United States Patent Application Publication US 2018/0305689 A1 - sequence listing, part 80

SEQ ID NO: 1163539 - RNA, 19 nt, Artificial Sequence
  Description of Artificial Sequence: Synthetic oligonucleotide
  Antisense strand to SEQ ID NO: 1163538
ugcucaagaaucuucagcu

SEQ ID NO: 1163540 - RNA, 19 nt, Artificial Sequence
  Description of Artificial Sequence: Synthetic oligonucleotide
  Sense strand starting at position 122 of SEQ ID NO: 916526
gaagauucuugagcaguga

SEQ ID NO: 1163541 - RNA, 19 nt, Artificial Sequence
  Description of Artificial Sequence: Synthetic oligonucleotide
  Antisense strand to SEQ ID NO: 1163540
ucacugcucaagaaucuuc

SEQ ID NO: 1163542 - RNA, 19 nt, Artificial Sequence
  Description of Artificial Sequence: Synthetic oligonucleotide
  Sense strand starting at position 217 of SEQ ID NO: 916526
gccacugauccugggaaua

SEQ ID NO: 1163543 - RNA, 19 nt, Artificial Sequence
  Description of Artificial Sequence: Synthetic oligonucleotide
  Antisense strand to SEQ ID NO: 1163542
uauucccaggaucaguggc

SEQ ID NO: 1163544 - RNA, 19 nt, Artificial Sequence
  Description of Artificial Sequence: Synthetic oligonucleotide
  Sense strand starting at position 539 of SEQ ID NO: 916526
cagaguugugacugaagga

SEQ ID NO: 1163545 - RNA, 19 nt, Artificial Sequence
  Description of Artificial Sequence: Synthetic oligonucleotide
  Antisense strand to SEQ ID NO: 1163544
uccuucagucacaacucug

SEQ ID NO: 1163546 - RNA, 19 nt, Artificial Sequence
  Description of Artificial Sequence: Synthetic oligonucleotide
  Sense strand starting at position 835 of SEQ ID NO: 916526
gaggcaggauuccuccaua

SEQ ID NO: 1163547 - RNA, 19 nt, Artificial Sequence
  Description of Artificial Sequence: Synthetic oligonucleotide
  Antisense strand to SEQ ID NO: 1163546
uauggaggaauccugccuc

SEQ ID NO: 1163548 - RNA, 19 nt, Artificial Sequence
  Description of Artificial Sequence: Synthetic oligonucleotide
  Sense strand starting at position 858 of SEQ ID NO: 916526
auuggaauuucccaaagaa

SEQ ID NO: 1163549 - RNA, 19 nt, Artificial Sequence
  Description of Artificial Sequence: Synthetic oligonucleotide
  Antisense strand to SEQ ID NO: 1163548
uucuuugggaaauuccaau

SEQ ID NO: 1163550 - RNA, 19 nt, Artificial Sequence
  Description of Artificial Sequence: Synthetic oligonucleotide
  Sense strand starting at position 1111 of SEQ ID NO: 916526
gcagguguucccuaaggag

SEQ ID NO: 1163551 - RNA, 19 nt, Artificial Sequence
  Description of Artificial Sequence: Synthetic oligonucleotide
  Antisense strand to SEQ ID NO: 1163550
cuccuuagggaacaccugc

SEQ ID NO: 1163552 - RNA, 19 nt, Artificial Sequence
  Description of Artificial Sequence: Synthetic oligonucleotide
  Sense strand starting at position 1146 of SEQ ID NO: 916526
cagucuuuccugugagacu

SEQ ID NO: 1163553 - RNA, 19 nt, Artificial Sequence
  Description of Artificial Sequence: Synthetic oligonucleotide
  Antisense strand to SEQ ID NO: 1163552
agucucacaggaaagacug

SEQ ID NO: 1163554 - RNA, 19 nt, Artificial Sequence
  Description of Artificial Sequence: Synthetic oligonucleotide
  Sense strand starting at position 1197 of SEQ ID NO: 916526
uuauuaguacaauggucaa

SEQ ID NO: 1163555 - RNA, 19 nt, Artificial Sequence
  Description of Artificial Sequence: Synthetic oligonucleotide
  Antisense strand to SEQ ID NO: 1163554
uugaccauuguacuaauaa

SEQ ID NO: 1163556 - RNA, 19 nt, Artificial Sequence
  Description of Artificial Sequence: Synthetic oligonucleotide
  Sense strand starting at position 1430 of SEQ ID NO: 916526
aauagcagucucuaggaau

SEQ ID NO: 1163557 - RNA, 19 nt, Artificial Sequence
  Description of Artificial Sequence: Synthetic oligonucleotide
  Antisense strand to SEQ ID NO: 1163556
auuccuagagacugcuauu

SEQ ID NO: 1163558 - RNA, 19 nt, Artificial Sequence
  Description of Artificial Sequence: Synthetic oligonucleotide
  Sense strand starting at position 1663 of SEQ ID NO: 916526
ugggaaugugacugguuga

SEQ ID NO: 1163559 - RNA, 19 nt, Artificial Sequence
  Description of Artificial Sequence: Synthetic oligonucleotide
  Antisense strand to SEQ ID NO: 1163558
ucaaccagucacauuccca

SEQ ID NO: 1163560 - RNA, 19 nt, Artificial Sequence
  Description of Artificial Sequence: Synthetic oligonucleotide
  Sense strand starting at position 1664 of SEQ ID NO: 916526
gggaaugugacugguugag

SEQ ID NO: 1163561 - RNA, 19 nt, Artificial Sequence
  Description of Artificial Sequence: Synthetic oligonucleotide
  Antisense strand to SEQ ID NO: 1163560
cucaaccagucacauuccc

SEQ ID NO: 1163562 - RNA, 19 nt, Artificial Sequence
  Description of Artificial Sequence: Synthetic oligonucleotide
  Sense strand starting at position 1823 of SEQ ID NO: 916526
aucucaauuugacaggaau

SEQ ID NO: 1163563 - RNA, 19 nt, Artificial Sequence
  Description of Artificial Sequence: Synthetic oligonucleotide
  Antisense strand to SEQ ID NO: 1163562
auuccugucaaauugagau

SEQ ID NO: 1163564 - RNA, 19 nt, Artificial Sequence
  Description of Artificial Sequence: Synthetic oligonucleotide
  Sense strand starting at position 1879 of SEQ ID NO: 916526
cuuaaugggagcuguccau

SEQ ID NO: 1163565 - RNA, 19 nt, Artificial Sequence
  Description of Artificial Sequence: Synthetic oligonucleotide
  Antisense strand to SEQ ID NO: 1163564
auggacagcucccauuaag

SEQ ID NO: 1163566 - RNA, 19 nt, Artificial Sequence
  Description of Artificial Sequence: Synthetic oligonucleotide
  Sense strand starting at position 2019 of SEQ ID NO: 916526
gauggcugaucagcacaaa

SEQ ID NO: 1163567 - RNA, 19 nt, Artificial Sequence
  Description of Artificial Sequence: Synthetic oligonucleotide
  Antisense strand to SEQ ID NO: 1163566
uuugugcugaucagccauc

SEQ ID NO: 1163568 - RNA, 19 nt, Artificial Sequence
  Description of Artificial Sequence: Synthetic oligonucleotide
  Sense strand starting at position 2031 of SEQ ID NO: 916526
gcacaaaguccagacuguu

SEQ ID NO: 1163569 - RNA, 19 nt, Artificial Sequence
  Description of Artificial Sequence: Synthetic oligonucleotide
  Antisense strand to SEQ ID NO: 1163568
aacagucuggacuuugugc

SEQ ID NO: 1163570 - RNA, 19 nt, Artificial Sequence
  Description of Artificial Sequence: Synthetic oligonucleotide
  Sense strand starting at position 2056 of SEQ ID NO: 916526
gaggguguggcucacuuaa

SEQ ID NO: 1163571 - RNA, 19 nt, Artificial Sequence
  Description of Artificial Sequence: Synthetic oligonucleotide
  Antisense strand to SEQ ID NO: 1163570
uuaagugagccacacccuc

SEQ ID NO: 1163572 - RNA, 19 nt, Artificial Sequence
  Description of Artificial Sequence: Synthetic oligonucleotide
  Sense strand starting at position 2113 of SEQ ID NO: 916526
gcucccucuagguaggaaa

SEQ ID NO: 1163573 - RNA, 19 nt, Artificial Sequence
  Description of Artificial Sequence: Synthetic oligonucleotide
  Antisense strand to SEQ ID NO: 1163572
uuuccuaccuagagggagc

SEQ ID NO: 1163574 - RNA, 19 nt, Artificial Sequence
  Description of Artificial Sequence: Synthetic oligonucleotide
  Sense strand starting at position 2145 of SEQ ID NO: 916526
gcguuagcugagaggcuua

SEQ ID NO: 1163575 - RNA, 19 nt, Artificial Sequence
  Description of Artificial Sequence: Synthetic oligonucleotide
  Antisense strand to SEQ ID NO: 1163574
uaagccucucagcuaacgc

SEQ ID NO: 1163576 - RNA, 19 nt, Artificial Sequence
  Description of Artificial Sequence: Synthetic oligonucleotide
  Sense strand starting at position 2150 of SEQ ID NO: 916526
agcugagaggcuuaacuaa

SEQ ID NO: 1163577 - RNA, 19 nt, Artificial Sequence
  Description of Artificial Sequence: Synthetic oligonucleotide
  Antisense strand to SEQ ID NO: 1163576
uuaguuaagccucucagcu

SEQ ID NO: 1163578 - RNA, 19 nt, Artificial Sequence
  Description of Artificial Sequence: Synthetic oligonucleotide
  Sense strand starting at position 2191 of SEQ ID NO: 916526
cucccaaauuuggaaauga

SEQ ID NO: 1163579 - RNA, 19 nt, Artificial Sequence
  Description of Artificial Sequence: Synthetic oligonucleotide
  Antisense strand to SEQ ID NO: 1163578
ucauuuccaaauuugggag

SEQ ID NO: 1163580 - RNA, 19 nt, Artificial Sequence
  Description of Artificial Sequence: Synthetic oligonucleotide
  Sense strand starting at position 2389 of SEQ ID NO: 916526
cgagacacgucuuuacaaa

SEQ ID NO: 1163581 - RNA, 19 nt, Artificial Sequence
  Description of Artificial Sequence: Synthetic oligonucleotide
  Antisense strand to SEQ ID NO: 1163580
uuuguaaagacgugucucg

SEQ ID NO: 1163582 - RNA, 19 nt, Artificial Sequence
  Description of Artificial Sequence: Synthetic oligonucleotide
  Sense strand starting at position 2406 of SEQ ID NO: 916526
aagagugucuuccuagcaa

SEQ ID NO: 1163583 - RNA, 19 nt, Artificial Sequence
  Description of Artificial Sequence: Synthetic oligonucleotide
  Antisense strand to SEQ ID NO: 1163582
uugcuaggaagacacucuu

SEQ ID NO: 1163584 - RNA, 19 nt, Artificial Sequence
  Description of Artificial Sequence: Synthetic oligonucleotide
  Sense strand starting at position 2591 of SEQ ID NO: 916526
guaauaauaccucacaugu

SEQ ID NO: 1163585 - RNA, 19 nt, Artificial Sequence
  Description of Artificial Sequence: Synthetic oligonucleotide
  Antisense strand to SEQ ID NO: 1163584
acaugugagguauuauuac

SEQ ID NO: 1163586 - RNA, 19 nt, Artificial Sequence
  Description of Artificial Sequence: Synthetic oligonucleotide
  Sense strand starting at position 2599 of SEQ ID NO: 916526
accucacauguguauagau

SEQ ID NO: 1163587 - RNA, 19 nt, Artificial Sequence
  Description of Artificial Sequence: Synthetic oligonucleotide
  Antisense strand to SEQ ID NO: 1163586
aucuauacacaugugaggu

SEQ ID NO: 1163588 - RNA, 19 nt, Artificial Sequence
  Description of Artificial Sequence: Synthetic oligonucleotide
  Sense strand starting at position 2641 of SEQ ID NO: 916526
cuugcauugccucacugaa

SEQ ID NO: 1163589 - RNA, 19 nt, Artificial Sequence
  Description of Artificial Sequence: Synthetic oligonucleotide
  Antisense strand to SEQ ID NO: 1163588
uucagugaggcaaugcaag

SEQ ID NO: 1163590 - RNA, 19 nt, Artificial Sequence
  Description of Artificial Sequence: Synthetic oligonucleotide
  Sense strand starting at position 2848 of SEQ ID NO: 916526
auucgucagcacuaggaua

SEQ ID NO: 1163591 - RNA, 19 nt, Artificial Sequence
  Description of Artificial Sequence: Synthetic oligonucleotide
  Antisense strand to SEQ ID NO: 1163590
uauccuagugcugacgaau

SEQ ID NO: 1163592 - RNA, 19 nt, Artificial Sequence
  Description of Artificial Sequence: Synthetic oligonucleotide
  Sense strand starting at position 2868 of SEQ ID NO: 916526
ugaguaagacccugagcua

SEQ ID NO: 1163593 - RNA, 19 nt, Artificial Sequence
  Description of Artificial Sequence: Synthetic oligonucleotide
  Antisense strand to SEQ ID NO: 1163592
uagcucagggucuuacuca

SEQ ID NO: 1163594 - RNA, 19 nt, Artificial Sequence
  Description of Artificial Sequence: Synthetic oligonucleotide
  Sense strand starting at position 2871 of SEQ ID NO: 916526
guaagacccugagcuaaug

SEQ ID NO: 1163595 - RNA, 19 nt, Artificial Sequence
  Description of Artificial Sequence: Synthetic oligonucleotide
  Antisense strand to SEQ ID NO: 1163594
cauuagcucagggucuuac

SEQ ID NO: 1163596 - RNA, 19 nt, Artificial Sequence
  Description of Artificial Sequence: Synthetic oligonucleotide
  Sense strand starting at position 3211 of SEQ ID NO: 916526
gagaaagcugaguggaagu

SEQ ID NO: 1163597 - RNA, 19 nt, Artificial Sequence
  Description of Artificial Sequence: Synthetic oligonucleotide
  Antisense strand to SEQ ID NO: 1163596
acuuccacucagcuuucuc

SEQ ID NO: 1163598 - RNA, 19 nt, Artificial Sequence
  Description of Artificial Sequence: Synthetic oligonucleotide
  Sense strand starting at position 3238 of SEQ ID NO: 916526
aacauaaugcuauguguag

SEQ ID NO: 1163599 - RNA, 19 nt, Artificial Sequence
  Description of Artificial Sequence: Synthetic oligonucleotide
  Antisense strand to SEQ ID NO: 1163598
cuacacauagcauuauguu

SEQ ID NO: 1163600 - RNA, 19 nt, Artificial Sequence
  Description of Artificial Sequence: Synthetic oligonucleotide
  Sense strand starting at position 3403 of SEQ ID NO: 916526
uguucucuaggccaggaau

SEQ ID NO: 1163601 - RNA, 19 nt, Artificial Sequence
  Description of Artificial Sequence: Synthetic oligonucleotide
  Antisense strand to SEQ ID NO: 1163600
auuccuggccuagagaaca

SEQ ID NO: 1163602 - RNA, 19 nt, Artificial Sequence
  Description of Artificial Sequence: Synthetic oligonucleotide
  Sense strand starting at position 3519 of SEQ ID NO: 916526
ggcacucucagguguaaga

SEQ ID NO: 1163603 - RNA, 19 nt, Artificial Sequence
  Description of Artificial Sequence: Synthetic oligonucleotide
  Antisense strand to SEQ ID NO: 1163602
ucuuacaccugagagugcc

SEQ ID NO: 1163604 - RNA, 19 nt, Artificial Sequence
  Description of Artificial Sequence: Synthetic oligonucleotide
  Sense strand starting at position 3530 of SEQ ID NO: 916526
guguaagaacaaugacaug

SEQ ID NO: 1163605 - RNA, 19 nt, Artificial Sequence
  Description of Artificial Sequence: Synthetic oligonucleotide
  Antisense strand to SEQ ID NO: 1163604
caugucauuguucuuacac

SEQ ID NO: 1163606 - RNA, 19 nt, Artificial Sequence
  Description of Artificial Sequence: Synthetic oligonucleotide
  Sense strand starting at position 3603 of SEQ ID NO: 916526
guucucuggacaugggaau

SEQ ID NO: 1163607 - RNA, 19 nt, Artificial Sequence
  Description of Artificial Sequence: Synthetic oligonucleotide
  Antisense strand to SEQ ID NO: 1163606
auucccauguccagagaac

SEQ ID NO: 1163608 - RNA, 19 nt, Artificial Sequence
  Description of Artificial Sequence: Synthetic oligonucleotide
  Sense strand starting at position 3700 of SEQ ID NO: 916526
auccaagucagcugggauu

SEQ ID NO: 1163609 - RNA, 19 nt, Artificial Sequence
  Description of Artificial Sequence: Synthetic oligonucleotide
  Antisense strand to SEQ ID NO: 1163608
aaucccagcugacuuggau

SEQ ID NO: 1163610 - RNA, 19 nt, Artificial Sequence
  Description of Artificial Sequence: Synthetic oligonucleotide
  Sense strand starting at position 3856 of SEQ ID NO: 916526
ggguuacagaaauggucua

SEQ ID NO: 1163611 - RNA, 19 nt, Artificial Sequence
  Description of Artificial Sequence: Synthetic oligonucleotide
  Antisense strand to SEQ ID NO: 1163610
uagaccauuucuguaaccc

SEQ ID NO: 1163612 - RNA, 19 nt, Artificial Sequence
  Description of Artificial Sequence: Synthetic oligonucleotide
  Sense strand starting at position 3857 of SEQ ID NO: 916526
gguuacagaaauggucuau

SEQ ID NO: 1163613 - RNA, 19 nt, Artificial Sequence
  Description of Artificial Sequence: Synthetic oligonucleotide
  Antisense strand to SEQ ID NO: 1163612
auagaccauuucuguaacc

SEQ ID NO: 1163614 - RNA, 19 nt, Artificial Sequence
  Description of Artificial Sequence: Synthetic oligonucleotide
  Sense strand starting at position 3869 of SEQ ID NO: 916526
ggucuauauccugauugug

SEQ ID NO: 1163615 - RNA, 19 nt, Artificial Sequence
  Description of Artificial Sequence: Synthetic oligonucleotide
  Antisense strand to SEQ ID NO: 1163614
cacaaucaggauauagacc

SEQ ID NO: 1163616 - RNA, 19 nt, Artificial Sequence
  Description of Artificial Sequence: Synthetic oligonucleotide
  Sense strand starting at position 3884 of SEQ ID NO: 916526
ugugguagugguuauacaa

SEQ ID NO: 1163617 - RNA, 19 nt, Artificial Sequence
  Description of Artificial Sequence: Synthetic oligonucleotide
  Antisense strand to SEQ ID NO: 1163616
uuguauaaccacuaccaca

SEQ ID NO: 1163618 - RNA, 19 nt, Artificial Sequence
  Description of Artificial Sequence: Synthetic oligonucleotide
  Sense strand starting at position 123 of SEQ ID NO: 916527
uggcacuuauauuccuaga

SEQ ID NO: 1163619 - RNA, 19 nt, Artificial Sequence
  Description of Artificial Sequence: Synthetic oligonucleotide
  Antisense strand to SEQ ID NO: 1163618
ucuaggaauauaagugcca

SEQ ID NO: 1163620 - RNA, 19 nt, Artificial Sequence
  Description of Artificial Sequence: Synthetic oligonucleotide
  Sense strand starting at position 612 of SEQ ID NO: 916527
guagaaauucaggguggaa

SEQ ID NO: 1163621 - RNA, 19 nt, Artificial Sequence
  Description of Artificial Sequence: Synthetic oligonucleotide
  Antisense strand to SEQ ID NO: 1163620
uuccacccugaauuucuac

SEQ ID NO: 1163622 - RNA, 19 nt, Artificial Sequence
  Description of Artificial Sequence: Synthetic oligonucleotide
  Sense strand starting at position 800 of SEQ ID NO: 916527
uaggauauguacucuaaga

SEQ ID NO: 1163623 - RNA, 19 nt, Artificial Sequence
  Description of Artificial Sequence: Synthetic oligonucleotide
  Antisense strand to SEQ ID NO: 1163622
ucuuagaguacauauccua

SEQ ID NO: 1163624 - RNA, 19 nt, Artificial Sequence
  Description of Artificial Sequence: Synthetic oligonucleotide
  Sense strand starting at position 1010 of SEQ ID NO: 916527
cuaugaaguuuacccuaga

SEQ ID NO: 1163625 - RNA, 19 nt, Artificial Sequence
  Description of Artificial Sequence: Synthetic oligonucleotide
  Antisense strand to SEQ ID NO: 1163624
ucuaggguaaacuucauag

SEQ ID NO: 1163626 - RNA, 19 nt, Artificial Sequence
  Description of Artificial Sequence: Synthetic oligonucleotide
  Sense strand starting at position 1066 of SEQ ID NO: 916527
ggugauaaaugggaauuua

SEQ ID NO: 1163627 - RNA, 19 nt, Artificial Sequence
  Description of Artificial Sequence: Synthetic oligonucleotide
  Antisense strand to SEQ ID NO: 1163626
uaaauucccauuuaucacc

SEQ ID NO: 1163628 - RNA, 19 nt, Artificial Sequence
  Description of Artificial Sequence: Synthetic oligonucleotide
  Sense strand starting at position 1130 of SEQ ID NO: 916527
cugagaagaguuugguaag

SEQ ID NO: 1163629 - RNA, 19 nt, Artificial Sequence
  Description of Artificial Sequence: Synthetic oligonucleotide
  Antisense strand to SEQ ID NO: 1163628
cuuaccaaacucuucucag

SEQ ID NO: 1163630 - RNA, 19 nt, Artificial Sequence
  Description of Artificial Sequence: Synthetic oligonucleotide
  Sense strand starting at position 1144 of SEQ ID NO: 916527
guaagugcugcauucucga

SEQ ID NO: 1163631 - RNA, 19 nt, Artificial Sequence
  Description of Artificial Sequence: Synthetic oligonucleotide
  Antisense strand to SEQ ID NO: 1163630
ucgagaaugcagcacuuac

SEQ ID NO: 1163632 - RNA, 19 nt, Artificial Sequence
  Description of Artificial Sequence: Synthetic oligonucleotide
  Sense strand starting at position 1336 of SEQ ID NO: 916527
ggccaaucagaauagucuu

SEQ ID NO: 1163633 - RNA, 19 nt, Artificial Sequence
  Description of Artificial Sequence: Synthetic oligonucleotide
  Antisense strand to SEQ ID NO: 1163632
aagacuauucugauuggcc

SEQ ID NO: 1163634 - RNA, 19 nt, Artificial Sequence
  Description of Artificial Sequence: Synthetic oligonucleotide
  Sense strand starting at position 1412 of SEQ ID NO: 916527
agagcugaucaaugucaac

SEQ ID NO: 1163635 - RNA, 19 nt, Artificial Sequence
  Description of Artificial Sequence: Synthetic oligonucleotide
  Antisense strand to SEQ ID NO: 1163634
guugacauugaucagcucu

SEQ ID NO: 1163636 - RNA, 19 nt, Artificial Sequence
  Description of Artificial Sequence: Synthetic oligonucleotide
  Sense strand starting at position 1583 of SEQ ID NO: 916527
uugagaaggaguugccaga

SEQ ID NO: 1163637 - RNA, 19 nt, Artificial Sequence
  Description of Artificial Sequence: Synthetic oligonucleotide
  Antisense strand to SEQ ID NO: 1163636
ucuggcaacuccuucucaa

SEQ ID NO: 1163638 - RNA, 19 nt, Artificial Sequence
  Description of Artificial Sequence: Synthetic oligonucleotide
  Sense strand starting at position 1596 of SEQ ID NO: 916527
gccagacauugucugaaac

SEQ ID NO: 1163639 - RNA, 19 nt, Artificial Sequence
  Description of Artificial Sequence: Synthetic oligonucleotide
  Antisense strand to SEQ ID NO: 1163638
guuucagacaaugucuggc

SEQ ID NO: 1163640 - RNA, 19 nt, Artificial Sequence
  Description of Artificial Sequence: Synthetic oligonucleotide
  Sense strand starting at position 1619 of SEQ ID NO: 916527
gaucuagucccgggaccua

SEQ ID NO: 1163641 - RNA, 19 nt, Artificial Sequence
  Description of Artificial Sequence: Synthetic oligonucleotide
  Antisense strand to SEQ ID NO: 1163640
uaggucccgggacuagauc

SEQ ID NO: 1163642 - RNA, 19 nt, Artificial Sequence
  Description of Artificial Sequence: Synthetic oligonucleotide
  Sense strand starting at position 1710 of SEQ ID NO: 916527
auaaacgucuuagcacaaa

SEQ ID NO: 1163643 - RNA, 19 nt, Artificial Sequence
  Description of Artificial Sequence: Synthetic oligonucleotide
  Antisense strand to SEQ ID NO: 1163642
uuugugcuaagacguuuau

SEQ ID NO: 1163644 - RNA, 19 nt, Artificial Sequence
  Description of Artificial Sequence: Synthetic oligonucleotide
  Sense strand starting at position 1856 of SEQ ID NO: 916527
ugagaagugggucacguua

SEQ ID NO: 1163645 - RNA, 19 nt, Artificial Sequence
  Description of Artificial Sequence: Synthetic oligonucleotide
  Antisense strand to SEQ ID NO: 1163644
uaacgugacccacuucuca

SEQ ID NO: 1163646 - RNA, 19 nt, Artificial Sequence
  Description of Artificial Sequence: Synthetic oligonucleotide
  Sense strand starting at position 2029 of SEQ ID NO: 916527
gucuucuuucuacgggaaa

SEQ ID NO: 1163647 - RNA, 19 nt, Artificial Sequence
  Description of Artificial Sequence: Synthetic oligonucleotide
  Antisense strand to SEQ ID NO: 1163646
uuucccguagaaagaagac

SEQ ID NO: 1163648 - RNA, 19 nt, Artificial Sequence
  Description of Artificial Sequence: Synthetic oligonucleotide
  Sense strand starting at position 2085 of SEQ ID NO: 916527
cuauuacacgucuaaugca

SEQ ID NO: 1163649 - RNA, 19 nt, Artificial Sequence
  Description of Artificial Sequence: Synthetic oligonucleotide
  Antisense strand to SEQ ID NO: 1163648
ugcauuagacguguaauag

SEQ ID NO: 1163650 - RNA, 19 nt, Artificial Sequence
  Description of Artificial Sequence: Synthetic oligonucleotide
  Sense strand starting at position 2090 of SEQ ID NO: 916527
acacgucuaaugcauggaa

SEQ ID NO: 1163651 - RNA, 19 nt, Artificial Sequence
  Description of Artificial Sequence: Synthetic oligonucleotide
  Antisense strand to SEQ ID NO: 1163650
uuccaugcauuagacgugu

SEQ ID NO: 1163652 - RNA, 19 nt, Artificial Sequence
  Description of Artificial Sequence: Synthetic oligonucleotide
  Sense strand starting at position 2092 of SEQ ID NO: 916527
acgucuaaugcauggaaau

SEQ ID NO: 1163653 - RNA, 19 nt, Artificial Sequence
  Description of Artificial Sequence: Synthetic oligonucleotide
  Antisense strand to SEQ ID NO: 1163652
auuuccaugcauuagacgu

SEQ ID NO: 1163654 - RNA, 19 nt, Artificial Sequence
  Description of Artificial Sequence: Synthetic oligonucleotide
  Sense strand starting at position 2093 of SEQ ID NO: 916527
cgucuaaugcauggaaaua

SEQ ID NO: 1163655 - RNA, 19 nt, Artificial Sequence
  Description of Artificial Sequence: Synthetic oligonucleotide
  Antisense strand to SEQ ID NO: 1163654
uauuuccaugcauuagacg

SEQ ID NO: 1163656 - RNA, 19 nt, Artificial Sequence
  Description of Artificial Sequence: Synthetic oligonucleotide
  Sense strand starting at position 2116 of SEQ ID NO: 916527
gaugcuaaacccugggaua

SEQ ID NO: 1163657 - RNA, 19 nt, Artificial Sequence
  Description of Artificial Sequence: Synthetic oligonucleotide
  Antisense strand to SEQ ID NO: 1163656
uaucccaggguuuagcauc

SEQ ID NO: 1163658 - RNA, 19 nt, Artificial Sequence
  Description of Artificial Sequence: Synthetic oligonucleotide
  Sense strand starting at position 2118 of SEQ ID NO: 916527
ugcuaaacccugggauagu

SEQ ID NO: 1163659 - RNA, 19 nt, Artificial Sequence
  Description of Artificial Sequence: Synthetic oligonucleotide
  Antisense strand to SEQ ID NO: 1163658
acuaucccaggguuuagca

SEQ ID NO: 1163660 - RNA, 19 nt, Artificial Sequence
  Description of Artificial Sequence: Synthetic oligonucleotide
  Sense strand starting at position 2132 of SEQ ID NO: 916527
auaguagagagccagcauu

SEQ ID NO: 1163661 - RNA, 19 nt, Artificial Sequence
  Description of Artificial Sequence: Synthetic oligonucleotide
  Antisense strand to SEQ ID NO: 1163660
aaugcuggcucucuacuau

SEQ ID NO: 1163662 - RNA, 19 nt, Artificial Sequence
  Description of Artificial Sequence: Synthetic oligonucleotide
  Sense strand starting at position 2170 of SEQ ID NO: 916527
uagaguuuacaauaugguu

SEQ ID NO: 1163663 - RNA, 19 nt, Artificial Sequence
  Description of Artificial Sequence: Synthetic oligonucleotide
  Antisense strand to SEQ ID NO: 1163662
aaccauauuguaaacucua

SEQ ID NO: 1163664 - RNA, 19 nt, Artificial Sequence
  Description of Artificial Sequence: Synthetic oligonucleotide
  Sense strand starting at position 2357 of SEQ ID NO: 916527
gaggcauaggaaugucaua

SEQ ID NO: 1163665 - RNA, 19 nt, Artificial Sequence
  Description of Artificial Sequence: Synthetic oligonucleotide
  Antisense strand to SEQ ID NO: 1163664
uaugacauuccuaugccuc

SEQ ID NO: 1163666 - RNA, 19 nt, Artificial Sequence
  Description of Artificial Sequence: Synthetic oligonucleotide
  Sense strand starting at position 2435 of SEQ ID NO: 916527
agacuugcuuuccugacaa

SEQ ID NO: 1163667 - RNA, 19 nt, Artificial Sequence
  Description of Artificial Sequence: Synthetic oligonucleotide
  Antisense strand to SEQ ID NO: 1163666
uugucaggaaagcaagucu

SEQ ID NO: 1163668 - RNA, 19 nt, Artificial Sequence
  Description of Artificial Sequence: Synthetic oligonucleotide
  Sense strand starting at position 2490 of SEQ ID NO: 916527
uuccuuuauguugauuagu

SEQ ID NO: 1163669 - RNA, 19 nt, Artificial Sequence
  Description of Artificial Sequence: Synthetic oligonucleotide
  Antisense strand to SEQ ID NO: 1163668
acuaaucaacauaaaggaa

SEQ ID NO: 1163670 - RNA, 19 nt, Artificial Sequence
  Description of Artificial Sequence: Synthetic oligonucleotide
  Sense strand starting at position 2493 of SEQ ID NO: 916527
cuuuauguugauuagucaa

SEQ ID NO: 1163671 - RNA, 19 nt, Artificial Sequence
  Description of Artificial Sequence: Synthetic oligonucleotide
  Antisense strand to SEQ ID NO: 1163670
uugacuaaucaacauaaag

SEQ ID NO: 1163672 - RNA, 19 nt, Artificial Sequence
  Description of Artificial Sequence: Synthetic oligonucleotide
  Sense strand starting at position 2560 of SEQ ID NO: 916527
guguuaauuguguaaacuc

SEQ ID NO: 1163673 - RNA, 19 nt, Artificial Sequence
  Description of Artificial Sequence: Synthetic oligonucleotide
  Antisense strand to SEQ ID NO: 1163672
gaguuuacacaauuaacac

SEQ ID NO: 1163674 - RNA, 19 nt, Artificial Sequence
  Description of Artificial Sequence: Synthetic oligonucleotide
  Sense strand starting at position 2571 of SEQ ID NO: 916527
guaaacucacuuuguaauu

SEQ ID NO: 1163675 - RNA, 19 nt, Artificial Sequence
  Description of Artificial Sequence: Synthetic oligonucleotide
  Antisense strand to SEQ ID NO: 1163674
aauuacaaagugaguuuac

SEQ ID NO: 1163676 - RNA, 19 nt, Artificial Sequence
  Description of Artificial Sequence: Synthetic oligonucleotide
  Sense strand starting at position 2603 of SEQ ID NO: 916527
ugaggaguuugggccagaa

SEQ ID NO: 1163677 - RNA, 19 nt, Artificial Sequence
  Description of Artificial Sequence: Synthetic oligonucleotide
  Antisense strand to SEQ ID NO: 1163676
uucuggcccaaacuccuca

SEQ ID NO: 1163678 - RNA, 19 nt, Artificial Sequence
  Description of Artificial Sequence: Synthetic oligonucleotide
  Sense strand starting at position 2623 of SEQ ID NO: 916527
gggaaauucuugcuacaga

SEQ ID NO: 1163679 - RNA, 19 nt, Artificial Sequence
  Description of Artificial Sequence: Synthetic oligonucleotide
  Antisense strand to SEQ ID NO: 1163678
ucuguagcaagaauuuccc

SEQ ID NO: 1163680 - RNA, 19 nt, Artificial Sequence
  Description of Artificial Sequence: Synthetic oligonucleotide
  Sense strand starting at position 2669 of SEQ ID NO: 916527
aguguuccucuccaaggau

SEQ ID NO: 1163681 - RNA, 19 nt, Artificial Sequence
  Description of Artificial Sequence: Synthetic oligonucleotide
  Antisense strand to SEQ ID NO: 1163680
auccuuggagaggaacacu

SEQ ID NO: 1163682 - RNA, 19 nt, Artificial Sequence
  Description of Artificial Sequence: Synthetic oligonucleotide
  Sense strand starting at position 2955 of SEQ ID NO: 916527
ucaggagggcugugacaaa

SEQ ID NO: 1163683 - RNA, 19 nt, Artificial Sequence
  Description of Artificial Sequence: Synthetic oligonucleotide
  Antisense strand to SEQ ID NO: 1163682
uuugucacagcccuccuga

SEQ ID NO: 1163684 - RNA, 19 nt, Artificial Sequence
  Description of Artificial Sequence: Synthetic oligonucleotide
  Sense strand starting at position 2999 of SEQ ID NO: 916527
cugugaggucacugagaga

SEQ ID NO: 1163685 - RNA, 19 nt, Artificial Sequence
  Description of Artificial Sequence: Synthetic oligonucleotide
  Antisense strand to SEQ ID NO: 1163684
ucucucagugaccucacag

SEQ ID NO: 1163686 - RNA, 19 nt, Artificial Sequence
  Description of Artificial Sequence: Synthetic oligonucleotide
  Sense strand starting at position 3237 of SEQ ID NO: 916527
gcagguaaugaagggugaa

SEQ ID NO: 1163687 - RNA, 19 nt, Artificial Sequence
  Description of Artificial Sequence: Synthetic oligonucleotide
  Antisense strand to SEQ ID NO: 1163686
uucacccuucauuaccugc

SEQ ID NO: 1163688 - RNA, 19 nt, Artificial Sequence
  Description of Artificial Sequence: Synthetic oligonucleotide
  Sense strand starting at position 3295 of SEQ ID NO: 916527
uggauaugcaaagguccua

SEQ ID NO: 1163689 - RNA, 19 nt, Artificial Sequence
  Description of Artificial Sequence: Synthetic oligonucleotide
  Antisense strand to SEQ ID NO: 1163688
uaggaccuuugcauaucca

SEQ ID NO: 1163690 - RNA, 19 nt, Artificial Sequence
  Description of Artificial Sequence: Synthetic oligonucleotide
  Sense strand starting at position 3350 of SEQ ID NO: 916527
cuagaauaagacuguguuu

SEQ ID NO: 1163691 - RNA, 19 nt, Artificial Sequence
  Description of Artificial Sequence: Synthetic oligonucleotide
  Antisense strand to SEQ ID NO: 1163690
aaacacagucuuauucuag

SEQ ID NO: 1163692 - RNA, 19 nt, Artificial Sequence
  Description of Artificial Sequence: Synthetic oligonucleotide
  Sense strand starting at position 3353 of SEQ ID NO: 916527
gaauaagacuguguuuaau

SEQ ID NO: 1163693 - RNA, 19 nt, Artificial Sequence
  Description of Artificial Sequence: Synthetic oligonucleotide
  Antisense strand to SEQ ID NO: 1163692
auuaaacacagucuuauuc

SEQ ID NO: 1163694 - RNA, 19 nt, Artificial Sequence
  Description of Artificial Sequence: Synthetic oligonucleotide
  Sense strand starting at position 3541 of SEQ ID NO: 916527
gcaggaggauugucuaaag

SEQ ID NO: 1163695 - RNA, 19 nt, Artificial Sequence
  Description of Artificial Sequence: Synthetic oligonucleotide
  Antisense strand to SEQ ID NO: 1163694
cuuuagacaauccuccugc

SEQ ID NO: 1163696 - RNA, 19 nt, Artificial Sequence
  Description of Artificial Sequence: Synthetic oligonucleotide
  Sense strand starting at position 3794 of SEQ ID NO: 916527
gggaccaucuuuguaacca

SEQ ID NO: 1163697 - RNA, 19 nt, Artificial Sequence
  Description of Artificial Sequence: Synthetic oligonucleotide
  Antisense strand to SEQ ID NO: 1163696
ugguuacaaagaugguccc

SEQ ID NO: 1163698 - RNA, 19 nt, Artificial Sequence
  Description of Artificial Sequence: Synthetic oligonucleotide
  Sense strand starting at position 206 of SEQ ID NO: 916528
ggcugaguaggucaagagu

SEQ ID NO: 1163699 - RNA, 19 nt, Artificial Sequence
  Description of Artificial Sequence: Synthetic oligonucleotide
  Antisense strand to SEQ ID NO: 1163698
acucuugaccuacucagcc

SEQ ID NO: 1163700 - RNA, 19 nt, Artificial Sequence
  Description of Artificial Sequence: Synthetic oligonucleotide
  Sense strand starting at position 209 of SEQ ID NO: 916528
ugaguaggucaagaguuca

SEQ ID NO: 1163701 - RNA, 19 nt, Artificial Sequence
  Description of Artificial Sequence: Synthetic oligonucleotide
  Antisense strand to SEQ ID NO: 1163700
ugaacucuugaccuacuca

SEQ ID NO: 1163702 - RNA, 19 nt, Artificial Sequence
  Description of Artificial Sequence: Synthetic oligonucleotide
  Sense strand starting at position 610 of SEQ ID NO: 916528
ccucuugagaaugggugaa

SEQ ID NO: 1163703 - RNA, 19 nt, Artificial Sequence
  Description of Artificial Sequence: Synthetic oligonucleotide
  Antisense strand to SEQ ID NO: 1163702
uucacccauucucaagagg

SEQ ID NO: 1163704 - RNA, 19 nt, Artificial Sequence
  Description of Artificial Sequence: Synthetic oligonucleotide
  Sense strand starting at position 622 of SEQ ID NO: 916528
gggugaagauuauauuaga

SEQ ID NO: 1163705 - RNA, 19 nt, Artificial Sequence
  Description of Artificial Sequence: Synthetic oligonucleotide
  Antisense strand to SEQ ID NO: 1163704
ucuaauauaaucuucaccc

SEQ ID NO: 1163706 - RNA, 19 nt, Artificial Sequence
  Description of Artificial Sequence: Synthetic oligonucleotide
  Sense strand starting at position 659 of SEQ ID NO: 916528
aaggccagugacugucaua

SEQ ID NO: 1163707 - RNA, 19 nt, Artificial Sequence
  Description of Artificial Sequence: Synthetic oligonucleotide
  Antisense strand to SEQ ID NO: 1163706
uaugacagucacuggccuu

SEQ ID NO: 1163708 - RNA, 19 nt, Artificial Sequence
  Description of Artificial Sequence: Synthetic oligonucleotide
  Sense strand starting at position 670 of SEQ ID NO: 916528
cugucauaaugagucaucu

SEQ ID NO: 1163709 - RNA, 19 nt, Artificial Sequence
  Description of Artificial Sequence: Synthetic oligonucleotide
  Antisense strand to SEQ ID NO: 1163708
agaugacucauuaugacag

SEQ ID NO: 1163710 - RNA, 19 nt, Artificial Sequence
  Description of Artificial Sequence: Synthetic oligonucleotide
  Sense strand starting at position 699 of SEQ ID NO: 916528
gcuauaggauuguugcuaa

SEQ ID NO: 1163711 - RNA, 19 nt, Artificial Sequence
  Description of Artificial Sequence: Synthetic oligonucleotide
  Antisense strand to SEQ ID NO: 1163710
uuagcaacaauccuauagc

SEQ ID NO: 1163712 - RNA, 19 nt, Artificial Sequence
  Description of Artificial Sequence: Synthetic oligonucleotide
  Sense strand starting at position 720 of SEQ ID NO: 916528
ucaaaugagaugugagagu

SEQ ID NO: 1163713 - RNA, 19 nt, Artificial Sequence
  Description of Artificial Sequence: Synthetic oligonucleotide
  Antisense strand to SEQ ID NO: 1163712
acucucacaucucauuuga

SEQ ID NO: 1163714 - RNA, 19 nt, Artificial Sequence
  Description of Artificial Sequence: Synthetic oligonucleotide
  Sense strand starting at position 776 of SEQ ID NO: 916528
gacuaacuguggccagaaa

SEQ ID NO: 1163715 - RNA, 19 nt, Artificial Sequence
  Description of Artificial Sequence: Synthetic oligonucleotide
  Antisense strand to SEQ ID NO: 1163714
uuucuggccacaguuaguc

SEQ ID NO: 1163716 - RNA, 19 nt, Artificial Sequence
  Description of Artificial Sequence: Synthetic oligonucleotide
  Sense strand starting at position 877 of SEQ ID NO: 916528
cuauaaauacgaugucuac

SEQ ID NO: 1163717 - RNA, 19 nt, Artificial Sequence
  Description of Artificial Sequence: Synthetic oligonucleotide
  Antisense strand to SEQ ID NO: 1163716
guagacaucguauuuauag

SEQ ID NO: 1163718 - RNA, 19 nt, Artificial Sequence
  Description of Artificial Sequence: Synthetic oligonucleotide
  Sense strand starting at position 1068 of SEQ ID NO: 916528
guaaauggaugagaugaca

SEQ ID NO: 1163719 - RNA, 19 nt, Artificial Sequence
  Description of Artificial Sequence: Synthetic oligonucleotide
  Antisense strand to SEQ ID NO: 1163718
ugucaucucauccauuuac

SEQ ID NO: 1163720 - RNA, 19 nt, Artificial Sequence
  Description of Artificial Sequence: Synthetic oligonucleotide
  Sense strand starting at position 1128 of SEQ ID NO: 916528
gagggaucugcuuagcaca

SEQ ID NO: 1163721 - RNA, 19 nt, Artificial Sequence
  Description of Artificial Sequence: Synthetic oligonucleotide
  Antisense strand to SEQ ID NO: 1163720
ugugcuaagcagaucccuc

SEQ ID NO: 1163722 - RNA, 19 nt, Artificial Sequence
  Description of Artificial Sequence: Synthetic oligonucleotide
  Sense strand starting at position 1456 of SEQ ID NO: 916528
gcccaauucccguaaauaa

SEQ ID NO: 1163723 - RNA, 19 nt, Artificial Sequence
  Description of Artificial Sequence: Synthetic oligonucleotide
  Antisense strand to SEQ ID NO: 1163722
uuauuuacgggaauugggc

SEQ ID NO: 1163724 - RNA, 19 nt, Artificial Sequence
  Description of Artificial Sequence: Synthetic oligonucleotide
  Sense strand starting at position 2013 of SEQ ID NO: 916528
cgucgaucucgcuugucua

SEQ ID NO: 1163725 - RNA, 19 nt, Artificial Sequence
  Description of Artificial Sequence: Synthetic oligonucleotide
  Antisense strand to SEQ ID NO: 1163724
uagacaagcgagaucgacg

SEQ ID NO: 1163726 - RNA, 19 nt, Artificial Sequence
  Description of Artificial Sequence: Synthetic oligonucleotide
  Sense strand starting at position 2159 of SEQ ID NO: 916528
gcagcuguugcuguuaaag

SEQ ID NO: 1163727 - RNA, 19 nt, Artificial Sequence
  Description of Artificial Sequence: Synthetic oligonucleotide
  Antisense strand to SEQ ID NO: 1163726
cuuuaacagcaacagcugc

SEQ ID NO: 1163728 - RNA, 19 nt, Artificial Sequence
  Description of Artificial Sequence: Synthetic oligonucleotide
  Sense strand starting at position 2169 of SEQ ID NO: 916528
cuguuaaagucuuccgagu

SEQ ID NO: 1163729 - RNA, 19 nt, Artificial Sequence
  Description of Artificial Sequence: Synthetic oligonucleotide
  Antisense strand to SEQ ID NO: 1163728
acucggaagacuuuaacag

SEQ ID NO: 1163730 - RNA, 19 nt, Artificial Sequence
  Description of Artificial Sequence: Synthetic oligonucleotide
  Sense strand starting at position 2285 of SEQ ID NO: 916528
gcuagacuuggcugugauu

SEQ ID NO: 1163731 - RNA, 19 nt, Artificial Sequence
  Description of Artificial Sequence: Synthetic oligonucleotide
  Antisense strand to SEQ ID NO: 1163730
aaucacagccaagucuagc

SEQ ID NO: 1163732 - RNA, 19 nt, Artificial Sequence
  Description of Artificial Sequence: Synthetic oligonucleotide
  Sense strand starting at position 2287 of SEQ ID NO: 916528
uagacuuggcugugauuaa

SEQ ID NO: 1163733 - RNA, 19 nt, Artificial Sequence
  Description of Artificial Sequence: Synthetic oligonucleotide
  Antisense strand to SEQ ID NO: 1163732
uuaaucacagccaagucua

SEQ ID NO: 1163734 - RNA, 19 nt, Artificial Sequence
  Description of Artificial Sequence: Synthetic oligonucleotide
  Sense strand starting at position 2294 of SEQ ID NO: 916528
ggcugugauuaaucgcaga

SEQ ID NO: 1163735 - RNA, 19 nt, Artificial Sequence
  Description of Artificial Sequence: Synthetic oligonucleotide
  Antisense strand to SEQ ID NO: 1163734
ucugcgauuaaucacagcc

SEQ ID NO: 1163736 - RNA, 19 nt, Artificial Sequence
  Description of Artificial Sequence: Synthetic oligonucleotide
  Sense strand starting at position 3297 of SEQ ID NO: 916528
ccugaagacuuuccuuuga

SEQ ID NO: 1163737 - RNA, 19 nt, Artificial Sequence
  Description of Artificial Sequence: Synthetic oligonucleotide
  Antisense strand to SEQ ID NO: 1163736
ucaaaggaaagucuucagg

SEQ ID NO: 1163738 - RNA, 19 nt, Artificial Sequence
  Description of Artificial Sequence: Synthetic oligonucleotide
  Sense strand starting at position 3299 of SEQ ID NO: 916528
ugaagacuuuccuuugaag

SEQ ID NO: 1163739 - RNA, 19 nt, Artificial Sequence
  Description of Artificial Sequence: Synthetic oligonucleotide
  Antisense strand to SEQ ID NO: 1163738
cuucaaaggaaagucuuca

SEQ ID NO: 1163740 - RNA, 19 nt, Artificial Sequence
  Description of Artificial Sequence: Synthetic oligonucleotide
  Sense strand starting at position 3382 of SEQ ID NO: 916528
cuacuaaaucacggagguu

SEQ ID NO: 1163741 - RNA, 19 nt, Artificial Sequence
  Description of Artificial Sequence: Synthetic oligonucleotide
  Antisense strand to SEQ ID NO: 1163740
aaccuccgugauuuaguag

SEQ ID NO: 1163742 - RNA, 19 nt, Artificial Sequence
  Description of Artificial Sequence: Synthetic oligonucleotide
  Sense strand starting at position 3698 of SEQ ID NO: 916528
gaugaauacuuacucggua

SEQ ID NO: 1163743 - RNA, 19 nt, Artificial Sequence
  Description of Artificial Sequence: Synthetic oligonucleotide
  Antisense strand to SEQ ID NO: 1163742
uaccgaguaaguauucauc

SEQ ID NO: 1163744 - RNA, 19 nt, Artificial Sequence
  Description of Artificial Sequence: Synthetic oligonucleotide
  Sense strand starting at position 3699 of SEQ ID NO: 916528
augaauacuuacucgguau

SEQ ID NO: 1163745 - RNA, 19 nt, Artificial Sequence
  Description of Artificial Sequence: Synthetic oligonucleotide
  Antisense strand to SEQ ID NO: 1163744
auaccgaguaaguauucau

SEQ ID NO: 1163746 - RNA, 19 nt, Artificial Sequence
  Description of Artificial Sequence: Synthetic oligonucleotide
  Sense strand starting at position 3701 of SEQ ID NO: 916528
gaauacuuacucgguaucu

SEQ ID NO: 1163747 - RNA, 19 nt, Artificial Sequence
  Description of Artificial Sequence: Synthetic oligonucleotide
  Antisense strand to SEQ ID NO: 1163746
agauaccgaguaaguauuc

SEQ ID NO: 1163748 - RNA, 19 nt, Artificial Sequence
  Description of Artificial Sequence: Synthetic oligonucleotide
  Sense strand starting at position 3710 of SEQ ID NO: 916528
cucgguaucugccuagagu

SEQ ID NO: 1163749 - RNA, 19 nt, Artificial Sequence
  Description of Artificial Sequence: Synthetic oligonucleotide
  Antisense strand to SEQ ID NO: 1163748
acucuaggcagauaccgag

SEQ ID NO: 1163750 - RNA, 19 nt, Artificial Sequence
  Description of Artificial Sequence: Synthetic oligonucleotide
  Sense strand starting at position 3711 of SEQ ID NO: 916528
ucgguaucugccuagagua

SEQ ID NO: 1163751 - RNA, 19 nt, Artificial Sequence
  Description of Artificial Sequence: Synthetic oligonucleotide
  Antisense strand to SEQ ID NO: 1163750
uacucuaggcagauaccga

SEQ ID NO: 1163752 - RNA, 19 nt, Artificial Sequence
  Description of Artificial Sequence: Synthetic oligonucleotide
  Sense strand starting at position 3713 of SEQ ID NO: 916528
gguaucugccuagaguauu

SEQ ID NO: 1163753 - RNA, 19 nt, Artificial Sequence
  Description of Artificial Sequence: Synthetic oligonucleotide
  Antisense strand to SEQ ID NO: 1163752
aauacucuaggcagauacc

SEQ ID NO: 1163754 - RNA, 19 nt, Artificial Sequence
  Description of Artificial Sequence: Synthetic oligonucleotide
  Sense strand starting at position 3771 of SEQ ID NO: 916528
ucauaacugucaucguauu

SEQ ID NO: 1163755 - RNA, 19 nt, Artificial Sequence
  Description of Artificial Sequence: Synthetic oligonucleotide
  Antisense strand to SEQ ID NO: 1163754
aauacgaugacaguuauga

SEQ ID NO: 1163756 - RNA, 19 nt, Artificial Sequence
  Description of Artificial Sequence: Synthetic oligonucleotide
  Sense strand starting at position 3783 of SEQ ID NO: 916528
ucguauuucccugggaggu

SEQ ID NO: 1163757 - RNA, 19 nt, Artificial Sequence
  Description of Artificial Sequence: Synthetic oligonucleotide
  Antisense strand to SEQ ID NO: 1163756
accucccagggaaauacga

SEQ ID NO: 1163758 - RNA, 19 nt, Artificial Sequence
  Description of Artificial Sequence: Synthetic oligonucleotide
  Sense strand starting at position 3784 of SEQ ID NO: 916528
cguauuucccugggaggua

SEQ ID NO: 1163759 - RNA, 19 nt, Artificial Sequence
  Description of Artificial Sequence: Synthetic oligonucleotide
  Antisense strand to SEQ ID NO: 1163758
uaccucccagggaaauacg

SEQ ID NO: 1163760 - RNA, 19 nt, Artificial Sequence
  Description of Artificial Sequence: Synthetic oligonucleotide
  Sense strand starting at position 3796 of SEQ ID NO: 916528
ggagguagaucuuauuauu

SEQ ID NO: 1163761 - RNA, 19 nt, Artificial Sequence
  Description of Artificial Sequence: Synthetic oligonucleotide
  Antisense strand to SEQ ID NO: 1163760
aauaauaagaucuaccucc

SEQ ID NO: 1163762 - RNA, 19 nt, Artificial Sequence
  Description of Artificial Sequence: Synthetic oligonucleotide
  Sense strand starting at position 3840 of SEQ ID NO: 916528
uucguacaacacugaguua

SEQ ID NO: 1163763 - RNA, 19 nt, Artificial Sequence
  Description of Artificial Sequence: Synthetic oligonucleotide
  Antisense strand to SEQ ID NO: 1163762
uaacucaguguuguacgaa

SEQ ID NO: 1163764 - RNA, 19 nt, Artificial Sequence
  Description of Artificial Sequence: Synthetic oligonucleotide
  Sense strand starting at position 3843 of SEQ ID NO: 916528
guacaacacugaguuauug

SEQ ID NO: 1163765 - RNA, 19 nt, Artificial Sequence
  Description of Artificial Sequence: Synthetic oligonucleotide
  Antisense strand to SEQ ID NO: 1163764
caauaacucaguguuguac

SEQ ID NO: 1163766 - RNA, 19 nt, Artificial Sequence
  Description of Artificial Sequence: Synthetic oligonucleotide
  Sense strand starting at position 3851 of SEQ ID NO: 916528
cugaguuauugagugccua

SEQ ID NO: 1163767 - RNA, 19 nt, Artificial Sequence
  Description of Artificial Sequence: Synthetic oligonucleotide
  Antisense strand to SEQ ID NO: 1163766
uaggcacucaauaacucag

SEQ ID NO: 1163768 - RNA, 19 nt, Artificial Sequence
  Description of Artificial Sequence: Synthetic oligonucleotide
  Sense strand starting at position 3852 of SEQ ID NO: 916528
ugaguuauugagugccuau

SEQ ID NO: 1163769 - RNA, 19 nt, Artificial Sequence
  Description of Artificial Sequence: Synthetic oligonucleotide
  Antisense strand to SEQ ID NO: 1163768
auaggcacucaauaacuca

SEQ ID NO: 1163770 - RNA, 19 nt, Artificial Sequence
  Description of Artificial Sequence: Synthetic oligonucleotide
  Sense strand starting at position 3855 of SEQ ID NO: 916528
guuauugagugccuauuau

SEQ ID NO: 1163771 - RNA, 19 nt, Artificial Sequence
  Description of Artificial Sequence: Synthetic oligonucleotide
  Antisense strand to SEQ ID NO: 1163770
auaauaggcacucaauaac

SEQ ID NO: 1163772 - RNA, 19 nt, Artificial Sequence
  Description of Artificial Sequence: Synthetic oligonucleotide
  Sense strand starting at position 3859 of SEQ ID NO: 916528
uugagugccuauuauuuga

SEQ ID NO: 1163773 - RNA, 19 nt, Artificial Sequence
  Description of Artificial Sequence: Synthetic oligonucleotide
  Antisense strand to SEQ ID NO: 1163772
ucaaauaauaggcacucaa

SEQ ID NO: 1163774 - RNA, 19 nt, Artificial Sequence
  Description of Artificial Sequence: Synthetic oligonucleotide
  Sense strand starting at position 3973 of SEQ ID NO: 916528
auaaguagauagccuauua

SEQ ID NO: 1163775 - RNA, 19 nt, Artificial Sequence
  Description of Artificial Sequence: Synthetic oligonucleotide
  Antisense strand to SEQ ID NO: 1163774
uaauaggcuaucuacuuau

SEQ ID NO: 1163776 - RNA, 19 nt, Artificial Sequence
  Description of Artificial Sequence: Synthetic oligonucleotide
  Sense strand starting at position 3983 of SEQ ID NO: 916528
agccuauuacauggugaua

SEQ ID NO: 1163777 - RNA, 19 nt, Artificial Sequence
  Description of Artificial Sequence: Synthetic oligonucleotide
  Antisense strand to SEQ ID NO: 1163776
uaucaccauguaauaggcu

SEQ ID NO: 1163778 - RNA, 19 nt, Artificial Sequence
  Description of Artificial Sequence: Synthetic oligonucleotide
  Sense strand starting at position 13 of SEQ ID NO: 916529
guaggagucgaagcgucuu

SEQ ID NO: 1163779 - RNA, 19 nt, Artificial Sequence
  Description of Artificial Sequence: Synthetic oligonucleotide
  Antisense strand to SEQ ID NO: 1163778
aagacgcuucgacuccuac

SEQ ID NO: 1163780 - RNA, 19 nt, Artificial Sequence
  Description of Artificial Sequence: Synthetic oligonucleotide
  Sense strand starting at position 1124 of SEQ ID NO: 916529
cgcugaugcuccuuuaacu

SEQ ID NO: 1163781 - RNA, 19 nt, Artificial Sequence
  Description of Artificial Sequence: Synthetic oligonucleotide
  Antisense strand to SEQ ID NO: 1163780
aguuaaaggagcaucagcg

SEQ ID NO: 1163782 - RNA, 19 nt, Artificial Sequence
  Description of Artificial Sequence: Synthetic oligonucleotide
  Sense strand starting at position 1319 of SEQ ID NO: 916529
aauggagauuuggguacua

SEQ ID NO: 1163783 - RNA, 19 nt, Artificial Sequence
  Description of Artificial Sequence: Synthetic oligonucleotide
  Antisense strand to SEQ ID NO: 1163782
uaguacccaaaucuccauu

SEQ ID NO: 1163784 - RNA, 19 nt, Artificial Sequence
  Description of Artificial Sequence: Synthetic oligonucleotide
  Sense strand starting at position 2357 of SEQ ID NO: 916529
uggugcuggacgugugaau

SEQ ID NO: 1163785 - RNA, 19 nt, Artificial Sequence
  Description of Artificial Sequence: Synthetic oligonucleotide
  Antisense strand to SEQ ID NO: 1163784
auucacacguccagcacca

SEQ ID NO: 1163786 - RNA, 19 nt, Artificial Sequence
  Description of Artificial Sequence: Synthetic oligonucleotide
  Sense strand starting at position 2366 of SEQ ID NO: 916529
acgugugaauguuagcagu

SEQ ID NO: 1163787 - RNA, 19 nt, Artificial Sequence
  Description of Artificial Sequence: Synthetic oligonucleotide
  Antisense strand to SEQ ID NO: 1163786
acugcuaacauucacacgu

SEQ ID NO: 1163788 - RNA, 19 nt, Artificial Sequence
  Description of Artificial Sequence: Synthetic oligonucleotide
  Sense strand starting at position 2368 of SEQ ID NO: 916529
gugugaauguuagcaguga

SEQ ID NO: 1163789 - RNA, 19 nt, Artificial Sequence
  Description of Artificial Sequence: Synthetic oligonucleotide
  Antisense strand to SEQ ID NO: 1163788
ucacugcuaacauucacac

SEQ ID NO: 1163790 - RNA, 19 nt, Artificial Sequence
  Description of Artificial Sequence: Synthetic oligonucleotide
  Sense strand starting at position 2445 of SEQ ID NO: 916529
cccguauagugugcacuua

SEQ ID NO: 1163791 - RNA, 19 nt, Artificial Sequence
  Description of Artificial Sequence: Synthetic oligonucleotide
  Antisense strand to SEQ ID NO: 1163790
uaagugcacacuauacggg

SEQ ID NO: 1163792 - RNA, 19 nt, Artificial Sequence
  Description of Artificial Sequence: Synthetic oligonucleotide
  Sense strand starting at position 2446 of SEQ ID NO: 916529
ccguauagugugcacuuaa

SEQ ID NO: 1163793 - RNA, 19 nt, Artificial Sequence
  Description of Artificial Sequence: Synthetic oligonucleotide
  Antisense strand to SEQ ID NO: 1163792
uuaagugcacacuauacgg

SEQ ID NO: 1163794 - RNA, 19 nt, Artificial Sequence
  Description of Artificial Sequence: Synthetic oligonucleotide
  Sense strand starting at position 2573 of SEQ ID NO: 916529
ccaugcuagccuggaaagu

SEQ ID NO: 1163795 - RNA, 19 nt, Artificial Sequence
  Description of Artificial Sequence: Synthetic oligonucleotide
  Antisense strand to SEQ ID NO: 1163794
acuuuccaggcuagcaugg

SEQ ID NO: 1163796 - RNA, 19 nt, Artificial Sequence
  Description of Artificial Sequence: Synthetic oligonucleotide
  Sense strand starting at position 2574 of SEQ ID NO: 916529
caugcuagccuggaaaguu

SEQ ID NO: 1163797 - RNA, 19 nt, Artificial Sequence
  Description of Artificial Sequence: Synthetic oligonucleotide
  Antisense strand to SEQ ID NO: 1163796
aacuuuccaggcuagcaug

SEQ ID NO: 1163798 - RNA, 19 nt, Artificial Sequence
  Description of Artificial Sequence: Synthetic oligonucleotide
  Sense strand starting at position 2647 of SEQ ID NO: 916529
ugauuagacgcgucggcuu

SEQ ID NO: 1163799 - RNA, 19 nt, Artificial Sequence
  Description of Artificial Sequence: Synthetic oligonucleotide
  Antisense strand to SEQ ID NO: 1163798
aagccgacgcgucuaauca

SEQ ID NO: 1163800 - RNA, 19 nt, Artificial Sequence
  Description of Artificial Sequence: Synthetic oligonucleotide
  Sense strand starting at position 2686 of SEQ ID NO: 916529
cagggauuccuccacuugu

SEQ ID NO: 1163801 - RNA, 19 nt, Artificial Sequence
  Description of Artificial Sequence: Synthetic oligonucleotide
  Antisense strand to SEQ ID NO: 1163800
acaaguggaggaaucccug

SEQ ID NO: 1163802 - RNA, 19 nt, Artificial Sequence
  Description of Artificial Sequence: Synthetic oligonucleotide
  Sense strand starting at position 2704 of SEQ ID NO: 916529
uccucuguuugcugaggau

SEQ ID NO: 1163803 - RNA, 19 nt, Artificial Sequence
  Description of Artificial Sequence: Synthetic oligonucleotide
  Antisense strand to SEQ ID NO: 1163802
auccucagcaaacagagga

SEQ ID NO: 1163804 - RNA, 19 nt, Artificial Sequence
  Description of Artificial Sequence: Synthetic oligonucleotide
  Sense strand starting at position 2742 of SEQ ID NO: 916529
uugugugacaaagacgaua

SEQ ID NO: 1163805 - RNA, 19 nt, Artificial Sequence
  Description of Artificial Sequence: Synthetic oligonucleotide
  Antisense strand to SEQ ID NO: 1163804
uaucgucuuugucacacaa

SEQ ID NO: 1163806 - RNA, 19 nt, Artificial Sequence
  Description of Artificial Sequence: Synthetic oligonucleotide
  Sense strand starting at position 2791 of SEQ ID NO: 916529
gcccgagagucuaguggaa

SEQ ID NO: 1163807 - RNA, 19 nt, Artificial Sequence
  Description of Artificial Sequence: Synthetic oligonucleotide
  Antisense strand to SEQ ID NO: 1163806
uuccacuagacucucgggc

SEQ ID NO: 1163808 - RNA, 19 nt, Artificial Sequence
  Description of Artificial Sequence: Synthetic oligonucleotide
  Sense strand starting at position 2793 of SEQ ID NO: 916529
ccgagagucuaguggaaga

SEQ ID NO: 1163809 - RNA, 19 nt, Artificial Sequence
  Description of Artificial Sequence: Synthetic oligonucleotide
  Antisense strand to SEQ ID NO: 1163808
ucuuccacuagacucucgg

SEQ ID NO: 1163810 - RNA, 19 nt, Artificial Sequence
  Description of Artificial Sequence: Synthetic oligonucleotide
  Sense strand starting at position 2800 of SEQ ID NO: 916529
ucuaguggaagaugaguaa

SEQ ID NO: 1163811 - RNA, 19 nt, Artificial Sequence
  Description of Artificial Sequence: Synthetic oligonucleotide
  Antisense strand to SEQ ID NO: 1163810
uuacucaucuuccacuaga

SEQ ID NO: 1163812 - RNA, 19 nt, Artificial Sequence
  Description of Artificial Sequence: Synthetic oligonucleotide
  Sense strand starting at position 3252 of SEQ ID NO: 916529
gcguuguuggugggaggau

SEQ ID NO: 1163813 - RNA, 19 nt, Artificial Sequence
  Description of Artificial Sequence: Synthetic oligonucleotide
  Antisense strand to SEQ ID NO: 1163812
auccucccaccaacaacgc

SEQ ID NO: 1163814 - RNA, 19 nt, Artificial Sequence
  Description of Artificial Sequence: Synthetic oligonucleotide
  Sense strand starting at position 3253 of SEQ ID NO: 916529
cguuguuggugggaggauu

SEQ ID NO: 1163815 - RNA, 19 nt, Artificial Sequence
  Description of Artificial Sequence: Synthetic oligonucleotide
  Antisense strand to SEQ ID NO: 1163814
aauccucccaccaacaacg

SEQ ID NO: 1163816 - RNA, 19 nt, Artificial Sequence
  Description of Artificial Sequence: Synthetic oligonucleotide
  Sense strand starting at position 3713 of SEQ ID NO: 916529
gguccugauccgggaaaga

SEQ ID NO: 1163817 - RNA, 19 nt, Artificial Sequence
  Description of Artificial Sequence: Synthetic oligonucleotide
  Antisense strand to SEQ ID NO: 1163816
ucuuucccggaucaggacc

SEQ ID NO: 1163818 - RNA, 19 nt, Artificial Sequence
  Description of Artificial Sequence: Synthetic oligonucleotide
  Sense strand starting at position 3811 of SEQ ID NO: 916529
aagagaaauuccgcagaag

SEQ ID NO: 1163819 - RNA, 19 nt, Artificial Sequence
  Description of Artificial Sequence: Synthetic oligonucleotide
  Antisense strand to SEQ ID NO: 1163818
cuucugcggaauuucucuu

SEQ ID NO: 1163820 - RNA, 19 nt, Artificial Sequence
  Description of Artificial Sequence: Synthetic oligonucleotide
  Sense strand starting at position 3869 of SEQ ID NO: 916529
ggugcgaacccguguguga

SEQ ID NO: 1163821 - RNA, 19 nt, Artificial Sequence
  Description of Artificial Sequence: Synthetic oligonucleotide
  Antisense strand to SEQ ID NO: 1163820
ucacacacggguucgcacc

SEQ ID NO: 1163822 - RNA, 19 nt, Artificial Sequence
  Description of Artificial Sequence: Synthetic oligonucleotide
  Sense strand starting at position 3876 of SEQ ID NO: 916529
acccgugugugagagugaa

SEQ ID NO: 1163823 - RNA, 19 nt, Artificial Sequence
  Description of Artificial Sequence: Synthetic oligonucleotide
  Antisense strand to SEQ ID NO: 1163822
uucacucucacacacgggu

SEQ ID NO: 1163824 - RNA, 19 nt, Artificial Sequence
  Description of Artificial Sequence: Synthetic oligonucleotide
  Sense strand starting at position 3880 of SEQ ID NO: 916529
gugugugagagugaaacua

SEQ ID NO: 1163825 - RNA, 19 nt, Artificial Sequence
  Description of Artificial Sequence: Synthetic oligonucleotide
  Antisense strand to SEQ ID NO: 1163824
uaguuucacucucacacac

SEQ ID NO: 1163826 - RNA, 19 nt, Artificial Sequence
  Description of Artificial Sequence: Synthetic oligonucleotide
  Sense strand starting at position 3890 of SEQ ID NO: 916529
gugaaacuaccggguguuu

SEQ ID NO: 1163827 - RNA, 19 nt, Artificial Sequence
  Description of Artificial Sequence: Synthetic oligonucleotide
  Antisense strand to SEQ ID NO: 1163826
aaacacccgguaguuucac

SEQ ID NO: 1163828 - RNA, 19 nt, Artificial Sequence
  Description of Artificial Sequence: Synthetic oligonucleotide
  Sense strand starting at position 3892 of SEQ ID NO: 916529
gaaacuaccggguguuugu

SEQ ID NO: 1163829 - RNA, 19 nt, Artificial Sequence
  Description of Artificial Sequence: Synthetic oligonucleotide
  Antisense strand to SEQ ID NO: 1163828
acaaacacccgguaguuuc

SEQ ID NO: 1163830 - RNA, 19 nt, Artificial Sequence
  Description of Artificial Sequence: Synthetic oligonucleotide
  Sense strand starting at position 3917 of SEQ ID NO: 916529
gugcccuuguuucucaaga

SEQ ID NO: 1163831 - RNA, 19 nt, Artificial Sequence
  Description of Artificial Sequence: Synthetic oligonucleotide
  Antisense strand to SEQ ID NO: 1163830
ucuugagaaacaagggcac

SEQ ID NO: 1163832 - RNA, 19 nt, Artificial Sequence
  Description of Artificial Sequence: Synthetic oligonucleotide
  Sense strand starting at position 3918 of SEQ ID NO: 916529
ugcccuuguuucucaagau

SEQ ID NO: 1163833 - RNA, 19 nt, Artificial Sequence
  Description of Artificial Sequence: Synthetic oligonucleotide
  Antisense strand to SEQ ID NO: 1163832
aucuugagaaacaagggca

SEQ ID NO: 1163834 - RNA, 19 nt, Artificial Sequence
  Description of Artificial Sequence: Synthetic oligonucleotide
  Sense strand starting at position 3919 of SEQ ID NO: 916529
gcccuuguuucucaagauu

SEQ ID NO: 1163835 - RNA, 19 nt, Artificial Sequence
  Description of Artificial Sequence: Synthetic oligonucleotide
  Antisense strand to SEQ ID NO: 1163834
aaucuugagaaacaagggc

SEQ ID NO: 1163836 - RNA, 19 nt, Artificial Sequence
  Description of Artificial Sequence: Synthetic oligonucleotide
  Sense strand starting at position 3922 of SEQ ID NO: 916529
cuuguuucucaagauuguc

SEQ ID NO: 1163837 - RNA, 19 nt, Artificial Sequence
  Description of Artificial Sequence: Synthetic oligonucleotide
  Antisense strand to SEQ ID NO: 1163836
gacaaucuugagaaacaag

SEQ ID NO: 1163838 - RNA, 19 nt, Artificial Sequence
  Description of Artificial Sequence: Synthetic oligonucleotide
  Sense strand starting at position 3930 of SEQ ID NO: 916529
ucaagauugucgugagauu

SEQ ID NO: 1163839 - RNA, 19 nt, Artificial Sequence
  Description of Artificial Sequence: Synthetic oligonucleotide
  Antisense strand to SEQ ID NO: 1163838
aaucucacgacaaucuuga

SEQ ID NO: 1163840 - RNA, 19 nt, Artificial Sequence
  Description of Artificial Sequence: Synthetic oligonucleotide
  Sense strand starting at position 3931 of SEQ ID NO: 916529
caagauugucgugagauuc

SEQ ID NO: 1163841 - RNA, 19 nt, Artificial Sequence
  Description of Artificial Sequence: Synthetic oligonucleotide
  Antisense strand to SEQ ID NO: 1163840
gaaucucacgacaaucuug

SEQ ID NO: 1163842 - RNA, 19 nt, Artificial Sequence
  Description of Artificial Sequence: Synthetic oligonucleotide
  Sense strand starting at position 3937 of SEQ ID NO: 916529
ugucgugagauucggauga

SEQ ID NO: 1163843 - RNA, 19 nt, Artificial Sequence
  Description of Artificial Sequence: Synthetic oligonucleotide
  Antisense strand to SEQ ID NO: 1163842
ucauccgaaucucacgaca

SEQ ID NO: 1163844 - RNA, 19 nt, Artificial Sequence
  Description of Artificial Sequence: Synthetic oligonucleotide
  Sense strand starting at position 3939 of SEQ ID NO: 916529
ucgugagauucggaugaga

SEQ ID NO: 1163845 - RNA, 19 nt, Artificial Sequence
  Description of Artificial Sequence: Synthetic oligonucleotide
  Antisense strand to SEQ ID NO: 1163844
ucucauccgaaucucacga

SEQ ID NO: 1163846 - RNA, 19 nt, Artificial Sequence
  Description of Artificial Sequence: Synthetic oligonucleotide
  Sense strand starting at position 3941 of SEQ ID NO: 916529
gugagauucggaugagaga

SEQ ID NO: 1163847 - RNA, 19 nt, Artificial Sequence
  Description of Artificial Sequence: Synthetic oligonucleotide
  Antisense strand to SEQ ID NO: 1163846
ucucucauccgaaucucac

SEQ ID NO: 1163848 - RNA, 19 nt, Artificial Sequence
  Description of Artificial Sequence: Synthetic oligonucleotide
  Sense strand starting at position 3973 of SEQ ID NO: 916529
cucucuaaauuguagaaug

SEQ ID NO: 1163849 - RNA, 19 nt, Artificial Sequence
  Description of Artificial Sequence: Synthetic oligonucleotide
  Antisense strand to SEQ ID NO: 1163848
cauucuacaauuuagagag

SEQ ID NO: 1163850 - RNA, 19 nt, Artificial Sequence
  Description of Artificial Sequence: Synthetic oligonucleotide
  Sense strand starting at position 3981 of SEQ ID NO: 916529
auuguagaaugcuaagcau

SEQ ID NO: 1163851 - RNA, 19 nt, Artificial Sequence
  Description of Artificial Sequence: Synthetic oligonucleotide
  Antisense strand to SEQ ID NO: 1163850
augcuuagcauucuacaau

SEQ ID NO: 1163852 - RNA, 19 nt, Artificial Sequence
  Description of Artificial Sequence: Synthetic oligonucleotide
  Sense strand starting at position 504 of SEQ ID NO: 916530
gacagagacuguuucucaa

SEQ ID NO: 1163853 - RNA, 19 nt, Artificial Sequence
  Description of Artificial Sequence: Synthetic oligonucleotide
  Antisense strand to SEQ ID NO: 1163852
uugagaaacagucucuguc

SEQ ID NO: 1163854 - RNA, 19 nt, Artificial Sequence
  Description of Artificial Sequence: Synthetic oligonucleotide
  Sense strand starting at position 746 of SEQ ID NO: 916530
aguacucagaaguguuaua

SEQ ID NO: 1163855 - RNA, 19 nt, Artificial Sequence
  Description of Artificial Sequence: Synthetic oligonucleotide
  Antisense strand to SEQ ID NO: 1163854
uauaacacuucugaguacu

SEQ ID NO: 1163856 - RNA, 19 nt, Artificial Sequence
  Description of Artificial Sequence: Synthetic oligonucleotide
  Sense strand starting at position 755 of SEQ ID NO: 916530
aaguguuauagggacuguu

SEQ ID NO: 1163857 - RNA, 19 nt, Artificial Sequence
  Description of Artificial Sequence: Synthetic oligonucleotide
  Antisense strand to SEQ ID NO: 1163856
aacagucccuauaacacuu

SEQ ID NO: 1163858 - RNA, 19 nt, Artificial Sequence
  Description of Artificial Sequence: Synthetic oligonucleotide
  Sense strand starting at position 758 of SEQ ID NO: 916530
uguuauagggacuguuaac

SEQ ID NO: 1163859 - RNA, 19 nt, Artificial Sequence
  Description of Artificial Sequence: Synthetic oligonucleotide
  Antisense strand to SEQ ID NO: 1163858
guuaacagucccuauaaca

SEQ ID NO: 1163860 - RNA, 19 nt, Artificial Sequence
  Description of Artificial Sequence: Synthetic oligonucleotide
  Sense strand starting at position 807 of SEQ ID NO: 916530
gccagaagucaccagcuga

SEQ ID NO: 1163861 - RNA, 19 nt, Artificial Sequence
  Description of Artificial Sequence: Synthetic oligonucleotide
  Antisense strand to SEQ ID NO: 1163860
ucagcuggugacuucuggc

SEQ ID NO: 1163862 - RNA, 19 nt, Artificial Sequence
  Description of Artificial Sequence: Synthetic oligonucleotide
  Sense strand starting at position 980 of SEQ ID NO: 916530
cagauaaaucgagguggga

SEQ ID NO: 1163863 - RNA, 19 nt, Artificial Sequence
  Description of Artificial Sequence: Synthetic oligonucleotide
  Antisense strand to SEQ ID NO: 1163862
ucccaccucgauuuaucug

SEQ ID NO: 1163864 - RNA, 19 nt, Artificial Sequence
  Description of Artificial Sequence: Synthetic oligonucleotide
  Sense strand starting at position 1007 of SEQ ID NO: 916530
aaauaaauggagugguauc

SEQ ID NO: 1163865 - RNA, 19 nt, Artificial Sequence
  Description of Artificial Sequence: Synthetic oligonucleotide
  Antisense strand to SEQ ID NO: 1163864
gauaccacuccauuuauuu

SEQ ID NO: 1163866 - RNA, 19 nt, Artificial Sequence
  Description of Artificial Sequence: Synthetic oligonucleotide
  Sense strand starting at position 1043 of SEQ ID NO: 916530
guggauauugguggaauga

SEQ ID NO: 1163867 - RNA, 19 nt, Artificial Sequence
  Description of Artificial Sequence: Synthetic oligonucleotide
  Antisense strand to SEQ ID NO: 1163866
ucauuccaccaauauccac

SEQ ID NO: 1163868 - RNA, 19 nt, Artificial Sequence
  Description of Artificial Sequence: Synthetic oligonucleotide
  Sense strand starting at position 1102 of SEQ ID NO: 916530
ggcauaaaggguugggauu

SEQ ID NO: 1163869 - RNA, 19 nt, Artificial Sequence
  Description of Artificial Sequence: Synthetic oligonucleotide
  Antisense strand to SEQ ID NO: 1163868
aaucccaacccuuuaugcc

SEQ ID NO: 1163870 - RNA, 19 nt, Artificial Sequence
  Description of Artificial Sequence: Synthetic oligonucleotide
  Sense strand starting at position 1108 of SEQ ID NO: 916530
aaggguugggauuguggaa

SEQ ID NO: 1163871 - RNA, 19 nt, Artificial Sequence
  Description of Artificial Sequence: Synthetic oligonucleotide
  Antisense strand to SEQ ID NO: 1163870
uuccacaaucccaacccuu

SEQ ID NO: 1163872 - RNA, 19 nt, Artificial Sequence
  Description of Artificial Sequence: Synthetic oligonucleotide
  Sense strand starting at position 1264 of SEQ ID NO: 916530
gucccagggucgaagagau

SEQ ID NO: 1163873 - RNA, 19 nt, Artificial Sequence
  Description of Artificial Sequence: Synthetic oligonucleotide
  Antisense strand to SEQ ID NO: 1163872
aucucuucgacccugggac

SEQ ID NO: 1163874 - RNA, 19 nt, Artificial Sequence
  Description of Artificial Sequence: Synthetic oligonucleotide
  Sense strand starting at position 1271 of SEQ ID NO: 916530
ggucgaagagauugggagu

SEQ ID NO: 1163875 - RNA, 19 nt, Artificial Sequence
  Description of Artificial Sequence: Synthetic oligonucleotide
  Antisense strand to SEQ ID NO: 1163874
acucccaaucucuucgacc

SEQ ID NO: 1163876 - RNA, 19 nt, Artificial Sequence
  Description of Artificial Sequence: Synthetic oligonucleotide
  Sense strand starting at position 1808 of SEQ ID NO: 916530
aguagaaucuuacuggcca

SEQ ID NO: 1163877 - RNA, 19 nt, Artificial Sequence
  Description of Artificial Sequence: Synthetic oligonucleotide
  Antisense strand to SEQ ID NO: 1163876
uggccaguaagauucuacu

SEQ ID NO: 1163878 - RNA, 19 nt, Artificial Sequence
  Description of Artificial Sequence: Synthetic oligonucleotide
  Sense strand starting at position 2000 of SEQ ID NO: 916530
cggacauucccggaaguuu

SEQ ID NO: 1163879 - RNA, 19 nt, Artificial Sequence
  Description of Artificial Sequence: Synthetic oligonucleotide
  Antisense strand to SEQ ID NO: 1163878
aaacuuccgggaauguccg

SEQ ID NO: 1163880 - RNA, 19 nt, Artificial Sequence
  Description of Artificial Sequence: Synthetic oligonucleotide
  Sense strand starting at position 2154 of SEQ ID NO: 916530
uggagauaguuggcucugu

SEQ ID NO: 1163881 - RNA, 19 nt, Artificial Sequence
  Description of Artificial Sequence: Synthetic oligonucleotide
  Antisense strand to SEQ ID NO: 1163880
acagagccaacuaucucca

SEQ ID NO: 1163882 - RNA, 19 nt, Artificial Sequence
  Description of Artificial Sequence: Synthetic oligonucleotide
  Sense strand starting at position 2155 of SEQ ID NO: 916530
ggagauaguuggcucugua

SEQ ID NO: 1163883 - RNA, 19 nt, Artificial Sequence
  Description of Artificial Sequence: Synthetic oligonucleotide
  Antisense strand to SEQ ID NO: 1163882
uacagagccaacuaucucc

SEQ ID NO: 1163884 - RNA, 19 nt, Artificial Sequence
  Description of Artificial Sequence: Synthetic oligonucleotide
  Sense strand starting at position 2221 of SEQ ID NO: 916530
uuaacuuggcuagggagaa

SEQ ID NO: 1163885 - RNA, 19 nt, Artificial Sequence
  Description of Artificial Sequence: Synthetic oligonucleotide
  Antisense strand to SEQ ID NO: 1163884
uucucccuagccaaguuaa

SEQ ID NO: 1163886 - RNA, 19 nt, Artificial Sequence
  Description of Artificial Sequence: Synthetic oligonucleotide
  Sense strand starting at position 2234 of SEQ ID NO: 916530
ggagaaugcacuuagguuc

SEQ ID NO: 1163887 - RNA, 19 nt, Artificial Sequence
  Description of Artificial Sequence: Synthetic oligonucleotide
  Antisense strand to SEQ ID NO: 1163886
gaaccuaagugcauucucc

SEQ ID NO: 1163888 - RNA, 19 nt, Artificial Sequence
  Description of Artificial Sequence: Synthetic oligonucleotide
  Sense strand starting at position 2237 of SEQ ID NO: 916530
gaaugcacuuagguucuaa

SEQ ID NO: 1163889 - RNA, 19 nt, Artificial Sequence
  Description of Artificial Sequence: Synthetic oligonucleotide
  Antisense strand to SEQ ID NO: 1163888
uuagaaccuaagugcauuc

SEQ ID NO: 1163890 - RNA, 19 nt, Artificial Sequence
  Description of Artificial Sequence: Synthetic oligonucleotide
  Sense strand starting at position 2252 of SEQ ID NO: 916530
cuaagacguuucuuuccaa

SEQ ID NO: 1163891 - RNA, 19 nt, Artificial Sequence
  Description of Artificial Sequence: Synthetic oligonucleotide
  Antisense strand to SEQ ID NO: 1163890
uuggaaagaaacgucuuag

SEQ ID NO: 1163892 - RNA, 19 nt, Artificial Sequence
  Description of Artificial Sequence: Synthetic oligonucleotide
  Sense strand starting at position 2255 of SEQ ID NO: 916530
agacguuucuuuccaaaga

SEQ ID NO: 1163893 - RNA, 19 nt, Artificial Sequence
  Description of Artificial Sequence: Synthetic oligonucleotide
  Antisense strand to SEQ ID NO: 1163892
ucuuuggaaagaaacgucu

SEQ ID NO: 1163894 - RNA, 19 nt, Artificial Sequence
  Description of Artificial Sequence: Synthetic oligonucleotide
  Sense strand starting at position 2303 of SEQ ID NO: 916530
ucggaaucuggcggacaaa

SEQ ID NO: 1163895 - RNA, 19 nt, Artificial Sequence
  Description of Artificial Sequence: Synthetic oligonucleotide
  Antisense strand to SEQ ID NO: 1163894
uuuguccgccagauuccga

SEQ ID NO: 1163896 - RNA, 19 nt, Artificial Sequence
  Description of Artificial Sequence: Synthetic oligonucleotide
  Sense strand starting at position 2324 of SEQ ID NO: 916530
uuugaauccuggcucaaug

SEQ ID NO: 1163897 - RNA, 19 nt, Artificial Sequence
  Description of Artificial Sequence: Synthetic oligonucleotide
  Antisense strand to SEQ ID NO: 1163896
cauugagccaggauucaaa

SEQ ID NO: 1163898 - RNA, 19 nt, Artificial Sequence
  Description of Artificial Sequence: Synthetic oligonucleotide
  Sense strand starting at position 2621 of SEQ ID NO: 916530
ugcucuaaccguuaucuuu

SEQ ID NO: 1163899 - RNA, 19 nt, Artificial Sequence
  Description of Artificial Sequence: Synthetic oligonucleotide
  Antisense strand to SEQ ID NO: 1163898
aaagauaacgguuagagca

SEQ ID NO: 1163900 - RNA, 19 nt, Artificial Sequence
  Description of Artificial Sequence: Synthetic oligonucleotide
  Sense strand starting at position 2653 of SEQ ID NO: 916530
gguucucaucuuuaaugca

SEQ ID NO: 1163901 - RNA, 19 nt, Artificial Sequence
  Description of Artificial Sequence: Synthetic oligonucleotide
  Antisense strand to SEQ ID NO: 1163900
ugcauuaaagaugagaacc

SEQ ID NO: 1163902 - RNA, 19 nt, Artificial Sequence
  Description of Artificial Sequence: Synthetic oligonucleotide
  Sense strand starting at position 2682 of SEQ ID NO: 916530
uggucaaggucucugggaa

SEQ ID NO: 1163903 - RNA, 19 nt, Artificial Sequence
  Description of Artificial Sequence: Synthetic oligonucleotide
  Antisense strand to SEQ ID NO: 1163902
uucccagagaccuugacca

SEQ ID NO: 1163904 - RNA, 19 nt, Artificial Sequence
  Description of Artificial Sequence: Synthetic oligonucleotide
  Sense strand starting at position 2683 of SEQ ID NO: 916530
ggucaaggucucugggaaa

SEQ ID NO: 1163905 - RNA, 19 nt, Artificial Sequence
  Description of Artificial Sequence: Synthetic oligonucleotide
  Antisense strand to SEQ ID NO: 1163904
uuucccagagaccuugacc

SEQ ID NO: 1163906 - RNA, 19 nt, Artificial Sequence
  Description of Artificial Sequence: Synthetic oligonucleotide
  Sense strand starting at position 3470 of SEQ ID NO: 916530
ccugucaaauuguccacaa

SEQ ID NO: 1163907 - RNA, 19 nt, Artificial Sequence
  Description of Artificial Sequence: Synthetic oligonucleotide
  Antisense strand to SEQ ID NO: 1163906
uuguggacaauuugacagg

SEQ ID NO: 1163908 - RNA, 19 nt, Artificial Sequence
  Description of Artificial Sequence: Synthetic oligonucleotide
  Sense strand starting at position 3471 of SEQ ID NO: 916530
cugucaaauuguccacaaa

SEQ ID NO: 1163909 - RNA, 19 nt, Artificial Sequence
  Description of Artificial Sequence: Synthetic oligonucleotide
  Antisense strand to SEQ ID NO: 1163908
uuuguggacaauuugacag

SEQ ID NO: 1163910 - RNA, 19 nt, Artificial Sequence
  Description of Artificial Sequence: Synthetic oligonucleotide
  Sense strand starting at position 3502 of SEQ ID NO: 916530
cuguauuguuguguauaaa

SEQ ID NO: 1163911 - RNA, 19 nt, Artificial Sequence
  Description of Artificial Sequence: Synthetic oligonucleotide
  Antisense strand to SEQ ID NO: 1163910
uuuauacacaacaauacag

SEQ ID NO: 1163912 - RNA, 19 nt, Artificial Sequence
  Description of Artificial Sequence: Synthetic oligonucleotide
  Sense strand starting at position 3503 of SEQ ID NO: 916530
uguauuguuguguauaaac

SEQ ID NO: 1163913 - RNA, 19 nt, Artificial Sequence
  Description of Artificial Sequence: Synthetic oligonucleotide
  Antisense strand to SEQ ID NO: 1163912
guuuauacacaacaauaca

SEQ ID NO: 1163914 - RNA, 19 nt, Artificial Sequence
  Description of Artificial Sequence: Synthetic oligonucleotide
  Sense strand starting at position 3527 of SEQ ID NO: 916530
acauaaagauaugugugua

SEQ ID NO: 1163915 - RNA, 19 nt, Artificial Sequence
  Description of Artificial Sequence: Synthetic oligonucleotide
  Antisense strand to SEQ ID NO: 1163914
uacacacauaucuuuaugu

SEQ ID NO: 1163916 - RNA, 19 nt, Artificial Sequence
  Description of Artificial Sequence: Synthetic oligonucleotide
  Sense strand starting at position 3553 of SEQ ID NO: 916530
auuaaugugcauuagcauu

SEQ ID NO: 1163917 - RNA, 19 nt, Artificial Sequence
  Description of Artificial Sequence: Synthetic oligonucleotide
  Antisense strand to SEQ ID NO: 1163916
aaugcuaaugcacauuaau

SEQ ID NO: 1163918 - RNA, 19 nt, Artificial Sequence
  Description of Artificial Sequence: Synthetic oligonucleotide
  Sense strand starting at position 3564 of SEQ ID NO: 916530
uuagcauuugcuuagccaa

SEQ ID NO: 1163919 - RNA, 19 nt, Artificial Sequence
  Description of Artificial Sequence: Synthetic oligonucleotide
  Antisense strand to SEQ ID NO: 1163918
uuggcuaagcaaaugcuaa

SEQ ID NO: 1163920 - RNA, 19 nt, Artificial Sequence
  Description of Artificial Sequence: Synthetic oligonucleotide
  Sense strand starting at position 3610 of SEQ ID NO: 916530
auaccagauuagucuagga

SEQ ID NO: 1163921 - RNA, 19 nt, Artificial Sequence
  Description of Artificial Sequence: Synthetic oligonucleotide
  Antisense strand to SEQ ID NO: 1163920
uccuagacuaaucugguau

SEQ ID NO: 1163922 - RNA, 19 nt, Artificial Sequence
  Description of Artificial Sequence: Synthetic oligonucleotide
  Sense strand starting at position 3614 of SEQ ID NO: 916530
cagauuagucuaggaaguc

SEQ ID NO: 1163923 - RNA, 19 nt, Artificial Sequence
  Description of Artificial Sequence: Synthetic oligonucleotide
  Antisense strand to SEQ ID NO: 1163922
gacuuccuagacuaaucug

SEQ ID NO: 1163924 - RNA, 19 nt, Artificial Sequence
  Description of Artificial Sequence: Synthetic oligonucleotide
  Sense strand starting at position 3624 of SEQ ID NO: 916530
uaggaagucaugugauugu

SEQ ID NO: 1163925 - RNA, 19 nt, Artificial Sequence
  Description of Artificial Sequence: Synthetic oligonucleotide
  Antisense strand to SEQ ID NO: 1163924
acaaucacaugacuuccua

SEQ ID NO: 1163926 - RNA, 19 nt, Artificial Sequence
  Description of Artificial Sequence: Synthetic oligonucleotide
  Sense strand starting at position 3627 of SEQ ID NO: 916530
gaagucaugugauuguaau

SEQ ID NO: 1163927 - RNA, 19 nt, Artificial Sequence
  Description of Artificial Sequence: Synthetic oligonucleotide
  Antisense strand to SEQ ID NO: 1163926
auuacaaucacaugacuuc

SEQ ID NO: 1163928 - RNA, 19 nt, Artificial Sequence
  Description of Artificial Sequence: Synthetic oligonucleotide
  Sense strand starting at position 3628 of SEQ ID NO: 916530
aagucaugugauuguaaug

SEQ ID NO: 1163929 - RNA, 19 nt, Artificial Sequence
  Description of Artificial Sequence: Synthetic oligonucleotide
  Antisense strand to SEQ ID NO: 1163928
cauuacaaucacaugacuu

SEQ ID NO: 1163930 - RNA, 19 nt, Artificial Sequence
  Description of Artificial Sequence: Synthetic oligonucleotide
  Sense strand starting at position 3753 of SEQ ID NO: 916530
gguguuguaagcuaaggaa

SEQ ID NO: 1163931 - RNA, 19 nt, Artificial Sequence
  Description of Artificial Sequence: Synthetic oligonucleotide
  Antisense strand to SEQ ID NO: 1163930
uuccuuagcuuacaacacc

SEQ ID NO: 1163932 - RNA, 19 nt, Artificial Sequence
  Description of Artificial Sequence: Synthetic oligonucleotide
  Sense strand starting at position 296 of SEQ ID NO: 916531
cguuaauuucgacgcugag

SEQ ID NO: 1163933 - RNA, 19 nt, Artificial Sequence
  Description of Artificial Sequence: Synthetic oligonucleotide
  Antisense strand to SEQ ID NO: 1163932
cucagcgucgaaauuaacg

SEQ ID NO: 1163934 - RNA, 19 nt, Artificial Sequence
  Description of Artificial Sequence: Synthetic oligonucleotide
  Sense strand starting at position 668 of SEQ ID NO: 916531
aggcgacaggcauaacaua

SEQ ID NO: 1163935 - RNA, 19 nt, Artificial Sequence
  Description of Artificial Sequence: Synthetic oligonucleotide
  Antisense strand to SEQ ID NO: 1163934
uauguuaugccugucgccu

SEQ ID NO: 1163936 - RNA, 19 nt, Artificial Sequence
  Description of Artificial Sequence: Synthetic oligonucleotide
  Sense strand starting at position 756 of SEQ ID NO: 916531
gaaguaucuccaggauagu

SEQ ID NO: 1163937 - RNA, 19 nt, Artificial Sequence
  Description of Artificial Sequence: Synthetic oligonucleotide
  Antisense strand to SEQ ID NO: 1163936
acuauccuggagauacuuc

SEQ ID NO: 1163938 - RNA, 19 nt, Artificial Sequence
  Description of Artificial Sequence: Synthetic oligonucleotide
  Sense strand starting at position 759 of SEQ ID NO: 916531
guaucuccaggauaguaau

SEQ ID NO: 1163939 - RNA, 19 nt, Artificial Sequence
  Description of Artificial Sequence: Synthetic oligonucleotide
  Antisense strand to SEQ ID NO: 1163938
auuacuauccuggagauac

SEQ ID NO: 1163940 - RNA, 19 nt, Artificial Sequence
  Description of Artificial Sequence: Synthetic oligonucleotide
  Sense strand starting at position 783 of SEQ ID NO: 916531
ggucuauccuccuugguaa

SEQ ID NO: 1163941 - RNA, 19 nt, Artificial Sequence
  Description of Artificial Sequence: Synthetic oligonucleotide
  Antisense strand to SEQ ID NO: 1163940
uuaccaaggaggauagacc

SEQ ID NO: 1163942 - RNA, 19 nt, Artificial Sequence
  Description of Artificial Sequence: Synthetic oligonucleotide
  Sense strand starting at position 784 of SEQ ID NO: 916531
gucuauccuccuugguaaa

SEQ ID NO: 1163943 - RNA, 19 nt, Artificial Sequence
  Description of Artificial Sequence: Synthetic oligonucleotide
  Antisense strand to SEQ ID NO: 1163942
uuuaccaaggaggauagac

SEQ ID NO: 1163944 - RNA, 19 nt, Artificial Sequence
  Description of Artificial Sequence: Synthetic oligonucleotide
  Sense strand starting at position 972 of SEQ ID NO: 916531
ccgggcauuucugaaggaa

SEQ ID NO: 1163945 - RNA, 19 nt, Artificial Sequence
  Description of Artificial Sequence: Synthetic oligonucleotide
  Antisense strand to SEQ ID NO: 1163944
uuccuucagaaaugcccgg

SEQ ID NO: 1163946 - RNA, 19 nt, Artificial Sequence
  Description of Artificial Sequence: Synthetic oligonucleotide
  Sense strand starting at position 1005 of SEQ ID NO: 916531
ggccuaaauugauugggau

SEQ ID NO: 1163947 - RNA, 19 nt, Artificial Sequence
  Description of Artificial Sequence: Synthetic oligonucleotide
  Antisense strand to SEQ ID NO: 1163946
aucccaaucaauuuaggcc

SEQ ID NO: 1163948 - RNA, 19 nt, Artificial Sequence
  Description of Artificial Sequence: Synthetic oligonucleotide
  Sense strand starting at position 1006 of SEQ ID NO: 916531
gccuaaauugauugggaua

SEQ ID NO: 1163949 - RNA, 19 nt, Artificial Sequence
  Description of Artificial Sequence: Synthetic oligonucleotide
  Antisense strand to SEQ ID NO: 1163948
uaucccaaucaauuuaggc

SEQ ID NO: 1163950 - RNA, 19 nt, Artificial Sequence
  Description of Artificial Sequence: Synthetic oligonucleotide
  Sense strand starting at position 1008 of SEQ ID NO: 916531
cuaaauugauugggauaca

SEQ ID NO: 1163951 - RNA, 19 nt, Artificial Sequence
  Description of Artificial Sequence: Synthetic oligonucleotide
  Antisense strand to SEQ ID NO: 1163950
uguaucccaaucaauuuag

SEQ ID NO: 1163952 - RNA, 19 nt, Artificial Sequence
  Description of Artificial Sequence: Synthetic oligonucleotide
  Sense strand starting at position 1040 of SEQ ID NO: 916531
cccggagauaaguauucuu

SEQ ID NO: 1163953 - RNA, 19 nt, Artificial Sequence
  Description of Artificial Sequence: Synthetic oligonucleotide
  Antisense strand to SEQ ID NO: 1163952
aagaauacuuaucuccggg

SEQ ID NO: 1163954 - RNA, 19 nt, Artificial Sequence
  Description of Artificial Sequence: Synthetic oligonucleotide
  Sense strand starting at position 1136 of SEQ ID NO: 916531
agagguaaauaugauguga

SEQ ID NO: 1163955 - RNA, 19 nt, Artificial Sequence
  Description of Artificial Sequence: Synthetic oligonucleotide
  Antisense strand to SEQ ID NO: 1163954
ucacaucauauuuaccucu

SEQ ID NO: 1163956 - RNA, 19 nt, Artificial Sequence
  Description of Artificial Sequence: Synthetic oligonucleotide
  Sense strand starting at position 1367 of SEQ ID NO: 916531
uugcuugucacagggagaa

SEQ ID NO: 1163957 - RNA, 19 nt, Artificial Sequence
  Description of Artificial Sequence: Synthetic oligonucleotide
  Antisense strand to SEQ ID NO: 1163956
uucucccugugacaagcaa

SEQ ID NO: 1163958 - RNA, 19 nt, Artificial Sequence
  Description of Artificial Sequence: Synthetic oligonucleotide
  Sense strand starting at position 1377 of SEQ ID NO: 916531
cagggagaacgguguuaca

SEQ ID NO: 1163959 - RNA, 19 nt, Artificial Sequence
  Description of Artificial Sequence: Synthetic oligonucleotide
  Antisense strand to SEQ ID NO: 1163958
uguaacaccguucucccug

SEQ ID NO: 1163960 - RNA, 19 nt, Artificial Sequence
  Description of Artificial Sequence: Synthetic oligonucleotide
  Sense strand starting at position 1384 of SEQ ID NO: 916531
aacgguguuacagguucua

SEQ ID NO: 1163961 - RNA, 19 nt, Artificial Sequence
  Description of Artificial Sequence: Synthetic oligonucleotide
  Antisense strand to SEQ ID NO: 1163960
uagaaccuguaacaccguu

SEQ ID NO: 1163962 - RNA, 19 nt, Artificial Sequence
  Description of Artificial Sequence: Synthetic oligonucleotide
  Sense strand starting at position 1655 of SEQ ID NO: 916531
ggcggcuuagcccgaaaga

SEQ ID NO: 1163963 - RNA, 19 nt, Artificial Sequence
  Description of Artificial Sequence: Synthetic oligonucleotide
  Antisense strand to SEQ ID NO: 1163962
ucuuucgggcuaagccgcc

SEQ ID NO: 1163964 - RNA, 19 nt, Artificial Sequence
  Description of Artificial Sequence: Synthetic oligonucleotide
  Sense strand starting at position 1656 of SEQ ID NO: 916531
gcggcuuagcccgaaagaa

SEQ ID NO: 1163965 - RNA, 19 nt, Artificial Sequence
  Description of Artificial Sequence: Synthetic oligonucleotide
  Antisense strand to SEQ ID NO: 1163964
uucuuucgggcuaagccgc

SEQ ID NO: 1163966 - RNA, 19 nt, Artificial Sequence
  Description of Artificial Sequence: Synthetic oligonucleotide
  Sense strand starting at position 1778 of SEQ ID NO: 916531
acgccuguugcagaaggaa

SEQ ID NO: 1163967 - RNA, 19 nt, Artificial Sequence
  Description of Artificial Sequence: Synthetic oligonucleotide
  Antisense strand to SEQ ID NO: 1163966
uuccuucugcaacaggcgu

SEQ ID NO: 1163968 - RNA, 19 nt, Artificial Sequence
  Description of Artificial Sequence: Synthetic oligonucleotide
  Sense strand starting at position 1911 of SEQ ID NO: 916531
acuaaaggguaagaauuua

SEQ ID NO: 1163969 - RNA, 19 nt, Artificial Sequence
  Description of Artificial Sequence: Synthetic oligonucleotide
  Antisense strand to SEQ ID NO: 1163968
uaaauucuuacccuuuagu

SEQ ID NO: 1163970 - RNA, 19 nt, Artificial Sequence
  Description of Artificial Sequence: Synthetic oligonucleotide
  Sense strand starting at position 2018 of SEQ ID NO: 916531
guggcgacugcgguauuaa

SEQ ID NO: 1163971 - RNA, 19 nt, Artificial Sequence
  Description of Artificial Sequence: Synthetic oligonucleotide
  Antisense strand to SEQ ID NO: 1163970
uuaauaccgcagucgccac

SEQ ID NO: 1163972 - RNA, 19 nt, Artificial Sequence
  Description of Artificial Sequence: Synthetic oligonucleotide
  Sense strand starting at position 2019 of SEQ ID NO: 916531
uggcgacugcgguauuaag

SEQ ID NO: 1163973 - RNA, 19 nt, Artificial Sequence
  Description of Artificial Sequence: Synthetic oligonucleotide
  Antisense strand to SEQ ID NO: 1163972
cuuaauaccgcagucgcca

SEQ ID NO: 1163974 - RNA, 19 nt, Artificial Sequence
  Description of Artificial Sequence: Synthetic oligonucleotide
  Sense strand starting at position 2042 of SEQ ID NO: 916531
ccucgcgauuucucaaaua

SEQ ID NO: 1163975 - RNA, 19 nt, Artificial Sequence
  Description of Artificial Sequence: Synthetic oligonucleotide
  Antisense strand to SEQ ID NO: 1163974
uauuugagaaaucgcgagg

SEQ ID NO: 1163976 - RNA, 19 nt, Artificial Sequence
  Description of Artificial Sequence: Synthetic oligonucleotide
  Sense strand starting at position 2054 of SEQ ID NO: 916531
ucaaauagugcaggaagaa

SEQ ID NO: 1163977 - RNA, 19 nt, Artificial Sequence
  Description of Artificial Sequence: Synthetic oligonucleotide
  Antisense strand to SEQ ID NO: 1163976
uucuuccugcacuauuuga

SEQ ID NO: 1163978 - RNA, 19 nt, Artificial Sequence
  Description of Artificial Sequence: Synthetic oligonucleotide
  Sense strand starting at position 2077 of SEQ ID NO: 916531
uuaaauagcgaaugcuaga

SEQ ID NO: 1163979 - RNA, 19 nt, Artificial Sequence
  Description of Artificial Sequence: Synthetic oligonucleotide
  Antisense strand to SEQ ID NO: 1163978
ucuagcauucgcuauuuaa

SEQ ID NO: 1163980 - RNA, 19 nt, Artificial Sequence
  Description of Artificial Sequence: Synthetic oligonucleotide
  Sense strand starting at position 2119 of SEQ ID NO: 916531
guggaagugacuuaggcua

SEQ ID NO: 1163981 - RNA, 19 nt, Artificial Sequence
  Description of Artificial Sequence: Synthetic oligonucleotide
  Antisense strand to SEQ ID NO: 1163980
uagccuaagucacuuccac

SEQ ID NO: 1163982 - RNA, 19 nt, Artificial Sequence
  Description of Artificial Sequence: Synthetic oligonucleotide
  Sense strand starting at position 2127 of SEQ ID NO: 916531
gacuuaggcuaaccaguua

SEQ ID NO: 1163983 - RNA, 19 nt, Artificial Sequence
  Description of Artificial Sequence: Synthetic oligonucleotide
  Antisense strand to SEQ ID NO: 1163982
uaacugguuagccuaaguc

SEQ ID NO: 1163984 - RNA, 19 nt, Artificial Sequence
  Description of Artificial Sequence: Synthetic oligonucleotide
  Sense strand starting at position 2150 of SEQ ID NO: 916531
uggaacacacgaugugaaa

SEQ ID NO: 1163985 - RNA, 19 nt, Artificial Sequence
  Description of Artificial Sequence: Synthetic oligonucleotide
  Antisense strand to SEQ ID NO: 1163984
uuucacaucguguguucca

SEQ ID NO: 1163986 - RNA, 19 nt, Artificial Sequence
  Description of Artificial Sequence: Synthetic oligonucleotide
  Sense strand starting at position 2237 of SEQ ID NO: 916531
agagaugugaugggucaca

SEQ ID NO: 1163987 - RNA, 19 nt, Artificial Sequence
  Description of Artificial Sequence: Synthetic oligonucleotide
  Antisense strand to SEQ ID NO: 1163986
ugugacccaucacaucucu

SEQ ID NO: 1163988 - RNA, 19 nt, Artificial Sequence
  Description of Artificial Sequence: Synthetic oligonucleotide
  Sense strand starting at position 2344 of SEQ ID NO: 916531
agcaacucaugcguguuaa

SEQ ID NO: 1163989 - RNA, 19 nt, Artificial Sequence
  Description of Artificial Sequence: Synthetic oligonucleotide
  Antisense strand to SEQ ID NO: 1163988
uuaacacgcaugaguugcu

SEQ ID NO: 1163990 - RNA, 19 nt, Artificial Sequence
  Description of Artificial Sequence: Synthetic oligonucleotide
  Sense strand starting at position 2354 of SEQ ID NO: 916531
gcguguuaaacucuucgua

SEQ ID NO: 1163991 - RNA, 19 nt, Artificial Sequence
  Description of Artificial Sequence: Synthetic oligonucleotide
  Antisense strand to SEQ ID NO: 1163990
uacgaagaguuuaacacgc

SEQ ID NO: 1163992 - RNA, 19 nt, Artificial Sequence
  Description of Artificial Sequence: Synthetic oligonucleotide
  Sense strand starting at position 2356 of SEQ ID NO: 916531
guguuaaacucuucguaaa

SEQ ID NO: 1163993 - RNA, 19 nt, Artificial Sequence
  Description of Artificial Sequence: Synthetic oligonucleotide
  Antisense strand to SEQ ID NO: 1163992
uuuacgaagaguuuaacac

SEQ ID NO: 1163994 - RNA, 19 nt, Artificial Sequence
  Description of Artificial Sequence: Synthetic oligonucleotide
  Sense strand starting at position 2431 of SEQ ID NO: 916531
uucuguaauuauguuccaa

SEQ ID NO: 1163995 - RNA, 19 nt, Artificial Sequence
  Description of Artificial Sequence: Synthetic oligonucleotide
  Antisense strand to SEQ ID NO: 1163994
uuggaacauaauuacagaa

SEQ ID NO: 1163996 - RNA, 19 nt, Artificial Sequence
  Description of Artificial Sequence: Synthetic oligonucleotide
  Sense strand starting at position 2445 of SEQ ID NO: 916531
uccaaccuuguauggauaa

SEQ ID NO: 1163997 - RNA, 19 nt, Artificial Sequence
  Description of Artificial Sequence: Synthetic oligonucleotide
  Antisense strand to SEQ ID NO: 1163996
uuauccauacaagguugga

SEQ ID NO: 1163998 - RNA, 19 nt, Artificial Sequence
  Description of Artificial Sequence: Synthetic oligonucleotide
  Sense strand starting at position 2633 of SEQ ID NO: 916531
cgacaauuuagccgauguu

SEQ ID NO: 1163999 - RNA, 19 nt, Artificial Sequence
  Description of Artificial Sequence: Synthetic oligonucleotide
  Antisense strand to SEQ ID NO: 1163998
aacaucggcuaaauugucg

SEQ ID NO: 1164000 - RNA, 19 nt, Artificial Sequence
  Description of Artificial Sequence: Synthetic oligonucleotide
  Sense strand starting at position 3322 of SEQ ID NO: 916531
cuggcacuucuuggauauu

SEQ ID NO: 1164001 - RNA, 19 nt, Artificial Sequence
  Description of Artificial Sequence: Synthetic oligonucleotide
  Antisense strand to SEQ ID NO: 1164000
aauauccaagaagugccag

SEQ ID NO: 1164002 - RNA, 19 nt, Artificial Sequence
  Description of Artificial Sequence: Synthetic oligonucleotide
  Sense strand starting at position 3325 of SEQ ID NO: 916531
gcacuucuuggauauucua

SEQ ID NO: 1164003 - RNA, 19 nt, Artificial Sequence
  Description of Artificial Sequence: Synthetic oligonucleotide
  Antisense strand to SEQ ID NO: 1164002
uagaauauccaagaagugc

SEQ ID NO: 1164004 - RNA, 19 nt, Artificial Sequence
  Description of Artificial Sequence: Synthetic oligonucleotide
  Sense strand starting at position 3333 of SEQ ID NO: 916531
uggauauucuaagcuuauu

SEQ ID NO: 1164005 - RNA, 19 nt, Artificial Sequence
  Description of Artificial Sequence: Synthetic oligonucleotide
  Antisense strand to SEQ ID NO: 1164004
aauaagcuuagaauaucca

SEQ ID NO: 1164006 - RNA, 19 nt, Artificial Sequence
  Description of Artificial Sequence: Synthetic oligonucleotide
  Sense strand starting at position 3347 of SEQ ID NO: 916531
uuauuuauucuaggugucu

SEQ ID NO: 1164007 - RNA, 19 nt, Artificial Sequence
  Description of Artificial Sequence: Synthetic oligonucleotide
  Antisense strand to SEQ ID NO: 1164006
agacaccuagaauaaauaa

SEQ ID NO: 1164008 - RNA, 19 nt, Artificial Sequence
  Description of Artificial Sequence: Synthetic oligonucleotide
  Sense strand starting at position 3681 of SEQ ID NO: 916531
gacuccugaccguagguua

SEQ ID NO: 1164009 - RNA, 19 nt, Artificial Sequence
  Description of Artificial Sequence: Synthetic oligonucleotide
  Antisense strand to SEQ ID NO: 1164008
uaaccuacggucaggaguc

SEQ ID NO: 1164010 - RNA, 19 nt, Artificial Sequence
  Description of Artificial Sequence: Synthetic oligonucleotide
  Sense strand starting at position 3748 of SEQ ID NO: 916531
cuaugccuggccugauuua

SEQ ID NO: 1164011 - RNA, 19 nt, Artificial Sequence
  Description of Artificial Sequence: Synthetic oligonucleotide
  Antisense strand to SEQ ID NO: 1164010
uaaaucaggccaggcauag

SEQ ID NO: 1164012 - RNA, 19 nt, Artificial Sequence
  Description of Artificial Sequence: Synthetic oligonucleotide
  Sense strand starting at position 135 of SEQ ID NO: 916532
uggcauacaucuguaauac

SEQ ID NO: 1164013 - RNA, 19 nt, Artificial Sequence
  Description of Artificial Sequence: Synthetic oligonucleotide
  Antisense strand to SEQ ID NO: 1164012
guauuacagauguaugcca

SEQ ID NO: 1164014 - RNA, 19 nt, Artificial Sequence
  Description of Artificial Sequence: Synthetic oligonucleotide
  Sense strand starting at position 136 of SEQ ID NO: 916532
ggcauacaucuguaauacc

SEQ ID NO: 1164015 - RNA, 19 nt, Artificial Sequence
  Description of Artificial Sequence: Synthetic oligonucleotide
  Antisense strand to SEQ ID NO: 1164014
gguauuacagauguaugcc

SEQ ID NO: 1164016 - RNA, 19 nt, Artificial Sequence
  Description of Artificial Sequence: Synthetic oligonucleotide
  Sense strand starting at position 150 of SEQ ID NO: 916532
auaccugcuacucgagaga

SEQ ID NO: 1164017 - RNA, 19 nt, Artificial Sequence
  Description of Artificial Sequence: Synthetic oligonucleotide
  Antisense strand to SEQ ID NO: 1164016
ucucucgaguagcagguau

SEQ ID NO: 1164018 - RNA, 19 nt, Artificial Sequence
  Description of Artificial Sequence: Synthetic oligonucleotide
  Sense strand starting at position 345 of SEQ ID NO: 916532
ggugaauagccaugcagag

SEQ ID NO: 1164019 - RNA, 19 nt, Artificial Sequence
  Description of Artificial Sequence: Synthetic oligonucleotide
  Antisense strand to SEQ ID NO: 1164018
cucugcauggcuauucacc

SEQ ID NO: 1164020 - RNA, 19 nt, Artificial Sequence
  Description of Artificial Sequence: Synthetic oligonucleotide
  Sense strand starting at position 363 of SEQ ID NO: 916532
gugggucagcgccuguaau

SEQ ID NO: 1164021 - RNA, 19 nt, Artificial Sequence
  Description of Artificial Sequence: Synthetic oligonucleotide
  Antisense strand to SEQ ID NO: 1164020
auuacaggcgcugacccac

SEQ ID NO: 1164022 - RNA, 19 nt, Artificial Sequence
  Description of Artificial Sequence: Synthetic oligonucleotide
  Sense strand starting at position 551 of SEQ ID NO: 916532
acuugaucucaggguugag

SEQ ID NO: 1164023 - RNA, 19 nt, Artificial Sequence
  Description of Artificial Sequence: Synthetic oligonucleotide
  Antisense strand to SEQ ID NO: 1164022
cucaacccugagaucaagu

SEQ ID NO: 1164024 - RNA, 19 nt, Artificial Sequence
  Description of Artificial Sequence: Synthetic oligonucleotide
  Sense strand starting at position 615 of SEQ ID NO: 916532
caaagugagucccugauuc

SEQ ID NO: 1164025 - RNA, 19 nt, Artificial Sequence
  Description of Artificial Sequence: Synthetic oligonucleotide
  Antisense strand to SEQ ID NO: 1164024
gaaucagggacucacuuug

SEQ ID NO: 1164026 - RNA, 19 nt, Artificial Sequence
  Description of Artificial Sequence: Synthetic oligonucleotide
  Sense strand starting at position 617 of SEQ ID NO: 916532
aagugagucccugauucua

SEQ ID NO: 1164027 - RNA, 19 nt, Artificial Sequence
  Description of Artificial Sequence: Synthetic oligonucleotide
  Antisense strand to SEQ ID NO: 1164026
uagaaucagggacucacuu

SEQ ID NO: 1164028 - RNA, 19 nt, Artificial Sequence
  Description of Artificial Sequence: Synthetic oligonucleotide
  Sense strand starting at position 619 of SEQ ID NO: 916532
gugagucccugauucuaaa

SEQ ID NO: 1164029 - RNA, 19 nt, Artificial Sequence
  Description of Artificial Sequence: Synthetic oligonucleotide
  Antisense strand to SEQ ID NO: 1164028
uuuagaaucagggacucac

SEQ ID NO: 1164030 - RNA, 19 nt, Artificial Sequence
  Description of Artificial Sequence: Synthetic oligonucleotide
  Sense strand starting at position 719 of SEQ ID NO: 916532
ucuuuacaacuguagucau

SEQ ID NO: 1164031 - RNA, 19 nt, Artificial Sequence
  Description of Artificial Sequence: Synthetic oligonucleotide
  Antisense strand to SEQ ID NO: 1164030
augacuacaguuguaaaga

SEQ ID NO: 1164032 - RNA, 19 nt, Artificial Sequence
  Description of Artificial Sequence: Synthetic oligonucleotide
  Sense strand starting at position 722 of SEQ ID NO: 916532
uuacaacuguagucauaau

SEQ ID NO: 1164033 - RNA, 19 nt, Artificial Sequence
  Description of Artificial Sequence: Synthetic oligonucleotide
  Antisense strand to SEQ ID NO: 1164032
auuaugacuacaguuguaa

SEQ ID NO: 1164034 - RNA, 19 nt, Artificial Sequence
  Description of Artificial Sequence: Synthetic oligonucleotide
  Sense strand starting at position 784 of SEQ ID NO: 916532
aauggcauucuugguaaag

SEQ ID NO: 1164035 - RNA, 19 nt, Artificial Sequence
  Description of Artificial Sequence: Synthetic oligonucleotide
  Antisense strand to SEQ ID NO: 1164034
cuuuaccaagaaugccauu

SEQ ID NO: 1164036 - RNA, 19 nt, Artificial Sequence
  Description of Artificial Sequence: Synthetic oligonucleotide
  Sense strand starting at position 857 of SEQ ID NO: 916532
gguagcggcuuuaugagua

SEQ ID NO: 1164037 - RNA, 19 nt, Artificial Sequence
  Description of Artificial Sequence: Synthetic oligonucleotide
  Antisense strand to SEQ ID NO: 1164036
uacucauaaagccgcuacc

SEQ ID NO: 1164038 - RNA, 19 nt, Artificial Sequence
  Description of Artificial Sequence: Synthetic oligonucleotide
  Sense strand starting at position 947 of SEQ ID NO: 916532
cuggacuucuagcuacauu

SEQ ID NO: 1164039 - RNA, 19 nt, Artificial Sequence
  Description of Artificial Sequence: Synthetic oligonucleotide
  Antisense strand to SEQ ID NO: 1164038
aauguagcuagaaguccag

SEQ ID NO: 1164040 - RNA, 19 nt, Artificial Sequence
  Description of Artificial Sequence: Synthetic oligonucleotide
  Sense strand starting at position 1162 of SEQ ID NO: 916532
acagaaaucucaucgugau

SEQ ID NO: 1164041 - RNA, 19 nt, Artificial Sequence
  Description of Artificial Sequence: Synthetic oligonucleotide
  Antisense strand to SEQ ID NO: 1164040
aucacgaugagauuucugu

SEQ ID NO: 1164042 - RNA, 19 nt, Artificial Sequence
  Description of Artificial Sequence: Synthetic oligonucleotide
  Sense strand starting at position 1163 of SEQ ID NO: 916532
cagaaaucucaucgugauu

SEQ ID NO: 1164043 - RNA, 19 nt, Artificial Sequence
  Description of Artificial Sequence: Synthetic oligonucleotide
  Antisense strand to SEQ ID NO: 1164042
aaucacgaugagauuucug

SEQ ID NO: 1164044 - RNA, 19 nt, Artificial Sequence
  Description of Artificial Sequence: Synthetic oligonucleotide
  Sense strand starting at position 1168 of SEQ ID NO: 916532
aucucaucgugauuugcca

SEQ ID NO: 1164045 - RNA, 19 nt, Artificial Sequence
  Description of Artificial Sequence: Synthetic oligonucleotide
  Antisense strand to SEQ ID NO: 1164044
uggcaaaucacgaugagau

SEQ ID NO: 1164046 - RNA, 19 nt, Artificial Sequence
  Description of Artificial Sequence: Synthetic oligonucleotide
  Sense strand starting at position 1236 of SEQ ID NO: 916532
aggucuucuggcuaauuag

SEQ ID NO: 1164047 - RNA, 19 nt, Artificial Sequence
  Description of Artificial Sequence: Synthetic oligonucleotide
  Antisense strand to SEQ ID NO: 1164046
cuaauuagccagaagaccu

SEQ ID NO: 1164048 - RNA, 19 nt, Artificial Sequence
  Description of Artificial Sequence: Synthetic oligonucleotide
  Sense strand starting at position 1287 of SEQ ID NO: 916532
gcacuaugugaagauguac

SEQ ID NO: 1164049 - RNA, 19 nt, Artificial Sequence
  Description of Artificial Sequence: Synthetic oligonucleotide
  Antisense strand to SEQ ID NO: 1164048
guacaucuucacauagugc

SEQ ID NO: 1164050 - RNA, 19 nt, Artificial Sequence
  Description of Artificial Sequence: Synthetic oligonucleotide
  Sense strand starting at position 1487 of SEQ ID NO: 916532
ggguuuccagaggauuagu

SEQ ID NO: 1164051 - RNA, 19 nt, Artificial Sequence
  Description of Artificial Sequence: Synthetic oligonucleotide
  Antisense strand to SEQ ID NO: 1164050
acuaauccucuggaaaccc

SEQ ID NO: 1164052 - RNA, 19 nt, Artificial Sequence
  Description of Artificial Sequence: Synthetic oligonucleotide
  Sense strand starting at position 1492 of SEQ ID NO: 916532
uccagaggauuaguugaua

SEQ ID NO: 1164053 - RNA, 19 nt, Artificial Sequence
  Description of Artificial Sequence: Synthetic oligonucleotide
  Antisense strand to SEQ ID NO: 1164052
uaucaacuaauccucugga

SEQ ID NO: 1164054 - RNA, 19 nt, Artificial Sequence
  Description of Artificial Sequence: Synthetic oligonucleotide
  Sense strand starting at position 1524 of SEQ ID NO: 916532
auaguaaugguccaucauu

SEQ ID NO: 1164055 - RNA, 19 nt, Artificial Sequence
  Description of Artificial Sequence: Synthetic oligonucleotide
  Antisense strand to SEQ ID NO: 1164054
aaugauggaccauuacuau

SEQ ID NO: 1164056 - RNA, 19 nt, Artificial Sequence
  Description of Artificial Sequence: Synthetic oligonucleotide
  Sense strand starting at position 2048 of SEQ ID NO: 916532
cugacccacccuugugaau

SEQ ID NO: 1164057 - RNA, 19 nt, Artificial Sequence
  Description of Artificial Sequence: Synthetic oligonucleotide
  Antisense strand to SEQ ID NO: 1164056
auucacaagggugggucag

SEQ ID NO: 1164058 - RNA, 19 nt, Artificial Sequence
  Description of Artificial Sequence: Synthetic oligonucleotide
  Sense strand starting at position 2605 of SEQ ID NO: 916532
ccuuaaauuccugagguua

SEQ ID NO: 1164059 - RNA, 19 nt, Artificial Sequence
  Description of Artificial Sequence: Synthetic oligonucleotide
  Antisense strand to SEQ ID NO: 1164058
uaaccucaggaauuuaagg

SEQ ID NO: 1164060 - RNA, 19 nt, Artificial Sequence
  Description of Artificial Sequence: Synthetic oligonucleotide
  Sense strand starting at position 2624 of SEQ ID NO: 916532
uugaaauucucauuagggu

SEQ ID NO: 1164061 - RNA, 19 nt, Artificial Sequence
  Description of Artificial Sequence: Synthetic oligonucleotide
  Antisense strand to SEQ ID NO: 1164060
acccuaaugagaauuucaa

SEQ ID NO: 1164062 - RNA, 19 nt, Artificial Sequence
  Description of Artificial Sequence: Synthetic oligonucleotide
  Sense strand starting at position 2759 of SEQ ID NO: 916532
gcauuauagcaugaagcca

SEQ ID NO: 1164063 - RNA, 19 nt, Artificial Sequence
  Description of Artificial Sequence: Synthetic oligonucleotide
  Antisense strand to SEQ ID NO: 1164062
uggcuucaugcuauaaugc

SEQ ID NO: 1164064 - RNA, 19 nt, Artificial Sequence
  Description of Artificial Sequence: Synthetic oligonucleotide
  Sense strand starting at position 2912 of SEQ ID NO: 916532
caggucuggugauuuguca

SEQ ID NO: 1164065 - RNA, 19 nt, Artificial Sequence
  Description of Artificial Sequence: Synthetic oligonucleotide
  Antisense strand to SEQ ID NO: 1164064
ugacaaaucaccagaccug

SEQ ID NO: 1164066 - RNA, 19 nt, Artificial Sequence
  Description of Artificial Sequence: Synthetic oligonucleotide
  Sense strand starting at position 3125 of SEQ ID NO: 916532
uccagucuuccauaccgaa

SEQ ID NO: 1164067 - RNA, 19 nt, Artificial Sequence
  Description of Artificial Sequence: Synthetic oligonucleotide
  Antisense strand to SEQ ID NO: 1164066
uucgguauggaagacugga

SEQ ID NO: 1164068 - RNA, 19 nt, Artificial Sequence
  Description of Artificial Sequence: Synthetic oligonucleotide
  Sense strand starting at position 3154 of SEQ ID NO: 916532
uuagcaaaucccgauuaug

SEQ ID NO: 1164069 - RNA, 19 nt, Artificial Sequence
  Description of Artificial Sequence: Synthetic oligonucleotide
  Antisense strand to SEQ ID NO: 1164068
cauaaucgggauuugcuaa

SEQ ID NO: 1164070 - RNA, 19 nt, Artificial Sequence
  Description of Artificial Sequence: Synthetic oligonucleotide
  Sense strand starting at position 3157 of SEQ ID NO: 916532
gcaaaucccgauuauguaa

SEQ ID NO: 1164071 - RNA, 19 nt, Artificial Sequence
  Description of Artificial Sequence: Synthetic oligonucleotide
  Antisense strand to SEQ ID NO: 1164070
uuacauaaucgggauuugc

SEQ ID NO: 1164072 - RNA, 19 nt, Artificial Sequence
  Description of Artificial Sequence: Synthetic oligonucleotide
  Sense strand starting at position 3295 of SEQ ID NO: 916532
aaaguauugcuugauguga

SEQ ID NO: 1164073 - RNA, 19 nt, Artificial Sequence
  Description of Artificial Sequence: Synthetic oligonucleotide
  Antisense strand to SEQ ID NO: 1164072
ucacaucaagcaauacuuu

SEQ ID NO: 1164074 - RNA, 19 nt, Artificial Sequence
  Description of Artificial Sequence: Synthetic oligonucleotide
  Sense strand starting at position 3321 of SEQ ID NO: 916532
aaaugaaauugggcguaau

SEQ ID NO: 1164075 - RNA, 19 nt, Artificial Sequence
  Description of Artificial Sequence: Synthetic oligonucleotide
  Antisense strand to SEQ ID NO: 1164074
auuacgcccaauuucauuu

SEQ ID NO: 1164076 - RNA, 19 nt, Artificial Sequence
  Description of Artificial Sequence: Synthetic oligonucleotide
  Sense strand starting at position 3322 of SEQ ID NO: 916532
aaugaaauugggcguaauc

SEQ ID NO: 1164077 - RNA, 19 nt, Artificial Sequence
  Description of Artificial Sequence: Synthetic oligonucleotide
  Antisense strand to SEQ ID NO: 1164076
gauuacgcccaauuucauu

SEQ ID NO: 1164078 - RNA, 19 nt, Artificial Sequence
  Description of Artificial Sequence: Synthetic oligonucleotide
  Sense strand starting at position 3324 of SEQ ID NO: 916532
ugaaauugggcguaaucuu

SEQ ID NO: 1164079 - RNA, 19 nt, Artificial Sequence
  Description of Artificial Sequence: Synthetic oligonucleotide
  Antisense strand to SEQ ID NO: 1164078
aagauuacgcccaauuuca

SEQ ID NO: 1164080 - RNA, 19 nt, Artificial Sequence
  Description of Artificial Sequence: Synthetic oligonucleotide
  Sense strand starting at position 3770 of SEQ ID NO: 916532
uuggaauaaaguugagguu

SEQ ID NO: 1164081 - RNA, 19 nt, Artificial Sequence
  Description of Artificial Sequence: Synthetic oligonucleotide
  Antisense strand to SEQ ID NO: 1164080
aaccucaacuuuauuccaa

SEQ ID NO: 1164082 - RNA, 19 nt, Artificial Sequence
  Description of Artificial Sequence: Synthetic oligonucleotide
  Sense strand starting at position 3785 of SEQ ID NO: 916532
gguuuaggaagcuaucuga

SEQ ID NO: 1164083 - RNA, 19 nt, Artificial Sequence
  Description of Artificial Sequence: Synthetic oligonucleotide
  Antisense strand to SEQ ID NO: 1164082
ucagauagcuuccuaaacc

SEQ ID NO: 1164084 - RNA, 19 nt, Artificial Sequence
  Description of Artificial Sequence: Synthetic oligonucleotide
  Sense strand starting at position 3788 of SEQ ID NO: 916532
uuaggaagcuaucugacuu

SEQ ID NO: 1164085 - RNA, 19 nt, Artificial Sequence
  Description of Artificial Sequence: Synthetic oligonucleotide
  Antisense strand to SEQ ID NO: 1164084
aagucagauagcuuccuaa

SEQ ID NO: 1164086 - RNA, 19 nt, Artificial Sequence
  Description of Artificial Sequence: Synthetic oligonucleotide
  Sense strand starting at position 3825 of SEQ ID NO: 916532
cuggacuaaggauguguua

SEQ ID NO: 1164087 - RNA, 19 nt, Artificial Sequence
  Description of Artificial Sequence: Synthetic oligonucleotide
  Antisense strand to SEQ ID NO: 1164086
uaacacauccuuaguccag

SEQ ID NO: 1164088 - RNA, 19 nt, Artificial Sequence
  Description of Artificial Sequence: Synthetic oligonucleotide
  Sense strand starting at position 3827 of SEQ ID NO: 916532
ggacuaaggauguguuaaa

SEQ ID NO: 1164089 - RNA, 19 nt, Artificial Sequence
  Description of Artificial Sequence: Synthetic oligonucleotide
  Antisense strand to SEQ ID NO: 1164088
uuuaacacauccuuagucc

SEQ ID NO: 1164090 - RNA, 19 nt, Artificial Sequence
  Description of Artificial Sequence: Synthetic oligonucleotide
  Sense strand starting at position 3907 of SEQ ID NO: 916532
ccaggugcaucaucugaga

SEQ ID NO: 1164091 - RNA, 19 nt, Artificial Sequence
  Description of Artificial Sequence: Synthetic oligonucleotide
  Antisense strand to SEQ ID NO: 1164090
ucucagaugaugcaccugg

SEQ ID NO: 1164092 - RNA, 19 nt, Artificial Sequence
  Description of Artificial Sequence: Synthetic oligonucleotide
  Sense strand starting at position 401 of SEQ ID NO: 916533
gagggucacuccuguaauc

SEQ ID NO: 1164093 - RNA, 19 nt, Artificial Sequence
  Description of Artificial Sequence: Synthetic oligonucleotide
  Antisense strand to SEQ ID NO: 1164092
gauuacaggagugacccuc

SEQ ID NO: 1164094 - RNA, 19 nt, Artificial Sequence
  Description of Artificial Sequence: Synthetic oligonucleotide
  Sense strand starting at position 521 of SEQ ID NO: 916533
aaacuaaucggacaugucu

SEQ ID NO: 1164095 - RNA, 19 nt, Artificial Sequence
  Description of Artificial Sequence: Synthetic oligonucleotide
  Antisense strand to SEQ ID NO: 1164094
agacauguccgauuaguuu

SEQ ID NO: 1164096 - RNA, 19 nt, Artificial Sequence
  Description of Artificial Sequence: Synthetic oligonucleotide
  Sense strand starting at position 560 of SEQ ID NO: 916533
ggucgcaguuaguugagau

SEQ ID NO: 1164097 - RNA, 19 nt, Artificial Sequence
  Description of Artificial Sequence: Synthetic oligonucleotide
  Antisense strand to SEQ ID NO: 1164096
aucucaacuaacugcgacc

SEQ ID NO: 1164098 - RNA, 19 nt, Artificial Sequence
  Description of Artificial Sequence: Synthetic oligonucleotide
  Sense strand starting at position 561 of SEQ ID NO: 916533
gucgcaguuaguugagauu

SEQ ID NO: 1164099 - RNA, 19 nt, Artificial Sequence
  Description of Artificial Sequence: Synthetic oligonucleotide
  Antisense strand to SEQ ID NO: 1164098
aaucucaacuaacugcgac

SEQ ID NO: 1164100 - RNA, 19 nt, Artificial Sequence
  Description of Artificial Sequence: Synthetic oligonucleotide
  Sense strand starting at position 682 of SEQ ID NO: 916533
ggguaucgugguggugaga

SEQ ID NO: 1164101 - RNA, 19 nt, Artificial Sequence
  Description of Artificial Sequence: Synthetic oligonucleotide
  Antisense strand to SEQ ID NO: 1164100
ucucaccaccacgauaccc

SEQ ID NO: 1164102 - RNA, 19 nt, Artificial Sequence
  Description of Artificial Sequence: Synthetic oligonucleotide
  Sense strand starting at position 695 of SEQ ID NO: 916533
gugagauaguggguuuguu

SEQ ID NO: 1164103 - RNA, 19 nt, Artificial Sequence
  Description of Artificial Sequence: Synthetic oligonucleotide
  Antisense strand to SEQ ID NO: 1164102
aacaaacccacuaucucac

SEQ ID NO: 1164104 - RNA, 19 nt, Artificial Sequence
  Description of Artificial Sequence: Synthetic oligonucleotide
  Sense strand starting at position 814 of SEQ ID NO: 916533
ccuucugggcucgaaggau

SEQ ID NO: 1164105 - RNA, 19 nt, Artificial Sequence
  Description of Artificial Sequence: Synthetic oligonucleotide
  Antisense strand to SEQ ID NO: 1164104
auccuucgagcccagaagg

SEQ ID NO: 1164106 - RNA, 19 nt, Artificial Sequence
  Description of Artificial Sequence: Synthetic oligonucleotide
  Sense strand starting at position 1063 of SEQ ID NO: 916533
uucugaaguaucgggaucu

SEQ ID NO: 1164107 - RNA, 19 nt, Artificial Sequence
  Description of Artificial Sequence: Synthetic oligonucleotide
  Antisense strand to SEQ ID NO: 1164106
agaucccgauacuucagaa

SEQ ID NO: 1164108 - RNA, 19 nt, Artificial Sequence
  Description of Artificial Sequence: Synthetic oligonucleotide
  Sense strand starting at position 1096 of SEQ ID NO: 916533
agaguuuauucucccacuu

SEQ ID NO: 1164109 - RNA, 19 nt, Artificial Sequence
  Description of Artificial Sequence: Synthetic oligonucleotide
  Antisense strand to SEQ ID NO: 1164108
aagugggagaauaaacucu

SEQ ID NO: 1164110 - RNA, 19 nt, Artificial Sequence
  Description of Artificial Sequence: Synthetic oligonucleotide
  Sense strand starting at position 1199 of SEQ ID NO: 916533
gauuucugucccugugcuu

SEQ ID NO: 1164111 - RNA, 19 nt, Artificial Sequence
  Description of Artificial Sequence: Synthetic oligonucleotide
  Antisense strand to SEQ ID NO: 1164110
aagcacagggacagaaauc

SEQ ID NO: 1164112 - RNA, 19 nt, Artificial Sequence
  Description of Artificial Sequence: Synthetic oligonucleotide
  Sense strand starting at position 1283 of SEQ ID NO: 916533
gucaucuaaucucaugguu

SEQ ID NO: 1164113 - RNA, 19 nt, Artificial Sequence
  Description of Artificial Sequence: Synthetic oligonucleotide
  Antisense strand to SEQ ID NO: 1164112
aaccaugagauuagaugac

SEQ ID NO: 1164114 - RNA, 19 nt, Artificial Sequence
  Description of Artificial Sequence: Synthetic oligonucleotide
  Sense strand starting at position 1342 of SEQ ID NO: 916533
uuuccagucuucuauguca

SEQ ID NO: 1164115 - RNA, 19 nt, Artificial Sequence
  Description of Artificial Sequence: Synthetic oligonucleotide
  Antisense strand to SEQ ID NO: 1164114
ugacauagaagacuggaaa

SEQ ID NO: 1164116 - RNA, 19 nt, Artificial Sequence
  Description of Artificial Sequence: Synthetic oligonucleotide
  Sense strand starting at position 1344 of SEQ ID NO: 916533
uccagucuucuaugucaaa

SEQ ID NO: 1164117 - RNA, 19 nt, Artificial Sequence
  Description of Artificial Sequence: Synthetic oligonucleotide
  Antisense strand to SEQ ID NO: 1164116
uuugacauagaagacugga

SEQ ID NO: 1164118 - RNA, 19 nt, Artificial Sequence
  Description of Artificial Sequence: Synthetic oligonucleotide
  Sense strand starting at position 1345 of SEQ ID NO: 916533
ccagucuucuaugucaaac

SEQ ID NO: 1164119 - RNA, 19 nt, Artificial Sequence
  Description of Artificial Sequence: Synthetic oligonucleotide
  Antisense strand to SEQ ID NO: 1164118
guuugacauagaagacugg

SEQ ID NO: 1164120 - RNA, 19 nt, Artificial Sequence
  Description of Artificial Sequence: Synthetic oligonucleotide
  Sense strand starting at position 1380 of SEQ ID NO: 916533
cugcuuggaugucuaauaa

SEQ ID NO: 1164121 - RNA, 19 nt, Artificial Sequence
  Description of Artificial Sequence: Synthetic oligonucleotide
  Antisense strand to SEQ ID NO: 1164120
uuauuagacauccaagcag

SEQ ID NO: 1164122 - RNA, 19 nt, Artificial Sequence
  Description of Artificial Sequence: Synthetic oligonucleotide
  Sense strand starting at position 1384 of SEQ ID NO: 916533
uuggaugucuaauaaguua

SEQ ID NO: 1164123 - RNA, 19 nt, Artificial Sequence
  Description of Artificial Sequence: Synthetic oligonucleotide
  Antisense strand to SEQ ID NO: 1164122
uaacuuauuagacauccaa

SEQ ID NO: 1164124 - RNA, 19 nt, Artificial Sequence
  Description of Artificial Sequence: Synthetic oligonucleotide
  Sense strand starting at position 1468 of SEQ ID NO: 916533
aggccucucuaucuuagua

SEQ ID NO: 1164125 - RNA, 19 nt, Artificial Sequence
  Description of Artificial Sequence: Synthetic oligonucleotide
  Antisense strand to SEQ ID NO: 1164124
uacuaagauagagaggccu

SEQ ID NO: 1164126 - RNA, 19 nt, Artificial Sequence
  Description of Artificial Sequence: Synthetic oligonucleotide
  Sense strand starting at position 1501 of SEQ ID NO: 916533
ugcccagugguuugaguca

SEQ ID NO: 1164127 - RNA, 19 nt, Artificial Sequence
  Description of Artificial Sequence: Synthetic oligonucleotide
  Antisense strand to SEQ ID NO: 1164126
ugacucaaaccacugggca

SEQ ID NO: 1164128 - RNA, 19 nt, Artificial Sequence
  Description of Artificial Sequence: Synthetic oligonucleotide
  Sense strand starting at position 1566 of SEQ ID NO: 916533
cucaaucugucagaaaguc

SEQ ID NO: 1164129 - RNA, 19 nt, Artificial Sequence
  Description of Artificial Sequence: Synthetic oligonucleotide
  Antisense strand to SEQ ID NO: 1164128
gacuuucugacagauugag

SEQ ID NO: 1164130 - RNA, 19 nt, Artificial Sequence
  Description of Artificial Sequence: Synthetic oligonucleotide
  Sense strand starting at position 1989 of SEQ ID NO: 916533
agauaagguagaugucauc

SEQ ID NO: 1164131 - RNA, 19 nt, Artificial Sequence
  Description of Artificial Sequence: Synthetic oligonucleotide
  Antisense strand to SEQ ID NO: 1164130
gaugacaucuaccuuaucu

SEQ ID NO: 1164132 - RNA, 19 nt, Artificial Sequence
  Description of Artificial Sequence: Synthetic oligonucleotide
  Sense strand starting at position 1992 of SEQ ID NO: 916533
uaagguagaugucauccau

SEQ ID NO: 1164133 - RNA, 19 nt, Artificial Sequence
  Description of Artificial Sequence: Synthetic oligonucleotide
  Antisense strand to SEQ ID NO: 1164132
auggaugacaucuaccuua

SEQ ID NO: 1164134 - RNA, 19 nt, Artificial Sequence
  Description of Artificial Sequence: Synthetic oligonucleotide
  Sense strand starting at position 2018 of SEQ ID NO: 916533
augucagugggccacaaau

SEQ ID NO: 1164135 - RNA, 19 nt, Artificial Sequence
  Description of Artificial Sequence: Synthetic oligonucleotide
  Antisense strand to SEQ ID NO: 1164134
auuuguggcccacugacau

SEQ ID NO: 1164136 - RNA, 19 nt, Artificial Sequence
  Description of Artificial Sequence: Synthetic oligonucleotide
  Sense strand starting at position 2020 of SEQ ID NO: 916533
gucagugggccacaaauau

SEQ ID NO: 1164137 - RNA, 19 nt, Artificial Sequence
  Description of Artificial Sequence: Synthetic oligonucleotide
  Antisense strand to SEQ ID NO: 1164136
auauuuguggcccacugac

SEQ ID NO: 1164138 - RNA, 19 nt, Artificial Sequence
  Description of Artificial Sequence: Synthetic oligonucleotide
  Sense strand starting at position 2163 of SEQ ID NO: 916533
guugcagagugucccaaau

SEQ ID NO: 1164139 - RNA, 19 nt, Artificial Sequence
  Description of Artificial Sequence: Synthetic oligonucleotide
  Antisense strand to SEQ ID NO: 1164138
auuugggacacucugcaac

SEQ ID NO: 1164140 - RNA, 19 nt, Artificial Sequence
  Description of Artificial Sequence: Synthetic oligonucleotide
  Sense strand starting at position 2165 of SEQ ID NO: 916533
ugcagagugucccaaauag

SEQ ID NO: 1164141 - RNA, 19 nt, Artificial Sequence
  Description of Artificial Sequence: Synthetic oligonucleotide
  Antisense strand to SEQ ID NO: 1164140
cuauuugggacacucugca

SEQ ID NO: 1164142 - RNA, 19 nt, Artificial Sequence
  Description of Artificial Sequence: Synthetic oligonucleotide
  Sense strand starting at position 2172 of SEQ ID NO: 916533
ugucccaaauagugagaua

SEQ ID NO: 1164143 - RNA, 19 nt, Artificial Sequence
  Description of Artificial Sequence: Synthetic oligonucleotide
  Antisense strand to SEQ ID NO: 1164142
uaucucacuauuugggaca

SEQ ID NO: 1164144 - RNA, 19 nt, Artificial Sequence
  Description of Artificial Sequence: Synthetic oligonucleotide
  Sense strand starting at position 2175 of SEQ ID NO: 916533
cccaaauagugagauauac

SEQ ID NO: 1164145 - RNA, 19 nt, Artificial Sequence
  Description of Artificial Sequence: Synthetic oligonucleotide
  Antisense strand to SEQ ID NO: 1164144
guauaucucacuauuuggg

SEQ ID NO: 1164146 - RNA, 19 nt, Artificial Sequence
  Description of Artificial Sequence: Synthetic oligonucleotide
  Sense strand starting at position 2378 of SEQ ID NO: 916533
aaacuuagcuuguguagaa

SEQ ID NO: 1164147 - RNA, 19 nt, Artificial Sequence
  Description of Artificial Sequence: Synthetic oligonucleotide
  Antisense strand to SEQ ID NO: 1164146
uucuacacaagcuaaguuu

SEQ ID NO: 1164148 - RNA, 19 nt, Artificial Sequence
  Description of Artificial Sequence: Synthetic oligonucleotide
  Sense strand starting at position 2393 of SEQ ID NO: 916533
agaaguacgugcuugugau

SEQ ID NO: 1164149 - RNA, 19 nt, Artificial Sequence
  Description of Artificial Sequence: Synthetic oligonucleotide
  Antisense strand to SEQ ID NO: 1164148
aucacaagcacguacuucu

SEQ ID NO: 1164150 - RNA, 19 nt, Artificial Sequence
  Description of Artificial Sequence: Synthetic oligonucleotide
  Sense strand starting at position 2394 of SEQ ID NO: 916533
gaaguacgugcuugugauc

SEQ ID NO: 1164151 - RNA, 19 nt, Artificial Sequence
  Description of Artificial Sequence: Synthetic oligonucleotide
  Antisense strand to SEQ ID NO: 1164150
gaucacaagcacguacuuc

SEQ ID NO: 1164152 - RNA, 19 nt, Artificial Sequence
  Description of Artificial Sequence: Synthetic oligonucleotide
  Sense strand starting at position 2624 of SEQ ID NO: 916533
agaagaauuguuugagcuc

SEQ ID NO: 1164153 - RNA, 19 nt, Artificial Sequence
  Description of Artificial Sequence: Synthetic oligonucleotide
  Antisense strand to SEQ ID NO: 1164152
gagcucaaacaauucuucu

SEQ ID NO: 1164154 - RNA, 19 nt, Artificial Sequence
  Description of Artificial Sequence: Synthetic oligonucleotide
  Sense strand starting at position 2625 of SEQ ID NO: 916533
gaagaauuguuugagcuca

SEQ ID NO: 1164155 - RNA, 19 nt, Artificial Sequence
  Description of Artificial Sequence: Synthetic oligonucleotide
  Antisense strand to SEQ ID NO: 1164154
ugagcucaaacaauucuuc

SEQ ID NO: 1164156 - RNA, 19 nt, Artificial Sequence
  Description of Artificial Sequence: Synthetic oligonucleotide
  Sense strand starting at position 2742 of SEQ ID NO: 916533
gacgaagucuccuuucuug

SEQ ID NO: 1164157 - RNA, 19 nt, Artificial Sequence
  Description of Artificial Sequence: Synthetic oligonucleotide
  Antisense strand to SEQ ID NO: 1164156
caagaaaggagacuucguc

SEQ ID NO: 1164158 - RNA, 19 nt, Artificial Sequence
  Description of Artificial Sequence: Synthetic oligonucleotide
  Sense strand starting at position 2940 of SEQ ID NO: 916533
ccucgaauuccugacauga

SEQ ID NO: 1164159 - RNA, 19 nt, Artificial Sequence
  Description of Artificial Sequence: Synthetic oligonucleotide
  Antisense strand to SEQ ID NO: 1164158
ucaugucaggaauucgagg

SEQ ID NO: 1164160 - RNA, 19 nt, Artificial Sequence
  Description of Artificial Sequence: Synthetic oligonucleotide
  Sense strand starting at position 3365 of SEQ ID NO: 916533
auacucuuaccuggucaca

SEQ ID NO: 1164161 - RNA, 19 nt, Artificial Sequence
  Description of Artificial Sequence: Synthetic oligonucleotide
  Antisense strand to SEQ ID NO: 1164160
ugugaccagguaagaguau

SEQ ID NO: 1164162 - RNA, 19 nt, Artificial Sequence
  Description of Artificial Sequence: Synthetic oligonucleotide
  Sense strand starting at position 3367 of SEQ ID NO: 916533
acucuuaccuggucacaca

SEQ ID NO: 1164163 - RNA, 19 nt, Artificial Sequence
  Description of Artificial Sequence: Synthetic oligonucleotide
  Antisense strand to SEQ ID NO: 1164162
ugugugaccagguaagagu

SEQ ID NO: 1164164 - RNA, 19 nt, Artificial Sequence
  Description of Artificial Sequence: Synthetic oligonucleotide
  Sense strand starting at position 3390 of SEQ ID NO: 916533
gccucacacucugguagaa

SEQ ID NO: 1164165 - RNA, 19 nt, Artificial Sequence
  Description of Artificial Sequence: Synthetic oligonucleotide
  Antisense strand to SEQ ID NO: 1164164
uucuaccagagugugaggc

SEQ ID NO: 1164166 - RNA, 19 nt, Artificial Sequence
  Description of Artificial Sequence: Synthetic oligonucleotide
  Sense strand starting at position 3392 of SEQ ID NO: 916533
cucacacucugguagaaga

SEQ ID NO: 1164167 - RNA, 19 nt, Artificial Sequence
  Description of Artificial Sequence: Synthetic oligonucleotide
  Antisense strand to SEQ ID NO: 1164166
ucuucuaccagagugugag

SEQ ID NO: 1164168 - RNA, 19 nt, Artificial Sequence
  Description of Artificial Sequence: Synthetic oligonucleotide
  Sense strand starting at position 3429 of SEQ ID NO: 916533
uguuaaccacuucguuaau

SEQ ID NO: 1164169 - RNA, 19 nt, Artificial Sequence
  Description of Artificial Sequence: Synthetic oligonucleotide
  Antisense strand to SEQ ID NO: 1164168
auuaacgaagugguuaaca

SEQ ID NO: 1164170 - RNA, 19 nt, Artificial Sequence
  Description of Artificial Sequence: Synthetic oligonucleotide
  Sense strand starting at position 3440 of SEQ ID NO: 916533
ucguuaaucucagcuaaga

SEQ ID NO: 1164171 - RNA, 19 nt, Artificial Sequence
  Description of Artificial Sequence: Synthetic oligonucleotide
  Antisense strand to SEQ ID NO: 1164170
ucuuagcugagauuaacga

SEQ ID NO: 1164172 - RNA, 19 nt, Artificial Sequence
  Description of Artificial Sequence: Synthetic oligonucleotide
  Sense strand starting at position 72 of SEQ ID NO: 916534
cugaucagugaccgucuaa

SEQ ID NO: 1164173 - RNA, 19 nt, Artificial Sequence
  Description of Artificial Sequence: Synthetic oligonucleotide
  Antisense strand to SEQ ID NO: 1164172
uuagacggucacugaucag

SEQ ID NO: 1164174 - RNA, 19 nt, Artificial Sequence
  Description of Artificial Sequence: Synthetic oligonucleotide
  Sense strand starting at position 241 of SEQ ID NO: 916534
gcuacaaacuuggcaaagu

SEQ ID NO: 1164175 - RNA, 19 nt, Artificial Sequence
  Description of Artificial Sequence: Synthetic oligonucleotide
  Antisense strand to SEQ ID NO: 1164174
acuuugccaaguuuguagc

SEQ ID NO: 1164176 - RNA, 19 nt, Artificial Sequence
  Description of Artificial Sequence: Synthetic oligonucleotide
  Sense strand starting at position 722 of SEQ ID NO: 916534
cgcuauauacgcguuaacu

SEQ ID NO: 1164177 - RNA, 19 nt, Artificial Sequence
  Description of Artificial Sequence: Synthetic oligonucleotide
  Antisense strand to SEQ ID NO: 1164176
aguuaacgcguauauagcg

SEQ ID NO: 1164178 - RNA, 19 nt, Artificial Sequence
  Description of Artificial Sequence: Synthetic oligonucleotide
  Sense strand starting at position 723 of SEQ ID NO: 916534
gcuauauacgcguuaacuu

SEQ ID NO: 1164179 - RNA, 19 nt, Artificial Sequence
  Description of Artificial Sequence: Synthetic oligonucleotide
  Antisense strand to SEQ ID NO: 1164178
aaguuaacgcguauauagc

SEQ ID NO: 1164180 - RNA, 19 nt, Artificial Sequence
  Description of Artificial Sequence: Synthetic oligonucleotide
  Sense strand starting at position 724 of SEQ ID NO: 916534
cuauauacgcguuaacuuu

SEQ ID NO: 1164181 - RNA, 19 nt, Artificial Sequence
  Description of Artificial Sequence: Synthetic oligonucleotide
  Antisense strand to SEQ ID NO: 1164180
aaaguuaacgcguauauag

SEQ ID NO: 1164182 - RNA, 19 nt, Artificial Sequence
  Description of Artificial Sequence: Synthetic oligonucleotide
  Sense strand starting at position 1156 of SEQ ID NO: 916534
ggccucccuccugguauua

SEQ ID NO: 1164183 - RNA, 19 nt, Artificial Sequence
  Description of Artificial Sequence: Synthetic oligonucleotide
  Antisense strand to SEQ ID NO: 1164182
uaauaccaggagggaggcc

SEQ ID NO: 1164184 - RNA, 19 nt, Artificial Sequence
  Description of Artificial Sequence: Synthetic oligonucleotide
  Sense strand starting at position 1739 of SEQ ID NO: 916534
cgccgcucgcgcucauaua

SEQ ID NO: 1164185 - RNA, 19 nt, Artificial Sequence
  Description of Artificial Sequence: Synthetic oligonucleotide
  Antisense strand to SEQ ID NO: 1164184
uauaugagcgcgagcggcg

SEQ ID NO: 1164186 - RNA, 19 nt, Artificial Sequence
  Description of Artificial Sequence: Synthetic oligonucleotide
  Sense strand starting at position 1962 of SEQ ID NO: 916534
ugucuaaccuccucuguua

SEQ ID NO: 1164187 - RNA, 19 nt, Artificial Sequence
  Description of Artificial Sequence: Synthetic oligonucleotide
  Antisense strand to SEQ ID NO: 1164186
uaacagaggagguuagaca

SEQ ID NO: 1164188 - RNA, 19 nt, Artificial Sequence
  Description of Artificial Sequence: Synthetic oligonucleotide
  Sense strand starting at position 2383 of SEQ ID NO: 916534
ccgucaguucggcuucagu

SEQ ID NO: 1164189 - RNA, 19 nt, Artificial Sequence
  Description of Artificial Sequence: Synthetic oligonucleotide
  Antisense strand to SEQ ID NO: 1164188
acugaagccgaacugacgg

SEQ ID NO: 1164190 - RNA, 19 nt, Artificial Sequence
  Description of Artificial Sequence: Synthetic oligonucleotide
  Sense strand starting at position 2426 of SEQ ID NO: 916534
auuugugcauucucuggau

SEQ ID NO: 1164191 - RNA, 19 nt, Artificial Sequence
  Description of Artificial Sequence: Synthetic oligonucleotide
  Antisense strand to SEQ ID NO: 1164190
auccagagaaugcacaaau

SEQ ID NO: 1164192 - RNA, 19 nt, Artificial Sequence
  Description of Artificial Sequence: Synthetic oligonucleotide
  Sense strand starting at position 2434 of SEQ ID NO: 916534
auucucuggaugcguuaua

SEQ ID NO: 1164193 - RNA, 19 nt, Artificial Sequence
  Description of Artificial Sequence: Synthetic oligonucleotide
  Antisense strand to SEQ ID NO: 1164192
uauaacgcauccagagaau

SEQ ID NO: 1164194 - RNA, 19 nt, Artificial Sequence
  Description of Artificial Sequence: Synthetic oligonucleotide
  Sense strand starting at position 2435 of SEQ ID NO: 916534
uucucuggaugcguuauaa

SEQ ID NO: 1164195 - RNA, 19 nt, Artificial Sequence
  Description of Artificial Sequence: Synthetic oligonucleotide
  Antisense strand to SEQ ID NO: 1164194
uuauaacgcauccagagaa

SEQ ID NO: 1164196 - RNA, 19 nt, Artificial Sequence
  Description of Artificial Sequence: Synthetic oligonucleotide
  Sense strand starting at position 2443 of SEQ ID NO: 916534
augcguuauaaugaggaca

SEQ ID NO: 1164197 - RNA, 19 nt, Artificial Sequence
  Description of Artificial Sequence: Synthetic oligonucleotide
  Antisense strand to SEQ ID NO: 1164196
uguccucauuauaacgcau

SEQ ID NO: 1164198 - RNA, 19 nt, Artificial Sequence
  Description of Artificial Sequence: Synthetic oligonucleotide
  Sense strand starting at position 2588 of SEQ ID NO: 916534
cagaguauggucugagggu

SEQ ID NO: 1164199 - RNA, 19 nt, Artificial Sequence
  Description of Artificial Sequence: Synthetic oligonucleotide
  Antisense strand to SEQ ID NO: 1164198
acccucagaccauacucug

SEQ ID NO: 1164200 - RNA, 19 nt, Artificial Sequence
  Description of Artificial Sequence: Synthetic oligonucleotide
  Sense strand starting at position 2711 of SEQ ID NO: 916534
ggcuacgugacaugugaua

SEQ ID NO: 1164201 - RNA, 19 nt, Artificial Sequence
  Description of Artificial Sequence: Synthetic oligonucleotide
  Antisense strand to SEQ ID NO: 1164200
uaucacaugucacguagcc

SEQ ID NO: 1164202 - RNA, 19 nt, Artificial Sequence
  Description of Artificial Sequence: Synthetic oligonucleotide
  Sense strand starting at position 2713 of SEQ ID NO: 916534
cuacgugacaugugauaag

SEQ ID NO: 1164203 - RNA, 19 nt, Artificial Sequence
  Description of Artificial Sequence: Synthetic oligonucleotide
  Antisense strand to SEQ ID NO: 1164202
cuuaucacaugucacguag

SEQ ID NO: 1164204 - RNA, 19 nt, Artificial Sequence
  Description of Artificial Sequence: Synthetic oligonucleotide
  Sense strand starting at position 2765 of SEQ ID NO: 916534
uccagucaucugcgguuaa

SEQ ID NO: 1164205 - RNA, 19 nt, Artificial Sequence
  Description of Artificial Sequence: Synthetic oligonucleotide
  Antisense strand to SEQ ID NO: 1164204
uuaaccgcagaugacugga

SEQ ID NO: 1164206 - RNA, 19 nt, Artificial Sequence
  Description of Artificial Sequence: Synthetic oligonucleotide
  Sense strand starting at position 2769 of SEQ ID NO: 916534
gucaucugcgguuaaacca

SEQ ID NO: 1164207 - RNA, 19 nt, Artificial Sequence
  Description of Artificial Sequence: Synthetic oligonucleotide
  Antisense strand to SEQ ID NO: 1164206
ugguuuaaccgcagaugac

SEQ ID NO: 1164208 - RNA, 19 nt, Artificial Sequence
  Description of Artificial Sequence: Synthetic oligonucleotide
  Sense strand starting at position 2776 of SEQ ID NO: 916534
gcgguuaaaccagacguua

SEQ ID NO: 1164209 - RNA, 19 nt, Artificial Sequence
  Description of Artificial Sequence: Synthetic oligonucleotide
  Antisense strand to SEQ ID NO: 1164208
uaacgucugguuuaaccgc

SEQ ID NO: 1164210 - RNA, 19 nt, Artificial Sequence
  Description of Artificial Sequence: Synthetic oligonucleotide
  Sense strand starting at position 2778 of SEQ ID NO: 916534
gguuaaaccagacguuaaa

SEQ ID NO: 1164211 - RNA, 19 nt, Artificial Sequence
  Description of Artificial Sequence: Synthetic oligonucleotide
  Antisense strand to SEQ ID NO: 1164210
uuuaacgucugguuuaacc

SEQ ID NO: 1164212 - RNA, 19 nt, Artificial Sequence
  Description of Artificial Sequence: Synthetic oligonucleotide
  Sense strand starting at position 3100 of SEQ ID NO: 916534
gcaacuuuaucuuccguuu

SEQ ID NO: 1164213 - RNA, 19 nt, Artificial Sequence
  Description of Artificial Sequence: Synthetic oligonucleotide
  Antisense strand to SEQ ID NO: 1164212
aaacggaagauaaaguugc

SEQ ID NO: 1164214 - RNA, 19 nt, Artificial Sequence
  Description of Artificial Sequence: Synthetic oligonucleotide
  Sense strand starting at position 3187 of SEQ ID NO: 916534
ugcagacgacucuguuuau

SEQ ID NO: 1164215 - RNA, 19 nt, Artificial Sequence
  Description of Artificial Sequence: Synthetic oligonucleotide
  Antisense strand to SEQ ID NO: 1164214
auaaacagagucgucugca

SEQ ID NO: 1164216 - RNA, 19 nt, Artificial Sequence
  Description of Artificial Sequence: Synthetic oligonucleotide
  Sense strand starting at position 3188 of SEQ ID NO: 916534
gcagacgacucuguuuauu

SEQ ID NO: 1164217 - RNA, 19 nt, Artificial Sequence
  Description of Artificial Sequence: Synthetic oligonucleotide
  Antisense strand to SEQ ID NO: 1164216
aauaaacagagucgucugc

SEQ ID NO: 1164218 - RNA, 19 nt, Artificial Sequence
  Description of Artificial Sequence: Synthetic oligonucleotide
  Sense strand starting at position 3227 of SEQ ID NO: 916534
auacaauuccuuuguuguu

SEQ ID NO: 1164219 - RNA, 19 nt, Artificial Sequence
  Description of Artificial Sequence: Synthetic oligonucleotide
  Antisense strand to SEQ ID NO: 1164218
aacaacaaaggaauuguau

SEQ ID NO: 1164220 - RNA, 19 nt, Artificial Sequence
  Description of Artificial Sequence: Synthetic oligonucleotide
  Sense strand starting at position 3233 of SEQ ID NO: 916534
uuccuuuguuguucucaua

SEQ ID NO: 1164221 - RNA, 19 nt, Artificial Sequence
  Description of Artificial Sequence: Synthetic oligonucleotide
  Antisense strand to SEQ ID NO: 1164220
uaugagaacaacaaaggaa

SEQ ID NO: 1164222 - RNA, 19 nt, Artificial Sequence
  Description of Artificial Sequence: Synthetic oligonucleotide
  Sense strand starting at position 3353 of SEQ ID NO: 916534
guagaccagugcucaguuu

SEQ ID NO: 1164223 - RNA, 19 nt, Artificial Sequence
  Description of Artificial Sequence: Synthetic oligonucleotide
  Antisense strand to SEQ ID NO: 1164222
aaacugagcacuggucuac

SEQ ID NO: 1164224 - RNA, 19 nt, Artificial Sequence
  Description of Artificial Sequence: Synthetic oligonucleotide
  Sense strand starting at position 3359 of SEQ ID NO: 916534
cagugcucaguuugaacau

SEQ ID NO: 1164225 - RNA, 19 nt, Artificial Sequence
  Description of Artificial Sequence: Synthetic oligonucleotide
  Antisense strand to SEQ ID NO: 1164224
auguucaaacugagcacug

SEQ ID NO: 1164226 - RNA, 19 nt, Artificial Sequence
  Description of Artificial Sequence: Synthetic oligonucleotide
  Sense strand starting at position 3442 of SEQ ID NO: 916534
gaugcaagguaauuagcau

SEQ ID NO: 1164227 - RNA, 19 nt, Artificial Sequence
  Description of Artificial Sequence: Synthetic oligonucleotide
  Antisense strand to SEQ ID NO: 1164226
augcuaauuaccuugcauc

SEQ ID NO: 1164228 - RNA, 19 nt, Artificial Sequence
  Description of Artificial Sequence: Synthetic oligonucleotide
  Sense strand starting at position 3511 of SEQ ID NO: 916534
agcagaauuucugagacaa

SEQ ID NO: 1164229 - RNA, 19 nt, Artificial Sequence
  Description of Artificial Sequence: Synthetic oligonucleotide
  Antisense strand to SEQ ID NO: 1164228
uugucucagaaauucugcu

SEQ ID NO: 1164230 - RNA, 19 nt, Artificial Sequence
  Description of Artificial Sequence: Synthetic oligonucleotide
  Sense strand starting at position 3648 of SEQ ID NO: 916534
ccuauaacuuagguguuau

SEQ ID NO: 1164231 - RNA, 19 nt, Artificial Sequence
  Description of Artificial Sequence: Synthetic oligonucleotide
  Antisense strand to SEQ ID NO: 1164230
auaacaccuaaguuauagg

SEQ ID NO: 1164232 - RNA, 19 nt, Artificial Sequence
  Description of Artificial Sequence: Synthetic oligonucleotide
  Sense strand starting at position 3658 of SEQ ID NO: 916534
agguguuaucauuaccagu

SEQ ID NO: 1164233 - RNA, 19 nt, Artificial Sequence
  Description of Artificial Sequence: Synthetic oligonucleotide
  Antisense strand to SEQ ID NO: 1164232
acugguaaugauaacaccu

SEQ ID NO: 1164234 - RNA, 19 nt, Artificial Sequence
  Description of Artificial Sequence: Synthetic oligonucleotide
  Sense strand starting at position 3660 of SEQ ID NO: 916534
guguuaucauuaccaguac

SEQ ID NO: 1164235 - RNA, 19 nt, Artificial Sequence
  Description of Artificial Sequence: Synthetic oligonucleotide
  Antisense strand to SEQ ID NO: 1164234
guacugguaaugauaacac

SEQ ID NO: 1164236 - RNA, 19 nt, Artificial Sequence
  Description of Artificial Sequence: Synthetic oligonucleotide
  Sense strand starting at position 3722 of SEQ ID NO: 916534
aguguauccuagccaaucu

SEQ ID NO: 1164237 - RNA, 19 nt, Artificial Sequence
  Description of Artificial Sequence: Synthetic oligonucleotide
  Antisense strand to SEQ ID NO: 1164236
agauuggcuaggauacacu

SEQ ID NO: 1164238 - RNA, 19 nt, Artificial Sequence
  Description of Artificial Sequence: Synthetic oligonucleotide
  Sense strand starting at position 3771 of SEQ ID NO: 916534
augcaugccuuuguaauau

SEQ ID NO: 1164239 - RNA, 19 nt, Artificial Sequence
  Description of Artificial Sequence: Synthetic oligonucleotide
  Antisense strand to SEQ ID NO: 1164238
auauuacaaaggcaugcau

SEQ ID NO: 1164240 - RNA, 19 nt, Artificial Sequence
  Description of Artificial Sequence: Synthetic oligonucleotide
  Sense strand starting at position 3795 of SEQ ID NO: 916534
uuugaaccaguuuguaaau

SEQ ID NO: 1164241 - RNA, 19 nt, Artificial Sequence
  Description of Artificial Sequence: Synthetic oligonucleotide
  Antisense strand to SEQ ID NO: 1164240
auuuacaaacugguucaaa

SEQ ID NO: 1164242 - RNA, 19 nt, Artificial Sequence
  Description of Artificial Sequence: Synthetic oligonucleotide
  Sense strand starting at position 3817 of SEQ ID NO: 916534
agucuuugccauuaaaguu

SEQ ID NO: 1164243 - RNA, 19 nt, Artificial Sequence
  Description of Artificial Sequence: Synthetic oligonucleotide
  Antisense strand to SEQ ID NO: 1164242
aacuuuaauggcaaagacu

SEQ ID NO: 1164244 - RNA, 19 nt, Artificial Sequence
  Description of Artificial Sequence: Synthetic oligonucleotide
  Sense strand starting at position 3872 of SEQ ID NO: 916534
auauuuaugucaggcacaa

SEQ ID NO: 1164245 - RNA, 19 nt, Artificial Sequence
  Description of Artificial Sequence: Synthetic oligonucleotide
  Antisense strand to SEQ ID NO: 1164244
uugugccugacauaaauau

SEQ ID NO: 1164246 - RNA, 19 nt, Artificial Sequence
  Description of Artificial Sequence: Synthetic oligonucleotide
  Sense strand starting at position 3889 of SEQ ID NO: 916534
aacuucggacucuggaaau

SEQ ID NO: 1164247 - RNA, 19 nt, Artificial Sequence
  Description of Artificial Sequence: Synthetic oligonucleotide
  Antisense strand to SEQ ID NO: 1164246
auuuccagaguccgaaguu

SEQ ID NO: 1164248 - RNA, 19 nt, Artificial Sequence
  Description of Artificial Sequence: Synthetic oligonucleotide
  Sense strand starting at position 3947 of SEQ ID NO: 916534
gaaguuauggucuagugag

SEQ ID NO: 1164249 - RNA, 19 nt, Artificial Sequence
  Description of Artificial Sequence: Synthetic oligonucleotide
  Antisense strand to SEQ ID NO: 1164248
cucacuagaccauaacuuc

SEQ ID NO: 1164250 - RNA, 19 nt, Artificial Sequence
  Description of Artificial Sequence: Synthetic oligonucleotide
  Sense strand starting at position 3970 of SEQ ID NO: 916534
ggcaaaugauuagagauaa

SEQ ID NO: 1164251 - RNA, 19 nt, Artificial Sequence
  Description of Artificial Sequence: Synthetic oligonucleotide
  Antisense strand to SEQ ID NO: 1164250
uuaucucuaaucauuugcc

SEQ ID NO: 1164252 - RNA, 19 nt, Artificial Sequence
  Description of Artificial Sequence: Synthetic oligonucleotide
  Sense strand starting at position 13 of SEQ ID NO: 916535
agcauuguacagggagaga

SEQ ID NO: 1164253 - RNA, 19 nt, Artificial Sequence
  Description of Artificial Sequence: Synthetic oligonucleotide
  Antisense strand to SEQ ID NO: 1164252
ucucucccuguacaaugcu

SEQ ID NO: 1164254 - RNA, 19 nt, Artificial Sequence
  Description of Artificial Sequence: Synthetic oligonucleotide
  Sense strand starting at position 265 of SEQ ID NO: 916535
ugggaugggcauuguagaa

SEQ ID NO: 1164255 - RNA, 19 nt, Artificial Sequence
  Description of Artificial Sequence: Synthetic oligonucleotide
  Antisense strand to SEQ ID NO: 1164254
uucuacaaugcccauccca

SEQ ID NO: 1164256 - RNA, 19 nt, Artificial Sequence
  Description of Artificial Sequence: Synthetic oligonucleotide
  Sense strand starting at position 458 of SEQ ID NO: 916535
aagugaugcugaguagaau

SEQ ID NO: 1164257 - RNA, 19 nt, Artificial Sequence
  Description of Artificial Sequence: Synthetic oligonucleotide
  Antisense strand to SEQ ID NO: 1164256
auucuacucagcaucacuu

SEQ ID NO: 1164258 - RNA, 19 nt, Artificial Sequence
  Description of Artificial Sequence: Synthetic oligonucleotide
  Sense strand starting at position 459 of SEQ ID NO: 916535
agugaugcugaguagaaug

SEQ ID NO: 1164259 - RNA, 19 nt, Artificial Sequence
  Description of Artificial Sequence: Synthetic oligonucleotide
  Antisense strand to SEQ ID NO: 1164258
cauucuacucagcaucacu

SEQ ID NO: 1164260 - RNA, 19 nt, Artificial Sequence
  Description of Artificial Sequence: Synthetic oligonucleotide
  Sense strand starting at position 528 of SEQ ID NO: 916535
gaucguuaaugaguacaaa

SEQ ID NO: 1164261 - RNA, 19 nt, Artificial Sequence
  Description of Artificial Sequence: Synthetic oligonucleotide
  Antisense strand to SEQ ID NO: 1164260
uuuguacucauuaacgauc

SEQ ID NO: 1164262 - RNA, 19 nt, Artificial Sequence
  Description of Artificial Sequence: Synthetic oligonucleotide
  Sense strand starting at position 592 of SEQ ID NO: 916535
auaggaugauuacugucaa

SEQ ID NO: 1164263 - RNA, 19 nt, Artificial Sequence
  Description of Artificial Sequence: Synthetic oligonucleotide
  Antisense strand to SEQ ID NO: 1164262
uugacaguaaucauccuau

SEQ ID NO: 1164264 - RNA, 19 nt, Artificial Sequence
  Description of Artificial Sequence: Synthetic oligonucleotide
  Sense strand starting at position 673 of SEQ ID NO: 916535
augauaaaugcuuaaggca

SEQ ID NO: 1164265 - RNA, 19 nt, Artificial Sequence
  Description of Artificial Sequence: Synthetic oligonucleotide
  Antisense strand to SEQ ID NO: 1164264
ugccuuaagcauuuaucau

SEQ ID NO: 1164266 - RNA, 19 nt, Artificial Sequence
  Description of Artificial Sequence: Synthetic oligonucleotide
  Sense strand starting at position 739 of SEQ ID NO: 916535
guaucagaaucucucauga

SEQ ID NO: 1164267 - RNA, 19 nt, Artificial Sequence
  Description of Artificial Sequence: Synthetic oligonucleotide
  Antisense strand to SEQ ID NO: 1164266
ucaugagagauucugauac

SEQ ID NO: 1164268 - RNA, 19 nt, Artificial Sequence
  Description of Artificial Sequence: Synthetic oligonucleotide
  Sense strand starting at position 860 of SEQ ID NO: 916535
acaaaugaauccgcaugaa

SEQ ID NO: 1164269 - RNA, 19 nt, Artificial Sequence
  Description of Artificial Sequence: Synthetic oligonucleotide
  Antisense strand to SEQ ID NO: 1164268
uucaugcggauucauuugu

SEQ ID NO: 1164270 - RNA, 19 nt, Artificial Sequence
  Description of Artificial Sequence: Synthetic oligonucleotide
  Sense strand starting at position 928 of SEQ ID NO: 916535
uguaguaugcuuuagaaac

SEQ ID NO: 1164271 - RNA, 19 nt, Artificial Sequence
  Description of Artificial Sequence: Synthetic oligonucleotide
  Antisense strand to SEQ ID NO: 1164270
guuucuaaagcauacuaca

SEQ ID NO: 1164272 - RNA, 19 nt, Artificial Sequence
  Description of Artificial Sequence: Synthetic oligonucleotide
  Sense strand starting at position 1030 of SEQ ID NO: 916535
ucaguuuacaagggaaagu

SEQ ID NO: 1164273 - RNA, 19 nt, Artificial Sequence
  Description of Artificial Sequence: Synthetic oligonucleotide
  Antisense strand to SEQ ID NO: 1164272
acuuucccuuguaaacuga

SEQ ID NO: 1164274 - RNA, 19 nt, Artificial Sequence
  Description of Artificial Sequence: Synthetic oligonucleotide
  Sense strand starting at position 1053 of SEQ ID NO: 916535
auaaaugugcaguaucaag

SEQ ID NO: 1164275 - RNA, 19 nt, Artificial Sequence
  Description of Artificial Sequence: Synthetic oligonucleotide
  Antisense strand to SEQ ID NO: 1164274
cuugauacugcacauuuau

SEQ ID NO: 1164276 - RNA, 19 nt, Artificial Sequence
  Description of Artificial Sequence: Synthetic oligonucleotide
  Sense strand starting at position 1175 of SEQ ID NO: 916535
agugauggugucuauauga

SEQ ID NO: 1164277 - RNA, 19 nt, Artificial Sequence
  Description of Artificial Sequence: Synthetic oligonucleotide
  Antisense strand to SEQ ID NO: 1164276
ucauauagacaccaucacu

SEQ ID NO: 1164278 - RNA, 19 nt, Artificial Sequence
  Description of Artificial Sequence: Synthetic oligonucleotide
  Sense strand starting at position 1233 of SEQ ID NO: 916535
cauacauugcaguauggau

SEQ ID NO: 1164279 - RNA, 19 nt, Artificial Sequence
  Description of Artificial Sequence: Synthetic oligonucleotide
  Antisense strand to SEQ ID NO: 1164278
auccauacugcaauguaug

SEQ ID NO: 1164280 - RNA, 19 nt, Artificial Sequence
  Description of Artificial Sequence: Synthetic oligonucleotide
  Sense strand starting at position 1297 of SEQ ID NO: 916535
uuaguaauagagcaauauc

SEQ ID NO: 1164281 - RNA, 19 nt, Artificial Sequence
  Description of Artificial Sequence: Synthetic oligonucleotide
  Antisense strand to SEQ ID NO: 1164280
gauauugcucuauuacuaa

SEQ ID NO: 1164282 - RNA, 19 nt, Artificial Sequence
  Description of Artificial Sequence: Synthetic oligonucleotide
  Sense strand starting at position 1410 of SEQ ID NO: 916535
cuaagaauacaguguuuac

SEQ ID NO: 1164283 - RNA, 19 nt, Artificial Sequence
  Description of Artificial Sequence: Synthetic oligonucleotide
  Antisense strand to SEQ ID NO: 1164282
guaaacacuguauucuuag

SEQ ID NO: 1164284 - RNA, 19 nt, Artificial Sequence
  Description of Artificial Sequence: Synthetic oligonucleotide
  Sense strand starting at position 1469 of SEQ ID NO: 916535
acauccuuacacugguauu

SEQ ID NO: 1164285 - RNA, 19 nt, Artificial Sequence
  Description of Artificial Sequence: Synthetic oligonucleotide
  Antisense strand to SEQ ID NO: 1164284
aauaccaguguaaggaugu

SEQ ID NO: 1164286 - RNA, 19 nt, Artificial Sequence
  Description of Artificial Sequence: Synthetic oligonucleotide
  Sense strand starting at position 1480 of SEQ ID NO: 916535
cugguauuccucuacuacu

SEQ ID NO: 1164287 - RNA, 19 nt, Artificial Sequence
  Description of Artificial Sequence: Synthetic oligonucleotide
  Antisense strand to SEQ ID NO: 1164286
aguaguagaggaauaccag

SEQ ID NO: 1164288 - RNA, 19 nt, Artificial Sequence
  Description of Artificial Sequence: Synthetic oligonucleotide
  Sense strand starting at position 1553 of SEQ ID NO: 916535
uacacaagucugcagguaa

SEQ ID NO: 1164289 - RNA, 19 nt, Artificial Sequence
  Description of Artificial Sequence: Synthetic oligonucleotide
  Antisense strand to SEQ ID NO: 1164288
uuaccugcagacuugugua

SEQ ID NO: 1164290 - RNA, 19 nt, Artificial Sequence
  Description of Artificial Sequence: Synthetic oligonucleotide
  Sense strand starting at position 2148 of SEQ ID NO: 916535
cucaguaucuaaguaauac

SEQ ID NO: 1164291 - RNA, 19 nt, Artificial Sequence
  Description of Artificial Sequence: Synthetic oligonucleotide
  Antisense strand to SEQ ID NO: 1164290
guauuacuuagauacugag

SEQ ID NO: 1164292 - RNA, 19 nt, Artificial Sequence
  Description of Artificial Sequence: Synthetic oligonucleotide
  Sense strand starting at position 2269 of SEQ ID NO: 916535
aaagcagucugagucugaa

SEQ ID NO: 1164293 - RNA, 19 nt, Artificial Sequence
  Description of Artificial Sequence: Synthetic oligonucleotide
  Antisense strand to SEQ ID NO: 1164292
uucagacucagacugcuuu

SEQ ID NO: 1164294 - RNA, 19 nt, Artificial Sequence
  Description of Artificial Sequence: Synthetic oligonucleotide
  Sense strand starting at position 2279 of SEQ ID NO: 916535
gagucugaacuuugagauu

SEQ ID NO: 1164295 - RNA, 19 nt, Artificial Sequence
  Description of Artificial Sequence: Synthetic oligonucleotide
  Antisense strand to SEQ ID NO: 1164294
aaucucaaaguucagacuc

SEQ ID NO: 1164296 - RNA, 19 nt, Artificial Sequence
  Description of Artificial Sequence: Synthetic oligonucleotide
  Sense strand starting at position 2469 of SEQ ID NO: 916535
ggacauguuaauggccaaa

SEQ ID NO: 1164297 - RNA, 19 nt, Artificial Sequence
  Description of Artificial Sequence: Synthetic oligonucleotide
  Antisense strand to SEQ ID NO: 1164296
uuuggccauuaacaugucc

SEQ ID NO: 1164298 - RNA, 19 nt, Artificial Sequence
  Description of Artificial Sequence: Synthetic oligonucleotide
  Sense strand starting at position 2536 of SEQ ID NO: 916535
aaaguuguuugucugauuu

SEQ ID NO: 1164299 - RNA, 19 nt, Artificial Sequence
  Description of Artificial Sequence: Synthetic oligonucleotide
  Antisense strand to SEQ ID NO: 1164298
aaaucagacaaacaacuuu

SEQ ID NO: 1164300 - RNA, 19 nt, Artificial Sequence
  Description of Artificial Sequence: Synthetic oligonucleotide
  Sense strand starting at position 2543 of SEQ ID NO: 916535
uuugucugauuuccagcua

SEQ ID NO: 1164301 - RNA, 19 nt, Artificial Sequence
  Description of Artificial Sequence: Synthetic oligonucleotide
  Antisense strand to SEQ ID NO: 1164300
uagcuggaaaucagacaaa

SEQ ID NO: 1164302 - RNA, 19 nt, Artificial Sequence
  Description of Artificial Sequence: Synthetic oligonucleotide
  Sense strand starting at position 2602 of SEQ ID NO: 916535
guugcaucccaugaaauca

SEQ ID NO: 1164303 - RNA, 19 nt, Artificial Sequence
  Description of Artificial Sequence: Synthetic oligonucleotide
  Antisense strand to SEQ ID NO: 1164302
ugauuucaugggaugcaac

SEQ ID NO: 1164304 - RNA, 19 nt, Artificial Sequence
  Description of Artificial Sequence: Synthetic oligonucleotide
  Sense strand starting at position 2679 of SEQ ID NO: 916535
agcugccuagguuaugaaa

SEQ ID NO: 1164305 - RNA, 19 nt, Artificial Sequence
  Description of Artificial Sequence: Synthetic oligonucleotide
  Antisense strand to SEQ ID NO: 1164304
uuucauaaccuaggcagcu

SEQ ID NO: 1164306 - RNA, 19 nt, Artificial Sequence
  Description of Artificial Sequence: Synthetic oligonucleotide
  Sense strand starting at position 2719 of SEQ ID NO: 916535
gggcacuaaauauguagua

SEQ ID NO: 1164307 - RNA, 19 nt, Artificial Sequence
  Description of Artificial Sequence: Synthetic oligonucleotide
  Antisense strand to SEQ ID NO: 1164306
uacuacauauuuagugccc

SEQ ID NO: 1164308 - RNA, 19 nt, Artificial Sequence
  Description of Artificial Sequence: Synthetic oligonucleotide
  Sense strand starting at position 2720 of SEQ ID NO: 916535
ggcacuaaauauguaguaa

SEQ ID NO: 1164309 - RNA, 19 nt, Artificial Sequence
  Description of Artificial Sequence: Synthetic oligonucleotide
  Antisense strand to SEQ ID NO: 1164308
uuacuacauauuuagugcc

SEQ ID NO: 1164310 - RNA, 19 nt, Artificial Sequence
  Description of Artificial Sequence: Synthetic oligonucleotide
  Sense strand starting at position 2734 of SEQ ID NO: 916535
aguaaucauuguucccaaa

SEQ ID NO: 1164311 - RNA, 19 nt, Artificial Sequence
  Description of Artificial Sequence: Synthetic oligonucleotide
  Antisense strand to SEQ ID NO: 1164310
uuugggaacaaugauuacu

SEQ ID NO: 1164312 - RNA, 19 nt, Artificial Sequence
  Description of Artificial Sequence: Synthetic oligonucleotide
  Sense strand starting at position 2785 of SEQ ID NO: 916535
gcuaacacuuauguggaau

SEQ ID NO: 1164313 - RNA, 19 nt, Artificial Sequence
  Description of Artificial Sequence: Synthetic oligonucleotide
  Antisense strand to SEQ ID NO: 1164312
auuccacauaaguguuagc

SEQ ID NO: 1164314 - RNA, 19 nt, Artificial Sequence
  Description of Artificial Sequence: Synthetic oligonucleotide
  Sense strand starting at position 2791 of SEQ ID NO: 916535
acuuauguggaauguauua

SEQ ID NO: 1164315 - RNA, 19 nt, Artificial Sequence
  Description of Artificial Sequence: Synthetic oligonucleotide
  Antisense strand to SEQ ID NO: 1164314
uaauacauuccacauaagu

SEQ ID NO: 1164316 - RNA, 19 nt, Artificial Sequence
  Description of Artificial Sequence: Synthetic oligonucleotide
  Sense strand starting at position 2867 of SEQ ID NO: 916535
cucaaaguauaggcauauu

SEQ ID NO: 1164317 - RNA, 19 nt, Artificial Sequence
  Description of Artificial Sequence: Synthetic oligonucleotide
  Antisense strand to SEQ ID NO: 1164316
aauaugccuauacuuugag

SEQ ID NO: 1164318 - RNA, 19 nt, Artificial Sequence
  Description of Artificial Sequence: Synthetic oligonucleotide
  Sense strand starting at position 2910 of SEQ ID NO: 916535
acagcuaugacuuggagac

SEQ ID NO: 1164319 - RNA, 19 nt, Artificial Sequence
  Description of Artificial Sequence: Synthetic oligonucleotide
  Antisense strand to SEQ ID NO: 1164318
gucuccaagucauagcugu

SEQ ID NO: 1164320 - RNA, 19 nt, Artificial Sequence
  Description of Artificial Sequence: Synthetic oligonucleotide
  Sense strand starting at position 2911 of SEQ ID NO: 916535
cagcuaugacuuggagaca

SEQ ID NO: 1164321 - RNA, 19 nt, Artificial Sequence
  Description of Artificial Sequence: Synthetic oligonucleotide
  Antisense strand to SEQ ID NO: 1164320
ugucuccaagucauagcug

SEQ ID NO: 1164322 - RNA, 19 nt, Artificial Sequence
  Description of Artificial Sequence: Synthetic oligonucleotide
  Sense strand starting at position 3152 of SEQ ID NO: 916535
uucuauuucugguuaaagc

SEQ ID NO: 1164323 - RNA, 19 nt, Artificial Sequence
  Description of Artificial Sequence: Synthetic oligonucleotide
  Antisense strand to SEQ ID NO: 1164322
gcuuuaaccagaaauagaa

SEQ ID NO: 1164324 - RNA, 19 nt, Artificial Sequence
  Description of Artificial Sequence: Synthetic oligonucleotide
  Sense strand starting at position 3166 of SEQ ID NO: 916535
aaagcaugucaggaacuuu

SEQ ID NO: 1164325 - RNA, 19 nt, Artificial Sequence
  Description of Artificial Sequence: Synthetic oligonucleotide
  Antisense strand to SEQ ID NO: 1164324
aaaguuccugacaugcuuu

SEQ ID NO: 1164326 - RNA, 19 nt, Artificial Sequence
  Description of Artificial Sequence: Synthetic oligonucleotide
  Sense strand starting at position 3341 of SEQ ID NO: 916535
gguggacacuuaguauaga

SEQ ID NO: 1164327 - RNA, 19 nt, Artificial Sequence
  Description of Artificial Sequence: Synthetic oligonucleotide
  Antisense strand to SEQ ID NO: 1164326
ucuauacuaaguguccacc

SEQ ID NO: 1164328 - RNA, 19 nt, Artificial Sequence
  Description of Artificial Sequence: Synthetic oligonucleotide
  Sense strand starting at position 3489 of SEQ ID NO: 916535
agcaguaauuuauagauga

SEQ ID NO: 1164329 - RNA, 19 nt, Artificial Sequence
  Description of Artificial Sequence: Synthetic oligonucleotide
  Antisense strand to SEQ ID NO: 1164328
ucaucuauaaauuacugcu

SEQ ID NO: 1164330 - RNA, 19 nt, Artificial Sequence
  Description of Artificial Sequence: Synthetic oligonucleotide
  Sense strand starting at position 3537 of SEQ ID NO: 916535
gcugaugcagcauagaaga

SEQ ID NO: 1164331 - RNA, 19 nt, Artificial Sequence
  Description of Artificial Sequence: Synthetic oligonucleotide
  Antisense strand to SEQ ID NO: 1164330
ucuucuaugcugcaucagc

SEQ ID NO: 1164332 - RNA, 19 nt, Artificial Sequence
  Description of Artificial Sequence: Synthetic oligonucleotide
  Sense strand starting at position 145 of SEQ ID NO: 916536
ugucgagcugcugcauuaa

SEQ ID NO: 1164333 - RNA, 19 nt, Artificial Sequence
  Description of Artificial Sequence: Synthetic oligonucleotide
  Antisense strand to SEQ ID NO: 1164332
uuaaugcagcagcucgaca

SEQ ID NO: 1164334 - RNA, 19 nt, Artificial Sequence
  Description of Artificial Sequence: Synthetic oligonucleotide
  Sense strand starting at position 173 of SEQ ID NO: 916536
cuucuuguaggugauaaca

SEQ ID NO: 1164335 - RNA, 19 nt, Artificial Sequence
  Description of Artificial Sequence: Synthetic oligonucleotide
  Antisense strand to SEQ ID NO: 1164334
uguuaucaccuacaagaag

SEQ ID NO: 1164336 - RNA, 19 nt, Artificial Sequence
  Description of Artificial Sequence: Synthetic oligonucleotide
  Sense strand starting at position 263 of SEQ ID NO: 916536
uaaggucagagugguagaa

SEQ ID NO: 1164337 - RNA, 19 nt, Artificial Sequence
  Description of Artificial Sequence: Synthetic oligonucleotide
  Antisense strand to SEQ ID NO: 1164336
uucuaccacucugaccuua

SEQ ID NO: 1164338 - RNA, 19 nt, Artificial Sequence
  Description of Artificial Sequence: Synthetic oligonucleotide
  Sense strand starting at position 384 of SEQ ID NO: 916536
uaugaagucuuucugguaa

SEQ ID NO: 1164339 - RNA, 19 nt, Artificial Sequence
  Description of Artificial Sequence: Synthetic oligonucleotide
  Antisense strand to SEQ ID NO: 1164338
uuaccagaaagacuucaua

SEQ ID NO: 1164340 - RNA, 19 nt, Artificial Sequence
  Description of Artificial Sequence: Synthetic oligonucleotide
  Sense strand starting at position 441 of SEQ ID NO: 916536
gugacugcacuguacauau

SEQ ID NO: 1164341 - RNA, 19 nt, Artificial Sequence
  Description of Artificial Sequence: Synthetic oligonucleotide
  Antisense strand to SEQ ID NO: 1164340
auauguacagugcagucac

SEQ ID NO: 1164342 - RNA, 19 nt, Artificial Sequence
  Description of Artificial Sequence: Synthetic oligonucleotide
  Sense strand starting at position 559 of SEQ ID NO: 916536
aguuaaguccgagacauuc

SEQ ID NO: 1164343 - RNA, 19 nt, Artificial Sequence
  Description of Artificial Sequence: Synthetic oligonucleotide
  Antisense strand to SEQ ID NO: 1164342
gaaugucucggacuuaacu

SEQ ID NO: 1164344 - RNA, 19 nt, Artificial Sequence
  Description of Artificial Sequence: Synthetic oligonucleotide
  Sense strand starting at position 830 of SEQ ID NO: 916536
cagaaaugacaauguagca

SEQ ID NO: 1164345 - RNA, 19 nt, Artificial Sequence
  Description of Artificial Sequence: Synthetic oligonucleotide
  Antisense strand to SEQ ID NO: 1164344
ugcuacauugucauuucug

SEQ ID NO: 1164346 - RNA, 19 nt, Artificial Sequence
  Description of Artificial Sequence: Synthetic oligonucleotide
  Sense strand starting at position 845 of SEQ ID NO: 916536
agcaauuccaugugagaug

SEQ ID NO: 1164347 - RNA, 19 nt, Artificial Sequence
  Description of Artificial Sequence: Synthetic oligonucleotide
  Antisense strand to SEQ ID NO: 1164346
caucucacauggaauugcu

SEQ ID NO: 1164348 - RNA, 19 nt, Artificial Sequence
  Description of Artificial Sequence: Synthetic oligonucleotide
  Sense strand starting at position 856 of SEQ ID NO: 916536
gugagaugguccuuugaaa

SEQ ID NO: 1164349 - RNA, 19 nt, Artificial Sequence
  Description of Artificial Sequence: Synthetic oligonucleotide
  Antisense strand to SEQ ID NO: 1164348
uuucaaaggaccaucucac

SEQ ID NO: 1164350 - RNA, 19 nt, Artificial Sequence
  Description of Artificial Sequence: Synthetic oligonucleotide
  Sense strand starting at position 1254 of SEQ ID NO: 916536
ucuuacgggaucugagauu

SEQ ID NO: 1164351 - RNA, 19 nt, Artificial Sequence
  Description of Artificial Sequence: Synthetic oligonucleotide
  Antisense strand to SEQ ID NO: 1164350
aaucucagaucccguaaga

SEQ ID NO: 1164352 - RNA, 19 nt, Artificial Sequence
  Description of Artificial Sequence: Synthetic oligonucleotide
  Sense strand starting at position 1385 of SEQ ID NO: 916536
aguugcucugaugaucaaa

SEQ ID NO: 1164353 - RNA, 19 nt, Artificial Sequence
  Description of Artificial Sequence: Synthetic oligonucleotide
  Antisense strand to SEQ ID NO: 1164352
uuugaucaucagagcaacu

SEQ ID NO: 1164354 - RNA, 19 nt, Artificial Sequence
  Description of Artificial Sequence: Synthetic oligonucleotide
  Sense strand starting at position 1387 of SEQ ID NO: 916536
uugcucugaugaucaaaca

SEQ ID NO: 1164355 - RNA, 19 nt, Artificial Sequence
  Description of Artificial Sequence: Synthetic oligonucleotide
  Antisense strand to SEQ ID NO: 1164354
uguuugaucaucagagcaa

SEQ ID NO: 1164356 - RNA, 19 nt, Artificial Sequence
  Description of Artificial Sequence: Synthetic oligonucleotide
  Sense strand starting at position 1505 of SEQ ID NO: 916536
gagagaauggucugaucuc

SEQ ID NO: 1164357 - RNA, 19 nt, Artificial Sequence
  Description of Artificial Sequence: Synthetic oligonucleotide
  Antisense strand to SEQ ID NO: 1164356
gagaucagaccauucucuc

SEQ ID NO: 1164358 - RNA, 19 nt, Artificial Sequence
  Description of Artificial Sequence: Synthetic oligonucleotide
  Sense strand starting at position 1603 of SEQ ID NO: 916536
uuauuuauccugugccaag

SEQ ID NO: 1164359 - RNA, 19 nt, Artificial Sequence
  Description of Artificial Sequence: Synthetic oligonucleotide
  Antisense strand to SEQ ID NO: 1164358
cuuggcacaggauaaauaa

SEQ ID NO: 1164360 - RNA, 19 nt, Artificial Sequence
  Description of Artificial Sequence: Synthetic oligonucleotide
  Sense strand starting at position 1614 of SEQ ID NO: 916536
gugccaagucuguuaggcu

SEQ ID NO: 1164361 - RNA, 19 nt, Artificial Sequence
  Description of Artificial Sequence: Synthetic oligonucleotide
  Antisense strand to SEQ ID NO: 1164360
agccuaacagacuuggcac

SEQ ID NO: 1164362 - RNA, 19 nt, Artificial Sequence
  Description of Artificial Sequence: Synthetic oligonucleotide
  Sense strand starting at position 1674 of SEQ ID NO: 916536
ucccaugaggugcauaaua

SEQ ID NO: 1164363 - RNA, 19 nt, Artificial Sequence
  Description of Artificial Sequence: Synthetic oligonucleotide
  Antisense strand to SEQ ID NO: 1164362
uauuaugcaccucauggga

SEQ ID NO: 1164364 - RNA, 19 nt, Artificial Sequence
  Description of Artificial Sequence: Synthetic oligonucleotide
  Sense strand starting at position 1676 of SEQ ID NO: 916536
ccaugaggugcauaauaau

SEQ ID NO: 1164365 - RNA, 19 nt, Artificial Sequence
  Description of Artificial Sequence: Synthetic oligonucleotide
  Antisense strand to SEQ ID NO: 1164364
auuauuaugcaccucaugg

SEQ ID NO: 1164366 - RNA, 19 nt, Artificial Sequence
  Description of Artificial Sequence: Synthetic oligonucleotide
  Sense strand starting at position 1701 of SEQ ID NO: 916536
gaguuuacagagcggaaau

SEQ ID NO: 1164367 - RNA, 19 nt, Artificial Sequence
  Description of Artificial Sequence: Synthetic oligonucleotide
  Antisense strand to SEQ ID NO: 1164366
auuuccgcucuguaaacuc

SEQ ID NO: 1164368 - RNA, 19 nt, Artificial Sequence
  Description of Artificial Sequence: Synthetic oligonucleotide
  Sense strand starting at position 1731 of SEQ ID NO: 916536
aguuaagcgauuugcuuaa

SEQ ID NO: 1164369 - RNA, 19 nt, Artificial Sequence
  Description of Artificial Sequence: Synthetic oligonucleotide
  Antisense strand to SEQ ID NO: 1164368
uuaagcaaaucgcuuaacu

SEQ ID NO: 1164370 - RNA, 19 nt, Artificial Sequence
  Description of Artificial Sequence: Synthetic oligonucleotide
  Sense strand starting at position 1791 of SEQ ID NO: 916536
uuccguugcggaucuguua

SEQ ID NO: 1164371 - RNA, 19 nt, Artificial Sequence
  Description of Artificial Sequence: Synthetic oligonucleotide
  Antisense strand to SEQ ID NO: 1164370
uaacagauccgcaacggaa

SEQ ID NO: 1164372 - RNA, 19 nt, Artificial Sequence
  Description of Artificial Sequence: Synthetic oligonucleotide
  Sense strand starting at position 1797 of SEQ ID NO: 916536
ugcggaucuguuaagcgau

SEQ ID NO: 1164373 - RNA, 19 nt, Artificial Sequence
  Description of Artificial Sequence: Synthetic oligonucleotide
  Antisense strand to SEQ ID NO: 1164372
aucgcuuaacagauccgca

SEQ ID NO: 1164374 - RNA, 19 nt, Artificial Sequence
  Description of Artificial Sequence: Synthetic oligonucleotide
  Sense strand starting at position 1799 of SEQ ID NO: 916536
cggaucuguuaagcgauuu

SEQ ID NO: 1164375 - RNA, 19 nt, Artificial Sequence
  Description of Artificial Sequence: Synthetic oligonucleotide
  Antisense strand to SEQ ID NO: 1164374
aaaucgcuuaacagauccg

SEQ ID NO: 1164376 - RNA, 19 nt, Artificial Sequence
  Description of Artificial Sequence: Synthetic oligonucleotide
  Sense strand starting at position 1800 of SEQ ID NO: 916536
ggaucuguuaagcgauuug

SEQ ID NO: 1164377 - RNA, 19 nt, Artificial Sequence
  Description of Artificial Sequence: Synthetic oligonucleotide
  Antisense strand to SEQ ID NO: 1164376
caaaucgcuuaacagaucc

SEQ ID NO: 1164378 - RNA, 19 nt, Artificial Sequence
  Description of Artificial Sequence: Synthetic oligonucleotide
  Sense strand starting at position 1807 of SEQ ID NO: 916536
uuaagcgauuugcuuaaca

SEQ ID NO: 1164379 - RNA, 19 nt, Artificial Sequence
  Description of Artificial Sequence: Synthetic oligonucleotide
  Antisense strand to SEQ ID NO: 1164378
uguuaagcaaaucgcuuaa

SEQ ID NO: 1164380 - RNA, 19 nt, Artificial Sequence
  Description of Artificial Sequence: Synthetic oligonucleotide
  Sense strand starting at position 1884 of SEQ ID NO: 916536
acuuacuaggccuauugua

SEQ ID NO: 1164381 - RNA, 19 nt, Artificial Sequence
  Description of Artificial Sequence: Synthetic oligonucleotide
  Antisense strand to SEQ ID NO: 1164380
uacaauaggccuaguaagu

SEQ ID NO: 1164382 - RNA, 19 nt, Artificial Sequence
  Description of Artificial Sequence: Synthetic oligonucleotide
  Sense strand starting at position 2008 of SEQ ID NO: 916536
ggcagucaggcugaaauga

SEQ ID NO: 1164383 - RNA, 19 nt, Artificial Sequence
  Description of Artificial Sequence: Synthetic oligonucleotide
  Antisense strand to SEQ ID NO: 1164382
ucauuucagccugacugcc

SEQ ID NO: 1164384 - RNA, 19 nt, Artificial Sequence
  Description of Artificial Sequence: Synthetic oligonucleotide
  Sense strand starting at position 2573 of SEQ ID NO: 916536
uguugugaggcacagagaa

SEQ ID NO: 1164385 - RNA, 19 nt, Artificial Sequence
  Description of Artificial Sequence: Synthetic oligonucleotide
  Antisense strand to SEQ ID NO: 1164384
uucucugugccucacaaca

SEQ ID NO: 1164386 - RNA, 19 nt, Artificial Sequence
  Description of Artificial Sequence: Synthetic oligonucleotide
  Sense strand starting at position 2586 of SEQ ID NO: 916536
agagaaagggcuuggucau

SEQ ID NO: 1164387 - RNA, 19 nt, Artificial Sequence
  Description of Artificial Sequence: Synthetic oligonucleotide
  Antisense strand to SEQ ID NO: 1164386
augaccaagcccuuucucu

SEQ ID NO: 1164388 - RNA, 19 nt, Artificial Sequence
  Description of Artificial Sequence: Synthetic oligonucleotide
  Sense strand starting at position 2587 of SEQ ID NO: 916536
gagaaagggcuuggucauu

SEQ ID NO: 1164389 - RNA, 19 nt, Artificial Sequence
  Description of Artificial Sequence: Synthetic oligonucleotide
  Antisense strand to SEQ ID NO: 1164388
aaugaccaagcccuuucuc

SEQ ID NO: 1164390 - RNA, 19 nt, Artificial Sequence
  Description of Artificial Sequence: Synthetic oligonucleotide
  Sense strand starting at position 2702 of SEQ ID NO: 916536
gggaaucuuagcgacgagu

SEQ ID NO: 1164391 - RNA, 19 nt, Artificial Sequence
  Description of Artificial Sequence: Synthetic oligonucleotide
  Antisense strand to SEQ ID NO: 1164390
acucgucgcuaagauuccc

SEQ ID NO: 1164392 - RNA, 19 nt, Artificial Sequence
  Description of Artificial Sequence: Synthetic oligonucleotide
  Sense strand starting at position 2897 of SEQ ID NO: 916536
ggcugucuucgccuuagua

SEQ ID NO: 1164393 - RNA, 19 nt, Artificial Sequence
  Description of Artificial Sequence: Synthetic oligonucleotide
  Antisense strand to SEQ ID NO: 1164392
uacuaaggcgaagacagcc

SEQ ID NO: 1164394 - RNA, 19 nt, Artificial Sequence
  Description of Artificial Sequence: Synthetic oligonucleotide
  Sense strand starting at position 3098 of SEQ ID NO: 916536
ccgauaacugcuucguagu

SEQ ID NO: 1164395 - RNA, 19 nt, Artificial Sequence
  Description of Artificial Sequence: Synthetic oligonucleotide
  Antisense strand to SEQ ID NO: 1164394
acuacgaagcaguuaucgg

SEQ ID NO: 1164396 - RNA, 19 nt, Artificial Sequence
  Description of Artificial Sequence: Synthetic oligonucleotide
  Sense strand starting at position 3166 of SEQ ID NO: 916536
ccuagauugaucgguauaa

SEQ ID NO: 1164397 - RNA, 19 nt, Artificial Sequence
  Description of Artificial Sequence: Synthetic oligonucleotide
  Antisense strand to SEQ ID NO: 1164396
uuauaccgaucaaucuagg

SEQ ID NO: 1164398 - RNA, 19 nt, Artificial Sequence
  Description of Artificial Sequence: Synthetic oligonucleotide
  Sense strand starting at position 3167 of SEQ ID NO: 916536
cuagauugaucgguauaag

SEQ ID NO: 1164399 - RNA, 19 nt, Artificial Sequence
  Description of Artificial Sequence: Synthetic oligonucleotide
  Antisense strand to SEQ ID NO: 1164398
cuuauaccgaucaaucuag

SEQ ID NO: 1164400 - RNA, 19 nt, Artificial Sequence
  Description of Artificial Sequence: Synthetic oligonucleotide
  Sense strand starting at position 3170 of SEQ ID NO: 916536
gauugaucgguauaaggcu

SEQ ID NO: 1164401 - RNA, 19 nt, Artificial Sequence
  Description of Artificial Sequence: Synthetic oligonucleotide
  Antisense strand to SEQ ID NO: 1164400
agccuuauaccgaucaauc

SEQ ID NO: 1164402 - RNA, 19 nt, Artificial Sequence
  Description of Artificial Sequence: Synthetic oligonucleotide
  Sense strand starting at position 3234 of SEQ ID NO: 916536
ggccauguucggaguguau

SEQ ID NO: 1164403 - RNA, 19 nt, Artificial Sequence
  Description of Artificial Sequence: Synthetic oligonucleotide
  Antisense strand to SEQ ID NO: 1164402
auacacuccgaacauggcc

SEQ ID NO: 1164404 - RNA, 19 nt, Artificial Sequence
  Description of Artificial Sequence: Synthetic oligonucleotide
  Sense strand starting at position 3261 of SEQ ID NO: 916536
cgggauccuggguaagacu

SEQ ID NO: 1164405 - RNA, 19 nt, Artificial Sequence
  Description of Artificial Sequence: Synthetic oligonucleotide
  Antisense strand to SEQ ID NO: 1164404
agucuuacccaggaucccg

SEQ ID NO: 1164406 - RNA, 19 nt, Artificial Sequence
  Description of Artificial Sequence: Synthetic oligonucleotide
  Sense strand starting at position 3268 of SEQ ID NO: 916536
cuggguaagacuugaccuu

SEQ ID NO: 1164407 - RNA, 19 nt, Artificial Sequence
  Description of Artificial Sequence: Synthetic oligonucleotide
  Antisense strand to SEQ ID NO: 1164406
aaggucaagucuuacccag

SEQ ID NO: 1164408 - RNA, 19 nt, Artificial Sequence
  Description of Artificial Sequence: Synthetic oligonucleotide
  Sense strand starting at position 3358 of SEQ ID NO: 916536
uacugugcucaauaguaag

SEQ ID NO: 1164409 - RNA, 19 nt, Artificial Sequence
  Description of Artificial Sequence: Synthetic oligonucleotide
  Antisense strand to SEQ ID NO: 1164408
cuuacuauugagcacagua

SEQ ID NO: 1164410 - RNA, 19 nt, Artificial Sequence
  Description of Artificial Sequence: Synthetic oligonucleotide
  Sense strand starting at position 3530 of SEQ ID NO: 916536
ugugcuauuguucuguacu

SEQ ID NO: 1164411 - RNA, 19 nt, Artificial Sequence
  Description of Artificial Sequence: Synthetic oligonucleotide
  Antisense strand to SEQ ID NO: 1164410
aguacagaacaauagcaca

SEQ ID NO: 1164412 - RNA, 19 nt, Artificial Sequence
  Description of Artificial Sequence: Synthetic oligonucleotide
  Sense strand starting at position 150 of SEQ ID NO: 916537
gagagcucacccgaaauuc

SEQ ID NO: 1164413 - RNA, 19 nt, Artificial Sequence
  Description of Artificial Sequence: Synthetic oligonucleotide
  Antisense strand to SEQ ID NO: 1164412
gaauuucgggugagcucuc

SEQ ID NO: 1164414 - RNA, 19 nt, Artificial Sequence
  Description of Artificial Sequence: Synthetic oligonucleotide
  Sense strand starting at position 316 of SEQ ID NO: 916537
caagaagaacagugguuau

SEQ ID NO: 1164415 - RNA, 19 nt, Artificial Sequence
  Description of Artificial Sequence: Synthetic oligonucleotide
  Antisense strand to SEQ ID NO: 1164414
auaaccacuguucuucuug

SEQ ID NO: 1164416 - RNA, 19 nt, Artificial Sequence
  Description of Artificial Sequence: Synthetic oligonucleotide
  Sense strand starting at position 686 of SEQ ID NO: 916537
gaaauauacugacagagga

SEQ ID NO: 1164417 - RNA, 19 nt, Artificial Sequence
  Description of Artificial Sequence: Synthetic oligonucleotide
  Antisense strand to SEQ ID NO: 1164416
uccucugucaguauauuuc

SEQ ID NO: 1164418 - RNA, 19 nt, Artificial Sequence
  Description of Artificial Sequence: Synthetic oligonucleotide
  Sense strand starting at position 724 of SEQ ID NO: 916537
cucugaaggucuuuaaaca

SEQ ID NO: 1164419 - RNA, 19 nt, Artificial Sequence
  Description of Artificial Sequence: Synthetic oligonucleotide
  Antisense strand to SEQ ID NO: 1164418
uguuuaaagaccuucagag

SEQ ID NO: 1164420 - RNA, 19 nt, Artificial Sequence
  Description of Artificial Sequence: Synthetic oligonucleotide
  Sense strand starting at position 742 of SEQ ID NO: 916537
aaaggagauugucuaucua

SEQ ID NO: 1164421 - RNA, 19 nt, Artificial Sequence
  Description of Artificial Sequence: Synthetic oligonucleotide
  Antisense strand to SEQ ID NO: 1164420
uagauagacaaucuccuuu

SEQ ID NO: 1164422 - RNA, 19 nt, Artificial Sequence
  Description of Artificial Sequence: Synthetic oligonucleotide
  Sense strand starting at position 746 of SEQ ID NO: 916537
gagauugucuaucuaggua

SEQ ID NO: 1164423 - RNA, 19 nt, Artificial Sequence
  Description of Artificial Sequence: Synthetic oligonucleotide
  Antisense strand to SEQ ID NO: 1164422
uaccuagauagacaaucuc

SEQ ID NO: 1164424 - RNA, 19 nt, Artificial Sequence
  Description of Artificial Sequence: Synthetic oligonucleotide
  Sense strand starting at position 749 of SEQ ID NO: 916537
auugucuaucuagguagaa

SEQ ID NO: 1164425 - RNA, 19 nt, Artificial Sequence
  Description of Artificial Sequence: Synthetic oligonucleotide
  Antisense strand to SEQ ID NO: 1164424
uucuaccuagauagacaau

SEQ ID NO: 1164426 - RNA, 19 nt, Artificial Sequence
  Description of Artificial Sequence: Synthetic oligonucleotide
  Sense strand starting at position 750 of SEQ ID NO: 916537
uugucuaucuagguagaau

SEQ ID NO: 1164427 - RNA, 19 nt, Artificial Sequence
  Description of Artificial Sequence: Synthetic oligonucleotide
  Antisense strand to SEQ ID NO: 1164426
auucuaccuagauagacaa

SEQ ID NO: 1164428 - RNA, 19 nt, Artificial Sequence
  Description of Artificial Sequence: Synthetic oligonucleotide
  Sense strand starting at position 751 of SEQ ID NO: 916537
ugucuaucuagguagaaug

SEQ ID NO: 1164429 - RNA, 19 nt, Artificial Sequence
  Description of Artificial Sequence: Synthetic oligonucleotide
  Antisense strand to SEQ ID NO: 1164428
cauucuaccuagauagaca

SEQ ID NO: 1164430 - RNA, 19 nt, Artificial Sequence
  Description of Artificial Sequence: Synthetic oligonucleotide
  Sense strand starting at position 773 of SEQ ID NO: 916537
gcaugugauccugacuaga

SEQ ID NO: 1164431 - RNA, 19 nt, Artificial Sequence
  Description of Artificial Sequence: Synthetic oligonucleotide
  Antisense strand to SEQ ID NO: 1164430
ucuagucaggaucacaugc

SEQ ID NO: 1164432 - RNA, 19 nt, Artificial Sequence
  Description of Artificial Sequence: Synthetic oligonucleotide
  Sense strand starting at position 775 of SEQ ID NO: 916537
augugauccugacuagaua

SEQ ID NO: 1164433 - RNA, 19 nt, Artificial Sequence
  Description of Artificial Sequence: Synthetic oligonucleotide
  Antisense strand to SEQ ID NO: 1164432
uaucuagucaggaucacau

SEQ ID NO: 1164434 - RNA, 19 nt, Artificial Sequence
  Description of Artificial Sequence: Synthetic oligonucleotide
  Sense strand starting at position 886 of SEQ ID NO: 916537
gcuacaaagaugggugaaa

SEQ ID NO: 1164435 - RNA, 19 nt, Artificial Sequence
  Description of Artificial Sequence: Synthetic oligonucleotide
  Antisense strand to SEQ ID NO: 1164434
uuucacccaucuuuguagc

SEQ ID NO: 1164436 - RNA, 19 nt, Artificial Sequence
  Description of Artificial Sequence: Synthetic oligonucleotide
  Sense strand starting at position 913 of SEQ ID NO: 916537
guuaacauuuaauaaggga

SEQ ID NO: 1164437 - RNA, 19 nt, Artificial Sequence
  Description of Artificial Sequence: Synthetic oligonucleotide
  Antisense strand to SEQ ID NO: 1164436
ucccuuauuaaauguuaac

SEQ ID NO: 1164438 - RNA, 19 nt, Artificial Sequence
  Description of Artificial Sequence: Synthetic oligonucleotide
  Sense strand starting at position 1103 of SEQ ID NO: 916537
ccagcuuaugcuggaagaa

SEQ ID NO: 1164439 - RNA, 19 nt, Artificial Sequence
  Description of Artificial Sequence: Synthetic oligonucleotide
  Antisense strand to SEQ ID NO: 1164438
uucuuccagcauaagcugg

SEQ ID NO: 1164440 - RNA, 19 nt, Artificial Sequence
  Description of Artificial Sequence: Synthetic oligonucleotide
  Sense strand starting at position 1104 of SEQ ID NO: 916537
cagcuuaugcuggaagaau

SEQ ID NO: 1164441 - RNA, 19 nt, Artificial Sequence
  Description of Artificial Sequence: Synthetic oligonucleotide
  Antisense strand to SEQ ID NO: 1164440
auucuuccagcauaagcug

SEQ ID NO: 1164442 - RNA, 19 nt, Artificial Sequence
  Description of Artificial Sequence: Synthetic oligonucleotide
  Sense strand starting at position 1507 of SEQ ID NO: 916537
cucauaaucugucuuagga

SEQ ID NO: 1164443 - RNA, 19 nt, Artificial Sequence
  Description of Artificial Sequence: Synthetic oligonucleotide
  Antisense strand to SEQ ID NO: 1164442
uccuaagacagauuaugag

SEQ ID NO: 1164444 - RNA, 19 nt, Artificial Sequence
  Description of Artificial Sequence: Synthetic oligonucleotide
  Sense strand starting at position 1884 of SEQ ID NO: 916537
gcauaagaguaggucaaga

SEQ ID NO: 1164445 - RNA, 19 nt, Artificial Sequence
  Description of Artificial Sequence: Synthetic oligonucleotide
  Antisense strand to SEQ ID NO: 1164444
ucuugaccuacucuuaugc

SEQ ID NO: 1164446 - RNA, 19 nt, Artificial Sequence
  Description of Artificial Sequence: Synthetic oligonucleotide
  Sense strand starting at position 1926 of SEQ ID NO: 916537
aguaucuaagagcgaaaua

SEQ ID NO: 1164447 - RNA, 19 nt, Artificial Sequence
  Description of Artificial Sequence: Synthetic oligonucleotide
  Antisense strand to SEQ ID NO: 1164446
uauuucgcucuuagauacu

SEQ ID NO: 1164448 - RNA, 19 nt, Artificial Sequence
  Description of Artificial Sequence: Synthetic oligonucleotide
  Sense strand starting at position 1927 of SEQ ID NO: 916537
guaucuaagagcgaaauaa

SEQ ID NO: 1164449 - RNA, 19 nt, Artificial Sequence
  Description of Artificial Sequence: Synthetic oligonucleotide
  Antisense strand to SEQ ID NO: 1164448
uuauuucgcucuuagauac

SEQ ID NO: 1164450 - RNA, 19 nt, Artificial Sequence
  Description of Artificial Sequence: Synthetic oligonucleotide
  Sense strand starting at position 2066 of SEQ ID NO: 916537
ggaguuagacuuuguacaa

SEQ ID NO: 1164451 - RNA, 19 nt, Artificial Sequence
  Description of Artificial Sequence: Synthetic oligonucleotide
  Antisense strand to SEQ ID NO: 1164450
uuguacaaagucuaacucc

SEQ ID NO: 1164452 - RNA, 19 nt, Artificial Sequence
  Description of Artificial Sequence: Synthetic oligonucleotide
  Sense strand starting at position 2067 of SEQ ID NO: 916537
gaguuagacuuuguacaag

SEQ ID NO: 1164453 - RNA, 19 nt, Artificial Sequence
  Description of Artificial Sequence: Synthetic oligonucleotide
  Antisense strand to SEQ ID NO: 1164452
cuuguacaaagucuaacuc

SEQ ID NO: 1164454 - RNA, 19 nt, Artificial Sequence
  Description of Artificial Sequence: Synthetic oligonucleotide
  Sense strand starting at position 2113 of SEQ ID NO: 916537
guaaguaucuuaucccaaa

SEQ ID NO: 1164455 - RNA, 19 nt, Artificial Sequence
  Description of Artificial Sequence: Synthetic oligonucleotide
  Antisense strand to SEQ ID NO: 1164454
uuugggauaagauacuuac

SEQ ID NO: 1164456 - RNA, 19 nt, Artificial Sequence
  Description of Artificial Sequence: Synthetic oligonucleotide
  Sense strand starting at position 2600 of SEQ ID NO: 916537
uuggaauaccacuguuguu

SEQ ID NO: 1164457 - RNA, 19 nt, Artificial Sequence
  Description of Artificial Sequence: Synthetic oligonucleotide
  Antisense strand to SEQ ID NO: 1164456
aacaacagugguauuccaa

SEQ ID NO: 1164458 - RNA, 19 nt, Artificial Sequence
  Description of Artificial Sequence: Synthetic oligonucleotide
  Sense strand starting at position 2746 of SEQ ID NO: 916537
uguauaaucugagugauua

SEQ ID NO: 1164459 - RNA, 19 nt, Artificial Sequence
  Description of Artificial Sequence: Synthetic oligonucleotide
  Antisense strand to SEQ ID NO: 1164458
uaaucacucagauuauaca

SEQ ID NO: 1164460 - RNA, 19 nt, Artificial Sequence
  Description of Artificial Sequence: Synthetic oligonucleotide
  Sense strand starting at position 2747 of SEQ ID NO: 916537
guauaaucugagugauuau

SEQ ID NO: 1164461 - RNA, 19 nt, Artificial Sequence
  Description of Artificial Sequence: Synthetic oligonucleotide
  Antisense strand to SEQ ID NO: 1164460
auaaucacucagauuauac

SEQ ID NO: 1164462 - RNA, 19 nt, Artificial Sequence
  Description of Artificial Sequence: Synthetic oligonucleotide
  Sense strand starting at position 2750 of SEQ ID NO: 916537
uaaucugagugauuaugua

SEQ ID NO: 1164463 - RNA, 19 nt, Artificial Sequence
  Description of Artificial Sequence: Synthetic oligonucleotide
  Antisense strand to SEQ ID NO: 1164462
uacauaaucacucagauua

SEQ ID NO: 1164464 - RNA, 19 nt, Artificial Sequence
  Description of Artificial Sequence: Synthetic oligonucleotide
  Sense strand starting at position 2754 of SEQ ID NO: 916537
cugagugauuauguagauu

SEQ ID NO: 1164465 - RNA, 19 nt, Artificial Sequence
  Description of Artificial Sequence: Synthetic oligonucleotide
  Antisense strand to SEQ ID NO: 1164464
aaucuacauaaucacucag

SEQ ID NO: 1164466 - RNA, 19 nt, Artificial Sequence
  Description of Artificial Sequence: Synthetic oligonucleotide
  Sense strand starting at position 2766 of SEQ ID NO: 916537
guagauuauagucagugga

SEQ ID NO: 1164467 - RNA, 19 nt, Artificial Sequence
  Description of Artificial Sequence: Synthetic oligonucleotide
  Antisense strand to SEQ ID NO: 1164466
uccacugacuauaaucuac

SEQ ID NO: 1164468 - RNA, 19 nt, Artificial Sequence
  Description of Artificial Sequence: Synthetic oligonucleotide
  Sense strand starting at position 2768 of SEQ ID NO: 916537
agauuauagucaguggaaa

SEQ ID NO: 1164469 - RNA, 19 nt, Artificial Sequence
  Description of Artificial Sequence: Synthetic oligonucleotide
  Antisense strand to SEQ ID NO: 1164468
uuuccacugacuauaaucu

SEQ ID NO: 1164470 - RNA, 19 nt, Artificial Sequence
  Description of Artificial Sequence: Synthetic oligonucleotide
  Sense strand starting at position 2846 of SEQ ID NO: 916537
ccuauuauuguuggaauaa

SEQ ID NO: 1164471 - RNA, 19 nt, Artificial Sequence
  Description of Artificial Sequence: Synthetic oligonucleotide
  Antisense strand to SEQ ID NO: 1164470
uuauuccaacaauaauagg

SEQ ID NO: 1164472 - RNA, 19 nt, Artificial Sequence
  Description of Artificial Sequence: Synthetic oligonucleotide
  Sense strand starting at position 2856 of SEQ ID NO: 916537
uuggaauaaucaguacuag

SEQ ID NO: 1164473 - RNA, 19 nt, Artificial Sequence
  Description of Artificial Sequence: Synthetic oligonucleotide
  Antisense strand to SEQ ID NO: 1164472
cuaguacugauuauuccaa

SEQ ID NO: 1164474 - RNA, 19 nt, Artificial Sequence
  Description of Artificial Sequence: Synthetic oligonucleotide
  Sense strand starting at position 2888 of SEQ ID NO: 916537
gcuuaccuucuugauguua

SEQ ID NO: 1164475 - RNA, 19 nt, Artificial Sequence
  Description of Artificial Sequence: Synthetic oligonucleotide
  Antisense strand to SEQ ID NO: 1164474
uaacaucaagaagguaagc

SEQ ID NO: 1164476 - RNA, 19 nt, Artificial Sequence
  Description of Artificial Sequence: Synthetic oligonucleotide
  Sense strand starting at position 3125 of SEQ ID NO: 916537
auuggcucaugggugaaau

SEQ ID NO: 1164477 - RNA, 19 nt, Artificial Sequence
  Description of Artificial Sequence: Synthetic oligonucleotide
  Antisense strand to SEQ ID NO: 1164476
auuucacccaugagccaau

SEQ ID NO: 1164478 - RNA, 19 nt, Artificial Sequence
  Description of Artificial Sequence: Synthetic oligonucleotide
  Sense strand starting at position 3126 of SEQ ID NO: 916537
uuggcucaugggugaaauc

SEQ ID NO: 1164479 - RNA, 19 nt, Artificial Sequence
  Description of Artificial Sequence: Synthetic oligonucleotide
  Antisense strand to SEQ ID NO: 1164478
gauuucacccaugagccaa

SEQ ID NO: 1164480 - RNA, 19 nt, Artificial Sequence
  Description of Artificial Sequence: Synthetic oligonucleotide
  Sense strand starting at position 3127 of SEQ ID NO: 916537
uggcucaugggugaaauca

SEQ ID NO: 1164481 - RNA, 19 nt, Artificial Sequence
  Description of Artificial Sequence: Synthetic oligonucleotide
  Antisense strand to SEQ ID NO: 1164480
ugauuucacccaugagcca

SEQ ID NO: 1164482 - RNA, 19 nt, Artificial Sequence
  Description of Artificial Sequence: Synthetic oligonucleotide
  Sense strand starting at position 3139 of SEQ ID NO: 916537
gaaaucagucauuauggcu

SEQ ID NO: 1164483 - RNA, 19 nt, Artificial Sequence
  Description of Artificial Sequence: Synthetic oligonucleotide
  Antisense strand to SEQ ID NO: 1164482
agccauaaugacugauuuc

SEQ ID NO: 1164484 - RNA, 19 nt, Artificial Sequence
  Description of Artificial Sequence: Synthetic oligonucleotide
  Sense strand starting at position 3484 of SEQ ID NO: 916537
agcuguaagcuagauaaac

SEQ ID NO: 1164485 - RNA, 19 nt, Artificial Sequence
  Description of Artificial Sequence: Synthetic oligonucleotide
  Antisense strand to SEQ ID NO: 1164484
guuuaucuagcuuacagcu

SEQ ID NO: 1164486 - RNA, 19 nt, Artificial Sequence
  Description of Artificial Sequence: Synthetic oligonucleotide
  Sense strand starting at position 3553 of SEQ ID NO: 916537
auccaagaaugccuaugaa

SEQ ID NO: 1164487 - RNA, 19 nt, Artificial Sequence
  Description of Artificial Sequence: Synthetic oligonucleotide
  Antisense strand to SEQ ID NO: 1164486
uucauaggcauucuuggau

SEQ ID NO: 1164488 - RNA, 19 nt, Artificial Sequence
  Description of Artificial Sequence: Synthetic oligonucleotide
  Sense strand starting at position 3729 of SEQ ID NO: 916537
agcauaagcuccuuaauga

SEQ ID NO: 1164489 - RNA, 19 nt, Artificial Sequence
  Description of Artificial Sequence: Synthetic oligonucleotide
  Antisense strand to SEQ ID NO: 1164488
ucauuaaggagcuuaugcu

SEQ ID NO: 1164490 - RNA, 19 nt, Artificial Sequence
  Description of Artificial Sequence: Synthetic oligonucleotide
  Sense strand starting at position 3730 of SEQ ID NO: 916537
gcauaagcuccuuaaugac

SEQ ID NO: 1164491 - RNA, 19 nt, Artificial Sequence
  Description of Artificial Sequence: Synthetic oligonucleotide
  Antisense strand to SEQ ID NO: 1164490
gucauuaaggagcuuaugc

SEQ ID NO: 1164492 - RNA, 19 nt, Artificial Sequence
  Description of Artificial Sequence: Synthetic oligonucleotide
  Sense strand starting at position 30 of SEQ ID NO: 916538
ccagcuuaugcuggaagaa

SEQ ID NO: 1164493 - RNA, 19 nt, Artificial Sequence
  Description of Artificial Sequence: Synthetic oligonucleotide
  Antisense strand to SEQ ID NO: 1164492
uucuuccagcauaagcugg

SEQ ID NO: 1164494 - RNA, 19 nt, Artificial Sequence
  Description of Artificial Sequence: Synthetic oligonucleotide
  Sense strand starting at position 31 of SEQ ID NO: 916538
cagcuuaugcuggaagaau

SEQ ID NO: 1164495 - RNA, 19 nt, Artificial Sequence
  Description of Artificial Sequence: Synthetic oligonucleotide
  Antisense strand to SEQ ID NO: 1164494
auucuuccagcauaagcug

SEQ ID NO: 1164496 - RNA, 19 nt, Artificial Sequence
  Description of Artificial Sequence: Synthetic oligonucleotide
  Sense strand starting at position 434 of SEQ ID NO: 916538
cucauaaucugucuuagga

SEQ ID NO: 1164497 - RNA, 19 nt, Artificial Sequence
  Description of Artificial Sequence: Synthetic oligonucleotide
  Antisense strand to SEQ ID NO: 1164496
uccuaagacagauuaugag

SEQ ID NO: 1164498 - RNA, 19 nt, Artificial Sequence
  Description of Artificial Sequence: Synthetic oligonucleotide
  Sense strand starting at position 811 of SEQ ID NO: 916538
gcauaagaguaggucaaga

SEQ ID NO: 1164499 - RNA, 19 nt, Artificial Sequence
  Description of Artificial Sequence: Synthetic oligonucleotide
  Antisense strand to SEQ ID NO: 1164498
ucuugaccuacucuuaugc

SEQ ID NO: 1164500 - RNA, 19 nt, Artificial Sequence
  Description of Artificial Sequence: Synthetic oligonucleotide
  Sense strand starting at position 853 of SEQ ID NO: 916538
aguaucuaagagcgaaaua

SEQ ID NO: 1164501 - RNA, 19 nt, Artificial Sequence
  Description of Artificial Sequence: Synthetic oligonucleotide
  Antisense strand to SEQ ID NO: 1164500
uauuucgcucuuagauacu

SEQ ID NO: 1164502 - RNA, 19 nt, Artificial Sequence
  Description of Artificial Sequence: Synthetic oligonucleotide
  Sense strand starting at position 854 of SEQ ID NO: 916538
guaucuaagagcgaaauaa

SEQ ID NO: 1164503 - RNA, 19 nt, Artificial Sequence
  Description of Artificial Sequence: Synthetic oligonucleotide
  Antisense strand to SEQ ID NO: 1164502
uuauuucgcucuuagauac

SEQ ID NO: 1164504 - RNA, 19 nt, Artificial Sequence
  Description of Artificial Sequence: Synthetic oligonucleotide
  Sense strand starting at position 993 of SEQ ID NO: 916538
ggaguuagacuuuguacaa

SEQ ID NO: 1164505 - RNA, 19 nt, Artificial Sequence
  Description of Artificial Sequence: Synthetic oligonucleotide
  Antisense strand to SEQ ID NO: 1164504
uuguacaaagucuaacucc

SEQ ID NO: 1164506 - RNA, 19 nt, Artificial Sequence
  Description of Artificial Sequence: Synthetic oligonucleotide
  Sense strand starting at position 994 of SEQ ID NO: 916538
gaguuagacuuuguacaag

SEQ ID NO: 1164507 - RNA, 19 nt, Artificial Sequence
  Description of Artificial Sequence: Synthetic oligonucleotide
  Antisense strand to SEQ ID NO: 1164506
cuuguacaaagucuaacuc

SEQ ID NO: 1164508 - RNA, 19 nt, Artificial Sequence
  Description of Artificial Sequence: Synthetic oligonucleotide
  Sense strand starting at position 1040 of SEQ ID NO: 916538
guaaguaucuuaucccaaa

SEQ ID NO: 1164509 - RNA, 19 nt, Artificial Sequence
  Description of Artificial Sequence: Synthetic oligonucleotide
  Antisense strand to SEQ ID NO: 1164508
uuugggauaagauacuuac

SEQ ID NO: 1164510 - RNA, 19 nt, Artificial Sequence
  Description of Artificial Sequence: Synthetic oligonucleotide
  Sense strand starting at position 1673 of SEQ ID NO: 916538
uguauaaucugagugauua

SEQ ID NO: 1164511 - RNA, 19 nt, Artificial Sequence
  Description of Artificial Sequence: Synthetic oligonucleotide
  Antisense strand to SEQ ID NO: 1164510
uaaucacucagauuauaca

SEQ ID NO: 1164512 - RNA, 19 nt, Artificial Sequence
  Description of Artificial Sequence: Synthetic oligonucleotide
  Sense strand starting at position 1674 of SEQ ID NO: 916538
guauaaucugagugauuau

SEQ ID NO: 1164513 - RNA, 19 nt, Artificial Sequence
  Description of Artificial Sequence: Synthetic oligonucleotide
  Antisense strand to SEQ ID NO: 1164512
auaaucacucagauuauac

SEQ ID NO: 1164514 - RNA, 19 nt, Artificial Sequence
  Description of Artificial Sequence: Synthetic oligonucleotide
  Sense strand starting at position 1677 of SEQ ID NO: 916538
uaaucugagugauuaugua

SEQ ID NO: 1164515 - RNA, 19 nt, Artificial Sequence
  Description of Artificial Sequence: Synthetic oligonucleotide
  Antisense strand to SEQ ID NO: 1164514
uacauaaucacucagauua

SEQ ID NO: 1164516 - RNA, 19 nt, Artificial Sequence
  Description of Artificial Sequence: Synthetic oligonucleotide
  Sense strand starting at position 1681 of SEQ ID NO: 916538
cugagugauuauguagauu

SEQ ID NO: 1164517 - RNA, 19 nt, Artificial Sequence
  Description of Artificial Sequence: Synthetic oligonucleotide
  Antisense strand to SEQ ID NO: 1164516
aaucuacauaaucacucag

SEQ ID NO: 1164518 - RNA, 19 nt, Artificial Sequence
  Description of Artificial Sequence: Synthetic oligonucleotide
  Sense strand starting at position 1693 of SEQ ID NO: 916538
guagauuauagucagugga

SEQ ID NO: 1164519 - RNA, 19 nt, Artificial Sequence
  Description of Artificial Sequence: Synthetic oligonucleotide
  Antisense strand to SEQ ID NO: 1164518
uccacugacuauaaucuac

SEQ ID NO: 1164520 - RNA, 19 nt, Artificial Sequence
  Description of Artificial Sequence: Synthetic oligonucleotide
  Sense strand starting at position 1695 of SEQ ID NO: 916538
agauuauagucaguggaaa

SEQ ID NO: 1164521 - RNA, 19 nt, Artificial Sequence
  Description of Artificial Sequence: Synthetic oligonucleotide
  Antisense strand to SEQ ID NO: 1164520
uuuccacugacuauaaucu

SEQ ID NO: 1164522 - RNA, 19 nt, Artificial Sequence
  Description of Artificial Sequence: Synthetic oligonucleotide
  Sense strand starting at position 1773 of SEQ ID NO: 916538
ccuauuauuguuggaauaa

SEQ ID NO: 1164523 - RNA, 19 nt, Artificial Sequence
  Description of Artificial Sequence: Synthetic oligonucleotide
  Antisense strand to SEQ ID NO: 1164522
uuauuccaacaauaauagg

SEQ ID NO: 1164524 - RNA, 19 nt, Artificial Sequence
  Description of Artificial Sequence: Synthetic oligonucleotide
  Sense strand starting at position 1783 of SEQ ID NO: 916538
uuggaauaaucaguacuag

SEQ ID NO: 1164525 - RNA, 19 nt, Artificial Sequence
  Description of Artificial Sequence: Synthetic oligonucleotide
  Antisense strand to SEQ ID NO: 1164524
cuaguacugauuauuccaa

SEQ ID NO: 1164526 - RNA, 19 nt, Artificial Sequence
  Description of Artificial Sequence: Synthetic oligonucleotide
  Sense strand starting at position 2052 of SEQ ID NO: 916538
auuggcucaugggugaaau

SEQ ID NO: 1164527 - RNA, 19 nt, Artificial Sequence
  Description of Artificial Sequence: Synthetic oligonucleotide
  Antisense strand to SEQ ID NO: 1164526
auuucacccaugagccaau

SEQ ID NO: 1164528 - RNA, 19 nt, Artificial Sequence
  Description of Artificial Sequence: Synthetic oligonucleotide
  Sense strand starting at position 2053 of SEQ ID NO: 916538
uuggcucaugggugaaauc

SEQ ID NO: 1164529 - RNA, 19 nt, Artificial Sequence
  Description of Artificial Sequence: Synthetic oligonucleotide
  Antisense strand to SEQ ID NO: 1164528
gauuucacccaugagccaa

SEQ ID NO: 1164530 - RNA, 19 nt, Artificial Sequence
  Description of Artificial Sequence: Synthetic oligonucleotide
  Sense strand starting at position 2054 of SEQ ID NO: 916538
uggcucaugggugaaauca

SEQ ID NO: 1164531 - RNA, 19 nt, Artificial Sequence
  Description of Artificial Sequence: Synthetic oligonucleotide
  Antisense strand to SEQ ID NO: 1164530
ugauuucacccaugagcca

SEQ ID NO: 1164532 - RNA, 19 nt, Artificial Sequence
  Description of Artificial Sequence: Synthetic oligonucleotide
  Sense strand starting at position 2066 of SEQ ID NO: 916538
gaaaucagucauuauggcu

SEQ ID NO: 1164533 - RNA, 19 nt, Artificial Sequence
  Description of Artificial Sequence: Synthetic oligonucleotide
  Antisense strand to SEQ ID NO: 1164532
agccauaaugacugauuuc

SEQ ID NO: 1164534 - RNA, 19 nt, Artificial Sequence
  Description of Artificial Sequence: Synthetic oligonucleotide
  Sense strand starting at position 2411 of SEQ ID NO: 916538
agcuguaagcuagauaaac

SEQ ID NO: 1164535 - RNA, 19 nt, Artificial Sequence
  Description of Artificial Sequence: Synthetic oligonucleotide
  Antisense strand to SEQ ID NO: 1164534
guuuaucuagcuuacagcu

SEQ ID NO: 1164536 - RNA, 19 nt, Artificial Sequence
  Description of Artificial Sequence: Synthetic oligonucleotide
  Sense strand starting at position 2480 of SEQ ID NO: 916538
auccaagaaugccuaugaa

SEQ ID NO: 1164537 - RNA, 19 nt, Artificial Sequence
  Description of Artificial Sequence: Synthetic oligonucleotide
  Antisense strand to SEQ ID NO: 1164536
uucauaggcauucuuggau

SEQ ID NO: 1164538 - RNA, 19 nt, Artificial Sequence
  Description of Artificial Sequence: Synthetic oligonucleotide
  Sense strand starting at position 2656 of SEQ ID NO: 916538
agcauaagcuccuuaauga

SEQ ID NO: 1164539 - RNA, 19 nt, Artificial Sequence
  Description of Artificial Sequence: Synthetic oligonucleotide
  Antisense strand to SEQ ID NO: 1164538
ucauuaaggagcuuaugcu

SEQ ID NO: 1164540 - RNA, 19 nt, Artificial Sequence
  Description of Artificial Sequence: Synthetic oligonucleotide
  Sense strand starting at position 2657 of SEQ ID NO: 916538
gcauaagcuccuuaaugac

SEQ ID NO: 1164541 - RNA, 19 nt, Artificial Sequence
  Description of Artificial Sequence: Synthetic oligonucleotide
  Antisense strand to SEQ ID NO: 1164540
gucauuaaggagcuuaugc

SEQ ID NO: 1164542 - RNA, 19 nt, Artificial Sequence
  Description of Artificial Sequence: Synthetic oligonucleotide
  Sense strand starting at position 2937 of SEQ ID NO: 916538
aggugauuuacccgccaca

SEQ ID NO: 1164543 - RNA, 19 nt, Artificial Sequence
  Description of Artificial Sequence: Synthetic oligonucleotide
  Antisense strand to SEQ ID NO: 1164542
uguggcggguaaaucaccu

SEQ ID NO: 1164544 - RNA, 19 nt, Artificial Sequence
  Description of Artificial Sequence: Synthetic oligonucleotide
  Sense strand starting at position 3046 of SEQ ID NO: 916538
auuguacuucuacaguaca

SEQ ID NO: 1164545 - RNA, 19 nt, Artificial Sequence
  Description of Artificial Sequence: Synthetic oligonucleotide
  Antisense strand to SEQ ID NO: 1164544
uguacuguagaaguacaau

SEQ ID NO: 1164546 - RNA, 19 nt, Artificial Sequence
  Description of Artificial Sequence: Synthetic oligonucleotide
  Sense strand starting at position 3049 of SEQ ID NO: 916538
guacuucuacaguacauaa

SEQ ID NO: 1164547 - RNA, 19 nt, Artificial Sequence
  Description of Artificial Sequence: Synthetic oligonucleotide
  Antisense strand to SEQ ID NO: 1164546
uuauguacuguagaaguac

SEQ ID NO: 1164548 - RNA, 19 nt, Artificial Sequence
  Description of Artificial Sequence: Synthetic oligonucleotide
  Sense strand starting at position 3071 of SEQ ID NO: 916538
uucucaaaguaguucucaa

SEQ ID NO: 1164549 - RNA, 19 nt, Artificial Sequence
  Description of Artificial Sequence: Synthetic oligonucleotide
  Antisense strand to SEQ ID NO: 1164548
uugagaacuacuuugagaa

SEQ ID NO: 1164550 - RNA, 19 nt, Artificial Sequence
  Description of Artificial Sequence: Synthetic oligonucleotide
  Sense strand starting at position 3078 of SEQ ID NO: 916538
aguaguucucaagaaguac

SEQ ID NO: 1164551 - RNA, 19 nt, Artificial Sequence
  Description of Artificial Sequence: Synthetic oligonucleotide
  Antisense strand to SEQ ID NO: 1164550
guacuucuugagaacuacu

SEQ ID NO: 1164552 - RNA, 19 nt, Artificial Sequence
  Description of Artificial Sequence: Synthetic oligonucleotide
  Sense strand starting at position 3092 of SEQ ID NO: 916538
aguacauaguaauucucaa

SEQ ID NO: 1164553 - RNA, 19 nt, Artificial Sequence
  Description of Artificial Sequence: Synthetic oligonucleotide
  Antisense strand to SEQ ID NO: 1164552
uugagaauuacuauguacu

SEQ ID NO: 1164554 - RNA, 19 nt, Artificial Sequence
  Description of Artificial Sequence: Synthetic oligonucleotide
  Sense strand starting at position 3137 of SEQ ID NO: 916538
ccuggaaacuuguuagaga

SEQ ID NO: 1164555 - RNA, 19 nt, Artificial Sequence
  Description of Artificial Sequence: Synthetic oligonucleotide
  Antisense strand to SEQ ID NO: 1164554
ucucuaacaaguuuccagg

SEQ ID NO: 1164556 - RNA, 19 nt, Artificial Sequence
  Description of Artificial Sequence: Synthetic oligonucleotide
  Sense strand starting at position 3326 of SEQ ID NO: 916538
guccucugagauuagcauu

SEQ ID NO: 1164557 - RNA, 19 nt, Artificial Sequence
  Description of Artificial Sequence: Synthetic oligonucleotide
  Antisense strand to SEQ ID NO: 1164556
aaugcuaaucucagaggac

SEQ ID NO: 1164558 - RNA, 19 nt, Artificial Sequence
  Description of Artificial Sequence: Synthetic oligonucleotide
  Sense strand starting at position 3333 of SEQ ID NO: 916538
gagauuagcauugguaggu

SEQ ID NO: 1164559 - RNA, 19 nt, Artificial Sequence
  Description of Artificial Sequence: Synthetic oligonucleotide
  Antisense strand to SEQ ID NO: 1164558
accuaccaaugcuaaucuc

SEQ ID NO: 1164560 - RNA, 19 nt, Artificial Sequence
  Description of Artificial Sequence: Synthetic oligonucleotide
  Sense strand starting at position 3334 of SEQ ID NO: 916538
agauuagcauugguaggua

SEQ ID NO: 1164561 - RNA, 19 nt, Artificial Sequence
  Description of Artificial Sequence: Synthetic oligonucleotide
  Antisense strand to SEQ ID NO: 1164560
uaccuaccaaugcuaaucu

SEQ ID NO: 1164562 - RNA, 19 nt, Artificial Sequence
  Description of Artificial Sequence: Synthetic oligonucleotide
  Sense strand starting at position 3371 of SEQ ID NO: 916538
ccuagaagucuguacuuau

SEQ ID NO: 1164563 - RNA, 19 nt, Artificial Sequence
  Description of Artificial Sequence: Synthetic oligonucleotide
  Antisense strand to SEQ ID NO: 1164562
auaaguacagacuucuagg

SEQ ID NO: 1164564 - RNA, 19 nt, Artificial Sequence
  Description of Artificial Sequence: Synthetic oligonucleotide
  Sense strand starting at position 3374 of SEQ ID NO: 916538
agaagucuguacuuauaua

SEQ ID NO: 1164565 - RNA, 19 nt, Artificial Sequence
  Description of Artificial Sequence: Synthetic oligonucleotide
  Antisense strand to SEQ ID NO: 1164564
uauauaaguacagacuucu

SEQ ID NO: 1164566 - RNA, 19 nt, Artificial Sequence
  Description of Artificial Sequence: Synthetic oligonucleotide
  Sense strand starting at position 3489 of SEQ ID NO: 916538
gcugguuuauuuguugaau

SEQ ID NO: 1164567 - RNA, 19 nt, Artificial Sequence
  Description of Artificial Sequence: Synthetic oligonucleotide
  Antisense strand to SEQ ID NO: 1164566
auucaacaaauaaaccagc

SEQ ID NO: 1164568 - RNA, 19 nt, Artificial Sequence
  Description of Artificial Sequence: Synthetic oligonucleotide
  Sense strand starting at position 3572 of SEQ ID NO: 916538
ggaaauuaguaaucacccu

SEQ ID NO: 1164569 - RNA, 19 nt, Artificial Sequence
  Description of Artificial Sequence: Synthetic oligonucleotide
  Antisense strand to SEQ ID NO: 1164568
agggugauuacuaauuucc

SEQ ID NO: 1164570 - RNA, 19 nt, Artificial Sequence
  Description of Artificial Sequence: Synthetic oligonucleotide
  Sense strand starting at position 3868 of SEQ ID NO: 916538
gcugaucagcauuauuacu

SEQ ID NO: 1164571 - RNA, 19 nt, Artificial Sequence
  Description of Artificial Sequence: Synthetic oligonucleotide
  Antisense strand to SEQ ID NO: 1164570
aguaauaaugcugaucagc

SEQ ID NO: 1164572 - RNA, 19 nt, Artificial Sequence
  Description of Artificial Sequence: Synthetic oligonucleotide
  Sense strand starting at position 40 of SEQ ID NO: 916539
aagggaaucuguucucucu

SEQ ID NO: 1164573 - RNA, 19 nt, Artificial Sequence
  Description of Artificial Sequence: Synthetic oligonucleotide
  Antisense strand to SEQ ID NO: 1164572
agagagaacagauucccuu

SEQ ID NO: 1164574 - RNA, 19 nt, Artificial Sequence
  Description of Artificial Sequence: Synthetic oligonucleotide
  Sense strand starting at position 42 of SEQ ID NO: 916539
gggaaucuguucucucuac

SEQ ID NO: 1164575 - RNA, 19 nt, Artificial Sequence
  Description of Artificial Sequence: Synthetic oligonucleotide
  Antisense strand to SEQ ID NO: 1164574
guagagagaacagauuccc

SEQ ID NO: 1164576 - RNA, 19 nt, Artificial Sequence
  Description of Artificial Sequence: Synthetic oligonucleotide
  Sense strand starting at position 211 of SEQ ID NO: 916539
agagcuaucuaguccaacu

SEQ ID NO: 1164577 - RNA, 19 nt, Artificial Sequence
  Description of Artificial Sequence: Synthetic oligonucleotide
  Antisense strand to SEQ ID NO: 1164576
aguuggacuagauagcucu

SEQ ID NO: 1164578 - RNA, 19 nt, Artificial Sequence
  Description of Artificial Sequence: Synthetic oligonucleotide
  Sense strand starting at position 322 of SEQ ID NO: 916539
uucugacucugucuuuauu

SEQ ID NO: 1164579 - RNA, 19 nt, Artificial Sequence
  Description of Artificial Sequence: Synthetic oligonucleotide
  Antisense strand to SEQ ID NO: 1164578
aauaaagacagagucagaa

SEQ ID NO: 1164580 - RNA, 19 nt, Artificial Sequence
  Description of Artificial Sequence: Synthetic oligonucleotide
  Sense strand starting at position 324 of SEQ ID NO: 916539
cugacucugucuuuauuga

SEQ ID NO: 1164581 - RNA, 19 nt, Artificial Sequence
  Description of Artificial Sequence: Synthetic oligonucleotide
  Antisense strand to SEQ ID NO: 1164580
ucaauaaagacagagucag

SEQ ID NO: 1164582 - RNA, 19 nt, Artificial Sequence
  Description of Artificial Sequence: Synthetic oligonucleotide
  Sense strand starting at position 325 of SEQ ID NO: 916539
ugacucugucuuuauugau

SEQ ID NO: 1164583 - RNA, 19 nt, Artificial Sequence
  Description of Artificial Sequence: Synthetic oligonucleotide
  Antisense strand to SEQ ID NO: 1164582
aucaauaaagacagaguca

SEQ ID NO: 1164584 - RNA, 19 nt, Artificial Sequence
  Description of Artificial Sequence: Synthetic oligonucleotide
  Sense strand starting at position 582 of SEQ ID NO: 916539
ccacuaaucccagguuguu

SEQ ID NO: 1164585 - RNA, 19 nt, Artificial Sequence
  Description of Artificial Sequence: Synthetic oligonucleotide
  Antisense strand to SEQ ID NO: 1164584
aacaaccugggauuagugg

SEQ ID NO: 1164586 - RNA, 19 nt, Artificial Sequence
  Description of Artificial Sequence: Synthetic oligonucleotide
  Sense strand starting at position 616 of SEQ ID NO: 916539
ggaccaauuugagaaguga

SEQ ID NO: 1164587 - RNA, 19 nt, Artificial Sequence
  Description of Artificial Sequence: Synthetic oligonucleotide
  Antisense strand to SEQ ID NO: 1164586
ucacuucucaaauuggucc

SEQ ID NO: 1164588 - RNA, 19 nt, Artificial Sequence
  Description of Artificial Sequence: Synthetic oligonucleotide
  Sense strand starting at position 750 of SEQ ID NO: 916539
acgguaaggcauugacacu

SEQ ID NO: 1164589 - RNA, 19 nt, Artificial Sequence
  Description of Artificial Sequence: Synthetic oligonucleotide
  Antisense strand to SEQ ID NO: 1164588
agugucaaugccuuaccgu

SEQ ID NO: 1164590 - RNA, 19 nt, Artificial Sequence
  Description of Artificial Sequence: Synthetic oligonucleotide
  Sense strand starting at position 817 of SEQ ID NO: 916539
ugaccauugugcuuaagaa

SEQ ID NO: 1164591 - RNA, 19 nt, Artificial Sequence
  Description of Artificial Sequence: Synthetic oligonucleotide
  Antisense strand to SEQ ID NO: 1164590
uucuuaagcacaaugguca

SEQ ID NO: 1164592 - RNA, 19 nt, Artificial Sequence
  Description of Artificial Sequence: Synthetic oligonucleotide
  Sense strand starting at position 818 of SEQ ID NO: 916539
gaccauugugcuuaagaag

SEQ ID NO: 1164593 - RNA, 19 nt, Artificial Sequence
  Description of Artificial Sequence: Synthetic oligonucleotide
  Antisense strand to SEQ ID NO: 1164592
cuucuuaagcacaaugguc

SEQ ID NO: 1164594 - RNA, 19 nt, Artificial Sequence
  Description of Artificial Sequence: Synthetic oligonucleotide
  Sense strand starting at position 1153 of SEQ ID NO: 916539
acagaugaauucucugcau

SEQ ID NO: 1164595 - RNA, 19 nt, Artificial Sequence
  Description of Artificial Sequence: Synthetic oligonucleotide
  Antisense strand to SEQ ID NO: 1164594
augcagagaauucaucugu

SEQ ID NO: 1164596 - RNA, 19 nt, Artificial Sequence
  Description of Artificial Sequence: Synthetic oligonucleotide
  Sense strand starting at position 1155 of SEQ ID NO: 916539
agaugaauucucugcauuc

SEQ ID NO: 1164597 - RNA, 19 nt, Artificial Sequence
  Description of Artificial Sequence: Synthetic oligonucleotide
  Antisense strand to SEQ ID NO: 1164596
gaaugcagagaauucaucu

SEQ ID NO: 1164598 - RNA, 19 nt, Artificial Sequence
  Description of Artificial Sequence: Synthetic oligonucleotide
  Sense strand starting at position 1885 of SEQ ID NO: 916539
cccagaacucaccgaaauc

SEQ ID NO: 1164599 - RNA, 19 nt, Artificial Sequence
  Description of Artificial Sequence: Synthetic oligonucleotide
  Antisense strand to SEQ ID NO: 1164598
gauuucggugaguucuggg

SEQ ID NO: 1164600 - RNA, 19 nt, Artificial Sequence
  Description of Artificial Sequence: Synthetic oligonucleotide
  Sense strand starting at position 1895 of SEQ ID NO: 916539
accgaaaucagguguugag

SEQ ID NO: 1164601 - RNA, 19 nt, Artificial Sequence
  Description of Artificial Sequence: Synthetic oligonucleotide
  Antisense strand to SEQ ID NO: 1164600
cucaacaccugauuucggu

SEQ ID NO: 1164602 - RNA, 19 nt, Artificial Sequence
  Description of Artificial Sequence: Synthetic oligonucleotide
  Sense strand starting at position 1998 of SEQ ID NO: 916539
uccugaugucaaggcuuua

SEQ ID NO: 1164603 - RNA, 19 nt, Artificial Sequence
  Description of Artificial Sequence: Synthetic oligonucleotide
  Antisense strand to SEQ ID NO: 1164602
uaaagccuugacaucagga

SEQ ID NO: 1164604 - RNA, 19 nt, Artificial Sequence
  Description of Artificial Sequence: Synthetic oligonucleotide
  Sense strand starting at position 2377 of SEQ ID NO: 916539
cguguaugugugguuguga

SEQ ID NO: 1164605 - RNA, 19 nt, Artificial Sequence
  Description of Artificial Sequence: Synthetic oligonucleotide
  Antisense strand to SEQ ID NO: 1164604
ucacaaccacacauacacg

SEQ ID NO: 1164606 - RNA, 19 nt, Artificial Sequence
  Description of Artificial Sequence: Synthetic oligonucleotide
  Sense strand starting at position 2392 of SEQ ID NO: 916539
gugagcgucgguguuugua

SEQ ID NO: 1164607 - RNA, 19 nt, Artificial Sequence
  Description of Artificial Sequence: Synthetic oligonucleotide
  Antisense strand to SEQ ID NO: 1164606
uacaaacaccgacgcucac

SEQ ID NO: 1164608 - RNA, 19 nt, Artificial Sequence
  Description of Artificial Sequence: Synthetic oligonucleotide
  Sense strand starting at position 2393 of SEQ ID NO: 916539
ugagcgucgguguuuguaa

SEQ ID NO: 1164609 - RNA, 19 nt, Artificial Sequence
  Description of Artificial Sequence: Synthetic oligonucleotide
  Antisense strand to SEQ ID NO: 1164608
uuacaaacaccgacgcuca

SEQ ID NO: 1164610 - RNA, 19 nt, Artificial Sequence
  Description of Artificial Sequence: Synthetic oligonucleotide
  Sense strand starting at position 2806 of SEQ ID NO: 916539
ccagaaauguagguucuca

SEQ ID NO: 1164611 - RNA, 19 nt, Artificial Sequence
  Description of Artificial Sequence: Synthetic oligonucleotide
  Antisense strand to SEQ ID NO: 1164610
ugagaaccuacauuucugg

SEQ ID NO: 1164612 - RNA, 19 nt, Artificial Sequence
  Description of Artificial Sequence: Synthetic oligonucleotide
  Sense strand starting at position 2827 of SEQ ID NO: 916539
uggguucugcagggaaaua

SEQ ID NO: 1164613 - RNA, 19 nt, Artificial Sequence
  Description of Artificial Sequence: Synthetic oligonucleotide
  Antisense strand to SEQ ID NO: 1164612
uauuucccugcagaaccca

SEQ ID NO: 1164614 - RNA, 19 nt, Artificial Sequence
  Description of Artificial Sequence: Synthetic oligonucleotide
  Sense strand starting at position 2910 of SEQ ID NO: 916539
aaggaugcagcuuagagua

SEQ ID NO: 1164615 - RNA, 19 nt, Artificial Sequence
  Description of Artificial Sequence: Synthetic oligonucleotide
  Antisense strand to SEQ ID NO: 1164614
uacucuaagcugcauccuu

SEQ ID NO: 1164616 - RNA, 19 nt, Artificial Sequence
  Description of Artificial Sequence: Synthetic oligonucleotide
  Sense strand starting at position 2915 of SEQ ID NO: 916539
ugcagcuuagaguaucaua

SEQ ID NO: 1164617 - RNA, 19 nt, Artificial Sequence
  Description of Artificial Sequence: Synthetic oligonucleotide
  Antisense strand to SEQ ID NO: 1164616
uaugauacucuaagcugca

SEQ ID NO: 1164618 - RNA, 19 nt, Artificial Sequence
  Description of Artificial Sequence: Synthetic oligonucleotide
  Sense strand starting at position 2925 of SEQ ID NO: 916539
aguaucauauuaguccaau

SEQ ID NO: 1164619 - RNA, 19 nt, Artificial Sequence
  Description of Artificial Sequence: Synthetic oligonucleotide
  Antisense strand to SEQ ID NO: 1164618
auuggacuaauaugauacu

SEQ ID NO: 1164620 - RNA, 19 nt, Artificial Sequence
  Description of Artificial Sequence: Synthetic oligonucleotide
  Sense strand starting at position 2926 of SEQ ID NO: 916539
guaucauauuaguccaaua

SEQ ID NO: 1164621 - RNA, 19 nt, Artificial Sequence
  Description of Artificial Sequence: Synthetic oligonucleotide
  Antisense strand to SEQ ID NO: 1164620
uauuggacuaauaugauac

SEQ ID NO: 1164622 - RNA, 19 nt, Artificial Sequence
  Description of Artificial Sequence: Synthetic oligonucleotide
  Sense strand starting at position 2966 of SEQ ID NO: 916539
aaguuagggugcucagauu

SEQ ID NO: 1164623 - RNA, 19 nt, Artificial Sequence
  Description of Artificial Sequence: Synthetic oligonucleotide
  Antisense strand to SEQ ID NO: 1164622
aaucugagcacccuaacuu

SEQ ID NO: 1164624 - RNA, 19 nt, Artificial Sequence
  Description of Artificial Sequence: Synthetic oligonucleotide
  Sense strand starting at position 2975 of SEQ ID NO: 916539
ugcucagauuggcuaggau

SEQ ID NO: 1164625 - RNA, 19 nt, Artificial Sequence
  Description of Artificial Sequence: Synthetic oligonucleotide
  Antisense strand to SEQ ID NO: 1164624
auccuagccaaucugagca

SEQ ID NO: 1164626 - RNA, 19 nt, Artificial Sequence
  Description of Artificial Sequence: Synthetic oligonucleotide
  Sense strand starting at position 2978 of SEQ ID NO: 916539
ucagauuggcuaggauuaa

SEQ ID NO: 1164627 - RNA, 19 nt, Artificial Sequence
  Description of Artificial Sequence: Synthetic oligonucleotide
  Antisense strand to SEQ ID NO: 1164626
uuaauccuagccaaucuga

SEQ ID NO: 1164628 - RNA, 19 nt, Artificial Sequence
  Description of Artificial Sequence: Synthetic oligonucleotide
  Sense strand starting at position 3107 of SEQ ID NO: 916539
caaauuaucugcgugggac

SEQ ID NO: 1164629 - RNA, 19 nt, Artificial Sequence
  Description of Artificial Sequence: Synthetic oligonucleotide
  Antisense strand to SEQ ID NO: 1164628
gucccacgcagauaauuug

SEQ ID NO: 1164630 - RNA, 19 nt, Artificial Sequence
  Description of Artificial Sequence: Synthetic oligonucleotide
  Sense strand starting at position 3158 of SEQ ID NO: 916539
gggagaaauuaauggagga

SEQ ID NO: 1164631 - RNA, 19 nt, Artificial Sequence
  Description of Artificial Sequence: Synthetic oligonucleotide
  Antisense strand to SEQ ID NO: 1164630
uccuccauuaauuucuccc

SEQ ID NO: 1164632 - RNA, 19 nt, Artificial Sequence
  Description of Artificial Sequence: Synthetic oligonucleotide
  Sense strand starting at position 3171 of SEQ ID NO: 916539
ggaggagguuucuuaugga

SEQ ID NO: 1164633 - RNA, 19 nt, Artificial Sequence
  Description of Artificial Sequence: Synthetic oligonucleotide
  Antisense strand to SEQ ID NO: 1164632
uccauaagaaaccuccucc

SEQ ID NO: 1164634 - RNA, 19 nt, Artificial Sequence
  Description of Artificial Sequence: Synthetic oligonucleotide
  Sense strand starting at position 3177 of SEQ ID NO: 916539
gguuucuuauggaggagag

SEQ ID NO: 1164635 - RNA, 19 nt, Artificial Sequence
  Description of Artificial Sequence: Synthetic oligonucleotide
  Antisense strand to SEQ ID NO: 1164634
cucuccuccauaagaaacc

SEQ ID NO: 1164636 - RNA, 19 nt, Artificial Sequence
  Description of Artificial Sequence: Synthetic oligonucleotide
  Sense strand starting at position 3243 of SEQ ID NO: 916539
uuggguucuugagcauaga

SEQ ID NO: 1164637 - RNA, 19 nt, Artificial Sequence
  Description of Artificial Sequence: Synthetic oligonucleotide
  Antisense strand to SEQ ID NO: 1164636
ucuaugcucaagaacccaa

SEQ ID NO: 1164638 - RNA, 19 nt, Artificial Sequence
  Description of Artificial Sequence: Synthetic oligonucleotide
  Sense strand starting at position 3246 of SEQ ID NO: 916539
gguucuugagcauagaggu

SEQ ID NO: 1164639 - RNA, 19 nt, Artificial Sequence
  Description of Artificial Sequence: Synthetic oligonucleotide
  Antisense strand to SEQ ID NO: 1164638
accucuaugcucaagaacc

SEQ ID NO: 1164640 - RNA, 19 nt, Artificial Sequence
  Description of Artificial Sequence: Synthetic oligonucleotide
  Sense strand starting at position 3505 of SEQ ID NO: 916539
guauuauaagagugcacca

SEQ ID NO: 1164641 - RNA, 19 nt, Artificial Sequence
  Description of Artificial Sequence: Synthetic oligonucleotide
  Antisense strand to SEQ ID NO: 1164640
uggugcacucuuauaauac

SEQ ID NO: 1164642 - RNA, 19 nt, Artificial Sequence
  Description of Artificial Sequence: Synthetic oligonucleotide
  Sense strand starting at position 3680 of SEQ ID NO: 916539
auucuuaacgugcaauaaa

SEQ ID NO: 1164643 - RNA, 19 nt, Artificial Sequence
  Description of Artificial Sequence: Synthetic oligonucleotide
  Antisense strand to SEQ ID NO: 1164642
uuuauugcacguuaagaau

SEQ ID NO: 1164644 - RNA, 19 nt, Artificial Sequence
  Description of Artificial Sequence: Synthetic oligonucleotide
  Sense strand starting at position 3846 of SEQ ID NO: 916539
ccuggcaacuuccugaauu

SEQ ID NO: 1164645 - RNA, 19 nt, Artificial Sequence
  Description of Artificial Sequence: Synthetic oligonucleotide
  Antisense strand to SEQ ID NO: 1164644
aauucaggaaguugccagg

SEQ ID NO: 1164646 - RNA, 19 nt, Artificial Sequence
  Description of Artificial Sequence: Synthetic oligonucleotide
  Sense strand starting at position 3848 of SEQ ID NO: 916539
uggcaacuuccugaauuau

SEQ ID NO: 1164647 - RNA, 19 nt, Artificial Sequence
  Description of Artificial Sequence: Synthetic oligonucleotide
  Antisense strand to SEQ ID NO: 1164646
auaauucaggaaguugcca

SEQ ID NO: 1164648 - RNA, 19 nt, Artificial Sequence
  Description of Artificial Sequence: Synthetic oligonucleotide
  Sense strand starting at position 3906 of SEQ ID NO: 916539
ggagcuuuacaguauguac

SEQ ID NO: 1164649 - RNA, 19 nt, Artificial Sequence
  Description of Artificial Sequence: Synthetic oligonucleotide
  Antisense strand to SEQ ID NO: 1164648
guacauacuguaaagcucc

SEQ ID NO: 1164650 - RNA, 19 nt, Artificial Sequence
  Description of Artificial Sequence: Synthetic oligonucleotide
  Sense strand starting at position 3959 of SEQ ID NO: 916539
gagauccauccauguguau

SEQ ID NO: 1164651 - RNA, 19 nt, Artificial Sequence
  Description of Artificial Sequence: Synthetic oligonucleotide
  Antisense strand to SEQ ID NO: 1164650
auacacauggauggaucuc

SEQ ID NO: 1164652 - RNA, 19 nt, Artificial Sequence
  Description of Artificial Sequence: Synthetic oligonucleotide
  Sense strand starting at position 134 of SEQ ID NO: 916540
uccagaccacguuggauua

SEQ ID NO: 1164653 - RNA, 19 nt, Artificial Sequence
  Description of Artificial Sequence: Synthetic oligonucleotide
  Antisense strand to SEQ ID NO: 1164652
uaauccaacguggucugga

SEQ ID NO: 1164654 - RNA, 19 nt, Artificial Sequence
  Description of Artificial Sequence: Synthetic oligonucleotide
  Sense strand starting at position 136 of SEQ ID NO: 916540
cagaccacguuggauuaaa

SEQ ID NO: 1164655 - RNA, 19 nt, Artificial Sequence
  Description of Artificial Sequence: Synthetic oligonucleotide
  Antisense strand to SEQ ID NO: 1164654
uuuaauccaacguggucug

SEQ ID NO: 1164656 - RNA, 19 nt, Artificial Sequence
  Description of Artificial Sequence: Synthetic oligonucleotide
  Sense strand starting at position 155 of SEQ ID NO: 916540
ggcccaaucuuagaaccca

SEQ ID NO: 1164657 - RNA, 19 nt, Artificial Sequence
  Description of Artificial Sequence: Synthetic oligonucleotide
  Antisense strand to SEQ ID NO: 1164656
uggguucuaagauugggcc

SEQ ID NO: 1164658 - RNA, 19 nt, Artificial Sequence
  Description of Artificial Sequence: Synthetic oligonucleotide
  Sense strand starting at position 186 of SEQ ID NO: 916540
ccgacacaguagucauagu

SEQ ID NO: 1164659 - RNA, 19 nt, Artificial Sequence
  Description of Artificial Sequence: Synthetic oligonucleotide
  Antisense strand to SEQ ID NO: 1164658
acuaugacuacugugucgg

SEQ ID NO: 1164660 - RNA, 19 nt, Artificial Sequence
  Description of Artificial Sequence: Synthetic oligonucleotide
  Sense strand starting at position 187 of SEQ ID NO: 916540
cgacacaguagucauagua

SEQ ID NO: 1164661 - RNA, 19 nt, Artificial Sequence
  Description of Artificial Sequence: Synthetic oligonucleotide
  Antisense strand to SEQ ID NO: 1164660
uacuaugacuacugugucg

SEQ ID NO: 1164662 - RNA, 19 nt, Artificial Sequence
  Description of Artificial Sequence: Synthetic oligonucleotide
  Sense strand starting at position 262 of SEQ ID NO: 916540
cugugaacucaguaccauu

SEQ ID NO: 1164663 - RNA, 19 nt, Artificial Sequence
  Description of Artificial Sequence: Synthetic oligonucleotide
  Antisense strand to SEQ ID NO: 1164662
aaugguacugaguucacag

SEQ ID NO: 1164664 - RNA, 19 nt, Artificial Sequence
  Description of Artificial Sequence: Synthetic oligonucleotide
  Sense strand starting at position 319 of SEQ ID NO: 916540
agagaaguuaagcaucugu

SEQ ID NO: 1164665 - RNA, 19 nt, Artificial Sequence
  Description of Artificial Sequence: Synthetic oligonucleotide
  Antisense strand to SEQ ID NO: 1164664
acagaugcuuaacuucucu

SEQ ID NO: 1164666 - RNA, 19 nt, Artificial Sequence
  Description of Artificial Sequence: Synthetic oligonucleotide
  Sense strand starting at position 330 of SEQ ID NO: 916540
gcaucuguccagggucaca

SEQ ID NO: 1164667 - RNA, 19 nt, Artificial Sequence
  Description of Artificial Sequence: Synthetic oligonucleotide
  Antisense strand to SEQ ID NO: 1164666
ugugacccuggacagaugc

SEQ ID NO: 1164668 - RNA, 19 nt, Artificial Sequence
  Description of Artificial Sequence: Synthetic oligonucleotide
  Sense strand starting at position 361 of SEQ ID NO: 916540
uggcaaaggucagagucaa

SEQ ID NO: 1164669 - RNA, 19 nt, Artificial Sequence
  Description of Artificial Sequence: Synthetic oligonucleotide
  Antisense strand to SEQ ID NO: 1164668
uugacucugaccuuugcca

SEQ ID NO: 1164670 - RNA, 19 nt, Artificial Sequence
  Description of Artificial Sequence: Synthetic oligonucleotide
  Sense strand starting at position 856 of SEQ ID NO: 916540
ggaggacacucgcuuccaa

SEQ ID NO: 1164671 - RNA, 19 nt, Artificial Sequence
  Description of Artificial Sequence: Synthetic oligonucleotide
  Antisense strand to SEQ ID NO: 1164670
uuggaagcgaguguccucc

SEQ ID NO: 1164672 - RNA, 19 nt, Artificial Sequence
  Description of Artificial Sequence: Synthetic oligonucleotide
  Sense strand starting at position 1119 of SEQ ID NO: 916540
ugggaucagcucugaauuc

SEQ ID NO: 1164673 - RNA, 19 nt, Artificial Sequence
  Description of Artificial Sequence: Synthetic oligonucleotide
  Antisense strand to SEQ ID NO: 1164672
gaauucagagcugauccca

SEQ ID NO: 1164674 - RNA, 19 nt, Artificial Sequence
  Description of Artificial Sequence: Synthetic oligonucleotide
  Sense strand starting at position 1134 of SEQ ID NO: 916540
auuccaacuucgcaaagua

SEQ ID NO: 1164675 - RNA, 19 nt, Artificial Sequence
  Description of Artificial Sequence: Synthetic oligonucleotide
  Antisense strand to SEQ ID NO: 1164674
uacuuugcgaaguuggaau

SEQ ID NO: 1164676 - RNA, 19 nt, Artificial Sequence
  Description of Artificial Sequence: Synthetic oligonucleotide
  Sense strand starting at position 2492 of SEQ ID NO: 916540
cccaguaccucacuggaau

SEQ ID NO: 1164677 - RNA, 19 nt, Artificial Sequence
  Description of Artificial Sequence: Synthetic oligonucleotide
  Antisense strand to SEQ ID NO: 1164676
auuccagugagguacuggg

SEQ ID NO: 1164678 - RNA, 19 nt, Artificial Sequence
  Description of Artificial Sequence: Synthetic oligonucleotide
  Sense strand starting at position 2505 of SEQ ID NO: 916540
uggaaucgcguuucagcua

SEQ ID NO: 1164679 - RNA, 19 nt, Artificial Sequence
  Description of Artificial Sequence: Synthetic oligonucleotide
  Antisense strand to SEQ ID NO: 1164678
uagcugaaacgcgauucca

SEQ ID NO: 1164680 - RNA, 19 nt, Artificial Sequence
  Description of Artificial Sequence: Synthetic oligonucleotide
  Sense strand starting at position 2506 of SEQ ID NO: 916540
ggaaucgcguuucagcuau

SEQ ID NO: 1164681 - RNA, 19 nt, Artificial Sequence
  Description of Artificial Sequence: Synthetic oligonucleotide
  Antisense strand to SEQ ID NO: 1164680
auagcugaaacgcgauucc

SEQ ID NO: 1164682 - RNA, 19 nt, Artificial Sequence
  Description of Artificial Sequence: Synthetic oligonucleotide
  Sense strand starting at position 2526 of SEQ ID NO: 916540
aaauuauaacucuggagug

SEQ ID NO: 1164683 - RNA, 19 nt, Artificial Sequence
  Description of Artificial Sequence: Synthetic oligonucleotide
  Antisense strand to SEQ ID NO: 1164682
cacuccagaguuauaauuu

SEQ ID NO: 1164684 - RNA, 19 nt, Artificial Sequence
  Description of Artificial Sequence: Synthetic oligonucleotide
  Sense strand starting at position 2865 of SEQ ID NO: 916540
gcaguagggacucacgaau

SEQ ID NO: 1164685 - RNA, 19 nt, Artificial Sequence
  Description of Artificial Sequence: Synthetic oligonucleotide
  Antisense strand to SEQ ID NO: 1164684
auucgugagucccuacugc

SEQ ID NO: 1164686 - RNA, 19 nt, Artificial Sequence
  Description of Artificial Sequence: Synthetic oligonucleotide
  Sense strand starting at position 2876 of SEQ ID NO: 916540
ucacgaauguguugaguga

SEQ ID NO: 1164687 - RNA, 19 nt, Artificial Sequence
  Description of Artificial Sequence: Synthetic oligonucleotide
  Antisense strand to SEQ ID NO: 1164686
ucacucaacacauucguga

SEQ ID NO: 1164688 - RNA, 19 nt, Artificial Sequence
  Description of Artificial Sequence: Synthetic oligonucleotide
  Sense strand starting at position 2877 of SEQ ID NO: 916540
cacgaauguguugagugaa

SEQ ID NO: 1164689 - RNA, 19 nt, Artificial Sequence
  Description of Artificial Sequence: Synthetic oligonucleotide
  Antisense strand to SEQ ID NO: 1164688
uucacucaacacauucgug

SEQ ID NO: 1164690 - RNA, 19 nt, Artificial Sequence
  Description of Artificial Sequence: Synthetic oligonucleotide
  Sense strand starting at position 2878 of SEQ ID NO: 916540
acgaauguguugagugaag

SEQ ID NO: 1164691 - RNA, 19 nt, Artificial Sequence
  Description of Artificial Sequence: Synthetic oligonucleotide
  Antisense strand to SEQ ID NO: 1164690
cuucacucaacacauucgu

SEQ ID NO: 1164692 - RNA, 19 nt, Artificial Sequence
  Description of Artificial Sequence: Synthetic oligonucleotide
  Sense strand starting at position 2880 of SEQ ID NO: 916540
gaauguguugagugaaguc

SEQ ID NO: 1164693 - RNA, 19 nt, Artificial Sequence
  Description of Artificial Sequence: Synthetic oligonucleotide
  Antisense strand to SEQ ID NO: 1164692
gacuucacucaacacauuc

SEQ ID NO: 1164694 - RNA, 19 nt, Artificial Sequence
  Description of Artificial Sequence: Synthetic oligonucleotide
  Sense strand starting at position 3192 of SEQ ID NO: 916540
cagggcagaucucuuugaa

SEQ ID NO: 1164695 - RNA, 19 nt, Artificial Sequence
  Description of Artificial Sequence: Synthetic oligonucleotide
  Antisense strand to SEQ ID NO: 1164694
uucaaagagaucugcccug

SEQ ID NO: 1164696 - RNA, 19 nt, Artificial Sequence
  Description of Artificial Sequence: Synthetic oligonucleotide
  Sense strand starting at position 3195 of SEQ ID NO: 916540
ggcagaucucuuugaacag

SEQ ID NO: 1164697 - RNA, 19 nt, Artificial Sequence
  Description of Artificial Sequence: Synthetic oligonucleotide
  Antisense strand to SEQ ID NO: 1164696
cuguucaaagagaucugcc

SEQ ID NO: 1164698 - RNA, 19 nt, Artificial Sequence
  Description of Artificial Sequence: Synthetic oligonucleotide
  Sense strand starting at position 3264 of SEQ ID NO: 916540
ucugcuuucuccuaagaug

SEQ ID NO: 1164699 - RNA, 19 nt, Artificial Sequence
  Description of Artificial Sequence: Synthetic oligonucleotide
  Antisense strand to SEQ ID NO: 1164698
caucuuaggagaaagcaga

SEQ ID NO: 1164700 - RNA, 19 nt, Artificial Sequence
  Description of Artificial Sequence: Synthetic oligonucleotide
  Sense strand starting at position 3273 of SEQ ID NO: 916540
uccuaagauguuggagagu

SEQ ID NO: 1164701 - RNA, 19 nt, Artificial Sequence
  Description of Artificial Sequence: Synthetic oligonucleotide
  Antisense strand to SEQ ID NO: 1164700
acucuccaacaucuuagga

SEQ ID NO: 1164702 - RNA, 19 nt, Artificial Sequence
  Description of Artificial Sequence: Synthetic oligonucleotide
  Sense strand starting at position 3335 of SEQ ID NO: 916540
agugacgucucagcagauu

SEQ ID NO: 1164703 - RNA, 19 nt, Artificial Sequence
  Description of Artificial Sequence: Synthetic oligonucleotide
  Antisense strand to SEQ ID NO: 1164702
aaucugcugagacgucacu

SEQ ID NO: 1164704 - RNA, 19 nt, Artificial Sequence
  Description of Artificial Sequence: Synthetic oligonucleotide
  Sense strand starting at position 3563 of SEQ ID NO: 916540
gcugacaaugucuggcaaa

SEQ ID NO: 1164705 - RNA, 19 nt, Artificial Sequence
  Description of Artificial Sequence: Synthetic oligonucleotide
  Antisense strand to SEQ ID NO: 1164704
uuugccagacauugucagc

SEQ ID NO: 1164706 - RNA, 19 nt, Artificial Sequence
  Description of Artificial Sequence: Synthetic oligonucleotide
  Sense strand starting at position 3605 of SEQ ID NO: 916540
caguuugcagacugaaaca

SEQ ID NO: 1164707 - RNA, 19 nt, Artificial Sequence
  Description of Artificial Sequence: Synthetic oligonucleotide
  Antisense strand to SEQ ID NO: 1164706
uguuucagucugcaaacug

SEQ ID NO: 1164708 - RNA, 19 nt, Artificial Sequence
  Description of Artificial Sequence: Synthetic oligonucleotide
  Sense strand starting at position 305 of SEQ ID NO: 916541
aguggaagugcugagacaa

SEQ ID NO: 1164709 - RNA, 19 nt, Artificial Sequence
  Description of Artificial Sequence: Synthetic oligonucleotide
  Antisense strand to SEQ ID NO: 1164708
uugucucagcacuuccacu

SEQ ID NO: 1164710 - RNA, 19 nt, Artificial Sequence
  Description of Artificial Sequence: Synthetic oligonucleotide
  Sense strand starting at position 318 of SEQ ID NO: 916541
agacaaaggauaugugcaa

SEQ ID NO: 1164711 - RNA, 19 nt, Artificial Sequence
  Description of Artificial Sequence: Synthetic oligonucleotide
  Antisense strand to SEQ ID NO: 1164710
uugcacauauccuuugucu

SEQ ID NO: 1164712 - RNA, 19 nt, Artificial Sequence
  Description of Artificial Sequence: Synthetic oligonucleotide
  Sense strand starting at position 319 of SEQ ID NO: 916541
gacaaaggauaugugcaau

SEQ ID NO: 1164713 - RNA, 19 nt, Artificial Sequence
  Description of Artificial Sequence: Synthetic oligonucleotide
  Antisense strand to SEQ ID NO: 1164712
auugcacauauccuuuguc

SEQ ID NO: 1164714 - RNA, 19 nt, Artificial Sequence
  Description of Artificial Sequence: Synthetic oligonucleotide
  Sense strand starting at position 322 of SEQ ID NO: 916541
aaaggauaugugcaaugua

SEQ ID NO: 1164715 - RNA, 19 nt, Artificial Sequence
  Description of Artificial Sequence: Synthetic oligonucleotide
  Antisense strand to SEQ ID NO: 1164714
uacauugcacauauccuuu

SEQ ID NO: 1164716 - RNA, 19 nt, Artificial Sequence
  Description of Artificial Sequence: Synthetic oligonucleotide
  Sense strand starting at position 325 of SEQ ID NO: 916541
ggauaugugcaauguaaau

SEQ ID NO: 1164717 - RNA, 19 nt, Artificial Sequence
  Description of Artificial Sequence: Synthetic oligonucleotide
  Antisense strand to SEQ ID NO: 1164716
auuuacauugcacauaucc

SEQ ID NO: 1164718 - RNA, 19 nt, Artificial Sequence
  Description of Artificial Sequence: Synthetic oligonucleotide
  Sense strand starting at position 409 of SEQ ID NO: 916541
ugcccacauugggauuuau

SEQ ID NO: 1164719 - RNA, 19 nt, Artificial Sequence
  Description of Artificial Sequence: Synthetic oligonucleotide
  Antisense strand to SEQ ID NO: 1164718
auaaaucccaaugugggca

SEQ ID NO: 1164720 - RNA, 19 nt, Artificial Sequence
  Description of Artificial Sequence: Synthetic oligonucleotide
  Sense strand starting at position 806 of SEQ ID NO: 916541
aguugcauuucuguuguua

SEQ ID NO: 1164721 - RNA, 19 nt, Artificial Sequence
  Description of Artificial Sequence: Synthetic oligonucleotide
  Antisense strand to SEQ ID NO: 1164720
uaacaacagaaaugcaacu

SEQ ID NO: 1164722 - RNA, 19 nt, Artificial Sequence
  Description of Artificial Sequence: Synthetic oligonucleotide
  Sense strand starting at position 810 of SEQ ID NO: 916541
gcauuucuguuguuacaag

SEQ ID NO: 1164723 - RNA, 19 nt, Artificial Sequence
  Description of Artificial Sequence: Synthetic oligonucleotide
  Antisense strand to SEQ ID NO: 1164722
cuuguaacaacagaaaugc

SEQ ID NO: 1164724 - RNA, 19 nt, Artificial Sequence
  Description of Artificial Sequence: Synthetic oligonucleotide
  Sense strand starting at position 817 of SEQ ID NO: 916541
uguuguuacaagugagaau

SEQ ID NO: 1164725 - RNA, 19 nt, Artificial Sequence
  Description of Artificial Sequence: Synthetic oligonucleotide
  Antisense strand to SEQ ID NO: 1164724
auucucacuuguaacaaca

SEQ ID NO: 1164726 - RNA, 19 nt, Artificial Sequence
  Description of Artificial Sequence: Synthetic oligonucleotide
  Sense strand starting at position 818 of SEQ ID NO: 916541
guuguuacaagugagaaug

SEQ ID NO: 1164727 - RNA, 19 nt, Artificial Sequence
  Description of Artificial Sequence: Synthetic oligonucleotide
  Antisense strand to SEQ ID NO: 1164726
cauucucacuuguaacaac

SEQ ID NO: 1164728 - RNA, 19 nt, Artificial Sequence
  Description of Artificial Sequence: Synthetic oligonucleotide
  Sense strand starting at position 1085 of SEQ ID NO: 916541
guaccaaccuucgcaucau

SEQ ID NO: 1164729 - RNA, 19 nt, Artificial Sequence
  Description of Artificial Sequence: Synthetic oligonucleotide
  Antisense strand to SEQ ID NO: 1164728
augaugcgaagguugguac

SEQ ID NO: 1164730 - RNA, 19 nt, Artificial Sequence
  Description of Artificial Sequence: Synthetic oligonucleotide
  Sense strand starting at position 1096 of SEQ ID NO: 916541
cgcaucauuuguccuguga

SEQ ID NO: 1164731 - RNA, 19 nt, Artificial Sequence
  Description of Artificial Sequence: Synthetic oligonucleotide
  Antisense strand to SEQ ID NO: 1164730
ucacaggacaaaugaugcg

SEQ ID NO: 1164732 - RNA, 19 nt, Artificial Sequence
  Description of Artificial Sequence: Synthetic oligonucleotide
  Sense strand starting at position 1138 of SEQ ID NO: 916541
uuagaaugauucuuaguuc

SEQ ID NO: 1164733 - RNA, 19 nt, Artificial Sequence
  Description of Artificial Sequence: Synthetic oligonucleotide
  Antisense strand to SEQ ID NO: 1164732
gaacuaagaaucauucuaa

SEQ ID NO: 1164734 - RNA, 19 nt, Artificial Sequence
  Description of Artificial Sequence: Synthetic oligonucleotide
  Sense strand starting at position 1166 of SEQ ID NO: 916541
acggaaauaaagugagagu

SEQ ID NO: 1164735 - RNA, 19 nt, Artificial Sequence
  Description of Artificial Sequence: Synthetic oligonucleotide
  Antisense strand to SEQ ID NO: 1164734
acucucacuuuauuuccgu

SEQ ID NO: 1164736 - RNA, 19 nt, Artificial Sequence
  Description of Artificial Sequence: Synthetic oligonucleotide
  Sense strand starting at position 1169 of SEQ ID NO: 916541
gaaauaaagugagaguaac

SEQ ID NO: 1164737 - RNA, 19 nt, Artificial Sequence
  Description of Artificial Sequence: Synthetic oligonucleotide
  Antisense strand to SEQ ID NO: 1164736
guuacucucacuuuauuuc

SEQ ID NO: 1164738 - RNA, 19 nt, Artificial Sequence
  Description of Artificial Sequence: Synthetic oligonucleotide
  Sense strand starting at position 1260 of SEQ ID NO: 916541
gacaacugaugugcucaaa

SEQ ID NO: 1164739 - RNA, 19 nt, Artificial Sequence
  Description of Artificial Sequence: Synthetic oligonucleotide
  Antisense strand to SEQ ID NO: 1164738
uuugagcacaucaguuguc

SEQ ID NO: 1164740 - RNA, 19 nt, Artificial Sequence
  Description of Artificial Sequence: Synthetic oligonucleotide
  Sense strand starting at position 1344 of SEQ ID NO: 916541
ccaggaggcacuggaauua

SEQ ID NO: 1164741 - RNA, 19 nt, Artificial Sequence
  Description of Artificial Sequence: Synthetic oligonucleotide
  Antisense strand to SEQ ID NO: 1164740
uaauuccagugccuccugg

SEQ ID NO: 1164742 - RNA, 19 nt, Artificial Sequence
  Description of Artificial Sequence: Synthetic oligonucleotide
  Sense strand starting at position 1454 of SEQ ID NO: 916541
ccauuuagguuucugcgaa

SEQ ID NO: 1164743 - RNA, 19 nt, Artificial Sequence
  Description of Artificial Sequence: Synthetic oligonucleotide
  Antisense strand to SEQ ID NO: 1164742
uucgcagaaaccuaaaugg

SEQ ID NO: 1164744 - RNA, 19 nt, Artificial Sequence
  Description of Artificial Sequence: Synthetic oligonucleotide
  Sense strand starting at position 1585 of SEQ ID NO: 916541
cagggucacugaguuaaug

SEQ ID NO: 1164745 - RNA, 19 nt, Artificial Sequence
  Description of Artificial Sequence: Synthetic oligonucleotide
  Antisense strand to SEQ ID NO: 1164744
cauuaacucagugacccug

SEQ ID NO: 1164746 - RNA, 19 nt, Artificial Sequence
  Description of Artificial Sequence: Synthetic oligonucleotide
  Sense strand starting at position 1587 of SEQ ID NO: 916541
gggucacugaguuaauguc

SEQ ID NO: 1164747 - RNA, 19 nt, Artificial Sequence
  Description of Artificial Sequence: Synthetic oligonucleotide
  Antisense strand to SEQ ID NO: 1164746
gacauuaacucagugaccc

SEQ ID NO: 1164748 - RNA, 19 nt, Artificial Sequence
  Description of Artificial Sequence: Synthetic oligonucleotide
  Sense strand starting at position 1593 of SEQ ID NO: 916541
cugaguuaaugucuuguaa

SEQ ID NO: 1164749 - RNA, 19 nt, Artificial Sequence
  Description of Artificial Sequence: Synthetic oligonucleotide
  Antisense strand to SEQ ID NO: 1164748
uuacaagacauuaacucag

SEQ ID NO: 1164750 - RNA, 19 nt, Artificial Sequence
  Description of Artificial Sequence: Synthetic oligonucleotide
  Sense strand starting at position 1686 of SEQ ID NO: 916541
uacagauagcuucggucuu

SEQ ID NO: 1164751 - RNA, 19 nt, Artificial Sequence
  Description of Artificial Sequence: Synthetic oligonucleotide
  Antisense strand to SEQ ID NO: 1164750
aagaccgaagcuaucugua

SEQ ID NO: 1164752 - RNA, 19 nt, Artificial Sequence
  Description of Artificial Sequence: Synthetic oligonucleotide
  Sense strand starting at position 1761 of SEQ ID NO: 916541
gcgguuguccuugacaaga

SEQ ID NO: 1164753 - RNA, 19 nt, Artificial Sequence
  Description of Artificial Sequence: Synthetic oligonucleotide
  Antisense strand to SEQ ID NO: 1164752
ucuugucaaggacaaccgc

SEQ ID NO: 1164754 - RNA, 19 nt, Artificial Sequence
  Description of Artificial Sequence: Synthetic oligonucleotide
  Sense strand starting at position 1824 of SEQ ID NO: 916541
gaaaucagccagcgaaagu

SEQ ID NO: 1164755 - RNA, 19 nt, Artificial Sequence
  Description of Artificial Sequence: Synthetic oligonucleotide
  Antisense strand to SEQ ID NO: 1164754
acuuucgcuggcugauuuc

SEQ ID NO: 1164756 - RNA, 19 nt, Artificial Sequence
  Description of Artificial Sequence: Synthetic oligonucleotide
  Sense strand starting at position 2216 of SEQ ID NO: 916541
gggcauaugcuggaaagcu

SEQ ID NO: 1164757 - RNA, 19 nt, Artificial Sequence
  Description of Artificial Sequence: Synthetic oligonucleotide
  Antisense strand to SEQ ID NO: 1164756
agcuuuccagcauaugccc

SEQ ID NO: 1164758 - RNA, 19 nt, Artificial Sequence
  Description of Artificial Sequence: Synthetic oligonucleotide
  Sense strand starting at position 2402 of SEQ ID NO: 916541
cgccaacacagcgagaauu

SEQ ID NO: 1164759 - RNA, 19 nt, Artificial Sequence
  Description of Artificial Sequence: Synthetic oligonucleotide
  Antisense strand to SEQ ID NO: 1164758
aauucucgcuguguuggcg

SEQ ID NO: 1164760 - RNA, 19 nt, Artificial Sequence
  Description of Artificial Sequence: Synthetic oligonucleotide
  Sense strand starting at position 2413 of SEQ ID NO: 916541
cgagaauucugucucuaca

SEQ ID NO: 1164761 - RNA, 19 nt, Artificial Sequence
  Description of Artificial Sequence: Synthetic oligonucleotide
  Antisense strand to SEQ ID NO: 1164760
uguagagacagaauucucg

SEQ ID NO: 1164762 - RNA, 19 nt, Artificial Sequence
  Description of Artificial Sequence: Synthetic oligonucleotide
  Sense strand starting at position 2643 of SEQ ID NO: 916541
ggugcuugauucucuuacu

SEQ ID NO: 1164763 - RNA, 19 nt, Artificial Sequence
  Description of Artificial Sequence: Synthetic oligonucleotide
  Antisense strand to SEQ ID NO: 1164762
aguaagagaaucaagcacc

SEQ ID NO: 1164764 - RNA, 19 nt, Artificial Sequence
  Description of Artificial Sequence: Synthetic oligonucleotide
  Sense strand starting at position 2821 of SEQ ID NO: 916541
augggcaucuuguuauguu

SEQ ID NO: 1164765 - RNA, 19 nt, Artificial Sequence
  Description of Artificial Sequence: Synthetic oligonucleotide
  Antisense strand to SEQ ID NO: 1164764
aacauaacaagaugcccau

SEQ ID NO: 1164766 - RNA, 19 nt, Artificial Sequence
  Description of Artificial Sequence: Synthetic oligonucleotide
  Sense strand starting at position 2997 of SEQ ID NO: 916541
uuugguaguggugguuaaa

SEQ ID NO: 1164767 - RNA, 19 nt, Artificial Sequence
  Description of Artificial Sequence: Synthetic oligonucleotide
  Antisense strand to SEQ ID NO: 1164766
uuuaaccaccacuaccaaa

SEQ ID NO: 1164768 - RNA, 19 nt, Artificial Sequence
  Description of Artificial Sequence: Synthetic oligonucleotide
  Sense strand starting at position 3079 of SEQ ID NO: 916541
cacauuguugcgcaacaga

SEQ ID NO: 1164769 - RNA, 19 nt, Artificial Sequence
  Description of Artificial Sequence: Synthetic oligonucleotide
  Antisense strand to SEQ ID NO: 1164768
ucuguugcgcaacaaugug

SEQ ID NO: 1164770 - RNA, 19 nt, Artificial Sequence
  Description of Artificial Sequence: Synthetic oligonucleotide
  Sense strand starting at position 3187 of SEQ ID NO: 916541
cuacuucuguuucuaagag

SEQ ID NO: 1164771 - RNA, 19 nt, Artificial Sequence
  Description of Artificial Sequence: Synthetic oligonucleotide
  Antisense strand to SEQ ID NO: 1164770
cucuuagaaacagaaguag

SEQ ID NO: 1164772 - RNA, 19 nt, Artificial Sequence
  Description of Artificial Sequence: Synthetic oligonucleotide
  Sense strand starting at position 3235 of SEQ ID NO: 916541
agaaucaugagguguuugu

SEQ ID NO: 1164773 - RNA, 19 nt, Artificial Sequence
  Description of Artificial Sequence: Synthetic oligonucleotide
  Antisense strand to SEQ ID NO: 1164772
acaaacaccucaugauucu

SEQ ID NO: 1164774 - RNA, 19 nt, Artificial Sequence
  Description of Artificial Sequence: Synthetic oligonucleotide
  Sense strand starting at position 3281 of SEQ ID NO: 916541
gcaugauauccacaaggcu

SEQ ID NO: 1164775 - RNA, 19 nt, Artificial Sequence
  Description of Artificial Sequence: Synthetic oligonucleotide
  Antisense strand to SEQ ID NO: 1164774
agccuuguggauaucaugc

SEQ ID NO: 1164776 - RNA, 19 nt, Artificial Sequence
  Description of Artificial Sequence: Synthetic oligonucleotide
  Sense strand starting at position 3294 of SEQ ID NO: 916541
aaggcucauccauagugua

SEQ ID NO: 1164777 - RNA, 19 nt, Artificial Sequence
  Description of Artificial Sequence: Synthetic oligonucleotide
  Antisense strand to SEQ ID NO: 1164776
uacacuauggaugagccuu

SEQ ID NO: 1164778 - RNA, 19 nt, Artificial Sequence
  Description of Artificial Sequence: Synthetic oligonucleotide
  Sense strand starting at position 3299 of SEQ ID NO: 916541
ucauccauaguguaguaua

SEQ ID NO: 1164779 - RNA, 19 nt, Artificial Sequence
  Description of Artificial Sequence: Synthetic oligonucleotide
  Antisense strand to SEQ ID NO: 1164778
uauacuacacuauggauga

SEQ ID NO: 1164780 - RNA, 19 nt, Artificial Sequence
  Description of Artificial Sequence: Synthetic oligonucleotide
  Sense strand starting at position 3304 of SEQ ID NO: 916541
cauaguguaguauaugaca

SEQ ID NO: 1164781 - RNA, 19 nt, Artificial Sequence
  Description of Artificial Sequence: Synthetic oligonucleotide
  Antisense strand to SEQ ID NO: 1164780
ugucauauacuacacuaug

SEQ ID NO: 1164782 - RNA, 19 nt, Artificial Sequence
  Description of Artificial Sequence: Synthetic oligonucleotide
  Sense strand starting at position 3378 of SEQ ID NO: 916541
ccaguuaccuguccauaaa

SEQ ID NO: 1164783 - RNA, 19 nt, Artificial Sequence
  Description of Artificial Sequence: Synthetic oligonucleotide
  Antisense strand to SEQ ID NO: 1164782
uuuauggacagguaacugg

SEQ ID NO: 1164784 - RNA, 19 nt, Artificial Sequence
  Description of Artificial Sequence: Synthetic oligonucleotide
  Sense strand starting at position 3455 of SEQ ID NO: 916541
ugcagauaucucuaagauc

SEQ ID NO: 1164785 - RNA, 19 nt, Artificial Sequence
  Description of Artificial Sequence: Synthetic oligonucleotide
  Antisense strand to SEQ ID NO: 1164784
gaucuuagagauaucugca

SEQ ID NO: 1164786 - RNA, 19 nt, Artificial Sequence
  Description of Artificial Sequence: Synthetic oligonucleotide
  Sense strand starting at position 3501 of SEQ ID NO: 916541
ccagaaguggauugcuaga

SEQ ID NO: 1164787 - RNA, 19 nt, Artificial Sequence
  Description of Artificial Sequence: Synthetic oligonucleotide
  Antisense strand to SEQ ID NO: 1164786
ucuagcaauccacuucugg

SEQ ID NO: 1164788 - RNA, 19 nt, Artificial Sequence
  Description of Artificial Sequence: Synthetic oligonucleotide
  Sense strand starting at position 180 of SEQ ID NO: 916542
ggucccugucucugugaau

SEQ ID NO: 1164789 - RNA, 19 nt, Artificial Sequence
  Description of Artificial Sequence: Synthetic oligonucleotide
  Antisense strand to SEQ ID NO: 1164788
auucacagagacagggacc

SEQ ID NO: 1164790 - RNA, 19 nt, Artificial Sequence
  Description of Artificial Sequence: Synthetic oligonucleotide
  Sense strand starting at position 181 of SEQ ID NO: 916542
gucccugucucugugaauu

SEQ ID NO: 1164791 - RNA, 19 nt, Artificial Sequence
  Description of Artificial Sequence: Synthetic oligonucleotide
  Antisense strand to SEQ ID NO: 1164790
aauucacagagacagggac

SEQ ID NO: 1164792 - RNA, 19 nt, Artificial Sequence
  Description of Artificial Sequence: Synthetic oligonucleotide
  Sense strand starting at position 183 of SEQ ID NO: 916542
cccugucucugugaauuua

SEQ ID NO: 1164793 - RNA, 19 nt, Artificial Sequence
  Description of Artificial Sequence: Synthetic oligonucleotide
  Antisense strand to SEQ ID NO: 1164792
uaaauucacagagacaggg

SEQ ID NO: 1164794 - RNA, 19 nt, Artificial Sequence
  Description of Artificial Sequence: Synthetic oligonucleotide
  Sense strand starting at position 367 of SEQ ID NO: 916542
aggagucauuagccgcaga

SEQ ID NO: 1164795 - RNA, 19 nt, Artificial Sequence
  Description of Artificial Sequence: Synthetic oligonucleotide
  Antisense strand to SEQ ID NO: 1164794
ucugcggcuaaugacuccu

SEQ ID NO: 1164796 - RNA, 19 nt, Artificial Sequence
  Description of Artificial Sequence: Synthetic oligonucleotide
  Sense strand starting at position 368 of SEQ ID NO: 916542
ggagucauuagccgcagau

SEQ ID NO: 1164797 - RNA, 19 nt, Artificial Sequence
  Description of Artificial Sequence: Synthetic oligonucleotide
  Antisense strand to SEQ ID NO: 1164796
aucugcggcuaaugacucc

SEQ ID NO: 1164798 - RNA, 19 nt, Artificial Sequence
  Description of Artificial Sequence: Synthetic oligonucleotide
  Sense strand starting at position 370 of SEQ ID NO: 916542
agucauuagccgcagauua

SEQ ID NO: 1164799 - RNA, 19 nt, Artificial Sequence
  Description of Artificial Sequence: Synthetic oligonucleotide
  Antisense strand to SEQ ID NO: 1164798
uaaucugcggcuaaugacu

SEQ ID NO: 1164800 - RNA, 19 nt, Artificial Sequence
  Description of Artificial Sequence: Synthetic oligonucleotide
  Sense strand starting at position 711 of SEQ ID NO: 916542
acucuucuggugugagaug

SEQ ID NO: 1164801 - RNA, 19 nt, Artificial Sequence
  Description of Artificial Sequence: Synthetic oligonucleotide
  Antisense strand to SEQ ID NO: 1164800
caucucacaccagaagagu

SEQ ID NO: 1164802 - RNA, 19 nt, Artificial Sequence
  Description of Artificial Sequence: Synthetic oligonucleotide
  Sense strand starting at position 1131 of SEQ ID NO: 916542
cugugucucucuuuacuaa

SEQ ID NO: 1164803 - RNA, 19 nt, Artificial Sequence
  Description of Artificial Sequence: Synthetic oligonucleotide
  Antisense strand to SEQ ID NO: 1164802
uuaguaaagagagacacag

SEQ ID NO: 1164804 - RNA, 19 nt, Artificial Sequence
  Description of Artificial Sequence: Synthetic oligonucleotide
  Sense strand starting at position 1132 of SEQ ID NO: 916542
ugugucucucuuuacuaau

SEQ ID NO: 1164805 - RNA, 19 nt, Artificial Sequence
  Description of Artificial Sequence: Synthetic oligonucleotide
  Antisense strand to SEQ ID NO: 1164804
auuaguaaagagagacaca

SEQ ID NO: 1164806 - RNA, 19 nt, Artificial Sequence
  Description of Artificial Sequence: Synthetic oligonucleotide
  Sense strand starting at position 1471 of SEQ ID NO: 916542
cgagaugaucaugauugca

SEQ ID NO: 1164807 - RNA, 19 nt, Artificial Sequence
  Description of Artificial Sequence: Synthetic oligonucleotide
  Antisense strand to SEQ ID NO: 1164806
ugcaaucaugaucaucucg

SEQ ID NO: 1164808 - RNA, 19 nt, Artificial Sequence
  Description of Artificial Sequence: Synthetic oligonucleotide
  Sense strand starting at position 1473 of SEQ ID NO: 916542
agaugaucaugauugcauc

SEQ ID NO: 1164809 - RNA, 19 nt, Artificial Sequence
  Description of Artificial Sequence: Synthetic oligonucleotide
  Antisense strand to SEQ ID NO: 1164808
gaugcaaucaugaucaucu

SEQ ID NO: 1164810 - RNA, 19 nt, Artificial Sequence
  Description of Artificial Sequence: Synthetic oligonucleotide
  Sense strand starting at position 1474 of SEQ ID NO: 916542
gaugaucaugauugcauca

SEQ ID NO: 1164811 - RNA, 19 nt, Artificial Sequence
  Description of Artificial Sequence: Synthetic oligonucleotide
  Antisense strand to SEQ ID NO: 1164810
ugaugcaaucaugaucauc

SEQ ID NO: 1164812 - RNA, 19 nt, Artificial Sequence
  Description of Artificial Sequence: Synthetic oligonucleotide
  Sense strand starting at position 1485 of SEQ ID NO: 916542
uugcaucagccagacagaa

SEQ ID NO: 1164813 - RNA, 19 nt, Artificial Sequence
  Description of Artificial Sequence: Synthetic oligonucleotide
  Antisense strand to SEQ ID NO: 1164812
uucugucuggcugaugcaa

SEQ ID NO: 1164814 - RNA, 19 nt, Artificial Sequence
  Description of Artificial Sequence: Synthetic oligonucleotide
  Sense strand starting at position 1553 of SEQ ID NO: 916542
gcgccaucuguuuaugcaa

SEQ ID NO: 1164815 - RNA, 19 nt, Artificial Sequence
  Description of Artificial Sequence: Synthetic oligonucleotide
  Antisense strand to SEQ ID NO: 1164814
uugcauaaacagauggcgc

SEQ ID NO: 1164816 - RNA, 19 nt, Artificial Sequence
  Description of Artificial Sequence: Synthetic oligonucleotide
  Sense strand starting at position 1752 of SEQ ID NO: 916542
cgcggcuguuucuucaaua

SEQ ID NO: 1164817 - RNA, 19 nt, Artificial Sequence
  Description of Artificial Sequence: Synthetic oligonucleotide
  Antisense strand to SEQ ID NO: 1164816
uauugaagaaacagccgcg

SEQ ID NO: 1164818 - RNA, 19 nt, Artificial Sequence
  Description of Artificial Sequence: Synthetic oligonucleotide
  Sense strand starting at position 1905 of SEQ ID NO: 916542
gucacacugucauucggau

SEQ ID NO: 1164819 - RNA, 19 nt, Artificial Sequence
  Description of Artificial Sequence: Synthetic oligonucleotide
  Antisense strand to SEQ ID NO: 1164818
auccgaaugacagugugac

SEQ ID NO: 1164820 - RNA, 19 nt, Artificial Sequence
  Description of Artificial Sequence: Synthetic oligonucleotide
  Sense strand starting at position 1961 of SEQ ID NO: 916542
acgcacugucacugagaca

SEQ ID NO: 1164821 - RNA, 19 nt, Artificial Sequence
  Description of Artificial Sequence: Synthetic oligonucleotide
  Antisense strand to SEQ ID NO: 1164820
ugucucagugacagugcgu

SEQ ID NO: 1164822 - RNA, 19 nt, Artificial Sequence
  Description of Artificial Sequence: Synthetic oligonucleotide
  Sense strand starting at position 2275 of SEQ ID NO: 916542
cggagauacagacguccau

SEQ ID NO: 1164823 - RNA, 19 nt, Artificial Sequence
  Description of Artificial Sequence: Synthetic oligonucleotide
  Antisense strand to SEQ ID NO: 1164822
auggacgucuguaucuccg

SEQ ID NO: 1164824 - RNA, 19 nt, Artificial Sequence
  Description of Artificial Sequence: Synthetic oligonucleotide
  Sense strand starting at position 2279 of SEQ ID NO: 916542
gauacagacguccauaauu

SEQ ID NO: 1164825 - RNA, 19 nt, Artificial Sequence
  Description of Artificial Sequence: Synthetic oligonucleotide
  Antisense strand to SEQ ID NO: 1164824
aauuauggacgucuguauc

SEQ ID NO: 1164826 - RNA, 19 nt, Artificial Sequence
  Description of Artificial Sequence: Synthetic oligonucleotide
  Sense strand starting at position 2444 of SEQ ID NO: 916542
ugaugaggucuuggugaca

SEQ ID NO: 1164827 - RNA, 19 nt, Artificial Sequence
  Description of Artificial Sequence: Synthetic oligonucleotide
  Antisense strand to SEQ ID NO: 1164826
ugucaccaagaccucauca

SEQ ID NO: 1164828 - RNA, 19 nt, Artificial Sequence
  Description of Artificial Sequence: Synthetic oligonucleotide
  Sense strand starting at position 2506 of SEQ ID NO: 916542
cuuagcugucugcaagcuu

SEQ ID NO: 1164829 - RNA, 19 nt, Artificial Sequence
  Description of Artificial Sequence: Synthetic oligonucleotide
  Antisense strand to SEQ ID NO: 1164828
aagcuugcagacagcuaag

SEQ ID NO: 1164830 - RNA, 19 nt, Artificial Sequence
  Description of Artificial Sequence: Synthetic oligonucleotide
  Sense strand starting at position 2608 of SEQ ID NO: 916542
gggcaguuucguggaggga

SEQ ID NO: 1164831 - RNA, 19 nt, Artificial Sequence
  Description of Artificial Sequence: Synthetic oligonucleotide
  Antisense strand to SEQ ID NO: 1164830
ucccuccacgaaacugccc

SEQ ID NO: 1164832 - RNA, 19 nt, Artificial Sequence
  Description of Artificial Sequence: Synthetic oligonucleotide
  Sense strand starting at position 2610 of SEQ ID NO: 916542
gcaguuucguggagggaga

SEQ ID NO: 1164833 - RNA, 19 nt, Artificial Sequence
  Description of Artificial Sequence: Synthetic oligonucleotide
  Antisense strand to SEQ ID NO: 1164832
ucucccuccacgaaacugc

SEQ ID NO: 1164834 - RNA, 19 nt, Artificial Sequence
  Description of Artificial Sequence: Synthetic oligonucleotide
  Sense strand starting at position 2654 of SEQ ID NO: 916542
ccgagagauucucaggauc

SEQ ID NO: 1164835 - RNA, 19 nt, Artificial Sequence
  Description of Artificial Sequence: Synthetic oligonucleotide
  Antisense strand to SEQ ID NO: 1164834
gauccugagaaucucucgg

SEQ ID NO: 1164836 - RNA, 19 nt, Artificial Sequence
  Description of Artificial Sequence: Synthetic oligonucleotide
  Sense strand starting at position 2699 of SEQ ID NO: 916542
uagaaagggucacucugua

SEQ ID NO: 1164837 - RNA, 19 nt, Artificial Sequence
  Description of Artificial Sequence: Synthetic oligonucleotide
  Antisense strand to SEQ ID NO: 1164836
uacagagugacccuuucua

SEQ ID NO: 1164838 - RNA, 19 nt, Artificial Sequence
  Description of Artificial Sequence: Synthetic oligonucleotide
  Sense strand starting at position 2888 of SEQ ID NO: 916542
cuccuuggcccagacuuau

SEQ ID NO: 1164839 - RNA, 19 nt, Artificial Sequence
  Description of Artificial Sequence: Synthetic oligonucleotide
  Antisense strand to SEQ ID NO: 1164838
auaagucugggccaaggag

SEQ ID NO: 1164840 - RNA, 19 nt, Artificial Sequence
  Description of Artificial Sequence: Synthetic oligonucleotide
  Sense strand starting at position 2921 of SEQ ID NO: 916542
gcggcaguaucauccauca

SEQ ID NO: 1164841 - RNA, 19 nt, Artificial Sequence
  Description of Artificial Sequence: Synthetic oligonucleotide
  Antisense strand to SEQ ID NO: 1164840
ugauggaugauacugccgc

SEQ ID NO: 1164842 - RNA, 19 nt, Artificial Sequence
  Description of Artificial Sequence: Synthetic oligonucleotide
  Sense strand starting at position 3046 of SEQ ID NO: 916542
uuaagagucuuggugagua

SEQ ID NO: 1164843 - RNA, 19 nt, Artificial Sequence
  Description of Artificial Sequence: Synthetic oligonucleotide
  Antisense strand to SEQ ID NO: 1164842
uacucaccaagacucuuaa

SEQ ID NO: 1164844 - RNA, 19 nt, Artificial Sequence
  Description of Artificial Sequence: Synthetic oligonucleotide
  Sense strand starting at position 3048 of SEQ ID NO: 916542
aagagucuuggugaguaau

SEQ ID NO: 1164845 - RNA, 19 nt, Artificial Sequence
  Description of Artificial Sequence: Synthetic oligonucleotide
  Antisense strand to SEQ ID NO: 1164844
auuacucaccaagacucuu

SEQ ID NO: 1164846 - RNA, 19 nt, Artificial Sequence
  Description of Artificial Sequence: Synthetic oligonucleotide
  Sense strand starting at position 3050 of SEQ ID NO: 916542
gagucuuggugaguaauga

SEQ ID NO: 1164847 - RNA, 19 nt, Artificial Sequence
  Description of Artificial Sequence: Synthetic oligonucleotide
  Antisense strand to SEQ ID NO: 1164846
ucauuacucaccaagacuc

SEQ ID NO: 1164848 - RNA, 19 nt, Artificial Sequence
  Description of Artificial Sequence: Synthetic oligonucleotide
  Sense strand starting at position 3051 of SEQ ID NO: 916542
agucuuggugaguaaugac

SEQ ID NO: 1164849 - RNA, 19 nt, Artificial Sequence
  Description of Artificial Sequence: Synthetic oligonucleotide
  Antisense strand to SEQ ID NO: 1164848
gucauuacucaccaagacu

SEQ ID NO: 1164850 - RNA, 19 nt, Artificial Sequence
  Description of Artificial Sequence: Synthetic oligonucleotide
  Sense strand starting at position 3059 of SEQ ID NO: 916542
ugaguaaugacgggagggu

SEQ ID NO: 1164851 - RNA, 19 nt, Artificial Sequence
  Description of Artificial Sequence: Synthetic oligonucleotide
  Antisense strand to SEQ ID NO: 1164850
acccucccgucauuacuca

SEQ ID NO: 1164852 - RNA, 19 nt, Artificial Sequence
  Description of Artificial Sequence: Synthetic oligonucleotide
  Sense strand starting at position 3361 of SEQ ID NO: 916542
cgcccaaugagccaguaaa

SEQ ID NO: 1164853 - RNA, 19 nt, Artificial Sequence
  Description of Artificial Sequence: Synthetic oligonucleotide
  Antisense strand to SEQ ID NO: 1164852
uuuacuggcucauugggcg

SEQ ID NO: 1164854 - RNA, 19 nt, Artificial Sequence
  Description of Artificial Sequence: Synthetic oligonucleotide
  Sense strand starting at position 3441 of SEQ ID NO: 916542
ucccucagaccuugaugaa

SEQ ID NO: 1164855 - RNA, 19 nt, Artificial Sequence
  Description of Artificial Sequence: Synthetic oligonucleotide
  Antisense strand to SEQ ID NO: 1164854
uucaucaaggucugaggga

SEQ ID NO: 1164856 - RNA, 19 nt, Artificial Sequence
  Description of Artificial Sequence: Synthetic oligonucleotide
  Sense strand starting at position 3444 of SEQ ID NO: 916542
cucagaccuugaugaauag

SEQ ID NO: 1164857 - RNA, 19 nt, Artificial Sequence
  Description of Artificial Sequence: Synthetic oligonucleotide
  Antisense strand to SEQ ID NO: 1164856
cuauucaucaaggucugag

SEQ ID NO: 1164858 - RNA, 19 nt, Artificial Sequence
  Description of Artificial Sequence: Synthetic oligonucleotide
  Sense strand starting at position 3506 of SEQ ID NO: 916542
guagguggauuucaaggaa

SEQ ID NO: 1164859 - RNA, 19 nt, Artificial Sequence
  Description of Artificial Sequence: Synthetic oligonucleotide
  Antisense strand to SEQ ID NO: 1164858
uuccuugaaauccaccuac

SEQ ID NO: 1164860 - RNA, 19 nt, Artificial Sequence
  Description of Artificial Sequence: Synthetic oligonucleotide
  Sense strand starting at position 3536 of SEQ ID NO: 916542
gaaugcuugauuugcgugu

SEQ ID NO: 1164861 - RNA, 19 nt, Artificial Sequence
  Description of Artificial Sequence: Synthetic oligonucleotide
  Antisense strand to SEQ ID NO: 1164860
acacgcaaaucaagcauuc

SEQ ID NO: 1164862 - RNA, 19 nt, Artificial Sequence
  Description of Artificial Sequence: Synthetic oligonucleotide
  Sense strand starting at position 3540 of SEQ ID NO: 916542
gcuugauuugcgugugguu

SEQ ID NO: 1164863 - RNA, 19 nt, Artificial Sequence
  Description of Artificial Sequence: Synthetic oligonucleotide
  Antisense strand to SEQ ID NO: 1164862
aaccacacgcaaaucaagc

SEQ ID NO: 1164864 - RNA, 19 nt, Artificial Sequence
  Description of Artificial Sequence: Synthetic oligonucleotide
  Sense strand starting at position 3565 of SEQ ID NO: 916542
uguguuugccugugaucug

SEQ ID NO: 1164865 - RNA, 19 nt, Artificial Sequence
  Description of Artificial Sequence: Synthetic oligonucleotide
  Antisense strand to SEQ ID NO: 1164864
cagaucacaggcaaacaca

SEQ ID NO: 1164866 - RNA, 19 nt, Artificial Sequence
  Description of Artificial Sequence: Synthetic oligonucleotide
  Sense strand starting at position 3593 of SEQ ID NO: 916542
cagcucaaucgcgauuaaa

SEQ ID NO: 1164867 - RNA, 19 nt, Artificial Sequence
  Description of Artificial Sequence: Synthetic oligonucleotide
  Antisense strand to SEQ ID NO: 1164866
uuuaaucgcgauugagcug

SEQ ID NO: 1164868 - RNA, 19 nt, Artificial Sequence
  Description of Artificial Sequence: Synthetic oligonucleotide
  Sense strand starting at position 31 of SEQ ID NO: 916543
uggcauacaguuuaaacua

SEQ ID NO: 1164869 - RNA, 19 nt, Artificial Sequence
  Description of Artificial Sequence: Synthetic oligonucleotide
  Antisense strand to SEQ ID NO: 1164868
uaguuuaaacuguaugcca

SEQ ID NO: 1164870 - RNA, 19 nt, Artificial Sequence
  Description of Artificial Sequence: Synthetic oligonucleotide
  Sense strand starting at position 590 of SEQ ID NO: 916543
uauggugucagucagagga

SEQ ID NO: 1164871 - RNA, 19 nt, Artificial Sequence
  Description of Artificial Sequence: Synthetic oligonucleotide
  Antisense strand to SEQ ID NO: 1164870
uccucugacugacaccaua

SEQ ID NO: 1164872 - RNA, 19 nt, Artificial Sequence
  Description of Artificial Sequence: Synthetic oligonucleotide
  Sense strand starting at position 658 of SEQ ID NO: 916543
gcagauagcagguacucaa

SEQ ID NO: 1164873 - RNA, 19 nt, Artificial Sequence
  Description of Artificial Sequence: Synthetic oligonucleotide
  Antisense strand to SEQ ID NO: 1164872
uugaguaccugcuaucugc

SEQ ID NO: 1164874 - RNA, 19 nt, Artificial Sequence
  Description of Artificial Sequence: Synthetic oligonucleotide
  Sense strand starting at position 661 of SEQ ID NO: 916543
gauagcagguacucaauaa

SEQ ID NO: 1164875 - RNA, 19 nt, Artificial Sequence
  Description of Artificial Sequence: Synthetic oligonucleotide
  Antisense strand to SEQ ID NO: 1164874
uuauugaguaccugcuauc

SEQ ID NO: 1164876 - RNA, 19 nt, Artificial Sequence
  Description of Artificial Sequence: Synthetic oligonucleotide
  Sense strand starting at position 1041 of SEQ ID NO: 916543
agcaaaugauauucuguaa

SEQ ID NO: 1164877 - RNA, 19 nt, Artificial Sequence
  Description of Artificial Sequence: Synthetic oligonucleotide
  Antisense strand to SEQ ID NO: 1164876
uuacagaauaucauuugcu

SEQ ID NO: 1164878 - RNA, 19 nt, Artificial Sequence
  Description of Artificial Sequence: Synthetic oligonucleotide
  Sense strand starting at position 1044 of SEQ ID NO: 916543
aaaugauauucuguaacga

SEQ ID NO: 1164879 - RNA, 19 nt, Artificial Sequence
  Description of Artificial Sequence: Synthetic oligonucleotide
  Antisense strand to SEQ ID NO: 1164878
ucguuacagaauaucauuu

SEQ ID NO: 1164880 - RNA, 19 nt, Artificial Sequence
  Description of Artificial Sequence: Synthetic oligonucleotide
  Sense strand starting at position 1045 of SEQ ID NO: 916543
aaugauauucuguaacgac

SEQ ID NO: 1164881 - RNA, 19 nt, Artificial Sequence
  Description of Artificial Sequence: Synthetic oligonucleotide
  Antisense strand to SEQ ID NO: 1164880
gucguuacagaauaucauu

SEQ ID NO: 1164882 - RNA, 19 nt, Artificial Sequence
  Description of Artificial Sequence: Synthetic oligonucleotide
  Sense strand starting at position 1096 of SEQ ID NO: 916543
guuugauuggaauauguuu

SEQ ID NO: 1164883 - RNA, 19 nt, Artificial Sequence
  Description of Artificial Sequence: Synthetic oligonucleotide
  Antisense strand to SEQ ID NO: 1164882
aaacauauuccaaucaaac

SEQ ID NO: 1164884 - RNA, 19 nt, Artificial Sequence
  Description of Artificial Sequence: Synthetic oligonucleotide
  Sense strand starting at position 1101 of SEQ ID NO: 916543
auuggaauauguuugugga

SEQ ID NO: 1164885 - RNA, 19 nt, Artificial Sequence
  Description of Artificial Sequence: Synthetic oligonucleotide
  Antisense strand to SEQ ID NO: 1164884
uccacaaacauauuccaau

SEQ ID NO: 1164886 - RNA, 19 nt, Artificial Sequence
  Description of Artificial Sequence: Synthetic oligonucleotide
  Sense strand starting at position 1102 of SEQ ID NO: 916543
uuggaauauguuuguggaa

SEQ ID NO: 1164887 - RNA, 19 nt, Artificial Sequence
  Description of Artificial Sequence: Synthetic oligonucleotide
  Antisense strand to SEQ ID NO: 1164886
uuccacaaacauauuccaa

SEQ ID NO: 1164888 - RNA, 19 nt, Artificial Sequence
  Description of Artificial Sequence: Synthetic oligonucleotide
  Sense strand starting at position 1103 of SEQ ID NO: 916543
uggaauauguuuguggaag

SEQ ID NO: 1164889 - RNA, 19 nt, Artificial Sequence
  Description of Artificial Sequence: Synthetic oligonucleotide
  Antisense strand to SEQ ID NO: 1164888
cuuccacaaacauauucca

SEQ ID NO: 1164890 - RNA, 19 nt, Artificial Sequence
  Description of Artificial Sequence: Synthetic oligonucleotide
  Sense strand starting at position 1109 of SEQ ID NO: 916543
auguuuguggaagaguaga

SEQ ID NO: 1164891 - RNA, 19 nt, Artificial Sequence
  Description of Artificial Sequence: Synthetic oligonucleotide
  Antisense strand to SEQ ID NO: 1164890
ucuacucuuccacaaacau

SEQ ID NO: 1164892 - RNA, 19 nt, Artificial Sequence
  Description of Artificial Sequence: Synthetic oligonucleotide
  Sense strand starting at position 1149 of SEQ ID NO: 916543
guguaaccguauuucuaau

SEQ ID NO: 1164893 - RNA, 19 nt, Artificial Sequence
  Description of Artificial Sequence: Synthetic oligonucleotide
  Antisense strand to SEQ ID NO: 1164892
auuagaaauacgguuacac

SEQ ID NO: 1164894 - RNA, 19 nt, Artificial Sequence
  Description of Artificial Sequence: Synthetic oligonucleotide
  Sense strand starting at position 1377 of SEQ ID NO: 916543
auucuacauccguagagac

SEQ ID NO: 1164895 - RNA, 19 nt, Artificial Sequence
  Description of Artificial Sequence: Synthetic oligonucleotide
  Antisense strand to SEQ ID NO: 1164894
gucucuacggauguagaau

SEQ ID NO: 1164896 - RNA, 19 nt, Artificial Sequence
  Description of Artificial Sequence: Synthetic oligonucleotide
  Sense strand starting at position 1444 of SEQ ID NO: 916543
aucagagacucccugguau

SEQ ID NO: 1164897 - RNA, 19 nt, Artificial Sequence
  Description of Artificial Sequence: Synthetic oligonucleotide
  Antisense strand to SEQ ID NO: 1164896
auaccagggagucucugau

SEQ ID NO: 1164898 - RNA, 19 nt, Artificial Sequence
  Description of Artificial Sequence: Synthetic oligonucleotide
  Sense strand starting at position 1732 of SEQ ID NO: 916543
ugcacaauugaauauguga

SEQ ID NO: 1164899 - RNA, 19 nt, Artificial Sequence
  Description of Artificial Sequence: Synthetic oligonucleotide
  Antisense strand to SEQ ID NO: 1164898
ucacauauucaauugugca

SEQ ID NO: 1164900 - RNA, 19 nt, Artificial Sequence
  Description of Artificial Sequence: Synthetic oligonucleotide
  Sense strand starting at position 2079 of SEQ ID NO: 916543
acgguuucggguagauugu

SEQ ID NO: 1164901 - RNA, 19 nt, Artificial Sequence
  Description of Artificial Sequence: Synthetic oligonucleotide
  Antisense strand to SEQ ID NO: 1164900
acaaucuacccgaaaccgu

SEQ ID NO: 1164902 - RNA, 19 nt, Artificial Sequence
  Description of Artificial Sequence: Synthetic oligonucleotide
  Sense strand starting at position 2089 of SEQ ID NO: 916543
guagauuguugguuaagaa

SEQ ID NO: 1164903 - RNA, 19 nt, Artificial Sequence
  Description of Artificial Sequence: Synthetic oligonucleotide
  Antisense strand to SEQ ID NO: 1164902
uucuuaaccaacaaucuac

SEQ ID NO: 1164904 - RNA, 19 nt, Artificial Sequence
  Description of Artificial Sequence: Synthetic oligonucleotide
  Sense strand starting at position 2207 of SEQ ID NO: 916543
ucucuaauugccgaggaac

SEQ ID NO: 1164905 - RNA, 19 nt, Artificial Sequence
  Description of Artificial Sequence: Synthetic oligonucleotide
  Antisense strand to SEQ ID NO: 1164904
guuccucggcaauuagaga

SEQ ID NO: 1164906 - RNA, 19 nt, Artificial Sequence
  Description of Artificial Sequence: Synthetic oligonucleotide
  Sense strand starting at position 2235 of SEQ ID NO: 916543
agaguuaaccagugacuga

SEQ ID NO: 1164907 - RNA, 19 nt, Artificial Sequence
  Description of Artificial Sequence: Synthetic oligonucleotide
  Antisense strand to SEQ ID NO: 1164906
ucagucacugguuaacucu

SEQ ID NO: 1164908 - RNA, 19 nt, Artificial Sequence
  Description of Artificial Sequence: Synthetic oligonucleotide
  Sense strand starting at position 2283 of SEQ ID NO: 916543
gguagaagagcucaccuuu

SEQ ID NO: 1164909 - RNA, 19 nt, Artificial Sequence
  Description of Artificial Sequence: Synthetic oligonucleotide
  Antisense strand to SEQ ID NO: 1164908
aaaggugagcucuucuacc

SEQ ID NO: 1164910 - RNA, 19 nt, Artificial Sequence
  Description of Artificial Sequence: Synthetic oligonucleotide
  Sense strand starting at position 2354 of SEQ ID NO: 916543
ggugaguccggaggaagaa

SEQ ID NO: 1164911 - RNA, 19 nt, Artificial Sequence
  Description of Artificial Sequence: Synthetic oligonucleotide
  Antisense strand to SEQ ID NO: 1164910
uucuuccuccggacucacc

SEQ ID NO: 1164912 - RNA, 19 nt, Artificial Sequence
  Description of Artificial Sequence: Synthetic oligonucleotide
  Sense strand starting at position 2472 of SEQ ID NO: 916543
gugugucccaaguaaauaa

SEQ ID NO: 1164913 - RNA, 19 nt, Artificial Sequence
  Description of Artificial Sequence: Synthetic oligonucleotide
  Antisense strand to SEQ ID NO: 1164912
uuauuuacuugggacacac

SEQ ID NO: 1164914 - RNA, 19 nt, Artificial Sequence
  Description of Artificial Sequence: Synthetic oligonucleotide
  Sense strand starting at position 2723 of SEQ ID NO: 916543
aguucuuaaccagaagugu

SEQ ID NO: 1164915 - RNA, 19 nt, Artificial Sequence
  Description of Artificial Sequence: Synthetic oligonucleotide
  Antisense strand to SEQ ID NO: 1164914
acacuucugguuaagaacu

SEQ ID NO: 1164916 - RNA, 19 nt, Artificial Sequence
  Description of Artificial Sequence: Synthetic oligonucleotide
  Sense strand starting at position 2758 of SEQ ID NO: 916543
ucgggaaaucugugaacuu

SEQ ID NO: 1164917 - RNA, 19 nt, Artificial Sequence
  Description of Artificial Sequence: Synthetic oligonucleotide
  Antisense strand to SEQ ID NO: 1164916
aaguucacagauuucccga

SEQ ID NO: 1164918 - RNA, 19 nt, Artificial Sequence
  Description of Artificial Sequence: Synthetic oligonucleotide
  Sense strand starting at position 2816 of SEQ ID NO: 916543
cugaacaucugucuaagga

SEQ ID NO: 1164919 - RNA, 19 nt, Artificial Sequence
  Description of Artificial Sequence: Synthetic oligonucleotide
  Antisense strand to SEQ ID NO: 1164918
uccuuagacagauguucag

SEQ ID NO: 1164920 - RNA, 19 nt, Artificial Sequence
  Description of Artificial Sequence: Synthetic oligonucleotide
  Sense strand starting at position 2856 of SEQ ID NO: 916543
uagcgcaauggcuuguaau

SEQ ID NO: 1164921 - RNA, 19 nt, Artificial Sequence
  Description of Artificial Sequence: Synthetic oligonucleotide
  Antisense strand to SEQ ID NO: 1164920
auuacaagccauugcgcua

SEQ ID NO: 1164922 - RNA, 19 nt, Artificial Sequence
  Description of Artificial Sequence: Synthetic oligonucleotide
  Sense strand starting at position 2907 of SEQ ID NO: 916543
ugcauuguucuacaaagag

SEQ ID NO: 1164923 - RNA, 19 nt, Artificial Sequence
  Description of Artificial Sequence: Synthetic oligonucleotide
  Antisense strand to SEQ ID NO: 1164922
cucuuuguagaacaaugca

SEQ ID NO: 1164924 - RNA, 19 nt, Artificial Sequence
  Description of Artificial Sequence: Synthetic oligonucleotide
  Sense strand starting at position 2955 of SEQ ID NO: 916543
agacuaagcgcuuggauuu

SEQ ID NO: 1164925 - RNA, 19 nt, Artificial Sequence
  Description of Artificial Sequence: Synthetic oligonucleotide
  Antisense strand to SEQ ID NO: 1164924
aaauccaagcgcuuagucu

SEQ ID NO: 1164926 - RNA, 19 nt, Artificial Sequence
  Description of Artificial Sequence: Synthetic oligonucleotide
  Sense strand starting at position 3045 of SEQ ID NO: 916543
auaccuuaggcuuaucaga

SEQ ID NO: 1164927 - RNA, 19 nt, Artificial Sequence
  Description of Artificial Sequence: Synthetic oligonucleotide
  Antisense strand to SEQ ID NO: 1164926
ucugauaagccuaagguau

SEQ ID NO: 1164928 - RNA, 19 nt, Artificial Sequence
  Description of Artificial Sequence: Synthetic oligonucleotide
  Sense strand starting at position 3047 of SEQ ID NO: 916543
accuuaggcuuaucagaaa

SEQ ID NO: 1164929 - RNA, 19 nt, Artificial Sequence
  Description of Artificial Sequence: Synthetic oligonucleotide
  Antisense strand to SEQ ID NO: 1164928
uuucugauaagccuaaggu

SEQ ID NO: 1164930 - RNA, 19 nt, Artificial Sequence
  Description of Artificial Sequence: Synthetic oligonucleotide
  Sense strand starting at position 3143 of SEQ ID NO: 916543
guguuucugggauagacaa

SEQ ID NO: 1164931 - RNA, 19 nt, Artificial Sequence
  Description of Artificial Sequence: Synthetic oligonucleotide
  Antisense strand to SEQ ID NO: 1164930
uugucuaucccagaaacac

SEQ ID NO: 1164932 - RNA, 19 nt, Artificial Sequence
  Description of Artificial Sequence: Synthetic oligonucleotide
  Sense strand starting at position 3166 of SEQ ID NO: 916543
gccugugaugaguagggau

SEQ ID NO: 1164933 - RNA, 19 nt, Artificial Sequence
  Description of Artificial Sequence: Synthetic oligonucleotide
  Antisense strand to SEQ ID NO: 1164932
aucccuacucaucacaggc

SEQ ID NO: 1164934 - RNA, 19 nt, Artificial Sequence
  Description of Artificial Sequence: Synthetic oligonucleotide
  Sense strand starting at position 3198 of SEQ ID NO: 916543
auuacuaggcuugaaaucu

SEQ ID NO: 1164935 - RNA, 19 nt, Artificial Sequence
  Description of Artificial Sequence: Synthetic oligonucleotide
  Antisense strand to SEQ ID NO: 1164934
agauuucaagccuaguaau

SEQ ID NO: 1164936 - RNA, 19 nt, Artificial Sequence
  Description of Artificial Sequence: Synthetic oligonucleotide
  Sense strand starting at position 3336 of SEQ ID NO: 916543
gucauauuucuuggccuua

SEQ ID NO: 1164937 - RNA, 19 nt, Artificial Sequence
  Description of Artificial Sequence: Synthetic oligonucleotide
  Antisense strand to SEQ ID NO: 1164936
uaaggccaagaaauaugac

SEQ ID NO: 1164938 - RNA, 19 nt, Artificial Sequence
  Description of Artificial Sequence: Synthetic oligonucleotide
  Sense strand starting at position 3423 of SEQ ID NO: 916543
ccuuguucggaucaacaga

SEQ ID NO: 1164939 - RNA, 19 nt, Artificial Sequence
  Description of Artificial Sequence: Synthetic oligonucleotide
  Antisense strand to SEQ ID NO: 1164938
ucuguugauccgaacaagg

SEQ ID NO: 1164940 - RNA, 19 nt, Artificial Sequence
  Description of Artificial Sequence: Synthetic oligonucleotide
  Sense strand starting at position 3771 of SEQ ID NO: 916543
agcugugaccuggacaagu

SEQ ID NO: 1164941 - RNA, 19 nt, Artificial Sequence
  Description of Artificial Sequence: Synthetic oligonucleotide
  Antisense strand to SEQ ID NO: 1164940
acuuguccaggucacagcu

SEQ ID NO: 1164942 - RNA, 19 nt, Artificial Sequence
  Description of Artificial Sequence: Synthetic oligonucleotide
  Sense strand starting at position 3773 of SEQ ID NO: 916543
cugugaccuggacaaguuu

SEQ ID NO: 1164943 - RNA, 19 nt, Artificial Sequence
  Description of Artificial Sequence: Synthetic oligonucleotide
  Antisense strand to SEQ ID NO: 1164942
aaacuuguccaggucacag

SEQ ID NO: 1164944 - RNA, 19 nt, Artificial Sequence
  Description of Artificial Sequence: Synthetic oligonucleotide
  Sense strand starting at position 3797 of SEQ ID NO: 916543
cuugucuaacaggguaaau

SEQ ID NO: 1164945 - RNA, 19 nt, Artificial Sequence
  Description of Artificial Sequence: Synthetic oligonucleotide
  Antisense strand to SEQ ID NO: 1164944
auuuacccuguuagacaag

SEQ ID NO: 1164946 - RNA, 19 nt, Artificial Sequence
  Description of Artificial Sequence: Synthetic oligonucleotide
  Sense strand starting at position 3861 of SEQ ID NO: 916543
gcguaauggaugcaaagau

SEQ ID NO: 1164947 - RNA, 19 nt, Artificial Sequence
  Description of Artificial Sequence: Synthetic oligonucleotide
  Antisense strand to SEQ ID NO: 1164946
aucuuugcauccauuacgc

SEQ ID NO: 1164948 - RNA, 19 nt, Artificial Sequence
  Description of Artificial Sequence: Synthetic oligonucleotide
  Sense strand starting at position 129 of SEQ ID NO: 916544
aaugaugaugugggucaga

SEQ ID NO: 1164949 - RNA, 19 nt, Artificial Sequence
  Description of Artificial Sequence: Synthetic oligonucleotide
  Antisense strand to SEQ ID NO: 1164948
ucugacccacaucaucauu

SEQ ID NO: 1164950 - RNA, 19 nt, Artificial Sequence
  Description of Artificial Sequence: Synthetic oligonucleotide
  Sense strand starting at position 261 of SEQ ID NO: 916544
ugggaaauauaucaagauc

SEQ ID NO: 1164951 - RNA, 19 nt, Artificial Sequence
  Description of Artificial Sequence: Synthetic oligonucleotide
  Antisense strand to SEQ ID NO: 1164950
gaucuugauauauuuccca

SEQ ID NO: 1164952 - RNA, 19 nt, Artificial Sequence
  Description of Artificial Sequence: Synthetic oligonucleotide
  Sense strand starting at position 494 of SEQ ID NO: 916544
cguggugucacgccuguaa

SEQ ID NO: 1164953 - RNA, 19 nt, Artificial Sequence
  Description of Artificial Sequence: Synthetic oligonucleotide
  Antisense strand to SEQ ID NO: 1164952
uuacaggcgugacaccacg

SEQ ID NO: 1164954 - RNA, 19 nt, Artificial Sequence
  Description of Artificial Sequence: Synthetic oligonucleotide
  Sense strand starting at position 884 of SEQ ID NO: 916544
uguuaagcacauuauaaga

SEQ ID NO: 1164955 - RNA, 19 nt, Artificial Sequence
  Description of Artificial Sequence: Synthetic oligonucleotide
  Antisense strand to SEQ ID NO: 1164954
ucuuauaaugugcuuaaca

SEQ ID NO: 1164956 - RNA, 19 nt, Artificial Sequence
  Description of Artificial Sequence: Synthetic oligonucleotide
  Sense strand starting at position 894 of SEQ ID NO: 916544
auuauaagagcgcagguau

SEQ ID NO: 1164957 - RNA, 19 nt, Artificial Sequence
  Description of Artificial Sequence: Synthetic oligonucleotide
  Antisense strand to SEQ ID NO: 1164956
auaccugcgcucuuauaau

SEQ ID NO: 1164958 - RNA, 19 nt, Artificial Sequence
  Description of Artificial Sequence: Synthetic oligonucleotide
  Sense strand starting at position 1047 of SEQ ID NO: 916544
accucacagucauuggauu

SEQ ID NO: 1164959 - RNA, 19 nt, Artificial Sequence
  Description of Artificial Sequence: Synthetic oligonucleotide
  Antisense strand to SEQ ID NO: 1164958
aauccaaugacugugaggu

SEQ ID NO: 1164960 - RNA, 19 nt, Artificial Sequence
  Description of Artificial Sequence: Synthetic oligonucleotide
  Sense strand starting at position 1048 of SEQ ID NO: 916544
ccucacagucauuggauua

SEQ ID NO: 1164961 - RNA, 19 nt, Artificial Sequence
  Description of Artificial Sequence: Synthetic oligonucleotide
  Antisense strand to SEQ ID NO: 1164960
uaauccaaugacugugagg

SEQ ID NO: 1164962 - RNA, 19 nt, Artificial Sequence
  Description of Artificial Sequence: Synthetic oligonucleotide
  Sense strand starting at position 1074 of SEQ ID NO: 916544
gguaguuaggcccaacaga

SEQ ID NO: 1164963 - RNA, 19 nt, Artificial Sequence
  Description of Artificial Sequence: Synthetic oligonucleotide
  Antisense strand to SEQ ID NO: 1164962
ucuguugggccuaacuacc

SEQ ID NO: 1164964 - RNA, 19 nt, Artificial Sequence
  Description of Artificial Sequence: Synthetic oligonucleotide
  Sense strand starting at position 1220 of SEQ ID NO: 916544
cguuguaaagcuuaugauc

SEQ ID NO: 1164965 - RNA, 19 nt, Artificial Sequence
  Description of Artificial Sequence: Synthetic oligonucleotide
  Antisense strand to SEQ ID NO: 1164964
gaucauaagcuuuacaacg

SEQ ID NO: 1164966 - RNA, 19 nt, Artificial Sequence
  Description of Artificial Sequence: Synthetic oligonucleotide
  Sense strand starting at position 1291 of SEQ ID NO: 916544
augacaguuggugacgaaa

SEQ ID NO: 1164967 - RNA, 19 nt, Artificial Sequence
  Description of Artificial Sequence: Synthetic oligonucleotide
  Antisense strand to SEQ ID NO: 1164966
uuucgucaccaacugucau

SEQ ID NO: 1164968 - RNA, 19 nt, Artificial Sequence
  Description of Artificial Sequence: Synthetic oligonucleotide
  Sense strand starting at position 1722 of SEQ ID NO: 916544
ugacaauacagagguagua

SEQ ID NO: 1164969 - RNA, 19 nt, Artificial Sequence
  Description of Artificial Sequence: Synthetic oligonucleotide
  Antisense strand to SEQ ID NO: 1164968
uacuaccucuguauuguca

SEQ ID NO: 1164970 - RNA, 19 nt, Artificial Sequence
  Description of Artificial Sequence: Synthetic oligonucleotide
  Sense strand starting at position 1757 of SEQ ID NO: 916544
gcgugcuagcugagaagga

SEQ ID NO: 1164971 - RNA, 19 nt, Artificial Sequence
  Description of Artificial Sequence: Synthetic oligonucleotide
  Antisense strand to SEQ ID NO: 1164970
uccuucucagcuagcacgc

SEQ ID NO: 1164972 - RNA, 19 nt, Artificial Sequence
  Description of Artificial Sequence: Synthetic oligonucleotide
  Sense strand starting at position 1779 of SEQ ID NO: 916544
ugucaucugcgacagagua

SEQ ID NO: 1164973 - RNA, 19 nt, Artificial Sequence
  Description of Artificial Sequence: Synthetic oligonucleotide
  Antisense strand to SEQ ID NO: 1164972
uacucugucgcagaugaca

SEQ ID NO: 1164974 - RNA, 19 nt, Artificial Sequence
  Description of Artificial Sequence: Synthetic oligonucleotide
  Sense strand starting at position 2026 of SEQ ID NO: 916544
gcgcgaguucaaguuaguu

SEQ ID NO: 1164975 - RNA, 19 nt, Artificial Sequence
  Description of Artificial Sequence: Synthetic oligonucleotide
  Antisense strand to SEQ ID NO: 1164974
aacuaacuugaacucgcgc

SEQ ID NO: 1164976 - RNA, 19 nt, Artificial Sequence
  Description of Artificial Sequence: Synthetic oligonucleotide
  Sense strand starting at position 2034 of SEQ ID NO: 916544
ucaaguuaguuucugagau

SEQ ID NO: 1164977 - RNA, 19 nt, Artificial Sequence
  Description of Artificial Sequence: Synthetic oligonucleotide
  Antisense strand to SEQ ID NO: 1164976
aucucagaaacuaacuuga

SEQ ID NO: 1164978 - RNA, 19 nt, Artificial Sequence
  Description of Artificial Sequence: Synthetic oligonucleotide
  Sense strand starting at position 2041 of SEQ ID NO: 916544
aguuucugagauuaaccuu

SEQ ID NO: 1164979 - RNA, 19 nt, Artificial Sequence
  Description of Artificial Sequence: Synthetic oligonucleotide
  Antisense strand to SEQ ID NO: 1164978
aagguuaaucucagaaacu

SEQ ID NO: 1164980 - RNA, 19 nt, Artificial Sequence
  Description of Artificial Sequence: Synthetic oligonucleotide
  Sense strand starting at position 2151 of SEQ ID NO: 916544
cgugacucucguuauggaa

SEQ ID NO: 1164981 - RNA, 19 nt, Artificial Sequence
  Description of Artificial Sequence: Synthetic oligonucleotide
  Antisense strand to SEQ ID NO: 1164980
uuccauaacgagagucacg

SEQ ID NO: 1164982 - RNA, 19 nt, Artificial Sequence
  Description of Artificial Sequence: Synthetic oligonucleotide
  Sense strand starting at position 2166 of SEQ ID NO: 916544
ggaaaucucuguccuggag

SEQ ID NO: 1164983 - RNA, 19 nt, Artificial Sequence
  Description of Artificial Sequence: Synthetic oligonucleotide
  Antisense strand to SEQ ID NO: 1164982
cuccaggacagagauuucc

SEQ ID NO: 1164984 - RNA, 19 nt, Artificial Sequence
  Description of Artificial Sequence: Synthetic oligonucleotide
  Sense strand starting at position 2180 of SEQ ID NO: 916544
uggagaggugcuuacgaaa

SEQ ID NO: 1164985 - RNA, 19 nt, Artificial Sequence
  Description of Artificial Sequence: Synthetic oligonucleotide
  Antisense strand to SEQ ID NO: 1164984
uuucguaagcaccucucca

SEQ ID NO: 1164986 - RNA, 19 nt, Artificial Sequence
  Description of Artificial Sequence: Synthetic oligonucleotide
  Sense strand starting at position 2351 of SEQ ID NO: 916544
ccugcagagaaugauguau

SEQ ID NO: 1164987 - RNA, 19 nt, Artificial Sequence
  Description of Artificial Sequence: Synthetic oligonucleotide
  Antisense strand to SEQ ID NO: 1164986
auacaucauucucugcagg

SEQ ID NO: 1164988 - RNA, 19 nt, Artificial Sequence
  Description of Artificial Sequence: Synthetic oligonucleotide
  Sense strand starting at position 2362 of SEQ ID NO: 916544
ugauguaugaucuggucau

SEQ ID NO: 1164989 - RNA, 19 nt, Artificial Sequence
  Description of Artificial Sequence: Synthetic oligonucleotide
  Antisense strand to SEQ ID NO: 1164988
augaccagaucauacauca

SEQ ID NO: 1164990 - RNA, 19 nt, Artificial Sequence
  Description of Artificial Sequence: Synthetic oligonucleotide
  Sense strand starting at position 2366 of SEQ ID NO: 916544
guaugaucuggucauagac

SEQ ID NO: 1164991 - RNA, 19 nt, Artificial Sequence
  Description of Artificial Sequence: Synthetic oligonucleotide
  Antisense strand to SEQ ID NO: 1164990
gucuaugaccagaucauac

SEQ ID NO: 1164992 - RNA, 19 nt, Artificial Sequence
  Description of Artificial Sequence: Synthetic oligonucleotide
  Sense strand starting at position 2497 of SEQ ID NO: 916544
cacacuuucggcguguauu

SEQ ID NO: 1164993 - RNA, 19 nt, Artificial Sequence
  Description of Artificial Sequence: Synthetic oligonucleotide
  Antisense strand to SEQ ID NO: 1164992
aauacacgccgaaagugug

SEQ ID NO: 1164994 - RNA, 19 nt, Artificial Sequence
  Description of Artificial Sequence: Synthetic oligonucleotide
  Sense strand starting at position 2509 of SEQ ID NO: 916544
guguauuccgauuaucuuu

SEQ ID NO: 1164995 - RNA, 19 nt, Artificial Sequence
  Description of Artificial Sequence: Synthetic oligonucleotide
  Antisense strand to SEQ ID NO: 1164994
aaagauaaucggaauacac

SEQ ID NO: 1164996 - RNA, 19 nt, Artificial Sequence
  Description of Artificial Sequence: Synthetic oligonucleotide
  Sense strand starting at position 2535 of SEQ ID NO: 916544
auuugauccuguuaaauag

SEQ ID NO: 1164997 - RNA, 19 nt, Artificial Sequence
  Description of Artificial Sequence: Synthetic oligonucleotide
  Antisense strand to SEQ ID NO: 1164996
cuauuuaacaggaucaaau

SEQ ID NO: 1164998 - RNA, 19 nt, Artificial Sequence
  Description of Artificial Sequence: Synthetic oligonucleotide
  Sense strand starting at position 2544 of SEQ ID NO: 916544
uguuaaauagacuauacgu

SEQ ID NO: 1164999 - RNA, 19 nt, Artificial Sequence
  Description of Artificial Sequence: Synthetic oligonucleotide
  Antisense strand to SEQ ID NO: 1164998
acguauagucuauuuaaca

SEQ ID NO: 1165000 - RNA, 19 nt, Artificial Sequence
  Description of Artificial Sequence: Synthetic oligonucleotide
  Sense strand starting at position 2551 of SEQ ID NO: 916544
uagacuauacgugggauca

SEQ ID NO: 1165001 - RNA, 19 nt, Artificial Sequence
  Description of Artificial Sequence: Synthetic oligonucleotide
  Antisense strand to SEQ ID NO: 1165000
ugaucccacguauagucua

SEQ ID NO: 1165002 - RNA, 19 nt, Artificial Sequence
  Description of Artificial Sequence: Synthetic oligonucleotide
  Sense strand starting at position 2552 of SEQ ID NO: 916544
agacuauacgugggaucaa

SEQ ID NO: 1165003 - RNA, 19 nt, Artificial Sequence
  Description of Artificial Sequence: Synthetic oligonucleotide
  Antisense strand to SEQ ID NO: 1165002
uugaucccacguauagucu

SEQ ID NO: 1165004 - RNA, 19 nt, Artificial Sequence
  Description of Artificial Sequence: Synthetic oligonucleotide
  Sense strand starting at position 3259 of SEQ ID NO: 916544
ccacauuuaucccuggcga

SEQ ID NO: 1165005 - RNA, 19 nt, Artificial Sequence
  Description of Artificial Sequence: Synthetic oligonucleotide
  Antisense strand to SEQ ID NO: 1165004
ucgccagggauaaaugugg

SEQ ID NO: 1165006 - RNA, 19 nt, Artificial Sequence
  Description of Artificial Sequence: Synthetic oligonucleotide
  Sense strand starting at position 3286 of SEQ ID NO: 916544
ggaacagucuaaucucaua

SEQ ID NO: 1165007 - RNA, 19 nt, Artificial Sequence
  Description of Artificial Sequence: Synthetic oligonucleotide
  Antisense strand to SEQ ID NO: 1165006
uaugagauuagacuguucc

SEQ ID NO: 1165008 - RNA, 19 nt, Artificial Sequence
  Description of Artificial Sequence: Synthetic oligonucleotide
  Sense strand starting at position 3321 of SEQ ID NO: 916544
guaaauuggcacggcauuu

SEQ ID NO: 1165009 - RNA, 19 nt, Artificial Sequence
  Description of Artificial Sequence: Synthetic oligonucleotide
  Antisense strand to SEQ ID NO: 1165008
aaaugccgugccaauuuac

SEQ ID NO: 1165010 - RNA, 19 nt, Artificial Sequence
  Description of Artificial Sequence: Synthetic oligonucleotide
  Sense strand starting at position 3370 of SEQ ID NO: 916544
auauuaauuggacguaauc

SEQ ID NO: 1165011 - RNA, 19 nt, Artificial Sequence
  Description of Artificial Sequence: Synthetic oligonucleotide
  Antisense strand to SEQ ID NO: 1165010
gauuacguccaauuaauau

SEQ ID NO: 1165012 - RNA, 19 nt, Artificial Sequence
  Description of Artificial Sequence: Synthetic oligonucleotide
  Sense strand starting at position 3524 of SEQ ID NO: 916544
ugguuaaugguauaucuau

SEQ ID NO: 1165013 - RNA, 19 nt, Artificial Sequence
  Description of Artificial Sequence: Synthetic oligonucleotide
  Antisense strand to SEQ ID NO: 1165012
auagauauaccauuaacca

SEQ ID NO: 1165014 - RNA, 19 nt, Artificial Sequence
  Description of Artificial Sequence: Synthetic oligonucleotide
  Sense strand starting at position 3566 of SEQ ID NO: 916544
aggguuagccauugaaaga

SEQ ID NO: 1165015 - RNA, 19 nt, Artificial Sequence
  Description of Artificial Sequence: Synthetic oligonucleotide
  Antisense strand to SEQ ID NO: 1165014
ucuuucaauggcuaacccu

SEQ ID NO: 1165016 - RNA, 19 nt, Artificial Sequence
  Description of Artificial Sequence: Synthetic oligonucleotide
  Sense strand starting at position 3655 of SEQ ID NO: 916544
auuauauaugcaugcaugu

SEQ ID NO: 1165017 - RNA, 19 nt, Artificial Sequence
  Description of Artificial Sequence: Synthetic oligonucleotide
  Antisense strand to SEQ ID NO: 1165016
acaugcaugcauauauaau

SEQ ID NO: 1165018 - RNA, 19 nt, Artificial Sequence
  Description of Artificial Sequence: Synthetic oligonucleotide
  Sense strand starting at position 3670 of SEQ ID NO: 916544
auguaaaugcauugagaag

SEQ ID NO: 1165019 - RNA, 19 nt, Artificial Sequence
  Description of Artificial Sequence: Synthetic oligonucleotide
  Antisense strand to SEQ ID NO: 1165018
cuucucaaugcauuuacau

SEQ ID NO: 1165020 - RNA, 19 nt, Artificial Sequence
  Description of Artificial Sequence: Synthetic oligonucleotide
  Sense strand starting at position 3739 of SEQ ID NO: 916544
ccauauauuucucuguugu

SEQ ID NO: 1165021 - RNA, 19 nt, Artificial Sequence
  Description of Artificial Sequence: Synthetic oligonucleotide
  Antisense strand to SEQ ID NO: 1165020
acaacagagaaauauaugg

SEQ ID NO: 1165022 - RNA, 19 nt, Artificial Sequence
  Description of Artificial Sequence: Synthetic oligonucleotide
  Sense strand starting at position 3746 of SEQ ID NO: 916544
uuucucuguuguuuaagau

SEQ ID NO: 1165023 - RNA, 19 nt, Artificial Sequence
  Description of Artificial Sequence: Synthetic oligonucleotide
  Antisense strand to SEQ ID NO: 1165022
aucuuaaacaacagagaaa

SEQ ID NO: 1165024 - RNA, 19 nt, Artificial Sequence
  Description of Artificial Sequence: Synthetic oligonucleotide
  Sense strand starting at position 3865 of SEQ ID NO: 916544
aucugaagccuaggucaua

SEQ ID NO: 1165025 - RNA, 19 nt, Artificial Sequence
  Description of Artificial Sequence: Synthetic oligonucleotide
  Antisense strand to SEQ ID NO: 1165024
uaugaccuaggcuucagau

SEQ ID NO: 1165026 - RNA, 19 nt, Artificial Sequence
  Description of Artificial Sequence: Synthetic oligonucleotide
  Sense strand starting at position 3866 of SEQ ID NO: 916544
ucugaagccuaggucauau

SEQ ID NO: 1165027 - RNA, 19 nt, Artificial Sequence
  Description of Artificial Sequence: Synthetic oligonucleotide
  Antisense strand to SEQ ID NO: 1165026
auaugaccuaggcuucaga

SEQ ID NO: 1165028 - RNA, 19 nt, Artificial Sequence
  Description of Artificial Sequence: Synthetic oligonucleotide
  Sense strand starting at position 86 of SEQ ID NO: 916545
cccagauucccauggucau

SEQ ID NO: 1165029 - RNA, 19 nt, Artificial Sequence
  Description of Artificial Sequence: Synthetic oligonucleotide
  Antisense strand to SEQ ID NO: 1165028
augaccaugggaaucuggg

SEQ ID NO: 1165030 - RNA, 19 nt, Artificial Sequence
  Description of Artificial Sequence: Synthetic oligonucleotide
  Sense strand starting at position 97 of SEQ ID NO: 916545
auggucaucuccuucucau

SEQ ID NO: 1165031 - RNA, 19 nt, Artificial Sequence
  Description of Artificial Sequence: Synthetic oligonucleotide
  Antisense strand to SEQ ID NO: 1165030
augagaaggagaugaccau

SEQ ID NO: 1165032 - RNA, 19 nt, Artificial Sequence
  Description of Artificial Sequence: Synthetic oligonucleotide
  Sense strand starting at position 207 of SEQ ID NO: 916545
uuagcaguuuacccuauau

SEQ ID NO: 1165033 - RNA, 19 nt, Artificial Sequence
  Description of Artificial Sequence: Synthetic oligonucleotide
  Antisense strand to SEQ ID NO: 1165032
auauaggguaaacugcuaa

SEQ ID NO: 1165034 - RNA, 19 nt, Artificial Sequence
  Description of Artificial Sequence: Synthetic oligonucleotide
  Sense strand starting at position 766 of SEQ ID NO: 916545
uuagcaauauggucaaaug

SEQ ID NO: 1165035 - RNA, 19 nt, Artificial Sequence
  Description of Artificial Sequence: Synthetic oligonucleotide
  Antisense strand to SEQ ID NO: 1165034
cauuugaccauauugcuaa

SEQ ID NO: 1165036 - RNA, 19 nt, Artificial Sequence
  Description of Artificial Sequence: Synthetic oligonucleotide
  Sense strand starting at position 954 of SEQ ID NO: 916545
gguaguaaugaacgauaag

SEQ ID NO: 1165037 - RNA, 19 nt, Artificial Sequence
  Description of Artificial Sequence: Synthetic oligonucleotide
  Antisense strand to SEQ ID NO: 1165036
cuuaucguucauuacuacc

SEQ ID NO: 1165038 - RNA, 19 nt, Artificial Sequence
  Description of Artificial Sequence: Synthetic oligonucleotide
  Sense strand starting at position 955 of SEQ ID NO: 916545
guaguaaugaacgauaagu

SEQ ID NO: 1165039 - RNA, 19 nt, Artificial Sequence
  Description of Artificial Sequence: Synthetic oligonucleotide
  Antisense strand to SEQ ID NO: 1165038
acuuaucguucauuacuac

SEQ ID NO: 1165040 - RNA, 19 nt, Artificial Sequence
  Description of Artificial Sequence: Synthetic oligonucleotide
  Sense strand starting at position 1218 of SEQ ID NO: 916545
ucacucaugugcuuccuua

SEQ ID NO: 1165041 - RNA, 19 nt, Artificial Sequence
  Description of Artificial Sequence: Synthetic oligonucleotide
  Antisense strand to SEQ ID NO: 1165040
uaaggaagcacaugaguga

SEQ ID NO: 1165042 - RNA, 19 nt, Artificial Sequence
  Description of Artificial Sequence: Synthetic oligonucleotide
  Sense strand starting at position 1274 of SEQ ID NO: 916545
uaaagucaccugcagagau

SEQ ID NO: 1165043 - RNA, 19 nt, Artificial Sequence
  Description of Artificial Sequence: Synthetic oligonucleotide
  Antisense strand to SEQ ID NO: 1165042
aucucugcaggugacuuua

SEQ ID NO: 1165044 - RNA, 19 nt, Artificial Sequence
  Description of Artificial Sequence: Synthetic oligonucleotide
  Sense strand starting at position 1278 of SEQ ID NO: 916545
gucaccugcagagauguaa

SEQ ID NO: 1165045 - RNA, 19 nt, Artificial Sequence
  Description of Artificial Sequence: Synthetic oligonucleotide
  Antisense strand to SEQ ID NO: 1165044
uuacaucucugcaggugac

SEQ ID NO: 1165046 - RNA, 19 nt, Artificial Sequence
  Description of Artificial Sequence: Synthetic oligonucleotide
  Sense strand starting at position 1293 of SEQ ID NO: 916545
guaacacaauguuuggauu

SEQ ID NO: 1165047 - RNA, 19 nt, Artificial Sequence
  Description of Artificial Sequence: Synthetic oligonucleotide
  Antisense strand to SEQ ID NO: 1165046
aauccaaacauuguguuac

SEQ ID NO: 1165048 - RNA, 19 nt, Artificial Sequence
  Description of Artificial Sequence: Synthetic oligonucleotide
  Sense strand starting at position 1460 of SEQ ID NO: 916545
ggguguaguggguagauca

SEQ ID NO: 1165049 - RNA, 19 nt, Artificial Sequence
  Description of Artificial Sequence: Synthetic oligonucleotide
  Antisense strand to SEQ ID NO: 1165048
ugaucuacccacuacaccc

SEQ ID NO: 1165050 - RNA, 19 nt, Artificial Sequence
  Description of Artificial Sequence: Synthetic oligonucleotide
  Sense strand starting at position 1536 of SEQ ID NO: 916545
caacucgccgggugauuua

SEQ ID NO: 1165051 - RNA, 19 nt, Artificial Sequence
  Description of Artificial Sequence: Synthetic oligonucleotide
  Antisense strand to SEQ ID NO: 1165050
uaaaucacccggcgaguug

SEQ ID NO: 1165052 - RNA, 19 nt, Artificial Sequence
  Description of Artificial Sequence: Synthetic oligonucleotide
  Sense strand starting at position 1607 of SEQ ID NO: 916545
cuaccucggucuucuaaga

SEQ ID NO: 1165053 - RNA, 19 nt, Artificial Sequence
  Description of Artificial Sequence: Synthetic oligonucleotide
  Antisense strand to SEQ ID NO: 1165052
ucuuagaagaccgagguag

SEQ ID NO: 1165054 - RNA, 19 nt, Artificial Sequence
  Description of Artificial Sequence: Synthetic oligonucleotide
  Sense strand starting at position 2371 of SEQ ID NO: 916545
aaguuaucccagugucagg

SEQ ID NO: 1165055 - RNA, 19 nt, Artificial Sequence
  Description of Artificial Sequence: Synthetic oligonucleotide
  Antisense strand to SEQ ID NO: 1165054
ccugacacugggauaacuu

SEQ ID NO: 1165056 - RNA, 19 nt, Artificial Sequence
  Description of Artificial Sequence: Synthetic oligonucleotide
  Sense strand starting at position 2498 of SEQ ID NO: 916545
cuagacucuugaguguaca

SEQ ID NO: 1165057 - RNA, 19 nt, Artificial Sequence
  Description of Artificial Sequence: Synthetic oligonucleotide
  Antisense strand to SEQ ID NO: 1165056
uguacacucaagagucuag

SEQ ID NO: 1165058 - RNA, 19 nt, Artificial Sequence
  Description of Artificial Sequence: Synthetic oligonucleotide
  Sense strand starting at position 2596 of SEQ ID NO: 916545
ggaagcugacguuauuaga

SEQ ID NO: 1165059 - RNA, 19 nt, Artificial Sequence
  Description of Artificial Sequence: Synthetic oligonucleotide
  Antisense strand to SEQ ID NO: 1165058
ucuaauaacgucagcuucc

SEQ ID NO: 1165060 - RNA, 19 nt, Artificial Sequence
  Description of Artificial Sequence: Synthetic oligonucleotide
  Sense strand starting at position 2606 of SEQ ID NO: 916545
guuauuagaugcuuaaaug

SEQ ID NO: 1165061 - RNA, 19 nt, Artificial Sequence
  Description of Artificial Sequence: Synthetic oligonucleotide
  Antisense strand to SEQ ID NO: 1165060
cauuuaagcaucuaauaac

SEQ ID NO: 1165062 - RNA, 19 nt, Artificial Sequence
  Description of Artificial Sequence: Synthetic oligonucleotide
  Sense strand starting at position 2612 of SEQ ID NO: 916545
agaugcuuaaauggaaagu

SEQ ID NO: 1165063 - RNA, 19 nt, Artificial Sequence
  Description of Artificial Sequence: Synthetic oligonucleotide
  Antisense strand to SEQ ID NO: 1165062
acuuuccauuuaagcaucu

SEQ ID NO: 1165064 - RNA, 19 nt, Artificial Sequence
  Description of Artificial Sequence: Synthetic oligonucleotide
  Sense strand starting at position 2629 of SEQ ID NO: 916545
gugaaacuaugauaaugaa

SEQ ID NO: 1165065 - RNA, 19 nt, Artificial Sequence
  Description of Artificial Sequence: Synthetic oligonucleotide
  Antisense strand to SEQ ID NO: 1165064
uucauuaucauaguuucac

SEQ ID NO: 1165066 - RNA, 19 nt, Artificial Sequence
  Description of Artificial Sequence: Synthetic oligonucleotide
  Sense strand starting at position 2682 of SEQ ID NO: 916545
aacuauuguggauguggau

SEQ ID NO: 1165067 - RNA, 19 nt, Artificial Sequence
  Description of Artificial Sequence: Synthetic oligonucleotide
  Antisense strand to SEQ ID NO: 1165066
auccacauccacaauaguu

SEQ ID NO: 1165068 - RNA, 19 nt, Artificial Sequence
  Description of Artificial Sequence: Synthetic oligonucleotide
  Sense strand starting at position 2706 of SEQ ID NO: 916545
aaaggauuccuacaugcga

SEQ ID NO: 1165069 - RNA, 19 nt, Artificial Sequence
  Description of Artificial Sequence: Synthetic oligonucleotide
  Antisense strand to SEQ ID NO: 1165068
ucgcauguaggaauccuuu

SEQ ID NO: 1165070 - RNA, 19 nt, Artificial Sequence
  Description of Artificial Sequence: Synthetic oligonucleotide
  Sense strand starting at position 2708 of SEQ ID NO: 916545
aggauuccuacaugcgauu

SEQ ID NO: 1165071 - RNA, 19 nt, Artificial Sequence
  Description of Artificial Sequence: Synthetic oligonucleotide
  Antisense strand to SEQ ID NO: 1165070
aaucgcauguaggaauccu

SEQ ID NO: 1165072 - RNA, 19 nt, Artificial Sequence
  Description of Artificial Sequence: Synthetic oligonucleotide
  Sense strand starting at position 3134 of SEQ ID NO: 916545
uugaaaucguagccaaguu

SEQ ID NO: 1165073 - RNA, 19 nt, Artificial Sequence
  Description of Artificial Sequence: Synthetic oligonucleotide
  Antisense strand to SEQ ID NO: 1165072
aacuuggcuacgauuucaa

SEQ ID NO: 1165074 - RNA, 19 nt, Artificial Sequence
  Description of Artificial Sequence: Synthetic oligonucleotide
  Sense strand starting at position 3135 of SEQ ID NO: 916545
ugaaaucguagccaaguua

SEQ ID NO: 1165075 - RNA, 19 nt, Artificial Sequence
  Description of Artificial Sequence: Synthetic oligonucleotide
  Antisense strand to SEQ ID NO: 1165074
uaacuuggcuacgauuuca

SEQ ID NO: 1165076 - RNA, 19 nt, Artificial Sequence
  Description of Artificial Sequence: Synthetic oligonucleotide
  Sense strand starting at position 3219 of SEQ ID NO: 916545
ucugcaguucuugaggcua

SEQ ID NO: 1165077 - RNA, 19 nt, Artificial Sequence
  Description of Artificial Sequence: Synthetic oligonucleotide
  Antisense strand to SEQ ID NO: 1165076
uagccucaagaacugcaga

SEQ ID NO: 1165078 - RNA, 19 nt, Artificial Sequence
  Description of Artificial Sequence: Synthetic oligonucleotide
  Sense strand starting at position 3224 of SEQ ID NO: 916545
aguucuugaggcuaugaaa

SEQ ID NO: 1165079 - RNA, 19 nt, Artificial Sequence
  Description of Artificial Sequence: Synthetic oligonucleotide
  Antisense strand to SEQ ID NO: 1165078
uuucauagccucaagaacu

SEQ ID NO: 1165080 - RNA, 19 nt, Artificial Sequence
  Description of Artificial Sequence: Synthetic oligonucleotide
  Sense strand starting at position 3266 of SEQ ID NO: 916545
ccagaaaguugggaacuaa

SEQ ID NO: 1165081 - RNA, 19 nt, Artificial Sequence
  Description of Artificial Sequence: Synthetic oligonucleotide
  Antisense strand to SEQ ID NO: 1165080
uuaguucccaacuuucugg

SEQ ID NO: 1165082 - RNA, 19 nt, Artificial Sequence
  Description of Artificial Sequence: Synthetic oligonucleotide
  Sense strand starting at position 3515 of SEQ ID NO: 916545
agcacuguauuuguguaua

SEQ ID NO: 1165083 - RNA, 19 nt, Artificial Sequence
  Description of Artificial Sequence: Synthetic oligonucleotide
  Antisense strand to SEQ ID NO: 1165082
uauacacaaauacagugcu

SEQ ID NO: 1165084 - RNA, 19 nt, Artificial Sequence
  Description of Artificial Sequence: Synthetic oligonucleotide
  Sense strand starting at position 3517 of SEQ ID NO: 916545
cacuguauuuguguauaua

SEQ ID NO: 1165085 - RNA, 19 nt, Artificial Sequence
  Description of Artificial Sequence: Synthetic oligonucleotide
  Antisense strand to SEQ ID NO: 1165084
uauauacacaaauacagug

SEQ ID NO: 1165086 - RNA, 19 nt, Artificial Sequence
  Description of Artificial Sequence: Synthetic oligonucleotide
  Sense strand starting at position 3526 of SEQ ID NO: 916545
uguguauauagacguaaug

SEQ ID NO: 1165087 - RNA, 19 nt, Artificial Sequence
  Description of Artificial Sequence: Synthetic oligonucleotide
  Antisense strand to SEQ ID NO: 1165086
cauuacgucuauauacaca

SEQ ID NO: 1165088 - RNA, 19 nt, Artificial Sequence
  Description of Artificial Sequence: Synthetic oligonucleotide
  Sense strand starting at position 3528 of SEQ ID NO: 916545
uguauauagacguaaugug

SEQ ID NO: 1165089 - RNA, 19 nt, Artificial Sequence
  Description of Artificial Sequence: Synthetic oligonucleotide
  Antisense strand to SEQ ID NO: 1165088
cacauuacgucuauauaca

SEQ ID NO: 1165090 - RNA, 19 nt, Artificial Sequence
  Description of Artificial Sequence: Synthetic oligonucleotide
  Sense strand starting at position 3535 of SEQ ID NO: 916545
agacguaauguguauguau

SEQ ID NO: 1165091 - RNA, 19 nt, Artificial Sequence
  Description of Artificial Sequence: Synthetic oligonucleotide
  Antisense strand to SEQ ID NO: 1165090
auacauacacauuacgucu

SEQ ID NO: 1165092 - RNA, 19 nt, Artificial Sequence
  Description of Artificial Sequence: Synthetic oligonucleotide
  Sense strand starting at position 3588 of SEQ ID NO: 916545
caugaaguaugugcuauua

SEQ ID NO: 1165093 - RNA, 19 nt, Artificial Sequence
  Description of Artificial Sequence: Synthetic oligonucleotide
  Antisense strand to SEQ ID NO: 1165092
uaauagcacauacuucaug

SEQ ID NO: 1165094 - RNA, 19 nt, Artificial Sequence
  Description of Artificial Sequence: Synthetic oligonucleotide
  Sense strand starting at position 3687 of SEQ ID NO: 916545
aaguuaaaccugggaccau

SEQ ID NO: 1165095 - RNA, 19 nt, Artificial Sequence
  Description of Artificial Sequence: Synthetic oligonucleotide
  Antisense strand to SEQ ID NO: 1165094
auggucccagguuuaacuu

SEQ ID NO: 1165096 - RNA, 19 nt, Artificial Sequence
  Description of Artificial Sequence: Synthetic oligonucleotide
  Sense strand starting at position 3721 of SEQ ID NO: 916545
gucccagaccuuuaugcua

SEQ ID NO: 1165097 - RNA, 19 nt, Artificial Sequence
  Description of Artificial Sequence: Synthetic oligonucleotide
  Antisense strand to SEQ ID NO: 1165096
uagcauaaaggucugggac

SEQ ID NO: 1165098 - RNA, 19 nt, Artificial Sequence
  Description of Artificial Sequence: Synthetic oligonucleotide
  Sense strand starting at position 3825 of SEQ ID NO: 916545
ucuuacuggcccugaaaca

SEQ ID NO: 1165099 - RNA, 19 nt, Artificial Sequence
  Description of Artificial Sequence: Synthetic oligonucleotide
  Antisense strand to SEQ ID NO: 1165098
uguuucagggccaguaaga

SEQ ID NO: 1165100 - RNA, 19 nt, Artificial Sequence
  Description of Artificial Sequence: Synthetic oligonucleotide
  Sense strand starting at position 3889 of SEQ ID NO: 916545
uuccucaguucuguauaau

SEQ ID NO: 1165101 - RNA, 19 nt, Artificial Sequence
  Description of Artificial Sequence: Synthetic oligonucleotide
  Antisense strand to SEQ ID NO: 1165100
auuauacagaacugaggaa

SEQ ID NO: 1165102 - RNA, 19 nt, Artificial Sequence
  Description of Artificial Sequence: Synthetic oligonucleotide
  Sense strand starting at position 3890 of SEQ ID NO: 916545
uccucaguucuguauaaua

SEQ ID NO: 1165103 - RNA, 19 nt, Artificial Sequence
  Description of Artificial Sequence: Synthetic oligonucleotide
  Antisense strand to SEQ ID NO: 1165102
uauuauacagaacugagga

SEQ ID NO: 1165104 - RNA, 19 nt, Artificial Sequence
  Description of Artificial Sequence: Synthetic oligonucleotide
  Sense strand starting at position 3892 of SEQ ID NO: 916545
cucaguucuguauaauagu

SEQ ID NO: 1165105 - RNA, 19 nt, Artificial Sequence
  Description of Artificial Sequence: Synthetic oligonucleotide
  Antisense strand to SEQ ID NO: 1165104
acuauuauacagaacugag

SEQ ID NO: 1165106 - RNA, 19 nt, Artificial Sequence
  Description of Artificial Sequence: Synthetic oligonucleotide
  Sense strand starting at position 3935 of SEQ ID NO: 916545
uuagaagccuugcuaauau

SEQ ID NO: 1165107 - RNA, 19 nt, Artificial Sequence
  Description of Artificial Sequence: Synthetic oligonucleotide
  Antisense strand to SEQ ID NO: 1165106
auauuagcaaggcuucuaa

SEQ ID NO: 1165108 - RNA, 19 nt, Artificial Sequence
  Description of Artificial Sequence: Synthetic oligonucleotide
  Sense strand starting at position 523 of SEQ ID NO: 916546
uuagcaauauggucaaaug

SEQ ID NO: 1165109 - RNA, 19 nt, Artificial Sequence
  Description of Artificial Sequence: Synthetic oligonucleotide
  Antisense strand to SEQ ID NO: 1165108
cauuugaccauauugcuaa

SEQ ID NO: 1165110 - RNA, 19 nt, Artificial Sequence
  Description of Artificial Sequence: Synthetic oligonucleotide
  Sense strand starting at position 711 of SEQ ID NO: 916546
gguaguaaugaacgauaag

SEQ ID NO: 1165111 - RNA, 19 nt, Artificial Sequence
  Description of Artificial Sequence: Synthetic oligonucleotide
  Antisense strand to SEQ ID NO: 1165110
cuuaucguucauuacuacc

SEQ ID NO: 1165112 - RNA, 19 nt, Artificial Sequence
  Description of Artificial Sequence: Synthetic oligonucleotide
  Sense strand starting at position 712 of SEQ ID NO: 916546
guaguaaugaacgauaagu

SEQ ID NO: 1165113 - RNA, 19 nt, Artificial Sequence
  Description of Artificial Sequence: Synthetic oligonucleotide
  Antisense strand to SEQ ID NO: 1165112
acuuaucguucauuacuac

SEQ ID NO: 1165114 - RNA, 19 nt, Artificial Sequence
  Description of Artificial Sequence: Synthetic oligonucleotide
  Sense strand starting at position 1031 of SEQ ID NO: 916546
uaaagucaccugcagagau

SEQ ID NO: 1165115 - RNA, 19 nt, Artificial Sequence
  Description of Artificial Sequence: Synthetic oligonucleotide
  Antisense strand to SEQ ID NO: 1165114
aucucugcaggugacuuua

SEQ ID NO: 1165116 - RNA, 19 nt, Artificial Sequence
  Description of Artificial Sequence: Synthetic oligonucleotide
  Sense strand starting at position 1035 of SEQ ID NO: 916546
gucaccugcagagauguaa

SEQ ID NO: 1165117 - RNA, 19 nt, Artificial Sequence
  Description of Artificial Sequence: Synthetic oligonucleotide
  Antisense strand to SEQ ID NO: 1165116
uuacaucucugcaggugac

SEQ ID NO: 1165118 - RNA, 19 nt, Artificial Sequence
  Description of Artificial Sequence: Synthetic oligonucleotide
  Sense strand starting at position 1050 of SEQ ID NO: 916546
guaacacaauguuuggauu

SEQ ID NO: 1165119 - RNA, 19 nt, Artificial Sequence
  Description of Artificial Sequence: Synthetic oligonucleotide
  Antisense strand to SEQ ID NO: 1165118
aauccaaacauuguguuac

SEQ ID NO: 1165120 - RNA, 19 nt, Artificial Sequence
  Description of Artificial Sequence: Synthetic oligonucleotide
  Sense strand starting at position 1217 of SEQ ID NO: 916546
ggguguaguggguagauca

SEQ ID NO: 1165121 - RNA, 19 nt, Artificial Sequence
  Description of Artificial Sequence: Synthetic oligonucleotide
  Antisense strand to SEQ ID NO: 1165120
ugaucuacccacuacaccc

SEQ ID NO: 1165122 - RNA, 19 nt, Artificial Sequence
  Description of Artificial Sequence: Synthetic oligonucleotide
  Sense strand starting at position 1293 of SEQ ID NO: 916546
caacucgccgggugauuua

SEQ ID NO: 1165123 - RNA, 19 nt, Artificial Sequence
  Description of Artificial Sequence: Synthetic oligonucleotide
  Antisense strand to SEQ ID NO: 1165122
uaaaucacccggcgaguug

SEQ ID NO: 1165124 - RNA, 19 nt, Artificial Sequence
  Description of Artificial Sequence: Synthetic oligonucleotide
  Sense strand starting at position 1364 of SEQ ID NO: 916546
cuaccucggucuucuaaga

SEQ ID NO: 1165125 - RNA, 19 nt, Artificial Sequence
  Description of Artificial Sequence: Synthetic oligonucleotide
  Antisense strand to SEQ ID NO: 1165124
ucuuagaagaccgagguag

SEQ ID NO: 1165126 - RNA, 19 nt, Artificial Sequence
  Description of Artificial Sequence: Synthetic oligonucleotide
  Sense strand starting at position 2128 of SEQ ID NO: 916546
aaguuaucccagugucagg

SEQ ID NO: 1165127 - RNA, 19 nt, Artificial Sequence
  Description of Artificial Sequence: Synthetic oligonucleotide
  Antisense strand to SEQ ID NO: 1165126
ccugacacugggauaacuu

SEQ ID NO: 1165128 - RNA, 19 nt, Artificial Sequence
  Description of Artificial Sequence: Synthetic oligonucleotide
  Sense strand starting at position 2255 of SEQ ID NO: 916546
cuagacucuugaguguaca

SEQ ID NO: 1165129 - RNA, 19 nt, Artificial Sequence
  Description of Artificial Sequence: Synthetic oligonucleotide
  Antisense strand to SEQ ID NO: 1165128
uguacacucaagagucuag

SEQ ID NO: 1165130 - RNA, 19 nt, Artificial Sequence
  Description of Artificial Sequence: Synthetic oligonucleotide
  Sense strand starting at position 2353 of SEQ ID NO: 916546
ggaagcugacguuauuaga

SEQ ID NO: 1165131 - RNA, 19 nt, Artificial Sequence
  Description of Artificial Sequence: Synthetic oligonucleotide
  Antisense strand to SEQ ID NO: 1165130
ucuaauaacgucagcuucc

SEQ ID NO: 1165132 - RNA, 19 nt, Artificial Sequence
  Description of Artificial Sequence: Synthetic oligonucleotide
  Sense strand starting at position 2363 of SEQ ID NO: 916546
guuauuagaugcuuaaaug

SEQ ID NO: 1165133 - RNA, 19 nt, Artificial Sequence
  Description of Artificial Sequence: Synthetic oligonucleotide
  Antisense strand to SEQ ID NO: 1165132
cauuuaagcaucuaauaac

SEQ ID NO: 1165134 - RNA, 19 nt, Artificial Sequence
  Description of Artificial Sequence: Synthetic oligonucleotide
  Sense strand starting at position 2369 of SEQ ID NO: 916546
agaugcuuaaauggaaagu

SEQ ID NO: 1165135 - RNA, 19 nt, Artificial Sequence
  Description of Artificial Sequence: Synthetic oligonucleotide
  Antisense strand to SEQ ID NO: 1165134
acuuuccauuuaagcaucu

SEQ ID NO: 1165136 - RNA, 19 nt, Artificial Sequence
  Description of Artificial Sequence: Synthetic oligonucleotide
  Sense strand starting at position 2386 of SEQ ID NO: 916546
gugaaacuaugauaaugaa

SEQ ID NO: 1165137 - RNA, 19 nt, Artificial Sequence
  Description of Artificial Sequence: Synthetic oligonucleotide
  Antisense strand to SEQ ID NO: 1165136
uucauuaucauaguuucac

SEQ ID NO: 1165138 - RNA, 19 nt, Artificial Sequence
  Description of Artificial Sequence: Synthetic oligonucleotide
  Sense strand starting at position 2439 of SEQ ID NO: 916546
aacuauuguggauguggau

SEQ ID NO: 1165139 - RNA, 19 nt, Artificial Sequence
  Description of Artificial Sequence: Synthetic oligonucleotide
  Antisense strand to SEQ ID NO: 1165138
auccacauccacaauaguu

SEQ ID NO: 1165140 - RNA, 19 nt, Artificial Sequence
  Description of Artificial Sequence: Synthetic oligonucleotide
  Sense strand starting at position 2463 of SEQ ID NO: 916546
aaaggauuccuacaugcga

SEQ ID NO: 1165141 - RNA, 19 nt, Artificial Sequence
  Description of Artificial Sequence: Synthetic oligonucleotide
  Antisense strand to SEQ ID NO: 1165140
ucgcauguaggaauccuuu

SEQ ID NO: 1165142 - RNA, 19 nt, Artificial Sequence
  Description of Artificial Sequence: Synthetic oligonucleotide
  Sense strand starting at position 2465 of SEQ ID NO: 916546
aggauuccuacaugcgauu

SEQ ID NO: 1165143 - RNA, 19 nt, Artificial Sequence
  Description of Artificial Sequence: Synthetic oligonucleotide
  Antisense strand to SEQ ID NO: 1165142
aaucgcauguaggaauccu

SEQ ID NO: 1165144 - RNA, 19 nt, Artificial Sequence
  Description of Artificial Sequence: Synthetic oligonucleotide
  Sense strand starting at position 2891 of SEQ ID NO: 916546
uugaaaucguagccaaguu

SEQ ID NO: 1165145 - RNA, 19 nt, Artificial Sequence
  Description of Artificial Sequence: Synthetic oligonucleotide
  Antisense strand to SEQ ID NO: 1165144
aacuuggcuacgauuucaa

SEQ ID NO: 1165146 - RNA, 19 nt, Artificial Sequence
  Description of Artificial Sequence: Synthetic oligonucleotide
  Sense strand starting at position 2892 of SEQ ID NO: 916546
ugaaaucguagccaaguua

SEQ ID NO: 1165147 - RNA, 19 nt, Artificial Sequence
  Description of Artificial Sequence: Synthetic oligonucleotide
  Antisense strand to SEQ ID NO: 1165146
uaacuuggcuacgauuuca

SEQ ID NO: 1165148 - RNA, 19 nt, Artificial Sequence
  Description of Artificial Sequence: Synthetic oligonucleotide
  Sense strand starting at position 2976 of SEQ ID NO: 916546
ucugcaguucuugaggcua

SEQ ID NO: 1165149 - RNA, 19 nt, Artificial Sequence
  Description of Artificial Sequence: Synthetic oligonucleotide
  Antisense strand to SEQ ID NO: 1165148
uagccucaagaacugcaga

SEQ ID NO: 1165150 - RNA, 19 nt, Artificial Sequence
  Description of Artificial Sequence: Synthetic oligonucleotide
  Sense strand starting at position 2981 of SEQ ID NO: 916546
aguucuugaggcuaugaaa

SEQ ID NO: 1165151 - RNA, 19 nt, Artificial Sequence
  Description of Artificial Sequence: Synthetic oligonucleotide
  Antisense strand to SEQ ID NO: 1165150
uuucauagccucaagaacu

SEQ ID NO: 1165152 - RNA, 19 nt, Artificial Sequence
  Description of Artificial Sequence: Synthetic oligonucleotide
  Sense strand starting at position 3023 of SEQ ID NO: 916546
ccagaaaguugggaacuaa

SEQ ID NO: 1165153 - RNA, 19 nt, Artificial Sequence
  Description of Artificial Sequence: Synthetic oligonucleotide
  Antisense strand to SEQ ID NO: 1165152
uuaguucccaacuuucugg

SEQ ID NO: 1165154 - RNA, 19 nt, Artificial Sequence
  Description of Artificial Sequence: Synthetic oligonucleotide
  Sense strand starting at position 3272 of SEQ ID NO: 916546
agcacuguauuuguguaua

SEQ ID NO: 1165155 - RNA, 19 nt, Artificial Sequence
  Description of Artificial Sequence: Synthetic oligonucleotide
  Antisense strand to SEQ ID NO: 1165154
uauacacaaauacagugcu

SEQ ID NO: 1165156 - RNA, 19 nt, Artificial Sequence
  Description of Artificial Sequence: Synthetic oligonucleotide
  Sense strand starting at position 3274 of SEQ ID NO: 916546
cacuguauuuguguauaua

SEQ ID NO: 1165157 - RNA, 19 nt, Artificial Sequence
  Description of Artificial Sequence: Synthetic oligonucleotide
  Antisense strand to SEQ ID NO: 1165156
uauauacacaaauacagug

SEQ ID NO: 1165158 - RNA, 19 nt, Artificial Sequence
  Description of Artificial Sequence: Synthetic oligonucleotide
  Sense strand starting at position 3283 of SEQ ID NO: 916546
uguguauauagacguaaug

SEQ ID NO: 1165159 - RNA, 19 nt, Artificial Sequence
  Description of Artificial Sequence: Synthetic oligonucleotide
  Antisense strand to SEQ ID NO: 1165158
cauuacgucuauauacaca

SEQ ID NO: 1165160 - RNA, 19 nt, Artificial Sequence
  Description of Artificial Sequence: Synthetic oligonucleotide
  Sense strand starting at position 3285 of SEQ ID NO: 916546
uguauauagacguaaugug

SEQ ID NO: 1165161 - RNA, 19 nt, Artificial Sequence
  Description of Artificial Sequence: Synthetic oligonucleotide
  Antisense strand to SEQ ID NO: 1165160
cacauuacgucuauauaca

SEQ ID NO: 1165162 - RNA, 19 nt, Artificial Sequence
  Description of Artificial Sequence: Synthetic oligonucleotide
  Sense strand starting at position 3292 of SEQ ID NO: 916546
agacguaauguguauguau

SEQ ID NO: 1165163 - RNA, 19 nt, Artificial Sequence
  Description of Artificial Sequence: Synthetic oligonucleotide
  Antisense strand to SEQ ID NO: 1165162
auacauacacauuacgucu

SEQ ID NO: 1165164 - RNA, 19 nt, Artificial Sequence
  Description of Artificial Sequence: Synthetic oligonucleotide
  Sense strand starting at position 3345 of SEQ ID NO: 916546
caugaaguaugugcuauua

SEQ ID NO: 1165165 - RNA, 19 nt, Artificial Sequence
  Description of Artificial Sequence: Synthetic oligonucleotide
  Antisense strand to SEQ ID NO: 1165164
uaauagcacauacuucaug

SEQ ID NO: 1165166 - RNA, 19 nt, Artificial Sequence
  Description of Artificial Sequence: Synthetic oligonucleotide
  Sense strand starting at position 3444 of SEQ ID NO: 916546
aaguuaaaccugggaccau

SEQ ID NO: 1165167 - RNA, 19 nt, Artificial Sequence
  Description of Artificial Sequence: Synthetic oligonucleotide
  Antisense strand to SEQ ID NO: 1165166
auggucccagguuuaacuu

SEQ ID NO: 1165168 - RNA, 19 nt, Artificial Sequence
  Description of Artificial Sequence: Synthetic oligonucleotide
  Sense strand starting at position 3478 of SEQ ID NO: 916546
gucccagaccuuuaugcua

SEQ ID NO: 1165169 - RNA, 19 nt, Artificial Sequence
  Description of Artificial Sequence: Synthetic oligonucleotide
  Antisense strand to SEQ ID NO: 1165168
uagcauaaaggucugggac

SEQ ID NO: 1165170 - RNA, 19 nt, Artificial Sequence
  Description of Artificial Sequence: Synthetic oligonucleotide
  Sense strand starting at position 3582 of SEQ ID NO: 916546
ucuuacuggcccugaaaca

SEQ ID NO: 1165171 - RNA, 19 nt, Artificial Sequence
  Description of Artificial Sequence: Synthetic oligonucleotide
  Antisense strand to SEQ ID NO: 1165170
uguuucagggccaguaaga

SEQ ID NO: 1165172 - RNA, 19 nt, Artificial Sequence
  Description of Artificial Sequence: Synthetic oligonucleotide
  Sense strand starting at position 3646 of SEQ ID NO: 916546
uuccucaguucuguauaau

SEQ ID NO: 1165173 - RNA, 19 nt, Artificial Sequence
  Description of Artificial Sequence: Synthetic oligonucleotide
  Antisense strand to SEQ ID NO: 1165172
auuauacagaacugaggaa

SEQ ID NO: 1165174 - RNA, 19 nt, Artificial Sequence
  Description of Artificial Sequence: Synthetic oligonucleotide
  Sense strand starting at position 3647 of SEQ ID NO: 916546
uccucaguucuguauaaua

SEQ ID NO: 1165175 - RNA, 19 nt, Artificial Sequence
  Description of Artificial Sequence: Synthetic oligonucleotide
  Antisense strand to SEQ ID NO: 1165174
uauuauacagaacugagga

SEQ ID NO: 1165176 - RNA, 19 nt, Artificial Sequence
  Description of Artificial Sequence: Synthetic oligonucleotide
  Sense strand starting at position 3649 of SEQ ID NO: 916546
cucaguucuguauaauagu

SEQ ID NO: 1165177 - RNA, 19 nt, Artificial Sequence
  Description of Artificial Sequence: Synthetic oligonucleotide
  Antisense strand to SEQ ID NO: 1165176
acuauuauacagaacugag

SEQ ID NO: 1165178 - RNA, 19 nt, Artificial Sequence
  Description of Artificial Sequence: Synthetic oligonucleotide
  Sense strand starting at position 3692 of SEQ ID NO: 916546
uuagaagccuugcuaauau

SEQ ID NO: 1165179 - RNA, 19 nt, Artificial Sequence
  Description of Artificial Sequence: Synthetic oligonucleotide
  Antisense strand to SEQ ID NO: 1165178
auauuagcaaggcuucuaa

SEQ ID NO: 1165180 - RNA, 19 nt, Artificial Sequence
  Description of Artificial Sequence: Synthetic oligonucleotide
  Sense strand starting at position 3835 of SEQ ID NO: 916546
aaguguauaggugaacgua

SEQ ID NO: 1165181 - RNA, 19 nt, Artificial Sequence
  Description of Artificial Sequence: Synthetic oligonucleotide
  Antisense strand to SEQ ID NO: 1165180
uacguucaccuauacacuu

SEQ ID NO: 1165182 - RNA, 19 nt, Artificial Sequence
  Description of Artificial Sequence: Synthetic oligonucleotide
  Sense strand starting at position 3838 of SEQ ID NO: 916546
uguauaggugaacguaaga

SEQ ID NO: 1165183 - RNA, 19 nt, Artificial Sequence
  Description of Artificial Sequence: Synthetic oligonucleotide
  Antisense strand to SEQ ID NO: 1165182
ucuuacguucaccuauaca

SEQ ID NO: 1165184 - RNA, 19 nt, Artificial Sequence
  Description of Artificial Sequence: Synthetic oligonucleotide
  Sense strand starting at position 3911 of SEQ ID NO: 916546
acccauagucauuguugga

SEQ ID NO: 1165185 - RNA, 19 nt, Artificial Sequence
  Description of Artificial Sequence: Synthetic oligonucleotide
  Antisense strand to SEQ ID NO: 1165184
uccaacaaugacuaugggu

SEQ ID NO: 1165186 - RNA, 19 nt, Artificial Sequence
  Description of Artificial Sequence: Synthetic oligonucleotide
  Sense strand starting at position 3915 of SEQ ID NO: 916546
auagucauuguuggagacu

SEQ ID NO: 1165187 - RNA, 19 nt, Artificial Sequence
  Description of Artificial Sequence: Synthetic oligonucleotide
  Antisense strand to SEQ ID NO: 1165186
agucuccaacaaugacuau

SEQ ID NO: 1165188 - RNA, 19 nt, Artificial Sequence
  Description of Artificial Sequence: Synthetic oligonucleotide
  Sense strand starting at position 105 of SEQ ID NO: 916547
aaccaucugccauaggagu

SEQ ID NO: 1165189 - RNA, 19 nt, Artificial Sequence
  Description of Artificial Sequence: Synthetic oligonucleotide
  Antisense strand to SEQ ID NO: 1165188
acuccuauggcagaugguu

SEQ ID NO: 1165190 - RNA, 19 nt, Artificial Sequence
  Description of Artificial Sequence: Synthetic oligonucleotide
  Sense strand starting at position 118 of SEQ ID NO: 916547
aggaguuucugcucaguaa

SEQ ID NO: 1165191 - RNA, 19 nt, Artificial Sequence
  Description of Artificial Sequence: Synthetic oligonucleotide
  Antisense strand to SEQ ID NO: 1165190
uuacugagcagaaacuccu

SEQ ID NO: 1165192 - RNA, 19 nt, Artificial Sequence
  Description of Artificial Sequence: Synthetic oligonucleotide
  Sense strand starting at position 119 of SEQ ID NO: 916547
ggaguuucugcucaguaau

SEQ ID NO: 1165193 - RNA, 19 nt, Artificial Sequence
  Description of Artificial Sequence: Synthetic oligonucleotide
  Antisense strand to SEQ ID NO: 1165192
auuacugagcagaaacucc

SEQ ID NO: 1165194 - RNA, 19 nt, Artificial Sequence
  Description of Artificial Sequence: Synthetic oligonucleotide
  Sense strand starting at position 122 of SEQ ID NO: 916547
guuucugcucaguaauuaa

SEQ ID NO: 1165195 - RNA, 19 nt, Artificial Sequence
  Description of Artificial Sequence: Synthetic oligonucleotide
  Antisense strand to SEQ ID NO: 1165194
uuaauuacugagcagaaac

SEQ ID NO: 1165196 - RNA, 19 nt, Artificial Sequence
  Description of Artificial Sequence: Synthetic oligonucleotide
  Sense strand starting at position 219 of SEQ ID NO: 916547
gagauagggauaugugucu

SEQ ID NO: 1165197 - RNA, 19 nt, Artificial Sequence
  Description of Artificial Sequence: Synthetic oligonucleotide
  Antisense strand to SEQ ID NO: 1165196
agacacauaucccuaucuc

SEQ ID NO: 1165198 - RNA, 19 nt, Artificial Sequence
  Description of Artificial Sequence: Synthetic oligonucleotide
  Sense strand starting at position 224 of SEQ ID NO: 916547
agggauaugugucucacac

SEQ ID NO: 1165199 - RNA, 19 nt, Artificial Sequence
  Description of Artificial Sequence: Synthetic oligonucleotide
  Antisense strand to SEQ ID NO: 1165198
gugugagacacauaucccu

SEQ ID NO: 1165200 - RNA, 19 nt, Artificial Sequence
  Description of Artificial Sequence: Synthetic oligonucleotide
  Sense strand starting at position 268 of SEQ ID NO: 916547
uacugucauccaugaggca

SEQ ID NO: 1165201 - RNA, 19 nt, Artificial Sequence
  Description of Artificial Sequence: Synthetic oligonucleotide
  Antisense strand to SEQ ID NO: 1165200
ugccucauggaugacagua

SEQ ID NO: 1165202 - RNA, 19 nt, Artificial Sequence
  Description of Artificial Sequence: Synthetic oligonucleotide
  Sense strand starting at position 269 of SEQ ID NO: 916547
acugucauccaugaggcaa

SEQ ID NO: 1165203 - RNA, 19 nt, Artificial Sequence
  Description of Artificial Sequence: Synthetic oligonucleotide
  Antisense strand to SEQ ID NO: 1165202
uugccucauggaugacagu

SEQ ID NO: 1165204 - RNA, 19 nt, Artificial Sequence
  Description of Artificial Sequence: Synthetic oligonucleotide
  Sense strand starting at position 327 of SEQ ID NO: 916547
gguuaucggaacugaaauc

SEQ ID NO: 1165205 - RNA, 19 nt, Artificial Sequence
  Description of Artificial Sequence: Synthetic oligonucleotide
  Antisense strand to SEQ ID NO: 1165204
gauuucaguuccgauaacc

SEQ ID NO: 1165206 - RNA, 19 nt, Artificial Sequence
  Description of Artificial Sequence: Synthetic oligonucleotide
  Sense strand starting at position 365 of SEQ ID NO: 916547
ccgggcauaccuugaaaga

SEQ ID NO: 1165207 - RNA, 19 nt, Artificial Sequence
  Description of Artificial Sequence: Synthetic oligonucleotide
  Antisense strand to SEQ ID NO: 1165206
ucuuucaagguaugcccgg

SEQ ID NO: 1165208 - RNA, 19 nt, Artificial Sequence
  Description of Artificial Sequence: Synthetic oligonucleotide
  Sense strand starting at position 446 of SEQ ID NO: 916547
aguucuaacucuguuaaga

SEQ ID NO: 1165209 - RNA, 19 nt, Artificial Sequence
  Description of Artificial Sequence: Synthetic oligonucleotide
  Antisense strand to SEQ ID NO: 1165208
ucuuaacagaguuagaacu

SEQ ID NO: 1165210 - RNA, 19 nt, Artificial Sequence
  Description of Artificial Sequence: Synthetic oligonucleotide
  Sense strand starting at position 463 of SEQ ID NO: 916547
gacgucaaucuguagggaa

SEQ ID NO: 1165211 - RNA, 19 nt, Artificial Sequence
  Description of Artificial Sequence: Synthetic oligonucleotide
  Antisense strand to SEQ ID NO: 1165210
uucccuacagauugacguc

SEQ ID NO: 1165212 - RNA, 19 nt, Artificial Sequence
  Description of Artificial Sequence: Synthetic oligonucleotide
  Sense strand starting at position 644 of SEQ ID NO: 916547
ccgagagccuuaccugaga

SEQ ID NO: 1165213 - RNA, 19 nt, Artificial Sequence
  Description of Artificial Sequence: Synthetic oligonucleotide
  Antisense strand to SEQ ID NO: 1165212
ucucagguaaggcucucgg

SEQ ID NO: 1165214 - RNA, 19 nt, Artificial Sequence
  Description of Artificial Sequence: Synthetic oligonucleotide
  Sense strand starting at position 865 of SEQ ID NO: 916547
cuacuuuggguccgggaaa

SEQ ID NO: 1165215 - RNA, 19 nt, Artificial Sequence
  Description of Artificial Sequence: Synthetic oligonucleotide
  Antisense strand to SEQ ID NO: 1165214
uuucccggacccaaaguag

SEQ ID NO: 1165216 - RNA, 19 nt, Artificial Sequence
  Description of Artificial Sequence: Synthetic oligonucleotide
  Sense strand starting at position 990 of SEQ ID NO: 916547
gaauguucucaguaagacc

SEQ ID NO: 1165217 - RNA, 19 nt, Artificial Sequence
  Description of Artificial Sequence: Synthetic oligonucleotide
  Antisense strand to SEQ ID NO: 1165216
ggucuuacugagaacauuc

SEQ ID NO: 1165218 - RNA, 19 nt, Artificial Sequence
  Description of Artificial Sequence: Synthetic oligonucleotide
  Sense strand starting at position 1083 of SEQ ID NO: 916547
cuuggaaucaagcgggaaa

SEQ ID NO: 1165219 - RNA, 19 nt, Artificial Sequence
  Description of Artificial Sequence: Synthetic oligonucleotide
  Antisense strand to SEQ ID NO: 1165218
uuucccgcuugauuccaag

SEQ ID NO: 1165220 - RNA, 19 nt, Artificial Sequence
  Description of Artificial Sequence: Synthetic oligonucleotide
  Sense strand starting at position 1119 of SEQ ID NO: 916547
ugcugcugccucggauuua

SEQ ID NO: 1165221 - RNA, 19 nt, Artificial Sequence
  Description of Artificial Sequence: Synthetic oligonucleotide
  Antisense strand to SEQ ID NO: 1165220
uaaauccgaggcagcagca

SEQ ID NO: 1165222 - RNA, 19 nt, Artificial Sequence
  Description of Artificial Sequence: Synthetic oligonucleotide
  Sense strand starting at position 1136 of SEQ ID NO: 916547
uacugaucaguaggauuaa

SEQ ID NO: 1165223 - RNA, 19 nt, Artificial Sequence
  Description of Artificial Sequence: Synthetic oligonucleotide
  Antisense strand to SEQ ID NO: 1165222
uuaauccuacugaucagua

SEQ ID NO: 1165224 - RNA, 19 nt, Artificial Sequence
  Description of Artificial Sequence: Synthetic oligonucleotide
  Sense strand starting at position 1465 of SEQ ID NO: 916547
uggagaaagcuccgggaga

SEQ ID NO: 1165225 - RNA, 19 nt, Artificial Sequence
  Description of Artificial Sequence: Synthetic oligonucleotide
  Antisense strand to SEQ ID NO: 1165224
ucucccggagcuuucucca

SEQ ID NO: 1165226 - RNA, 19 nt, Artificial Sequence
  Description of Artificial Sequence: Synthetic oligonucleotide
  Sense strand starting at position 1691 of SEQ ID NO: 916547
accuccuuucgggauugaa

SEQ ID NO: 1165227 - RNA, 19 nt, Artificial Sequence
  Description of Artificial Sequence: Synthetic oligonucleotide
  Antisense strand to SEQ ID NO: 1165226
uucaaucccgaaaggaggu

SEQ ID NO: 1165228 - RNA, 19 nt, Artificial Sequence
  Description of Artificial Sequence: Synthetic oligonucleotide
  Sense strand starting at position 1712 of SEQ ID NO: 916547
cucuaaauccaaggugcua

SEQ ID NO: 1165229 - RNA, 19 nt, Artificial Sequence
  Description of Artificial Sequence: Synthetic oligonucleotide
  Antisense strand to SEQ ID NO: 1165228
uagcaccuuggauuuagag

SEQ ID NO: 1165230 - RNA, 19 nt, Artificial Sequence
  Description of Artificial Sequence: Synthetic oligonucleotide
  Sense strand starting at position 2252 of SEQ ID NO: 916547
gcgucuguucacgccgaaa

SEQ ID NO: 1165231 - RNA, 19 nt, Artificial Sequence
  Description of Artificial Sequence: Synthetic oligonucleotide
  Antisense strand to SEQ ID NO: 1165230
uuucggcgugaacagacgc

SEQ ID NO: 1165232 - RNA, 19 nt, Artificial Sequence
  Description of Artificial Sequence: Synthetic oligonucleotide
  Sense strand starting at position 2424 of SEQ ID NO: 916547
cacauauguccgggaccau

SEQ ID NO: 1165233 - RNA, 19 nt, Artificial Sequence
  Description of Artificial Sequence: Synthetic oligonucleotide
  Antisense strand to SEQ ID NO: 1165232
auggucccggacauaugug

SEQ ID NO: 1165234 - RNA, 19 nt, Artificial Sequence
  Description of Artificial Sequence: Synthetic oligonucleotide
  Sense strand starting at position 2425 of SEQ ID NO: 916547
acauauguccgggaccaua

SEQ ID NO: 1165235 - RNA, 19 nt, Artificial Sequence
  Description of Artificial Sequence: Synthetic oligonucleotide
  Antisense strand to SEQ ID NO: 1165234
uauggucccggacauaugu

SEQ ID NO: 1165236 - RNA, 19 nt, Artificial Sequence
  Description of Artificial Sequence: Synthetic oligonucleotide
  Sense strand starting at position 2605 of SEQ ID NO: 916547
ugguauuaaucuguacaaa

SEQ ID NO: 1165237 - RNA, 19 nt, Artificial Sequence
  Description of Artificial Sequence: Synthetic oligonucleotide
  Antisense strand to SEQ ID NO: 1165236
uuuguacagauuaauacca

SEQ ID NO: 1165238 - RNA, 19 nt, Artificial Sequence
  Description of Artificial Sequence: Synthetic oligonucleotide
  Sense strand starting at position 2662 of SEQ ID NO: 916547
gguacugaauucuccaacu

SEQ ID NO: 1165239 - RNA, 19 nt, Artificial Sequence
  Description of Artificial Sequence: Synthetic oligonucleotide
  Antisense strand to SEQ ID NO: 1165238
aguuggagaauucaguacc

SEQ ID NO: 1165240 - RNA, 19 nt, Artificial Sequence
  Description of Artificial Sequence: Synthetic oligonucleotide
  Sense strand starting at position 2949 of SEQ ID NO: 916547
cuuuguaaaguuugagaaa

SEQ ID NO: 1165241 - RNA, 19 nt, Artificial Sequence
  Description of Artificial Sequence: Synthetic oligonucleotide
  Antisense strand to SEQ ID NO: 1165240
uuucucaaacuuuacaaag

SEQ ID NO: 1165242 - RNA, 19 nt, Artificial Sequence
  Description of Artificial Sequence: Synthetic oligonucleotide
  Sense strand starting at position 2985 of SEQ ID NO: 916547
gugauaaaggauugucaua

SEQ ID NO: 1165243 - RNA, 19 nt, Artificial Sequence
  Description of Artificial Sequence: Synthetic oligonucleotide
  Antisense strand to SEQ ID NO: 1165242
uaugacaauccuuuaucac

SEQ ID NO: 1165244 - RNA, 19 nt, Artificial Sequence
  Description of Artificial Sequence: Synthetic oligonucleotide
  Sense strand starting at position 3127 of SEQ ID NO: 916547
uguaauaaguaucuacaga

SEQ ID NO: 1165245 - RNA, 19 nt, Artificial Sequence
  Description of Artificial Sequence: Synthetic oligonucleotide
  Antisense strand to SEQ ID NO: 1165244
ucuguagauacuuauuaca

SEQ ID NO: 1165246 - RNA, 19 nt, Artificial Sequence
  Description of Artificial Sequence: Synthetic oligonucleotide
  Sense strand starting at position 3329 of SEQ ID NO: 916547
cugaaagcuggugguuaau

SEQ ID NO: 1165247 - RNA, 19 nt, Artificial Sequence
  Description of Artificial Sequence: Synthetic oligonucleotide
  Antisense strand to SEQ ID NO: 1165246
auuaaccaccagcuuucag

SEQ ID NO: 1165248 - RNA, 19 nt, Artificial Sequence
  Description of Artificial Sequence: Synthetic oligonucleotide
  Sense strand starting at position 3350 of SEQ ID NO: 916547
gcuuaucuccaguaccaua

SEQ ID NO: 1165249 - RNA, 19 nt, Artificial Sequence
  Description of Artificial Sequence: Synthetic oligonucleotide
  Antisense strand to SEQ ID NO: 1165248
uaugguacuggagauaagc

SEQ ID NO: 1165250 - RNA, 19 nt, Artificial Sequence
  Description of Artificial Sequence: Synthetic oligonucleotide
  Sense strand starting at position 3382 of SEQ ID NO: 916547
ccuccagaacagugguauu

SEQ ID NO: 1165251 - RNA, 19 nt, Artificial Sequence
  Description of Artificial Sequence: Synthetic oligonucleotide
  Antisense strand to SEQ ID NO: 1165250
aauaccacuguucuggagg

SEQ ID NO: 1165252 - RNA, 19 nt, Artificial Sequence
  Description of Artificial Sequence: Synthetic oligonucleotide
  Sense strand starting at position 3520 of SEQ ID NO: 916547
agguauaagguuuggaaac

SEQ ID NO: 1165253 - RNA, 19 nt, Artificial Sequence
  Description of Artificial Sequence: Synthetic oligonucleotide
  Antisense strand to SEQ ID NO: 1165252
guuuccaaaccuuauaccu

SEQ ID NO: 1165254 - RNA, 19 nt, Artificial Sequence
  Description of Artificial Sequence: Synthetic oligonucleotide
  Sense strand starting at position 3665 of SEQ ID NO: 916547
guaggauguuaguugaauu

SEQ ID NO: 1165255 - RNA, 19 nt, Artificial Sequence
  Description of Artificial Sequence: Synthetic oligonucleotide
  Antisense strand to SEQ ID NO: 1165254
aauucaacuaacauccuac

SEQ ID NO: 1165256 - RNA, 19 nt, Artificial Sequence
  Description of Artificial Sequence: Synthetic oligonucleotide
  Sense strand starting at position 3675 of SEQ ID NO: 916547
aguugaauucuuggucucu

SEQ ID NO: 1165257 - RNA, 19 nt, Artificial Sequence
  Description of Artificial Sequence: Synthetic oligonucleotide
  Antisense strand to SEQ ID NO: 1165256
agagaccaagaauucaacu

SEQ ID NO: 1165258 - RNA, 19 nt, Artificial Sequence
  Description of Artificial Sequence: Synthetic oligonucleotide
  Sense strand starting at position 3676 of SEQ ID NO: 916547
guugaauucuuggucucua

SEQ ID NO: 1165259 - RNA, 19 nt, Artificial Sequence
  Description of Artificial Sequence: Synthetic oligonucleotide
  Antisense strand to SEQ ID NO: 1165258
uagagaccaagaauucaac

SEQ ID NO: 1165260 - RNA, 19 nt, Artificial Sequence
  Description of Artificial Sequence: Synthetic oligonucleotide
  Sense strand starting at position 3677 of SEQ ID NO: 916547
uugaauucuuggucucuau

SEQ ID NO: 1165261 - RNA, 19 nt, Artificial Sequence
  Description of Artificial Sequence: Synthetic oligonucleotide
  Antisense strand to SEQ ID NO: 1165260
auagagaccaagaauucaa

SEQ ID NO: 1165262 - RNA, 19 nt, Artificial Sequence
  Description of Artificial Sequence: Synthetic oligonucleotide
  Sense strand starting at position 3747 of SEQ ID NO: 916547
acuauaucucuuugugaag

SEQ ID NO: 1165263 - RNA, 19 nt, Artificial Sequence
  Description of Artificial Sequence: Synthetic oligonucleotide
  Antisense strand to SEQ ID NO: 1165262
cuucacaaagagauauagu

SEQ ID NO: 1165264 - RNA, 19 nt, Artificial Sequence
  Description of Artificial Sequence: Synthetic oligonucleotide
  Sense strand starting at position 3774 of SEQ ID NO: 916547
auugguauucuagggaaua

SEQ ID NO: 1165265 - RNA, 19 nt, Artificial Sequence
  Description of Artificial Sequence: Synthetic oligonucleotide
  Antisense strand to SEQ ID NO: 1165264
uauucccuagaauaccaau

SEQ ID NO: 1165266 - RNA, 19 nt, Artificial Sequence
  Description of Artificial Sequence: Synthetic oligonucleotide
  Sense strand starting at position 3978 of SEQ ID NO: 916547
aucauuguuguaggcauaa

SEQ ID NO: 1165267 - RNA, 19 nt, Artificial Sequence
  Description of Artificial Sequence: Synthetic oligonucleotide
  Antisense strand to SEQ ID NO: 1165266
uuaugccuacaacaaugau

SEQ ID NO: 1165268 - RNA, 19 nt, Artificial Sequence
  Description of Artificial Sequence: Synthetic oligonucleotide
  Sense strand starting at position 58 of SEQ ID NO: 916548
agacauuugugcccagcca

SEQ ID NO: 1165269 - RNA, 19 nt, Artificial Sequence
  Description of Artificial Sequence: Synthetic oligonucleotide
  Antisense strand to SEQ ID NO: 1165268
uggcugggcacaaaugucu

SEQ ID NO: 1165270 - RNA, 19 nt, Artificial Sequence
  Description of Artificial Sequence: Synthetic oligonucleotide
  Sense strand starting at position 207 of SEQ ID NO: 916548
cuuguuauugguggaugaa

SEQ ID NO: 1165271 - RNA, 19 nt, Artificial Sequence
  Description of Artificial Sequence: Synthetic oligonucleotide
  Antisense strand to SEQ ID NO: 1165270
uucauccaccaauaacaag

SEQ ID NO: 1165272 - RNA, 19 nt, Artificial Sequence
  Description of Artificial Sequence: Synthetic oligonucleotide
  Sense strand starting at position 208 of SEQ ID NO: 916548
uuguuauugguggaugaag

SEQ ID NO: 1165273 - RNA, 19 nt, Artificial Sequence
  Description of Artificial Sequence: Synthetic oligonucleotide
  Antisense strand to SEQ ID NO: 1165272
cuucauccaccaauaacaa

SEQ ID NO: 1165274 - RNA, 19 nt, Artificial Sequence
  Description of Artificial Sequence: Synthetic oligonucleotide
  Sense strand starting at position 210 of SEQ ID NO: 916548
guuauugguggaugaagga

SEQ ID NO: 1165275 - RNA, 19 nt, Artificial Sequence
  Description of Artificial Sequence: Synthetic oligonucleotide
  Antisense strand to SEQ ID NO: 1165274
uccuucauccaccaauaac

SEQ ID NO: 1165276 - RNA, 19 nt, Artificial Sequence
  Description of Artificial Sequence: Synthetic oligonucleotide
  Sense strand starting at position 265 of SEQ ID NO: 916548
auauacugcgacugugaua

SEQ ID NO: 1165277 - RNA, 19 nt, Artificial Sequence
  Description of Artificial Sequence: Synthetic oligonucleotide
  Antisense strand to SEQ ID NO: 1165276
uaucacagucgcaguauau

SEQ ID NO: 1165278 - RNA, 19 nt, Artificial Sequence
  Description of Artificial Sequence: Synthetic oligonucleotide
  Sense strand starting at position 274 of SEQ ID NO: 916548
gacugugauaugcaguaag

SEQ ID NO: 1165279 - RNA, 19 nt, Artificial Sequence
  Description of Artificial Sequence: Synthetic oligonucleotide
  Antisense strand to SEQ ID NO: 1165278
cuuacugcauaucacaguc

SEQ ID NO: 1165280 - RNA, 19 nt, Artificial Sequence
  Description of Artificial Sequence: Synthetic oligonucleotide
  Sense strand starting at position 277 of SEQ ID NO: 916548
ugugauaugcaguaaguaa

SEQ ID NO: 1165281 - RNA, 19 nt, Artificial Sequence
  Description of Artificial Sequence: Synthetic oligonucleotide
  Antisense strand to SEQ ID NO: 1165280
uuacuuacugcauaucaca

SEQ ID NO: 1165282 - RNA, 19 nt, Artificial Sequence
  Description of Artificial Sequence: Synthetic oligonucleotide
  Sense strand starting at position 361 of SEQ ID NO: 916548
accaucguaccugaaacuu

SEQ ID NO: 1165283 - RNA, 19 nt, Artificial Sequence
  Description of Artificial Sequence: Synthetic oligonucleotide
  Antisense strand to SEQ ID NO: 1165282
aaguuucagguacgauggu

SEQ ID NO: 1165284 - RNA, 19 nt, Artificial Sequence
  Description of Artificial Sequence: Synthetic oligonucleotide
  Sense strand starting at position 382 of SEQ ID NO: 916548
agagaucagugucuuaacu

SEQ ID NO: 1165285 - RNA, 19 nt, Artificial Sequence
  Description of Artificial Sequence: Synthetic oligonucleotide
  Antisense strand to SEQ ID NO: 1165284
aguuaagacacugaucucu

SEQ ID NO: 1165286 - RNA, 19 nt, Artificial Sequence
  Description of Artificial Sequence: Synthetic oligonucleotide
  Sense strand starting at position 491 of SEQ ID NO: 916548
aaccaucugccauaggagu

SEQ ID NO: 1165287 - RNA, 19 nt, Artificial Sequence
  Description of Artificial Sequence: Synthetic oligonucleotide
  Antisense strand to SEQ ID NO: 1165286
acuccuauggcagaugguu

SEQ ID NO: 1165288 - RNA, 19 nt, Artificial Sequence
  Description of Artificial Sequence: Synthetic oligonucleotide
  Sense strand starting at position 505 of SEQ ID NO: 916548
ggaguuucugcucaguaau

SEQ ID NO: 1165289 - RNA, 19 nt, Artificial Sequence
  Description of Artificial Sequence: Synthetic oligonucleotide
  Antisense strand to SEQ ID NO: 1165288
auuacugagcagaaacucc

SEQ ID NO: 1165290 - RNA, 19 nt, Artificial Sequence
  Description of Artificial Sequence: Synthetic oligonucleotide
  Sense strand starting at position 508 of SEQ ID NO: 916548
guuucugcucaguaauuaa

SEQ ID NO: 1165291 - RNA, 19 nt, Artificial Sequence
  Description of Artificial Sequence: Synthetic oligonucleotide
  Antisense strand to SEQ ID NO: 1165290
uuaauuacugagcagaaac

SEQ ID NO: 1165292 - RNA, 19 nt, Artificial Sequence
  Description of Artificial Sequence: Synthetic oligonucleotide
  Sense strand starting at position 605 of SEQ ID NO: 916548
gagauagggauaugugucu

SEQ ID NO: 1165293 - RNA, 19 nt, Artificial Sequence
  Description of Artificial Sequence: Synthetic oligonucleotide
  Antisense strand to SEQ ID NO: 1165292
agacacauaucccuaucuc

SEQ ID NO: 1165294 - RNA, 19 nt, Artificial Sequence
  Description of Artificial Sequence: Synthetic oligonucleotide
  Sense strand starting at position 610 of SEQ ID NO: 916548
agggauaugugucucacac

SEQ ID NO: 1165295 - RNA, 19 nt, Artificial Sequence
  Description of Artificial Sequence: Synthetic oligonucleotide
  Antisense strand to SEQ ID NO: 1165294
gugugagacacauaucccu

SEQ ID NO: 1165296 - RNA, 19 nt, Artificial Sequence
  Description of Artificial Sequence: Synthetic oligonucleotide
  Sense strand starting at position 654 of SEQ ID NO: 916548
uacugucauccaugaggca

SEQ ID NO: 1165297 - RNA, 19 nt, Artificial Sequence
  Description of Artificial Sequence: Synthetic oligonucleotide
  Antisense strand to SEQ ID NO: 1165296
ugccucauggaugacagua

SEQ ID NO: 1165298 - RNA, 19 nt, Artificial Sequence
  Description of Artificial Sequence: Synthetic oligonucleotide
  Sense strand starting at position 655 of SEQ ID NO: 916548
acugucauccaugaggcaa

SEQ ID NO: 1165299 - RNA, 19 nt, Artificial Sequence
  Description of Artificial Sequence: Synthetic oligonucleotide
  Antisense strand to SEQ ID NO: 1165298
uugccucauggaugacagu

SEQ ID NO: 1165300 - RNA, 19 nt, Artificial Sequence
  Description of Artificial Sequence: Synthetic oligonucleotide
  Sense strand starting at position 713 of SEQ ID NO: 916548
gguuaucggaacugaaauc

SEQ ID NO: 1165301 - RNA, 19 nt, Artificial Sequence
  Description of Artificial Sequence: Synthetic oligonucleotide
  Antisense strand to SEQ ID NO: 1165300
gauuucaguuccgauaacc

SEQ ID NO: 1165302 - RNA, 19 nt, Artificial Sequence
  Description of Artificial Sequence: Synthetic oligonucleotide
  Sense strand starting at position 751 of SEQ ID NO: 916548
ccgggcauaccuugaaaga

SEQ ID NO: 1165303 - RNA, 19 nt, Artificial Sequence
  Description of Artificial Sequence: Synthetic oligonucleotide
  Antisense strand to SEQ ID NO: 1165302
ucuuucaagguaugcccgg

SEQ ID NO: 1165304 - RNA, 19 nt, Artificial Sequence
  Description of Artificial Sequence: Synthetic oligonucleotide
  Sense strand starting at position 832 of SEQ ID NO: 916548
aguucuaacucuguuaaga

SEQ ID NO: 1165305 - RNA, 19 nt, Artificial Sequence
  Description of Artificial Sequence: Synthetic oligonucleotide
  Antisense strand to SEQ ID NO: 1165304
ucuuaacagaguuagaacu

SEQ ID NO: 1165306 - RNA, 19 nt, Artificial Sequence
  Description of Artificial Sequence: Synthetic oligonucleotide
  Sense strand starting at position 849 of SEQ ID NO: 916548
gacgucaaucuguagggaa

SEQ ID NO: 1165307 - RNA, 19 nt, Artificial Sequence
  Description of Artificial Sequence: Synthetic oligonucleotide
  Antisense strand to SEQ ID NO: 1165306
uucccuacagauugacguc

SEQ ID NO: 1165308 - RNA, 19 nt, Artificial Sequence
  Description of Artificial Sequence: Synthetic oligonucleotide
  Sense strand starting at position 1030 of SEQ ID NO: 916548
ccgagagccuuaccugaga

SEQ ID NO: 1165309 - RNA, 19 nt, Artificial Sequence
  Description of Artificial Sequence: Synthetic oligonucleotide
  Antisense strand to SEQ ID NO: 1165308
ucucagguaaggcucucgg

SEQ ID NO: 1165310 - RNA, 19 nt, Artificial Sequence
  Description of Artificial Sequence: Synthetic oligonucleotide
  Sense strand starting at position 1251 of SEQ ID NO: 916548
cuacuuuggguccgggaaa

SEQ ID NO: 1165311 - RNA, 19 nt, Artificial Sequence
  Description of Artificial Sequence: Synthetic oligonucleotide
  Antisense strand to SEQ ID NO: 1165310
uuucccggacccaaaguag

SEQ ID NO: 1165312 - RNA, 19 nt, Artificial Sequence
  Description of Artificial Sequence: Synthetic oligonucleotide
  Sense strand starting at position 1376 of SEQ ID NO: 916548
gaauguucucaguaagacc

SEQ ID NO: 1165313 - RNA, 19 nt, Artificial Sequence
  Description of Artificial Sequence: Synthetic oligonucleotide
  Antisense strand to SEQ ID NO: 1165312
ggucuuacugagaacauuc

SEQ ID NO: 1165314 - RNA, 19 nt, Artificial Sequence
  Description of Artificial Sequence: Synthetic oligonucleotide
  Sense strand starting at position 1469 of SEQ ID NO: 916548
cuuggaaucaagcgggaaa

SEQ ID NO: 1165315 - RNA, 19 nt, Artificial Sequence
  Description of Artificial Sequence: Synthetic oligonucleotide
  Antisense strand to SEQ ID NO: 1165314
uuucccgcuugauuccaag

SEQ ID NO: 1165316 - RNA, 19 nt, Artificial Sequence
  Description of Artificial Sequence: Synthetic oligonucleotide
  Sense strand starting at position 1522 of SEQ ID NO: 916548
uacugaucaguaggauuaa

SEQ ID NO: 1165317 - RNA, 19 nt, Artificial Sequence
  Description of Artificial Sequence: Synthetic oligonucleotide
  Antisense strand to SEQ ID NO: 1165316
uuaauccuacugaucagua

SEQ ID NO: 1165318 - RNA, 19 nt, Artificial Sequence
  Description of Artificial Sequence: Synthetic oligonucleotide
  Sense strand starting at position 1851 of SEQ ID NO: 916548
uggagaaagcuccgggaga

SEQ ID NO: 1165319 - RNA, 19 nt, Artificial Sequence
  Description of Artificial Sequence: Synthetic oligonucleotide
  Antisense strand to SEQ ID NO: 1165318
ucucccggagcuuucucca

SEQ ID NO: 1165320 - RNA, 19 nt, Artificial Sequence
  Description of Artificial Sequence: Synthetic oligonucleotide
  Sense strand starting at position 2077 of SEQ ID NO: 916548
accuccuuucgggauugaa

SEQ ID NO: 1165321 - RNA, 19 nt, Artificial Sequence
  Description of Artificial Sequence: Synthetic oligonucleotide
  Antisense strand to SEQ ID NO: 1165320
uucaaucccgaaaggaggu

SEQ ID NO: 1165322 - RNA, 19 nt, Artificial Sequence
  Description of Artificial Sequence: Synthetic oligonucleotide
  Sense strand starting at position 2098 of SEQ ID NO: 916548
cucuaaauccaaggugcua

SEQ ID NO: 1165323 - RNA, 19 nt, Artificial Sequence
  Description of Artificial Sequence: Synthetic oligonucleotide
  Antisense strand to SEQ ID NO: 1165322
uagcaccuuggauuuagag

SEQ ID NO: 1165324 - RNA, 19 nt, Artificial Sequence
  Description of Artificial Sequence: Synthetic oligonucleotide
  Sense strand starting at position 2638 of SEQ ID NO: 916548
gcgucuguucacgccgaaa

SEQ ID NO: 1165325 - RNA, 19 nt, Artificial Sequence
  Description of Artificial Sequence: Synthetic oligonucleotide
  Antisense strand to SEQ ID NO: 1165324
uuucggcgugaacagacgc

SEQ ID NO: 1165326 - RNA, 19 nt, Artificial Sequence
  Description of Artificial Sequence: Synthetic oligonucleotide
  Sense strand starting at position 2810 of SEQ ID NO: 916548
cacauauguccgggaccau

SEQ ID NO: 1165327 - RNA, 19 nt, Artificial Sequence
  Description of Artificial Sequence: Synthetic oligonucleotide
  Antisense strand to SEQ ID NO: 1165326
auggucccggacauaugug

SEQ ID NO: 1165328 - RNA, 19 nt, Artificial Sequence
  Description of Artificial Sequence: Synthetic oligonucleotide
  Sense strand starting at position 2811 of SEQ ID NO: 916548
acauauguccgggaccaua

SEQ ID NO: 1165329 - RNA, 19 nt, Artificial Sequence
  Description of Artificial Sequence: Synthetic oligonucleotide
  Antisense strand to SEQ ID NO: 1165328
uauggucccggacauaugu

SEQ ID NO: 1165330 - RNA, 19 nt, Artificial Sequence
  Description of Artificial Sequence: Synthetic oligonucleotide
  Sense strand starting at position 2991 of SEQ ID NO: 916548
ugguauuaaucuguacaaa

SEQ ID NO: 1165331 - RNA, 19 nt, Artificial Sequence
  Description of Artificial Sequence: Synthetic oligonucleotide
  Antisense strand to SEQ ID NO: 1165330
uuuguacagauuaauacca

SEQ ID NO: 1165332 - RNA, 19 nt, Artificial Sequence
  Description of Artificial Sequence: Synthetic oligonucleotide
  Sense strand starting at position 3048 of SEQ ID NO: 916548
gguacugaauucuccaacu

SEQ ID NO: 1165333 - RNA, 19 nt, Artificial Sequence
  Description of Artificial Sequence: Synthetic oligonucleotide
  Antisense strand to SEQ ID NO: 1165332
aguuggagaauucaguacc

SEQ ID NO: 1165334 - RNA, 19 nt, Artificial Sequence
  Description of Artificial Sequence: Synthetic oligonucleotide
  Sense strand starting at position 3335 of SEQ ID NO: 916548
cuuuguaaaguuugagaaa

SEQ ID NO: 1165335 - RNA, 19 nt, Artificial Sequence
  Description of Artificial Sequence: Synthetic oligonucleotide
  Antisense strand to SEQ ID NO: 1165334
uuucucaaacuuuacaaag

SEQ ID NO: 1165336 - RNA, 19 nt, Artificial Sequence
  Description of Artificial Sequence: Synthetic oligonucleotide
  Sense strand starting at position 3371 of SEQ ID NO: 916548
gugauaaaggauugucaua

SEQ ID NO: 1165337 - RNA, 19 nt, Artificial Sequence
  Description of Artificial Sequence: Synthetic oligonucleotide
  Antisense strand to SEQ ID NO: 1165336
uaugacaauccuuuaucac

SEQ ID NO: 1165338 - RNA, 19 nt, Artificial Sequence
  Description of Artificial Sequence: Synthetic oligonucleotide
  Sense strand starting at position 3513 of SEQ ID NO: 916548
uguaauaaguaucuacaga

SEQ ID NO: 1165339 - RNA, 19 nt, Artificial Sequence
  Description of Artificial Sequence: Synthetic oligonucleotide
  Antisense strand to SEQ ID NO: 1165338
ucuguagauacuuauuaca

SEQ ID NO: 1165340 - RNA, 19 nt, Artificial Sequence
  Description of Artificial Sequence: Synthetic oligonucleotide
  Sense strand starting at position 3715 of SEQ ID NO: 916548
cugaaagcuggugguuaau

SEQ ID NO: 1165341 - RNA, 19 nt, Artificial Sequence
  Description of Artificial Sequence: Synthetic oligonucleotide
  Antisense strand to SEQ ID NO: 1165340
auuaaccaccagcuuucag

SEQ ID NO: 1165342 - RNA, 19 nt, Artificial Sequence
  Description of Artificial Sequence: Synthetic oligonucleotide
  Sense strand starting at position 3736 of SEQ ID NO: 916548
gcuuaucuccaguaccaua

SEQ ID NO: 1165343 - RNA, 19 nt, Artificial Sequence
  Description of Artificial Sequence: Synthetic oligonucleotide
  Antisense strand to SEQ ID NO: 1165342
uaugguacuggagauaagc

SEQ ID NO: 1165344 - RNA, 19 nt, Artificial Sequence
  Description of Artificial Sequence: Synthetic oligonucleotide
  Sense strand starting at position 3768 of SEQ ID NO: 916548
ccuccagaacagugguauu

SEQ ID NO: 1165345 - RNA, 19 nt, Artificial Sequence
  Description of Artificial Sequence: Synthetic oligonucleotide
  Antisense strand to SEQ ID NO: 1165344
aauaccacuguucuggagg

SEQ ID NO: 1165346 - RNA, 19 nt, Artificial Sequence
  Description of Artificial Sequence: Synthetic oligonucleotide
  Sense strand starting at position 3906 of SEQ ID NO: 916548
agguauaagguuuggaaac

SEQ ID NO: 1165347 - RNA, 19 nt, Artificial Sequence
  Description of Artificial Sequence: Synthetic oligonucleotide
  Antisense strand to SEQ ID NO: 1165346
guuuccaaaccuuauaccu

SEQ ID NO: 1165348 - RNA, 19 nt, Artificial Sequence
  Description of Artificial Sequence: Synthetic oligonucleotide
  Sense strand starting at position 487 of SEQ ID NO: 916549
uuucuauuucuugguagca

SEQ ID NO: 1165349 - RNA, 19 nt, Artificial Sequence
  Description of Artificial Sequence: Synthetic oligonucleotide
  Antisense strand to SEQ ID NO: 1165348
ugcuaccaagaaauagaaa

SEQ ID NO: 1165350 - RNA, 19 nt, Artificial Sequence
  Description of Artificial Sequence: Synthetic oligonucleotide
  Sense strand starting at position 488 of SEQ ID NO: 916549
uucuauuucuugguagcau

SEQ ID NO: 1165351 - RNA, 19 nt, Artificial Sequence
  Description of Artificial Sequence: Synthetic oligonucleotide
  Antisense strand to SEQ ID NO: 1165350
augcuaccaagaaauagaa

SEQ ID NO: 1165352 - RNA, 19 nt, Artificial Sequence
  Description of Artificial Sequence: Synthetic oligonucleotide
  Sense strand starting at position 626 of SEQ ID NO: 916549
gaagcuuuaguccauuaga

SEQ ID NO: 1165353 - RNA, 19 nt, Artificial Sequence
  Description of Artificial Sequence: Synthetic oligonucleotide
  Antisense strand to SEQ ID NO: 1165352
ucuaauggacuaaagcuuc

SEQ ID NO: 1165354 - RNA, 19 nt, Artificial Sequence
  Description of Artificial Sequence: Synthetic oligonucleotide
  Sense strand starting at position 629 of SEQ ID NO: 916549
gcuuuaguccauuagauau

SEQ ID NO: 1165355 - RNA, 19 nt, Artificial Sequence
  Description of Artificial Sequence: Synthetic oligonucleotide
  Antisense strand to SEQ ID NO: 1165354
auaucuaauggacuaaagc

SEQ ID NO: 1165356 - RNA, 19 nt, Artificial Sequence
  Description of Artificial Sequence: Synthetic oligonucleotide
  Sense strand starting at position 695 of SEQ ID NO: 916549
acaugaaucuagucugucu

SEQ ID NO: 1165357 - RNA, 19 nt, Artificial Sequence
  Description of Artificial Sequence: Synthetic oligonucleotide
  Antisense strand to SEQ ID NO: 1165356
agacagacuagauucaugu

SEQ ID NO: 1165358 - RNA, 19 nt, Artificial Sequence
  Description of Artificial Sequence: Synthetic oligonucleotide
  Sense strand starting at position 710 of SEQ ID NO: 916549
gucuguacacguuuagcua

SEQ ID NO: 1165359 - RNA, 19 nt, Artificial Sequence
  Description of Artificial Sequence: Synthetic oligonucleotide
  Antisense strand to SEQ ID NO: 1165358
uagcuaaacguguacagac

SEQ ID NO: 1165360 - RNA, 19 nt, Artificial Sequence
  Description of Artificial Sequence: Synthetic oligonucleotide
  Sense strand starting at position 740 of SEQ ID NO: 916549
cucuuauuacggcaacuuu

SEQ ID NO: 1165361 - RNA, 19 nt, Artificial Sequence
  Description of Artificial Sequence: Synthetic oligonucleotide
  Antisense strand to SEQ ID NO: 1165360
aaaguugccguaauaagag

SEQ ID NO: 1165362 - RNA, 19 nt, Artificial Sequence
  Description of Artificial Sequence: Synthetic oligonucleotide
  Sense strand starting at position 801 of SEQ ID NO: 916549
guuugcugcauuggaauuu

SEQ ID NO: 1165363 - RNA, 19 nt, Artificial Sequence
  Description of Artificial Sequence: Synthetic oligonucleotide
  Antisense strand to SEQ ID NO: 1165362
aaauuccaaugcagcaaac

SEQ ID NO: 1165364 - RNA, 19 nt, Artificial Sequence
  Description of Artificial Sequence: Synthetic oligonucleotide
  Sense strand starting at position 861 of SEQ ID NO: 916549
agacauuugugcccagcca

SEQ ID NO: 1165365 - RNA, 19 nt, Artificial Sequence
  Description of Artificial Sequence: Synthetic oligonucleotide
  Antisense strand to SEQ ID NO: 1165364
uggcugggcacaaaugucu

SEQ ID NO: 1165366 - RNA, 19 nt, Artificial Sequence
  Description of Artificial Sequence: Synthetic oligonucleotide
  Sense strand starting at position 1010 of SEQ ID NO: 916549
cuuguuauugguggaugaa

SEQ ID NO: 1165367 - RNA, 19 nt, Artificial Sequence
  Description of Artificial Sequence: Synthetic oligonucleotide
  Antisense strand to SEQ ID NO: 1165366
uucauccaccaauaacaag

SEQ ID NO: 1165368 - RNA, 19 nt, Artificial Sequence
  Description of Artificial Sequence: Synthetic oligonucleotide
  Sense strand starting at position 1011 of SEQ ID NO: 916549
uuguuauugguggaugaag

SEQ ID NO: 1165369 - RNA, 19 nt, Artificial Sequence
  Description of Artificial Sequence: Synthetic oligonucleotide
  Antisense strand to SEQ ID NO: 1165368
cuucauccaccaauaacaa

SEQ ID NO: 1165370 - RNA, 19 nt, Artificial Sequence
  Description of Artificial Sequence: Synthetic oligonucleotide
  Sense strand starting at position 1013 of SEQ ID NO: 916549
guuauugguggaugaagga

SEQ ID NO: 1165371 - RNA, 19 nt, Artificial Sequence
  Description of Artificial Sequence: Synthetic oligonucleotide
  Antisense strand to SEQ ID NO: 1165370
uccuucauccaccaauaac

SEQ ID NO: 1165372 - RNA, 19 nt, Artificial Sequence
  Description of Artificial Sequence: Synthetic oligonucleotide
  Sense strand starting at position 1077 of SEQ ID NO: 916549
gacugugauaugcaguaag

SEQ ID NO: 1165373 - RNA, 19 nt, Artificial Sequence
  Description of Artificial Sequence: Synthetic oligonucleotide
  Antisense strand to SEQ ID NO: 1165372
cuuacugcauaucacaguc

SEQ ID NO: 1165374 - RNA, 19 nt, Artificial Sequence
  Description of Artificial Sequence: Synthetic oligonucleotide
  Sense strand starting at position 1080 of SEQ ID NO: 916549
ugugauaugcaguaaguaa

SEQ ID NO: 1165375 - RNA, 19 nt, Artificial Sequence
  Description of Artificial Sequence: Synthetic oligonucleotide
  Antisense strand to SEQ ID NO: 1165374
uuacuuacugcauaucaca

SEQ ID NO: 1165376 - RNA, 19 nt, Artificial Sequence
  Description of Artificial Sequence: Synthetic oligonucleotide
  Sense strand starting at position 1164 of SEQ ID NO: 916549
accaucguaccugaaacuu

SEQ ID NO: 1165377 - RNA, 19 nt, Artificial Sequence
  Description of Artificial Sequence: Synthetic oligonucleotide
  Antisense strand to SEQ ID NO: 1165376
aaguuucagguacgauggu

SEQ ID NO: 1165378 - RNA, 19 nt, Artificial Sequence
  Description of Artificial Sequence: Synthetic oligonucleotide
  Sense strand starting at position 1185 of SEQ ID NO: 916549
agagaucagugucuuaacu

SEQ ID NO: 1165379 - RNA, 19 nt, Artificial Sequence
  Description of Artificial Sequence: Synthetic oligonucleotide
  Antisense strand to SEQ ID NO: 1165378
aguuaagacacugaucucu

SEQ ID NO: 1165380 - RNA, 19 nt, Artificial Sequence
  Description of Artificial Sequence: Synthetic oligonucleotide
  Sense strand starting at position 1294 of SEQ ID NO: 916549
aaccaucugccauaggagu

SEQ ID NO: 1165381 - RNA, 19 nt, Artificial Sequence
  Description of Artificial Sequence: Synthetic oligonucleotide
  Antisense strand to SEQ ID NO: 1165380
acuccuauggcagaugguu

SEQ ID NO: 1165382 - RNA, 19 nt, Artificial Sequence
  Description of Artificial Sequence: Synthetic oligonucleotide
  Sense strand starting at position 1308 of SEQ ID NO: 916549
ggaguuucugcucaguaau

SEQ ID NO: 1165383 - RNA, 19 nt, Artificial Sequence
  Description of Artificial Sequence: Synthetic oligonucleotide
  Antisense strand to SEQ ID NO: 1165382
auuacugagcagaaacucc

SEQ ID NO: 1165384 - RNA, 19 nt, Artificial Sequence
  Description of Artificial Sequence: Synthetic oligonucleotide
  Sense strand starting at position 1311 of SEQ ID NO: 916549
guuucugcucaguaauuaa

SEQ ID NO: 1165385 - RNA, 19 nt, Artificial Sequence
  Description of Artificial Sequence: Synthetic oligonucleotide
  Antisense strand to SEQ ID NO: 1165384
uuaauuacugagcagaaac

SEQ ID NO: 1165386 - RNA, 19 nt, Artificial Sequence
  Description of Artificial Sequence: Synthetic oligonucleotide
  Sense strand starting at position 1408 of SEQ ID NO: 916549
gagauagggauaugugucu

SEQ ID NO: 1165387 - RNA, 19 nt, Artificial Sequence
  Description of Artificial Sequence: Synthetic oligonucleotide
  Antisense strand to SEQ ID NO: 1165386
agacacauaucccuaucuc

SEQ ID NO: 1165388 - RNA, 19 nt, Artificial Sequence
  Description of Artificial Sequence: Synthetic oligonucleotide
  Sense strand starting at position 1413 of SEQ ID NO: 916549
agggauaugugucucacac

SEQ ID NO: 1165389 - RNA, 19 nt, Artificial Sequence
  Description of Artificial Sequence: Synthetic oligonucleotide
  Antisense strand to SEQ ID NO: 1165388
gugugagacacauaucccu

SEQ ID NO: 1165390 - RNA, 19 nt, Artificial Sequence
  Description of Artificial Sequence: Synthetic oligonucleotide
  Sense strand starting at position 1457 of SEQ ID NO: 916549
uacugucauccaugaggca

SEQ ID NO: 1165391 - RNA, 19 nt, Artificial Sequence
  Description of Artificial Sequence: Synthetic oligonucleotide
  Antisense strand to SEQ ID NO: 1165390
ugccucauggaugacagua

SEQ ID NO: 1165392 - RNA, 19 nt, Artificial Sequence
  Description of Artificial Sequence: Synthetic oligonucleotide
  Sense strand starting at position 1458 of SEQ ID NO: 916549
acugucauccaugaggcaa

SEQ ID NO: 1165393 - RNA, 19 nt, Artificial Sequence
  Description of Artificial Sequence: Synthetic oligonucleotide
  Antisense strand to SEQ ID NO: 1165392
uugccucauggaugacagu

SEQ ID NO: 1165394 - RNA, 19 nt, Artificial Sequence
  Description of Artificial Sequence: Synthetic oligonucleotide
  Sense strand starting at position 1516 of SEQ ID NO: 916549
gguuaucggaacugaaauc

SEQ ID NO: 1165395 - RNA, 19 nt, Artificial Sequence
  Description of Artificial Sequence: Synthetic oligonucleotide
  Antisense strand to SEQ ID NO: 1165394
gauuucaguuccgauaacc

SEQ ID NO: 1165396 - RNA, 19 nt, Artificial Sequence
  Description of Artificial Sequence: Synthetic oligonucleotide
  Sense strand starting at position 1554 of SEQ ID NO: 916549
ccgggcauaccuugaaaga

SEQ ID NO: 1165397 - RNA, 19 nt, Artificial Sequence
  Description of Artificial Sequence: Synthetic oligonucleotide
  Antisense strand to SEQ ID NO: 1165396
ucuuucaagguaugcccgg

SEQ ID NO: 1165398 - RNA, 19 nt, Artificial Sequence
  Description of Artificial Sequence: Synthetic oligonucleotide
  Sense strand starting at position 1635 of SEQ ID NO: 916549
aguucuaacucuguuaaga

SEQ ID NO: 1165399 - RNA, 19 nt, Artificial Sequence
  Description of Artificial Sequence: Synthetic oligonucleotide
  Antisense strand to SEQ ID NO: 1165398
ucuuaacagaguuagaacu

SEQ ID NO: 1165400 - RNA, 19 nt, Artificial Sequence
  Description of Artificial Sequence: Synthetic oligonucleotide
  Sense strand starting at position 1652 of SEQ ID NO: 916549
gacgucaaucuguagggaa

SEQ ID NO: 1165401 - RNA, 19 nt, Artificial Sequence
  Description of Artificial Sequence: Synthetic oligonucleotide
  Antisense strand to SEQ ID NO: 1165400
uucccuacagauugacguc

SEQ ID NO: 1165402 - RNA, 19 nt, Artificial Sequence
  Description of Artificial Sequence: Synthetic oligonucleotide
  Sense strand starting at position 1833 of SEQ ID NO: 916549
ccgagagccuuaccugaga

SEQ ID NO: 1165403 - RNA, 19 nt, Artificial Sequence
  Description of Artificial Sequence: Synthetic oligonucleotide
  Antisense strand to SEQ ID NO: 1165402
ucucagguaaggcucucgg

SEQ ID NO: 1165404 - RNA, 19 nt, Artificial Sequence
  Description of Artificial Sequence: Synthetic oligonucleotide
  Sense strand starting at position 2054 of SEQ ID NO: 916549
cuacuuuggguccgggaaa

SEQ ID NO: 1165405 - RNA, 19 nt, Artificial Sequence
  Description of Artificial Sequence: Synthetic oligonucleotide
  Antisense strand to SEQ ID NO: 1165404
uuucccggacccaaaguag

SEQ ID NO: 1165406 - RNA, 19 nt, Artificial Sequence
  Description of Artificial Sequence: Synthetic oligonucleotide
  Sense strand starting at position 2179 of SEQ ID NO: 916549
gaauguucucaguaagacc

SEQ ID NO: 1165407 - RNA, 19 nt, Artificial Sequence
  Description of Artificial Sequence: Synthetic oligonucleotide
  Antisense strand to SEQ ID NO: 1165406
ggucuuacugagaacauuc

SEQ ID NO: 1165408 - RNA, 19 nt, Artificial Sequence
  Description of Artificial Sequence: Synthetic oligonucleotide
  Sense strand starting at position 2272 of SEQ ID NO: 916549
cuuggaaucaagcgggaaa

SEQ ID NO: 1165409 - RNA, 19 nt, Artificial Sequence
  Description of Artificial Sequence: Synthetic oligonucleotide
  Antisense strand to SEQ ID NO: 1165408
uuucccgcuugauuccaag

SEQ ID NO: 1165410 - RNA, 19 nt, Artificial Sequence
  Description of Artificial Sequence: Synthetic oligonucleotide
  Sense strand starting at position 2325 of SEQ ID NO: 916549
uacugaucaguaggauuaa

SEQ ID NO: 1165411 - RNA, 19 nt, Artificial Sequence
  Description of Artificial Sequence: Synthetic oligonucleotide
  Antisense strand to SEQ ID NO: 1165410
uuaauccuacugaucagua

SEQ ID NO: 1165412 - RNA, 19 nt, Artificial Sequence
  Description of Artificial Sequence: Synthetic oligonucleotide
  Sense strand starting at position 2654 of SEQ ID NO: 916549
uggagaaagcuccgggaga

SEQ ID NO: 1165413 - RNA, 19 nt, Artificial Sequence
  Description of Artificial Sequence: Synthetic oligonucleotide
  Antisense strand to SEQ ID NO: 1165412
ucucccggagcuuucucca

SEQ ID NO: 1165414 - RNA, 19 nt, Artificial Sequence
  Description of Artificial Sequence: Synthetic oligonucleotide
  Sense strand starting at position 2880 of SEQ ID NO: 916549
accuccuuucgggauugaa

SEQ ID NO: 1165415 - RNA, 19 nt, Artificial Sequence
  Description of Artificial Sequence: Synthetic oligonucleotide
  Antisense strand to SEQ ID NO: 1165414
uucaaucccgaaaggaggu

SEQ ID NO: 1165416 - RNA, 19 nt, Artificial Sequence
  Description of Artificial Sequence: Synthetic oligonucleotide
  Sense strand starting at position 2901 of SEQ ID NO: 916549
cucuaaauccaaggugcua

SEQ ID NO: 1165417 - RNA, 19 nt, Artificial Sequence
  Description of Artificial Sequence: Synthetic oligonucleotide
  Antisense strand to SEQ ID NO: 1165416
uagcaccuuggauuuagag

SEQ ID NO: 1165418 - RNA, 19 nt, Artificial Sequence
  Description of Artificial Sequence: Synthetic oligonucleotide
  Sense strand starting at position 3441 of SEQ ID NO: 916549
gcgucuguucacgccgaaa

SEQ ID NO: 1165419 - RNA, 19 nt, Artificial Sequence
  Description of Artificial Sequence: Synthetic oligonucleotide
  Antisense strand to SEQ ID NO: 1165418
uuucggcgugaacagacgc

SEQ ID NO: 1165420 - RNA, 19 nt, Artificial Sequence
  Description of Artificial Sequence: Synthetic oligonucleotide
  Sense strand starting at position 3613 of SEQ ID NO: 916549
cacauauguccgggaccau

SEQ ID NO: 1165421 - RNA, 19 nt, Artificial Sequence
  Description of Artificial Sequence: Synthetic oligonucleotide
  Antisense strand to SEQ ID NO: 1165420
auggucccggacauaugug

SEQ ID NO: 1165422 - RNA, 19 nt, Artificial Sequence
  Description of Artificial Sequence: Synthetic oligonucleotide
  Sense strand starting at position 3614 of SEQ ID NO: 916549
acauauguccgggaccaua

SEQ ID NO: 1165423 - RNA, 19 nt, Artificial Sequence
  Description of Artificial Sequence: Synthetic oligonucleotide
  Antisense strand to SEQ ID NO: 1165422
uauggucccggacauaugu

SEQ ID NO: 1165424 - RNA, 19 nt, Artificial Sequence
  Description of Artificial Sequence: Synthetic oligonucleotide
  Sense strand starting at position 3794 of SEQ ID NO: 916549
ugguauuaaucuguacaaa

SEQ ID NO: 1165425 - RNA, 19 nt, Artificial Sequence
  Description of Artificial Sequence: Synthetic oligonucleotide
  Antisense strand to SEQ ID NO: 1165424
uuuguacagauuaauacca

SEQ ID NO: 1165426 - RNA, 19 nt, Artificial Sequence
  Description of Artificial Sequence: Synthetic oligonucleotide
  Sense strand starting at position 3851 of SEQ ID NO: 916549
gguacugaauucuccaacu

SEQ ID NO: 1165427 - RNA, 19 nt, Artificial Sequence
  Description of Artificial Sequence: Synthetic oligonucleotide
  Antisense strand to SEQ ID NO: 1165426
aguuggagaauucaguacc

SEQ ID NO: 1165428 - RNA, 19 nt, Artificial Sequence
  Description of Artificial Sequence: Synthetic oligonucleotide
  Sense strand starting at position 97 of SEQ ID NO: 916550
ugaggauugaguuggagcu

SEQ ID NO: 1165429 - RNA, 19 nt, Artificial Sequence
  Description of Artificial Sequence: Synthetic oligonucleotide
  Antisense strand to SEQ ID NO: 1165428
agcuccaacucaauccuca

SEQ ID NO: 1165430 - RNA, 19 nt, Artificial Sequence
  Description of Artificial Sequence: Synthetic oligonucleotide
  Sense strand starting at position 269 of SEQ ID NO: 916550
gacaauggaugaugaauuu

SEQ ID NO: 1165431 - RNA, 19 nt, Artificial Sequence
  Description of Artificial Sequence: Synthetic oligonucleotide
  Antisense strand to SEQ ID NO: 1165430
aaauucaucauccauuguc

SEQ ID NO: 1165432 - RNA, 19 nt, Artificial Sequence
  Description of Artificial Sequence: Synthetic oligonucleotide
  Sense strand starting at position 333 of SEQ ID NO: 916550
ggcuuuagaccucauccua

SEQ ID NO: 1165433 - RNA, 19 nt, Artificial Sequence
  Description of Artificial Sequence: Synthetic oligonucleotide
  Antisense strand to SEQ ID NO: 1165432
uaggaugaggucuaaagcc

SEQ ID NO: 1165434 - RNA, 19 nt, Artificial Sequence
  Description of Artificial Sequence: Synthetic oligonucleotide
  Sense strand starting at position 386 of SEQ ID NO: 916550
cuacuaguucuaugggaug

SEQ ID NO: 1165435 - RNA, 19 nt, Artificial Sequence
  Description of Artificial Sequence: Synthetic oligonucleotide
  Antisense strand to SEQ ID NO: 1165434
caucccauagaacuaguag

SEQ ID NO: 1165436 - RNA, 19 nt, Artificial Sequence
  Description of Artificial Sequence: Synthetic oligonucleotide
  Sense strand starting at position 391 of SEQ ID NO: 916550
aguucuaugggauguugaa

SEQ ID NO: 1165437 - RNA, 19 nt, Artificial Sequence
  Description of Artificial Sequence: Synthetic oligonucleotide
  Antisense strand to SEQ ID NO: 1165436
uucaacaucccauagaacu

SEQ ID NO: 1165438 - RNA, 19 nt, Artificial Sequence
  Description of Artificial Sequence: Synthetic oligonucleotide
  Sense strand starting at position 430 of SEQ ID NO: 916550
aggcaucucugaucaaaca

SEQ ID NO: 1165439 - RNA, 19 nt, Artificial Sequence
  Description of Artificial Sequence: Synthetic oligonucleotide
  Antisense strand to SEQ ID NO: 1165438
uguuugaucagagaugccu

SEQ ID NO: 1165440 - RNA, 19 nt, Artificial Sequence
  Description of Artificial Sequence: Synthetic oligonucleotide
  Sense strand starting at position 604 of SEQ ID NO: 916550
aacuaauguucugugggaa

SEQ ID NO: 1165441 - RNA, 19 nt, Artificial Sequence
  Description of Artificial Sequence: Synthetic oligonucleotide
  Antisense strand to SEQ ID NO: 1165440
uucccacagaacauuaguu

SEQ ID NO: 1165442 - RNA, 19 nt, Artificial Sequence
  Description of Artificial Sequence: Synthetic oligonucleotide
  Sense strand starting at position 605 of SEQ ID NO: 916550
acuaauguucugugggaau

SEQ ID NO: 1165443 - RNA, 19 nt, Artificial Sequence
  Description of Artificial Sequence: Synthetic oligonucleotide
  Antisense strand to SEQ ID NO: 1165442
auucccacagaacauuagu

SEQ ID NO: 1165444 - RNA, 19 nt, Artificial Sequence
  Description of Artificial Sequence: Synthetic oligonucleotide
  Sense strand starting at position 616 of SEQ ID NO: 916550
gugggaauguauucuggaa

SEQ ID NO: 1165445 - RNA, 19 nt, Artificial Sequence
  Description of Artificial Sequence: Synthetic oligonucleotide
  Antisense strand to SEQ ID NO: 1165444
uuccagaauacauucccac

SEQ ID NO: 1165446 - RNA, 19 nt, Artificial Sequence
  Description of Artificial Sequence: Synthetic oligonucleotide
  Sense strand starting at position 746 of SEQ ID NO: 916550
acaugcuaagccuaauagu

SEQ ID NO: 1165447 - RNA, 19 nt, Artificial Sequence
  Description of Artificial Sequence: Synthetic oligonucleotide
  Antisense strand to SEQ ID NO: 1165446
acuauuaggcuuagcaugu

SEQ ID NO: 1165448 - RNA, 19 nt, Artificial Sequence
  Description of Artificial Sequence: Synthetic oligonucleotide
  Sense strand starting at position 790 of SEQ ID NO: 916550
auucgaauuguuuauguga

SEQ ID NO: 1165449 - RNA, 19 nt, Artificial Sequence
  Description of Artificial Sequence: Synthetic oligonucleotide
  Antisense strand to SEQ ID NO: 1165448
ucacauaaacaauucgaau

SEQ ID NO: 1165450 - RNA, 19 nt, Artificial Sequence
  Description of Artificial Sequence: Synthetic oligonucleotide
  Sense strand starting at position 861 of SEQ ID NO: 916550
cuuggauucugacuauaca

SEQ ID NO: 1165451 - RNA, 19 nt, Artificial Sequence
  Description of Artificial Sequence: Synthetic oligonucleotide
  Antisense strand to SEQ ID NO: 1165450
uguauagucagaauccaag

SEQ ID NO: 1165452 - RNA, 19 nt, Artificial Sequence
  Description of Artificial Sequence: Synthetic oligonucleotide
  Sense strand starting at position 1012 of SEQ ID NO: 916550
gccacuauuaagugggaau

SEQ ID NO: 1165453 - RNA, 19 nt, Artificial Sequence
  Description of Artificial Sequence: Synthetic oligonucleotide
  Antisense strand to SEQ ID NO: 1165452
auucccacuuaauaguggc

SEQ ID NO: 1165454 - RNA, 19 nt, Artificial Sequence
  Description of Artificial Sequence: Synthetic oligonucleotide
  Sense strand starting at position 1019 of SEQ ID NO: 916550
uuaagugggaauugugaca

SEQ ID NO: 1165455 - RNA, 19 nt, Artificial Sequence
  Description of Artificial Sequence: Synthetic oligonucleotide
  Antisense strand to SEQ ID NO: 1165454
ugucacaauucccacuuaa

SEQ ID NO: 1165456 - RNA, 19 nt, Artificial Sequence
  Description of Artificial Sequence: Synthetic oligonucleotide
  Sense strand starting at position 1055 of SEQ ID NO: 916550
ucugaugauuaaguugaau

SEQ ID NO: 1165457 - RNA, 19 nt, Artificial Sequence
  Description of Artificial Sequence: Synthetic oligonucleotide
  Antisense strand to SEQ ID NO: 1165456
auucaacuuaaucaucaga

SEQ ID NO: 1165458 - RNA, 19 nt, Artificial Sequence
  Description of Artificial Sequence: Synthetic oligonucleotide
  Sense strand starting at position 1061 of SEQ ID NO: 916550
gauuaaguugaaugagcaa

SEQ ID NO: 1165459 - RNA, 19 nt, Artificial Sequence
  Description of Artificial Sequence: Synthetic oligonucleotide
  Antisense strand to SEQ ID NO: 1165458
uugcucauucaacuuaauc

SEQ ID NO: 1165460 - RNA, 19 nt, Artificial Sequence
  Description of Artificial Sequence: Synthetic oligonucleotide
  Sense strand starting at position 1209 of SEQ ID NO: 916550
gcacacuuacucugggaaa

SEQ ID NO: 1165461 - RNA, 19 nt, Artificial Sequence
  Description of Artificial Sequence: Synthetic oligonucleotide
  Antisense strand to SEQ ID NO: 1165460
uuucccagaguaagugugc

SEQ ID NO: 1165462 - RNA, 19 nt, Artificial Sequence
  Description of Artificial Sequence: Synthetic oligonucleotide
  Sense strand starting at position 1211 of SEQ ID NO: 916550
acacuuacucugggaaauu

SEQ ID NO: 1165463 - RNA, 19 nt, Artificial Sequence
  Description of Artificial Sequence: Synthetic oligonucleotide
  Antisense strand to SEQ ID NO: 1165462
aauuucccagaguaagugu

SEQ ID NO: 1165464 - RNA, 19 nt, Artificial Sequence
  Description of Artificial Sequence: Synthetic oligonucleotide
  Sense strand starting at position 1248 of SEQ ID NO: 916550
ccuguuuagauauagguga

SEQ ID NO: 1165465 - RNA, 19 nt, Artificial Sequence
  Description of Artificial Sequence: Synthetic oligonucleotide
  Antisense strand to SEQ ID NO: 1165464
ucaccuauaucuaaacagg

SEQ ID NO: 1165466 - RNA, 19 nt, Artificial Sequence
  Description of Artificial Sequence: Synthetic oligonucleotide
  Sense strand starting at position 1250 of SEQ ID NO: 916550
uguuuagauauaggugaaa

SEQ ID NO: 1165467 - RNA, 19 nt, Artificial Sequence
  Description of Artificial Sequence: Synthetic oligonucleotide
  Antisense strand to SEQ ID NO: 1165466
uuucaccuauaucuaaaca

SEQ ID NO: 1165468 - RNA, 19 nt, Artificial Sequence
  Description of Artificial Sequence: Synthetic oligonucleotide
  Sense strand starting at position 1378 of SEQ ID NO: 916550
cuccauacagcugauugaa

SEQ ID NO: 1165469 - RNA, 19 nt, Artificial Sequence
  Description of Artificial Sequence: Synthetic oligonucleotide
  Antisense strand to SEQ ID NO: 1165468
uucaaucagcuguauggag

SEQ ID NO: 1165470 - RNA, 19 nt, Artificial Sequence
  Description of Artificial Sequence: Synthetic oligonucleotide
  Sense strand starting at position 1660 of SEQ ID NO: 916550
aaguuugaauaguugugaa

SEQ ID NO: 1165471 - RNA, 19 nt, Artificial Sequence
  Description of Artificial Sequence: Synthetic oligonucleotide
  Antisense strand to SEQ ID NO: 1165470
uucacaacuauucaaacuu

SEQ ID NO: 1165472 - RNA, 19 nt, Artificial Sequence
  Description of Artificial Sequence: Synthetic oligonucleotide
  Sense strand starting at position 1887 of SEQ ID NO: 916550
ugagaagucuucuuauaga

SEQ ID NO: 1165473 - RNA, 19 nt, Artificial Sequence
  Description of Artificial Sequence: Synthetic oligonucleotide
  Antisense strand to SEQ ID NO: 1165472
ucuauaagaagacuucuca

SEQ ID NO: 1165474 - RNA, 19 nt, Artificial Sequence
  Description of Artificial Sequence: Synthetic oligonucleotide
  Sense strand starting at position 1985 of SEQ ID NO: 916550
uuagauggauccuucugau

SEQ ID NO: 1165475 - RNA, 19 nt, Artificial Sequence
  Description of Artificial Sequence: Synthetic oligonucleotide
  Antisense strand to SEQ ID NO: 1165474
aucagaaggauccaucuaa

SEQ ID NO: 1165476 - RNA, 19 nt, Artificial Sequence
  Description of Artificial Sequence: Synthetic oligonucleotide
  Sense strand starting at position 2132 of SEQ ID NO: 916550
ggucuaagucaucauccua

SEQ ID NO: 1165477 - RNA, 19 nt, Artificial Sequence
  Description of Artificial Sequence: Synthetic oligonucleotide
  Antisense strand to SEQ ID NO: 1165476
uaggaugaugacuuagacc

SEQ ID NO: 1165478 - RNA, 19 nt, Artificial Sequence
  Description of Artificial Sequence: Synthetic oligonucleotide
  Sense strand starting at position 2731 of SEQ ID NO: 916550
cuagaagagugcuuaacac

SEQ ID NO: 1165479 - RNA, 19 nt, Artificial Sequence
  Description of Artificial Sequence: Synthetic oligonucleotide
  Antisense strand to SEQ ID NO: 1165478
guguuaagcacucuucuag

SEQ ID NO: 1165480 - RNA, 19 nt, Artificial Sequence
  Description of Artificial Sequence: Synthetic oligonucleotide
  Sense strand starting at position 2813 of SEQ ID NO: 916550
uuggauauauacuccugga

SEQ ID NO: 1165481 - RNA, 19 nt, Artificial Sequence
  Description of Artificial Sequence: Synthetic oligonucleotide
  Antisense strand to SEQ ID NO: 1165480
uccaggaguauauauccaa

SEQ ID NO: 1165482 - RNA, 19 nt, Artificial Sequence
  Description of Artificial Sequence: Synthetic oligonucleotide
  Sense strand starting at position 2818 of SEQ ID NO: 916550
uauauacuccuggagugua

SEQ ID NO: 1165483 - RNA, 19 nt, Artificial Sequence
  Description of Artificial Sequence: Synthetic oligonucleotide
  Antisense strand to SEQ ID NO: 1165482
uacacuccaggaguauaua

SEQ ID NO: 1165484 - RNA, 19 nt, Artificial Sequence
  Description of Artificial Sequence: Synthetic oligonucleotide
  Sense strand starting at position 2837 of SEQ ID NO: 916550
gagaaaggucucggcuaga

SEQ ID NO: 1165485 - RNA, 19 nt, Artificial Sequence
  Description of Artificial Sequence: Synthetic oligonucleotide
  Antisense strand to SEQ ID NO: 1165484
ucuagccgagaccuuucuc

SEQ ID NO: 1165486 - RNA, 19 nt, Artificial Sequence
  Description of Artificial Sequence: Synthetic oligonucleotide
  Sense strand starting at position 2840 of SEQ ID NO: 916550
aaaggucucggcuagagau

SEQ ID NO: 1165487 - RNA, 19 nt, Artificial Sequence
  Description of Artificial Sequence: Synthetic oligonucleotide
  Antisense strand to SEQ ID NO: 1165486
aucucuagccgagaccuuu

SEQ ID NO: 1165488 - RNA, 19 nt, Artificial Sequence
  Description of Artificial Sequence: Synthetic oligonucleotide
  Sense strand starting at position 2842 of SEQ ID NO: 916550
aggucucggcuagagauau

SEQ ID NO: 1165489 - RNA, 19 nt, Artificial Sequence
  Description of Artificial Sequence: Synthetic oligonucleotide
  Antisense strand to SEQ ID NO: 1165488
auaucucuagccgagaccu

SEQ ID NO: 1165490 - RNA, 19 nt, Artificial Sequence
  Description of Artificial Sequence: Synthetic oligonucleotide
  Sense strand starting at position 2846 of SEQ ID NO: 916550
cucggcuagagauauaauu

SEQ ID NO: 1165491 - RNA, 19 nt, Artificial Sequence
  Description of Artificial Sequence: Synthetic oligonucleotide
  Antisense strand to SEQ ID NO: 1165490
aauuauaucucuagccgag

SEQ ID NO: 1165492 - RNA, 19 nt, Artificial Sequence
  Description of Artificial Sequence: Synthetic oligonucleotide
  Sense strand starting at position 2848 of SEQ ID NO: 916550
cggcuagagauauaauugu

SEQ ID NO: 1165493 - RNA, 19 nt, Artificial Sequence
  Description of Artificial Sequence: Synthetic oligonucleotide
  Antisense strand to SEQ ID NO: 1165492
acaauuauaucucuagccg

SEQ ID NO: 1165494 - RNA, 19 nt, Artificial Sequence
  Description of Artificial Sequence: Synthetic oligonucleotide
  Sense strand starting at position 2864 of SEQ ID NO: 916550
uguauuagucaucaguaaa

SEQ ID NO: 1165495 - RNA, 19 nt, Artificial Sequence
  Description of Artificial Sequence: Synthetic oligonucleotide
  Antisense strand to SEQ ID NO: 1165494
uuuacugaugacuaauaca

SEQ ID NO: 1165496 - RNA, 19 nt, Artificial Sequence
  Description of Artificial Sequence: Synthetic oligonucleotide
  Sense strand starting at position 3286 of SEQ ID NO: 916550
gaaugcacuuugcuggaaa

SEQ ID NO: 1165497 - RNA, 19 nt, Artificial Sequence
  Description of Artificial Sequence: Synthetic oligonucleotide
  Antisense strand to SEQ ID NO: 1165496
uuuccagcaaagugcauuc

SEQ ID NO: 1165498 - RNA, 19 nt, Artificial Sequence
  Description of Artificial Sequence: Synthetic oligonucleotide
  Sense strand starting at position 3519 of SEQ ID NO: 916550
ucuguuuaccaucagaucu

SEQ ID NO: 1165499 - RNA, 19 nt, Artificial Sequence
  Description of Artificial Sequence: Synthetic oligonucleotide
  Antisense strand to SEQ ID NO: 1165498
agaucugaugguaaacaga

SEQ ID NO: 1165500 - RNA, 19 nt, Artificial Sequence
  Description of Artificial Sequence: Synthetic oligonucleotide
  Sense strand starting at position 3649 of SEQ ID NO: 916550
uggcaagacaugugggaau

SEQ ID NO: 1165501 - RNA, 19 nt, Artificial Sequence
  Description of Artificial Sequence: Synthetic oligonucleotide
  Antisense strand to SEQ ID NO: 1165500
auucccacaugucuugcca

SEQ ID NO: 1165502 - RNA, 19 nt, Artificial Sequence
  Description of Artificial Sequence: Synthetic oligonucleotide
  Sense strand starting at position 3656 of SEQ ID NO: 916550
acaugugggaauugaaagu

SEQ ID NO: 1165503 - RNA, 19 nt, Artificial Sequence
  Description of Artificial Sequence: Synthetic oligonucleotide
  Antisense strand to SEQ ID NO: 1165502
acuuucaauucccacaugu

SEQ ID NO: 1165504 - RNA, 19 nt, Artificial Sequence
  Description of Artificial Sequence: Synthetic oligonucleotide
  Sense strand starting at position 3672 of SEQ ID NO: 916550
aguaauauacuuggaagua

SEQ ID NO: 1165505 - RNA, 19 nt, Artificial Sequence
  Description of Artificial Sequence: Synthetic oligonucleotide
  Antisense strand to SEQ ID NO: 1165504
uacuuccaaguauauuacu

SEQ ID NO: 1165506 - RNA, 19 nt, Artificial Sequence
  Description of Artificial Sequence: Synthetic oligonucleotide
  Sense strand starting at position 3899 of SEQ ID NO: 916550
ugcucaguaauuuguguua

SEQ ID NO: 1165507 - RNA, 19 nt, Artificial Sequence
  Description of Artificial Sequence: Synthetic oligonucleotide
  Antisense strand to SEQ ID NO: 1165506
uaacacaaauuacugagca

SEQ ID NO: 1165508 - RNA, 19 nt, Artificial Sequence
  Description of Artificial Sequence: Synthetic oligonucleotide
  Sense strand starting at position 27 of SEQ ID NO: 916551
aggaaauaggcucgaacau

SEQ ID NO: 1165509 - RNA, 19 nt, Artificial Sequence
  Description of Artificial Sequence: Synthetic oligonucleotide
  Antisense strand to SEQ ID NO: 1165508
auguucgagccuauuuccu

SEQ ID NO: 1165510 - RNA, 19 nt, Artificial Sequence
  Description of Artificial Sequence: Synthetic oligonucleotide
  Sense strand starting at position 306 of SEQ ID NO: 916551
aggcaaugauuguuacuac

SEQ ID NO: 1165511 - RNA, 19 nt, Artificial Sequence
  Description of Artificial Sequence: Synthetic oligonucleotide
  Antisense strand to SEQ ID NO: 1165510
guaguaacaaucauugccu

SEQ ID NO: 1165512 - RNA, 19 nt, Artificial Sequence
  Description of Artificial Sequence: Synthetic oligonucleotide
  Sense strand starting at position 359 of SEQ ID NO: 916551
gcauuacuacuaugugaag

SEQ ID NO: 1165513 - RNA, 19 nt, Artificial Sequence
  Description of Artificial Sequence: Synthetic oligonucleotide
  Antisense strand to SEQ ID NO: 1165512
cuucacauaguaguaaugc

SEQ ID NO: 1165514 - RNA, 19 nt, Artificial Sequence
  Description of Artificial Sequence: Synthetic oligonucleotide
  Sense strand starting at position 370 of SEQ ID NO: 916551
augugaagcuauccuggaa

SEQ ID NO: 1165515 - RNA, 19 nt, Artificial Sequence
  Description of Artificial Sequence: Synthetic oligonucleotide
  Antisense strand to SEQ ID NO: 1165514
uuccaggauagcuucacau

SEQ ID NO: 1165516 - RNA, 19 nt, Artificial Sequence
  Description of Artificial Sequence: Synthetic oligonucleotide
  Sense strand starting at position 373 of SEQ ID NO: 916551
ugaagcuauccuggaauuc

SEQ ID NO: 1165517 - RNA, 19 nt, Artificial Sequence
  Description of Artificial Sequence: Synthetic oligonucleotide
  Antisense strand to SEQ ID NO: 1165516
gaauuccaggauagcuuca

SEQ ID NO: 1165518 - RNA, 19 nt, Artificial Sequence
  Description of Artificial Sequence: Synthetic oligonucleotide
  Sense strand starting at position 529 of SEQ ID NO: 916551
cugauccgaugacuaaaua

SEQ ID NO: 1165519 - RNA, 19 nt, Artificial Sequence
  Description of Artificial Sequence: Synthetic oligonucleotide
  Antisense strand to SEQ ID NO: 1165518
uauuuagucaucggaucag

SEQ ID NO: 1165520 - RNA, 19 nt, Artificial Sequence
  Description of Artificial Sequence: Synthetic oligonucleotide
  Sense strand starting at position 978 of SEQ ID NO: 916551
ggcaaaugaugagugugaa

SEQ ID NO: 1165521 - RNA, 19 nt, Artificial Sequence
  Description of Artificial Sequence: Synthetic oligonucleotide
  Antisense strand to SEQ ID NO: 1165520
uucacacucaucauuugcc

SEQ ID NO: 1165522 - RNA, 19 nt, Artificial Sequence
  Description of Artificial Sequence: Synthetic oligonucleotide
  Sense strand starting at position 979 of SEQ ID NO: 916551
gcaaaugaugagugugaag

SEQ ID NO: 1165523 - RNA, 19 nt, Artificial Sequence
  Description of Artificial Sequence: Synthetic oligonucleotide
  Antisense strand to SEQ ID NO: 1165522
cuucacacucaucauuugc

SEQ ID NO: 1165524 - RNA, 19 nt, Artificial Sequence
  Description of Artificial Sequence: Synthetic oligonucleotide
  Sense strand starting at position 981 of SEQ ID NO: 916551
aaaugaugagugugaagca

SEQ ID NO: 1165525 - RNA, 19 nt, Artificial Sequence
  Description of Artificial Sequence: Synthetic oligonucleotide
  Antisense strand to SEQ ID NO: 1165524
ugcuucacacucaucauuu

SEQ ID NO: 1165526 - RNA, 19 nt, Artificial Sequence
  Description of Artificial Sequence: Synthetic oligonucleotide
  Sense strand starting at position 1240 of SEQ ID NO: 916551
gguggauugggucaauucu

SEQ ID NO: 1165527 - RNA, 19 nt, Artificial Sequence
  Description of Artificial Sequence: Synthetic oligonucleotide
  Antisense strand to SEQ ID NO: 1165526
agaauugacccaauccacc

SEQ ID NO: 1165528 - RNA, 19 nt, Artificial Sequence
  Description of Artificial Sequence: Synthetic oligonucleotide
  Sense strand starting at position 1334 of SEQ ID NO: 916551
guggcuuugacaggaauug

SEQ ID NO: 1165529 - RNA, 19 nt, Artificial Sequence
  Description of Artificial Sequence: Synthetic oligonucleotide
  Antisense strand to SEQ ID NO: 1165528
caauuccugucaaagccac

SEQ ID NO: 1165530 - RNA, 19 nt, Artificial Sequence
  Description of Artificial Sequence: Synthetic oligonucleotide
  Sense strand starting at position 1354 of SEQ ID NO: 916551
gggagaucaucuguauucu

SEQ ID NO: 1165531 - RNA, 19 nt, Artificial Sequence
  Description of Artificial Sequence: Synthetic oligonucleotide
  Antisense strand to SEQ ID NO: 1165530
agaauacagaugaucuccc

SEQ ID NO: 1165532 - RNA, 19 nt, Artificial Sequence
  Description of Artificial Sequence: Synthetic oligonucleotide
  Sense strand starting at position 1355 of SEQ ID NO: 916551
ggagaucaucuguauucuu

SEQ ID NO: 1165533 - RNA, 19 nt, Artificial Sequence
  Description of Artificial Sequence: Synthetic oligonucleotide
  Antisense strand to SEQ ID NO: 1165532
aagaauacagaugaucucc

SEQ ID NO: 1165534 - RNA, 19 nt, Artificial Sequence
  Description of Artificial Sequence: Synthetic oligonucleotide
  Sense strand starting at position 1384 of SEQ ID NO: 916551
aaaugauugugagugucua

SEQ ID NO: 1165535 - RNA, 19 nt, Artificial Sequence
  Description of Artificial Sequence: Synthetic oligonucleotide
  Antisense strand to SEQ ID NO: 1165534
uagacacucacaaucauuu

SEQ ID NO: 1165536 - RNA, 19 nt, Artificial Sequence
  Description of Artificial Sequence: Synthetic oligonucleotide
  Sense strand starting at position 2031 of SEQ ID NO: 916551
ugauguugcccagagucua

SEQ ID NO: 1165537 - RNA, 19 nt, Artificial Sequence
  Description of Artificial Sequence: Synthetic oligonucleotide
  Antisense strand to SEQ ID NO: 1165536
uagacucugggcaacauca

SEQ ID NO: 1165538 - RNA, 19 nt, Artificial Sequence
  Description of Artificial Sequence: Synthetic oligonucleotide
  Sense strand starting at position 2172 of SEQ ID NO: 916551
aggagaguugcugaaguua

SEQ ID NO: 1165539 - RNA, 19 nt, Artificial Sequence
  Description of Artificial Sequence: Synthetic oligonucleotide
  Antisense strand to SEQ ID NO: 1165538
uaacuucagcaacucuccu

SEQ ID NO: 1165540 - RNA, 19 nt, Artificial Sequence
  Description of Artificial Sequence: Synthetic oligonucleotide
  Sense strand starting at position 2210 of SEQ ID NO: 916551
acuggaaaccuuugugauu

SEQ ID NO: 1165541 - RNA, 19 nt, Artificial Sequence
  Description of Artificial Sequence: Synthetic oligonucleotide
  Antisense strand to SEQ ID NO: 1165540
aaucacaaagguuuccagu

SEQ ID NO: 1165542 - RNA, 19 nt, Artificial Sequence
  Description of Artificial Sequence: Synthetic oligonucleotide
  Sense strand starting at position 2211 of SEQ ID NO: 916551
cuggaaaccuuugugauua

SEQ ID NO: 1165543 - RNA, 19 nt, Artificial Sequence
  Description of Artificial Sequence: Synthetic oligonucleotide
  Antisense strand to SEQ ID NO: 1165542
uaaucacaaagguuuccag

SEQ ID NO: 1165544 - RNA, 19 nt, Artificial Sequence
  Description of Artificial Sequence: Synthetic oligonucleotide
  Sense strand starting at position 2249 of SEQ ID NO: 916551
cggaguaguguggacagaa

SEQ ID NO: 1165545 - RNA, 19 nt, Artificial Sequence
  Description of Artificial Sequence: Synthetic oligonucleotide
  Antisense strand to SEQ ID NO: 1165544
uucuguccacacuacuccg

SEQ ID NO: 1165546 - RNA, 19 nt, Artificial Sequence
  Description of Artificial Sequence: Synthetic oligonucleotide
  Sense strand starting at position 2416 of SEQ ID NO: 916551
gggucuuuggcuuauaaac

SEQ ID NO: 1165547 - RNA, 19 nt, Artificial Sequence
  Description of Artificial Sequence: Synthetic oligonucleotide
  Antisense strand to SEQ ID NO: 1165546
guuuauaagccaaagaccc

SEQ ID NO: 1165548 - RNA, 19 nt, Artificial Sequence
  Description of Artificial Sequence: Synthetic oligonucleotide
  Sense strand starting at position 2703 of SEQ ID NO: 916551
aaguccaccugaguaguaa

SEQ ID NO: 1165549 - RNA, 19 nt, Artificial Sequence
  Description of Artificial Sequence: Synthetic oligonucleotide
  Antisense strand to SEQ ID NO: 1165548
uuacuacucagguggacuu

SEQ ID NO: 1165550 - RNA, 19 nt, Artificial Sequence
  Description of Artificial Sequence: Synthetic oligonucleotide
  Sense strand starting at position 2704 of SEQ ID NO: 916551
aguccaccugaguaguaau

SEQ ID NO: 1165551 - RNA, 19 nt, Artificial Sequence
  Description of Artificial Sequence: Synthetic oligonucleotide
  Antisense strand to SEQ ID NO: 1165550
auuacuacucagguggacu

SEQ ID NO: 1165552 - RNA, 19 nt, Artificial Sequence
  Description of Artificial Sequence: Synthetic oligonucleotide
  Sense strand starting at position 2767 of SEQ ID NO: 916551
uugguauuaggagguugaa

SEQ ID NO: 1165553 - RNA, 19 nt, Artificial Sequence
  Description of Artificial Sequence: Synthetic oligonucleotide
  Antisense strand to SEQ ID NO: 1165552
uucaaccuccuaauaccaa

SEQ ID NO: 1165554 - RNA, 19 nt, Artificial Sequence
  Description of Artificial Sequence: Synthetic oligonucleotide
  Sense strand starting at position 2770 of SEQ ID NO: 916551
guauuaggagguugaauua

SEQ ID NO: 1165555 - RNA, 19 nt, Artificial Sequence
  Description of Artificial Sequence: Synthetic oligonucleotide
  Antisense strand to SEQ ID NO: 1165554
uaauucaaccuccuaauac

SEQ ID NO: 1165556 - RNA, 19 nt, Artificial Sequence
  Description of Artificial Sequence: Synthetic oligonucleotide
  Sense strand starting at position 2943 of SEQ ID NO: 916551
aaagaaaggugcucagauu

SEQ ID NO: 1165557 - RNA, 19 nt, Artificial Sequence
  Description of Artificial Sequence: Synthetic oligonucleotide
  Antisense strand to SEQ ID NO: 1165556
aaucugagcaccuuucuuu

SEQ ID NO: 1165558 - RNA, 19 nt, Artificial Sequence
  Description of Artificial Sequence: Synthetic oligonucleotide
  Sense strand starting at position 2949 of SEQ ID NO: 916551
aggugcucagauuaagcaa

SEQ ID NO: 1165559 - RNA, 19 nt, Artificial Sequence
  Description of Artificial Sequence: Synthetic oligonucleotide
  Antisense strand to SEQ ID NO: 1165558
uugcuuaaucugagcaccu

SEQ ID NO: 1165560 - RNA, 19 nt, Artificial Sequence
  Description of Artificial Sequence: Synthetic oligonucleotide
  Sense strand starting at position 2961 of SEQ ID NO: 916551
uaagcaauuggcugaauga

SEQ ID NO: 1165561 - RNA, 19 nt, Artificial Sequence
  Description of Artificial Sequence: Synthetic oligonucleotide
  Antisense strand to SEQ ID NO: 1165560
ucauucagccaauugcuua

SEQ ID NO: 1165562 - RNA, 19 nt, Artificial Sequence
  Description of Artificial Sequence: Synthetic oligonucleotide
  Sense strand starting at position 2962 of SEQ ID NO: 916551
aagcaauuggcugaaugau

SEQ ID NO: 1165563 - RNA, 19 nt, Artificial Sequence
  Description of Artificial Sequence: Synthetic oligonucleotide
  Antisense strand to SEQ ID NO: 1165562
aucauucagccaauugcuu

SEQ ID NO: 1165564 - RNA, 19 nt, Artificial Sequence
  Description of Artificial Sequence: Synthetic oligonucleotide
  Sense strand starting at position 2968 of SEQ ID NO: 916551
uuggcugaaugaucuugaa

SEQ ID NO: 1165565 - RNA, 19 nt, Artificial Sequence
  Description of Artificial Sequence: Synthetic oligonucleotide
  Antisense strand to SEQ ID NO: 1165564
uucaagaucauucagccaa

SEQ ID NO: 1165566 - RNA, 19 nt, Artificial Sequence
  Description of Artificial Sequence: Synthetic oligonucleotide
  Sense strand starting at position 3039 of SEQ ID NO: 916551
ccaucaguagccugauaga

SEQ ID NO: 1165567 - RNA, 19 nt, Artificial Sequence
  Description of Artificial Sequence: Synthetic oligonucleotide
  Antisense strand to SEQ ID NO: 1165566
ucuaucaggcuacugaugg

SEQ ID NO: 1165568 - RNA, 19 nt, Artificial Sequence
  Description of Artificial Sequence: Synthetic oligonucleotide
  Sense strand starting at position 3048 of SEQ ID NO: 916551
gccugauagaguuacgaau

SEQ ID NO: 1165569 - RNA, 19 nt, Artificial Sequence
  Description of Artificial Sequence: Synthetic oligonucleotide
  Antisense strand to SEQ ID NO: 1165568
auucguaacucuaucaggc

SEQ ID NO: 1165570 - RNA, 19 nt, Artificial Sequence
  Description of Artificial Sequence: Synthetic oligonucleotide
  Sense strand starting at position 3099 of SEQ ID NO: 916551
aggauaauuccucaggcgu

SEQ ID NO: 1165571 - RNA, 19 nt, Artificial Sequence
  Description of Artificial Sequence: Synthetic oligonucleotide
  Antisense strand to SEQ ID NO: 1165570
acgccugaggaauuauccu

SEQ ID NO: 1165572 - RNA, 19 nt, Artificial Sequence
  Description of Artificial Sequence: Synthetic oligonucleotide
  Sense strand starting at position 3188 of SEQ ID NO: 916551
guggucuaacaacauaacu

SEQ ID NO: 1165573 - RNA, 19 nt, Artificial Sequence
  Description of Artificial Sequence: Synthetic oligonucleotide
  Antisense strand to SEQ ID NO: 1165572
aguuauguuguuagaccac

SEQ ID NO: 1165574 - RNA, 19 nt, Artificial Sequence
  Description of Artificial Sequence: Synthetic oligonucleotide
  Sense strand starting at position 3212 of SEQ ID NO: 916551
augcgucaaacagaaauga

SEQ ID NO: 1165575 - RNA, 19 nt, Artificial Sequence
  Description of Artificial Sequence: Synthetic oligonucleotide
  Antisense strand to SEQ ID NO: 1165574
ucauuucuguuugacgcau

SEQ ID NO: 1165576 - RNA, 19 nt, Artificial Sequence
  Description of Artificial Sequence: Synthetic oligonucleotide
  Sense strand starting at position 3312 of SEQ ID NO: 916551
agaguaucuuaaguuugaa

SEQ ID NO: 1165577 - RNA, 19 nt, Artificial Sequence
  Description of Artificial Sequence: Synthetic oligonucleotide
  Antisense strand to SEQ ID NO: 1165576
uucaaacuuaagauacucu

SEQ ID NO: 1165578 - RNA, 19 nt, Artificial Sequence
  Description of Artificial Sequence: Synthetic oligonucleotide
  Sense strand starting at position 3616 of SEQ ID NO: 916551
auuuaugucuaggauagag

SEQ ID NO: 1165579 - RNA, 19 nt, Artificial Sequence
  Description of Artificial Sequence: Synthetic oligonucleotide
  Antisense strand to SEQ ID NO: 1165578
cucuauccuagacauaaau

SEQ ID NO: 1165580 - RNA, 19 nt, Artificial Sequence
  Description of Artificial Sequence: Synthetic oligonucleotide
  Sense strand starting at position 3624 of SEQ ID NO: 916551
cuaggauagaggugcuuaa

SEQ ID NO: 1165581 - RNA, 19 nt, Artificial Sequence
  Description of Artificial Sequence: Synthetic oligonucleotide
  Antisense strand to SEQ ID NO: 1165580
uuaagcaccucuauccuag

SEQ ID NO: 1165582 - RNA, 19 nt, Artificial Sequence
  Description of Artificial Sequence: Synthetic oligonucleotide
  Sense strand starting at position 3628 of SEQ ID NO: 916551
gauagaggugcuuaaucau

SEQ ID NO: 1165583 - RNA, 19 nt, Artificial Sequence
  Description of Artificial Sequence: Synthetic oligonucleotide
  Antisense strand to SEQ ID NO: 1165582
augauuaagcaccucuauc

SEQ ID NO: 1165584 - RNA, 19 nt, Artificial Sequence
  Description of Artificial Sequence: Synthetic oligonucleotide
  Sense strand starting at position 3668 of SEQ ID NO: 916551
augaauugaucuccugcuu

SEQ ID NO: 1165585 - RNA, 19 nt, Artificial Sequence
  Description of Artificial Sequence: Synthetic oligonucleotide
  Antisense strand to SEQ ID NO: 1165584
aagcaggagaucaauucau

SEQ ID NO: 1165586 - RNA, 19 nt, Artificial Sequence
  Description of Artificial Sequence: Synthetic oligonucleotide
  Sense strand starting at position 3978 of SEQ ID NO: 916551
gggaguugugaaugccaaa

SEQ ID NO: 1165587 - RNA, 19 nt, Artificial Sequence
  Description of Artificial Sequence: Synthetic oligonucleotide
  Antisense strand to SEQ ID NO: 1165586
uuuggcauucacaacuccc

SEQ ID NO: 1165588 - RNA, 19 nt, Artificial Sequence
  Description of Artificial Sequence: Synthetic oligonucleotide
  Sense strand starting at position 156 of SEQ ID NO: 916552
ucccuagacgcucaaggau

SEQ ID NO: 1165589 - RNA, 19 nt, Artificial Sequence
  Description of Artificial Sequence: Synthetic oligonucleotide
  Antisense strand to SEQ ID NO: 1165588
auccuugagcgucuaggga

SEQ ID NO: 1165590 - RNA, 19 nt, Artificial Sequence
  Description of Artificial Sequence: Synthetic oligonucleotide
  Sense strand starting at position 172 of SEQ ID NO: 916552
gauggaugguguucuauac

SEQ ID NO: 1165591 - RNA, 19 nt, Artificial Sequence
  Description of Artificial Sequence: Synthetic oligonucleotide
  Antisense strand to SEQ ID NO: 1165590
guauagaacaccauccauc

SEQ ID NO: 1165592 - RNA, 19 nt, Artificial Sequence
  Description of Artificial Sequence: Synthetic oligonucleotide
  Sense strand starting at position 176 of SEQ ID NO: 916552
gaugguguucuauacacca

SEQ ID NO: 1165593 - RNA, 19 nt, Artificial Sequence
  Description of Artificial Sequence: Synthetic oligonucleotide
  Antisense strand to SEQ ID NO: 1165592
ugguguauagaacaccauc

SEQ ID NO: 1165594 - RNA, 19 nt, Artificial Sequence
  Description of Artificial Sequence: Synthetic oligonucleotide
  Sense strand starting at position 495 of SEQ ID NO: 916552
gguugucaccagggacuaa

SEQ ID NO: 1165595 - RNA, 19 nt, Artificial Sequence
  Description of Artificial Sequence: Synthetic oligonucleotide
  Antisense strand to SEQ ID NO: 1165594
uuagucccuggugacaacc

SEQ ID NO: 1165596 - RNA, 19 nt, Artificial Sequence
  Description of Artificial Sequence: Synthetic oligonucleotide
  Sense strand starting at position 779 of SEQ ID NO: 916552
ugucaauaggugcagugaa

SEQ ID NO: 1165597 - RNA, 19 nt, Artificial Sequence
  Description of Artificial Sequence: Synthetic oligonucleotide
  Antisense strand to SEQ ID NO: 1165596
uucacugcaccuauugaca

SEQ ID NO: 1165598 - RNA, 19 nt, Artificial Sequence
  Description of Artificial Sequence: Synthetic oligonucleotide
  Sense strand starting at position 830 of SEQ ID NO: 916552
uugguuaaccgguaagcaa

SEQ ID NO: 1165599 - RNA, 19 nt, Artificial Sequence
  Description of Artificial Sequence: Synthetic oligonucleotide
  Antisense strand to SEQ ID NO: 1165598
uugcuuaccgguuaaccaa

SEQ ID NO: 1165600 - RNA, 19 nt, Artificial Sequence
  Description of Artificial Sequence: Synthetic oligonucleotide
  Sense strand starting at position 845 of SEQ ID NO: 916552
gcaaccuauuuagaaagau

SEQ ID NO: 1165601 - RNA, 19 nt, Artificial Sequence
  Description of Artificial Sequence: Synthetic oligonucleotide
  Antisense strand to SEQ ID NO: 1165600
aucuuucuaaauagguugc

SEQ ID NO: 1165602 - RNA, 19 nt, Artificial Sequence
  Description of Artificial Sequence: Synthetic oligonucleotide
  Sense strand starting at position 981 of SEQ ID NO: 916552
caaacaaaugugugagaac

SEQ ID NO: 1165603 - RNA, 19 nt, Artificial Sequence
  Description of Artificial Sequence: Synthetic oligonucleotide
  Antisense strand to SEQ ID NO: 1165602
guucucacacauuuguuug

SEQ ID NO: 1165604 - RNA, 19 nt, Artificial Sequence
  Description of Artificial Sequence: Synthetic oligonucleotide
  Sense strand starting at position 1395 of SEQ ID NO: 916552
agaguaauggaauggaguu

SEQ ID NO: 1165605 - RNA, 19 nt, Artificial Sequence
  Description of Artificial Sequence: Synthetic oligonucleotide
  Antisense strand to SEQ ID NO: 1165604
aacuccauuccauuacucu

SEQ ID NO: 1165606 - RNA, 19 nt, Artificial Sequence
  Description of Artificial Sequence: Synthetic oligonucleotide
  Sense strand starting at position 1415 of SEQ ID NO: 916552
gggaaaggguagucuauug

SEQ ID NO: 1165607 - RNA, 19 nt, Artificial Sequence
  Description of Artificial Sequence: Synthetic oligonucleotide
  Antisense strand to SEQ ID NO: 1165606
caauagacuacccuuuccc

SEQ ID NO: 1165608 - RNA, 19 nt, Artificial Sequence
  Description of Artificial Sequence: Synthetic oligonucleotide
  Sense strand starting at position 1572 of SEQ ID NO: 916552
ccacuuaggucuucuccua

SEQ ID NO: 1165609 - RNA, 19 nt, Artificial Sequence
  Description of Artificial Sequence: Synthetic oligonucleotide
  Antisense strand to SEQ ID NO: 1165608
uaggagaagaccuaagugg

SEQ ID NO: 1165610 - RNA, 19 nt, Artificial Sequence
  Description of Artificial Sequence: Synthetic oligonucleotide
  Sense strand starting at position 1579 of SEQ ID NO: 916552
ggucuucuccuagaggagu

SEQ ID NO: 1165611 - RNA, 19 nt, Artificial Sequence
  Description of Artificial Sequence: Synthetic oligonucleotide
  Antisense strand to SEQ ID NO: 1165610
acuccucuaggagaagacc

SEQ ID NO: 1165612 - RNA, 19 nt, Artificial Sequence
  Description of Artificial Sequence: Synthetic oligonucleotide
  Sense strand starting at position 1711 of SEQ ID NO: 916552
cucggaucucacuggaauc

SEQ ID NO: 1165613 - RNA, 19 nt, Artificial Sequence
  Description of Artificial Sequence: Synthetic oligonucleotide
  Antisense strand to SEQ ID NO: 1165612
gauuccagugagauccgag

SEQ ID NO: 1165614 - RNA, 19 nt, Artificial Sequence
  Description of Artificial Sequence: Synthetic oligonucleotide
  Sense strand starting at position 1859 of SEQ ID NO: 916552
cccggcuaccuuugagaau

SEQ ID NO: 1165615 - RNA, 19 nt, Artificial Sequence
  Description of Artificial Sequence: Synthetic oligonucleotide
  Antisense strand to SEQ ID NO: 1165614
auucucaaagguagccggg

SEQ ID NO: 1165616 - RNA, 19 nt, Artificial Sequence
  Description of Artificial Sequence: Synthetic oligonucleotide
  Sense strand starting at position 2236 of SEQ ID NO: 916552
acucgaaugugaccuuuaa

SEQ ID NO: 1165617 - RNA, 19 nt, Artificial Sequence
  Description of Artificial Sequence: Synthetic oligonucleotide
  Antisense strand to SEQ ID NO: 1165616
uuaaaggucacauucgagu

SEQ ID NO: 1165618 - RNA, 19 nt, Artificial Sequence
  Description of Artificial Sequence: Synthetic oligonucleotide
  Sense strand starting at position 2314 of SEQ ID NO: 916552
gagucauaucaagguggaa

SEQ ID NO: 1165619 - RNA, 19 nt, Artificial Sequence
  Description of Artificial Sequence: Synthetic oligonucleotide
  Antisense strand to SEQ ID NO: 1165618
uuccaccuugauaugacuc

SEQ ID NO: 1165620 - RNA, 19 nt, Artificial Sequence
  Description of Artificial Sequence: Synthetic oligonucleotide
  Sense strand starting at position 2466 of SEQ ID NO: 916552
gcaacugacugcuuugaug

SEQ ID NO: 1165621 - RNA, 19 nt, Artificial Sequence
  Description of Artificial Sequence: Synthetic oligonucleotide
  Antisense strand to SEQ ID NO: 1165620
caucaaagcagucaguugc

SEQ ID NO: 1165622 - RNA, 19 nt, Artificial Sequence
  Description of Artificial Sequence: Synthetic oligonucleotide
  Sense strand starting at position 2570 of SEQ ID NO: 916552
cagugugugaagggaguua

SEQ ID NO: 1165623 - RNA, 19 nt, Artificial Sequence
  Description of Artificial Sequence: Synthetic oligonucleotide
  Antisense strand to SEQ ID NO: 1165622
uaacucccuucacacacug

SEQ ID NO: 1165624 - RNA, 19 nt, Artificial Sequence
  Description of Artificial Sequence: Synthetic oligonucleotide
  Sense strand starting at position 3099 of SEQ ID NO: 916552
cuccacagacugugagaaa

SEQ ID NO: 1165625 - RNA, 19 nt, Artificial Sequence
  Description of Artificial Sequence: Synthetic oligonucleotide
  Antisense strand to SEQ ID NO: 1165624
uuucucacagucuguggag

SEQ ID NO: 1165626 - RNA, 19 nt, Artificial Sequence
  Description of Artificial Sequence: Synthetic oligonucleotide
  Sense strand starting at position 3175 of SEQ ID NO: 916552
uccugacaucugcagcuua

SEQ ID NO: 1165627 - RNA, 19 nt, Artificial Sequence
  Description of Artificial Sequence: Synthetic oligonucleotide
  Antisense strand to SEQ ID NO: 1165626
uaagcugcagaugucagga

SEQ ID NO: 1165628 - RNA, 19 nt, Artificial Sequence
  Description of Artificial Sequence: Synthetic oligonucleotide
  Sense strand starting at position 3303 of SEQ ID NO: 916552
gggauuguauuugcuguua

SEQ ID NO: 1165629 - RNA, 19 nt, Artificial Sequence
  Description of Artificial Sequence: Synthetic oligonucleotide
  Antisense strand to SEQ ID NO: 1165628
uaacagcaaauacaauccc

SEQ ID NO: 1165630 - RNA, 19 nt, Artificial Sequence
  Description of Artificial Sequence: Synthetic oligonucleotide
  Sense strand starting at position 3360 of SEQ ID NO: 916552
gcugcugugagcccucuaa

SEQ ID NO: 1165631 - RNA, 19 nt, Artificial Sequence
  Description of Artificial Sequence: Synthetic oligonucleotide
  Antisense strand to SEQ ID NO: 1165630
uuagagggcucacagcagc

SEQ ID NO: 1165632 - RNA, 19 nt, Artificial Sequence
  Description of Artificial Sequence: Synthetic oligonucleotide
  Sense strand starting at position 3524 of SEQ ID NO: 916552
augccaaaccuaugguuaa

SEQ ID NO: 1165633 - RNA, 19 nt, Artificial Sequence
  Description of Artificial Sequence: Synthetic oligonucleotide
  Antisense strand to SEQ ID NO: 1165632
uuaaccauagguuuggcau

SEQ ID NO: 1165634 - RNA, 19 nt, Artificial Sequence
  Description of Artificial Sequence: Synthetic oligonucleotide
  Sense strand starting at position 3535 of SEQ ID NO: 916552
augguuaaaugcuuugaau

SEQ ID NO: 1165635 - RNA, 19 nt, Artificial Sequence
  Description of Artificial Sequence: Synthetic oligonucleotide
  Antisense strand to SEQ ID NO: 1165634
auucaaagcauuuaaccau

SEQ ID NO: 1165636 - RNA, 19 nt, Artificial Sequence
  Description of Artificial Sequence: Synthetic oligonucleotide
  Sense strand starting at position 3537 of SEQ ID NO: 916552
gguuaaaugcuuugaauuc

SEQ ID NO: 1165637 - RNA, 19 nt, Artificial Sequence
  Description of Artificial Sequence: Synthetic oligonucleotide
  Antisense strand to SEQ ID NO: 1165636
gaauucaaagcauuuaacc

SEQ ID NO: 1165638 - RNA, 19 nt, Artificial Sequence
  Description of Artificial Sequence: Synthetic oligonucleotide
  Sense strand starting at position 3568 of SEQ ID NO: 916552
aguagaucaugacugcaca

SEQ ID NO: 1165639 - RNA, 19 nt, Artificial Sequence
  Description of Artificial Sequence: Synthetic oligonucleotide
  Antisense strand to SEQ ID NO: 1165638
ugugcagucaugaucuacu

SEQ ID NO: 1165640 - RNA, 19 nt, Artificial Sequence
  Description of Artificial Sequence: Synthetic oligonucleotide
  Sense strand starting at position 3569 of SEQ ID NO: 916552
guagaucaugacugcacau

SEQ ID NO: 1165641 - RNA, 19 nt, Artificial Sequence
  Description of Artificial Sequence: Synthetic oligonucleotide
  Antisense strand to SEQ ID NO: 1165640
augugcagucaugaucuac

SEQ ID NO: 1165642 - RNA, 19 nt, Artificial Sequence
  Description of Artificial Sequence: Synthetic oligonucleotide
  Sense strand starting at position 3579 of SEQ ID NO: 916552
acugcacaugcaugaucaa

SEQ ID NO: 1165643 - RNA, 19 nt, Artificial Sequence
  Description of Artificial Sequence: Synthetic oligonucleotide
  Antisense strand to SEQ ID NO: 1165642
uugaucaugcaugugcagu

SEQ ID NO: 1165644 - RNA, 19 nt, Artificial Sequence
  Description of Artificial Sequence: Synthetic oligonucleotide
  Sense strand starting at position 3586 of SEQ ID NO: 916552
augcaugaucaagguaaga

SEQ ID NO: 1165645 - RNA, 19 nt, Artificial Sequence
  Description of Artificial Sequence: Synthetic oligonucleotide
  Antisense strand to SEQ ID NO: 1165644
ucuuaccuugaucaugcau

SEQ ID NO: 1165646 - RNA, 19 nt, Artificial Sequence
  Description of Artificial Sequence: Synthetic oligonucleotide
  Sense strand starting at position 3633 of SEQ ID NO: 916552
uguuacauguggguucaga

SEQ ID NO: 1165647 - RNA, 19 nt, Artificial Sequence
  Description of Artificial Sequence: Synthetic oligonucleotide
  Antisense strand to SEQ ID NO: 1165646
ucugaacccacauguaaca

SEQ ID NO: 1165648 - RNA, 19 nt, Artificial Sequence
  Description of Artificial Sequence: Synthetic oligonucleotide
  Sense strand starting at position 3659 of SEQ ID NO: 916552
cagacuugggcaugaaucu

SEQ ID NO: 1165649 - RNA, 19 nt, Artificial Sequence
  Description of Artificial Sequence: Synthetic oligonucleotide
  Antisense strand to SEQ ID NO: 1165648
agauucaugcccaagucug

SEQ ID NO: 1165650 - RNA, 19 nt, Artificial Sequence
  Description of Artificial Sequence: Synthetic oligonucleotide
  Sense strand starting at position 3668 of SEQ ID NO: 916552
gcaugaaucugggucacau

SEQ ID NO: 1165651 - RNA, 19 nt, Artificial Sequence
  Description of Artificial Sequence: Synthetic oligonucleotide
  Antisense strand to SEQ ID NO: 1165650
augugacccagauucaugc

SEQ ID NO: 1165652 - RNA, 19 nt, Artificial Sequence
  Description of Artificial Sequence: Synthetic oligonucleotide
  Sense strand starting at position 3764 of SEQ ID NO: 916552
cacacuuguggcugacuau

SEQ ID NO: 1165653 - RNA, 19 nt, Artificial Sequence
  Description of Artificial Sequence: Synthetic oligonucleotide
  Antisense strand to SEQ ID NO: 1165652
auagucagccacaagugug

SEQ ID NO: 1165654 - RNA, 19 nt, Artificial Sequence
  Description of Artificial Sequence: Synthetic oligonucleotide
  Sense strand starting at position 3765 of SEQ ID NO: 916552
acacuuguggcugacuaua

SEQ ID NO: 1165655 - RNA, 19 nt, Artificial Sequence
  Description of Artificial Sequence: Synthetic oligonucleotide
  Antisense strand to SEQ ID NO: 1165654
uauagucagccacaagugu

SEQ ID NO: 1165656 - RNA, 19 nt, Artificial Sequence
  Description of Artificial Sequence: Synthetic oligonucleotide
  Sense strand starting at position 3767 of SEQ ID NO: 916552
acuuguggcugacuauaua

SEQ ID NO: 1165657 - RNA, 19 nt, Artificial Sequence
  Description of Artificial Sequence: Synthetic oligonucleotide
  Antisense strand to SEQ ID NO: 1165656
uauauagucagccacaagu

SEQ ID NO: 1165658 - RNA, 19 nt, Artificial Sequence
  Description of Artificial Sequence: Synthetic oligonucleotide
  Sense strand starting at position 3795 of SEQ ID NO: 916552
gguuauagauagucaacaa

SEQ ID NO: 1165659 - RNA, 19 nt, Artificial Sequence
  Description of Artificial Sequence: Synthetic oligonucleotide
  Antisense strand to SEQ ID NO: 1165658
uuguugacuaucuauaacc

SEQ ID NO: 1165660 - RNA, 19 nt, Artificial Sequence
  Description of Artificial Sequence: Synthetic oligonucleotide
  Sense strand starting at position 3847 of SEQ ID NO: 916552
acugguguugcauagacaa

SEQ ID NO: 1165661 - RNA, 19 nt, Artificial Sequence
  Description of Artificial Sequence: Synthetic oligonucleotide
  Antisense strand to SEQ ID NO: 1165660
uugucuaugcaacaccagu

SEQ ID NO: 1165662 - RNA, 19 nt, Artificial Sequence
  Description of Artificial Sequence: Synthetic oligonucleotide
  Sense strand starting at position 3849 of SEQ ID NO: 916552
ugguguugcauagacaauu

SEQ ID NO: 1165663 - RNA, 19 nt, Artificial Sequence
  Description of Artificial Sequence: Synthetic oligonucleotide
  Antisense strand to SEQ ID NO: 1165662
aauugucuaugcaacacca

SEQ ID NO: 1165664 - RNA, 19 nt, Artificial Sequence
  Description of Artificial Sequence: Synthetic oligonucleotide
  Sense strand starting at position 3976 of SEQ ID NO: 916552
agucaagucuagucaggga

SEQ ID NO: 1165665 - RNA, 19 nt, Artificial Sequence
  Description of Artificial Sequence: Synthetic oligonucleotide
  Antisense strand to SEQ ID NO: 1165664
ucccugacuagacuugacu

SEQ ID NO: 1165666 - RNA, 19 nt, Artificial Sequence
  Description of Artificial Sequence: Synthetic oligonucleotide
  Sense strand starting at position 3980 of SEQ ID NO: 916552
aagucuagucagggaauua

SEQ ID NO: 1165667 - RNA, 19 nt, Artificial Sequence
  Description of Artificial Sequence: Synthetic oligonucleotide
  Antisense strand to SEQ ID NO: 1165666
uaauucccugacuagacuu

SEQ ID NO: 1165668 - RNA, 19 nt, Artificial Sequence
  Description of Artificial Sequence: Synthetic oligonucleotide
  Sense strand starting at position 90 of SEQ ID NO: 916553
cagcuuuagcaagaaugga

SEQ ID NO: 1165669 - RNA, 19 nt, Artificial Sequence
  Description of Artificial Sequence: Synthetic oligonucleotide
  Antisense strand to SEQ ID NO: 1165668
uccauucuugcuaaagcug

SEQ ID NO: 1165670 - RNA, 19 nt, Artificial Sequence
  Description of Artificial Sequence: Synthetic oligonucleotide
  Sense strand starting at position 103 of SEQ ID NO: 916553
aauggaagucacugagguu

SEQ ID NO: 1165671 - RNA, 19 nt, Artificial Sequence
  Description of Artificial Sequence: Synthetic oligonucleotide
  Antisense strand to SEQ ID NO: 1165670
aaccucagugacuuccauu

SEQ ID NO: 1165672 - RNA, 19 nt, Artificial Sequence
  Description of Artificial Sequence: Synthetic oligonucleotide
  Sense strand starting at position 175 of SEQ ID NO: 916553
aagcucuuacuggguugaa

SEQ ID NO: 1165673 - RNA, 19 nt, Artificial Sequence
  Description of Artificial Sequence: Synthetic oligonucleotide
  Antisense strand to SEQ ID NO: 1165672
uucaacccaguaagagcuu

SEQ ID NO: 1165674 - RNA, 19 nt, Artificial Sequence
  Description of Artificial Sequence: Synthetic oligonucleotide
  Sense strand starting at position 176 of SEQ ID NO: 916553
agcucuuacuggguugaaa

SEQ ID NO: 1165675 - RNA, 19 nt, Artificial Sequence
  Description of Artificial Sequence: Synthetic oligonucleotide
  Antisense strand to SEQ ID NO: 1165674
uuucaacccaguaagagcu

SEQ ID NO: 1165676 - RNA, 19 nt, Artificial Sequence
  Description of Artificial Sequence: Synthetic oligonucleotide
  Sense strand starting at position 178 of SEQ ID NO: 916553
cucuuacuggguugaaaug

SEQ ID NO: 1165677 - RNA, 19 nt, Artificial Sequence
  Description of Artificial Sequence: Synthetic oligonucleotide
  Antisense strand to SEQ ID NO: 1165676
cauuucaacccaguaagag

SEQ ID NO: 1165678 - RNA, 19 nt, Artificial Sequence
  Description of Artificial Sequence: Synthetic oligonucleotide
  Sense strand starting at position 188 of SEQ ID NO: 916553
guugaaauggcucauguuc

SEQ ID NO: 1165679 - RNA, 19 nt, Artificial Sequence
  Description of Artificial Sequence: Synthetic oligonucleotide
  Antisense strand to SEQ ID NO: 1165678
gaacaugagccauuucaac

SEQ ID NO: 1165680 - RNA, 19 nt, Artificial Sequence
  Description of Artificial Sequence: Synthetic oligonucleotide
  Sense strand starting at position 472 of SEQ ID NO: 916553
aaagaaauggcucauguuc

SEQ ID NO: 1165681 - RNA, 19 nt, Artificial Sequence
  Description of Artificial Sequence: Synthetic oligonucleotide
  Antisense strand to SEQ ID NO: 1165680
gaacaugagccauuucuuu

SEQ ID NO: 1165682 - RNA, 19 nt, Artificial Sequence
  Description of Artificial Sequence: Synthetic oligonucleotide
  Sense strand starting at position 479 of SEQ ID NO: 916553
uggcucauguuccuuuauu

SEQ ID NO: 1165683 - RNA, 19 nt, Artificial Sequence
  Description of Artificial Sequence: Synthetic oligonucleotide
  Antisense strand to SEQ ID NO: 1165682
aauaaaggaacaugagcca

SEQ ID NO: 1165684 - RNA, 19 nt, Artificial Sequence
  Description of Artificial Sequence: Synthetic oligonucleotide
  Sense strand starting at position 555 of SEQ ID NO: 916553
ugcaguuaucuagggucaa

SEQ ID NO: 1165685 - RNA, 19 nt, Artificial Sequence
  Description of Artificial Sequence: Synthetic oligonucleotide
  Antisense strand to SEQ ID NO: 1165684
uugacccuagauaacugca

SEQ ID NO: 1165686 - RNA, 19 nt, Artificial Sequence
  Description of Artificial Sequence: Synthetic oligonucleotide
  Sense strand starting at position 908 of SEQ ID NO: 916553
aggagaggacccuggcaua

SEQ ID NO: 1165687 - RNA, 19 nt, Artificial Sequence
  Description of Artificial Sequence: Synthetic oligonucleotide
  Antisense strand to SEQ ID NO: 1165686
uaugccaggguccucuccu

SEQ ID NO: 1165688 - RNA, 19 nt, Artificial Sequence
  Description of Artificial Sequence: Synthetic oligonucleotide
  Sense strand starting at position 951 of SEQ ID NO: 916553
cugaacuacugcucuguua

SEQ ID NO: 1165689 - RNA, 19 nt, Artificial Sequence
  Description of Artificial Sequence: Synthetic oligonucleotide
  Antisense strand to SEQ ID NO: 1165688
uaacagagcaguaguucag

SEQ ID NO: 1165690 - RNA, 19 nt, Artificial Sequence
  Description of Artificial Sequence: Synthetic oligonucleotide
  Sense strand starting at position 1517 of SEQ ID NO: 916553
ucuagaaaccugugucaaa

SEQ ID NO: 1165691 - RNA, 19 nt, Artificial Sequence
  Description of Artificial Sequence: Synthetic oligonucleotide
  Antisense strand to SEQ ID NO: 1165690
uuugacacagguuucuaga

SEQ ID NO: 1165692 - RNA, 19 nt, Artificial Sequence
  Description of Artificial Sequence: Synthetic oligonucleotide
  Sense strand starting at position 1518 of SEQ ID NO: 916553
cuagaaaccugugucaaag

SEQ ID NO: 1165693 - RNA, 19 nt, Artificial Sequence
  Description of Artificial Sequence: Synthetic oligonucleotide
  Antisense strand to SEQ ID NO: 1165692
cuuugacacagguuucuag

SEQ ID NO: 1165694 - RNA, 19 nt, Artificial Sequence
  Description of Artificial Sequence: Synthetic oligonucleotide
  Sense strand starting at position 1729 of SEQ ID NO: 916553
acagucaguuccuuuggua

SEQ ID NO: 1165695 - RNA, 19 nt, Artificial Sequence
  Description of Artificial Sequence: Synthetic oligonucleotide
  Antisense strand to SEQ ID NO: 1165694
uaccaaaggaacugacugu

SEQ ID NO: 1165696 - RNA, 19 nt, Artificial Sequence
  Description of Artificial Sequence: Synthetic oligonucleotide
  Sense strand starting at position 1840 of SEQ ID NO: 916553
agagucagaucuucuguuu

SEQ ID NO: 1165697 - RNA, 19 nt, Artificial Sequence
  Description of Artificial Sequence: Synthetic oligonucleotide
  Antisense strand to SEQ ID NO: 1165696
aaacagaagaucugacucu

SEQ ID NO: 1165698 - RNA, 19 nt, Artificial Sequence
  Description of Artificial Sequence: Synthetic oligonucleotide
  Sense strand starting at position 1970 of SEQ ID NO: 916553
gacaguauaugcuugagga

SEQ ID NO: 1165699 - RNA, 19 nt, Artificial Sequence
  Description of Artificial Sequence: Synthetic oligonucleotide
  Antisense strand to SEQ ID NO: 1165698
uccucaagcauauacuguc

SEQ ID NO: 1165700 - RNA, 19 nt, Artificial Sequence
  Description of Artificial Sequence: Synthetic oligonucleotide
  Sense strand starting at position 1971 of SEQ ID NO: 916553
acaguauaugcuugaggau

SEQ ID NO: 1165701 - RNA, 19 nt, Artificial Sequence
  Description of Artificial Sequence: Synthetic oligonucleotide
  Antisense strand to SEQ ID NO: 1165700
auccucaagcauauacugu

SEQ ID NO: 1165702 - RNA, 19 nt, Artificial Sequence
  Description of Artificial Sequence: Synthetic oligonucleotide
  Sense strand starting at position 1972 of SEQ ID NO: 916553
caguauaugcuugaggauc

SEQ ID NO: 1165703 - RNA, 19 nt, Artificial Sequence
  Description of Artificial Sequence: Synthetic oligonucleotide
  Antisense strand to SEQ ID NO: 1165702
gauccucaagcauauacug

SEQ ID NO: 1165704 - RNA, 19 nt, Artificial Sequence
  Description of Artificial Sequence: Synthetic oligonucleotide
  Sense strand starting at position 1992 of SEQ ID NO: 916553
ccaagaacaaguuguggaa

SEQ ID NO: 1165705 - RNA, 19 nt, Artificial Sequence
  Description of Artificial Sequence: Synthetic oligonucleotide
  Antisense strand to SEQ ID NO: 1165704
uuccacaacuuguucuugg

SEQ ID NO: 1165706 - RNA, 19 nt, Artificial Sequence
  Description of Artificial Sequence: Synthetic oligonucleotide
  Sense strand starting at position 2111 of SEQ ID NO: 916553
cugccugggccagauaaga

SEQ ID NO: 1165707 - RNA, 19 nt, Artificial Sequence
  Description of Artificial Sequence: Synthetic oligonucleotide
  Antisense strand to SEQ ID NO: 1165706
ucuuaucuggcccaggcag

SEQ ID NO: 1165708 - RNA, 19 nt, Artificial Sequence
  Description of Artificial Sequence: Synthetic oligonucleotide
  Sense strand starting at position 2124 of SEQ ID NO: 916553
auaagagguuuaucaguug

SEQ ID NO: 1165709 - RNA, 19 nt, Artificial Sequence
  Description of Artificial Sequence: Synthetic oligonucleotide
  Antisense strand to SEQ ID NO: 1165708
caacugauaaaccucuuau

SEQ ID NO: 1165710 - RNA, 19 nt, Artificial Sequence
  Description of Artificial Sequence: Synthetic oligonucleotide
  Sense strand starting at position 2260 of SEQ ID NO: 916553
gagguaauauaaccuuagu

SEQ ID NO: 1165711 - RNA, 19 nt, Artificial Sequence
  Description of Artificial Sequence: Synthetic oligonucleotide
  Antisense strand to SEQ ID NO: 1165710
acuaagguuauauuaccuc

SEQ ID NO: 1165712 - RNA, 19 nt, Artificial Sequence
  Description of Artificial Sequence: Synthetic oligonucleotide
  Sense strand starting at position 2276 of SEQ ID NO: 916553
aguaaagacuuaguaagca

SEQ ID NO: 1165713 - RNA, 19 nt, Artificial Sequence
  Description of Artificial Sequence: Synthetic oligonucleotide
  Antisense strand to SEQ ID NO: 1165712
ugcuuacuaagucuuuacu

SEQ ID NO: 1165714 - RNA, 19 nt, Artificial Sequence
  Description of Artificial Sequence: Synthetic oligonucleotide
  Sense strand starting at position 2316 of SEQ ID NO: 916553
auugcaagcuuaguuuaua

SEQ ID NO: 1165715 - RNA, 19 nt, Artificial Sequence
  Description of Artificial Sequence: Synthetic oligonucleotide
  Antisense strand to SEQ ID NO: 1165714
uauaaacuaagcuugcaau

SEQ ID NO: 1165716 - RNA, 19 nt, Artificial Sequence
  Description of Artificial Sequence: Synthetic oligonucleotide
  Sense strand starting at position 2317 of SEQ ID NO: 916553
uugcaagcuuaguuuauaa

SEQ ID NO: 1165717 - RNA, 19 nt, Artificial Sequence
  Description of Artificial Sequence: Synthetic oligonucleotide
  Antisense strand to SEQ ID NO: 1165716
uuauaaacuaagcuugcaa

SEQ ID NO: 1165718 - RNA, 19 nt, Artificial Sequence
  Description of Artificial Sequence: Synthetic oligonucleotide
  Sense strand starting at position 2319 of SEQ ID NO: 916553
gcaagcuuaguuuauaaga

SEQ ID NO: 1165719 - RNA, 19 nt, Artificial Sequence
  Description of Artificial Sequence: Synthetic oligonucleotide
  Antisense strand to SEQ ID NO: 1165718
ucuuauaaacuaagcuugc

SEQ ID NO: 1165720 - RNA, 19 nt, Artificial Sequence
  Description of Artificial Sequence: Synthetic oligonucleotide
  Sense strand starting at position 2660 of SEQ ID NO: 916553
ucacaaagauucuaaaggu

SEQ ID NO: 1165721 - RNA, 19 nt, Artificial Sequence
  Description of Artificial Sequence: Synthetic oligonucleotide
  Antisense strand to SEQ ID NO: 1165720
accuuuagaaucuuuguga

SEQ ID NO: 1165722 - RNA, 19 nt, Artificial Sequence
  Description of Artificial Sequence: Synthetic oligonucleotide
  Sense strand starting at position 2865 of SEQ ID NO: 916553
ugggcaaugucucuuuaga

SEQ ID NO: 1165723 - RNA, 19 nt, Artificial Sequence
  Description of Artificial Sequence: Synthetic oligonucleotide
  Antisense strand to SEQ ID NO: 1165722
ucuaaagagacauugccca

SEQ ID NO: 1165724 - RNA, 19 nt, Artificial Sequence
  Description of Artificial Sequence: Synthetic oligonucleotide
  Sense strand starting at position 2867 of SEQ ID NO: 916553
ggcaaugucucuuuagagc

SEQ ID NO: 1165725 - RNA, 19 nt, Artificial Sequence
  Description of Artificial Sequence: Synthetic oligonucleotide
  Antisense strand to SEQ ID NO: 1165724
gcucuaaagagacauugcc

SEQ ID NO: 1165726 - RNA, 19 nt, Artificial Sequence
  Description of Artificial Sequence: Synthetic oligonucleotide
  Sense strand starting at position 2876 of SEQ ID NO: 916553
ucuuuagagccuugaauau

SEQ ID NO: 1165727 - RNA, 19 nt, Artificial Sequence
  Description of Artificial Sequence: Synthetic oligonucleotide
  Antisense strand to SEQ ID NO: 1165726
auauucaaggcucuaaaga

SEQ ID NO: 1165728 - RNA, 19 nt, Artificial Sequence
  Description of Artificial Sequence: Synthetic oligonucleotide
  Sense strand starting at position 3047 of SEQ ID NO: 916553
gucccuuucugcuuggaua

SEQ ID NO: 1165729 - RNA, 19 nt, Artificial Sequence
  Description of Artificial Sequence: Synthetic oligonucleotide
  Antisense strand to SEQ ID NO: 1165728
uauccaagcagaaagggac

SEQ ID NO: 1165730 - RNA, 19 nt, Artificial Sequence
  Description of Artificial Sequence: Synthetic oligonucleotide
  Sense strand starting at position 3055 of SEQ ID NO: 916553
cugcuuggauagcuuagaa

SEQ ID NO: 1165731 - RNA, 19 nt, Artificial Sequence
  Description of Artificial Sequence: Synthetic oligonucleotide
  Antisense strand to SEQ ID NO: 1165730
uucuaagcuauccaagcag

SEQ ID NO: 1165732 - RNA, 19 nt, Artificial Sequence
  Description of Artificial Sequence: Synthetic oligonucleotide
  Sense strand starting at position 3065 of SEQ ID NO: 916553
agcuuagaauucucagcaa

SEQ ID NO: 1165733 - RNA, 19 nt, Artificial Sequence
  Description of Artificial Sequence: Synthetic oligonucleotide
  Antisense strand to SEQ ID NO: 1165732
uugcugagaauucuaagcu

SEQ ID NO: 1165734 - RNA, 19 nt, Artificial Sequence
  Description of Artificial Sequence: Synthetic oligonucleotide
  Sense strand starting at position 3206 of SEQ ID NO: 916553
uuggcaaggucuuccugau

SEQ ID NO: 1165735 - RNA, 19 nt, Artificial Sequence
  Description of Artificial Sequence: Synthetic oligonucleotide
  Antisense strand to SEQ ID NO: 1165734
aucaggaagaccuugccaa

SEQ ID NO: 1165736 - RNA, 19 nt, Artificial Sequence
  Description of Artificial Sequence: Synthetic oligonucleotide
  Sense strand starting at position 3222 of SEQ ID NO: 916553
gaucucuacggucagacau

SEQ ID NO: 1165737 - RNA, 19 nt, Artificial Sequence
  Description of Artificial Sequence: Synthetic oligonucleotide
  Antisense strand to SEQ ID NO: 1165736
augucugaccguagagauc

SEQ ID NO: 1165738 - RNA, 19 nt, Artificial Sequence
  Description of Artificial Sequence: Synthetic oligonucleotide
  Sense strand starting at position 3232 of SEQ ID NO: 916553
gucagacauugugucuaug

SEQ ID NO: 1165739 - RNA, 19 nt, Artificial Sequence
  Description of Artificial Sequence: Synthetic oligonucleotide
  Antisense strand to SEQ ID NO: 1165738
cauagacacaaugucugac

SEQ ID NO: 1165740 - RNA, 19 nt, Artificial Sequence
  Description of Artificial Sequence: Synthetic oligonucleotide
  Sense strand starting at position 3234 of SEQ ID NO: 916553
cagacauugugucuaugug

SEQ ID NO: 1165741 - RNA, 19 nt, Artificial Sequence
  Description of Artificial Sequence: Synthetic oligonucleotide
  Antisense strand to SEQ ID NO: 1165740
cacauagacacaaugucug

SEQ ID NO: 1165742 - RNA, 19 nt, Artificial Sequence
  Description of Artificial Sequence: Synthetic oligonucleotide
  Sense strand starting at position 3260 of SEQ ID NO: 916553
acagacauaccgugccaua

SEQ ID NO: 1165743 - RNA, 19 nt, Artificial Sequence
  Description of Artificial Sequence: Synthetic oligonucleotide
  Antisense strand to SEQ ID NO: 1165742
uauggcacgguaugucugu

SEQ ID NO: 1165744 - RNA, 19 nt, Artificial Sequence
  Description of Artificial Sequence: Synthetic oligonucleotide
  Sense strand starting at position 3422 of SEQ ID NO: 916553
agaaauuagcuaggcauaa

SEQ ID NO: 1165745 - RNA, 19 nt, Artificial Sequence
  Description of Artificial Sequence: Synthetic oligonucleotide
  Antisense strand to SEQ ID NO: 1165744
uuaugccuagcuaauuucu

SEQ ID NO: 1165746 - RNA, 19 nt, Artificial Sequence
  Description of Artificial Sequence: Synthetic oligonucleotide
  Sense strand starting at position 3943 of SEQ ID NO: 916553
aggauuguaugaccucaaa

SEQ ID NO: 1165747 - RNA, 19 nt, Artificial Sequence
  Description of Artificial Sequence: Synthetic oligonucleotide
  Antisense strand to SEQ ID NO: 1165746
uuugaggucauacaauccu

SEQ ID NO: 1165748 - RNA, 19 nt, Artificial Sequence
  Description of Artificial Sequence: Synthetic oligonucleotide
  Sense strand starting at position 99 of SEQ ID NO: 916554
gcauccaagcaugaaaucu

SEQ ID NO: 1165749 - RNA, 19 nt, Artificial Sequence
  Description of Artificial Sequence: Synthetic oligonucleotide
  Antisense strand to SEQ ID NO: 1165748
agauuucaugcuuggaugc

SEQ ID NO: 1165750 - RNA, 19 nt, Artificial Sequence
  Description of Artificial Sequence: Synthetic oligonucleotide
  Sense strand starting at position 198 of SEQ ID NO: 916554
ugacguuugcuauaauauu

SEQ ID NO: 1165751 - RNA, 19 nt, Artificial Sequence
  Description of Artificial Sequence: Synthetic oligonucleotide
  Antisense strand to SEQ ID NO: 1165750
aauauuauagcaaacguca

SEQ ID NO: 1165752 - RNA, 19 nt, Artificial Sequence
  Description of Artificial Sequence: Synthetic oligonucleotide
  Sense strand starting at position 292 of SEQ ID NO: 916554
uguaacgagaaauguuauu

SEQ ID NO: 1165753 - RNA, 19 nt, Artificial Sequence
  Description of Artificial Sequence: Synthetic oligonucleotide
  Antisense strand to SEQ ID NO: 1165752
aauaacauuucucguuaca

SEQ ID NO: 1165754 - RNA, 19 nt, Artificial Sequence
  Description of Artificial Sequence: Synthetic oligonucleotide
  Sense strand starting at position 556 of SEQ ID NO: 916554
gcauacaucuguuuaaugu

SEQ ID NO: 1165755 - RNA, 19 nt, Artificial Sequence
  Description of Artificial Sequence: Synthetic oligonucleotide
  Antisense strand to SEQ ID NO: 1165754
acauuaaacagauguaugc

SEQ ID NO: 1165756 - RNA, 19 nt, Artificial Sequence
  Description of Artificial Sequence: Synthetic oligonucleotide
  Sense strand starting at position 784 of SEQ ID NO: 916554
cacugauauugauccguuu

SEQ ID NO: 1165757 - RNA, 19 nt, Artificial Sequence
  Description of Artificial Sequence: Synthetic oligonucleotide
  Antisense strand to SEQ ID NO: 1165756
aaacggaucaauaucagug

SEQ ID NO: 1165758 - RNA, 19 nt, Artificial Sequence
  Description of Artificial Sequence: Synthetic oligonucleotide
  Sense strand starting at position 787 of SEQ ID NO: 916554
ugauauugauccguuugcu

SEQ ID NO: 1165759 - RNA, 19 nt, Artificial Sequence
  Description of Artificial Sequence: Synthetic oligonucleotide
  Antisense strand to SEQ ID NO: 1165758
agcaaacggaucaauauca

SEQ ID NO: 1165760 - RNA, 19 nt, Artificial Sequence
  Description of Artificial Sequence: Synthetic oligonucleotide
  Sense strand starting at position 813 of SEQ ID NO: 916554
cuuuauguugcugauuagu

SEQ ID NO: 1165761 - RNA, 19 nt, Artificial Sequence
  Description of Artificial Sequence: Synthetic oligonucleotide
  Antisense strand to SEQ ID NO: 1165760
acuaaucagcaacauaaag

SEQ ID NO: 1165762 - RNA, 19 nt, Artificial Sequence
  Description of Artificial Sequence: Synthetic oligonucleotide
  Sense strand starting at position 815 of SEQ ID NO: 916554
uuauguugcugauuaguuu

SEQ ID NO: 1165763 - RNA, 19 nt, Artificial Sequence
  Description of Artificial Sequence: Synthetic oligonucleotide
  Antisense strand to SEQ ID NO: 1165762
aaacuaaucagcaacauaa

SEQ ID NO: 1165764 - RNA, 19 nt, Artificial Sequence
  Description of Artificial Sequence: Synthetic oligonucleotide
  Sense strand starting at position 822 of SEQ ID NO: 916554
gcugauuaguuuccauacu

SEQ ID NO: 1165765 - RNA, 19 nt, Artificial Sequence
  Description of Artificial Sequence: Synthetic oligonucleotide
  Antisense strand to SEQ ID NO: 1165764
aguauggaaacuaaucagc

SEQ ID NO: 1165766 - RNA, 19 nt, Artificial Sequence
  Description of Artificial Sequence: Synthetic oligonucleotide
  Sense strand starting at position 831 of SEQ ID NO: 916554
uuuccauacuaagagagau

SEQ ID NO: 1165767 - RNA, 19 nt, Artificial Sequence
  Description of Artificial Sequence: Synthetic oligonucleotide
  Antisense strand to SEQ ID NO: 1165766
aucucucuuaguauggaaa

SEQ ID NO: 1165768 - RNA, 19 nt, Artificial Sequence
  Description of Artificial Sequence: Synthetic oligonucleotide
  Sense strand starting at position 902 of SEQ ID NO: 916554
ggguuagugggaugccauu

SEQ ID NO: 1165769 - RNA, 19 nt, Artificial Sequence
  Description of Artificial Sequence: Synthetic oligonucleotide
  Antisense strand to SEQ ID NO: 1165768
aauggcaucccacuaaccc

SEQ ID NO: 1165770 - RNA, 19 nt, Artificial Sequence
  Description of Artificial Sequence: Synthetic oligonucleotide
  Sense strand starting at position 969 of SEQ ID NO: 916554
agugcuuugggcgagauua

SEQ ID NO: 1165771 - RNA, 19 nt, Artificial Sequence
  Description of Artificial Sequence: Synthetic oligonucleotide
  Antisense strand to SEQ ID NO: 1165770
uaaucucgcccaaagcacu

SEQ ID NO: 1165772 - RNA, 19 nt, Artificial Sequence
  Description of Artificial Sequence: Synthetic oligonucleotide
  Sense strand starting at position 970 of SEQ ID NO: 916554
gugcuuugggcgagauuac

SEQ ID NO: 1165773 - RNA, 19 nt, Artificial Sequence
  Description of Artificial Sequence: Synthetic oligonucleotide
  Antisense strand to SEQ ID NO: 1165772
guaaucucgcccaaagcac

SEQ ID NO: 1165774 - RNA, 19 nt, Artificial Sequence
  Description of Artificial Sequence: Synthetic oligonucleotide
  Sense strand starting at position 990 of SEQ ID NO: 916554
auuugugggugcucuguaa

SEQ ID NO: 1165775 - RNA, 19 nt, Artificial Sequence
  Description of Artificial Sequence: Synthetic oligonucleotide
  Antisense strand to SEQ ID NO: 1165774
uuacagagcacccacaaau

SEQ ID NO: 1165776 - RNA, 19 nt, Artificial Sequence
  Description of Artificial Sequence: Synthetic oligonucleotide
  Sense strand starting at position 994 of SEQ ID NO: 916554
gugggugcucuguaauucu

SEQ ID NO: 1165777 - RNA, 19 nt, Artificial Sequence
  Description of Artificial Sequence: Synthetic oligonucleotide
  Antisense strand to SEQ ID NO: 1165776
agaauuacagagcacccac

SEQ ID NO: 1165778 - RNA, 19 nt, Artificial Sequence
  Description of Artificial Sequence: Synthetic oligonucleotide
  Sense strand starting at position 1003 of SEQ ID NO: 916554
cuguaauucuuuguucucu

SEQ ID NO: 1165779 - RNA, 19 nt, Artificial Sequence
  Description of Artificial Sequence: Synthetic oligonucleotide
  Antisense strand to SEQ ID NO: 1165778
agagaacaaagaauuacag

SEQ ID NO: 1165780 - RNA, 19 nt, Artificial Sequence
  Description of Artificial Sequence: Synthetic oligonucleotide
  Sense strand starting at position 1004 of SEQ ID NO: 916554
uguaauucuuuguucucua

SEQ ID NO: 1165781 - RNA, 19 nt, Artificial Sequence
  Description of Artificial Sequence: Synthetic oligonucleotide
  Antisense strand to SEQ ID NO: 1165780
uagagaacaaagaauuaca

SEQ ID NO: 1165782 - RNA, 19 nt, Artificial Sequence
  Description of Artificial Sequence: Synthetic oligonucleotide
  Sense strand starting at position 1005 of SEQ ID NO: 916554
guaauucuuuguucucuaa

SEQ ID NO: 1165783 - RNA, 19 nt, Artificial Sequence
  Description of Artificial Sequence: Synthetic oligonucleotide
  Antisense strand to SEQ ID NO: 1165782
uuagagaacaaagaauuac

SEQ ID NO: 1165784 - RNA, 19 nt, Artificial Sequence
  Description of Artificial Sequence: Synthetic oligonucleotide
  Sense strand starting at position 1033 of SEQ ID NO: 916554
ucuuuaaggcccugcauau

SEQ ID NO: 1165785 - RNA, 19 nt, Artificial Sequence
  Description of Artificial Sequence: Synthetic oligonucleotide
  Antisense strand to SEQ ID NO: 1165784
auaugcagggccuuaaaga

SEQ ID NO: 1165786 - RNA, 19 nt, Artificial Sequence
  Description of Artificial Sequence: Synthetic oligonucleotide
  Sense strand starting at position 1143 of SEQ ID NO: 916554
gccagauggcugcauucuu

SEQ ID NO: 1165787 - RNA, 19 nt, Artificial Sequence
  Description of Artificial Sequence: Synthetic oligonucleotide
  Antisense strand to SEQ ID NO: 1165786
aagaaugcagccaucuggc

SEQ ID NO: 1165788 - RNA, 19 nt, Artificial Sequence
  Description of Artificial Sequence: Synthetic oligonucleotide
  Sense strand starting at position 1156 of SEQ ID NO: 916554
auucuuuacgcgcaaacca

SEQ ID NO: 1165789 - RNA, 19 nt, Artificial Sequence
  Description of Artificial Sequence: Synthetic oligonucleotide
  Antisense strand to SEQ ID NO: 1165788
ugguuugcgcguaaagaau

SEQ ID NO: 1165790 - RNA, 19 nt, Artificial Sequence
  Description of Artificial Sequence: Synthetic oligonucleotide
  Sense strand starting at position 1839 of SEQ ID NO: 916554
ucgguuuaggagcgaucau

SEQ ID NO: 1165791 - RNA, 19 nt, Artificial Sequence
  Description of Artificial Sequence: Synthetic oligonucleotide
  Antisense strand to SEQ ID NO: 1165790
augaucgcuccuaaaccga

SEQ ID NO: 1165792 - RNA, 19 nt, Artificial Sequence
  Description of Artificial Sequence: Synthetic oligonucleotide
  Sense strand starting at position 1840 of SEQ ID NO: 916554
cgguuuaggagcgaucauu

SEQ ID NO: 1165793 - RNA, 19 nt, Artificial Sequence
  Description of Artificial Sequence: Synthetic oligonucleotide
  Antisense strand to SEQ ID NO: 1165792
aaugaucgcuccuaaaccg

SEQ ID NO: 1165794 - RNA, 19 nt, Artificial Sequence
  Description of Artificial Sequence: Synthetic oligonucleotide
  Sense strand starting at position 1851 of SEQ ID NO: 916554
cgaucauuggccgaagcga

SEQ ID NO: 1165795 - RNA, 19 nt, Artificial Sequence
  Description of Artificial Sequence: Synthetic oligonucleotide
  Antisense strand to SEQ ID NO: 1165794
ucgcuucggccaaugaucg

SEQ ID NO: 1165796 - RNA, 19 nt, Artificial Sequence
  Description of Artificial Sequence: Synthetic oligonucleotide
  Sense strand starting at position 1915 of SEQ ID NO: 916554
ggcuguuugguuggacaga

SEQ ID NO: 1165797 - RNA, 19 nt, Artificial Sequence
  Description of Artificial Sequence: Synthetic oligonucleotide
  Antisense strand to SEQ ID NO: 1165796
ucuguccaaccaaacagcc

SEQ ID NO: 1165798 - RNA, 19 nt, Artificial Sequence
  Description of Artificial Sequence: Synthetic oligonucleotide
  Sense strand starting at position 2503 of SEQ ID NO: 916554
ccugucauuuggucccuga

SEQ ID NO: 1165799 - RNA, 19 nt, Artificial Sequence
  Description of Artificial Sequence: Synthetic oligonucleotide
  Antisense strand to SEQ ID NO: 1165798
ucagggaccaaaugacagg

SEQ ID NO: 1165800 - RNA, 19 nt, Artificial Sequence
  Description of Artificial Sequence: Synthetic oligonucleotide
  Sense strand starting at position 2506 of SEQ ID NO: 916554
gucauuuggucccugagcu

SEQ ID NO: 1165801 - RNA, 19 nt, Artificial Sequence
  Description of Artificial Sequence: Synthetic oligonucleotide
  Antisense strand to SEQ ID NO: 1165800
agcucagggaccaaaugac

SEQ ID NO: 1165802 - RNA, 19 nt, Artificial Sequence
  Description of Artificial Sequence: Synthetic oligonucleotide
  Sense strand starting at position 2507 of SEQ ID NO: 916554
ucauuuggucccugagcuu

SEQ ID NO: 1165803 - RNA, 19 nt, Artificial Sequence
  Description of Artificial Sequence: Synthetic oligonucleotide
  Antisense strand to SEQ ID NO: 1165802
aagcucagggaccaaauga

SEQ ID NO: 1165804 - RNA, 19 nt, Artificial Sequence
  Description of Artificial Sequence: Synthetic oligonucleotide
  Sense strand starting at position 2893 of SEQ ID NO: 916554
uccagcuuugauuauguaa

SEQ ID NO: 1165805 - RNA, 19 nt, Artificial Sequence
  Description of Artificial Sequence: Synthetic oligonucleotide
  Antisense strand to SEQ ID NO: 1165804
uuacauaaucaaagcugga

SEQ ID NO: 1165806 - RNA, 19 nt, Artificial Sequence
  Description of Artificial Sequence: Synthetic oligonucleotide
  Sense strand starting at position 2962 of SEQ ID NO: 916554
uaaacauuucugcggcaag

SEQ ID NO: 1165807 - RNA, 19 nt, Artificial Sequence
  Description of Artificial Sequence: Synthetic oligonucleotide
  Antisense strand to SEQ ID NO: 1165806
cuugccgcagaaauguuua

SEQ ID NO: 1165808 - RNA, 19 nt, Artificial Sequence
  Description of Artificial Sequence: Synthetic oligonucleotide
  Sense strand starting at position 2965 of SEQ ID NO: 916554
acauuucugcggcaaguau

SEQ ID NO: 1165809 - RNA, 19 nt, Artificial Sequence
  Description of Artificial Sequence: Synthetic oligonucleotide
  Antisense strand to SEQ ID NO: 1165808
auacuugccgcagaaaugu

SEQ ID NO: 1165810 - RNA, 19 nt, Artificial Sequence
  Description of Artificial Sequence: Synthetic oligonucleotide
  Sense strand starting at position 2973 of SEQ ID NO: 916554
gcggcaaguauggaagaaa

SEQ ID NO: 1165811 - RNA, 19 nt, Artificial Sequence
  Description of Artificial Sequence: Synthetic oligonucleotide
  Antisense strand to SEQ ID NO: 1165810
uuucuuccauacuugccgc

SEQ ID NO: 1165812 - RNA, 19 nt, Artificial Sequence
  Description of Artificial Sequence: Synthetic oligonucleotide
  Sense strand starting at position 3036 of SEQ ID NO: 916554
augccacugucaucagaca

SEQ ID NO: 1165813 - RNA, 19 nt, Artificial Sequence
  Description of Artificial Sequence: Synthetic oligonucleotide
  Antisense strand to SEQ ID NO: 1165812
ugucugaugacaguggcau

SEQ ID NO: 1165814 - RNA, 19 nt, Artificial Sequence
  Description of Artificial Sequence: Synthetic oligonucleotide
  Sense strand starting at position 3037 of SEQ ID NO: 916554
ugccacugucaucagacaa

SEQ ID NO: 1165815 - RNA, 19 nt, Artificial Sequence
  Description of Artificial Sequence: Synthetic oligonucleotide
  Antisense strand to SEQ ID NO: 1165814
uugucugaugacaguggca

SEQ ID NO: 1165816 - RNA, 19 nt, Artificial Sequence
  Description of Artificial Sequence: Synthetic oligonucleotide
  Sense strand starting at position 3079 of SEQ ID NO: 916554
uucuuacaggcuugugauc

SEQ ID NO: 1165817 - RNA, 19 nt, Artificial Sequence
  Description of Artificial Sequence: Synthetic oligonucleotide
  Antisense strand to SEQ ID NO: 1165816
gaucacaagccuguaagaa

SEQ ID NO: 1165818 - RNA, 19 nt, Artificial Sequence
  Description of Artificial Sequence: Synthetic oligonucleotide
  Sense strand starting at position 3088 of SEQ ID NO: 916554
gcuugugaucuuggccaaa

SEQ ID NO: 1165819 - RNA, 19 nt, Artificial Sequence
  Description of Artificial Sequence: Synthetic oligonucleotide
  Antisense strand to SEQ ID NO: 1165818
uuuggccaagaucacaagc

SEQ ID NO: 1165820 - RNA, 19 nt, Artificial Sequence
  Description of Artificial Sequence: Synthetic oligonucleotide
  Sense strand starting at position 3090 of SEQ ID NO: 916554
uugugaucuuggccaaaug

SEQ ID NO: 1165821 - RNA, 19 nt, Artificial Sequence
  Description of Artificial Sequence: Synthetic oligonucleotide
  Antisense strand to SEQ ID NO: 1165820
cauuuggccaagaucacaa

SEQ ID NO: 1165822 - RNA, 19 nt, Artificial Sequence
  Description of Artificial Sequence: Synthetic oligonucleotide
  Sense strand starting at position 3091 of SEQ ID NO: 916554
ugugaucuuggccaaaugu

SEQ ID NO: 1165823 - RNA, 19 nt, Artificial Sequence
  Description of Artificial Sequence: Synthetic oligonucleotide
  Antisense strand to SEQ ID NO: 1165822
acauuuggccaagaucaca

SEQ ID NO: 1165824 - RNA, 19 nt, Artificial Sequence
  Description of Artificial Sequence: Synthetic oligonucleotide
  Sense strand starting at position 3121 of SEQ ID NO: 916554
gguuguuugggauaaugua

SEQ ID NO: 1165825 - RNA, 19 nt, Artificial Sequence
  Description of Artificial Sequence: Synthetic oligonucleotide
  Antisense strand to SEQ ID NO: 1165824
uacauuaucccaaacaacc

SEQ ID NO: 1165826 - RNA, 19 nt, Artificial Sequence
  Description of Artificial Sequence: Synthetic oligonucleotide
  Sense strand starting at position 3637 of SEQ ID NO: 916554
guaauagaauugggagaag

SEQ ID NO: 1165827 - RNA, 19 nt, Artificial Sequence
  Description of Artificial Sequence: Synthetic oligonucleotide
  Antisense strand to SEQ ID NO: 1165826
cuucucccaauucuauuac

SEQ ID NO: 1165828 - RNA, 19 nt, Artificial Sequence
  Description of Artificial Sequence: Synthetic oligonucleotide
  Sense strand starting at position 77 of SEQ ID NO: 916555
ugagaaagcugagacauaa

SEQ ID NO: 1165829 - RNA, 19 nt, Artificial Sequence
  Description of Artificial Sequence: Synthetic oligonucleotide
  Antisense strand to SEQ ID NO: 1165828
uuaugucucagcuuucuca

SEQ ID NO: 1165830 - RNA, 19 nt, Artificial Sequence
  Description of Artificial Sequence: Synthetic oligonucleotide
  Sense strand starting at position 88 of SEQ ID NO: 916555
agacauaaaugagacauua

SEQ ID NO: 1165831 - RNA, 19 nt, Artificial Sequence
  Description of Artificial Sequence: Synthetic oligonucleotide
  Antisense strand to SEQ ID NO: 1165830
uaaugucucauuuaugucu

SEQ ID NO: 1165832 - RNA, 19 nt, Artificial Sequence
  Description of Artificial Sequence: Synthetic oligonucleotide
  Sense strand starting at position 299 of SEQ ID NO: 916555
augaauaacucagcaaugu

SEQ ID NO: 1165833 - RNA, 19 nt, Artificial Sequence
  Description of Artificial Sequence: Synthetic oligonucleotide
  Antisense strand to SEQ ID NO: 1165832
acauugcugaguuauucau

SEQ ID NO: 1165834 - RNA, 19 nt, Artificial Sequence
  Description of Artificial Sequence: Synthetic oligonucleotide
  Sense strand starting at position 300 of SEQ ID NO: 916555
ugaauaacucagcaaugug

SEQ ID NO: 1165835 - RNA, 19 nt, Artificial Sequence
  Description of Artificial Sequence: Synthetic oligonucleotide
  Antisense strand to SEQ ID NO: 1165834
cacauugcugaguuauuca

SEQ ID NO: 1165836 - RNA, 19 nt, Artificial Sequence
  Description of Artificial Sequence: Synthetic oligonucleotide
  Sense strand starting at position 354 of SEQ ID NO: 916555
ucuggauucuacguccuga

SEQ ID NO: 1165837 - RNA, 19 nt, Artificial Sequence
  Description of Artificial Sequence: Synthetic oligonucleotide
  Antisense strand to SEQ ID NO: 1165836
ucaggacguagaauccaga

SEQ ID NO: 1165838 - RNA, 19 nt, Artificial Sequence
  Description of Artificial Sequence: Synthetic oligonucleotide
  Sense strand starting at position 423 of SEQ ID NO: 916555
guaucagguccauguuuaa

SEQ ID NO: 1165839 - RNA, 19 nt, Artificial Sequence
  Description of Artificial Sequence: Synthetic oligonucleotide
  Antisense strand to SEQ ID NO: 1165838
uuaaacauggaccugauac

SEQ ID NO: 1165840 - RNA, 19 nt, Artificial Sequence
  Description of Artificial Sequence: Synthetic oligonucleotide
  Sense strand starting at position 560 of SEQ ID NO: 916555
gcaacacucgcucacagaa

SEQ ID NO: 1165841 - RNA, 19 nt, Artificial Sequence
  Description of Artificial Sequence: Synthetic oligonucleotide
  Antisense strand to SEQ ID NO: 1165840
uucugugagcgaguguugc

SEQ ID NO: 1165842 - RNA, 19 nt, Artificial Sequence
  Description of Artificial Sequence: Synthetic oligonucleotide
  Sense strand starting at position 946 of SEQ ID NO: 916555
ggccgcaaagaugaguaaa

SEQ ID NO: 1165843 - RNA, 19 nt, Artificial Sequence
  Description of Artificial Sequence: Synthetic oligonucleotide
  Antisense strand to SEQ ID NO: 1165842
uuuacucaucuuugcggcc

SEQ ID NO: 1165844 - RNA, 19 nt, Artificial Sequence
  Description of Artificial Sequence: Synthetic oligonucleotide
  Sense strand starting at position 1514 of SEQ ID NO: 916555
guggcaagacccugucuua

SEQ ID NO: 1165845 - RNA, 19 nt, Artificial Sequence
  Description of Artificial Sequence: Synthetic oligonucleotide
  Antisense strand to SEQ ID NO: 1165844
uaagacagggucuugccac

SEQ ID NO: 1165846 - RNA, 19 nt, Artificial Sequence
  Description of Artificial Sequence: Synthetic oligonucleotide
  Sense strand starting at position 1564 of SEQ ID NO: 916555
aauaauguuugaccaugga

SEQ ID NO: 1165847 - RNA, 19 nt, Artificial Sequence
  Description of Artificial Sequence: Synthetic oligonucleotide
  Antisense strand to SEQ ID NO: 1165846
uccauggucaaacauuauu

SEQ ID NO: 1165848 - RNA, 19 nt, Artificial Sequence
  Description of Artificial Sequence: Synthetic oligonucleotide
  Sense strand starting at position 1577 of SEQ ID NO: 916555
cauggaaggucacacauuu

SEQ ID NO: 1165849 - RNA, 19 nt, Artificial Sequence
  Description of Artificial Sequence: Synthetic oligonucleotide
  Antisense strand to SEQ ID NO: 1165848
aaaugugugaccuuccaug

SEQ ID NO: 1165850 - RNA, 19 nt, Artificial Sequence
  Description of Artificial Sequence: Synthetic oligonucleotide
  Sense strand starting at position 1604 of SEQ ID NO: 916555
gcuagagcaugauccaagu

SEQ ID NO: 1165851 - RNA, 19 nt, Artificial Sequence
  Description of Artificial Sequence: Synthetic oligonucleotide
  Antisense strand to SEQ ID NO: 1165850
acuuggaucaugcucuagc

SEQ ID NO: 1165852 - RNA, 19 nt, Artificial Sequence
  Description of Artificial Sequence: Synthetic oligonucleotide
  Sense strand starting at position 1717 of SEQ ID NO: 916555
agcucuaacuuugcagagu

SEQ ID NO: 1165853 - RNA, 19 nt, Artificial Sequence
  Description of Artificial Sequence: Synthetic oligonucleotide
  Antisense strand to SEQ ID NO: 1165852
acucugcaaaguuagagcu

SEQ ID NO: 1165854 - RNA, 19 nt, Artificial Sequence
  Description of Artificial Sequence: Synthetic oligonucleotide
  Sense strand starting at position 1720 of SEQ ID NO: 916555
ucuaacuuugcagagucau

SEQ ID NO: 1165855 - RNA, 19 nt, Artificial Sequence
  Description of Artificial Sequence: Synthetic oligonucleotide
  Antisense strand to SEQ ID NO: 1165854
augacucugcaaaguuaga

SEQ ID NO: 1165856 - RNA, 19 nt, Artificial Sequence
  Description of Artificial Sequence: Synthetic oligonucleotide
  Sense strand starting at position 1726 of SEQ ID NO: 916555
uuugcagagucauuuccau

SEQ ID NO: 1165857 - RNA, 19 nt, Artificial Sequence
  Description of Artificial Sequence: Synthetic oligonucleotide
  Antisense strand to SEQ ID NO: 1165856
auggaaaugacucugcaaa

SEQ ID NO: 1165858 - RNA, 19 nt, Artificial Sequence
  Description of Artificial Sequence: Synthetic oligonucleotide
  Sense strand starting at position 1903 of SEQ ID NO: 916555
ugaagaucccguggccaga

SEQ ID NO: 1165859 - RNA, 19 nt, Artificial Sequence
  Description of Artificial Sequence: Synthetic oligonucleotide
  Antisense strand to SEQ ID NO: 1165858
ucuggccacgggaucuuca

SEQ ID NO: 1165860 - RNA, 19 nt, Artificial Sequence
  Description of Artificial Sequence: Synthetic oligonucleotide
  Sense strand starting at position 2212 of SEQ ID NO: 916555
ggacuuaauauguggcucu

SEQ ID NO: 1165861 - RNA, 19 nt, Artificial Sequence
  Description of Artificial Sequence: Synthetic oligonucleotide
  Antisense strand to SEQ ID NO: 1165860
agagccacauauuaagucc

SEQ ID NO: 1165862 - RNA, 19 nt, Artificial Sequence
  Description of Artificial Sequence: Synthetic oligonucleotide
  Sense strand starting at position 2215 of SEQ ID NO: 916555
cuuaauauguggcucuaga

SEQ ID NO: 1165863 - RNA, 19 nt, Artificial Sequence
  Description of Artificial Sequence: Synthetic oligonucleotide
  Antisense strand to SEQ ID NO: 1165862
ucuagagccacauauuaag

SEQ ID NO: 1165864 - RNA, 19 nt, Artificial Sequence
  Description of Artificial Sequence: Synthetic oligonucleotide
  Sense strand starting at position 2225 of SEQ ID NO: 916555
ggcucuagagucugaagga

SEQ ID NO: 1165865 - RNA, 19 nt, Artificial Sequence
  Description of Artificial Sequence: Synthetic oligonucleotide
  Antisense strand to SEQ ID NO: 1165864
uccuucagacucuagagcc

SEQ ID NO: 1165866 - RNA, 19 nt, Artificial Sequence
  Description of Artificial Sequence: Synthetic oligonucleotide
  Sense strand starting at position 2269 of SEQ ID NO: 916555
gcagaacugggcuaugaca

SEQ ID NO: 1165867 - RNA, 19 nt, Artificial Sequence
  Description of Artificial Sequence: Synthetic oligonucleotide
  Antisense strand to SEQ ID NO: 1165866
ugucauagcccaguucugc

SEQ ID NO: 1165868 - RNA, 19 nt, Artificial Sequence
  Description of Artificial Sequence: Synthetic oligonucleotide
  Sense strand starting at position 2635 of SEQ ID NO: 916555
uuuaaagaacucuguguua

SEQ ID NO: 1165869 - RNA, 19 nt, Artificial Sequence
  Description of Artificial Sequence: Synthetic oligonucleotide
  Antisense strand to SEQ ID NO: 1165868
uaacacagaguucuuuaaa

SEQ ID NO: 1165870 - RNA, 19 nt, Artificial Sequence
  Description of Artificial Sequence: Synthetic oligonucleotide
  Sense strand starting at position 2665 of SEQ ID NO: 916555
ucugcaaucugucccaaga

SEQ ID NO: 1165871 - RNA, 19 nt, Artificial Sequence
  Description of Artificial Sequence: Synthetic oligonucleotide
  Antisense strand to SEQ ID NO: 1165870
ucuugggacagauugcaga

SEQ ID NO: 1165872 - RNA, 19 nt, Artificial Sequence
  Description of Artificial Sequence: Synthetic oligonucleotide
  Sense strand starting at position 3396 of SEQ ID NO: 916555
uuccaugaguuuccaggaa

SEQ ID NO: 1165873 - RNA, 19 nt, Artificial Sequence
  Description of Artificial Sequence: Synthetic oligonucleotide
  Antisense strand to SEQ ID NO: 1165872
uuccuggaaacucauggaa

SEQ ID NO: 1165874 - RNA, 19 nt, Artificial Sequence
  Description of Artificial Sequence: Synthetic oligonucleotide
  Sense strand starting at position 3400 of SEQ ID NO: 916555
augaguuuccaggaagcga

SEQ ID NO: 1165875 - RNA, 19 nt, Artificial Sequence
  Description of Artificial Sequence: Synthetic oligonucleotide
  Antisense strand to SEQ ID NO: 1165874
ucgcuuccuggaaacucau

SEQ ID NO: 1165876 - RNA, 19 nt, Artificial Sequence
  Description of Artificial Sequence: Synthetic oligonucleotide
  Sense strand starting at position 3413 of SEQ ID NO: 916555
aagcgaggccauuauuacu

SEQ ID NO: 1165877 - RNA, 19 nt, Artificial Sequence
  Description of Artificial Sequence: Synthetic oligonucleotide
  Antisense strand to SEQ ID NO: 1165876
aguaauaauggccucgcuu

SEQ ID NO: 1165878 - RNA, 19 nt, Artificial Sequence
  Description of Artificial Sequence: Synthetic oligonucleotide
  Sense strand starting at position 3427 of SEQ ID NO: 916555
uuacuuguuguaggagguu

SEQ ID NO: 1165879 - RNA, 19 nt, Artificial Sequence
  Description of Artificial Sequence: Synthetic oligonucleotide
  Antisense strand to SEQ ID NO: 1165878
aaccuccuacaacaaguaa

SEQ ID NO: 1165880 - RNA, 19 nt, Artificial Sequence
  Description of Artificial Sequence: Synthetic oligonucleotide
  Sense strand starting at position 3464 of SEQ ID NO: 916555
gaccuucuugcaggauagu

SEQ ID NO: 1165881 - RNA, 19 nt, Artificial Sequence
  Description of Artificial Sequence: Synthetic oligonucleotide
  Antisense strand to SEQ ID NO: 1165880
acuauccugcaagaagguc

SEQ ID NO: 1165882 - RNA, 19 nt, Artificial Sequence
  Description of Artificial Sequence: Synthetic oligonucleotide
  Sense strand starting at position 3465 of SEQ ID NO: 916555
accuucuugcaggauagua

SEQ ID NO: 1165883 - RNA, 19 nt, Artificial Sequence
  Description of Artificial Sequence: Synthetic oligonucleotide
  Antisense strand to SEQ ID NO: 1165882
uacuauccugcaagaaggu

SEQ ID NO: 1165884 - RNA, 19 nt, Artificial Sequence
  Description of Artificial Sequence: Synthetic oligonucleotide
  Sense strand starting at position 3482 of SEQ ID NO: 916555
uagaauauuugacgggaug

SEQ ID NO: 1165885 - RNA, 19 nt, Artificial Sequence
  Description of Artificial Sequence: Synthetic oligonucleotide
  Antisense strand to SEQ ID NO: 1165884
caucccgucaaauauucua

SEQ ID NO: 1165886 - RNA, 19 nt, Artificial Sequence
  Description of Artificial Sequence: Synthetic oligonucleotide
  Sense strand starting at position 3576 of SEQ ID NO: 916555
augagaacuuagcaagaag

SEQ ID NO: 1165887 - RNA, 19 nt, Artificial Sequence
  Description of Artificial Sequence: Synthetic oligonucleotide
  Antisense strand to SEQ ID NO: 1165886
cuucuugcuaaguucucau

SEQ ID NO: 1165888 - RNA, 19 nt, Artificial Sequence
  Description of Artificial Sequence: Synthetic oligonucleotide
  Sense strand starting at position 3686 of SEQ ID NO: 916555
caaucauguguauaaggua

SEQ ID NO: 1165889 - RNA, 19 nt, Artificial Sequence
  Description of Artificial Sequence: Synthetic oligonucleotide
  Antisense strand to SEQ ID NO: 1165888
uaccuuauacacaugauug

SEQ ID NO: 1165890 - RNA, 19 nt, Artificial Sequence
  Description of Artificial Sequence: Synthetic oligonucleotide
  Sense strand starting at position 3765 of SEQ ID NO: 916555
acuguauuaucccuggacu

SEQ ID NO: 1165891 - RNA, 19 nt, Artificial Sequence
  Description of Artificial Sequence: Synthetic oligonucleotide
  Antisense strand to SEQ ID NO: 1165890
aguccagggauaauacagu

SEQ ID NO: 1165892 - RNA, 19 nt, Artificial Sequence
  Description of Artificial Sequence: Synthetic oligonucleotide
  Sense strand starting at position 3766 of SEQ ID NO: 916555
cuguauuaucccuggacug

SEQ ID NO: 1165893 - RNA, 19 nt, Artificial Sequence
  Description of Artificial Sequence: Synthetic oligonucleotide
  Antisense strand to SEQ ID NO: 1165892
caguccagggauaauacag

SEQ ID NO: 1165894 - RNA, 19 nt, Artificial Sequence
  Description of Artificial Sequence: Synthetic oligonucleotide
  Sense strand starting at position 3767 of SEQ ID NO: 916555
uguauuaucccuggacugu

SEQ ID NO: 1165895 - RNA, 19 nt, Artificial Sequence
  Description of Artificial Sequence: Synthetic oligonucleotide
  Antisense strand to SEQ ID NO: 1165894
acaguccagggauaauaca

SEQ ID NO: 1165896 - RNA, 19 nt, Artificial Sequence
  Description of Artificial Sequence: Synthetic oligonucleotide
  Sense strand starting at position 3768 of SEQ ID NO: 916555
guauuaucccuggacuguc

SEQ ID NO: 1165897 - RNA, 19 nt, Artificial Sequence
  Description of Artificial Sequence: Synthetic oligonucleotide
  Antisense strand to SEQ ID NO: 1165896
gacaguccagggauaauac

SEQ ID NO: 1165898 - RNA, 19 nt, Artificial Sequence
  Description of Artificial Sequence: Synthetic oligonucleotide
  Sense strand starting at position 3851 of SEQ ID NO: 916555
uggcgucuugcgucaguga

SEQ ID NO: 1165899 - RNA, 19 nt, Artificial Sequence
  Description of Artificial Sequence: Synthetic oligonucleotide
  Antisense strand to SEQ ID NO: 1165898
ucacugacgcaagacgcca

SEQ ID NO: 1165900 - RNA, 19 nt, Artificial Sequence
  Description of Artificial Sequence: Synthetic oligonucleotide
  Sense strand starting at position 3853 of SEQ ID NO: 916555
gcgucuugcgucagugaaa

SEQ ID NO: 1165901 - RNA, 19 nt, Artificial Sequence
  Description of Artificial Sequence: Synthetic oligonucleotide
  Antisense strand to SEQ ID NO: 1165900
uuucacugacgcaagacgc

SEQ ID NO: 1165902 - RNA, 19 nt, Artificial Sequence
  Description of Artificial Sequence: Synthetic oligonucleotide
  Sense strand starting at position 3918 of SEQ ID NO: 916555
ccucccguucucugagaaa

SEQ ID NO: 1165903 - RNA, 19 nt, Artificial Sequence
  Description of Artificial Sequence: Synthetic oligonucleotide
  Antisense strand to SEQ ID NO: 1165902
uuucucagagaacgggagg

SEQ ID NO: 1165904 - RNA, 19 nt, Artificial Sequence
  Description of Artificial Sequence: Synthetic oligonucleotide
  Sense strand starting at position 3975 of SEQ ID NO: 916555
uuauauccgguccaggaau

SEQ ID NO: 1165905 - RNA, 19 nt, Artificial Sequence
  Description of Artificial Sequence: Synthetic oligonucleotide
  Antisense strand to SEQ ID NO: 1165904
auuccuggaccggauauaa

SEQ ID NO: 1165906 - RNA, 19 nt, Artificial Sequence
  Description of Artificial Sequence: Synthetic oligonucleotide
  Sense strand starting at position 3977 of SEQ ID NO: 916555
auauccgguccaggaauau

SEQ ID NO: 1165907 - RNA, 19 nt, Artificial Sequence
  Description of Artificial Sequence: Synthetic oligonucleotide
  Antisense strand to SEQ ID NO: 1165906
auauuccuggaccggauau

SEQ ID NO: 1165908 - RNA, 19 nt, Artificial Sequence
  Description of Artificial Sequence: Synthetic oligonucleotide
  Sense strand starting at position 188 of SEQ ID NO: 916556
agggaagucucuucuaaca

SEQ ID NO: 1165909 - RNA, 19 nt, Artificial Sequence
  Description of Artificial Sequence: Synthetic oligonucleotide
  Antisense strand to SEQ ID NO: 1165908
uguuagaagagacuucccu

SEQ ID NO: 1165910 - RNA, 19 nt, Artificial Sequence
  Description of Artificial Sequence: Synthetic oligonucleotide
  Sense strand starting at position 190 of SEQ ID NO: 916556
ggaagucucuucuaacacu

SEQ ID NO: 1165911 - RNA, 19 nt, Artificial Sequence
  Description of Artificial Sequence: Synthetic oligonucleotide
  Antisense strand to SEQ ID NO: 1165910
aguguuagaagagacuucc

SEQ ID NO: 1165912 - RNA, 19 nt, Artificial Sequence
  Description of Artificial Sequence: Synthetic oligonucleotide
  Sense strand starting at position 245 of SEQ ID NO: 916556
aaagaccugucuuugagga

SEQ ID NO: 1165913 - RNA, 19 nt, Artificial Sequence
  Description of Artificial Sequence: Synthetic oligonucleotide
  Antisense strand to SEQ ID NO: 1165912
uccucaaagacaggucuuu

SEQ ID NO: 1165914 - RNA, 19 nt, Artificial Sequence
  Description of Artificial Sequence: Synthetic oligonucleotide
  Sense strand starting at position 270 of SEQ ID NO: 916556
cgcuuuaggguagaaucua

SEQ ID NO: 1165915 - RNA, 19 nt, Artificial Sequence
  Description of Artificial Sequence: Synthetic oligonucleotide
  Antisense strand to SEQ ID NO: 1165914
uagauucuacccuaaagcg

SEQ ID NO: 1165916 - RNA, 19 nt, Artificial Sequence
  Description of Artificial Sequence: Synthetic oligonucleotide
  Sense strand starting at position 278 of SEQ ID NO: 916556
gguagaaucuagcggaaca

SEQ ID NO: 1165917 - RNA, 19 nt, Artificial Sequence
  Description of Artificial Sequence: Synthetic oligonucleotide
  Antisense strand to SEQ ID NO: 1165916
uguuccgcuagauucuacc

SEQ ID NO: 1165918 - RNA, 19 nt, Artificial Sequence
  Description of Artificial Sequence: Synthetic oligonucleotide
  Sense strand starting at position 346 of SEQ ID NO: 916556
cgggaaagggcccguauuu

SEQ ID NO: 1165919 - RNA, 19 nt, Artificial Sequence
  Description of Artificial Sequence: Synthetic oligonucleotide
  Antisense strand to SEQ ID NO: 1165918
aaauacgggcccuuucccg

SEQ ID NO: 1165920 - RNA, 19 nt, Artificial Sequence
  Description of Artificial Sequence: Synthetic oligonucleotide
  Sense strand starting at position 367 of SEQ ID NO: 916556
guuugacagccugagaugu

SEQ ID NO: 1165921 - RNA, 19 nt, Artificial Sequence
  Description of Artificial Sequence: Synthetic oligonucleotide
  Antisense strand to SEQ ID NO: 1165920
acaucucaggcugucaaac

SEQ ID NO: 1165922 - RNA, 19 nt, Artificial Sequence
  Description of Artificial Sequence: Synthetic oligonucleotide
  Sense strand starting at position 380 of SEQ ID NO: 916556
agaugugaaucccgguuga

SEQ ID NO: 1165923 - RNA, 19 nt, Artificial Sequence
  Description of Artificial Sequence: Synthetic oligonucleotide
  Antisense strand to SEQ ID NO: 1165922
ucaaccgggauucacaucu

SEQ ID NO: 1165924 - RNA, 19 nt, Artificial Sequence
  Description of Artificial Sequence: Synthetic oligonucleotide
  Sense strand starting at position 409 of SEQ ID NO: 916556
agcugugaccuugagcaca

SEQ ID NO: 1165925 - RNA, 19 nt, Artificial Sequence
  Description of Artificial Sequence: Synthetic oligonucleotide
  Antisense strand to SEQ ID NO: 1165924
ugugcucaaggucacagcu

SEQ ID NO: 1165926 - RNA, 19 nt, Artificial Sequence
  Description of Artificial Sequence: Synthetic oligonucleotide
  Sense strand starting at position 456 of SEQ ID NO: 916556
aucugugagucgcgguuaa

SEQ ID NO: 1165927 - RNA, 19 nt, Artificial Sequence
  Description of Artificial Sequence: Synthetic oligonucleotide
  Antisense strand to SEQ ID NO: 1165926
uuaaccgcgacucacagau

SEQ ID NO: 1165928 - RNA, 19 nt, Artificial Sequence
  Description of Artificial Sequence: Synthetic oligonucleotide
  Sense strand starting at position 458 of SEQ ID NO: 916556
cugugagucgcgguuaaua

SEQ ID NO: 1165929 - RNA, 19 nt, Artificial Sequence
  Description of Artificial Sequence: Synthetic oligonucleotide
  Antisense strand to SEQ ID NO: 1165928
uauuaaccgcgacucacag

SEQ ID NO: 1165930 - RNA, 19 nt, Artificial Sequence
  Description of Artificial Sequence: Synthetic oligonucleotide
  Sense strand starting at position 460 of SEQ ID NO: 916556
gugagucgcgguuaauaau

SEQ ID NO: 1165931 - RNA, 19 nt, Artificial Sequence
  Description of Artificial Sequence: Synthetic oligonucleotide
  Antisense strand to SEQ ID NO: 1165930
auuauuaaccgcgacucac

SEQ ID NO: 1165932 - RNA, 19 nt, Artificial Sequence
  Description of Artificial Sequence: Synthetic oligonucleotide
  Sense strand starting at position 529 of SEQ ID NO: 916556
aaugccugcuucguacaaa

SEQ ID NO: 1165933 - RNA, 19 nt, Artificial Sequence
  Description of Artificial Sequence: Synthetic oligonucleotide
  Antisense strand to SEQ ID NO: 1165932
uuuguacgaagcaggcauu

SEQ ID NO: 1165934 - RNA, 19 nt, Artificial Sequence
  Description of Artificial Sequence: Synthetic oligonucleotide
  Sense strand starting at position 838 of SEQ ID NO: 916556
cggcgcuauuauuauuaau

SEQ ID NO: 1165935 - RNA, 19 nt, Artificial Sequence
  Description of Artificial Sequence: Synthetic oligonucleotide
  Antisense strand to SEQ ID NO: 1165934
auuaauaauaauagcgccg

SEQ ID NO: 1165936 - RNA, 19 nt, Artificial Sequence
  Description of Artificial Sequence: Synthetic oligonucleotide
  Sense strand starting at position 883 of SEQ ID NO: 916556
agcagaaaucaaggacucu

SEQ ID NO: 1165937 - RNA, 19 nt, Artificial Sequence
  Description of Artificial Sequence: Synthetic oligonucleotide
  Antisense strand to SEQ ID NO: 1165936
agaguccuugauuucugcu

SEQ ID NO: 1165938 - RNA, 19 nt, Artificial Sequence
  Description of Artificial Sequence: Synthetic oligonucleotide
  Sense strand starting at position 892 of SEQ ID NO: 916556
caaggacucucgugagaaa

SEQ ID NO: 1165939 - RNA, 19 nt, Artificial Sequence
  Description of Artificial Sequence: Synthetic oligonucleotide
  Antisense strand to SEQ ID NO: 1165938
uuucucacgagaguccuug

SEQ ID NO: 1165940 - RNA, 19 nt, Artificial Sequence
  Description of Artificial Sequence: Synthetic oligonucleotide
  Sense strand starting at position 1033 of SEQ ID NO: 916556
cuaguucugagccgggaaa

SEQ ID NO: 1165941 - RNA, 19 nt, Artificial Sequence
  Description of Artificial Sequence: Synthetic oligonucleotide
  Antisense strand to SEQ ID NO: 1165940
uuucccggcucagaacuag

SEQ ID NO: 1165942 - RNA, 19 nt, Artificial Sequence
  Description of Artificial Sequence: Synthetic oligonucleotide
  Sense strand starting at position 1676 of SEQ ID NO: 916556
uccugaguccgcggaggaa

SEQ ID NO: 1165943 - RNA, 19 nt, Artificial Sequence
  Description of Artificial Sequence: Synthetic oligonucleotide
  Antisense strand to SEQ ID NO: 1165942
uuccuccgcggacucagga

SEQ ID NO: 1165944 - RNA, 19 nt, Artificial Sequence
  Description of Artificial Sequence: Synthetic oligonucleotide
  Sense strand starting at position 1803 of SEQ ID NO: 916556
cggcuuugucccuggaacu

SEQ ID NO: 1165945 - RNA, 19 nt, Artificial Sequence
  Description of Artificial Sequence: Synthetic oligonucleotide
  Antisense strand to SEQ ID NO: 1165944
aguuccagggacaaagccg

SEQ ID NO: 1165946 - RNA, 19 nt, Artificial Sequence
  Description of Artificial Sequence: Synthetic oligonucleotide
  Sense strand starting at position 1896 of SEQ ID NO: 916556
aaccgaggcucggagagau

SEQ ID NO: 1165947 - RNA, 19 nt, Artificial Sequence
  Description of Artificial Sequence: Synthetic oligonucleotide
  Antisense strand to SEQ ID NO: 1165946
aucucuccgagccucgguu

SEQ ID NO: 1165948 - RNA, 19 nt, Artificial Sequence
  Description of Artificial Sequence: Synthetic oligonucleotide
  Sense strand starting at position 2080 of SEQ ID NO: 916556
ucagucuacucuuccagua

SEQ ID NO: 1165949 - RNA, 19 nt, Artificial Sequence
  Description of Artificial Sequence: Synthetic oligonucleotide
  Antisense strand to SEQ ID NO: 1165948
uacuggaagaguagacuga

SEQ ID NO: 1165950 - RNA, 19 nt, Artificial Sequence
  Description of Artificial Sequence: Synthetic oligonucleotide
  Sense strand starting at position 2082 of SEQ ID NO: 916556
agucuacucuuccaguaga

SEQ ID NO: 1165951 - RNA, 19 nt, Artificial Sequence
  Description of Artificial Sequence: Synthetic oligonucleotide
  Antisense strand to SEQ ID NO: 1165950
ucuacuggaagaguagacu

SEQ ID NO: 1165952 - RNA, 19 nt, Artificial Sequence
  Description of Artificial Sequence: Synthetic oligonucleotide
  Sense strand starting at position 2140 of SEQ ID NO: 916556
gcucaucgcucaggucuua

SEQ ID NO: 1165953 - RNA, 19 nt, Artificial Sequence
  Description of Artificial Sequence: Synthetic oligonucleotide
  Antisense strand to SEQ ID NO: 1165952
uaagaccugagcgaugagc

SEQ ID NO: 1165954 - RNA, 19 nt, Artificial Sequence
  Description of Artificial Sequence: Synthetic oligonucleotide
  Sense strand starting at position 2145 of SEQ ID NO: 916556
ucgcucaggucuuagauga

SEQ ID NO: 1165955 - RNA, 19 nt, Artificial Sequence
  Description of Artificial Sequence: Synthetic oligonucleotide
  Antisense strand to SEQ ID NO: 1165954
ucaucuaagaccugagcga

SEQ ID NO: 1165956 - RNA, 19 nt, Artificial Sequence
  Description of Artificial Sequence: Synthetic oligonucleotide
  Sense strand starting at position 49 of SEQ ID NO: 916557
ggccaauuaggugaccuua

SEQ ID NO: 1165957 - RNA, 19 nt, Artificial Sequence
  Description of Artificial Sequence: Synthetic oligonucleotide
  Antisense strand to SEQ ID NO: 1165956
uaaggucaccuaauuggcc

SEQ ID NO: 1165958 - RNA, 19 nt, Artificial Sequence
  Description of Artificial Sequence: Synthetic oligonucleotide
  Sense strand starting at position 51 of SEQ ID NO: 916557
ccaauuaggugaccuuauu

SEQ ID NO: 1165959 - RNA, 19 nt, Artificial Sequence
  Description of Artificial Sequence: Synthetic oligonucleotide
  Antisense strand to SEQ ID NO: 1165958
aauaaggucaccuaauugg

SEQ ID NO: 1165960 - RNA, 19 nt, Artificial Sequence
  Description of Artificial Sequence: Synthetic oligonucleotide
  Sense strand starting at position 172 of SEQ ID NO: 916557
ggcugcagcagugaauaaa

SEQ ID NO: 1165961 - RNA, 19 nt, Artificial Sequence
  Description of Artificial Sequence: Synthetic oligonucleotide
  Antisense strand to SEQ ID NO: 1165960
uuuauucacugcugcagcc

SEQ ID NO: 1165962 - RNA, 19 nt, Artificial Sequence
  Description of Artificial Sequence: Synthetic oligonucleotide
  Sense strand starting at position 210 of SEQ ID NO: 916557
cagagaucuuguguccuag

SEQ ID NO: 1165963 - RNA, 19 nt, Artificial Sequence
  Description of Artificial Sequence: Synthetic oligonucleotide
  Antisense strand to SEQ ID NO: 1165962
cuaggacacaagaucucug

SEQ ID NO: 1165964 - RNA, 19 nt, Artificial Sequence
  Description of Artificial Sequence: Synthetic oligonucleotide
  Sense strand starting at position 228 of SEQ ID NO: 916557
gugagagugacaggcaaua

SEQ ID NO: 1165965 - RNA, 19 nt, Artificial Sequence
  Description of Artificial Sequence: Synthetic oligonucleotide
  Antisense strand to SEQ ID NO: 1165964
uauugccugucacucucac

SEQ ID NO: 1165966 - RNA, 19 nt, Artificial Sequence
  Description of Artificial Sequence: Synthetic oligonucleotide
  Sense strand starting at position 255 of SEQ ID NO: 916557
auaaauaagcaguguaacu

SEQ ID NO: 1165967 - RNA, 19 nt, Artificial Sequence
  Description of Artificial Sequence: Synthetic oligonucleotide
  Antisense strand to SEQ ID NO: 1165966
aguuacacugcuuauuuau

SEQ ID NO: 1165968 - RNA, 19 nt, Artificial Sequence
  Description of Artificial Sequence: Synthetic oligonucleotide
  Sense strand starting at position 282 of SEQ ID NO: 916557
ugagcagugcuaugaaaga

SEQ ID NO: 1165969 - RNA, 19 nt, Artificial Sequence
  Description of Artificial Sequence: Synthetic oligonucleotide
  Antisense strand to SEQ ID NO: 1165968
ucuuucauagcacugcuca

SEQ ID NO: 1165970 - RNA, 19 nt, Artificial Sequence
  Description of Artificial Sequence: Synthetic oligonucleotide
  Sense strand starting at position 332 of SEQ ID NO: 916557
ggaggcauccugugaagag

SEQ ID NO: 1165971 - RNA, 19 nt, Artificial Sequence
  Description of Artificial Sequence: Synthetic oligonucleotide
  Antisense strand to SEQ ID NO: 1165970
cucuucacaggaugccucc

SEQ ID NO: 1165972 - RNA, 19 nt, Artificial Sequence
  Description of Artificial Sequence: Synthetic oligonucleotide
  Sense strand starting at position 391 of SEQ ID NO: 916557
cugagaccugaauguacua

SEQ ID NO: 1165973 - RNA, 19 nt, Artificial Sequence
  Description of Artificial Sequence: Synthetic oligonucleotide
  Antisense strand to SEQ ID NO: 1165972
uaguacauucaggucucag

SEQ ID NO: 1165974 - RNA, 19 nt, Artificial Sequence
  Description of Artificial Sequence: Synthetic oligonucleotide
  Sense strand starting at position 858 of SEQ ID NO: 916557
cucagcaguggucauagaa

SEQ ID NO: 1165975 - RNA, 19 nt, Artificial Sequence
  Description of Artificial Sequence: Synthetic oligonucleotide
  Antisense strand to SEQ ID NO: 1165974
uucuaugaccacugcugag

SEQ ID NO: 1165976 - RNA, 19 nt, Artificial Sequence
  Description of Artificial Sequence: Synthetic oligonucleotide
  Sense strand starting at position 1072 of SEQ ID NO: 916557
ccuugcacuguccaaauga

SEQ ID NO: 1165977 - RNA, 19 nt, Artificial Sequence
  Description of Artificial Sequence: Synthetic oligonucleotide
  Antisense strand to SEQ ID NO: 1165976
ucauuuggacagugcaagg

SEQ ID NO: 1165978 - RNA, 19 nt, Artificial Sequence
  Description of Artificial Sequence: Synthetic oligonucleotide
  Sense strand starting at position 1095 of SEQ ID NO: 916557
cuuucuguccuacacagua

SEQ ID NO: 1165979 - RNA, 19 nt, Artificial Sequence
  Description of Artificial Sequence: Synthetic oligonucleotide
  Antisense strand to SEQ ID NO: 1165978
uacuguguaggacagaaag

SEQ ID NO: 1165980 - RNA, 19 nt, Artificial Sequence
  Description of Artificial Sequence: Synthetic oligonucleotide
  Sense strand starting at position 1132 of SEQ ID NO: 916557
cgagaaacggcucaaguuu

SEQ ID NO: 1165981 - RNA, 19 nt, Artificial Sequence
  Description of Artificial Sequence: Synthetic oligonucleotide
  Antisense strand to SEQ ID NO: 1165980
aaacuugagccguuucucg

SEQ ID NO: 1165982 - RNA, 19 nt, Artificial Sequence
  Description of Artificial Sequence: Synthetic oligonucleotide
  Sense strand starting at position 1237 of SEQ ID NO: 916557
aagagaagucucuacuguc

SEQ ID NO: 1165983 - RNA, 19 nt, Artificial Sequence
  Description of Artificial Sequence: Synthetic oligonucleotide
  Antisense strand to SEQ ID NO: 1165982
gacaguagagacuucucuu

SEQ ID NO: 1165984 - RNA, 19 nt, Artificial Sequence
  Description of Artificial Sequence: Synthetic oligonucleotide
  Sense strand starting at position 1273 of SEQ ID NO: 916557
cacugcucagaaugugaaa

SEQ ID NO: 1165985 - RNA, 19 nt, Artificial Sequence
  Description of Artificial Sequence: Synthetic oligonucleotide
  Antisense strand to SEQ ID NO: 1165984
uuucacauucugagcagug

SEQ ID NO: 1165986 - RNA, 19 nt, Artificial Sequence
  Description of Artificial Sequence: Synthetic oligonucleotide
  Sense strand starting at position 1298 of SEQ ID NO: 916557
ucugguaauacggaucuaa

SEQ ID NO: 1165987 - RNA, 19 nt, Artificial Sequence
  Description of Artificial Sequence: Synthetic oligonucleotide
  Antisense strand to SEQ ID NO: 1165986
uuagauccguauuaccaga

SEQ ID NO: 1165988 - RNA, 19 nt, Artificial Sequence
  Description of Artificial Sequence: Synthetic oligonucleotide
  Sense strand starting at position 1313 of SEQ ID NO: 916557
cuaauuagcucuuugacug

SEQ ID NO: 1165989 - RNA, 19 nt, Artificial Sequence
  Description of Artificial Sequence: Synthetic oligonucleotide
  Antisense strand to SEQ ID NO: 1165988
cagucaaagagcuaauuag

SEQ ID NO: 1165990 - RNA, 19 nt, Artificial Sequence
  Description of Artificial Sequence: Synthetic oligonucleotide
  Sense strand starting at position 1317 of SEQ ID NO: 916557
uuagcucuuugacugacaa

SEQ ID NO: 1165991 - RNA, 19 nt, Artificial Sequence
  Description of Artificial Sequence: Synthetic oligonucleotide
  Antisense strand to SEQ ID NO: 1165990
uugucagucaaagagcuaa

SEQ ID NO: 1165992 - RNA, 19 nt, Artificial Sequence
  Description of Artificial Sequence: Synthetic oligonucleotide
  Sense strand starting at position 1563 of SEQ ID NO: 916557
ugcucucuuccagagagaa

SEQ ID NO: 1165993 - RNA, 19 nt, Artificial Sequence
  Description of Artificial Sequence: Synthetic oligonucleotide
  Antisense strand to SEQ ID NO: 1165992
uucucucuggaagagagca

SEQ ID NO: 1165994 - RNA, 19 nt, Artificial Sequence
  Description of Artificial Sequence: Synthetic oligonucleotide
  Sense strand starting at position 1993 of SEQ ID NO: 916557
agcuuuaugacuggcaaag

SEQ ID NO: 1165995 - RNA, 19 nt, Artificial Sequence
  Description of Artificial Sequence: Synthetic oligonucleotide
  Antisense strand to SEQ ID NO: 1165994
cuuugccagucauaaagcu

SEQ ID NO: 1165996 - RNA, 19 nt, Artificial Sequence
  Description of Artificial Sequence: Synthetic oligonucleotide
  Sense strand starting at position 2104 of SEQ ID NO: 916557
uggagugaccuccagcaca

SEQ ID NO: 1165997 - RNA, 19 nt, Artificial Sequence
  Description of Artificial Sequence: Synthetic oligonucleotide
  Antisense strand to SEQ ID NO: 1165996
ugugcuggaggucacucca

SEQ ID NO: 1165998 - RNA, 19 nt, Artificial Sequence
  Description of Artificial Sequence: Synthetic oligonucleotide
  Sense strand starting at position 2141 of SEQ ID NO: 916557
agggauuuccguuguucuu

SEQ ID NO: 1165999 - RNA, 19 nt, Artificial Sequence
  Description of Artificial Sequence: Synthetic oligonucleotide
  Antisense strand to SEQ ID NO: 1165998
aagaacaacggaaaucccu

SEQ ID NO: 1166000 - RNA, 19 nt, Artificial Sequence
  Description of Artificial Sequence: Synthetic oligonucleotide
  Sense strand starting at position 2238 of SEQ ID NO: 916557
cugcaaagugagugaacaa

SEQ ID NO: 1166001 - RNA, 19 nt, Artificial Sequence
  Description of Artificial Sequence: Synthetic oligonucleotide
  Antisense strand to SEQ ID NO: 1166000
uuguucacucacuuugcag

SEQ ID NO: 1166002 - RNA, 19 nt, Artificial Sequence
  Description of Artificial Sequence: Synthetic oligonucleotide
  Sense strand starting at position 2239 of SEQ ID NO: 916557
ugcaaagugagugaacaau

SEQ ID NO: 1166003 - RNA, 19 nt, Artificial Sequence
  Description of Artificial Sequence: Synthetic oligonucleotide
  Antisense strand to SEQ ID NO: 1166002
auuguucacucacuuugca

SEQ ID NO: 1166004 - RNA, 19 nt, Artificial Sequence
  Description of Artificial Sequence: Synthetic oligonucleotide
  Sense strand starting at position 2245 of SEQ ID NO: 916557
gugagugaacaauacguuu

SEQ ID NO: 1166005 - RNA, 19 nt, Artificial Sequence
  Description of Artificial Sequence: Synthetic oligonucleotide
  Antisense strand to SEQ ID NO: 1166004
aaacguauuguucacucac

SEQ ID NO: 1166006 - RNA, 19 nt, Artificial Sequence
  Description of Artificial Sequence: Synthetic oligonucleotide
  Sense strand starting at position 2266 of SEQ ID NO: 916557
acugacggauuguuugauu

SEQ ID NO: 1166007 - RNA, 19 nt, Artificial Sequence
  Description of Artificial Sequence: Synthetic oligonucleotide
  Antisense strand to SEQ ID NO: 1166006
aaucaaacaauccgucagu

SEQ ID NO: 1166008 - RNA, 19 nt, Artificial Sequence
  Description of Artificial Sequence: Synthetic oligonucleotide
  Sense strand starting at position 2296 of SEQ ID NO: 916557
ucccuugauuagccauaga

SEQ ID NO: 1166009 - RNA, 19 nt, Artificial Sequence
  Description of Artificial Sequence: Synthetic oligonucleotide
  Antisense strand to SEQ ID NO: 1166008
ucuauggcuaaucaaggga

SEQ ID NO: 1166010 - RNA, 19 nt, Artificial Sequence
  Description of Artificial Sequence: Synthetic oligonucleotide
  Sense strand starting at position 2541 of SEQ ID NO: 916557
gguguuaaccuguaaucca

SEQ ID NO: 1166011 - RNA, 19 nt, Artificial Sequence
  Description of Artificial Sequence: Synthetic oligonucleotide
  Antisense strand to SEQ ID NO: 1166010
uggauuacagguuaacacc

SEQ ID NO: 1166012 - RNA, 19 nt, Artificial Sequence
  Description of Artificial Sequence: Synthetic oligonucleotide
  Sense strand starting at position 2667 of SEQ ID NO: 916557
augaaaugccuuuauaagu

SEQ ID NO: 1166013 - RNA, 19 nt, Artificial Sequence
  Description of Artificial Sequence: Synthetic oligonucleotide
  Antisense strand to SEQ ID NO: 1166012
acuuauaaaggcauuucau

SEQ ID NO: 1166014 - RNA, 19 nt, Artificial Sequence
  Description of Artificial Sequence: Synthetic oligonucleotide
  Sense strand starting at position 2756 of SEQ ID NO: 916557
uaugaagcauaguuggauu

SEQ ID NO: 1166015 - RNA, 19 nt, Artificial Sequence
  Description of Artificial Sequence: Synthetic oligonucleotide
  Antisense strand to SEQ ID NO: 1166014
aauccaacuaugcuucaua

SEQ ID NO: 1166016 - RNA, 19 nt, Artificial Sequence
  Description of Artificial Sequence: Synthetic oligonucleotide
  Sense strand starting at position 2778 of SEQ ID NO: 916557
ucauuuaaaugguaaacag

SEQ ID NO: 1166017 - RNA, 19 nt, Artificial Sequence
  Description of Artificial Sequence: Synthetic oligonucleotide
  Antisense strand to SEQ ID NO: 1166016
cuguuuaccauuuaaauga

SEQ ID NO: 1166018 - RNA, 19 nt, Artificial Sequence
  Description of Artificial Sequence: Synthetic oligonucleotide
  Sense strand starting at position 2787 of SEQ ID NO: 916557
ugguaaacaguccacuuua

SEQ ID NO: 1166019 - RNA, 19 nt, Artificial Sequence
  Description of Artificial Sequence: Synthetic oligonucleotide
  Antisense strand to SEQ ID NO: 1166018
uaaaguggacuguuuacca

SEQ ID NO: 1166020 - RNA, 19 nt, Artificial Sequence
  Description of Artificial Sequence: Synthetic oligonucleotide
  Sense strand starting at position 2819 of SEQ ID NO: 916557
gucuuucggauuugcagaa

SEQ ID NO: 1166021 - RNA, 19 nt, Artificial Sequence
  Description of Artificial Sequence: Synthetic oligonucleotide
  Antisense strand to SEQ ID NO: 1166020
uucugcaaauccgaaagac

SEQ ID NO: 1166022 - RNA, 19 nt, Artificial Sequence
  Description of Artificial Sequence: Synthetic oligonucleotide
  Sense strand starting at position 3030 of SEQ ID NO: 916557
gccagagucacucaugggu

SEQ ID NO: 1166023 - RNA, 19 nt, Artificial Sequence
  Description of Artificial Sequence: Synthetic oligonucleotide
  Antisense strand to SEQ ID NO: 1166022
acccaugagugacucuggc

SEQ ID NO: 1166024 - RNA, 19 nt, Artificial Sequence
  Description of Artificial Sequence: Synthetic oligonucleotide
  Sense strand starting at position 3033 of SEQ ID NO: 916557
agagucacucaugggugau

SEQ ID NO: 1166025 - RNA, 19 nt, Artificial Sequence
  Description of Artificial Sequence: Synthetic oligonucleotide
  Antisense strand to SEQ ID NO: 1166024
aucacccaugagugacucu

SEQ ID NO: 1166026 - RNA, 19 nt, Artificial Sequence
  Description of Artificial Sequence: Synthetic oligonucleotide
  Sense strand starting at position 3034 of SEQ ID NO: 916557
gagucacucaugggugauu

SEQ ID NO: 1166027 - RNA, 19 nt, Artificial Sequence
  Description of Artificial Sequence: Synthetic oligonucleotide
  Antisense strand to SEQ ID NO: 1166026
aaucacccaugagugacuc

SEQ ID NO: 1166028 - RNA, 19 nt, Artificial Sequence
  Description of Artificial Sequence: Synthetic oligonucleotide
  Sense strand starting at position 3179 of SEQ ID NO: 916557
uggcccacaucucuaagau

SEQ ID NO: 1166029 - RNA, 19 nt, Artificial Sequence
  Description of Artificial Sequence: Synthetic oligonucleotide
  Antisense strand to SEQ ID NO: 1166028
aucuuagagaugugggcca

SEQ ID NO: 1166030 - RNA, 19 nt, Artificial Sequence
  Description of Artificial Sequence: Synthetic oligonucleotide
  Sense strand starting at position 3180 of SEQ ID NO: 916557
ggcccacaucucuaagaua

SEQ ID NO: 1166031 - RNA, 19 nt, Artificial Sequence
  Description of Artificial Sequence: Synthetic oligonucleotide
  Antisense strand to SEQ ID NO: 1166030
uaucuuagagaugugggcc

SEQ ID NO: 1166032 - RNA, 19 nt, Artificial Sequence
  Description of Artificial Sequence: Synthetic oligonucleotide
  Sense strand starting at position 3722 of SEQ ID NO: 916557
cugggauguaucugaugua

SEQ ID NO: 1166033 - RNA, 19 nt, Artificial Sequence
  Description of Artificial Sequence: Synthetic oligonucleotide
  Antisense strand to SEQ ID NO: 1166032
uacaucagauacaucccag

SEQ ID NO: 1166034 - RNA, 19 nt, Artificial Sequence
  Description of Artificial Sequence: Synthetic oligonucleotide
  Sense strand starting at position 3737 of SEQ ID NO: 916557
uguagaacucuaugacaac

SEQ ID NO: 1166035 - RNA, 19 nt, Artificial Sequence
  Description of Artificial Sequence: Synthetic oligonucleotide
  Antisense strand to SEQ ID NO: 1166034
guugucauagaguucuaca

SEQ ID NO: 1166036 - RNA, 19 nt, Artificial Sequence
  Description of Artificial Sequence: Synthetic oligonucleotide
  Sense strand starting at position 6 of SEQ ID NO: 916558
gaguuuguacgcgaacguu

SEQ ID NO: 1166037 - RNA, 19 nt, Artificial Sequence
  Description of Artificial Sequence: Synthetic oligonucleotide
  Antisense strand to SEQ ID NO: 1166036
aacguucgcguacaaacuc

SEQ ID NO: 1166038 - RNA, 19 nt, Artificial Sequence
  Description of Artificial Sequence: Synthetic oligonucleotide
  Sense strand starting at position 94 of SEQ ID NO: 916558
acgauacgugcugugcuau

SEQ ID NO: 1166039 - RNA, 19 nt, Artificial Sequence
  Description of Artificial Sequence: Synthetic oligonucleotide
  Antisense strand to SEQ ID NO: 1166038
auagcacagcacguaucgu

SEQ ID NO: 1166040 - RNA, 19 nt, Artificial Sequence
  Description of Artificial Sequence: Synthetic oligonucleotide
  Sense strand starting at position 224 of SEQ ID NO: 916558
cccauugauccaggaagua

SEQ ID NO: 1166041 - RNA, 19 nt, Artificial Sequence
  Description of Artificial Sequence: Synthetic oligonucleotide
  Antisense strand to SEQ ID NO: 1166040
uacuuccuggaucaauggg

SEQ ID NO: 1166042 - RNA, 19 nt, Artificial Sequence
  Description of Artificial Sequence: Synthetic oligonucleotide
  Sense strand starting at position 236 of SEQ ID NO: 916558
ggaaguaaccacugaucca

SEQ ID NO: 1166043 - RNA, 19 nt, Artificial Sequence
  Description of Artificial Sequence: Synthetic oligonucleotide
  Antisense strand to SEQ ID NO: 1166042
uggaucagugguuacuucc

SEQ ID NO: 1166044 - RNA, 19 nt, Artificial Sequence
  Description of Artificial Sequence: Synthetic oligonucleotide
  Sense strand starting at position 291 of SEQ ID NO: 916558
ggauauggaagcgauggua

SEQ ID NO: 1166045 - RNA, 19 nt, Artificial Sequence
  Description of Artificial Sequence: Synthetic oligonucleotide
  Antisense strand to SEQ ID NO: 1166044
uaccaucgcuuccauaucc

SEQ ID NO: 1166046 - RNA, 19 nt, Artificial Sequence
  Description of Artificial Sequence: Synthetic oligonucleotide
  Sense strand starting at position 335 of SEQ ID NO: 916558
cgauaaagauguucuggga

SEQ ID NO: 1166047 - RNA, 19 nt, Artificial Sequence
  Description of Artificial Sequence: Synthetic oligonucleotide
  Antisense strand to SEQ ID NO: 1166046
ucccagaacaucuuuaucg

SEQ ID NO: 1166048 - RNA, 19 nt, Artificial Sequence
  Description of Artificial Sequence: Synthetic oligonucleotide
  Sense strand starting at position 338 of SEQ ID NO: 916558
uaaagauguucugggauag

SEQ ID NO: 1166049 - RNA, 19 nt, Artificial Sequence
  Description of Artificial Sequence: Synthetic oligonucleotide
  Antisense strand to SEQ ID NO: 1166048
cuaucccagaacaucuuua

SEQ ID NO: 1166050 - RNA, 19 nt, Artificial Sequence
  Description of Artificial Sequence: Synthetic oligonucleotide
  Sense strand starting at position 408 of SEQ ID NO: 916558
gguaaacugugccucaguu

SEQ ID NO: 1166051 - RNA, 19 nt, Artificial Sequence
  Description of Artificial Sequence: Synthetic oligonucleotide
  Antisense strand to SEQ ID NO: 1166050
aacugaggcacaguuuacc

SEQ ID NO: 1166052 - RNA, 19 nt, Artificial Sequence
  Description of Artificial Sequence: Synthetic oligonucleotide
  Sense strand starting at position 423 of SEQ ID NO: 916558
aguuauuccucacuacaga

SEQ ID NO: 1166053 - RNA, 19 nt, Artificial Sequence
  Description of Artificial Sequence: Synthetic oligonucleotide
  Antisense strand to SEQ ID NO: 1166052
ucuguagugaggaauaacu

SEQ ID NO: 1166054 - RNA, 19 nt, Artificial Sequence
  Description of Artificial Sequence: Synthetic oligonucleotide
  Sense strand starting at position 424 of SEQ ID NO: 916558
guuauuccucacuacagau

SEQ ID NO: 1166055 - RNA, 19 nt, Artificial Sequence
  Description of Artificial Sequence: Synthetic oligonucleotide
  Antisense strand to SEQ ID NO: 1166054
aucuguagugaggaauaac

SEQ ID NO: 1166056 - RNA, 19 nt, Artificial Sequence
  Description of Artificial Sequence: Synthetic oligonucleotide
  Sense strand starting at position 485 of SEQ ID NO: 916558
gugugaucugagcaaacac

SEQ ID NO: 1166057 - RNA, 19 nt, Artificial Sequence
  Description of Artificial Sequence: Synthetic oligonucleotide
  Antisense strand to SEQ ID NO: 1166056
guguuugcucagaucacac

SEQ ID NO: 1166058 - RNA, 19 nt, Artificial Sequence
  Description of Artificial Sequence: Synthetic oligonucleotide
  Sense strand starting at position 560 of SEQ ID NO: 916558
cguggaugccacuggaaau

SEQ ID NO: 1166059 - RNA, 19 nt, Artificial Sequence
  Description of Artificial Sequence: Synthetic oligonucleotide
  Antisense strand to SEQ ID NO: 1166058
auuuccaguggcauccacg

SEQ ID NO: 1166060 - RNA, 19 nt, Artificial Sequence
  Description of Artificial Sequence: Synthetic oligonucleotide
  Sense strand starting at position 613 of SEQ ID NO: 916558
ggacucgauagccauguuu

SEQ ID NO: 1166061 - RNA, 19 nt, Artificial Sequence
  Description of Artificial Sequence: Synthetic oligonucleotide
  Antisense strand to SEQ ID NO: 1166060
aaacauggcuaucgagucc

SEQ ID NO: 1166062 - RNA, 19 nt, Artificial Sequence
  Description of Artificial Sequence: Synthetic oligonucleotide
  Sense strand starting at position 615 of SEQ ID NO: 916558
acucgauagccauguuucu

SEQ ID NO: 1166063 - RNA, 19 nt, Artificial Sequence
  Description of Artificial Sequence: Synthetic oligonucleotide
  Antisense strand to SEQ ID NO: 1166062
agaaacauggcuaucgagu

SEQ ID NO: 1166064 - RNA, 19 nt, Artificial Sequence
  Description of Artificial Sequence: Synthetic oligonucleotide
  Sense strand starting at position 625 of SEQ ID NO: 916558
cauguuucugaaugggacu

SEQ ID NO: 1166065 - RNA, 19 nt, Artificial Sequence
  Description of Artificial Sequence: Synthetic oligonucleotide
  Antisense strand to SEQ ID NO: 1166064
agucccauucagaaacaug

SEQ ID NO: 1166066 - RNA, 19 nt, Artificial Sequence
  Description of Artificial Sequence: Synthetic oligonucleotide
  Sense strand starting at position 676 of SEQ ID NO: 916558
agcagcuuugccuggacaa

SEQ ID NO: 1166067 - RNA, 19 nt, Artificial Sequence
  Description of Artificial Sequence: Synthetic oligonucleotide
  Antisense strand to SEQ ID NO: 1166066
uuguccaggcaaagcugcu

SEQ ID NO: 1166068 - RNA, 19 nt, Artificial Sequence
  Description of Artificial Sequence: Synthetic oligonucleotide
  Sense strand starting at position 677 of SEQ ID NO: 916558
gcagcuuugccuggacaau

SEQ ID NO: 1166069 - RNA, 19 nt, Artificial Sequence
  Description of Artificial Sequence: Synthetic oligonucleotide
  Antisense strand to SEQ ID NO: 1166068
auuguccaggcaaagcugc

SEQ ID NO: 1166070 - RNA, 19 nt, Artificial Sequence
  Description of Artificial Sequence: Synthetic oligonucleotide
  Sense strand starting at position 708 of SEQ ID NO: 916558
agaccucugcuuuguggau

SEQ ID NO: 1166071 - RNA, 19 nt, Artificial Sequence
  Description of Artificial Sequence: Synthetic oligonucleotide
  Antisense strand to SEQ ID NO: 1166070
auccacaaagcagaggucu

SEQ ID NO: 1166072 - RNA, 19 nt, Artificial Sequence
  Description of Artificial Sequence: Synthetic oligonucleotide
  Sense strand starting at position 709 of SEQ ID NO: 916558
gaccucugcuuuguggaua

SEQ ID NO: 1166073 - RNA, 19 nt, Artificial Sequence
  Description of Artificial Sequence: Synthetic oligonucleotide
  Antisense strand to SEQ ID NO: 1166072
uauccacaaagcagagguc

SEQ ID NO: 1166074 - RNA, 19 nt, Artificial Sequence
  Description of Artificial Sequence: Synthetic oligonucleotide
  Sense strand starting at position 720 of SEQ ID NO: 916558
uguggauaaccugggaguu

SEQ ID NO: 1166075 - RNA, 19 nt, Artificial Sequence
  Description of Artificial Sequence: Synthetic oligonucleotide
  Antisense strand to SEQ ID NO: 1166074
aacucccagguuauccaca

SEQ ID NO: 1166076 - RNA, 19 nt, Artificial Sequence
  Description of Artificial Sequence: Synthetic oligonucleotide
  Sense strand starting at position 1206 of SEQ ID NO: 916558
gugucaggaucagucaaca

SEQ ID NO: 1166077 - RNA, 19 nt, Artificial Sequence
  Description of Artificial Sequence: Synthetic oligonucleotide
  Antisense strand to SEQ ID NO: 1166076
uguugacugauccugacac

SEQ ID NO: 1166078 - RNA, 19 nt, Artificial Sequence
  Description of Artificial Sequence: Synthetic oligonucleotide
  Sense strand starting at position 1398 of SEQ ID NO: 916558
cgcucaucccauggugaca

SEQ ID NO: 1166079 - RNA, 19 nt, Artificial Sequence
  Description of Artificial Sequence: Synthetic oligonucleotide
  Antisense strand to SEQ ID NO: 1166078
ugucaccaugggaugagcg

SEQ ID NO: 1166080 - RNA, 19 nt, Artificial Sequence
  Description of Artificial Sequence: Synthetic oligonucleotide
  Sense strand starting at position 2523 of SEQ ID NO: 916558
gggugucugccucgcagaa

SEQ ID NO: 1166081 - RNA, 19 nt, Artificial Sequence
  Description of Artificial Sequence: Synthetic oligonucleotide
  Antisense strand to SEQ ID NO: 1166080
uucugcgaggcagacaccc

SEQ ID NO: 1166082 - RNA, 19 nt, Artificial Sequence
  Description of Artificial Sequence: Synthetic oligonucleotide
  Sense strand starting at position 2773 of SEQ ID NO: 916558
gaggguggucggcgugaga

SEQ ID NO: 1166083 - RNA, 19 nt, Artificial Sequence
  Description of Artificial Sequence: Synthetic oligonucleotide
  Antisense strand to SEQ ID NO: 1166082
ucucacgccgaccacccuc

SEQ ID NO: 1166084 - RNA, 19 nt, Artificial Sequence
  Description of Artificial Sequence: Synthetic oligonucleotide
  Sense strand starting at position 2834 of SEQ ID NO: 916558
agauuucguucagcgaaug

SEQ ID NO: 1166085 - RNA, 19 nt, Artificial Sequence
  Description of Artificial Sequence: Synthetic oligonucleotide
  Antisense strand to SEQ ID NO: 1166084
cauucgcugaacgaaaucu

SEQ ID NO: 1166086 - RNA, 19 nt, Artificial Sequence
  Description of Artificial Sequence: Synthetic oligonucleotide
  Sense strand starting at position 2975 of SEQ ID NO: 916558
gcgccaguucugcaagaug

SEQ ID NO: 1166087 - RNA, 19 nt, Artificial Sequence
  Description of Artificial Sequence: Synthetic oligonucleotide
  Antisense strand to SEQ ID NO: 1166086
caucuugcagaacuggcgc

SEQ ID NO: 1166088 - RNA, 19 nt, Artificial Sequence
  Description of Artificial Sequence: Synthetic oligonucleotide
  Sense strand starting at position 2978 of SEQ ID NO: 916558
ccaguucugcaagaugugu

SEQ ID NO: 1166089 - RNA, 19 nt, Artificial Sequence
  Description of Artificial Sequence: Synthetic oligonucleotide
  Antisense strand to SEQ ID NO: 1166088
acacaucuugcagaacugg

SEQ ID NO: 1166090 - RNA, 19 nt, Artificial Sequence
  Description of Artificial Sequence: Synthetic oligonucleotide
  Sense strand starting at position 2980 of SEQ ID NO: 916558
aguucugcaagauguguuu

SEQ ID NO: 1166091 - RNA, 19 nt, Artificial Sequence
  Description of Artificial Sequence: Synthetic oligonucleotide
  Antisense strand to SEQ ID NO: 1166090
aaacacaucuugcagaacu

SEQ ID NO: 1166092 - RNA, 19 nt, Artificial Sequence
  Description of Artificial Sequence: Synthetic oligonucleotide
  Sense strand starting at position 2987 of SEQ ID NO: 916558
caagauguguuugcgugaa

SEQ ID NO: 1166093 - RNA, 19 nt, Artificial Sequence
  Description of Artificial Sequence: Synthetic oligonucleotide
  Antisense strand to SEQ ID NO: 1166092
uucacgcaaacacaucuug

SEQ ID NO: 1166094 - RNA, 19 nt, Artificial Sequence
  Description of Artificial Sequence: Synthetic oligonucleotide
  Sense strand starting at position 3141 of SEQ ID NO: 916558
aagcgagaaguuugacaga

SEQ ID NO: 1166095 - RNA, 19 nt, Artificial Sequence
  Description of Artificial Sequence: Synthetic oligonucleotide
  Antisense strand to SEQ ID NO: 1166094
ucugucaaacuucucgcuu

SEQ ID NO: 1166096 - RNA, 19 nt, Artificial Sequence
  Description of Artificial Sequence: Synthetic oligonucleotide
  Sense strand starting at position 3146 of SEQ ID NO: 916558
agaaguuugacagagugcu

SEQ ID NO: 1166097 - RNA, 19 nt, Artificial Sequence
  Description of Artificial Sequence: Synthetic oligonucleotide
  Antisense strand to SEQ ID NO: 1166096
agcacucugucaaacuucu

SEQ ID NO: 1166098 - RNA, 19 nt, Artificial Sequence
  Description of Artificial Sequence: Synthetic oligonucleotide
  Sense strand starting at position 3191 of SEQ ID NO: 916558
ggagguucucuuugaguug

SEQ ID NO: 1166099 - RNA, 19 nt, Artificial Sequence
  Description of Artificial Sequence: Synthetic oligonucleotide
  Antisense strand to SEQ ID NO: 1166098
caacucaaagagaaccucc

SEQ ID NO: 1166100 - RNA, 19 nt, Artificial Sequence
  Description of Artificial Sequence: Synthetic oligonucleotide
  Sense strand starting at position 3194 of SEQ ID NO: 916558
gguucucuuugaguuggga

SEQ ID NO: 1166101 - RNA, 19 nt, Artificial Sequence
  Description of Artificial Sequence: Synthetic oligonucleotide
  Antisense strand to SEQ ID NO: 1166100
ucccaacucaaagagaacc

SEQ ID NO: 1166102 - RNA, 19 nt, Artificial Sequence
  Description of Artificial Sequence: Synthetic oligonucleotide
  Sense strand starting at position 3371 of SEQ ID NO: 916558
gagugaguuugcucaggga

SEQ ID NO: 1166103 - RNA, 19 nt, Artificial Sequence
  Description of Artificial Sequence: Synthetic oligonucleotide
  Antisense strand to SEQ ID NO: 1166102
ucccugagcaaacucacuc

SEQ ID NO: 1166104 - RNA, 19 nt, Artificial Sequence
  Description of Artificial Sequence: Synthetic oligonucleotide
  Sense strand starting at position 3373 of SEQ ID NO: 916558
gugaguuugcucagggagu

SEQ ID NO: 1166105 - RNA, 19 nt, Artificial Sequence
  Description of Artificial Sequence: Synthetic oligonucleotide
  Antisense strand to SEQ ID NO: 1166104
acucccugagcaaacucac

SEQ ID NO: 1166106 - RNA, 19 nt, Artificial Sequence
  Description of Artificial Sequence: Synthetic oligonucleotide
  Sense strand starting at position 3415 of SEQ ID NO: 916558
uucugaaggcuguauggaa

SEQ ID NO: 1166107 - RNA, 19 nt, Artificial Sequence
  Description of Artificial Sequence: Synthetic oligonucleotide
  Antisense strand to SEQ ID NO: 1166106
uuccauacagccuucagaa

SEQ ID NO: 1166108 - RNA, 19 nt, Artificial Sequence
  Description of Artificial Sequence: Synthetic oligonucleotide
  Sense strand starting at position 3600 of SEQ ID NO: 916558
ugagccuaacugugucaga

SEQ ID NO: 1166109 - RNA, 19 nt, Artificial Sequence
  Description of Artificial Sequence: Synthetic oligonucleotide
  Antisense strand to SEQ ID NO: 1166108
ucugacacaguuaggcuca

SEQ ID NO: 1166110 - RNA, 19 nt, Artificial Sequence
  Description of Artificial Sequence: Synthetic oligonucleotide
  Sense strand starting at position 3601 of SEQ ID NO: 916558
gagccuaacugugucagaa

SEQ ID NO: 1166111 - RNA, 19 nt, Artificial Sequence
  Description of Artificial Sequence: Synthetic oligonucleotide
  Antisense strand to SEQ ID NO: 1166110
uucugacacaguuaggcuc

SEQ ID NO: 1166112 - RNA, 19 nt, Artificial Sequence
  Description of Artificial Sequence: Synthetic oligonucleotide
  Sense strand starting at position 3605 of SEQ ID NO: 916558
cuaacugugucagaaggaa

SEQ ID NO: 1166113 - RNA, 19 nt, Artificial Sequence
  Description of Artificial Sequence: Synthetic oligonucleotide
  Antisense strand to SEQ ID NO: 1166112
uuccuucugacacaguuag

SEQ ID NO: 1166114 - RNA, 19 nt, Artificial Sequence
  Description of Artificial Sequence: Synthetic oligonucleotide
  Sense strand starting at position 3618 of SEQ ID NO: 916558
aaggaaugucaccgaagac

SEQ ID NO: 1166115 - RNA, 19 nt, Artificial Sequence
  Description of Artificial Sequence: Synthetic oligonucleotide
  Antisense strand to SEQ ID NO: 1166114
gucuucggugacauuccuu

SEQ ID NO: 1166116 - RNA, 19 nt, Artificial Sequence
  Description of Artificial Sequence: Synthetic oligonucleotide
  Sense strand starting at position 85 of SEQ ID NO: 916559
cucagaauguccuuuggcu

SEQ ID NO: 1166117 - RNA, 19 nt, Artificial Sequence
  Description of Artificial Sequence: Synthetic oligonucleotide
  Antisense strand to SEQ ID NO: 1166116
agccaaaggacauucugag

SEQ ID NO: 1166118 - RNA, 19 nt, Artificial Sequence
  Description of Artificial Sequence: Synthetic oligonucleotide
  Sense strand starting at position 273 of SEQ ID NO: 916559
ccucuuggcugcccugaaa

SEQ ID NO: 1166119 - RNA, 19 nt, Artificial Sequence
  Description of Artificial Sequence: Synthetic oligonucleotide
  Antisense strand to SEQ ID NO: 1166118
uuucagggcagccaagagg

SEQ ID NO: 1166120 - RNA, 19 nt, Artificial Sequence
  Description of Artificial Sequence: Synthetic oligonucleotide
  Sense strand starting at position 374 of SEQ ID NO: 916559
uagaauuaacucugugguc

SEQ ID NO: 1166121 - RNA, 19 nt, Artificial Sequence
  Description of Artificial Sequence: Synthetic oligonucleotide
  Antisense strand to SEQ ID NO: 1166120
gaccacagaguuaauucua

SEQ ID NO: 1166122 - RNA, 19 nt, Artificial Sequence
  Description of Artificial Sequence: Synthetic oligonucleotide
  Sense strand starting at position 375 of SEQ ID NO: 916559
agaauuaacucugugguca

SEQ ID NO: 1166123 - RNA, 19 nt, Artificial Sequence
  Description of Artificial Sequence: Synthetic oligonucleotide
  Antisense strand to SEQ ID NO: 1166122
ugaccacagaguuaauucu

SEQ ID NO: 1166124 - RNA, 19 nt, Artificial Sequence
  Description of Artificial Sequence: Synthetic oligonucleotide
  Sense strand starting at position 376 of SEQ ID NO: 916559
gaauuaacucuguggucaa

SEQ ID NO: 1166125 - RNA, 19 nt, Artificial Sequence
  Description of Artificial Sequence: Synthetic oligonucleotide
  Antisense strand to SEQ ID NO: 1166124
uugaccacagaguuaauuc

SEQ ID NO: 1166126 - RNA, 19 nt, Artificial Sequence
  Description of Artificial Sequence: Synthetic oligonucleotide
  Sense strand starting at position 379 of SEQ ID NO: 916559
uuaacucuguggucaaaga

SEQ ID NO: 1166127 - RNA, 19 nt, Artificial Sequence
  Description of Artificial Sequence: Synthetic oligonucleotide
  Antisense strand to SEQ ID NO: 1166126
ucuuugaccacagaguuaa

SEQ ID NO: 1166128 - RNA, 19 nt, Artificial Sequence
  Description of Artificial Sequence: Synthetic oligonucleotide
  Sense strand starting at position 380 of SEQ ID NO: 916559
uaacucuguggucaaagau

SEQ ID NO: 1166129 - RNA, 19 nt, Artificial Sequence
  Description of Artificial Sequence: Synthetic oligonucleotide
  Antisense strand to SEQ ID NO: 1166128
aucuuugaccacagaguua

SEQ ID NO: 1166130 - RNA, 19 nt, Artificial Sequence
  Description of Artificial Sequence: Synthetic oligonucleotide
  Sense strand starting at position 566 of SEQ ID NO: 916559
guaagagaauuaguacacu

SEQ ID NO: 1166131 - RNA, 19 nt, Artificial Sequence
  Description of Artificial Sequence: Synthetic oligonucleotide
  Antisense strand to SEQ ID NO: 1166130
aguguacuaauucucuuac

SEQ ID NO: 1166132 - RNA, 19 nt, Artificial Sequence
  Description of Artificial Sequence: Synthetic oligonucleotide
  Sense strand starting at position 609 of SEQ ID NO: 916559
ucagcccuguuauuauuua

SEQ ID NO: 1166133 - RNA, 19 nt, Artificial Sequence
  Description of Artificial Sequence: Synthetic oligonucleotide
  Antisense strand to SEQ ID NO: 1166132
uaaauaauaacagggcuga

SEQ ID NO: 1166134 - RNA, 19 nt, Artificial Sequence
  Description of Artificial Sequence: Synthetic oligonucleotide
  Sense strand starting at position 873 of SEQ ID NO: 916559
cucccaaaguguuuccuua

SEQ ID NO: 1166135 - RNA, 19 nt, Artificial Sequence
  Description of Artificial Sequence: Synthetic oligonucleotide
  Antisense strand to SEQ ID NO: 1166134
uaaggaaacacuuugggag

SEQ ID NO: 1166136 - RNA, 19 nt, Artificial Sequence
  Description of Artificial Sequence: Synthetic oligonucleotide
  Sense strand starting at position 906 of SEQ ID NO: 916559
acaggacucuaagaugauu

SEQ ID NO: 1166137 - RNA, 19 nt, Artificial Sequence
  Description of Artificial Sequence: Synthetic oligonucleotide
  Antisense strand to SEQ ID NO: 1166136
aaucaucuuagaguccugu

SEQ ID NO: 1166138 - RNA, 19 nt, Artificial Sequence
  Description of Artificial Sequence: Synthetic oligonucleotide
  Sense strand starting at position 912 of SEQ ID NO: 916559
cucuaagaugauuaagcga

SEQ ID NO: 1166139 - RNA, 19 nt, Artificial Sequence
  Description of Artificial Sequence: Synthetic oligonucleotide
  Antisense strand to SEQ ID NO: 1166138
ucgcuuaaucaucuuagag

SEQ ID NO: 1166140 - RNA, 19 nt, Artificial Sequence
  Description of Artificial Sequence: Synthetic oligonucleotide
  Sense strand starting at position 915 of SEQ ID NO: 916559
uaagaugauuaagcgauau

SEQ ID NO: 1166141 - RNA, 19 nt, Artificial Sequence
  Description of Artificial Sequence: Synthetic oligonucleotide
  Antisense strand to SEQ ID NO: 1166140
auaucgcuuaaucaucuua

SEQ ID NO: 1166142 - RNA, 19 nt, Artificial Sequence
  Description of Artificial Sequence: Synthetic oligonucleotide
  Sense strand starting at position 927 of SEQ ID NO: 916559
gcgauauaacaugaccaac

SEQ ID NO: 1166143 - RNA, 19 nt, Artificial Sequence
  Description of Artificial Sequence: Synthetic oligonucleotide
  Antisense strand to SEQ ID NO: 1166142
guuggucauguuauaucgc

SEQ ID NO: 1166144 - RNA, 19 nt, Artificial Sequence
  Description of Artificial Sequence: Synthetic oligonucleotide
  Sense strand starting at position 1041 of SEQ ID NO: 916559
accagucuuccacacagua

SEQ ID NO: 1166145 - RNA, 19 nt, Artificial Sequence
  Description of Artificial Sequence: Synthetic oligonucleotide
  Antisense strand to SEQ ID NO: 1166144
uacuguguggaagacuggu

SEQ ID NO: 1166146 - RNA, 19 nt, Artificial Sequence
  Description of Artificial Sequence: Synthetic oligonucleotide
  Sense strand starting at position 1118 of SEQ ID NO: 916559
aaggcaaaucagugacuga

SEQ ID NO: 1166147 - RNA, 19 nt, Artificial Sequence
  Description of Artificial Sequence: Synthetic oligonucleotide
  Antisense strand to SEQ ID NO: 1166146
ucagucacugauuugccuu

SEQ ID NO: 1166148 - RNA, 19 nt, Artificial Sequence
  Description of Artificial Sequence: Synthetic oligonucleotide
  Sense strand starting at position 1279 of SEQ ID NO: 916559
auaauaguuguguccgugu

SEQ ID NO: 1166149 - RNA, 19 nt, Artificial Sequence
  Description of Artificial Sequence: Synthetic oligonucleotide
  Antisense strand to SEQ ID NO: 1166148
acacggacacaacuauuau

SEQ ID NO: 1166150 - RNA, 19 nt, Artificial Sequence
  Description of Artificial Sequence: Synthetic oligonucleotide
  Sense strand starting at position 1284 of SEQ ID NO: 916559
aguuguguccgugucuuca

SEQ ID NO: 1166151 - RNA, 19 nt, Artificial Sequence
  Description of Artificial Sequence: Synthetic oligonucleotide
  Antisense strand to SEQ ID NO: 1166150
ugaagacacggacacaacu

SEQ ID NO: 1166152 - RNA, 19 nt, Artificial Sequence
  Description of Artificial Sequence: Synthetic oligonucleotide
  Sense strand starting at position 1491 of SEQ ID NO: 916559
caagaaucugacgaguucu

SEQ ID NO: 1166153 - RNA, 19 nt, Artificial Sequence
  Description of Artificial Sequence: Synthetic oligonucleotide
  Antisense strand to SEQ ID NO: 1166152
agaacucgucagauucuug

SEQ ID NO: 1166154 - RNA, 19 nt, Artificial Sequence
  Description of Artificial Sequence: Synthetic oligonucleotide
  Sense strand starting at position 1652 of SEQ ID NO: 916559
acgcuuggcguauuauagu

SEQ ID NO: 1166155 - RNA, 19 nt, Artificial Sequence
  Description of Artificial Sequence: Synthetic oligonucleotide
  Antisense strand to SEQ ID NO: 1166154
acuauaauacgccaagcgu

SEQ ID NO: 1166156 - RNA, 19 nt, Artificial Sequence
  Description of Artificial Sequence: Synthetic oligonucleotide
  Sense strand starting at position 1659 of SEQ ID NO: 916559
gcguauuauagugggaaag

SEQ ID NO: 1166157 - RNA, 19 nt, Artificial Sequence
  Description of Artificial Sequence: Synthetic oligonucleotide
  Antisense strand to SEQ ID NO: 1166156
cuuucccacuauaauacgc

SEQ ID NO: 1166158 - RNA, 19 nt, Artificial Sequence
  Description of Artificial Sequence: Synthetic oligonucleotide
  Sense strand starting at position 1884 of SEQ ID NO: 916559
gguuaauguccgagagugc

SEQ ID NO: 1166159 - RNA, 19 nt, Artificial Sequence
  Description of Artificial Sequence: Synthetic oligonucleotide
  Antisense strand to SEQ ID NO: 1166158
gcacucucggacauuaacc

SEQ ID NO: 1166160 - RNA, 19 nt, Artificial Sequence
  Description of Artificial Sequence: Synthetic oligonucleotide
  Sense strand starting at position 2142 of SEQ ID NO: 916559
gagcaaugugacgaaacca

SEQ ID NO: 1166161 - RNA, 19 nt, Artificial Sequence
  Description of Artificial Sequence: Synthetic oligonucleotide
  Antisense strand to SEQ ID NO: 1166160
ugguuucgucacauugcuc

SEQ ID NO: 1166162 - RNA, 19 nt, Artificial Sequence
  Description of Artificial Sequence: Synthetic oligonucleotide
  Sense strand starting at position 2150 of SEQ ID NO: 916559
ugacgaaaccauugagcuu

SEQ ID NO: 1166163 - RNA, 19 nt, Artificial Sequence
  Description of Artificial Sequence: Synthetic oligonucleotide
  Antisense strand to SEQ ID NO: 1166162
aagcucaaugguuucguca

SEQ ID NO: 1166164 - RNA, 19 nt, Artificial Sequence
  Description of Artificial Sequence: Synthetic oligonucleotide
  Sense strand starting at position 2211 of SEQ ID NO: 916559
gguuucuguugggugaaag

SEQ ID NO: 1166165 - RNA, 19 nt, Artificial Sequence
  Description of Artificial Sequence: Synthetic oligonucleotide
  Antisense strand to SEQ ID NO: 1166164
cuuucacccaacagaaacc

SEQ ID NO: 1166166 - RNA, 19 nt, Artificial Sequence
  Description of Artificial Sequence: Synthetic oligonucleotide
  Sense strand starting at position 2232 of SEQ ID NO: 916559
gcaccuucuccucgaacca

SEQ ID NO: 1166167 - RNA, 19 nt, Artificial Sequence
  Description of Artificial Sequence: Synthetic oligonucleotide
  Antisense strand to SEQ ID NO: 1166166
ugguucgaggagaaggugc

SEQ ID NO: 1166168 - RNA, 19 nt, Artificial Sequence
  Description of Artificial Sequence: Synthetic oligonucleotide
  Sense strand starting at position 2702 of SEQ ID NO: 916559
uggccaaccuugucucuau

SEQ ID NO: 1166169 - RNA, 19 nt, Artificial Sequence
  Description of Artificial Sequence: Synthetic oligonucleotide
  Antisense strand to SEQ ID NO: 1166168
auagagacaagguuggcca

SEQ ID NO: 1166170 - RNA, 19 nt, Artificial Sequence
  Description of Artificial Sequence: Synthetic oligonucleotide
  Sense strand starting at position 2703 of SEQ ID NO: 916559
ggccaaccuugucucuauu

SEQ ID NO: 1166171 - RNA, 19 nt, Artificial Sequence
  Description of Artificial Sequence: Synthetic oligonucleotide
  Antisense strand to SEQ ID NO: 1166170
aauagagacaagguuggcc

SEQ ID NO: 1166172 - RNA, 19 nt, Artificial Sequence
  Description of Artificial Sequence: Synthetic oligonucleotide
  Sense strand starting at position 2909 of SEQ ID NO: 916559
cguggaauuccaugccacu

SEQ ID NO: 1166173 - RNA, 19 nt, Artificial Sequence
  Description of Artificial Sequence: Synthetic oligonucleotide
  Antisense strand to SEQ ID NO: 1166172
aguggcauggaauuccacg

SEQ ID NO: 1166174 - RNA, 19 nt, Artificial Sequence
  Description of Artificial Sequence: Synthetic oligonucleotide
  Sense strand starting at position 2963 of SEQ ID NO: 916559
uuuauagagacggguugua

SEQ ID NO: 1166175 - RNA, 19 nt, Artificial Sequence
  Description of Artificial Sequence: Synthetic oligonucleotide
  Antisense strand to SEQ ID NO: 1166174
uacaacccgucucuauaaa

SEQ ID NO: 1166176 - RNA, 19 nt, Artificial Sequence
  Description of Artificial Sequence: Synthetic oligonucleotide
  Sense strand starting at position 3051 of SEQ ID NO: 916559
caccuuugugcugagauua

SEQ ID NO: 1166177 - RNA, 19 nt, Artificial Sequence
  Description of Artificial Sequence: Synthetic oligonucleotide
  Antisense strand to SEQ ID NO: 1166176
uaaucucagcacaaaggug

SEQ ID NO: 1166178 - RNA, 19 nt, Artificial Sequence
  Description of Artificial Sequence: Synthetic oligonucleotide
  Sense strand starting at position 3203 of SEQ ID NO: 916559
gucuacaauuaguugggaa

SEQ ID NO: 1166179 - RNA, 19 nt, Artificial Sequence
  Description of Artificial Sequence: Synthetic oligonucleotide
  Antisense strand to SEQ ID NO: 1166178
uucccaacuaauuguagac

SEQ ID NO: 1166180 - RNA, 19 nt, Artificial Sequence
  Description of Artificial Sequence: Synthetic oligonucleotide
  Sense strand starting at position 3205 of SEQ ID NO: 916559
cuacaauuaguugggaaac

SEQ ID NO: 1166181 - RNA, 19 nt, Artificial Sequence
  Description of Artificial Sequence: Synthetic oligonucleotide
  Antisense strand to SEQ ID NO: 1166180
guuucccaacuaauuguag

SEQ ID NO: 1166182 - RNA, 19 nt, Artificial Sequence
  Description of Artificial Sequence: Synthetic oligonucleotide
  Sense strand starting at position 3207 of SEQ ID NO: 916559
acaauuaguugggaaacaa

SEQ ID NO: 1166183 - RNA, 19 nt, Artificial Sequence
  Description of Artificial Sequence: Synthetic oligonucleotide
  Antisense strand to SEQ ID NO: 1166182
uuguuucccaacuaauugu

SEQ ID NO: 1166184 - RNA, 19 nt, Artificial Sequence
  Description of Artificial Sequence: Synthetic oligonucleotide
  Sense strand starting at position 3326 of SEQ ID NO: 916559
gaggcuguguucuuccaca

SEQ ID NO: 1166185 - RNA, 19 nt, Artificial Sequence
  Description of Artificial Sequence: Synthetic oligonucleotide
  Antisense strand to SEQ ID NO: 1166184
uguggaagaacacagccuc

SEQ ID NO: 1166186 - RNA, 19 nt, Artificial Sequence
  Description of Artificial Sequence: Synthetic oligonucleotide
  Sense strand starting at position 3331 of SEQ ID NO: 916559
uguguucuuccacaaauug

SEQ ID NO: 1166187 - RNA, 19 nt, Artificial Sequence
  Description of Artificial Sequence: Synthetic oligonucleotide
  Antisense strand to SEQ ID NO: 1166186
caauuuguggaagaacaca

SEQ ID NO: 1166188 - RNA, 19 nt, Artificial Sequence
  Description of Artificial Sequence: Synthetic oligonucleotide
  Sense strand starting at position 3413 of SEQ ID NO: 916559
gguagugguuagguguuaa

SEQ ID NO: 1166189 - RNA, 19 nt, Artificial Sequence
  Description of Artificial Sequence: Synthetic oligonucleotide
  Antisense strand to SEQ ID NO: 1166188
uuaacaccuaaccacuacc

SEQ ID NO: 1166190 - RNA, 19 nt, Artificial Sequence
  Description of Artificial Sequence: Synthetic oligonucleotide
  Sense strand starting at position 3461 of SEQ ID NO: 916559
uugacaaccguaugaggua

SEQ ID NO: 1166191 - RNA, 19 nt, Artificial Sequence
  Description of Artificial Sequence: Synthetic oligonucleotide
  Antisense strand to SEQ ID NO: 1166190
uaccucauacgguugucaa

SEQ ID NO: 1166192 - RNA, 19 nt, Artificial Sequence
  Description of Artificial Sequence: Synthetic oligonucleotide
  Sense strand starting at position 3468 of SEQ ID NO: 916559
ccguaugagguauacauga

SEQ ID NO: 1166193 - RNA, 19 nt, Artificial Sequence
  Description of Artificial Sequence: Synthetic oligonucleotide
  Antisense strand to SEQ ID NO: 1166192
ucauguauaccucauacgg

SEQ ID NO: 1166194 - RNA, 19 nt, Artificial Sequence
  Description of Artificial Sequence: Synthetic oligonucleotide
  Sense strand starting at position 3483 of SEQ ID NO: 916559
augagauaucugcauccca

SEQ ID NO: 1166195 - RNA, 19 nt, Artificial Sequence
  Description of Artificial Sequence: Synthetic oligonucleotide
  Antisense strand to SEQ ID NO: 1166194
ugggaugcagauaucucau

SEQ ID NO: 1166196 - RNA, 19 nt, Artificial Sequence
  Description of Artificial Sequence: Synthetic oligonucleotide
  Sense strand starting at position 49 of SEQ ID NO: 916560
gucccagagcauuacaaua

SEQ ID NO: 1166197 - RNA, 19 nt, Artificial Sequence
  Description of Artificial Sequence: Synthetic oligonucleotide
  Antisense strand to SEQ ID NO: 1166196
uauuguaaugcucugggac

SEQ ID NO: 1166198 - RNA, 19 nt, Artificial Sequence
  Description of Artificial Sequence: Synthetic oligonucleotide
  Sense strand starting at position 137 of SEQ ID NO: 916560
caacacuuccugcguuaug

SEQ ID NO: 1166199 - RNA, 19 nt, Artificial Sequence
  Description of Artificial Sequence: Synthetic oligonucleotide
  Antisense strand to SEQ ID NO: 1166198
cauaacgcaggaaguguug

SEQ ID NO: 1166200 - RNA, 19 nt, Artificial Sequence
  Description of Artificial Sequence: Synthetic oligonucleotide
  Sense strand starting at position 138 of SEQ ID NO: 916560
aacacuuccugcguuauga

SEQ ID NO: 1166201 - RNA, 19 nt, Artificial Sequence
  Description of Artificial Sequence: Synthetic oligonucleotide
  Antisense strand to SEQ ID NO: 1166200
ucauaacgcaggaaguguu

SEQ ID NO: 1166202 - RNA, 19 nt, Artificial Sequence
  Description of Artificial Sequence: Synthetic oligonucleotide
  Sense strand starting at position 251 of SEQ ID NO: 916560
aacugaggcugggaaagau

SEQ ID NO: 1166203 - RNA, 19 nt, Artificial Sequence
  Description of Artificial Sequence: Synthetic oligonucleotide
  Antisense strand to SEQ ID NO: 1166202
aucuuucccagccucaguu

SEQ ID NO: 1166204 - RNA, 19 nt, Artificial Sequence
  Description of Artificial Sequence: Synthetic oligonucleotide
  Sense strand starting at position 296 of SEQ ID NO: 916560
caaguaaagggucgaucua

SEQ ID NO: 1166205 - RNA, 19 nt, Artificial Sequence
  Description of Artificial Sequence: Synthetic oligonucleotide
  Antisense strand to SEQ ID NO: 1166204
uagaucgacccuuuacuug

SEQ ID NO: 1166206 - RNA, 19 nt, Artificial Sequence
  Description of Artificial Sequence: Synthetic oligonucleotide
  Sense strand starting at position 329 of SEQ ID NO: 916560
gggagucacuggaaagguu

SEQ ID NO: 1166207 - RNA, 19 nt, Artificial Sequence
  Description of Artificial Sequence: Synthetic oligonucleotide
  Antisense strand to SEQ ID NO: 1166206
aaccuuuccagugacuccc

SEQ ID NO: 1166208 - RNA, 19 nt, Artificial Sequence
  Description of Artificial Sequence: Synthetic oligonucleotide
  Sense strand starting at position 360 of SEQ ID NO: 916560
ggcugccuucuccgugaga

SEQ ID NO: 1166209 - RNA, 19 nt, Artificial Sequence
  Description of Artificial Sequence: Synthetic oligonucleotide
  Antisense strand to SEQ ID NO: 1166208
ucucacggagaaggcagcc

SEQ ID NO: 1166210 - RNA, 19 nt, Artificial Sequence
  Description of Artificial Sequence: Synthetic oligonucleotide
  Sense strand starting at position 435 of SEQ ID NO: 916560
ugagcucucuggucacagu

SEQ ID NO: 1166211 - RNA, 19 nt, Artificial Sequence
  Description of Artificial Sequence: Synthetic oligonucleotide
  Antisense strand to SEQ ID NO: 1166210
acugugaccagagagcuca

SEQ ID NO: 1166212 - RNA, 19 nt, Artificial Sequence
  Description of Artificial Sequence: Synthetic oligonucleotide
  Sense strand starting at position 538 of SEQ ID NO: 916560
cugaguggcccuggaaguu

SEQ ID NO: 1166213 - RNA, 19 nt, Artificial Sequence
  Description of Artificial Sequence: Synthetic oligonucleotide
  Antisense strand to SEQ ID NO: 1166212
aacuuccagggccacucag

SEQ ID NO: 1166214 - RNA, 19 nt, Artificial Sequence
  Description of Artificial Sequence: Synthetic oligonucleotide
  Sense strand starting at position 797 of SEQ ID NO: 916560
caaggaggcuccucgcaaa

SEQ ID NO: 1166215 - RNA, 19 nt, Artificial Sequence
  Description of Artificial Sequence: Synthetic oligonucleotide
  Antisense strand to SEQ ID NO: 1166214
uuugcgaggagccuccuug

SEQ ID NO: 1166216 - RNA, 19 nt, Artificial Sequence
  Description of Artificial Sequence: Synthetic oligonucleotide
  Sense strand starting at position 895 of SEQ ID NO: 916560
gccaaagacuccgccauua

SEQ ID NO: 1166217 - RNA, 19 nt, Artificial Sequence
  Description of Artificial Sequence: Synthetic oligonucleotide
  Antisense strand to SEQ ID NO: 1166216
uaauggcggagucuuuggc

SEQ ID NO: 1166218 - RNA, 19 nt, Artificial Sequence
  Description of Artificial Sequence: Synthetic oligonucleotide
  Sense strand starting at position 1433 of SEQ ID NO: 916560
gguucugaauccuccgagu

SEQ ID NO: 1166219 - RNA, 19 nt, Artificial Sequence
  Description of Artificial Sequence: Synthetic oligonucleotide
  Antisense strand to SEQ ID NO: 1166218
acucggaggauucagaacc

SEQ ID NO: 1166220 - RNA, 19 nt, Artificial Sequence
  Description of Artificial Sequence: Synthetic oligonucleotide
  Sense strand starting at position 1534 of SEQ ID NO: 916560
ccgcuuugugccuccaaga

SEQ ID NO: 1166221 - RNA, 19 nt, Artificial Sequence
  Description of Artificial Sequence: Synthetic oligonucleotide
  Antisense strand to SEQ ID NO: 1166220
ucuuggaggcacaaagcgg

SEQ ID NO: 1166222 - RNA, 19 nt, Artificial Sequence
  Description of Artificial Sequence: Synthetic oligonucleotide
  Sense strand starting at position 1535 of SEQ ID NO: 916560
cgcuuugugccuccaagau

SEQ ID NO: 1166223 - RNA, 19 nt, Artificial Sequence
  Description of Artificial Sequence: Synthetic oligonucleotide
  Antisense strand to SEQ ID NO: 1166222
aucuuggaggcacaaagcg

SEQ ID NO: 1166224 - RNA, 19 nt, Artificial Sequence
  Description of Artificial Sequence: Synthetic oligonucleotide
  Sense strand starting at position 1788 of SEQ ID NO: 916560
cuggaaacgcggcauaaau

SEQ ID NO: 1166225 - RNA, 19 nt, Artificial Sequence
  Description of Artificial Sequence: Synthetic oligonucleotide
  Antisense strand to SEQ ID NO: 1166224
auuuaugccgcguuuccag

SEQ ID NO: 1166226 - RNA, 19 nt, Artificial Sequence
  Description of Artificial Sequence: Synthetic oligonucleotide
  Sense strand starting at position 1790 of SEQ ID NO: 916560
ggaaacgcggcauaaauau

SEQ ID NO: 1166227 - RNA, 19 nt, Artificial Sequence
  Description of Artificial Sequence: Synthetic oligonucleotide
  Antisense strand to SEQ ID NO: 1166226
auauuuaugccgcguuucc

SEQ ID NO: 1166228 - RNA, 19 nt, Artificial Sequence
  Description of Artificial Sequence: Synthetic oligonucleotide
  Sense strand starting at position 1801 of SEQ ID NO: 916560
auaaauauguagggacuga

SEQ ID NO: 1166229 - RNA, 19 nt, Artificial Sequence
  Description of Artificial Sequence: Synthetic oligonucleotide
  Antisense strand to SEQ ID NO: 1166228
ucagucccuacauauuuau

SEQ ID NO: 1166230 - RNA, 19 nt, Artificial Sequence
  Description of Artificial Sequence: Synthetic oligonucleotide
  Sense strand starting at position 1946 of SEQ ID NO: 916560
cgucgcaacccucauuaaa

SEQ ID NO: 1166231 - RNA, 19 nt, Artificial Sequence
  Description of Artificial Sequence: Synthetic oligonucleotide
  Antisense strand to SEQ ID NO: 1166230
uuuaaugaggguugcgacg

SEQ ID NO: 1166232 - RNA, 19 nt, Artificial Sequence
  Description of Artificial Sequence: Synthetic oligonucleotide
  Sense strand starting at position 2116 of SEQ ID NO: 916560
cuggauagggcugaaugua

SEQ ID NO: 1166233 - RNA, 19 nt, Artificial Sequence
  Description of Artificial Sequence: Synthetic oligonucleotide
  Antisense strand to SEQ ID NO: 1166232
uacauucagcccuauccag

SEQ ID NO: 1166234 - RNA, 19 nt, Artificial Sequence
  Description of Artificial Sequence: Synthetic oligonucleotide
  Sense strand starting at position 2153 of SEQ ID NO: 916560
gcaggucuauuugggcaga

SEQ ID NO: 1166235 - RNA, 19 nt, Artificial Sequence
  Description of Artificial Sequence: Synthetic oligonucleotide
  Antisense strand to SEQ ID NO: 1166234
ucugcccaaauagaccugc

SEQ ID NO: 1166236 - RNA, 19 nt, Artificial Sequence
  Description of Artificial Sequence: Synthetic oligonucleotide
  Sense strand starting at position 2196 of SEQ ID NO: 916560
gguuauuucugccucuaca

SEQ ID NO: 1166237 - RNA, 19 nt, Artificial Sequence
  Description of Artificial Sequence: Synthetic oligonucleotide
  Antisense strand to SEQ ID NO: 1166236
uguagaggcagaaauaacc

SEQ ID NO: 1166238 - RNA, 19 nt, Artificial Sequence
  Description of Artificial Sequence: Synthetic oligonucleotide
  Sense strand starting at position 2223 of SEQ ID NO: 916560
gggauagcauuccuuaaug

SEQ ID NO: 1166239 - RNA, 19 nt, Artificial Sequence
  Description of Artificial Sequence: Synthetic oligonucleotide
  Antisense strand to SEQ ID NO: 1166238
cauuaaggaaugcuauccc

SEQ ID NO: 1166240 - RNA, 19 nt, Artificial Sequence
  Description of Artificial Sequence: Synthetic oligonucleotide
  Sense strand starting at position 2368 of SEQ ID NO: 916560
caggaaauguugccugguu

SEQ ID NO: 1166241 - RNA, 19 nt, Artificial Sequence
  Description of Artificial Sequence: Synthetic oligonucleotide
  Antisense strand to SEQ ID NO: 1166240
aaccaggcaacauuuccug

SEQ ID NO: 1166242 - RNA, 19 nt, Artificial Sequence
  Description of Artificial Sequence: Synthetic oligonucleotide
  Sense strand starting at position 2370 of SEQ ID NO: 916560
ggaaauguugccugguucu

SEQ ID NO: 1166243 - RNA, 19 nt, Artificial Sequence
  Description of Artificial Sequence: Synthetic oligonucleotide
  Antisense strand to SEQ ID NO: 1166242
agaaccaggcaacauuucc

SEQ ID NO: 1166244 - RNA, 19 nt, Artificial Sequence
  Description of Artificial Sequence: Synthetic oligonucleotide
  Sense strand starting at position 2550 of SEQ ID NO: 916560
ggcccuaacauauggguaa

SEQ ID NO: 1166245 - RNA, 19 nt, Artificial Sequence
  Description of Artificial Sequence: Synthetic oligonucleotide
  Antisense strand to SEQ ID NO: 1166244
uuacccauauguuagggcc

SEQ ID NO: 1166246 - RNA, 19 nt, Artificial Sequence
  Description of Artificial Sequence: Synthetic oligonucleotide
  Sense strand starting at position 2650 of SEQ ID NO: 916560
cucacacagucuugggaaa

SEQ ID NO: 1166247 - RNA, 19 nt, Artificial Sequence
  Description of Artificial Sequence: Synthetic oligonucleotide
  Antisense strand to SEQ ID NO: 1166246
uuucccaagacugugugag

SEQ ID NO: 1166248 - RNA, 19 nt, Artificial Sequence
  Description of Artificial Sequence: Synthetic oligonucleotide
  Sense strand starting at position 2830 of SEQ ID NO: 916560
cuucgaguugcgcagagaa

SEQ ID NO: 1166249 - RNA, 19 nt, Artificial Sequence
  Description of Artificial Sequence: Synthetic oligonucleotide
  Antisense strand to SEQ ID NO: 1166248
uucucugcgcaacucgaag

SEQ ID NO: 1166250 - RNA, 19 nt, Artificial Sequence
  Description of Artificial Sequence: Synthetic oligonucleotide
  Sense strand starting at position 2832 of SEQ ID NO: 916560
ucgaguugcgcagagaaga

SEQ ID NO: 1166251 - RNA, 19 nt, Artificial Sequence
  Description of Artificial Sequence: Synthetic oligonucleotide
  Antisense strand to SEQ ID NO: 1166250
ucuucucugcgcaacucga

SEQ ID NO: 1166252 - RNA, 19 nt, Artificial Sequence
  Description of Artificial Sequence: Synthetic oligonucleotide
  Sense strand starting at position 3145 of SEQ ID NO: 916560
ggaugucgugaggauauac

SEQ ID NO: 1166253 - RNA, 19 nt, Artificial Sequence
  Description of Artificial Sequence: Synthetic oligonucleotide
  Antisense strand to SEQ ID NO: 1166252
guauauccucacgacaucc

SEQ ID NO: 1166254 - RNA, 19 nt, Artificial Sequence
  Description of Artificial Sequence: Synthetic oligonucleotide
  Sense strand starting at position 3167 of SEQ ID NO: 916560
augagaugaugcuggugaa

SEQ ID NO: 1166255 - RNA, 19 nt, Artificial Sequence
  Description of Artificial Sequence: Synthetic oligonucleotide
  Antisense strand to SEQ ID NO: 1166254
uucaccagcaucaucucau

SEQ ID NO: 1166256 - RNA, 19 nt, Artificial Sequence
  Description of Artificial Sequence: Synthetic oligonucleotide
  Sense strand starting at position 3179 of SEQ ID NO: 916560
uggugaagcccuugacaug

SEQ ID NO: 1166257 - RNA, 19 nt, Artificial Sequence
  Description of Artificial Sequence: Synthetic oligonucleotide
  Antisense strand to SEQ ID NO: 1166256
caugucaagggcuucacca

SEQ ID NO: 1166258 - RNA, 19 nt, Artificial Sequence
  Description of Artificial Sequence: Synthetic oligonucleotide
  Sense strand starting at position 3190 of SEQ ID NO: 916560
uugacauggugcuagacau

SEQ ID NO: 1166259 - RNA, 19 nt, Artificial Sequence
  Description of Artificial Sequence: Synthetic oligonucleotide
  Antisense strand to SEQ ID NO: 1166258
augucuagcaccaugucaa

SEQ ID NO: 1166260 - RNA, 19 nt, Artificial Sequence
  Description of Artificial Sequence: Synthetic oligonucleotide
  Sense strand starting at position 3196 of SEQ ID NO: 916560
uggugcuagacauauagua

SEQ ID NO: 1166261 - RNA, 19 nt, Artificial Sequence
  Description of Artificial Sequence: Synthetic oligonucleotide
  Antisense strand to SEQ ID NO: 1166260
uacuauaugucuagcacca

SEQ ID NO: 1166262 - RNA, 19 nt, Artificial Sequence
  Description of Artificial Sequence: Synthetic oligonucleotide
  Sense strand starting at position 3223 of SEQ ID NO: 916560
ggaaacaguugccaacaau

SEQ ID NO: 1166263 - RNA, 19 nt, Artificial Sequence
  Description of Artificial Sequence: Synthetic oligonucleotide
  Antisense strand to SEQ ID NO: 1166262
auuguuggcaacuguuucc

SEQ ID NO: 1166264 - RNA, 19 nt, Artificial Sequence
  Description of Artificial Sequence: Synthetic oligonucleotide
  Sense strand starting at position 3318 of SEQ ID NO: 916560
ggagcugaguccuugcagu

SEQ ID NO: 1166265 - RNA, 19 nt, Artificial Sequence
  Description of Artificial Sequence: Synthetic oligonucleotide
  Antisense strand to SEQ ID NO: 1166264
acugcaaggacucagcucc

SEQ ID NO: 1166266 - RNA, 19 nt, Artificial Sequence
  Description of Artificial Sequence: Synthetic oligonucleotide
  Sense strand starting at position 3407 of SEQ ID NO: 916560
uggugucauucucagaaca

SEQ ID NO: 1166267 - RNA, 19 nt, Artificial Sequence
  Description of Artificial Sequence: Synthetic oligonucleotide
  Antisense strand to SEQ ID NO: 1166266
uguucugagaaugacacca

SEQ ID NO: 1166268 - RNA, 19 nt, Artificial Sequence
  Description of Artificial Sequence: Synthetic oligonucleotide
  Sense strand starting at position 3645 of SEQ ID NO: 916560
ccacgagaugguggagaua

SEQ ID NO: 1166269 - RNA, 19 nt, Artificial Sequence
  Description of Artificial Sequence: Synthetic oligonucleotide
  Antisense strand to SEQ ID NO: 1166268
uaucuccaccaucucgugg

SEQ ID NO: 1166270 - RNA, 19 nt, Artificial Sequence
  Description of Artificial Sequence: Synthetic oligonucleotide
  Sense strand starting at position 3647 of SEQ ID NO: 916560
acgagaugguggagauagu

SEQ ID NO: 1166271 - RNA, 19 nt, Artificial Sequence
  Description of Artificial Sequence: Synthetic oligonucleotide
  Antisense strand to SEQ ID NO: 1166270
acuaucuccaccaucucgu

SEQ ID NO: 1166272 - RNA, 19 nt, Artificial Sequence
  Description of Artificial Sequence: Synthetic oligonucleotide
  Sense strand starting at position 3790 of SEQ ID NO: 916560
agcaaagccuuagaaugua

SEQ ID NO: 1166273 - RNA, 19 nt, Artificial Sequence
  Description of Artificial Sequence: Synthetic oligonucleotide
  Antisense strand to SEQ ID NO: 1166272
uacauucuaaggcuuugcu

SEQ ID NO: 1166274 - RNA, 19 nt, Artificial Sequence
  Description of Artificial Sequence: Synthetic oligonucleotide
  Sense strand starting at position 3798 of SEQ ID NO: 916560
cuuagaauguagcucuuga

SEQ ID NO: 1166275 - RNA, 19 nt, Artificial Sequence
  Description of Artificial Sequence: Synthetic oligonucleotide
  Antisense strand to SEQ ID NO: 1166274
ucaagagcuacauucuaag

SEQ ID NO: 1166276 - RNA, 19 nt, Artificial Sequence
  Description of Artificial Sequence: Synthetic oligonucleotide
  Sense strand starting at position 13 of SEQ ID NO: 916561
uccugacaucauuaccgua

SEQ ID NO: 1166277 - RNA, 19 nt, Artificial Sequence
  Description of Artificial Sequence: Synthetic oligonucleotide
  Antisense strand to SEQ ID NO: 1166276
uacgguaaugaugucagga

SEQ ID NO: 1166278 - RNA, 19 nt, Artificial Sequence
  Description of Artificial Sequence: Synthetic oligonucleotide
  Sense strand starting at position 18 of SEQ ID NO: 916561
acaucauuaccguaaggcu

SEQ ID NO: 1166279 - RNA, 19 nt, Artificial Sequence
  Description of Artificial Sequence: Synthetic oligonucleotide
  Antisense strand to SEQ ID NO: 1166278
agccuuacgguaaugaugu

SEQ ID NO: 1166280 - RNA, 19 nt, Artificial Sequence
  Description of Artificial Sequence: Synthetic oligonucleotide
  Sense strand starting at position 207 of SEQ ID NO: 916561
ccuaaagauugggaaagaa

SEQ ID NO: 1166281 - RNA, 19 nt, Artificial Sequence
  Description of Artificial Sequence: Synthetic oligonucleotide
  Antisense strand to SEQ ID NO: 1166280
uucuuucccaaucuuuagg

SEQ ID NO: 1166282 - RNA, 19 nt, Artificial Sequence
  Description of Artificial Sequence: Synthetic oligonucleotide
  Sense strand starting at position 424 of SEQ ID NO: 916561
ucgauauaacagugaucuc

SEQ ID NO: 1166283 - RNA, 19 nt, Artificial Sequence
  Description of Artificial Sequence: Synthetic oligonucleotide
  Antisense strand to SEQ ID NO: 1166282
gagaucacuguuauaucga

SEQ ID NO: 1166284 - RNA, 19 nt, Artificial Sequence
  Description of Artificial Sequence: Synthetic oligonucleotide
  Sense strand starting at position 573 of SEQ ID NO: 916561
guacuaaggguuugacuga

SEQ ID NO: 1166285 - RNA, 19 nt, Artificial Sequence
  Description of Artificial Sequence: Synthetic oligonucleotide
  Antisense strand to SEQ ID NO: 1166284
ucagucaaacccuuaguac

SEQ ID NO: 1166286 - RNA, 19 nt, Artificial Sequence
  Description of Artificial Sequence: Synthetic oligonucleotide
  Sense strand starting at position 683 of SEQ ID NO: 916561
gggaaacgaugcuuaauaa

SEQ ID NO: 1166287 - RNA, 19 nt, Artificial Sequence
  Description of Artificial Sequence: Synthetic oligonucleotide
  Antisense strand to SEQ ID NO: 1166286
uuauuaagcaucguuuccc

SEQ ID NO: 1166288 - RNA, 19 nt, Artificial Sequence
  Description of Artificial Sequence: Synthetic oligonucleotide
  Sense strand starting at position 690 of SEQ ID NO: 916561
gaugcuuaauaagaaagga

SEQ ID NO: 1166289 - RNA, 19 nt, Artificial Sequence
  Description of Artificial Sequence: Synthetic oligonucleotide
  Antisense strand to SEQ ID NO: 1166288
uccuuucuuauuaagcauc

SEQ ID NO: 1166290 - RNA, 19 nt, Artificial Sequence
  Description of Artificial Sequence: Synthetic oligonucleotide
  Sense strand starting at position 726 of SEQ ID NO: 916561
uuugaauccugaguuugug

SEQ ID NO: 1166291 - RNA, 19 nt, Artificial Sequence
  Description of Artificial Sequence: Synthetic oligonucleotide
  Antisense strand to SEQ ID NO: 1166290
cacaaacucaggauucaaa

SEQ ID NO: 1166292 - RNA, 19 nt, Artificial Sequence
  Description of Artificial Sequence: Synthetic oligonucleotide
  Sense strand starting at position 735 of SEQ ID NO: 916561
ugaguuugugcagggagga

SEQ ID NO: 1166293 - RNA, 19 nt, Artificial Sequence
  Description of Artificial Sequence: Synthetic oligonucleotide
  Antisense strand to SEQ ID NO: 1166292
uccucccugcacaaacuca

SEQ ID NO: 1166294 - RNA, 19 nt, Artificial Sequence
  Description of Artificial Sequence: Synthetic oligonucleotide
  Sense strand starting at position 736 of SEQ ID NO: 916561
gaguuugugcagggaggau

SEQ ID NO: 1166295 - RNA, 19 nt, Artificial Sequence
  Description of Artificial Sequence: Synthetic oligonucleotide
  Antisense strand to SEQ ID NO: 1166294
auccucccugcacaaacuc

SEQ ID NO: 1166296 - RNA, 19 nt, Artificial Sequence
  Description of Artificial Sequence: Synthetic oligonucleotide
  Sense strand starting at position 847 of SEQ ID NO: 916561
acauguguucacgccugua

SEQ ID NO: 1166297 - RNA, 19 nt, Artificial Sequence
  Description of Artificial Sequence: Synthetic oligonucleotide
  Antisense strand to SEQ ID NO: 1166296
uacaggcgugaacacaugu

SEQ ID NO: 1166298 - RNA, 19 nt, Artificial Sequence
  Description of Artificial Sequence: Synthetic oligonucleotide
  Sense strand starting at position 1327 of SEQ ID NO: 916561
ggguaaaccuucccuggua

SEQ ID NO: 1166299 - RNA, 19 nt, Artificial Sequence
  Description of Artificial Sequence: Synthetic oligonucleotide
  Antisense strand to SEQ ID NO: 1166298
uaccagggaagguuuaccc

SEQ ID NO: 1166300 - RNA, 19 nt, Artificial Sequence
  Description of Artificial Sequence: Synthetic oligonucleotide
  Sense strand starting at position 1328 of SEQ ID NO: 916561
gguaaaccuucccugguau

SEQ ID NO: 1166301 - RNA, 19 nt, Artificial Sequence
  Description of Artificial Sequence: Synthetic oligonucleotide
  Antisense strand to SEQ ID NO: 1166300
auaccagggaagguuuacc

SEQ ID NO: 1166302 - RNA, 19 nt, Artificial Sequence
  Description of Artificial Sequence: Synthetic oligonucleotide
  Sense strand starting at position 1339 of SEQ ID NO: 916561
ccugguaucuacuugcuga

SEQ ID NO: 1166303 - RNA, 19 nt, Artificial Sequence
  Description of Artificial Sequence: Synthetic oligonucleotide
  Antisense strand to SEQ ID NO: 1166302
ucagcaaguagauaccagg

SEQ ID NO: 1166304 - RNA, 19 nt, Artificial Sequence
  Description of Artificial Sequence: Synthetic oligonucleotide
  Sense strand starting at position 1344 of SEQ ID NO: 916561
uaucuacuugcugagguaa

SEQ ID NO: 1166305 - RNA, 19 nt, Artificial Sequence
  Description of Artificial Sequence: Synthetic oligonucleotide
  Antisense strand to SEQ ID NO: 1166304
uuaccucagcaaguagaua

SEQ ID NO: 1166306 - RNA, 19 nt, Artificial Sequence
  Description of Artificial Sequence: Synthetic oligonucleotide
  Sense strand starting at position 1355 of SEQ ID NO: 916561
ugagguaauuauguuccca

SEQ ID NO: 1166307 - RNA, 19 nt, Artificial Sequence
  Description of Artificial Sequence: Synthetic oligonucleotide
  Antisense strand to SEQ ID NO: 1166306
ugggaacauaauuaccuca

SEQ ID NO: 1166308 - RNA, 19 nt, Artificial Sequence
  Description of Artificial Sequence: Synthetic oligonucleotide
  Sense strand starting at position 1357 of SEQ ID NO: 916561
agguaauuauguucccaaa

SEQ ID NO: 1166309 - RNA, 19 nt, Artificial Sequence
  Description of Artificial Sequence: Synthetic oligonucleotide
  Antisense strand to SEQ ID NO: 1166308
uuugggaacauaauuaccu

SEQ ID NO: 1166310 - RNA, 19 nt, Artificial Sequence
  Description of Artificial Sequence: Synthetic oligonucleotide
  Sense strand starting at position 1359 of SEQ ID NO: 916561
guaauuauguucccaaagc

SEQ ID NO: 1166311 - RNA, 19 nt, Artificial Sequence
  Description of Artificial Sequence: Synthetic oligonucleotide
  Antisense strand to SEQ ID NO: 1166310
gcuuugggaacauaauuac

SEQ ID NO: 1166312 - RNA, 19 nt, Artificial Sequence
  Description of Artificial Sequence: Synthetic oligonucleotide
  Sense strand starting at position 1514 of SEQ ID NO: 916561
agguuaucaagugaauggu

SEQ ID NO: 1166313 - RNA, 19 nt, Artificial Sequence
  Description of Artificial Sequence: Synthetic oligonucleotide
  Antisense strand to SEQ ID NO: 1166312
accauucacuugauaaccu

SEQ ID NO: 1166314 - RNA, 19 nt, Artificial Sequence
  Description of Artificial Sequence: Synthetic oligonucleotide
  Sense strand starting at position 1542 of SEQ ID NO: 916561
acugauuuguucuaucuac

SEQ ID NO: 1166315 - RNA, 19 nt, Artificial Sequence
  Description of Artificial Sequence: Synthetic oligonucleotide
  Antisense strand to SEQ ID NO: 1166314
guagauagaacaaaucagu

SEQ ID NO: 1166316 - RNA, 19 nt, Artificial Sequence
  Description of Artificial Sequence: Synthetic oligonucleotide
  Sense strand starting at position 1863 of SEQ ID NO: 916561
auagucuccuguguuagga

SEQ ID NO: 1166317 - RNA, 19 nt, Artificial Sequence
  Description of Artificial Sequence: Synthetic oligonucleotide
  Antisense strand to SEQ ID NO: 1166316
uccuaacacaggagacuau

SEQ ID NO: 1166318 - RNA, 19 nt, Artificial Sequence
  Description of Artificial Sequence: Synthetic oligonucleotide
  Sense strand starting at position 1879 of SEQ ID NO: 916561
ggaaguucuuccucauguc

SEQ ID NO: 1166319 - RNA, 19 nt, Artificial Sequence
  Description of Artificial Sequence: Synthetic oligonucleotide
  Antisense strand to SEQ ID NO: 1166318
gacaugaggaagaacuucc

SEQ ID NO: 1166320 - RNA, 19 nt, Artificial Sequence
  Description of Artificial Sequence: Synthetic oligonucleotide
  Sense strand starting at position 2032 of SEQ ID NO: 916561
ggguuccucuuugugacau

SEQ ID NO: 1166321 - RNA, 19 nt, Artificial Sequence
  Description of Artificial Sequence: Synthetic oligonucleotide
  Antisense strand to SEQ ID NO: 1166320
augucacaaagaggaaccc

SEQ ID NO: 1166322 - RNA, 19 nt, Artificial Sequence
  Description of Artificial Sequence: Synthetic oligonucleotide
  Sense strand starting at position 2066 of SEQ ID NO: 916561
cccuguggaugcuuaaaca

SEQ ID NO: 1166323 - RNA, 19 nt, Artificial Sequence
  Description of Artificial Sequence: Synthetic oligonucleotide
  Antisense strand to SEQ ID NO: 1166322
uguuuaagcauccacaggg

SEQ ID NO: 1166324 - RNA, 19 nt, Artificial Sequence
  Description of Artificial Sequence: Synthetic oligonucleotide
  Sense strand starting at position 2086 of SEQ ID NO: 916561
gccauaaauguggguuaca

SEQ ID NO: 1166325 - RNA, 19 nt, Artificial Sequence
  Description of Artificial Sequence: Synthetic oligonucleotide
  Antisense strand to SEQ ID NO: 1166324
uguaacccacauuuauggc

SEQ ID NO: 1166326 - RNA, 19 nt, Artificial Sequence
  Description of Artificial Sequence: Synthetic oligonucleotide
  Sense strand starting at position 2087 of SEQ ID NO: 916561
ccauaaauguggguuacaa

SEQ ID NO: 1166327 - RNA, 19 nt, Artificial Sequence
  Description of Artificial Sequence: Synthetic oligonucleotide
  Antisense strand to SEQ ID NO: 1166326
uuguaacccacauuuaugg

SEQ ID NO: 1166328 - RNA, 19 nt, Artificial Sequence
  Description of Artificial Sequence: Synthetic oligonucleotide
  Sense strand starting at position 2545 of SEQ ID NO: 916561
ggaagcauuucugaagccu

SEQ ID NO: 1166329 - RNA, 19 nt, Artificial Sequence
  Description of Artificial Sequence: Synthetic oligonucleotide
  Antisense strand to SEQ ID NO: 1166328
aggcuucagaaaugcuucc

SEQ ID NO: 1166330 - RNA, 19 nt, Artificial Sequence
  Description of Artificial Sequence: Synthetic oligonucleotide
  Sense strand starting at position 2666 of SEQ ID NO: 916561
cucuauuucugagaggcau

SEQ ID NO: 1166331 - RNA, 19 nt, Artificial Sequence
  Description of Artificial Sequence: Synthetic oligonucleotide
  Antisense strand to SEQ ID NO: 1166330
augccucucagaaauagag

SEQ ID NO: 1166332 - RNA, 19 nt, Artificial Sequence
  Description of Artificial Sequence: Synthetic oligonucleotide
  Sense strand starting at position 3007 of SEQ ID NO: 916561
ugggauuacagucgagaac

SEQ ID NO: 1166333 - RNA, 19 nt, Artificial Sequence
  Description of Artificial Sequence: Synthetic oligonucleotide
  Antisense strand to SEQ ID NO: 1166332
guucucgacuguaauccca

SEQ ID NO: 1166334 - RNA, 19 nt, Artificial Sequence
  Description of Artificial Sequence: Synthetic oligonucleotide
  Sense strand starting at position 3082 of SEQ ID NO: 916561
aggauuugauggugggcaa

SEQ ID NO: 1166335 - RNA, 19 nt, Artificial Sequence
  Description of Artificial Sequence: Synthetic oligonucleotide
  Antisense strand to SEQ ID NO: 1166334
uugcccaccaucaaauccu

SEQ ID NO: 1166336 - RNA, 19 nt, Artificial Sequence
  Description of Artificial Sequence: Synthetic oligonucleotide
  Sense strand starting at position 3096 of SEQ ID NO: 916561
ggcaaagacgaacguaaau

SEQ ID NO: 1166337 - RNA, 19 nt, Artificial Sequence
  Description of Artificial Sequence: Synthetic oligonucleotide
  Antisense strand to SEQ ID NO: 1166336
auuuacguucgucuuugcc

SEQ ID NO: 1166338 - RNA, 19 nt, Artificial Sequence
  Description of Artificial Sequence: Synthetic oligonucleotide
  Sense strand starting at position 3146 of SEQ ID NO: 916561
ccaggaacucucuaggcua

SEQ ID NO: 1166339 - RNA, 19 nt, Artificial Sequence
  Description of Artificial Sequence: Synthetic oligonucleotide
  Antisense strand to SEQ ID NO: 1166338
uagccuagagaguuccugg

SEQ ID NO: 1166340 - RNA, 19 nt, Artificial Sequence
  Description of Artificial Sequence: Synthetic oligonucleotide
  Sense strand starting at position 3148 of SEQ ID NO: 916561
aggaacucucuaggcuaaa

SEQ ID NO: 1166341 - RNA, 19 nt, Artificial Sequence
  Description of Artificial Sequence: Synthetic oligonucleotide
  Antisense strand to SEQ ID NO: 1166340
uuuagccuagagaguuccu

SEQ ID NO: 1166342 - RNA, 19 nt, Artificial Sequence
  Description of Artificial Sequence: Synthetic oligonucleotide
  Sense strand starting at position 3283 of SEQ ID NO: 916561
aggcaagcucuccauauau

SEQ ID NO: 1166343 - RNA, 19 nt, Artificial Sequence
  Description of Artificial Sequence: Synthetic oligonucleotide
  Antisense strand to SEQ ID NO: 1166342
auauauggagagcuugccu

SEQ ID NO: 1166344 - RNA, 19 nt, Artificial Sequence
  Description of Artificial Sequence: Synthetic oligonucleotide
  Sense strand starting at position 3386 of SEQ ID NO: 916561
cagguagguccucauguua

SEQ ID NO: 1166345 - RNA, 19 nt, Artificial Sequence
  Description of Artificial Sequence: Synthetic oligonucleotide
  Antisense strand to SEQ ID NO: 1166344
uaacaugaggaccuaccug

SEQ ID NO: 1166346 - RNA, 19 nt, Artificial Sequence
  Description of Artificial Sequence: Synthetic oligonucleotide
  Sense strand starting at position 3393 of SEQ ID NO: 916561
guccucauguuauuuaucu

SEQ ID NO: 1166347 - RNA, 19 nt, Artificial Sequence
  Description of Artificial Sequence: Synthetic oligonucleotide
  Antisense strand to SEQ ID NO: 1166346
agauaaauaacaugaggac

SEQ ID NO: 1166348 - RNA, 19 nt, Artificial Sequence
  Description of Artificial Sequence: Synthetic oligonucleotide
  Sense strand starting at position 3427 of SEQ ID NO: 916561
uuaagaugaugauuacgau

SEQ ID NO: 1166349 - RNA, 19 nt, Artificial Sequence
  Description of Artificial Sequence: Synthetic oligonucleotide
  Antisense strand to SEQ ID NO: 1166348
aucguaaucaucaucuuaa

SEQ ID NO: 1166350 - RNA, 19 nt, Artificial Sequence
  Description of Artificial Sequence: Synthetic oligonucleotide
  Sense strand starting at position 3433 of SEQ ID NO: 916561
ugaugauuacgauaacagc

SEQ ID NO: 1166351 - RNA, 19 nt, Artificial Sequence
  Description of Artificial Sequence: Synthetic oligonucleotide
  Antisense strand to SEQ ID NO: 1166350
gcuguuaucguaaucauca

SEQ ID NO: 1166352 - RNA, 19 nt, Artificial Sequence
  Description of Artificial Sequence: Synthetic oligonucleotide
  Sense strand starting at position 3484 of SEQ ID NO: 916561
agguguugugagcaccaaa

SEQ ID NO: 1166353 - RNA, 19 nt, Artificial Sequence
  Description of Artificial Sequence: Synthetic oligonucleotide
  Antisense strand to SEQ ID NO: 1166352
uuuggugcucacaacaccu

SEQ ID NO: 1166354 - RNA, 19 nt, Artificial Sequence
  Description of Artificial Sequence: Synthetic oligonucleotide
  Sense strand starting at position 3910 of SEQ ID NO: 916561
ggcaaacacuuaucugauc

SEQ ID NO: 1166355 - RNA, 19 nt, Artificial Sequence
  Description of Artificial Sequence: Synthetic oligonucleotide
  Antisense strand to SEQ ID NO: 1166354
gaucagauaaguguuugcc

SEQ ID NO: 1166356 - RNA, 19 nt, Artificial Sequence
  Description of Artificial Sequence: Synthetic oligonucleotide
  Sense strand starting at position 727 of SEQ ID NO: 916562
ugagguuuguggccaacua

SEQ ID NO: 1166357 - RNA, 19 nt, Artificial Sequence
  Description of Artificial Sequence: Synthetic oligonucleotide
  Antisense strand to SEQ ID NO: 1166356
uaguuggccacaaaccuca

SEQ ID NO: 1166358 - RNA, 19 nt, Artificial Sequence
  Description of Artificial Sequence: Synthetic oligonucleotide
  Sense strand starting at position 782 of SEQ ID NO: 916562
ucagucuaugcagauuguu

SEQ ID NO: 1166359 - RNA, 19 nt, Artificial Sequence
  Description of Artificial Sequence: Synthetic oligonucleotide
  Antisense strand to SEQ ID NO: 1166358
aacaaucugcauagacuga

SEQ ID NO: 1166360 - RNA, 19 nt, Artificial Sequence
  Description of Artificial Sequence: Synthetic oligonucleotide
  Sense strand starting at position 1013 of SEQ ID NO: 916562
cucuuaagucuaggagauu

SEQ ID NO: 1166361 - RNA, 19 nt, Artificial Sequence
  Description of Artificial Sequence: Synthetic oligonucleotide
  Antisense strand to SEQ ID NO: 1166360
aaucuccuagacuuaagag

SEQ ID NO: 1166362 - RNA, 19 nt, Artificial Sequence
  Description of Artificial Sequence: Synthetic oligonucleotide
  Sense strand starting at position 1034 of SEQ ID NO: 916562
gguugcagugaguaagcua

SEQ ID NO: 1166363 - RNA, 19 nt, Artificial Sequence
  Description of Artificial Sequence: Synthetic oligonucleotide
  Antisense strand to SEQ ID NO: 1166362
uagcuuacucacugcaacc

SEQ ID NO: 1166364 - RNA, 19 nt, Artificial Sequence
  Description of Artificial Sequence: Synthetic oligonucleotide
  Sense strand starting at position 1039 of SEQ ID NO: 916562
cagugaguaagcuaugaug

SEQ ID NO: 1166365 - RNA, 19 nt, Artificial Sequence
  Description of Artificial Sequence: Synthetic oligonucleotide
  Antisense strand to SEQ ID NO: 1166364
caucauagcuuacucacug

SEQ ID NO: 1166366 - RNA, 19 nt, Artificial Sequence
  Description of Artificial Sequence: Synthetic oligonucleotide
  Sense strand starting at position 1041 of SEQ ID NO: 916562
gugaguaagcuaugauggu

SEQ ID NO: 1166367 - RNA, 19 nt, Artificial Sequence
  Description of Artificial Sequence: Synthetic oligonucleotide
  Antisense strand to SEQ ID NO: 1166366
accaucauagcuuacucac

SEQ ID NO: 1166368 - RNA, 19 nt, Artificial Sequence
  Description of Artificial Sequence: Synthetic oligonucleotide
  Sense strand starting at position 1165 of SEQ ID NO: 916562
ggcgcaauguggucagauu

SEQ ID NO: 1166369 - RNA, 19 nt, Artificial Sequence
  Description of Artificial Sequence: Synthetic oligonucleotide
  Antisense strand to SEQ ID NO: 1166368
aaucugaccacauugcgcc

SEQ ID NO: 1166370 - RNA, 19 nt, Artificial Sequence
  Description of Artificial Sequence: Synthetic oligonucleotide
  Sense strand starting at position 1166 of SEQ ID NO: 916562
gcgcaauguggucagauua

SEQ ID NO: 1166371 - RNA, 19 nt, Artificial Sequence
  Description of Artificial Sequence: Synthetic oligonucleotide
  Antisense strand to SEQ ID NO: 1166370
uaaucugaccacauugcgc

SEQ ID NO: 1166372 - RNA, 19 nt, Artificial Sequence
  Description of Artificial Sequence: Synthetic oligonucleotide
  Sense strand starting at position 1474 of SEQ ID NO: 916562
cgugccuggccauagauua

SEQ ID NO: 1166373 - RNA, 19 nt, Artificial Sequence
  Description of Artificial Sequence: Synthetic oligonucleotide
  Antisense strand to SEQ ID NO: 1166372
uaaucuauggccaggcacg

SEQ ID NO: 1166374 - RNA, 19 nt, Artificial Sequence
  Description of Artificial Sequence: Synthetic oligonucleotide
  Sense strand starting at position 1479 of SEQ ID NO: 916562
cuggccauagauuauguaa

SEQ ID NO: 1166375 - RNA, 19 nt, Artificial Sequence
  Description of Artificial Sequence: Synthetic oligonucleotide
  Antisense strand to SEQ ID NO: 1166374
uuacauaaucuauggccag

SEQ ID NO: 1166376 - RNA, 19 nt, Artificial Sequence
  Description of Artificial Sequence: Synthetic oligonucleotide
  Sense strand starting at position 1482 of SEQ ID NO: 916562
gccauagauuauguaaauu

SEQ ID NO: 1166377 - RNA, 19 nt, Artificial Sequence
  Description of Artificial Sequence: Synthetic oligonucleotide
  Antisense strand to SEQ ID NO: 1166376
aauuuacauaaucuauggc

SEQ ID NO: 1166378 - RNA, 19 nt, Artificial Sequence
  Description of Artificial Sequence: Synthetic oligonucleotide
  Sense strand starting at position 1536 of SEQ ID NO: 916562
uugaaacauuggcaauaca

SEQ ID NO: 1166379 - RNA, 19 nt, Artificial Sequence
  Description of Artificial Sequence: Synthetic oligonucleotide
  Antisense strand to SEQ ID NO: 1166378
uguauugccaauguuucaa

SEQ ID NO: 1166380 - RNA, 19 nt, Artificial Sequence
  Description of Artificial Sequence: Synthetic oligonucleotide
  Sense strand starting at position 1672 of SEQ ID NO: 916562
ggcucauaugauggccaua

SEQ ID NO: 1166381 - RNA, 19 nt, Artificial Sequence
  Description of Artificial Sequence: Synthetic oligonucleotide
  Antisense strand to SEQ ID NO: 1166380
uauggccaucauaugagcc

SEQ ID NO: 1166382 - RNA, 19 nt, Artificial Sequence
  Description of Artificial Sequence: Synthetic oligonucleotide
  Sense strand starting at position 1759 of SEQ ID NO: 916562
aauggagaauaguuuccua

SEQ ID NO: 1166383 - RNA, 19 nt, Artificial Sequence
  Description of Artificial Sequence: Synthetic oligonucleotide
  Antisense strand to SEQ ID NO: 1166382
uaggaaacuauucuccauu

SEQ ID NO: 1166384 - RNA, 19 nt, Artificial Sequence
  Description of Artificial Sequence: Synthetic oligonucleotide
  Sense strand starting at position 1780 of SEQ ID NO: 916562
gcuucaguguggucuugac

SEQ ID NO: 1166385 - RNA, 19 nt, Artificial Sequence
  Description of Artificial Sequence: Synthetic oligonucleotide
  Antisense strand to SEQ ID NO: 1166384
gucaagaccacacugaagc

SEQ ID NO: 1166386 - RNA, 19 nt, Artificial Sequence
  Description of Artificial Sequence: Synthetic oligonucleotide
  Sense strand starting at position 1851 of SEQ ID NO: 916562
uccagauaucacugcuaga

SEQ ID NO: 1166387 - RNA, 19 nt, Artificial Sequence
  Description of Artificial Sequence: Synthetic oligonucleotide
  Antisense strand to SEQ ID NO: 1166386
ucuagcagugauaucugga

SEQ ID NO: 1166388 - RNA, 19 nt, Artificial Sequence
  Description of Artificial Sequence: Synthetic oligonucleotide
  Sense strand starting at position 1887 of SEQ ID NO: 916562
ggaccaugggucugaccua

SEQ ID NO: 1166389 - RNA, 19 nt, Artificial Sequence
  Description of Artificial Sequence: Synthetic oligonucleotide
  Antisense strand to SEQ ID NO: 1166388
uaggucagacccauggucc

SEQ ID NO: 1166390 - RNA, 19 nt, Artificial Sequence
  Description of Artificial Sequence: Synthetic oligonucleotide
  Sense strand starting at position 1915 of SEQ ID NO: 916562
cccugauguccuuaucuuc

SEQ ID NO: 1166391 - RNA, 19 nt, Artificial Sequence
  Description of Artificial Sequence: Synthetic oligonucleotide
  Antisense strand to SEQ ID NO: 1166390
gaagauaaggacaucaggg

SEQ ID NO: 1166392 - RNA, 19 nt, Artificial Sequence
  Description of Artificial Sequence: Synthetic oligonucleotide
  Sense strand starting at position 1999 of SEQ ID NO: 916562
cgcugaagcuguguagaga

SEQ ID NO: 1166393 - RNA, 19 nt, Artificial Sequence
  Description of Artificial Sequence: Synthetic oligonucleotide
  Antisense strand to SEQ ID NO: 1166392
ucucuacacagcuucagcg

SEQ ID NO: 1166394 - RNA, 19 nt, Artificial Sequence
  Description of Artificial Sequence: Synthetic oligonucleotide
  Sense strand starting at position 2000 of SEQ ID NO: 916562
gcugaagcuguguagagaa

SEQ ID NO: 1166395 - RNA, 19 nt, Artificial Sequence
  Description of Artificial Sequence: Synthetic oligonucleotide
  Antisense strand to SEQ ID NO: 1166394
uucucuacacagcuucagc

SEQ ID NO: 1166396 - RNA, 19 nt, Artificial Sequence
  Description of Artificial Sequence: Synthetic oligonucleotide
  Sense strand starting at position 2170 of SEQ ID NO: 916562
gaggauggguuugaaauuc

SEQ ID NO: 1166397 - RNA, 19 nt, Artificial Sequence
  Description of Artificial Sequence: Synthetic oligonucleotide
  Antisense strand to SEQ ID NO: 1166396
gaauuucaaacccauccuc

SEQ ID NO: 1166398 - RNA, 19 nt, Artificial Sequence
  Description of Artificial Sequence: Synthetic oligonucleotide
  Sense strand starting at position 2224 of SEQ ID NO: 916562
cagcuuacuggacagguaa

SEQ ID NO: 1166399 - RNA, 19 nt, Artificial Sequence
  Description of Artificial Sequence: Synthetic oligonucleotide
  Antisense strand to SEQ ID NO: 1166398
uuaccuguccaguaagcug

SEQ ID NO: 1166400 - RNA, 19 nt, Artificial Sequence
  Description of Artificial Sequence: Synthetic oligonucleotide
  Sense strand starting at position 2226 of SEQ ID NO: 916562
gcuuacuggacagguaaga

SEQ ID NO: 1166401 - RNA, 19 nt, Artificial Sequence
  Description of Artificial Sequence: Synthetic oligonucleotide
  Antisense strand to SEQ ID NO: 1166400
ucuuaccuguccaguaagc

SEQ ID NO: 1166402 - RNA, 19 nt, Artificial Sequence
  Description of Artificial Sequence: Synthetic oligonucleotide
  Sense strand starting at position 2273 of SEQ ID NO: 916562
cuagccacucuuuggaaau

SEQ ID NO: 1166403 - RNA, 19 nt, Artificial Sequence
  Description of Artificial Sequence: Synthetic oligonucleotide
  Antisense strand to SEQ ID NO: 1166402
auuuccaaagaguggcuag

SEQ ID NO: 1166404 - RNA, 19 nt, Artificial Sequence
  Description of Artificial Sequence: Synthetic oligonucleotide
  Sense strand starting at position 2285 of SEQ ID NO: 916562
uggaaaugauauugacuua

SEQ ID NO: 1166405 - RNA, 19 nt, Artificial Sequence
  Description of Artificial Sequence: Synthetic oligonucleotide
  Antisense strand to SEQ ID NO: 1166404
uaagucaauaucauuucca

SEQ ID NO: 1166406 - RNA, 19 nt, Artificial Sequence
  Description of Artificial Sequence: Synthetic oligonucleotide
  Sense strand starting at position 2292 of SEQ ID NO: 916562
gauauugacuuagcuguca

SEQ ID NO: 1166407 - RNA, 19 nt, Artificial Sequence
  Description of Artificial Sequence: Synthetic oligonucleotide
  Antisense strand to SEQ ID NO: 1166406
ugacagcuaagucaauauc

SEQ ID NO: 1166408 - RNA, 19 nt, Artificial Sequence
  Description of Artificial Sequence: Synthetic oligonucleotide
  Sense strand starting at position 2390 of SEQ ID NO: 916562
cuaguuagccgguaagauu

SEQ ID NO: 1166409 - RNA, 19 nt, Artificial Sequence
  Description of Artificial Sequence: Synthetic oligonucleotide
  Antisense strand to SEQ ID NO: 1166408
aaucuuaccggcuaacuag

SEQ ID NO: 1166410 - RNA, 19 nt, Artificial Sequence
  Description of Artificial Sequence: Synthetic oligonucleotide
  Sense strand starting at position 2397 of SEQ ID NO: 916562
gccgguaagauugauccaa

SEQ ID NO: 1166411 - RNA, 19 nt, Artificial Sequence
  Description of Artificial Sequence: Synthetic oligonucleotide
  Antisense strand to SEQ ID NO: 1166410
uuggaucaaucuuaccggc

SEQ ID NO: 1166412 - RNA, 19 nt, Artificial Sequence
  Description of Artificial Sequence: Synthetic oligonucleotide
  Sense strand starting at position 2439 of SEQ ID NO: 916562
aucacaaauguacgugaau

SEQ ID NO: 1166413 - RNA, 19 nt, Artificial Sequence
  Description of Artificial Sequence: Synthetic oligonucleotide
  Antisense strand to SEQ ID NO: 1166412
auucacguacauuugugau

SEQ ID NO: 1166414 - RNA, 19 nt, Artificial Sequence
  Description of Artificial Sequence: Synthetic oligonucleotide
  Sense strand starting at position 2440 of SEQ ID NO: 916562
ucacaaauguacgugaauu

SEQ ID NO: 1166415 - RNA, 19 nt, Artificial Sequence
  Description of Artificial Sequence: Synthetic oligonucleotide
  Antisense strand to SEQ ID NO: 1166414
aauucacguacauuuguga

SEQ ID NO: 1166416 - RNA, 19 nt, Artificial Sequence
  Description of Artificial Sequence: Synthetic oligonucleotide
  Sense strand starting at position 2800 of SEQ ID NO: 916562
aggaacuuauucuauugau

SEQ ID NO: 1166417 - RNA, 19 nt, Artificial Sequence
  Description of Artificial Sequence: Synthetic oligonucleotide
  Antisense strand to SEQ ID NO: 1166416
aucaauagaauaaguuccu

SEQ ID NO: 1166418 - RNA, 19 nt, Artificial Sequence
  Description of Artificial Sequence: Synthetic oligonucleotide
  Sense strand starting at position 2848 of SEQ ID NO: 916562
ggcacaaggucacucauua

SEQ ID NO: 1166419 - RNA, 19 nt, Artificial Sequence
  Description of Artificial Sequence: Synthetic oligonucleotide
  Antisense strand to SEQ ID NO: 1166418
uaaugagugaccuugugcc

SEQ ID NO: 1166420 - RNA, 19 nt, Artificial Sequence
  Description of Artificial Sequence: Synthetic oligonucleotide
  Sense strand starting at position 2861 of SEQ ID NO: 916562
ucauuacggcacugucaua

SEQ ID NO: 1166421 - RNA, 19 nt, Artificial Sequence
  Description of Artificial Sequence: Synthetic oligonucleotide
  Antisense strand to SEQ ID NO: 1166420
uaugacagugccguaauga

SEQ ID NO: 1166422 - RNA, 19 nt, Artificial Sequence
  Description of Artificial Sequence: Synthetic oligonucleotide
  Sense strand starting at position 2890 of SEQ ID NO: 916562
gacaguggcucauuaugaa

SEQ ID NO: 1166423 - RNA, 19 nt, Artificial Sequence
  Description of Artificial Sequence: Synthetic oligonucleotide
  Antisense strand to SEQ ID NO: 1166422
uucauaaugagccacuguc

SEQ ID NO: 1166424 - RNA, 19 nt, Artificial Sequence
  Description of Artificial Sequence: Synthetic oligonucleotide
  Sense strand starting at position 2897 of SEQ ID NO: 916562
gcucauuaugaaggacuga

SEQ ID NO: 1166425 - RNA, 19 nt, Artificial Sequence
  Description of Artificial Sequence: Synthetic oligonucleotide
  Antisense strand to SEQ ID NO: 1166424
ucaguccuucauaaugagc

SEQ ID NO: 1166426 - RNA, 19 nt, Artificial Sequence
  Description of Artificial Sequence: Synthetic oligonucleotide
  Sense strand starting at position 3098 of SEQ ID NO: 916562
uguguuugucaaugcauaa

SEQ ID NO: 1166427 - RNA, 19 nt, Artificial Sequence
  Description of Artificial Sequence: Synthetic oligonucleotide
  Antisense strand to SEQ ID NO: 1166426
uuaugcauugacaaacaca

SEQ ID NO: 1166428 - RNA, 19 nt, Artificial Sequence
  Description of Artificial Sequence: Synthetic oligonucleotide
  Sense strand starting at position 3378 of SEQ ID NO: 916562
gguauaugccauuaugcuc

SEQ ID NO: 1166429 - RNA, 19 nt, Artificial Sequence
  Description of Artificial Sequence: Synthetic oligonucleotide
  Antisense strand to SEQ ID NO: 1166428
gagcauaauggcauauacc

SEQ ID NO: 1166430 - RNA, 19 nt, Artificial Sequence
  Description of Artificial Sequence: Synthetic oligonucleotide
  Sense strand starting at position 3785 of SEQ ID NO: 916562
gaaucaugugaaugccuuu

SEQ ID NO: 1166431 - RNA, 19 nt, Artificial Sequence
  Description of Artificial Sequence: Synthetic oligonucleotide
  Antisense strand to SEQ ID NO: 1166430
aaaggcauucacaugauuc

SEQ ID NO: 1166432 - RNA, 19 nt, Artificial Sequence
  Description of Artificial Sequence: Synthetic oligonucleotide
  Sense strand starting at position 3792 of SEQ ID NO: 916562
gugaaugccuuucccagaa

SEQ ID NO: 1166433 - RNA, 19 nt, Artificial Sequence
  Description of Artificial Sequence: Synthetic oligonucleotide
  Antisense strand to SEQ ID NO: 1166432
uucugggaaaggcauucac

SEQ ID NO: 1166434 - RNA, 19 nt, Artificial Sequence
  Description of Artificial Sequence: Synthetic oligonucleotide
  Sense strand starting at position 3953 of SEQ ID NO: 916562
ugacacaguuuaggauuua

SEQ ID NO: 1166435 - RNA, 19 nt, Artificial Sequence
  Description of Artificial Sequence: Synthetic oligonucleotide
  Antisense strand to SEQ ID NO: 1166434
uaaauccuaaacuguguca

SEQ ID NO: 1166436 - RNA, 19 nt, Artificial Sequence
  Description of Artificial Sequence: Synthetic oligonucleotide
  Sense strand starting at position 274 of SEQ ID NO: 916563
gggugaugauaacgugaac

SEQ ID NO: 1166437 - RNA, 19 nt, Artificial Sequence
  Description of Artificial Sequence: Synthetic oligonucleotide
  Antisense strand to SEQ ID NO: 1166436
guucacguuaucaucaccc

SEQ ID NO: 1166438 - RNA, 19 nt, Artificial Sequence
  Description of Artificial Sequence: Synthetic oligonucleotide
  Sense strand starting at position 277 of SEQ ID NO: 916563
ugaugauaacgugaacgca

SEQ ID NO: 1166439 - RNA, 19 nt, Artificial Sequence
  Description of Artificial Sequence: Synthetic oligonucleotide
  Antisense strand to SEQ ID NO: 1166438
ugcguucacguuaucauca

SEQ ID NO: 1166440 - RNA, 19 nt, Artificial Sequence
  Description of Artificial Sequence: Synthetic oligonucleotide
  Sense strand starting at position 338 of SEQ ID NO: 916563
ucucuugcucuccagagga

SEQ ID NO: 1166441 - RNA, 19 nt, Artificial Sequence
  Description of Artificial Sequence: Synthetic oligonucleotide
  Antisense strand to SEQ ID NO: 1166440
uccucuggagagcaagaga

SEQ ID NO: 1166442 - RNA, 19 nt, Artificial Sequence
  Description of Artificial Sequence: Synthetic oligonucleotide
  Sense strand starting at position 801 of SEQ ID NO: 916563
ucuucuguuuccuugagca

SEQ ID NO: 1166443 - RNA, 19 nt, Artificial Sequence
  Description of Artificial Sequence: Synthetic oligonucleotide
  Antisense strand to SEQ ID NO: 1166442
ugcucaaggaaacagaaga

SEQ ID NO: 1166444 - RNA, 19 nt, Artificial Sequence
  Description of Artificial Sequence: Synthetic oligonucleotide
  Sense strand starting at position 803 of SEQ ID NO: 916563
uucuguuuccuugagcagu

SEQ ID NO: 1166445 - RNA, 19 nt, Artificial Sequence
  Description of Artificial Sequence: Synthetic oligonucleotide
  Antisense strand to SEQ ID NO: 1166444
acugcucaaggaaacagaa

SEQ ID NO: 1166446 - RNA, 19 nt, Artificial Sequence
  Description of Artificial Sequence: Synthetic oligonucleotide
  Sense strand starting at position 937 of SEQ ID NO: 916563
gaauguugucggcugccuu

SEQ ID NO: 1166447 - RNA, 19 nt, Artificial Sequence
  Description of Artificial Sequence: Synthetic oligonucleotide
  Antisense strand to SEQ ID NO: 1166446
aaggcagccgacaacauuc

SEQ ID NO: 1166448 - RNA, 19 nt, Artificial Sequence
  Description of Artificial Sequence: Synthetic oligonucleotide
  Sense strand starting at position 1022 of SEQ ID NO: 916563
uguaaagucucacacagac

SEQ ID NO: 1166449 - RNA, 19 nt, Artificial Sequence
  Description of Artificial Sequence: Synthetic oligonucleotide
  Antisense strand to SEQ ID NO: 1166448
gucugugugagacuuuaca

SEQ ID NO: 1166450 - RNA, 19 nt, Artificial Sequence
  Description of Artificial Sequence: Synthetic oligonucleotide
  Sense strand starting at position 1103 of SEQ ID NO: 916563
ggaccuugcaugcagacau

SEQ ID NO: 1166451 - RNA, 19 nt, Artificial Sequence
  Description of Artificial Sequence: Synthetic oligonucleotide
  Antisense strand to SEQ ID NO: 1166450
augucugcaugcaaggucc

SEQ ID NO: 1166452 - RNA, 19 nt, Artificial Sequence
  Description of Artificial Sequence: Synthetic oligonucleotide
  Sense strand starting at position 1239 of SEQ ID NO: 916563
ggguauuucugccaaaccu

SEQ ID NO: 1166453 - RNA, 19 nt, Artificial Sequence
  Description of Artificial Sequence: Synthetic oligonucleotide
  Antisense strand to SEQ ID NO: 1166452
agguuuggcagaaauaccc

SEQ ID NO: 1166454 - RNA, 19 nt, Artificial Sequence
  Description of Artificial Sequence: Synthetic oligonucleotide
  Sense strand starting at position 1249 of SEQ ID NO: 916563
gccaaaccuuaggaaagau

SEQ ID NO: 1166455 - RNA, 19 nt, Artificial Sequence
  Description of Artificial Sequence: Synthetic oligonucleotide
  Antisense strand to SEQ ID NO: 1166454
aucuuuccuaagguuuggc

SEQ ID NO: 1166456 - RNA, 19 nt, Artificial Sequence
  Description of Artificial Sequence: Synthetic oligonucleotide
  Sense strand starting at position 1611 of SEQ ID NO: 916563
accauuuccucagauguga

SEQ ID NO: 1166457 - RNA, 19 nt, Artificial Sequence
  Description of Artificial Sequence: Synthetic oligonucleotide
  Antisense strand to SEQ ID NO: 1166456
ucacaucugaggaaauggu

SEQ ID NO: 1166458 - RNA, 19 nt, Artificial Sequence
  Description of Artificial Sequence: Synthetic oligonucleotide
  Sense strand starting at position 1656 of SEQ ID NO: 916563
gagaaaguaucagaaccua

SEQ ID NO: 1166459 - RNA, 19 nt, Artificial Sequence
  Description of Artificial Sequence: Synthetic oligonucleotide
  Antisense strand to SEQ ID NO: 1166458
uagguucugauacuuucuc

SEQ ID NO: 1166460 - RNA, 19 nt, Artificial Sequence
  Description of Artificial Sequence: Synthetic oligonucleotide
  Sense strand starting at position 1814 of SEQ ID NO: 916563
gcagcagccugccuagaau

SEQ ID NO: 1166461 - RNA, 19 nt, Artificial Sequence
  Description of Artificial Sequence: Synthetic oligonucleotide
  Antisense strand to SEQ ID NO: 1166460
auucuaggcaggcugcugc

SEQ ID NO: 1166462 - RNA, 19 nt, Artificial Sequence
  Description of Artificial Sequence: Synthetic oligonucleotide
  Sense strand starting at position 2069 of SEQ ID NO: 916563
uccagagcucaagaagcau

SEQ ID NO: 1166463 - RNA, 19 nt, Artificial Sequence
  Description of Artificial Sequence: Synthetic oligonucleotide
  Antisense strand to SEQ ID NO: 1166462
augcuucuugagcucugga

SEQ ID NO: 1166464 - RNA, 19 nt, Artificial Sequence
  Description of Artificial Sequence: Synthetic oligonucleotide
  Sense strand starting at position 2078 of SEQ ID NO: 916563
caagaagcaucauuaguug

SEQ ID NO: 1166465 - RNA, 19 nt, Artificial Sequence
  Description of Artificial Sequence: Synthetic oligonucleotide
  Antisense strand to SEQ ID NO: 1166464
caacuaaugaugcuucuug

SEQ ID NO: 1166466 - RNA, 19 nt, Artificial Sequence
  Description of Artificial Sequence: Synthetic oligonucleotide
  Sense strand starting at position 2160 of SEQ ID NO: 916563
uggagagcuuguuuaucac

SEQ ID NO: 1166467 - RNA, 19 nt, Artificial Sequence
  Description of Artificial Sequence: Synthetic oligonucleotide
  Antisense strand to SEQ ID NO: 1166466
gugauaaacaagcucucca

SEQ ID NO: 1166468 - RNA, 19 nt, Artificial Sequence
  Description of Artificial Sequence: Synthetic oligonucleotide
  Sense strand starting at position 2279 of SEQ ID NO: 916563
gucagagucugugaggaug

SEQ ID NO: 1166469 - RNA, 19 nt, Artificial Sequence
  Description of Artificial Sequence: Synthetic oligonucleotide
  Antisense strand to SEQ ID NO: 1166468
cauccucacagacucugac

SEQ ID NO: 1166470 - RNA, 19 nt, Artificial Sequence
  Description of Artificial Sequence: Synthetic oligonucleotide
  Sense strand starting at position 2368 of SEQ ID NO: 916563
cuuggaggcuacucagauu

SEQ ID NO: 1166471 - RNA, 19 nt, Artificial Sequence
  Description of Artificial Sequence: Synthetic oligonucleotide
  Antisense strand to SEQ ID NO: 1166470
aaucugaguagccuccaag

SEQ ID NO: 1166472 - RNA, 19 nt, Artificial Sequence
  Description of Artificial Sequence: Synthetic oligonucleotide
  Sense strand starting at position 2382 of SEQ ID NO: 916563
agauuugccuguggauaga

SEQ ID NO: 1166473 - RNA, 19 nt, Artificial Sequence
  Description of Artificial Sequence: Synthetic oligonucleotide
  Antisense strand to SEQ ID NO: 1166472
ucuauccacaggcaaaucu

SEQ ID NO: 1166474 - RNA, 19 nt, Artificial Sequence
  Description of Artificial Sequence: Synthetic oligonucleotide
  Sense strand starting at position 2976 of SEQ ID NO: 916563
gaaugaguguggcuuccaa

SEQ ID NO: 1166475 - RNA, 19 nt, Artificial Sequence
  Description of Artificial Sequence: Synthetic oligonucleotide
  Antisense strand to SEQ ID NO: 1166474
uuggaagccacacucauuc

SEQ ID NO: 1166476 - RNA, 19 nt, Artificial Sequence
  Description of Artificial Sequence: Synthetic oligonucleotide
  Sense strand starting at position 2986 of SEQ ID NO: 916563
ggcuuccaaucuuugcaga

SEQ ID NO: 1166477 - RNA, 19 nt, Artificial Sequence
  Description of Artificial Sequence: Synthetic oligonucleotide
  Antisense strand to SEQ ID NO: 1166476
ucugcaaagauuggaagcc

SEQ ID NO: 1166478 - RNA, 19 nt, Artificial Sequence
  Description of Artificial Sequence: Synthetic oligonucleotide
  Sense strand starting at position 3144 of SEQ ID NO: 916563
agaauagaccucugcagag

SEQ ID NO: 1166479 - RNA, 19 nt, Artificial Sequence
  Description of Artificial Sequence: Synthetic oligonucleotide
  Antisense strand to SEQ ID NO: 1166478
cucugcagaggucuauucu

SEQ ID NO: 1166480 - RNA, 19 nt, Artificial Sequence
  Description of Artificial Sequence: Synthetic oligonucleotide
  Sense strand starting at position 3307 of SEQ ID NO: 916563
cauauagaguagccuagaa

SEQ ID NO: 1166481 - RNA, 19 nt, Artificial Sequence
  Description of Artificial Sequence: Synthetic oligonucleotide
  Antisense strand to SEQ ID NO: 1166480
uucuaggcuacucuauaug

SEQ ID NO: 1166482 - RNA, 19 nt, Artificial Sequence
  Description of Artificial Sequence: Synthetic oligonucleotide
  Sense strand starting at position 3309 of SEQ ID NO: 916563
uauagaguagccuagaauc

SEQ ID NO: 1166483 - RNA, 19 nt, Artificial Sequence
  Description of Artificial Sequence: Synthetic oligonucleotide
  Antisense strand to SEQ ID NO: 1166482
gauucuaggcuacucuaua

SEQ ID NO: 1166484 - RNA, 19 nt, Artificial Sequence
  Description of Artificial Sequence: Synthetic oligonucleotide
  Sense strand starting at position 3320 of SEQ ID NO: 916563
cuagaauccugucuuaaga

SEQ ID NO: 1166485 - RNA, 19 nt, Artificial Sequence
  Description of Artificial Sequence: Synthetic oligonucleotide
  Antisense strand to SEQ ID NO: 1166484
ucuuaagacaggauucuag

SEQ ID NO: 1166486 - RNA, 19 nt, Artificial Sequence
  Description of Artificial Sequence: Synthetic oligonucleotide
  Sense strand starting at position 3322 of SEQ ID NO: 916563
agaauccugucuuaagaaa

SEQ ID NO: 1166487 - RNA, 19 nt, Artificial Sequence
  Description of Artificial Sequence: Synthetic oligonucleotide
  Antisense strand to SEQ ID NO: 1166486
uuucuuaagacaggauucu

SEQ ID NO: 1166488 - RNA, 19 nt, Artificial Sequence
  Description of Artificial Sequence: Synthetic oligonucleotide
  Sense strand starting at position 3350 of SEQ ID NO: 916563
cacuaauccucagggagag

SEQ ID NO: 1166489 - RNA, 19 nt, Artificial Sequence
  Description of Artificial Sequence: Synthetic oligonucleotide
  Antisense strand to SEQ ID NO: 1166488
cucucccugaggauuagug

SEQ ID NO: 1166490 - RNA, 19 nt, Artificial Sequence
  Description of Artificial Sequence: Synthetic oligonucleotide
  Sense strand starting at position 3385 of SEQ ID NO: 916563
ggugcagguuccuucuaau

SEQ ID NO: 1166491 - RNA, 19 nt, Artificial Sequence
  Description of Artificial Sequence: Synthetic oligonucleotide
  Antisense strand to SEQ ID NO: 1166490
auuagaaggaaccugcacc

SEQ ID NO: 1166492 - RNA, 19 nt, Artificial Sequence
  Description of Artificial Sequence: Synthetic oligonucleotide
  Sense strand starting at position 3456 of SEQ ID NO: 916563
gaggaagagccaugacgua

SEQ ID NO: 1166493 - RNA, 19 nt, Artificial Sequence
  Description of Artificial Sequence: Synthetic oligonucleotide
  Antisense strand to SEQ ID NO: 1166492
uacgucauggcucuuccuc

SEQ ID NO: 1166494 - RNA, 19 nt, Artificial Sequence
  Description of Artificial Sequence: Synthetic oligonucleotide
  Sense strand starting at position 3569 of SEQ ID NO: 916563
uagggugugcauuacuuaa

SEQ ID NO: 1166495 - RNA, 19 nt, Artificial Sequence
  Description of Artificial Sequence: Synthetic oligonucleotide
  Antisense strand to SEQ ID NO: 1166494
uuaaguaaugcacacccua

SEQ ID NO: 1166496 - RNA, 19 nt, Artificial Sequence
  Description of Artificial Sequence: Synthetic oligonucleotide
  Sense strand starting at position 3571 of SEQ ID NO: 916563
gggugugcauuacuuaaca

SEQ ID NO: 1166497 - RNA, 19 nt, Artificial Sequence
  Description of Artificial Sequence: Synthetic oligonucleotide
  Antisense strand to SEQ ID NO: 1166496
uguuaaguaaugcacaccc

SEQ ID NO: 1166498 - RNA, 19 nt, Artificial Sequence
  Description of Artificial Sequence: Synthetic oligonucleotide
  Sense strand starting at position 3646 of SEQ ID NO: 916563
guuagcugugauugccuca

SEQ ID NO: 1166499 - RNA, 19 nt, Artificial Sequence
  Description of Artificial Sequence: Synthetic oligonucleotide
  Antisense strand to SEQ ID NO: 1166498
ugaggcaaucacagcuaac

SEQ ID NO: 1166500 - RNA, 19 nt, Artificial Sequence
  Description of Artificial Sequence: Synthetic oligonucleotide
  Sense strand starting at position 3649 of SEQ ID NO: 916563
agcugugauugccucaugu

SEQ ID NO: 1166501 - RNA, 19 nt, Artificial Sequence
  Description of Artificial Sequence: Synthetic oligonucleotide
  Antisense strand to SEQ ID NO: 1166500
acaugaggcaaucacagcu

SEQ ID NO: 1166502 - RNA, 19 nt, Artificial Sequence
  Description of Artificial Sequence: Synthetic oligonucleotide
  Sense strand starting at position 3694 of SEQ ID NO: 916563
cucagacagucuucggaca

SEQ ID NO: 1166503 - RNA, 19 nt, Artificial Sequence
  Description of Artificial Sequence: Synthetic oligonucleotide
  Antisense strand to SEQ ID NO: 1166502
uguccgaagacugucugag

SEQ ID NO: 1166504 - RNA, 19 nt, Artificial Sequence
  Description of Artificial Sequence: Synthetic oligonucleotide
  Sense strand starting at position 3695 of SEQ ID NO: 916563
ucagacagucuucggacau

SEQ ID NO: 1166505 - RNA, 19 nt, Artificial Sequence
  Description of Artificial Sequence: Synthetic oligonucleotide
  Antisense strand to SEQ ID NO: 1166504
auguccgaagacugucuga

SEQ ID NO: 1166506 - RNA, 19 nt, Artificial Sequence
  Description of Artificial Sequence: Synthetic oligonucleotide
  Sense strand starting at position 3696 of SEQ ID NO: 916563
cagacagucuucggacaua

SEQ ID NO: 1166507 - RNA, 19 nt, Artificial Sequence
  Description of Artificial Sequence: Synthetic oligonucleotide
  Antisense strand to SEQ ID NO: 1166506
uauguccgaagacugucug

SEQ ID NO: 1166508 - RNA, 19 nt, Artificial Sequence
  Description of Artificial Sequence: Synthetic oligonucleotide
  Sense strand starting at position 3763 of SEQ ID NO: 916563
gggucuuaguuugcuccau

SEQ ID NO: 1166509 - RNA, 19 nt, Artificial Sequence
  Description of Artificial Sequence: Synthetic oligonucleotide
  Antisense strand to SEQ ID NO: 1166508
auggagcaaacuaagaccc

SEQ ID NO: 1166510 - RNA, 19 nt, Artificial Sequence
  Description of Artificial Sequence: Synthetic oligonucleotide
  Sense strand starting at position 3764 of SEQ ID NO: 916563
ggucuuaguuugcuccauu

SEQ ID NO: 1166511 - RNA, 19 nt, Artificial Sequence
  Description of Artificial Sequence: Synthetic oligonucleotide
  Antisense strand to SEQ ID NO: 1166510
aauggagcaaacuaagacc

SEQ ID NO: 1166512 - RNA, 19 nt, Artificial Sequence
  Description of Artificial Sequence: Synthetic oligonucleotide
  Sense strand starting at position 3765 of SEQ ID NO: 916563
gucuuaguuugcuccauua

SEQ ID NO: 1166513 - RNA, 19 nt, Artificial Sequence
  Description of Artificial Sequence: Synthetic oligonucleotide
  Antisense strand to SEQ ID NO: 1166512
uaauggagcaaacuaagac

SEQ ID NO: 1166514 - RNA, 19 nt, Artificial Sequence
  Description of Artificial Sequence: Synthetic oligonucleotide
  Sense strand starting at position 3767 of SEQ ID NO: 916563
cuuaguuugcuccauuaag

SEQ ID NO: 1166515 - RNA, 19 nt, Artificial Sequence
  Description of Artificial Sequence: Synthetic oligonucleotide
  Antisense strand to SEQ ID NO: 1166514
cuuaauggagcaaacuaag

SEQ ID NO: 1166516 - RNA, 19 nt, Artificial Sequence
  Description of Artificial Sequence: Synthetic oligonucleotide
  Sense strand starting at position 96 of SEQ ID NO: 916564
aaggcuaggacauguuagu

SEQ ID NO: 1166517 - RNA, 19 nt, Artificial Sequence
  Description of Artificial Sequence: Synthetic oligonucleotide
  Antisense strand to SEQ ID NO: 1166516
acuaacauguccuagccuu

SEQ ID NO: 1166518 - RNA, 19 nt, Artificial Sequence
  Description of Artificial Sequence: Synthetic oligonucleotide
  Sense strand starting at position 109 of SEQ ID NO: 916564
guuaguagacauuguagaa

SEQ ID NO: 1166519 - RNA, 19 nt, Artificial Sequence
  Description of Artificial Sequence: Synthetic oligonucleotide
  Antisense strand to SEQ ID NO: 1166518
uucuacaaugucuacuaac

SEQ ID NO: 1166520 - RNA, 19 nt, Artificial Sequence
  Description of Artificial Sequence: Synthetic oligonucleotide
  Sense strand starting at position 206 of SEQ ID NO: 916564
uggauauuccauugcaauu

SEQ ID NO: 1166521 - RNA, 19 nt, Artificial Sequence
  Description of Artificial Sequence: Synthetic oligonucleotide
  Antisense strand to SEQ ID NO: 1166520
aauugcaauggaauaucca

SEQ ID NO: 1166522 - RNA, 19 nt, Artificial Sequence
  Description of Artificial Sequence: Synthetic oligonucleotide
  Sense strand starting at position 217 of SEQ ID NO: 916564
uugcaauuggcccaaucuu

SEQ ID NO: 1166523 - RNA, 19 nt, Artificial Sequence
  Description of Artificial Sequence: Synthetic oligonucleotide
  Antisense strand to SEQ ID NO: 1166522
aagauugggccaauugcaa

SEQ ID NO: 1166524 - RNA, 19 nt, Artificial Sequence
  Description of Artificial Sequence: Synthetic oligonucleotide
  Sense strand starting at position 305 of SEQ ID NO: 916564
gagguacguggugggaaau

SEQ ID NO: 1166525 - RNA, 19 nt, Artificial Sequence
  Description of Artificial Sequence: Synthetic oligonucleotide
  Antisense strand to SEQ ID NO: 1166524
auuucccaccacguaccuc

SEQ ID NO: 1166526 - RNA, 19 nt, Artificial Sequence
  Description of Artificial Sequence: Synthetic oligonucleotide
  Sense strand starting at position 317 of SEQ ID NO: 916564
gggaaauugcugcaaaucu

SEQ ID NO: 1166527 - RNA, 19 nt, Artificial Sequence
  Description of Artificial Sequence: Synthetic oligonucleotide
  Antisense strand to SEQ ID NO: 1166526
agauuugcagcaauuuccc

SEQ ID NO: 1166528 - RNA, 19 nt, Artificial Sequence
  Description of Artificial Sequence: Synthetic oligonucleotide
  Sense strand starting at position 325 of SEQ ID NO: 916564
gcugcaaaucuugaggaag

SEQ ID NO: 1166529 - RNA, 19 nt, Artificial Sequence
  Description of Artificial Sequence: Synthetic oligonucleotide
  Antisense strand to SEQ ID NO: 1166528
cuuccucaagauuugcagc

SEQ ID NO: 1166530 - RNA, 19 nt, Artificial Sequence
  Description of Artificial Sequence: Synthetic oligonucleotide
  Sense strand starting at position 402 of SEQ ID NO: 916564
gcaucaguauuuguugcaa

SEQ ID NO: 1166531 - RNA, 19 nt, Artificial Sequence
  Description of Artificial Sequence: Synthetic oligonucleotide
  Antisense strand to SEQ ID NO: 1166530
uugcaacaaauacugaugc

SEQ ID NO: 1166532 - RNA, 19 nt, Artificial Sequence
  Description of Artificial Sequence: Synthetic oligonucleotide
  Sense strand starting at position 414 of SEQ ID NO: 916564
guugcaacauccucagaaa

SEQ ID NO: 1166533 - RNA, 19 nt, Artificial Sequence
  Description of Artificial Sequence: Synthetic oligonucleotide
  Antisense strand to SEQ ID NO: 1166532
uuucugaggauguugcaac

SEQ ID NO: 1166534 - RNA, 19 nt, Artificial Sequence
  Description of Artificial Sequence: Synthetic oligonucleotide
  Sense strand starting at position 547 of SEQ ID NO: 916564
aaugguagcucccugaaca

SEQ ID NO: 1166535 - RNA, 19 nt, Artificial Sequence
  Description of Artificial Sequence: Synthetic oligonucleotide
  Antisense strand to SEQ ID NO: 1166534
uguucagggagcuaccauu

SEQ ID NO: 1166536 - RNA, 19 nt, Artificial Sequence
  Description of Artificial Sequence: Synthetic oligonucleotide
  Sense strand starting at position 657 of SEQ ID NO: 916564
acuuuacugaggugugacu

SEQ ID NO: 1166537 - RNA, 19 nt, Artificial Sequence
  Description of Artificial Sequence: Synthetic oligonucleotide
  Antisense strand to SEQ ID NO: 1166536
agucacaccucaguaaagu

SEQ ID NO: 1166538 - RNA, 19 nt, Artificial Sequence
  Description of Artificial Sequence: Synthetic oligonucleotide
  Sense strand starting at position 664 of SEQ ID NO: 916564
ugaggugugacugacauau

SEQ ID NO: 1166539 - RNA, 19 nt, Artificial Sequence
  Description of Artificial Sequence: Synthetic oligonucleotide
  Antisense strand to SEQ ID NO: 1166538
auaugucagucacaccuca

SEQ ID NO: 1166540 - RNA, 19 nt, Artificial Sequence
  Description of Artificial Sequence: Synthetic oligonucleotide
  Sense strand starting at position 851 of SEQ ID NO: 916564
gucaauacuccugaaguga

SEQ ID NO: 1166541 - RNA, 19 nt, Artificial Sequence
  Description of Artificial Sequence: Synthetic oligonucleotide
  Antisense strand to SEQ ID NO: 1166540
ucacuucaggaguauugac

SEQ ID NO: 1166542 - RNA, 19 nt, Artificial Sequence
  Description of Artificial Sequence: Synthetic oligonucleotide
  Sense strand starting at position 921 of SEQ ID NO: 916564
aggugugaguuucuuagag

SEQ ID NO: 1166543 - RNA, 19 nt, Artificial Sequence
  Description of Artificial Sequence: Synthetic oligonucleotide
  Antisense strand to SEQ ID NO: 1166542
cucuaagaaacucacaccu

SEQ ID NO: 1166544 - RNA, 19 nt, Artificial Sequence
  Description of Artificial Sequence: Synthetic oligonucleotide
  Sense strand starting at position 1062 of SEQ ID NO: 916564
agagguaucuuaucuauaa

SEQ ID NO: 1166545 - RNA, 19 nt, Artificial Sequence
  Description of Artificial Sequence: Synthetic oligonucleotide
  Antisense strand to SEQ ID NO: 1166544
uuauagauaagauaccucu

SEQ ID NO: 1166546 - RNA, 19 nt, Artificial Sequence
  Description of Artificial Sequence: Synthetic oligonucleotide
  Sense strand starting at position 1311 of SEQ ID NO: 916564
gucaucugacauuagcaau

SEQ ID NO: 1166547 - RNA, 19 nt, Artificial Sequence
  Description of Artificial Sequence: Synthetic oligonucleotide
  Antisense strand to SEQ ID NO: 1166546
auugcuaaugucagaugac

SEQ ID NO: 1166548 - RNA, 19 nt, Artificial Sequence
  Description of Artificial Sequence: Synthetic oligonucleotide
  Sense strand starting at position 1384 of SEQ ID NO: 916564
aagucaaauuguuuaugga

SEQ ID NO: 1166549 - RNA, 19 nt, Artificial Sequence
  Description of Artificial Sequence: Synthetic oligonucleotide
  Antisense strand to SEQ ID NO: 1166548
uccauaaacaauuugacuu

SEQ ID NO: 1166550 - RNA, 19 nt, Artificial Sequence
  Description of Artificial Sequence: Synthetic oligonucleotide
  Sense strand starting at position 1426 of SEQ ID NO: 916564
augcacuaucuccagugau

SEQ ID NO: 1166551 - RNA, 19 nt, Artificial Sequence
  Description of Artificial Sequence: Synthetic oligonucleotide
  Antisense strand to SEQ ID NO: 1166550
aucacuggagauagugcau

SEQ ID NO: 1166552 - RNA, 19 nt, Artificial Sequence
  Description of Artificial Sequence: Synthetic oligonucleotide
  Sense strand starting at position 1451 of SEQ ID NO: 916564
aggugaccacaauguuaaa

SEQ ID NO: 1166553 - RNA, 19 nt, Artificial Sequence
  Description of Artificial Sequence: Synthetic oligonucleotide
  Antisense strand to SEQ ID NO: 1166552
uuuaacauuguggucaccu

SEQ ID NO: 1166554 - RNA, 19 nt, Artificial Sequence
  Description of Artificial Sequence: Synthetic oligonucleotide
  Sense strand starting at position 1668 of SEQ ID NO: 916564
guugcugugagauacacaa

SEQ ID NO: 1166555 - RNA, 19 nt, Artificial Sequence
  Description of Artificial Sequence: Synthetic oligonucleotide
  Antisense strand to SEQ ID NO: 1166554
uuguguaucucacagcaac

SEQ ID NO: 1166556 - RNA, 19 nt, Artificial Sequence
  Description of Artificial Sequence: Synthetic oligonucleotide
  Sense strand starting at position 2010 of SEQ ID NO: 916564
uugggagagccucgagauu

SEQ ID NO: 1166557 - RNA, 19 nt, Artificial Sequence
  Description of Artificial Sequence: Synthetic oligonucleotide
  Antisense strand to SEQ ID NO: 1166556
aaucucgaggcucucccaa

SEQ ID NO: 1166558 - RNA, 19 nt, Artificial Sequence
  Description of Artificial Sequence: Synthetic oligonucleotide
  Sense strand starting at position 2139 of SEQ ID NO: 916564
acccguauuucuguacaca

SEQ ID NO: 1166559 - RNA, 19 nt, Artificial Sequence
  Description of Artificial Sequence: Synthetic oligonucleotide
  Antisense strand to SEQ ID NO: 1166558
uguguacagaaauacgggu

SEQ ID NO: 1166560 - RNA, 19 nt, Artificial Sequence
  Description of Artificial Sequence: Synthetic oligonucleotide
  Sense strand starting at position 2359 of SEQ ID NO: 916564
cuacuuugggccuaucaua

SEQ ID NO: 1166561 - RNA, 19 nt, Artificial Sequence
  Description of Artificial Sequence: Synthetic oligonucleotide
  Antisense strand to SEQ ID NO: 1166560
uaugauaggcccaaaguag

SEQ ID NO: 1166562 - RNA, 19 nt, Artificial Sequence
  Description of Artificial Sequence: Synthetic oligonucleotide
  Sense strand starting at position 2378 of SEQ ID NO: 916564
gcuuccuuucuggaugaca

SEQ ID NO: 1166563 - RNA, 19 nt, Artificial Sequence
  Description of Artificial Sequence: Synthetic oligonucleotide
  Antisense strand to SEQ ID NO: 1166562
ugucauccagaaaggaagc

SEQ ID NO: 1166564 - RNA, 19 nt, Artificial Sequence
  Description of Artificial Sequence: Synthetic oligonucleotide
  Sense strand starting at position 2380 of SEQ ID NO: 916564
uuccuuucuggaugacauu

SEQ ID NO: 1166565 - RNA, 19 nt, Artificial Sequence
  Description of Artificial Sequence: Synthetic oligonucleotide
  Antisense strand to SEQ ID NO: 1166564
aaugucauccagaaaggaa

SEQ ID NO: 1166566 - RNA, 19 nt, Artificial Sequence
  Description of Artificial Sequence: Synthetic oligonucleotide
  Sense strand starting at position 2474 of SEQ ID NO: 916564
ugguuagaugcccacucuu

SEQ ID NO: 1166567 - RNA, 19 nt, Artificial Sequence
  Description of Artificial Sequence: Synthetic oligonucleotide
  Antisense strand to SEQ ID NO: 1166566
aagagugggcaucuaacca

SEQ ID NO: 1166568 - RNA, 19 nt, Artificial Sequence
  Description of Artificial Sequence: Synthetic oligonucleotide
  Sense strand starting at position 2575 of SEQ ID NO: 916564
augggcuguggugagaauu

SEQ ID NO: 1166569 - RNA, 19 nt, Artificial Sequence
  Description of Artificial Sequence: Synthetic oligonucleotide
  Antisense strand to SEQ ID NO: 1166568
aauucucaccacagcccau

SEQ ID NO: 1166570 - RNA, 19 nt, Artificial Sequence
  Description of Artificial Sequence: Synthetic oligonucleotide
  Sense strand starting at position 2585 of SEQ ID NO: 916564
gugagaauuacaugaguag

SEQ ID NO: 1166571 - RNA, 19 nt, Artificial Sequence
  Description of Artificial Sequence: Synthetic oligonucleotide
  Antisense strand to SEQ ID NO: 1166570
cuacucauguaauucucac

SEQ ID NO: 1166572 - RNA, 19 nt, Artificial Sequence
  Description of Artificial Sequence: Synthetic oligonucleotide
  Sense strand starting at position 2588 of SEQ ID NO: 916564
agaauuacaugaguaguga

SEQ ID NO: 1166573 - RNA, 19 nt, Artificial Sequence
  Description of Artificial Sequence: Synthetic oligonucleotide
  Antisense strand to SEQ ID NO: 1166572
ucacuacucauguaauucu

SEQ ID NO: 1166574 - RNA, 19 nt, Artificial Sequence
  Description of Artificial Sequence: Synthetic oligonucleotide
  Sense strand starting at position 2699 of SEQ ID NO: 916564
ugauuaucagccuacuaug

SEQ ID NO: 1166575 - RNA, 19 nt, Artificial Sequence
  Description of Artificial Sequence: Synthetic oligonucleotide
  Antisense strand to SEQ ID NO: 1166574
cauaguaggcugauaauca

SEQ ID NO: 1166576 - RNA, 19 nt, Artificial Sequence
  Description of Artificial Sequence: Synthetic oligonucleotide
  Sense strand starting at position 2835 of SEQ ID NO: 916564
cccuaaugucucuaggauu

SEQ ID NO: 1166577 - RNA, 19 nt, Artificial Sequence
  Description of Artificial Sequence: Synthetic oligonucleotide
  Antisense strand to SEQ ID NO: 1166576
aauccuagagacauuaggg

SEQ ID NO: 1166578 - RNA, 19 nt, Artificial Sequence
  Description of Artificial Sequence: Synthetic oligonucleotide
  Sense strand starting at position 2994 of SEQ ID NO: 916564
gaagcagaguucucccuga

SEQ ID NO: 1166579 - RNA, 19 nt, Artificial Sequence
  Description of Artificial Sequence: Synthetic oligonucleotide
  Antisense strand to SEQ ID NO: 1166578
ucagggagaacucugcuuc

SEQ ID NO: 1166580 - RNA, 19 nt, Artificial Sequence
  Description of Artificial Sequence: Synthetic oligonucleotide
  Sense strand starting at position 2999 of SEQ ID NO: 916564
agaguucucccugaagcca

SEQ ID NO: 1166581 - RNA, 19 nt, Artificial Sequence
  Description of Artificial Sequence: Synthetic oligonucleotide
  Antisense strand to SEQ ID NO: 1166580
uggcuucagggagaacucu

SEQ ID NO: 1166582 - RNA, 19 nt, Artificial Sequence
  Description of Artificial Sequence: Synthetic oligonucleotide
  Sense strand starting at position 3239 of SEQ ID NO: 916564
uaacgcaaucaaugaguga

SEQ ID NO: 1166583 - RNA, 19 nt, Artificial Sequence
  Description of Artificial Sequence: Synthetic oligonucleotide
  Antisense strand to SEQ ID NO: 1166582
ucacucauugauugcguua

SEQ ID NO: 1166584 - RNA, 19 nt, Artificial Sequence
  Description of Artificial Sequence: Synthetic oligonucleotide
  Sense strand starting at position 3246 of SEQ ID NO: 916564
aucaaugagugagcugaga

SEQ ID NO: 1166585 - RNA, 19 nt, Artificial Sequence
  Description of Artificial Sequence: Synthetic oligonucleotide
  Antisense strand to SEQ ID NO: 1166584
ucucagcucacucauugau

SEQ ID NO: 1166586 - RNA, 19 nt, Artificial Sequence
  Description of Artificial Sequence: Synthetic oligonucleotide
  Sense strand starting at position 3577 of SEQ ID NO: 916564
ugaagagaguuugcacuga

SEQ ID NO: 1166587 - RNA, 19 nt, Artificial Sequence
  Description of Artificial Sequence: Synthetic oligonucleotide
  Antisense strand to SEQ ID NO: 1166586
ucagugcaaacucucuuca

SEQ ID NO: 1166588 - RNA, 19 nt, Artificial Sequence
  Description of Artificial Sequence: Synthetic oligonucleotide
  Sense strand starting at position 3581 of SEQ ID NO: 916564
gagaguuugcacugacacu

SEQ ID NO: 1166589 - RNA, 19 nt, Artificial Sequence
  Description of Artificial Sequence: Synthetic oligonucleotide
  Antisense strand to SEQ ID NO: 1166588
agugucagugcaaacucuc

SEQ ID NO: 1166590 - RNA, 19 nt, Artificial Sequence
  Description of Artificial Sequence: Synthetic oligonucleotide
  Sense strand starting at position 3628 of SEQ ID NO: 916564
gagggacuccugugugacu

SEQ ID NO: 1166591 - RNA, 19 nt, Artificial Sequence
  Description of Artificial Sequence: Synthetic oligonucleotide
  Antisense strand to SEQ ID NO: 1166590
agucacacaggagucccuc

SEQ ID NO: 1166592 - RNA, 19 nt, Artificial Sequence
  Description of Artificial Sequence: Synthetic oligonucleotide
  Sense strand starting at position 3667 of SEQ ID NO: 916564
uuucuucuuggaugauaag

SEQ ID NO: 1166593 - RNA, 19 nt, Artificial Sequence
  Description of Artificial Sequence: Synthetic oligonucleotide
  Antisense strand to SEQ ID NO: 1166592
cuuaucauccaagaagaaa

SEQ ID NO: 1166594 - RNA, 19 nt, Artificial Sequence
  Description of Artificial Sequence: Synthetic oligonucleotide
  Sense strand starting at position 3906 of SEQ ID NO: 916564
ugaauuaaucuaugcaaag

SEQ ID NO: 1166595 - RNA, 19 nt, Artificial Sequence
  Description of Artificial Sequence: Synthetic oligonucleotide
  Antisense strand to SEQ ID NO: 1166594
cuuugcauagauuaauuca

SEQ ID NO: 1166596 - RNA, 19 nt, Artificial Sequence
  Description of Artificial Sequence: Synthetic oligonucleotide
  Sense strand starting at position 78 of SEQ ID NO: 916565
ggaaaucagguuugcauaa

SEQ ID NO: 1166597 - RNA, 19 nt, Artificial Sequence
  Description of Artificial Sequence: Synthetic oligonucleotide
  Antisense strand to SEQ ID NO: 1166596
uuaugcaaaccugauuucc

SEQ ID NO: 1166598 - RNA, 19 nt, Artificial Sequence
  Description of Artificial Sequence: Synthetic oligonucleotide
  Sense strand starting at position 79 of SEQ ID NO: 916565
gaaaucagguuugcauaaa

SEQ ID NO: 1166599 - RNA, 19 nt, Artificial Sequence
  Description of Artificial Sequence: Synthetic oligonucleotide
  Antisense strand to SEQ ID NO: 1166598
uuuaugcaaaccugauuuc

SEQ ID NO: 1166600 - RNA, 19 nt, Artificial Sequence
  Description of Artificial Sequence: Synthetic oligonucleotide
  Sense strand starting at position 115 of SEQ ID NO: 916565
auaaucucacagugaguuu

SEQ ID NO: 1166601 - RNA, 19 nt, Artificial Sequence
  Description of Artificial Sequence: Synthetic oligonucleotide
  Antisense strand to SEQ ID NO: 1166600
aaacucacugugagauuau

SEQ ID NO: 1166602 - RNA, 19 nt, Artificial Sequence
  Description of Artificial Sequence: Synthetic oligonucleotide
  Sense strand starting at position 303 of SEQ ID NO: 916565
agggcuuuacugcaaaguu

SEQ ID NO: 1166603 - RNA, 19 nt, Artificial Sequence
  Description of Artificial Sequence: Synthetic oligonucleotide
  Antisense strand to SEQ ID NO: 1166602
aacuuugcaguaaagcccu

SEQ ID NO: 1166604 - RNA, 19 nt, Artificial Sequence
  Description of Artificial Sequence: Synthetic oligonucleotide
  Sense strand starting at position 386 of SEQ ID NO: 916565
accuacuucuggucaccua

SEQ ID NO: 1166605 - RNA, 19 nt, Artificial Sequence
  Description of Artificial Sequence: Synthetic oligonucleotide
  Antisense strand to SEQ ID NO: 1166604
uaggugaccagaaguaggu

SEQ ID NO: 1166606 - RNA, 19 nt, Artificial Sequence
  Description of Artificial Sequence: Synthetic oligonucleotide
  Sense strand starting at position 568 of SEQ ID NO: 916565
gcccucugagcagacaaau

SEQ ID NO: 1166607 - RNA, 19 nt, Artificial Sequence
  Description of Artificial Sequence: Synthetic oligonucleotide
  Antisense strand to SEQ ID NO: 1166606
auuugucugcucagagggc

SEQ ID NO: 1166608 - RNA, 19 nt, Artificial Sequence
  Description of Artificial Sequence: Synthetic oligonucleotide
  Sense strand starting at position 600 of SEQ ID NO: 916565
acccacaacuuguuaggua

SEQ ID NO: 1166609 - RNA, 19 nt, Artificial Sequence
  Description of Artificial Sequence: Synthetic oligonucleotide
  Antisense strand to SEQ ID NO: 1166608
uaccuaacaaguugugggu

SEQ ID NO: 1166610 - RNA, 19 nt, Artificial Sequence
  Description of Artificial Sequence: Synthetic oligonucleotide
  Sense strand starting at position 607 of SEQ ID NO: 916565
acuuguuagguauaugaac

SEQ ID NO: 1166611 - RNA, 19 nt, Artificial Sequence
  Description of Artificial Sequence: Synthetic oligonucleotide
  Antisense strand to SEQ ID NO: 1166610
guucauauaccuaacaagu

SEQ ID NO: 1166612 - RNA, 19 nt, Artificial Sequence
  Description of Artificial Sequence: Synthetic oligonucleotide
  Sense strand starting at position 637 of SEQ ID NO: 916565
auggaacuucuuuaagcuu

SEQ ID NO: 1166613 - RNA, 19 nt, Artificial Sequence
  Description of Artificial Sequence: Synthetic oligonucleotide
  Antisense strand to SEQ ID NO: 1166612
aagcuuaaagaaguuccau

SEQ ID NO: 1166614 - RNA, 19 nt, Artificial Sequence
  Description of Artificial Sequence: Synthetic oligonucleotide
  Sense strand starting at position 894 of SEQ ID NO: 916565
guugguuaaauugaaguaa

SEQ ID NO: 1166615 - RNA, 19 nt, Artificial Sequence
  Description of Artificial Sequence: Synthetic oligonucleotide
  Antisense strand to SEQ ID NO: 1166614
uuacuucaauuuaaccaac

SEQ ID NO: 1166616 - RNA, 19 nt, Artificial Sequence
  Description of Artificial Sequence: Synthetic oligonucleotide
  Sense strand starting at position 1202 of SEQ ID NO: 916565
cucugugcuuaucugauuu

SEQ ID NO: 1166617 - RNA, 19 nt, Artificial Sequence
  Description of Artificial Sequence: Synthetic oligonucleotide
  Antisense strand to SEQ ID NO: 1166616
aaaucagauaagcacagag

SEQ ID NO: 1166618 - RNA, 19 nt, Artificial Sequence
  Description of Artificial Sequence: Synthetic oligonucleotide
  Sense strand starting at position 1237 of SEQ ID NO: 916565
agaaaccugcugugaaacu

SEQ ID NO: 1166619 - RNA, 19 nt, Artificial Sequence
  Description of Artificial Sequence: Synthetic oligonucleotide
  Antisense strand to SEQ ID NO: 1166618
aguuucacagcagguuucu

SEQ ID NO: 1166620 - RNA, 19 nt, Artificial Sequence
  Description of Artificial Sequence: Synthetic oligonucleotide
  Sense strand starting at position 1395 of SEQ ID NO: 916565
gucuuuacuccuugaggga

SEQ ID NO: 1166621 - RNA, 19 nt, Artificial Sequence
  Description of Artificial Sequence: Synthetic oligonucleotide
  Antisense strand to SEQ ID NO: 1166620
ucccucaaggaguaaagac

SEQ ID NO: 1166622 - RNA, 19 nt, Artificial Sequence
  Description of Artificial Sequence: Synthetic oligonucleotide
  Sense strand starting at position 1451 of SEQ ID NO: 916565
uuuaaugcuggucacgaga

SEQ ID NO: 1166623 - RNA, 19 nt, Artificial Sequence
  Description of Artificial Sequence: Synthetic oligonucleotide
  Antisense strand to SEQ ID NO: 1166622
ucucgugaccagcauuaaa

SEQ ID NO: 1166624 - RNA, 19 nt, Artificial Sequence
  Description of Artificial Sequence: Synthetic oligonucleotide
  Sense strand starting at position 1496 of SEQ ID NO: 916565
ggaacugagacuugccauu

SEQ ID NO: 1166625 - RNA, 19 nt, Artificial Sequence
  Description of Artificial Sequence: Synthetic oligonucleotide
  Antisense strand to SEQ ID NO: 1166624
aauggcaagucucaguucc

SEQ ID NO: 1166626 - RNA, 19 nt, Artificial Sequence
  Description of Artificial Sequence: Synthetic oligonucleotide
  Sense strand starting at position 1515 of SEQ ID NO: 916565
uuaggagcacugcauuaaa

SEQ ID NO: 1166627 - RNA, 19 nt, Artificial Sequence
  Description of Artificial Sequence: Synthetic oligonucleotide
  Antisense strand to SEQ ID NO: 1166626
uuuaaugcagugcuccuaa

SEQ ID NO: 1166628 - RNA, 19 nt, Artificial Sequence
  Description of Artificial Sequence: Synthetic oligonucleotide
  Sense strand starting at position 1518 of SEQ ID NO: 916565
ggagcacugcauuaaauaa

SEQ ID NO: 1166629 - RNA, 19 nt, Artificial Sequence
  Description of Artificial Sequence: Synthetic oligonucleotide
  Antisense strand to SEQ ID NO: 1166628
uuauuuaaugcagugcucc

SEQ ID NO: 1166630 - RNA, 19 nt, Artificial Sequence
  Description of Artificial Sequence: Synthetic oligonucleotide
  Sense strand starting at position 1588 of SEQ ID NO: 916565
ucuaauguuugguuuggaa

SEQ ID NO: 1166631 - RNA, 19 nt, Artificial Sequence
  Description of Artificial Sequence: Synthetic oligonucleotide
  Antisense strand to SEQ ID NO: 1166630
uuccaaaccaaacauuaga

SEQ ID NO: 1166632 - RNA, 19 nt, Artificial Sequence
  Description of Artificial Sequence: Synthetic oligonucleotide
  Sense strand starting at position 1595 of SEQ ID NO: 916565
uuugguuuggaagaauagu

SEQ ID NO: 1166633 - RNA, 19 nt, Artificial Sequence
  Description of Artificial Sequence: Synthetic oligonucleotide
  Antisense strand to SEQ ID NO: 1166632
acuauucuuccaaaccaaa

SEQ ID NO: 1166634 - RNA, 19 nt, Artificial Sequence
  Description of Artificial Sequence: Synthetic oligonucleotide
  Sense strand starting at position 1604 of SEQ ID NO: 916565
gaagaauagugauaauuug

SEQ ID NO: 1166635 - RNA, 19 nt, Artificial Sequence
  Description of Artificial Sequence: Synthetic oligonucleotide
  Antisense strand to SEQ ID NO: 1166634
caaauuaucacuauucuuc

SEQ ID NO: 1166636 - RNA, 19 nt, Artificial Sequence
  Description of Artificial Sequence: Synthetic oligonucleotide
  Sense strand starting at position 1612 of SEQ ID NO: 916565
gugauaauuugacauaaga

SEQ ID NO: 1166637 - RNA, 19 nt, Artificial Sequence
  Description of Artificial Sequence: Synthetic oligonucleotide
  Antisense strand to SEQ ID NO: 1166636
ucuuaugucaaauuaucac

SEQ ID NO: 1166638 - RNA, 19 nt, Artificial Sequence
  Description of Artificial Sequence: Synthetic oligonucleotide
  Sense strand starting at position 1753 of SEQ ID NO: 916565
agccacuaucuuugacaga

SEQ ID NO: 1166639 - RNA, 19 nt, Artificial Sequence
  Description of Artificial Sequence: Synthetic oligonucleotide
  Antisense strand to SEQ ID NO: 1166638
ucugucaaagauaguggcu

SEQ ID NO: 1166640 - RNA, 19 nt, Artificial Sequence
  Description of Artificial Sequence: Synthetic oligonucleotide
  Sense strand starting at position 2104 of SEQ ID NO: 916565
ugccaaauugccuaguaag

SEQ ID NO: 1166641 - RNA, 19 nt, Artificial Sequence
  Description of Artificial Sequence: Synthetic oligonucleotide
  Antisense strand to SEQ ID NO: 1166640
cuuacuaggcaauuuggca

SEQ ID NO: 1166642 - RNA, 19 nt, Artificial Sequence
  Description of Artificial Sequence: Synthetic oligonucleotide
  Sense strand starting at position 2125 of SEQ ID NO: 916565
ggaaaccagucucuuagau

SEQ ID NO: 1166643 - RNA, 19 nt, Artificial Sequence
  Description of Artificial Sequence: Synthetic oligonucleotide
  Antisense strand to SEQ ID NO: 1166642
aucuaagagacugguuucc

SEQ ID NO: 1166644 - RNA, 19 nt, Artificial Sequence
  Description of Artificial Sequence: Synthetic oligonucleotide
  Sense strand starting at position 2296 of SEQ ID NO: 916565
auggaaugguaugauuuaa

SEQ ID NO: 1166645 - RNA, 19 nt, Artificial Sequence
  Description of Artificial Sequence: Synthetic oligonucleotide
  Antisense strand to SEQ ID NO: 1166644
uuaaaucauaccauuccau

SEQ ID NO: 1166646 - RNA, 19 nt, Artificial Sequence
  Description of Artificial Sequence: Synthetic oligonucleotide
  Sense strand starting at position 2415 of SEQ ID NO: 916565
acggauccuguaggagaua

SEQ ID NO: 1166647 - RNA, 19 nt, Artificial Sequence
  Description of Artificial Sequence: Synthetic oligonucleotide
  Antisense strand to SEQ ID NO: 1166646
uaucuccuacaggauccgu

SEQ ID NO: 1166648 - RNA, 19 nt, Artificial Sequence
  Description of Artificial Sequence: Synthetic oligonucleotide
  Sense strand starting at position 2715 of SEQ ID NO: 916565
guaagaugaggauguauau

SEQ ID NO: 1166649 - RNA, 19 nt, Artificial Sequence
  Description of Artificial Sequence: Synthetic oligonucleotide
  Antisense strand to SEQ ID NO: 1166648
auauacauccucaucuuac

SEQ ID NO: 1166650 - RNA, 19 nt, Artificial Sequence
  Description of Artificial Sequence: Synthetic oligonucleotide
  Sense strand starting at position 2724 of SEQ ID NO: 916565
ggauguauauauguugaag

SEQ ID NO: 1166651 - RNA, 19 nt, Artificial Sequence
  Description of Artificial Sequence: Synthetic oligonucleotide
  Antisense strand to SEQ ID NO: 1166650
cuucaacauauauacaucc

SEQ ID NO: 1166652 - RNA, 19 nt, Artificial Sequence
  Description of Artificial Sequence: Synthetic oligonucleotide
  Sense strand starting at position 2765 of SEQ ID NO: 916565
augugaccuuaauuguuga

SEQ ID NO: 1166653 - RNA, 19 nt, Artificial Sequence
  Description of Artificial Sequence: Synthetic oligonucleotide
  Antisense strand to SEQ ID NO: 1166652
ucaacaauuaaggucacau

SEQ ID NO: 1166654 - RNA, 19 nt, Artificial Sequence
  Description of Artificial Sequence: Synthetic oligonucleotide
  Sense strand starting at position 2778 of SEQ ID NO: 916565
uguugauagggucauuaca

SEQ ID NO: 1166655 - RNA, 19 nt, Artificial Sequence
  Description of Artificial Sequence: Synthetic oligonucleotide
  Antisense strand to SEQ ID NO: 1166654
uguaaugacccuaucaaca

SEQ ID NO: 1166656 - RNA, 19 nt, Artificial Sequence
  Description of Artificial Sequence: Synthetic oligonucleotide
  Sense strand starting at position 2780 of SEQ ID NO: 916565
uugauagggucauuacaga

SEQ ID NO: 1166657 - RNA, 19 nt, Artificial Sequence
  Description of Artificial Sequence: Synthetic oligonucleotide
  Antisense strand to SEQ ID NO: 1166656
ucuguaaugacccuaucaa

SEQ ID NO: 1166658 - RNA, 19 nt, Artificial Sequence
  Description of Artificial Sequence: Synthetic oligonucleotide
  Sense strand starting at position 2852 of SEQ ID NO: 916565
gaaauuugguuacagagac

SEQ ID NO: 1166659 - RNA, 19 nt, Artificial Sequence
  Description of Artificial Sequence: Synthetic oligonucleotide
  Antisense strand to SEQ ID NO: 1166658
gucucuguaaccaaauuuc

SEQ ID NO: 1166660 - RNA, 19 nt, Artificial Sequence
  Description of Artificial Sequence: Synthetic oligonucleotide
  Sense strand starting at position 3168 of SEQ ID NO: 916565
ccuuuauuuccuugguugu

SEQ ID NO: 1166661 - RNA, 19 nt, Artificial Sequence
  Description of Artificial Sequence: Synthetic oligonucleotide
  Antisense strand to SEQ ID NO: 1166660
acaaccaaggaaauaaagg

SEQ ID NO: 1166662 - RNA, 19 nt, Artificial Sequence
  Description of Artificial Sequence: Synthetic oligonucleotide
  Sense strand starting at position 3169 of SEQ ID NO: 916565
cuuuauuuccuugguugua

SEQ ID NO: 1166663 - RNA, 19 nt, Artificial Sequence
  Description of Artificial Sequence: Synthetic oligonucleotide
  Antisense strand to SEQ ID NO: 1166662
uacaaccaaggaaauaaag

SEQ ID NO: 1166664 - RNA, 19 nt, Artificial Sequence
  Description of Artificial Sequence: Synthetic oligonucleotide
  Sense strand starting at position 3284 of SEQ ID NO: 916565
ucaucacuacauugauguu

SEQ ID NO: 1166665 - RNA, 19 nt, Artificial Sequence
  Description of Artificial Sequence: Synthetic oligonucleotide
  Antisense strand to SEQ ID NO: 1166664
aacaucaauguagugauga

SEQ ID NO: 1166666 - RNA, 19 nt, Artificial Sequence
  Description of Artificial Sequence: Synthetic oligonucleotide
  Sense strand starting at position 3421 of SEQ ID NO: 916565
uuuagaaaugagggcuuua

SEQ ID NO: 1166667 - RNA, 19 nt, Artificial Sequence
  Description of Artificial Sequence: Synthetic oligonucleotide
  Antisense strand to SEQ ID NO: 1166666
uaaagcccucauuucuaaa

SEQ ID NO: 1166668 - RNA, 19 nt, Artificial Sequence
  Description of Artificial Sequence: Synthetic oligonucleotide
  Sense strand starting at position 3449 of SEQ ID NO: 916565
ucaguugauccagggugga

SEQ ID NO: 1166669 - RNA, 19 nt, Artificial Sequence
  Description of Artificial Sequence: Synthetic oligonucleotide
  Antisense strand to SEQ ID NO: 1166668
uccacccuggaucaacuga

SEQ ID NO: 1166670 - RNA, 19 nt, Artificial Sequence
  Description of Artificial Sequence: Synthetic oligonucleotide
  Sense strand starting at position 3643 of SEQ ID NO: 916565
aaaggugagcuauacaagu

SEQ ID NO: 1166671 - RNA, 19 nt, Artificial Sequence
  Description of Artificial Sequence: Synthetic oligonucleotide
  Antisense strand to SEQ ID NO: 1166670
acuuguauagcucaccuuu

SEQ ID NO: 1166672 - RNA, 19 nt, Artificial Sequence
  Description of Artificial Sequence: Synthetic oligonucleotide
  Sense strand starting at position 3660 of SEQ ID NO: 916565
guggaauaaucauugcuaa

SEQ ID NO: 1166673 - RNA, 19 nt, Artificial Sequence
  Description of Artificial Sequence: Synthetic oligonucleotide
  Antisense strand to SEQ ID NO: 1166672
uuagcaaugauuauuccac

SEQ ID NO: 1166674 - RNA, 19 nt, Artificial Sequence
  Description of Artificial Sequence: Synthetic oligonucleotide
  Sense strand starting at position 3661 of SEQ ID NO: 916565
uggaauaaucauugcuaag

SEQ ID NO: 1166675 - RNA, 19 nt, Artificial Sequence
  Description of Artificial Sequence: Synthetic oligonucleotide
  Antisense strand to SEQ ID NO: 1166674
cuuagcaaugauuauucca

SEQ ID NO: 1166676 - RNA, 19 nt, Artificial Sequence
  Description of Artificial Sequence: Synthetic oligonucleotide
  Sense strand starting at position 573 of SEQ ID NO: 916566
gguacaucacgaggucaga

SEQ ID NO: 1166677 - RNA, 19 nt, Artificial Sequence
  Description of Artificial Sequence: Synthetic oligonucleotide
  Antisense strand to SEQ ID NO: 1166676
ucugaccucgugauguacc

SEQ ID NO: 1166678 - RNA, 19 nt, Artificial Sequence
  Description of Artificial Sequence: Synthetic oligonucleotide
  Sense strand starting at position 921 of SEQ ID NO: 916566
aaauucuagcgguacuaaa

SEQ ID NO: 1166679 - RNA, 19 nt, Artificial Sequence
  Description of Artificial Sequence: Synthetic oligonucleotide
  Antisense strand to SEQ ID NO: 1166678
uuuaguaccgcuagaauuu

SEQ ID NO: 1166680 - RNA, 19 nt, Artificial Sequence
  Description of Artificial Sequence: Synthetic oligonucleotide
  Sense strand starting at position 972 of SEQ ID NO: 916566
uuugcuuuccgguuacuuu

SEQ ID NO: 1166681 - RNA, 19 nt, Artificial Sequence
  Description of Artificial Sequence: Synthetic oligonucleotide
  Antisense strand to SEQ ID NO: 1166680
aaaguaaccggaaagcaaa

SEQ ID NO: 1166682 - RNA, 19 nt, Artificial Sequence
  Description of Artificial Sequence: Synthetic oligonucleotide
  Sense strand starting at position 1009 of SEQ ID NO: 916566
uacugaagauuaugggaca

SEQ ID NO: 1166683 - RNA, 19 nt, Artificial Sequence
  Description of Artificial Sequence: Synthetic oligonucleotide
  Antisense strand to SEQ ID NO: 1166682
ugucccauaaucuucagua

SEQ ID NO: 1166684 - RNA, 19 nt, Artificial Sequence
  Description of Artificial Sequence: Synthetic oligonucleotide
  Sense strand starting at position 1022 of SEQ ID NO: 916566
gggacaaccuggcaacauu

SEQ ID NO: 1166685 - RNA, 19 nt, Artificial Sequence
  Description of Artificial Sequence: Synthetic oligonucleotide
  Antisense strand to SEQ ID NO: 1166684
aauguugccagguuguccc

SEQ ID NO: 1166686 - RNA, 19 nt, Artificial Sequence
  Description of Artificial Sequence: Synthetic oligonucleotide
  Sense strand starting at position 1054 of SEQ ID NO: 916566
aaugguaucugcccgaguu

SEQ ID NO: 1166687 - RNA, 19 nt, Artificial Sequence
  Description of Artificial Sequence: Synthetic oligonucleotide
  Antisense strand to SEQ ID NO: 1166686
aacucgggcagauaccauu

SEQ ID NO: 1166688 - RNA, 19 nt, Artificial Sequence
  Description of Artificial Sequence: Synthetic oligonucleotide
  Sense strand starting at position 1055 of SEQ ID NO: 916566
augguaucugcccgaguug

SEQ ID NO: 1166689 - RNA, 19 nt, Artificial Sequence
  Description of Artificial Sequence: Synthetic oligonucleotide
  Antisense strand to SEQ ID NO: 1166688
caacucgggcagauaccau

SEQ ID NO: 1166690 - RNA, 19 nt, Artificial Sequence
  Description of Artificial Sequence: Synthetic oligonucleotide
  Sense strand starting at position 1057 of SEQ ID NO: 916566
gguaucugcccgaguugga

SEQ ID NO: 1166691 - RNA, 19 nt, Artificial Sequence
  Description of Artificial Sequence: Synthetic oligonucleotide
  Antisense strand to SEQ ID NO: 1166690
uccaacucgggcagauacc

SEQ ID NO: 1166692 - RNA, 19 nt, Artificial Sequence
  Description of Artificial Sequence: Synthetic oligonucleotide
  Sense strand starting at position 1147 of SEQ ID NO: 916566
ccguuccauuucuucugaa

SEQ ID NO: 1166693 - RNA, 19 nt, Artificial Sequence
  Description of Artificial Sequence: Synthetic oligonucleotide
  Antisense strand to SEQ ID NO: 1166692
uucagaagaaauggaacgg

SEQ ID NO: 1166694 - RNA, 19 nt, Artificial Sequence
  Description of Artificial Sequence: Synthetic oligonucleotide
  Sense strand starting at position 1252 of SEQ ID NO: 916566
cgugaaagcacgggaguua

SEQ ID NO: 1166695 - RNA, 19 nt, Artificial Sequence
  Description of Artificial Sequence: Synthetic oligonucleotide
  Antisense strand to SEQ ID NO: 1166694
uaacucccgugcuuucacg

SEQ ID NO: 1166696 - RNA, 19 nt, Artificial Sequence
  Description of Artificial Sequence: Synthetic oligonucleotide
  Sense strand starting at position 1416 of SEQ ID NO: 916566
aagcuuucccugcagguua

SEQ ID NO: 1166697 - RNA, 19 nt, Artificial Sequence
  Description of Artificial Sequence: Synthetic oligonucleotide
  Antisense strand to SEQ ID NO: 1166696
uaaccugcagggaaagcuu

SEQ ID NO: 1166698 - RNA, 19 nt, Artificial Sequence
  Description of Artificial Sequence: Synthetic oligonucleotide
  Sense strand starting at position 1418 of SEQ ID NO: 916566
gcuuucccugcagguuaaa

SEQ ID NO: 1166699 - RNA, 19 nt, Artificial Sequence
  Description of Artificial Sequence: Synthetic oligonucleotide
  Antisense strand to SEQ ID NO: 1166698
uuuaaccugcagggaaagc

SEQ ID NO: 1166700 - RNA, 19 nt, Artificial Sequence
  Description of Artificial Sequence: Synthetic oligonucleotide
  Sense strand starting at position 1863 of SEQ ID NO: 916566
gggaugugggaucgagauu

SEQ ID NO: 1166701 - RNA, 19 nt, Artificial Sequence
  Description of Artificial Sequence: Synthetic oligonucleotide
  Antisense strand to SEQ ID NO: 1166700
aaucucgaucccacauccc

SEQ ID NO: 1166702 - RNA, 19 nt, Artificial Sequence
  Description of Artificial Sequence: Synthetic oligonucleotide
  Sense strand starting at position 1894 of SEQ ID NO: 916566
agcuuucuguguuugggua

SEQ ID NO: 1166703 - RNA, 19 nt, Artificial Sequence
  Description of Artificial Sequence: Synthetic oligonucleotide
  Antisense strand to SEQ ID NO: 1166702
uacccaaacacagaaagcu

SEQ ID NO: 1166704 - RNA, 19 nt, Artificial Sequence
  Description of Artificial Sequence: Synthetic oligonucleotide
  Sense strand starting at position 1923 of SEQ ID NO: 916566
gucagaguucgugaccucu

SEQ ID NO: 1166705 - RNA, 19 nt, Artificial Sequence
  Description of Artificial Sequence: Synthetic oligonucleotide
  Antisense strand to SEQ ID NO: 1166704
agaggucacgaacucugac

SEQ ID NO: 1166706 - RNA, 19 nt, Artificial Sequence
  Description of Artificial Sequence: Synthetic oligonucleotide
  Sense strand starting at position 1925 of SEQ ID NO: 916566
cagaguucgugaccucuuu

SEQ ID NO: 1166707 - RNA, 19 nt, Artificial Sequence
  Description of Artificial Sequence: Synthetic oligonucleotide
  Antisense strand to SEQ ID NO: 1166706
aaagaggucacgaacucug

SEQ ID NO: 1166708 - RNA, 19 nt, Artificial Sequence
  Description of Artificial Sequence: Synthetic oligonucleotide
  Sense strand starting at position 2149 of SEQ ID NO: 916566
cgugcaaagguuuaagcau

SEQ ID NO: 1166709 - RNA, 19 nt, Artificial Sequence
  Description of Artificial Sequence: Synthetic oligonucleotide
  Antisense strand to SEQ ID NO: 1166708
augcuuaaaccuuugcacg

SEQ ID NO: 1166710 - RNA, 19 nt, Artificial Sequence
  Description of Artificial Sequence: Synthetic oligonucleotide
  Sense strand starting at position 2160 of SEQ ID NO: 916566
uuaagcaucguuugccaaa

SEQ ID NO: 1166711 - RNA, 19 nt, Artificial Sequence
  Description of Artificial Sequence: Synthetic oligonucleotide
  Antisense strand to SEQ ID NO: 1166710
uuuggcaaacgaugcuuaa

SEQ ID NO: 1166712 - RNA, 19 nt, Artificial Sequence
  Description of Artificial Sequence: Synthetic oligonucleotide
  Sense strand starting at position 2239 of SEQ ID NO: 916566
gggucuuaggcauaucugu

SEQ ID NO: 1166713 - RNA, 19 nt, Artificial Sequence
  Description of Artificial Sequence: Synthetic oligonucleotide
  Antisense strand to SEQ ID NO: 1166712
acagauaugccuaagaccc

SEQ ID NO: 1166714 - RNA, 19 nt, Artificial Sequence
  Description of Artificial Sequence: Synthetic oligonucleotide
  Sense strand starting at position 2244 of SEQ ID NO: 916566
uuaggcauaucuguuucua

SEQ ID NO: 1166715 - RNA, 19 nt, Artificial Sequence
  Description of Artificial Sequence: Synthetic oligonucleotide
  Antisense strand to SEQ ID NO: 1166714
uagaaacagauaugccuaa

SEQ ID NO: 1166716 - RNA, 19 nt, Artificial Sequence
  Description of Artificial Sequence: Synthetic oligonucleotide
  Sense strand starting at position 2246 of SEQ ID NO: 916566
aggcauaucuguuucuaau

SEQ ID NO: 1166717 - RNA, 19 nt, Artificial Sequence
  Description of Artificial Sequence: Synthetic oligonucleotide
  Antisense strand to SEQ ID NO: 1166716
auuagaaacagauaugccu

SEQ ID NO: 1166718 - RNA, 19 nt, Artificial Sequence
  Description of Artificial Sequence: Synthetic oligonucleotide
  Sense strand starting at position 2702 of SEQ ID NO: 916566
gugccugucgucccaauua

SEQ ID NO: 1166719 - RNA, 19 nt, Artificial Sequence
  Description of Artificial Sequence: Synthetic oligonucleotide
  Antisense strand to SEQ ID NO: 1166718
uaauugggacgacaggcac

SEQ ID NO: 1166720 - RNA, 19 nt, Artificial Sequence
  Description of Artificial Sequence: Synthetic oligonucleotide
  Sense strand starting at position 2796 of SEQ ID NO: 916566
gggugacacaaugagucuu

SEQ ID NO: 1166721 - RNA, 19 nt, Artificial Sequence
  Description of Artificial Sequence: Synthetic oligonucleotide
  Antisense strand to SEQ ID NO: 1166720
aagacucauugugucaccc

SEQ ID NO: 1166722 - RNA, 19 nt, Artificial Sequence
  Description of Artificial Sequence: Synthetic oligonucleotide
  Sense strand starting at position 2936 of SEQ ID NO: 916566
agugauguauuaccaagca

SEQ ID NO: 1166723 - RNA, 19 nt, Artificial Sequence
  Description of Artificial Sequence: Synthetic oligonucleotide
  Antisense strand to SEQ ID NO: 1166722
ugcuugguaauacaucacu

SEQ ID NO: 1166724 - RNA, 19 nt, Artificial Sequence
  Description of Artificial Sequence: Synthetic oligonucleotide
  Sense strand starting at position 3059 of SEQ ID NO: 916566
cggcuugggcaagauaaca

SEQ ID NO: 1166725 - RNA, 19 nt, Artificial Sequence
  Description of Artificial Sequence: Synthetic oligonucleotide
  Antisense strand to SEQ ID NO: 1166724
uguuaucuugcccaagccg

SEQ ID NO: 1166726 - RNA, 19 nt, Artificial Sequence
  Description of Artificial Sequence: Synthetic oligonucleotide
  Sense strand starting at position 3120 of SEQ ID NO: 916566
aagagacauugguggaaca

SEQ ID NO: 1166727 - RNA, 19 nt, Artificial Sequence
  Description of Artificial Sequence: Synthetic oligonucleotide
  Antisense strand to SEQ ID NO: 1166726
uguuccaccaaugucucuu

SEQ ID NO: 1166728 - RNA, 19 nt, Artificial Sequence
  Description of Artificial Sequence: Synthetic oligonucleotide
  Sense strand starting at position 3200 of SEQ ID NO: 916566
caaaguacucugcgcuuua

SEQ ID NO: 1166729 - RNA, 19 nt, Artificial Sequence
  Description of Artificial Sequence: Synthetic oligonucleotide
  Antisense strand to SEQ ID NO: 1166728
uaaagcgcagaguacuuug

SEQ ID NO: 1166730 - RNA, 19 nt, Artificial Sequence
  Description of Artificial Sequence: Synthetic oligonucleotide
  Sense strand starting at position 3204 of SEQ ID NO: 916566
guacucugcgcuuuagauu

SEQ ID NO: 1166731 - RNA, 19 nt, Artificial Sequence
  Description of Artificial Sequence: Synthetic oligonucleotide
  Antisense strand to SEQ ID NO: 1166730
aaucuaaagcgcagaguac

SEQ ID NO: 1166732 - RNA, 19 nt, Artificial Sequence
  Description of Artificial Sequence: Synthetic oligonucleotide
  Sense strand starting at position 3205 of SEQ ID NO: 916566
uacucugcgcuuuagauuu

SEQ ID NO: 1166733 - RNA, 19 nt, Artificial Sequence
  Description of Artificial Sequence: Synthetic oligonucleotide
  Antisense strand to SEQ ID NO: 1166732
aaaucuaaagcgcagagua

SEQ ID NO: 1166734 - RNA, 19 nt, Artificial Sequence
  Description of Artificial Sequence: Synthetic oligonucleotide
  Sense strand starting at position 3222 of SEQ ID NO: 916566
uuugaagcauucuugaaau

SEQ ID NO: 1166735 - RNA, 19 nt, Artificial Sequence
  Description of Artificial Sequence: Synthetic oligonucleotide
  Antisense strand to SEQ ID NO: 1166734
auuucaagaaugcuucaaa

SEQ ID NO: 1166736 - RNA, 19 nt, Artificial Sequence
  Description of Artificial Sequence: Synthetic oligonucleotide
  Sense strand starting at position 3360 of SEQ ID NO: 916566
aaacguuugcugggaauga

SEQ ID NO: 1166737 - RNA, 19 nt, Artificial Sequence
  Description of Artificial Sequence: Synthetic oligonucleotide
  Antisense strand to SEQ ID NO: 1166736
ucauucccagcaaacguuu

SEQ ID NO: 1166738 - RNA, 19 nt, Artificial Sequence
  Description of Artificial Sequence: Synthetic oligonucleotide
  Sense strand starting at position 3375 of SEQ ID NO: 916566
augagaacaucucuguuau

SEQ ID NO: 1166739 - RNA, 19 nt, Artificial Sequence
  Description of Artificial Sequence: Synthetic oligonucleotide
  Antisense strand to SEQ ID NO: 1166738
auaacagagauguucucau

SEQ ID NO: 1166740 - RNA, 19 nt, Artificial Sequence
  Description of Artificial Sequence: Synthetic oligonucleotide
  Sense strand starting at position 3376 of SEQ ID NO: 916566
ugagaacaucucuguuauu

SEQ ID NO: 1166741 - RNA, 19 nt, Artificial Sequence
  Description of Artificial Sequence: Synthetic oligonucleotide
  Antisense strand to SEQ ID NO: 1166740
aauaacagagauguucuca

SEQ ID NO: 1166742 - RNA, 19 nt, Artificial Sequence
  Description of Artificial Sequence: Synthetic oligonucleotide
  Sense strand starting at position 3635 of SEQ ID NO: 916566
aggccuguauuccuaguua

SEQ ID NO: 1166743 - RNA, 19 nt, Artificial Sequence
  Description of Artificial Sequence: Synthetic oligonucleotide
  Antisense strand to SEQ ID NO: 1166742
uaacuaggaauacaggccu

SEQ ID NO: 1166744 - RNA, 19 nt, Artificial Sequence
  Description of Artificial Sequence: Synthetic oligonucleotide
  Sense strand starting at position 3639 of SEQ ID NO: 916566
cuguauuccuaguuacuga

SEQ ID NO: 1166745 - RNA, 19 nt, Artificial Sequence
  Description of Artificial Sequence: Synthetic oligonucleotide
  Antisense strand to SEQ ID NO: 1166744
ucaguaacuaggaauacag

SEQ ID NO: 1166746 - RNA, 19 nt, Artificial Sequence
  Description of Artificial Sequence: Synthetic oligonucleotide
  Sense strand starting at position 3689 of SEQ ID NO: 916566
aggagucugguccaguguu

SEQ ID NO: 1166747 - RNA, 19 nt, Artificial Sequence
  Description of Artificial Sequence: Synthetic oligonucleotide
  Antisense strand to SEQ ID NO: 1166746
aacacuggaccagacuccu

SEQ ID NO: 1166748 - RNA, 19 nt, Artificial Sequence
  Description of Artificial Sequence: Synthetic oligonucleotide
  Sense strand starting at position 3783 of SEQ ID NO: 916566
uuguguauuugguuugguu

SEQ ID NO: 1166749 - RNA, 19 nt, Artificial Sequence
  Description of Artificial Sequence: Synthetic oligonucleotide
  Antisense strand to SEQ ID NO: 1166748
aaccaaaccaaauacacaa

SEQ ID NO: 1166750 - RNA, 19 nt, Artificial Sequence
  Description of Artificial Sequence: Synthetic oligonucleotide
  Sense strand starting at position 3823 of SEQ ID NO: 916566
accauaagcuggucccaaa

SEQ ID NO: 1166751 - RNA, 19 nt, Artificial Sequence
  Description of Artificial Sequence: Synthetic oligonucleotide
  Antisense strand to SEQ ID NO: 1166750
uuugggaccagcuuauggu

SEQ ID NO: 1166752 - RNA, 19 nt, Artificial Sequence
  Description of Artificial Sequence: Synthetic oligonucleotide
  Sense strand starting at position 3861 of SEQ ID NO: 916566
uagucacgucagggauaug

SEQ ID NO: 1166753 - RNA, 19 nt, Artificial Sequence
  Description of Artificial Sequence: Synthetic oligonucleotide
  Antisense strand to SEQ ID NO: 1166752
cauaucccugacgugacua

SEQ ID NO: 1166754 - RNA, 19 nt, Artificial Sequence
  Description of Artificial Sequence: Synthetic oligonucleotide
  Sense strand starting at position 3981 of SEQ ID NO: 916566
uguagucuguugcucuuaa

SEQ ID NO: 1166755 - RNA, 19 nt, Artificial Sequence
  Description of Artificial Sequence: Synthetic oligonucleotide
  Antisense strand to SEQ ID NO: 1166754
uuaagagcaacagacuaca

SEQ ID NO: 1166756 - RNA, 19 nt, Artificial Sequence
  Description of Artificial Sequence: Synthetic oligonucleotide
  Sense strand starting at position 45 of SEQ ID NO: 916567
ccagguuugucugacucua

SEQ ID NO: 1166757 - RNA, 19 nt, Artificial Sequence
  Description of Artificial Sequence: Synthetic oligonucleotide
  Antisense strand to SEQ ID NO: 1166756
uagagucagacaaaccugg

SEQ ID NO: 1166758 - RNA, 19 nt, Artificial Sequence
  Description of Artificial Sequence: Synthetic oligonucleotide
  Sense strand starting at position 47 of SEQ ID NO: 916567
agguuugucugacucuagu

SEQ ID NO: 1166759 - RNA, 19 nt, Artificial Sequence
  Description of Artificial Sequence: Synthetic oligonucleotide
  Antisense strand to SEQ ID NO: 1166758
acuagagucagacaaaccu

SEQ ID NO: 1166760 - RNA, 19 nt, Artificial Sequence
  Description of Artificial Sequence: Synthetic oligonucleotide
  Sense strand starting at position 129 of SEQ ID NO: 916567
uucuuucuuucuugugaca

SEQ ID NO: 1166761 - RNA, 19 nt, Artificial Sequence
  Description of Artificial Sequence: Synthetic oligonucleotide
  Antisense strand to SEQ ID NO: 1166760
ugucacaagaaagaaagaa

SEQ ID NO: 1166762 - RNA, 19 nt, Artificial Sequence
  Description of Artificial Sequence: Synthetic oligonucleotide
  Sense strand starting at position 132 of SEQ ID NO: 916567
uuucuuucuugugacagga

SEQ ID NO: 1166763 - RNA, 19 nt, Artificial Sequence
  Description of Artificial Sequence: Synthetic oligonucleotide
  Antisense strand to SEQ ID NO: 1166762
uccugucacaagaaagaaa

SEQ ID NO: 1166764 - RNA, 19 nt, Artificial Sequence
  Description of Artificial Sequence: Synthetic oligonucleotide
  Sense strand starting at position 403 of SEQ ID NO: 916567
ggccgaaucugggcuuuaa

SEQ ID NO: 1166765 - RNA, 19 nt, Artificial Sequence
  Description of Artificial Sequence: Synthetic oligonucleotide
  Antisense strand to SEQ ID NO: 1166764
uuaaagcccagauucggcc

SEQ ID NO: 1166766 - RNA, 19 nt, Artificial Sequence
  Description of Artificial Sequence: Synthetic oligonucleotide
  Sense strand starting at position 483 of SEQ ID NO: 916567
gggccacaauuguauuaaa

SEQ ID NO: 1166767 - RNA, 19 nt, Artificial Sequence
  Description of Artificial Sequence: Synthetic oligonucleotide
  Antisense strand to SEQ ID NO: 1166766
uuuaauacaauuguggccc

SEQ ID NO: 1166768 - RNA, 19 nt, Artificial Sequence
  Description of Artificial Sequence: Synthetic oligonucleotide
  Sense strand starting at position 556 of SEQ ID NO: 916567
ugugauaaucucuggaggu

SEQ ID NO: 1166769 - RNA, 19 nt, Artificial Sequence
  Description of Artificial Sequence: Synthetic oligonucleotide
  Antisense strand to SEQ ID NO: 1166768
accuccagagauuaucaca

SEQ ID NO: 1166770 - RNA, 19 nt, Artificial Sequence
  Description of Artificial Sequence: Synthetic oligonucleotide
  Sense strand starting at position 557 of SEQ ID NO: 916567
gugauaaucucuggaggug

SEQ ID NO: 1166771 - RNA, 19 nt, Artificial Sequence
  Description of Artificial Sequence: Synthetic oligonucleotide
  Antisense strand to SEQ ID NO: 1166770
caccuccagagauuaucac

SEQ ID NO: 1166772 - RNA, 19 nt, Artificial Sequence
  Description of Artificial Sequence: Synthetic oligonucleotide
  Sense strand starting at position 650 of SEQ ID NO: 916567
ugcccuuagcguugauaac

SEQ ID NO: 1166773 - RNA, 19 nt, Artificial Sequence
  Description of Artificial Sequence: Synthetic oligonucleotide
  Antisense strand to SEQ ID NO: 1166772
guuaucaacgcuaagggca

SEQ ID NO: 1166774 - RNA, 19 nt, Artificial Sequence
  Description of Artificial Sequence: Synthetic oligonucleotide
  Sense strand starting at position 651 of SEQ ID NO: 916567
gcccuuagcguugauaaca

SEQ ID NO: 1166775 - RNA, 19 nt, Artificial Sequence
  Description of Artificial Sequence: Synthetic oligonucleotide
  Antisense strand to SEQ ID NO: 1166774
uguuaucaacgcuaagggc

SEQ ID NO: 1166776 - RNA, 19 nt, Artificial Sequence
  Description of Artificial Sequence: Synthetic oligonucleotide
  Sense strand starting at position 689 of SEQ ID NO: 916567
ggcuccuucgcgguuacaa

SEQ ID NO: 1166777 - RNA, 19 nt, Artificial Sequence
  Description of Artificial Sequence: Synthetic oligonucleotide
  Antisense strand to SEQ ID NO: 1166776
uuguaaccgcgaaggagcc

SEQ ID NO: 1166778 - RNA, 19 nt, Artificial Sequence
  Description of Artificial Sequence: Synthetic oligonucleotide
  Sense strand starting at position 690 of SEQ ID NO: 916567
gcuccuucgcgguuacaaa

SEQ ID NO: 1166779 - RNA, 19 nt, Artificial Sequence
  Description of Artificial Sequence: Synthetic oligonucleotide
  Antisense strand to SEQ ID NO: 1166778
uuuguaaccgcgaaggagc

SEQ ID NO: 1166780 - RNA, 19 nt, Artificial Sequence
  Description of Artificial Sequence: Synthetic oligonucleotide
  Sense strand starting at position 727 of SEQ ID NO: 916567
gagcguuugcuccucacca

SEQ ID NO: 1166781 - RNA, 19 nt, Artificial Sequence
  Description of Artificial Sequence: Synthetic oligonucleotide
  Antisense strand to SEQ ID NO: 1166780
uggugaggagcaaacgcuc

SEQ ID NO: 1166782 - RNA, 19 nt, Artificial Sequence
  Description of Artificial Sequence: Synthetic oligonucleotide
  Sense strand starting at position 729 of SEQ ID NO: 916567
gcguuugcuccucaccaca

SEQ ID NO: 1166783 - RNA, 19 nt, Artificial Sequence
  Description of Artificial Sequence: Synthetic oligonucleotide
  Antisense strand to SEQ ID NO: 1166782
uguggugaggagcaaacgc

SEQ ID NO: 1166784 - RNA, 19 nt, Artificial Sequence
  Description of Artificial Sequence: Synthetic oligonucleotide
  Sense strand starting at position 785 of SEQ ID NO: 916567
ccgcgacucucccucagau

SEQ ID NO: 1166785 - RNA, 19 nt, Artificial Sequence
  Description of Artificial Sequence: Synthetic oligonucleotide
  Antisense strand to SEQ ID NO: 1166784
aucugagggagagucgcgg

SEQ ID NO: 1166786 - RNA, 19 nt, Artificial Sequence
  Description of Artificial Sequence: Synthetic oligonucleotide
  Sense strand starting at position 2070 of SEQ ID NO: 916567
ggccgaguucggccaguau

SEQ ID NO: 1166787 - RNA, 19 nt, Artificial Sequence
  Description of Artificial Sequence: Synthetic oligonucleotide
  Antisense strand to SEQ ID NO: 1166786
auacuggccgaacucggcc

SEQ ID NO: 1166788 - RNA, 19 nt, Artificial Sequence
  Description of Artificial Sequence: Synthetic oligonucleotide
  Sense strand starting at position 2086 of SEQ ID NO: 916567
uauuuagagucccaaggau

SEQ ID NO: 1166789 - RNA, 19 nt, Artificial Sequence
  Description of Artificial Sequence: Synthetic oligonucleotide
  Antisense strand to SEQ ID NO: 1166788
auccuugggacucuaaaua

SEQ ID NO: 1166790 - RNA, 19 nt, Artificial Sequence
  Description of Artificial Sequence: Synthetic oligonucleotide
  Sense strand starting at position 2424 of SEQ ID NO: 916567
cguugaggaucgcuuaaac

SEQ ID NO: 1166791 - RNA, 19 nt, Artificial Sequence
  Description of Artificial Sequence: Synthetic oligonucleotide
  Antisense strand to SEQ ID NO: 1166790
guuuaagcgauccucaacg

SEQ ID NO: 1166792 - RNA, 19 nt, Artificial Sequence
  Description of Artificial Sequence: Synthetic oligonucleotide
  Sense strand starting at position 2434 of SEQ ID NO: 916567
cgcuuaaacccaggagauu

SEQ ID NO: 1166793 - RNA, 19 nt, Artificial Sequence
  Description of Artificial Sequence: Synthetic oligonucleotide
  Antisense strand to SEQ ID NO: 1166792
aaucuccuggguuuaagcg

SEQ ID NO: 1166794 - RNA, 19 nt, Artificial Sequence
  Description of Artificial Sequence: Synthetic oligonucleotide
  Sense strand starting at position 2942 of SEQ ID NO: 916567
ggcccuaucugcuguuaaa

SEQ ID NO: 1166795 - RNA, 19 nt, Artificial Sequence
  Description of Artificial Sequence: Synthetic oligonucleotide
  Antisense strand to SEQ ID NO: 1166794
uuuaacagcagauagggcc

SEQ ID NO: 1166796 - RNA, 19 nt, Artificial Sequence
  Description of Artificial Sequence: Synthetic oligonucleotide
  Sense strand starting at position 2945 of SEQ ID NO: 916567
ccuaucugcuguuaaaugu

SEQ ID NO: 1166797 - RNA, 19 nt, Artificial Sequence
  Description of Artificial Sequence: Synthetic oligonucleotide
  Antisense strand to SEQ ID NO: 1166796
acauuuaacagcagauagg

SEQ ID NO: 1166798 - RNA, 19 nt, Artificial Sequence
  Description of Artificial Sequence: Synthetic oligonucleotide
  Sense strand starting at position 3058 of SEQ ID NO: 916567
ccucaauuagagugagauu

SEQ ID NO: 1166799 - RNA, 19 nt, Artificial Sequence
  Description of Artificial Sequence: Synthetic oligonucleotide
  Antisense strand to SEQ ID NO: 1166798
aaucucacucuaauugagg

SEQ ID NO: 1166800 - RNA, 19 nt, Artificial Sequence
  Description of Artificial Sequence: Synthetic oligonucleotide
  Sense strand starting at position 3088 of SEQ ID NO: 916567
agaagaagaugcuauguau

SEQ ID NO: 1166801 - RNA, 19 nt, Artificial Sequence
  Description of Artificial Sequence: Synthetic oligonucleotide
  Antisense strand to SEQ ID NO: 1166800
auacauagcaucuucuucu

SEQ ID NO: 1166802 - RNA, 19 nt, Artificial Sequence
  Description of Artificial Sequence: Synthetic oligonucleotide
  Sense strand starting at position 3091 of SEQ ID NO: 916567
agaagaugcuauguaugcu

SEQ ID NO: 1166803 - RNA, 19 nt, Artificial Sequence
  Description of Artificial Sequence: Synthetic oligonucleotide
  Antisense strand to SEQ ID NO: 1166802
agcauacauagcaucuucu

SEQ ID NO: 1166804 - RNA, 19 nt, Artificial Sequence
  Description of Artificial Sequence: Synthetic oligonucleotide
  Sense strand starting at position 3151 of SEQ ID NO: 916567
ccagaucaacugugaguca

SEQ ID NO: 1166805 - RNA, 19 nt, Artificial Sequence
  Description of Artificial Sequence: Synthetic oligonucleotide
  Antisense strand to SEQ ID NO: 1166804
ugacucacaguugaucugg

SEQ ID NO: 1166806 - RNA, 19 nt, Artificial Sequence
  Description of Artificial Sequence: Synthetic oligonucleotide
  Sense strand starting at position 3154 of SEQ ID NO: 916567
gaucaacugugagucacua

SEQ ID NO: 1166807 - RNA, 19 nt, Artificial Sequence
  Description of Artificial Sequence: Synthetic oligonucleotide
  Antisense strand to SEQ ID NO: 1166806
uagugacucacaguugauc

SEQ ID NO: 1166808 - RNA, 19 nt, Artificial Sequence
  Description of Artificial Sequence: Synthetic oligonucleotide
  Sense strand starting at position 3166 of SEQ ID NO: 916567
gucacuaaaggcuaaguga

SEQ ID NO: 1166809 - RNA, 19 nt, Artificial Sequence
  Description of Artificial Sequence: Synthetic oligonucleotide
  Antisense strand to SEQ ID NO: 1166808
ucacuuagccuuuagugac

SEQ ID NO: 1166810 - RNA, 19 nt, Artificial Sequence
  Description of Artificial Sequence: Synthetic oligonucleotide
  Sense strand starting at position 3303 of SEQ ID NO: 916567
ggaggugucccugaaagca

SEQ ID NO: 1166811 - RNA, 19 nt, Artificial Sequence
  Description of Artificial Sequence: Synthetic oligonucleotide
  Antisense strand to SEQ ID NO: 1166810
ugcuuucagggacaccucc

SEQ ID NO: 1166812 - RNA, 19 nt, Artificial Sequence
  Description of Artificial Sequence: Synthetic oligonucleotide
  Sense strand starting at position 3373 of SEQ ID NO: 916567
ccauauugauugcaugcaa

SEQ ID NO: 1166813 - RNA, 19 nt, Artificial Sequence
  Description of Artificial Sequence: Synthetic oligonucleotide
  Antisense strand to SEQ ID NO: 1166812
uugcaugcaaucaauaugg

SEQ ID NO: 1166814 - RNA, 19 nt, Artificial Sequence
  Description of Artificial Sequence: Synthetic oligonucleotide
  Sense strand starting at position 3442 of SEQ ID NO: 916567
cuugcaucuugcuguugaa

SEQ ID NO: 1166815 - RNA, 19 nt, Artificial Sequence
  Description of Artificial Sequence: Synthetic oligonucleotide
  Antisense strand to SEQ ID NO: 1166814
uucaacagcaagaugcaag

SEQ ID NO: 1166816 - RNA, 19 nt, Artificial Sequence
  Description of Artificial Sequence: Synthetic oligonucleotide
  Sense strand starting at position 3513 of SEQ ID NO: 916567
caggguucugugcagagaa

SEQ ID NO: 1166817 - RNA, 19 nt, Artificial Sequence
  Description of Artificial Sequence: Synthetic oligonucleotide
  Antisense strand to SEQ ID NO: 1166816
uucucugcacagaacccug

SEQ ID NO: 1166818 - RNA, 19 nt, Artificial Sequence
  Description of Artificial Sequence: Synthetic oligonucleotide
  Sense strand starting at position 3514 of SEQ ID NO: 916567
aggguucugugcagagaag

SEQ ID NO: 1166819 - RNA, 19 nt, Artificial Sequence
  Description of Artificial Sequence: Synthetic oligonucleotide
  Antisense strand to SEQ ID NO: 1166818
cuucucugcacagaacccu

SEQ ID NO: 1166820 - RNA, 19 nt, Artificial Sequence
  Description of Artificial Sequence: Synthetic oligonucleotide
  Sense strand starting at position 3525 of SEQ ID NO: 916567
cagagaaggucuguugguu

SEQ ID NO: 1166821 - RNA, 19 nt, Artificial Sequence
  Description of Artificial Sequence: Synthetic oligonucleotide
  Antisense strand to SEQ ID NO: 1166820
aaccaacagaccuucucug

SEQ ID NO: 1166822 - RNA, 19 nt, Artificial Sequence
  Description of Artificial Sequence: Synthetic oligonucleotide
  Sense strand starting at position 3533 of SEQ ID NO: 916567
gucuguugguuggagucau

SEQ ID NO: 1166823 - RNA, 19 nt, Artificial Sequence
  Description of Artificial Sequence: Synthetic oligonucleotide
  Antisense strand to SEQ ID NO: 1166822
augacuccaaccaacagac

SEQ ID NO: 1166824 - RNA, 19 nt, Artificial Sequence
  Description of Artificial Sequence: Synthetic oligonucleotide
  Sense strand starting at position 3555 of SEQ ID NO: 916567
gucauuuaguuagauguuc

SEQ ID NO: 1166825 - RNA, 19 nt, Artificial Sequence
  Description of Artificial Sequence: Synthetic oligonucleotide
  Antisense strand to SEQ ID NO: 1166824
gaacaucuaacuaaaugac

SEQ ID NO: 1166826 - RNA, 19 nt, Artificial Sequence
  Description of Artificial Sequence: Synthetic oligonucleotide
  Sense strand starting at position 3560 of SEQ ID NO: 916567
uuaguuagauguucugaac

SEQ ID NO: 1166827 - RNA, 19 nt, Artificial Sequence
  Description of Artificial Sequence: Synthetic oligonucleotide
  Antisense strand to SEQ ID NO: 1166826
guucagaacaucuaacuaa

SEQ ID NO: 1166828 - RNA, 19 nt, Artificial Sequence
  Description of Artificial Sequence: Synthetic oligonucleotide
  Sense strand starting at position 3563 of SEQ ID NO: 916567
guuagauguucugaacuca

SEQ ID NO: 1166829 - RNA, 19 nt, Artificial Sequence
  Description of Artificial Sequence: Synthetic oligonucleotide
  Antisense strand to SEQ ID NO: 1166828
ugaguucagaacaucuaac

SEQ ID NO: 1166830 - RNA, 19 nt, Artificial Sequence
  Description of Artificial Sequence: Synthetic oligonucleotide
  Sense strand starting at position 3753 of SEQ ID NO: 916567
gaggcuccacuuuguacaa

SEQ ID NO: 1166831 - RNA, 19 nt, Artificial Sequence
  Description of Artificial Sequence: Synthetic oligonucleotide
  Antisense strand to SEQ ID NO: 1166830
uuguacaaaguggagccuc

SEQ ID NO: 1166832 - RNA, 19 nt, Artificial Sequence
  Description of Artificial Sequence: Synthetic oligonucleotide
  Sense strand starting at position 3945 of SEQ ID NO: 916567
gaggaacucucuuggguuu

SEQ ID NO: 1166833 - RNA, 19 nt, Artificial Sequence
  Description of Artificial Sequence: Synthetic oligonucleotide
  Antisense strand to SEQ ID NO: 1166832
aaacccaagagaguuccuc

SEQ ID NO: 1166834 - RNA, 19 nt, Artificial Sequence
  Description of Artificial Sequence: Synthetic oligonucleotide
  Sense strand starting at position 71 of SEQ ID NO: 916568
ucaguaagugugcguggaa

SEQ ID NO: 1166835 - RNA, 19 nt, Artificial Sequence
  Description of Artificial Sequence: Synthetic oligonucleotide
  Antisense strand to SEQ ID NO: 1166834
uuccacgcacacuuacuga

SEQ ID NO: 1166836 - RNA, 19 nt, Artificial Sequence
  Description of Artificial Sequence: Synthetic oligonucleotide
  Sense strand starting at position 116 of SEQ ID NO: 916568
ggagcugugcugggaggaa

SEQ ID NO: 1166837 - RNA, 19 nt, Artificial Sequence
  Description of Artificial Sequence: Synthetic oligonucleotide
  Antisense strand to SEQ ID NO: 1166836
uuccucccagcacagcucc

SEQ ID NO: 1166838 - RNA, 19 nt, Artificial Sequence
  Description of Artificial Sequence: Synthetic oligonucleotide
  Sense strand starting at position 177 of SEQ ID NO: 916568
cuuccauuuggcggcagau

SEQ ID NO: 1166839 - RNA, 19 nt, Artificial Sequence
  Description of Artificial Sequence: Synthetic oligonucleotide
  Antisense strand to SEQ ID NO: 1166838
aucugccgccaaauggaag

SEQ ID NO: 1166840 - RNA, 19 nt, Artificial Sequence
  Description of Artificial Sequence: Synthetic oligonucleotide
  Sense strand starting at position 207 of SEQ ID NO: 916568
agcagagguucuuccuuau

SEQ ID NO: 1166841 - RNA, 19 nt, Artificial Sequence
  Description of Artificial Sequence: Synthetic oligonucleotide
  Antisense strand to SEQ ID NO: 1166840
auaaggaagaaccucugcu

SEQ ID NO: 1166842 - RNA, 19 nt, Artificial Sequence
  Description of Artificial Sequence: Synthetic oligonucleotide
  Sense strand starting at position 211 of SEQ ID NO: 916568
gagguucuuccuuauguug

SEQ ID NO: 1166843 - RNA, 19 nt, Artificial Sequence
  Description of Artificial Sequence: Synthetic oligonucleotide
  Antisense strand to SEQ ID NO: 1166842
caacauaaggaagaaccuc

SEQ ID NO: 1166844 - RNA, 19 nt, Artificial Sequence
  Description of Artificial Sequence: Synthetic oligonucleotide
  Sense strand starting at position 213 of SEQ ID NO: 916568
gguucuuccuuauguugaa

SEQ ID NO: 1166845 - RNA, 19 nt, Artificial Sequence
  Description of Artificial Sequence: Synthetic oligonucleotide
  Antisense strand to SEQ ID NO: 1166844
uucaacauaaggaagaacc

SEQ ID NO: 1166846 - RNA, 19 nt, Artificial Sequence
  Description of Artificial Sequence: Synthetic oligonucleotide
  Sense strand starting at position 214 of SEQ ID NO: 916568
guucuuccuuauguugaau

SEQ ID NO: 1166847 - RNA, 19 nt, Artificial Sequence
  Description of Artificial Sequence: Synthetic oligonucleotide
  Antisense strand to SEQ ID NO: 1166846
auucaacauaaggaagaac

SEQ ID NO: 1166848 - RNA, 19 nt, Artificial Sequence
  Description of Artificial Sequence: Synthetic oligonucleotide
  Sense strand starting at position 295 of SEQ ID NO: 916568
caggaagccucauucuagu

SEQ ID NO: 1166849 - RNA, 19 nt, Artificial Sequence
  Description of Artificial Sequence: Synthetic oligonucleotide
  Antisense strand to SEQ ID NO: 1166848
acuagaaugaggcuuccug

SEQ ID NO: 1166850 - RNA, 19 nt, Artificial Sequence
  Description of Artificial Sequence: Synthetic oligonucleotide
  Sense strand starting at position 311 of SEQ ID NO: 916568
aguccuuccuagcaaguau

SEQ ID NO: 1166851 - RNA, 19 nt, Artificial Sequence
  Description of Artificial Sequence: Synthetic oligonucleotide
  Antisense strand to SEQ ID NO: 1166850
auacuugcuaggaaggacu

SEQ ID NO: 1166852 - RNA, 19 nt, Artificial Sequence
  Description of Artificial Sequence: Synthetic oligonucleotide
  Sense strand starting at position 444 of SEQ ID NO: 916568
cccagaagugggcauauua

SEQ ID NO: 1166853 - RNA, 19 nt, Artificial Sequence
  Description of Artificial Sequence: Synthetic oligonucleotide
  Antisense strand to SEQ ID NO: 1166852
uaauaugcccacuucuggg

SEQ ID NO: 1166854 - RNA, 19 nt, Artificial Sequence
  Description of Artificial Sequence: Synthetic oligonucleotide
  Sense strand starting at position 451 of SEQ ID NO: 916568
gugggcauauuacuauuau

SEQ ID NO: 1166855 - RNA, 19 nt, Artificial Sequence
  Description of Artificial Sequence: Synthetic oligonucleotide
  Antisense strand to SEQ ID NO: 1166854
auaauaguaauaugcccac

SEQ ID NO: 1166856 - RNA, 19 nt, Artificial Sequence
  Description of Artificial Sequence: Synthetic oligonucleotide
  Sense strand starting at position 452 of SEQ ID NO: 916568
ugggcauauuacuauuauu

SEQ ID NO: 1166857 - RNA, 19 nt, Artificial Sequence
  Description of Artificial Sequence: Synthetic oligonucleotide
  Antisense strand to SEQ ID NO: 1166856
aauaauaguaauaugccca

SEQ ID NO: 1166858 - RNA, 19 nt, Artificial Sequence
  Description of Artificial Sequence: Synthetic oligonucleotide
  Sense strand starting at position 554 of SEQ ID NO: 916568
cucacaauguuaugaggaa

SEQ ID NO: 1166859 - RNA, 19 nt, Artificial Sequence
  Description of Artificial Sequence: Synthetic oligonucleotide
  Antisense strand to SEQ ID NO: 1166858
uuccucauaacauugugag

SEQ ID NO: 1166860 - RNA, 19 nt, Artificial Sequence
  Description of Artificial Sequence: Synthetic oligonucleotide
  Sense strand starting at position 555 of SEQ ID NO: 916568
ucacaauguuaugaggaag

SEQ ID NO: 1166861 - RNA, 19 nt, Artificial Sequence
  Description of Artificial Sequence: Synthetic oligonucleotide
  Antisense strand to SEQ ID NO: 1166860
cuuccucauaacauuguga

SEQ ID NO: 1166862 - RNA, 19 nt, Artificial Sequence
  Description of Artificial Sequence: Synthetic oligonucleotide
  Sense strand starting at position 574 of SEQ ID NO: 916568
ggauuauuauuaugcacau

SEQ ID NO: 1166863 - RNA, 19 nt, Artificial Sequence
  Description of Artificial Sequence: Synthetic oligonucleotide
  Antisense strand to SEQ ID NO: 1166862
augugcauaauaauaaucc

SEQ ID NO: 1166864 - RNA, 19 nt, Artificial Sequence
  Description of Artificial Sequence: Synthetic oligonucleotide
  Sense strand starting at position 861 of SEQ ID NO: 916568
gccugaacuccucagcuga

SEQ ID NO: 1166865 - RNA, 19 nt, Artificial Sequence
  Description of Artificial Sequence: Synthetic oligonucleotide
  Antisense strand to SEQ ID NO: 1166864
ucagcugaggaguucaggc

SEQ ID NO: 1166866 - RNA, 19 nt, Artificial Sequence
  Description of Artificial Sequence: Synthetic oligonucleotide
  Sense strand starting at position 872 of SEQ ID NO: 916568
ucagcugacuuucuuaagu

SEQ ID NO: 1166867 - RNA, 19 nt, Artificial Sequence
  Description of Artificial Sequence: Synthetic oligonucleotide
  Antisense strand to SEQ ID NO: 1166866
acuuaagaaagucagcuga

SEQ ID NO: 1166868 - RNA, 19 nt, Artificial Sequence
  Description of Artificial Sequence: Synthetic oligonucleotide
  Sense strand starting at position 880 of SEQ ID NO: 916568
cuuucuuaaguccagcaga

SEQ ID NO: 1166869 - RNA, 19 nt, Artificial Sequence
  Description of Artificial Sequence: Synthetic oligonucleotide
  Antisense strand to SEQ ID NO: 1166868
ucugcuggacuuaagaaag

SEQ ID NO: 1166870 - RNA, 19 nt, Artificial Sequence
  Description of Artificial Sequence: Synthetic oligonucleotide
  Sense strand starting at position 909 of SEQ ID NO: 916568
caggaaucgucagucacau

SEQ ID NO: 1166871 - RNA, 19 nt, Artificial Sequence
  Description of Artificial Sequence: Synthetic oligonucleotide
  Antisense strand to SEQ ID NO: 1166870
augugacugacgauuccug

SEQ ID NO: 1166872 - RNA, 19 nt, Artificial Sequence
  Description of Artificial Sequence: Synthetic oligonucleotide
  Sense strand starting at position 911 of SEQ ID NO: 916568
ggaaucgucagucacauuc

SEQ ID NO: 1166873 - RNA, 19 nt, Artificial Sequence
  Description of Artificial Sequence: Synthetic oligonucleotide
  Antisense strand to SEQ ID NO: 1166872
gaaugugacugacgauucc

SEQ ID NO: 1166874 - RNA, 19 nt, Artificial Sequence
  Description of Artificial Sequence: Synthetic oligonucleotide
  Sense strand starting at position 947 of SEQ ID NO: 916568
ccauccuucugcccaguua

SEQ ID NO: 1166875 - RNA, 19 nt, Artificial Sequence
  Description of Artificial Sequence: Synthetic oligonucleotide
  Antisense strand to SEQ ID NO: 1166874
uaacugggcagaaggaugg

SEQ ID NO: 1166876 - RNA, 19 nt, Artificial Sequence
  Description of Artificial Sequence: Synthetic oligonucleotide
  Sense strand starting at position 2903 of SEQ ID NO: 916568
gguccaaagucacagcgau

SEQ ID NO: 1166877 - RNA, 19 nt, Artificial Sequence
  Description of Artificial Sequence: Synthetic oligonucleotide
  Antisense strand to SEQ ID NO: 1166876
aucgcugugacuuuggacc

SEQ ID NO: 1166878 - RNA, 19 nt, Artificial Sequence
  Description of Artificial Sequence: Synthetic oligonucleotide
  Sense strand starting at position 3064 of SEQ ID NO: 916568
auaggacuuucuccugaag

SEQ ID NO: 1166879 - RNA, 19 nt, Artificial Sequence
  Description of Artificial Sequence: Synthetic oligonucleotide
  Antisense strand to SEQ ID NO: 1166878
cuucaggagaaaguccuau

SEQ ID NO: 1166880 - RNA, 19 nt, Artificial Sequence
  Description of Artificial Sequence: Synthetic oligonucleotide
  Sense strand starting at position 3066 of SEQ ID NO: 916568
aggacuuucuccugaagag

SEQ ID NO: 1166881 - RNA, 19 nt, Artificial Sequence
  Description of Artificial Sequence: Synthetic oligonucleotide
  Antisense strand to SEQ ID NO: 1166880
cucuucaggagaaaguccu

SEQ ID NO: 1166882 - RNA, 19 nt, Artificial Sequence
  Description of Artificial Sequence: Synthetic oligonucleotide
  Sense strand starting at position 3162 of SEQ ID NO: 916568
cugugugacuuaggacagu

SEQ ID NO: 1166883 - RNA, 19 nt, Artificial Sequence
  Description of Artificial Sequence: Synthetic oligonucleotide
  Antisense strand to SEQ ID NO: 1166882
acuguccuaagucacacag

SEQ ID NO: 1166884 - RNA, 19 nt, Artificial Sequence
  Description of Artificial Sequence: Synthetic oligonucleotide
  Sense strand starting at position 3199 of SEQ ID NO: 916568
ucagcuuccucgucucuaa

SEQ ID NO: 1166885 - RNA, 19 nt, Artificial Sequence
  Description of Artificial Sequence: Synthetic oligonucleotide
  Antisense strand to SEQ ID NO: 1166884
uuagagacgaggaagcuga

SEQ ID NO: 1166886 - RNA, 19 nt, Artificial Sequence
  Description of Artificial Sequence: Synthetic oligonucleotide
  Sense strand starting at position 3221 of SEQ ID NO: 916568
augauaugaucagauuauc

SEQ ID NO: 1166887 - RNA, 19 nt, Artificial Sequence
  Description of Artificial Sequence: Synthetic oligonucleotide
  Antisense strand to SEQ ID NO: 1166886
gauaaucugaucauaucau

SEQ ID NO: 1166888 - RNA, 19 nt, Artificial Sequence
  Description of Artificial Sequence: Synthetic oligonucleotide
  Sense strand starting at position 3247 of SEQ ID NO: 916568
ucuggcugucaggaugaua

SEQ ID NO: 1166889 - RNA, 19 nt, Artificial Sequence
  Description of Artificial Sequence: Synthetic oligonucleotide
  Antisense strand to SEQ ID NO: 1166888
uaucauccugacagccaga

SEQ ID NO: 1166890 - RNA, 19 nt, Artificial Sequence
  Description of Artificial Sequence: Synthetic oligonucleotide
  Sense strand starting at position 3288 of SEQ ID NO: 916568
cacaguagauacugaguua

SEQ ID NO: 1166891 - RNA, 19 nt, Artificial Sequence
  Description of Artificial Sequence: Synthetic oligonucleotide
  Antisense strand to SEQ ID NO: 1166890
uaacucaguaucuacugug

SEQ ID NO: 1166892 - RNA, 19 nt, Artificial Sequence
  Description of Artificial Sequence: Synthetic oligonucleotide
  Sense strand starting at position 3291 of SEQ ID NO: 916568
aguagauacugaguuaguu

SEQ ID NO: 1166893 - RNA, 19 nt, Artificial Sequence
  Description of Artificial Sequence: Synthetic oligonucleotide
  Antisense strand to SEQ ID NO: 1166892
aacuaacucaguaucuacu

SEQ ID NO: 1166894 - RNA, 19 nt, Artificial Sequence
  Description of Artificial Sequence: Synthetic oligonucleotide
  Sense strand starting at position 3300 of SEQ ID NO: 916568
ugaguuaguucucccugcu

SEQ ID NO: 1166895 - RNA, 19 nt, Artificial Sequence
  Description of Artificial Sequence: Synthetic oligonucleotide
  Antisense strand to SEQ ID NO: 1166894
agcagggagaacuaacuca

SEQ ID NO: 1166896 - RNA, 19 nt, Artificial Sequence
  Description of Artificial Sequence: Synthetic oligonucleotide
  Sense strand starting at position 3417 of SEQ ID NO: 916568
ccaggcuuccaugguaaga

SEQ ID NO: 1166897 - RNA, 19 nt, Artificial Sequence
  Description of Artificial Sequence: Synthetic oligonucleotide
  Antisense strand to SEQ ID NO: 1166896
ucuuaccauggaagccugg

SEQ ID NO: 1166898 - RNA, 19 nt, Artificial Sequence
  Description of Artificial Sequence: Synthetic oligonucleotide
  Sense strand starting at position 3419 of SEQ ID NO: 916568
aggcuuccaugguaagaau

SEQ ID NO: 1166899 - RNA, 19 nt, Artificial Sequence
  Description of Artificial Sequence: Synthetic oligonucleotide
  Antisense strand to SEQ ID NO: 1166898
auucuuaccauggaagccu

SEQ ID NO: 1166900 - RNA, 19 nt, Artificial Sequence
  Description of Artificial Sequence: Synthetic oligonucleotide
  Sense strand starting at position 3485 of SEQ ID NO: 916568
uggagcccucuuuggaaau

SEQ ID NO: 1166901 - RNA, 19 nt, Artificial Sequence
  Description of Artificial Sequence: Synthetic oligonucleotide
  Antisense strand to SEQ ID NO: 1166900
auuuccaaagagggcucca

SEQ ID NO: 1166902 - RNA, 19 nt, Artificial Sequence
  Description of Artificial Sequence: Synthetic oligonucleotide
  Sense strand starting at position 3511 of SEQ ID NO: 916568
ccauccuguccugagcaaa

SEQ ID NO: 1166903 - RNA, 19 nt, Artificial Sequence
  Description of Artificial Sequence: Synthetic oligonucleotide
  Antisense strand to SEQ ID NO: 1166902
uuugcucaggacaggaugg

SEQ ID NO: 1166904 - RNA, 19 nt, Artificial Sequence
  Description of Artificial Sequence: Synthetic oligonucleotide
  Sense strand starting at position 3751 of SEQ ID NO: 916568
uuaaauuaugagcaugcua

SEQ ID NO: 1166905 - RNA, 19 nt, Artificial Sequence
  Description of Artificial Sequence: Synthetic oligonucleotide
  Antisense strand to SEQ ID NO: 1166904
uagcaugcucauaauuuaa

SEQ ID NO: 1166906 - RNA, 19 nt, Artificial Sequence
  Description of Artificial Sequence: Synthetic oligonucleotide
  Sense strand starting at position 3756 of SEQ ID NO: 916568
uuaugagcaugcuauacaa

SEQ ID NO: 1166907 - RNA, 19 nt, Artificial Sequence
  Description of Artificial Sequence: Synthetic oligonucleotide
  Antisense strand to SEQ ID NO: 1166906
uuguauagcaugcucauaa

SEQ ID NO: 1166908 - RNA, 19 nt, Artificial Sequence
  Description of Artificial Sequence: Synthetic oligonucleotide
  Sense strand starting at position 3909 of SEQ ID NO: 916568
ccagaaauccuuugcugga

SEQ ID NO: 1166909 - RNA, 19 nt, Artificial Sequence
  Description of Artificial Sequence: Synthetic oligonucleotide
  Antisense strand to SEQ ID NO: 1166908
uccagcaaaggauuucugg

SEQ ID NO: 1166910 - RNA, 19 nt, Artificial Sequence
  Description of Artificial Sequence: Synthetic oligonucleotide
  Sense strand starting at position 3911 of SEQ ID NO: 916568
agaaauccuuugcuggaca

SEQ ID NO: 1166911 - RNA, 19 nt, Artificial Sequence
  Description of Artificial Sequence: Synthetic oligonucleotide
  Antisense strand to SEQ ID NO: 1166910
uguccagcaaaggauuucu

SEQ ID NO: 1166912 - RNA, 19 nt, Artificial Sequence
  Description of Artificial Sequence: Synthetic oligonucleotide
  Sense strand starting at position 73 of SEQ ID NO: 916569
gggucugugcccugaagaa

SEQ ID NO: 1166913 - RNA, 19 nt, Artificial Sequence
  Description of Artificial Sequence: Synthetic oligonucleotide
  Antisense strand to SEQ ID NO: 1166912
uucuucagggcacagaccc

SEQ ID NO: 1166914 - RNA, 19 nt, Artificial Sequence
  Description of Artificial Sequence: Synthetic oligonucleotide
  Sense strand starting at position 171 of SEQ ID NO: 916569
ucaggcagauccuuacauu

SEQ ID NO: 1166915 - RNA, 19 nt, Artificial Sequence
  Description of Artificial Sequence: Synthetic oligonucleotide
  Antisense strand to SEQ ID NO: 1166914
aauguaaggaucugccuga

SEQ ID NO: 1166916 - RNA, 19 nt, Artificial Sequence
  Description of Artificial Sequence: Synthetic oligonucleotide
  Sense strand starting at position 556 of SEQ ID NO: 916569
gccacaucugccugcacua

SEQ ID NO: 1166917 - RNA, 19 nt, Artificial Sequence
  Description of Artificial Sequence: Synthetic oligonucleotide
  Antisense strand to SEQ ID NO: 1166916
uagugcaggcagauguggc

SEQ ID NO: 1166918 - RNA, 19 nt, Artificial Sequence
  Description of Artificial Sequence: Synthetic oligonucleotide
  Sense strand starting at position 637 of SEQ ID NO: 916569
ggcgcuuguuccugccuua

SEQ ID NO: 1166919 - RNA, 19 nt, Artificial Sequence
  Description of Artificial Sequence: Synthetic oligonucleotide
  Antisense strand to SEQ ID NO: 1166918
uaaggcaggaacaagcgcc

SEQ ID NO: 1166920 - RNA, 19 nt, Artificial Sequence
  Description of Artificial Sequence: Synthetic oligonucleotide
  Sense strand starting at position 638 of SEQ ID NO: 916569
gcgcuuguuccugccuuau

SEQ ID NO: 1166921 - RNA, 19 nt, Artificial Sequence
  Description of Artificial Sequence: Synthetic oligonucleotide
  Antisense strand to SEQ ID NO: 1166920
auaaggcaggaacaagcgc

SEQ ID NO: 1166922 - RNA, 19 nt, Artificial Sequence
  Description of Artificial Sequence: Synthetic oligonucleotide
  Sense strand starting at position 721 of SEQ ID NO: 916569
ucaugcagguucuuaacaa

SEQ ID NO: 1166923 - RNA, 19 nt, Artificial Sequence
  Description of Artificial Sequence: Synthetic oligonucleotide
  Antisense strand to SEQ ID NO: 1166922
uuguuaagaaccugcauga

SEQ ID NO: 1166924 - RNA, 19 nt, Artificial Sequence
  Description of Artificial Sequence: Synthetic oligonucleotide
  Sense strand starting at position 725 of SEQ ID NO: 916569
gcagguucuuaacaacaca

SEQ ID NO: 1166925 - RNA, 19 nt, Artificial Sequence
  Description of Artificial Sequence: Synthetic oligonucleotide
  Antisense strand to SEQ ID NO: 1166924
uguguuguuaagaaccugc

SEQ ID NO: 1166926 - RNA, 19 nt, Artificial Sequence
  Description of Artificial Sequence: Synthetic oligonucleotide
  Sense strand starting at position 899 of SEQ ID NO: 916569
gcacccuaccuguaagauc

SEQ ID NO: 1166927 - RNA, 19 nt, Artificial Sequence
  Description of Artificial Sequence: Synthetic oligonucleotide
  Antisense strand to SEQ ID NO: 1166926
gaucuuacagguagggugc

SEQ ID NO: 1166928 - RNA, 19 nt, Artificial Sequence
  Description of Artificial Sequence: Synthetic oligonucleotide
  Sense strand starting at position 967 of SEQ ID NO: 916569
cuggaaugguugggaggua

SEQ ID NO: 1166929 - RNA, 19 nt, Artificial Sequence
  Description of Artificial Sequence: Synthetic oligonucleotide
  Antisense strand to SEQ ID NO: 1166928
uaccucccaaccauuccag

SEQ ID NO: 1166930 - RNA, 19 nt, Artificial Sequence
  Description of Artificial Sequence: Synthetic oligonucleotide
  Sense strand starting at position 968 of SEQ ID NO: 916569
uggaaugguugggagguau

SEQ ID NO: 1166931 - RNA, 19 nt, Artificial Sequence
  Description of Artificial Sequence: Synthetic oligonucleotide
  Antisense strand to SEQ ID NO: 1166930
auaccucccaaccauucca

SEQ ID NO: 1166932 - RNA, 19 nt, Artificial Sequence
  Description of Artificial Sequence: Synthetic oligonucleotide
  Sense strand starting at position 979 of SEQ ID NO: 916569
ggagguauccucuaggcag

SEQ ID NO: 1166933 - RNA, 19 nt, Artificial Sequence
  Description of Artificial Sequence: Synthetic oligonucleotide
  Antisense strand to SEQ ID NO: 1166932
cugccuagaggauaccucc

SEQ ID NO: 1166934 - RNA, 19 nt, Artificial Sequence
  Description of Artificial Sequence: Synthetic oligonucleotide
  Sense strand starting at position 1021 of SEQ ID NO: 916569
ggcaacuucuauccaggau

SEQ ID NO: 1166935 - RNA, 19 nt, Artificial Sequence
  Description of Artificial Sequence: Synthetic oligonucleotide
  Antisense strand to SEQ ID NO: 1166934
auccuggauagaaguugcc

SEQ ID NO: 1166936 - RNA, 19 nt, Artificial Sequence
  Description of Artificial Sequence: Synthetic oligonucleotide
  Sense strand starting at position 1342 of SEQ ID NO: 916569
ccucuaaaguguuaagaaa

SEQ ID NO: 1166937 - RNA, 19 nt, Artificial Sequence
  Description of Artificial Sequence: Synthetic oligonucleotide
  Antisense strand to SEQ ID NO: 1166936
uuucuuaacacuuuagagg

SEQ ID NO: 1166938 - RNA, 19 nt, Artificial Sequence
  Description of Artificial Sequence: Synthetic oligonucleotide
  Sense strand starting at position 1427 of SEQ ID NO: 916569
caguuagaaucguacggau

SEQ ID NO: 1166939 - RNA, 19 nt, Artificial Sequence
  Description of Artificial Sequence: Synthetic oligonucleotide
  Antisense strand to SEQ ID NO: 1166938
auccguacgauucuaacug

SEQ ID NO: 1166940 - RNA, 19 nt, Artificial Sequence
  Description of Artificial Sequence: Synthetic oligonucleotide
  Sense strand starting at position 1453 of SEQ ID NO: 916569
gcgccaaagcucuguguac

SEQ ID NO: 1166941 - RNA, 19 nt, Artificial Sequence
  Description of Artificial Sequence: Synthetic oligonucleotide
  Antisense strand to SEQ ID NO: 1166940
guacacagagcuuuggcgc

SEQ ID NO: 1166942 - RNA, 19 nt, Artificial Sequence
  Description of Artificial Sequence: Synthetic oligonucleotide
  Sense strand starting at position 1455 of SEQ ID NO: 916569
gccaaagcucuguguaccu

SEQ ID NO: 1166943 - RNA, 19 nt, Artificial Sequence
  Description of Artificial Sequence: Synthetic oligonucleotide
  Antisense strand to SEQ ID NO: 1166942
agguacacagagcuuuggc

SEQ ID NO: 1166944 - RNA, 19 nt, Artificial Sequence
  Description of Artificial Sequence: Synthetic oligonucleotide
  Sense strand starting at position 1691 of SEQ ID NO: 916569
uucucaucccguugugcua

SEQ ID NO: 1166945 - RNA, 19 nt, Artificial Sequence
  Description of Artificial Sequence: Synthetic oligonucleotide
  Antisense strand to SEQ ID NO: 1166944
uagcacaacgggaugagaa

SEQ ID NO: 1166946 - RNA, 19 nt, Artificial Sequence
  Description of Artificial Sequence: Synthetic oligonucleotide
  Sense strand starting at position 2043 of SEQ ID NO: 916569
ucgagcuuuggccauacaa

SEQ ID NO: 1166947 - RNA, 19 nt, Artificial Sequence
  Description of Artificial Sequence: Synthetic oligonucleotide
  Antisense strand to SEQ ID NO: 1166946
uuguauggccaaagcucga

SEQ ID NO: 1166948 - RNA, 19 nt, Artificial Sequence
  Description of Artificial Sequence: Synthetic oligonucleotide
  Sense strand starting at position 2154 of SEQ ID NO: 916569
ggaaugucugcgcgcguga

SEQ ID NO: 1166949 - RNA, 19 nt, Artificial Sequence
  Description of Artificial Sequence: Synthetic oligonucleotide
  Antisense strand to SEQ ID NO: 1166948
ucacgcgcgcagacauucc

SEQ ID NO: 1166950 - RNA, 19 nt, Artificial Sequence
  Description of Artificial Sequence: Synthetic oligonucleotide
  Sense strand starting at position 2202 of SEQ ID NO: 916569
cgcggauuguuugaucuau

SEQ ID NO: 1166951 - RNA, 19 nt, Artificial Sequence
  Description of Artificial Sequence: Synthetic oligonucleotide
  Antisense strand to SEQ ID NO: 1166950
auagaucaaacaauccgcg

SEQ ID NO: 1166952 - RNA, 19 nt, Artificial Sequence
  Description of Artificial Sequence: Synthetic oligonucleotide
  Sense strand starting at position 2204 of SEQ ID NO: 916569
cggauuguuugaucuauaa

SEQ ID NO: 1166953 - RNA, 19 nt, Artificial Sequence
  Description of Artificial Sequence: Synthetic oligonucleotide
  Antisense strand to SEQ ID NO: 1166952
uuauagaucaaacaauccg

SEQ ID NO: 1166954 - RNA, 19 nt, Artificial Sequence
  Description of Artificial Sequence: Synthetic oligonucleotide
  Sense strand starting at position 2392 of SEQ ID NO: 916569
ggaugaggaucuccucacu

SEQ ID NO: 1166955 - RNA, 19 nt, Artificial Sequence
  Description of Artificial Sequence: Synthetic oligonucleotide
  Antisense strand to SEQ ID NO: 1166954
agugaggagauccucaucc

SEQ ID NO: 1166956 - RNA, 19 nt, Artificial Sequence
  Description of Artificial Sequence: Synthetic oligonucleotide
  Sense strand starting at position 2681 of SEQ ID NO: 916569
guuagagcccucgcuuagu

SEQ ID NO: 1166957 - RNA, 19 nt, Artificial Sequence
  Description of Artificial Sequence: Synthetic oligonucleotide
  Antisense strand to SEQ ID NO: 1166956
acuaagcgagggcucuaac

SEQ ID NO: 1166958 - RNA, 19 nt, Artificial Sequence
  Description of Artificial Sequence: Synthetic oligonucleotide
  Sense strand starting at position 2841 of SEQ ID NO: 916569
gcacccuaguugggaaauu

SEQ ID NO: 1166959 - RNA, 19 nt, Artificial Sequence
  Description of Artificial Sequence: Synthetic oligonucleotide
  Antisense strand to SEQ ID NO: 1166958
aauuucccaacuagggugc

SEQ ID NO: 1166960 - RNA, 19 nt, Artificial Sequence
  Description of Artificial Sequence: Synthetic oligonucleotide
  Sense strand starting at position 2842 of SEQ ID NO: 916569
cacccuaguugggaaauua

SEQ ID NO: 1166961 - RNA, 19 nt, Artificial Sequence
  Description of Artificial Sequence: Synthetic oligonucleotide
  Antisense strand to SEQ ID NO: 1166960
uaauuucccaacuagggug

SEQ ID NO: 1166962 - RNA, 19 nt, Artificial Sequence
  Description of Artificial Sequence: Synthetic oligonucleotide
  Sense strand starting at position 2850 of SEQ ID NO: 916569
uugggaaauuaccgaauuu

SEQ ID NO: 1166963 - RNA, 19 nt, Artificial Sequence
  Description of Artificial Sequence: Synthetic oligonucleotide
  Antisense strand to SEQ ID NO: 1166962
aaauucgguaauuucccaa

SEQ ID NO: 1166964 - RNA, 19 nt, Artificial Sequence
  Description of Artificial Sequence: Synthetic oligonucleotide
  Sense strand starting at position 2874 of SEQ ID NO: 916569
ccggguggagccugagaaa

SEQ ID NO: 1166965 - RNA, 19 nt, Artificial Sequence
  Description of Artificial Sequence: Synthetic oligonucleotide
  Antisense strand to SEQ ID NO: 1166964
uuucucaggcuccacccgg

SEQ ID NO: 1166966 - RNA, 19 nt, Artificial Sequence
  Description of Artificial Sequence: Synthetic oligonucleotide
  Sense strand starting at position 2877 of SEQ ID NO: 916569
gguggagccugagaaaucu

SEQ ID NO: 1166967 - RNA, 19 nt, Artificial Sequence
  Description of Artificial Sequence: Synthetic oligonucleotide
  Antisense strand to SEQ ID NO: 1166966
agauuucucaggcuccacc

SEQ ID NO: 1166968 - RNA, 19 nt, Artificial Sequence
  Description of Artificial Sequence: Synthetic oligonucleotide
  Sense strand starting at position 3119 of SEQ ID NO: 916569
ggcagcucugaccaguuau

SEQ ID NO: 1166969 - RNA, 19 nt, Artificial Sequence
  Description of Artificial Sequence: Synthetic oligonucleotide
  Antisense strand to SEQ ID NO: 1166968
auaacuggucagagcugcc

SEQ ID NO: 1166970 - RNA, 19 nt, Artificial Sequence
  Description of Artificial Sequence: Synthetic oligonucleotide
  Sense strand starting at position 3373 of SEQ ID NO: 916569
agucaauauccaugaguuu

SEQ ID NO: 1166971 - RNA, 19 nt, Artificial Sequence
  Description of Artificial Sequence: Synthetic oligonucleotide
  Antisense strand to SEQ ID NO: 1166970
aaacucauggauauugacu

SEQ ID NO: 1166972 - RNA, 19 nt, Artificial Sequence
  Description of Artificial Sequence: Synthetic oligonucleotide
  Sense strand starting at position 3374 of SEQ ID NO: 916569
gucaauauccaugaguuuc

SEQ ID NO: 1166973 - RNA, 19 nt, Artificial Sequence
  Description of Artificial Sequence: Synthetic oligonucleotide
  Antisense strand to SEQ ID NO: 1166972
gaaacucauggauauugac

SEQ ID NO: 1166974 - RNA, 19 nt, Artificial Sequence
  Description of Artificial Sequence: Synthetic oligonucleotide
  Sense strand starting at position 3382 of SEQ ID NO: 916569
ccaugaguuucugcuucca

SEQ ID NO: 1166975 - RNA, 19 nt, Artificial Sequence
  Description of Artificial Sequence: Synthetic oligonucleotide
  Antisense strand to SEQ ID NO: 1166974
uggaagcagaaacucaugg

SEQ ID NO: 1166976 - RNA, 19 nt, Artificial Sequence
  Description of Artificial Sequence: Synthetic oligonucleotide
  Sense strand starting at position 3384 of SEQ ID NO: 916569
augaguuucugcuuccauu

SEQ ID NO: 1166977 - RNA, 19 nt, Artificial Sequence
  Description of Artificial Sequence: Synthetic oligonucleotide
  Antisense strand to SEQ ID NO: 1166976
aauggaagcagaaacucau

SEQ ID NO: 1166978 - RNA, 19 nt, Artificial Sequence
  Description of Artificial Sequence: Synthetic oligonucleotide
  Sense strand starting at position 3737 of SEQ ID NO: 916569
uuuguugucuuugagacaa

SEQ ID NO: 1166979 - RNA, 19 nt, Artificial Sequence
  Description of Artificial Sequence: Synthetic oligonucleotide
  Antisense strand to SEQ ID NO: 1166978
uugucucaaagacaacaaa

SEQ ID NO: 1166980 - RNA, 19 nt, Artificial Sequence
  Description of Artificial Sequence: Synthetic oligonucleotide
  Sense strand starting at position 55 of SEQ ID NO: 916570
guaacugcuagggaucaau

SEQ ID NO: 1166981 - RNA, 19 nt, Artificial Sequence
  Description of Artificial Sequence: Synthetic oligonucleotide
  Antisense strand to SEQ ID NO: 1166980
auugaucccuagcaguuac

SEQ ID NO: 1166982 - RNA, 19 nt, Artificial Sequence
  Description of Artificial Sequence: Synthetic oligonucleotide
  Sense strand starting at position 152 of SEQ ID NO: 916570
uggcaaugucaguagagca

SEQ ID NO: 1166983 - RNA, 19 nt, Artificial Sequence
  Description of Artificial Sequence: Synthetic oligonucleotide
  Antisense strand to SEQ ID NO: 1166982
ugcucuacugacauugcca

SEQ ID NO: 1166984 - RNA, 19 nt, Artificial Sequence
  Description of Artificial Sequence: Synthetic oligonucleotide
  Sense strand starting at position 219 of SEQ ID NO: 916570
gccauugagagccgaagaa

SEQ ID NO: 1166985 - RNA, 19 nt, Artificial Sequence
  Description of Artificial Sequence: Synthetic oligonucleotide
  Antisense strand to SEQ ID NO: 1166984
uucuucggcucucaauggc

SEQ ID NO: 1166986 - RNA, 19 nt, Artificial Sequence
  Description of Artificial Sequence: Synthetic oligonucleotide
  Sense strand starting at position 409 of SEQ ID NO: 916570
agaggagucuggaaaggug

SEQ ID NO: 1166987 - RNA, 19 nt, Artificial Sequence
  Description of Artificial Sequence: Synthetic oligonucleotide
  Antisense strand to SEQ ID NO: 1166986
caccuuuccagacuccucu

SEQ ID NO: 1166988 - RNA, 19 nt, Artificial Sequence
  Description of Artificial Sequence: Synthetic oligonucleotide
  Sense strand starting at position 540 of SEQ ID NO: 916570
uugaguaccucuucucaga

SEQ ID NO: 1166989 - RNA, 19 nt, Artificial Sequence
  Description of Artificial Sequence: Synthetic oligonucleotide
  Antisense strand to SEQ ID NO: 1166988
ucugagaagagguacucaa

SEQ ID NO: 1166990 - RNA, 19 nt, Artificial Sequence
  Description of Artificial Sequence: Synthetic oligonucleotide
  Sense strand starting at position 613 of SEQ ID NO: 916570
cucucuuccacgggucaga

SEQ ID NO: 1166991 - RNA, 19 nt, Artificial Sequence
  Description of Artificial Sequence: Synthetic oligonucleotide
  Antisense strand to SEQ ID NO: 1166990
ucugacccguggaagagag

SEQ ID NO: 1166992 - RNA, 19 nt, Artificial Sequence
  Description of Artificial Sequence: Synthetic oligonucleotide
  Sense strand starting at position 636 of SEQ ID NO: 916570
aggaauauuucucagacua

SEQ ID NO: 1166993 - RNA, 19 nt, Artificial Sequence
  Description of Artificial Sequence: Synthetic oligonucleotide
  Antisense strand to SEQ ID NO: 1166992
uagucugagaaauauuccu

SEQ ID NO: 1166994 - RNA, 19 nt, Artificial Sequence
  Description of Artificial Sequence: Synthetic oligonucleotide
  Sense strand starting at position 1259 of SEQ ID NO: 916570
guuguaagugaccacucua

SEQ ID NO: 1166995 - RNA, 19 nt, Artificial Sequence
  Description of Artificial Sequence: Synthetic oligonucleotide
  Antisense strand to SEQ ID NO: 1166994
uagaguggucacuuacaac

SEQ ID NO: 1166996 - RNA, 19 nt, Artificial Sequence
  Description of Artificial Sequence: Synthetic oligonucleotide
  Sense strand starting at position 1424 of SEQ ID NO: 916570
ggugaagagccuugaguug

SEQ ID NO: 1166997 - RNA, 19 nt, Artificial Sequence
  Description of Artificial Sequence: Synthetic oligonucleotide
  Antisense strand to SEQ ID NO: 1166996
caacucaaggcucuucacc

SEQ ID NO: 1166998 - RNA, 19 nt, Artificial Sequence
  Description of Artificial Sequence: Synthetic oligonucleotide
  Sense strand starting at position 2162 of SEQ ID NO: 916570
gagacagugcuguaaacug

SEQ ID NO: 1166999 - RNA, 19 nt, Artificial Sequence
  Description of Artificial Sequence: Synthetic oligonucleotide
  Antisense strand to SEQ ID NO: 1166998
caguuuacagcacugucuc

SEQ ID NO: 1167000 - RNA, 19 nt, Artificial Sequence
  Description of Artificial Sequence: Synthetic oligonucleotide
  Sense strand starting at position 2359 of SEQ ID NO: 916570
gccaguaacuggguucaga

SEQ ID NO: 1167001 - RNA, 19 nt, Artificial Sequence
  Description of Artificial Sequence: Synthetic oligonucleotide
  Antisense strand to SEQ ID NO: 1167000
ucugaacccaguuacuggc

SEQ ID NO: 1167002 - RNA, 19 nt, Artificial Sequence
  Description of Artificial Sequence: Synthetic oligonucleotide
  Sense strand starting at position 2464 of SEQ ID NO: 916570
augucagagucuuuaacua

SEQ ID NO: 1167003 - RNA, 19 nt, Artificial Sequence
  Description of Artificial Sequence: Synthetic oligonucleotide
  Antisense strand to SEQ ID NO: 1167002
uaguuaaagacucugacau

SEQ ID NO: 1167004 - RNA, 19 nt, Artificial Sequence
  Description of Artificial Sequence: Synthetic oligonucleotide
  Sense strand starting at position 2527 of SEQ ID NO: 916570
ugaaucuucccacgaguag

SEQ ID NO: 1167005 - RNA, 19 nt, Artificial Sequence
  Description of Artificial Sequence: Synthetic oligonucleotide
  Antisense strand to SEQ ID NO: 1167004
cuacucgugggaagauuca

SEQ ID NO: 1167006 - RNA, 19 nt, Artificial Sequence
  Description of Artificial Sequence: Synthetic oligonucleotide
  Sense strand starting at position 2528 of SEQ ID NO: 916570
gaaucuucccacgaguaga

SEQ ID NO: 1167007 - RNA, 19 nt, Artificial Sequence
  Description of Artificial Sequence: Synthetic oligonucleotide
  Antisense strand to SEQ ID NO: 1167006
ucuacucgugggaagauuc

SEQ ID NO: 1167008 - RNA, 19 nt, Artificial Sequence
  Description of Artificial Sequence: Synthetic oligonucleotide
  Sense strand starting at position 2531 of SEQ ID NO: 916570
ucuucccacgaguagaaau

SEQ ID NO: 1167009 - RNA, 19 nt, Artificial Sequence
  Description of Artificial Sequence: Synthetic oligonucleotide
  Antisense strand to SEQ ID NO: 1167008
auuucuacucgugggaaga

SEQ ID NO: 1167010 - RNA, 19 nt, Artificial Sequence
  Description of Artificial Sequence: Synthetic oligonucleotide
  Sense strand starting at position 2543 of SEQ ID NO: 916570
uagaaauugucccuggcau

SEQ ID NO: 1167011 - RNA, 19 nt, Artificial Sequence
  Description of Artificial Sequence: Synthetic oligonucleotide
  Antisense strand to SEQ ID NO: 1167010
augccagggacaauuucua

SEQ ID NO: 1167012 - RNA, 19 nt, Artificial Sequence
  Description of Artificial Sequence: Synthetic oligonucleotide
  Sense strand starting at position 2544 of SEQ ID NO: 916570
agaaauugucccuggcauc

SEQ ID NO: 1167013 - RNA, 19 nt, Artificial Sequence
  Description of Artificial Sequence: Synthetic oligonucleotide
  Antisense strand to SEQ ID NO: 1167012
gaugccagggacaauuucu

SEQ ID NO: 1167014 - RNA, 19 nt, Artificial Sequence
  Description of Artificial Sequence: Synthetic oligonucleotide
  Sense strand starting at position 2545 of SEQ ID NO: 916570
gaaauugucccuggcaucu

SEQ ID NO: 1167015 - RNA, 19 nt, Artificial Sequence
  Description of Artificial Sequence: Synthetic oligonucleotide
  Antisense strand to SEQ ID NO: 1167014
agaugccagggacaauuuc

SEQ ID NO: 1167016 - RNA, 19 nt, Artificial Sequence
  Description of Artificial Sequence: Synthetic oligonucleotide
  Sense strand starting at position 2562 of SEQ ID NO: 916570
cucagucuccuuuauauga

SEQ ID NO: 1167017 - RNA, 19 nt, Artificial Sequence
  Description of Artificial Sequence: Synthetic oligonucleotide
  Antisense strand to SEQ ID NO: 1167016
ucauauaaaggagacugag

SEQ ID NO: 1167018 - RNA, 19 nt, Artificial Sequence
  Description of Artificial Sequence: Synthetic oligonucleotide
  Sense strand starting at position 2726 of SEQ ID NO: 916570
ugaaauugguguuuaucag

SEQ ID NO: 1167019 - RNA, 19 nt, Artificial Sequence
  Description of Artificial Sequence: Synthetic oligonucleotide
  Antisense strand to SEQ ID NO: 1167018
cugauaaacaccaauuuca

SEQ ID NO: 1167020 - RNA, 19 nt, Artificial Sequence
  Description of Artificial Sequence: Synthetic oligonucleotide
  Sense strand starting at position 2736 of SEQ ID NO: 916570
guuuaucaggcccagacuu

SEQ ID NO: 1167021 - RNA, 19 nt, Artificial Sequence
  Description of Artificial Sequence: Synthetic oligonucleotide
  Antisense strand to SEQ ID NO: 1167020
aagucugggccugauaaac

SEQ ID NO: 1167022 - RNA, 19 nt, Artificial Sequence
  Description of Artificial Sequence: Synthetic oligonucleotide
  Sense strand starting at position 2744 of SEQ ID NO: 916570
ggcccagacuucuuuauau

SEQ ID NO: 1167023 - RNA, 19 nt, Artificial Sequence
  Description of Artificial Sequence: Synthetic oligonucleotide
  Antisense strand to SEQ ID NO: 1167022
auauaaagaagucugggcc

SEQ ID NO: 1167024 - RNA, 19 nt, Artificial Sequence
  Description of Artificial Sequence: Synthetic oligonucleotide
  Sense strand starting at position 2813 of SEQ ID NO: 916570
uguccuacucacuguauuu

SEQ ID NO: 1167025 - RNA, 19 nt, Artificial Sequence
  Description of Artificial Sequence: Synthetic oligonucleotide
  Antisense strand to SEQ ID NO: 1167024
aaauacagugaguaggaca

SEQ ID NO: 1167026 - RNA, 19 nt, Artificial Sequence
  Description of Artificial Sequence: Synthetic oligonucleotide
  Sense strand starting at position 2824 of SEQ ID NO: 916570
cuguauuuauucuucugca

SEQ ID NO: 1167027 - RNA, 19 nt, Artificial Sequence
  Description of Artificial Sequence: Synthetic oligonucleotide
  Antisense strand to SEQ ID NO: 1167026
ugcagaagaauaaauacag

SEQ ID NO: 1167028 - RNA, 19 nt, Artificial Sequence
  Description of Artificial Sequence: Synthetic oligonucleotide
  Sense strand starting at position 2919 of SEQ ID NO: 916570
ucaccugcuguguaacaua

SEQ ID NO: 1167029 - RNA, 19 nt, Artificial Sequence
  Description of Artificial Sequence: Synthetic oligonucleotide
  Antisense strand to SEQ ID NO: 1167028
uauguuacacagcagguga

SEQ ID NO: 1167030 - RNA, 19 nt, Artificial Sequence
  Description of Artificial Sequence: Synthetic oligonucleotide
  Sense strand starting at position 2924 of SEQ ID NO: 916570
ugcuguguaacauaguauu

SEQ ID NO: 1167031 - RNA, 19 nt, Artificial Sequence
  Description of Artificial Sequence: Synthetic oligonucleotide
  Antisense strand to SEQ ID NO: 1167030
aauacuauguuacacagca

SEQ ID NO: 1167032 - RNA, 19 nt, Artificial Sequence
  Description of Artificial Sequence: Synthetic oligonucleotide
  Sense strand starting at position 2935 of SEQ ID NO: 916570
auaguauuccauuagaugc

SEQ ID NO: 1167033 - RNA, 19 nt, Artificial Sequence
  Description of Artificial Sequence: Synthetic oligonucleotide
  Antisense strand to SEQ ID NO: 1167032
gcaucuaauggaauacuau

SEQ ID NO: 1167034 - RNA, 19 nt, Artificial Sequence
  Description of Artificial Sequence: Synthetic oligonucleotide
  Sense strand starting at position 2943 of SEQ ID NO: 916570
ccauuagaugcaugcauga

SEQ ID NO: 1167035 - RNA, 19 nt, Artificial Sequence
  Description of Artificial Sequence: Synthetic oligonucleotide
  Antisense strand to SEQ ID NO: 1167034
ucaugcaugcaucuaaugg

SEQ ID NO: 1167036 - RNA, 19 nt, Artificial Sequence
  Description of Artificial Sequence: Synthetic oligonucleotide
  Sense strand starting at position 2953 of SEQ ID NO: 916570
caugcaugacauugaggaa

SEQ ID NO: 1167037 - RNA, 19 nt, Artificial Sequence
  Description of Artificial Sequence: Synthetic oligonucleotide
  Antisense strand to SEQ ID NO: 1167036
uuccucaaugucaugcaug

SEQ ID NO: 1167038 - RNA, 19 nt, Artificial Sequence
  Description of Artificial Sequence: Synthetic oligonucleotide
  Sense strand starting at position 2965 of SEQ ID NO: 916570
ugaggaaauguagguuauu

SEQ ID NO: 1167039 - RNA, 19 nt, Artificial Sequence
  Description of Artificial Sequence: Synthetic oligonucleotide
  Antisense strand to SEQ ID NO: 1167038
aauaaccuacauuuccuca

SEQ ID NO: 1167040 - RNA, 19 nt, Artificial Sequence
  Description of Artificial Sequence: Synthetic oligonucleotide
  Sense strand starting at position 3052 of SEQ ID NO: 916570
guaggcauuucucuagagu

SEQ ID NO: 1167041 - RNA, 19 nt, Artificial Sequence
  Description of Artificial Sequence: Synthetic oligonucleotide
  Antisense strand to SEQ ID NO: 1167040
acucuagagaaaugccuac

SEQ ID NO: 1167042 - RNA, 19 nt, Artificial Sequence
  Description of Artificial Sequence: Synthetic oligonucleotide
  Sense strand starting at position 3236 of SEQ ID NO: 916570
ccuggcuuaucagcagauu

SEQ ID NO: 1167043 - RNA, 19 nt, Artificial Sequence
  Description of Artificial Sequence: Synthetic oligonucleotide
  Antisense strand to SEQ ID NO: 1167042
aaucugcugauaagccagg

SEQ ID NO: 1167044 - RNA, 19 nt, Artificial Sequence
  Description of Artificial Sequence: Synthetic oligonucleotide
  Sense strand starting at position 3322 of SEQ ID NO: 916570
ggaugcucacagggugauu

SEQ ID NO: 1167045 - RNA, 19 nt, Artificial Sequence
  Description of Artificial Sequence: Synthetic oligonucleotide
  Antisense strand to SEQ ID NO: 1167044
aaucacccugugagcaucc

SEQ ID NO: 1167046 - RNA, 19 nt, Artificial Sequence
  Description of Artificial Sequence: Synthetic oligonucleotide
  Sense strand starting at position 3522 of SEQ ID NO: 916570
gaaaguguuauggguugaa

SEQ ID NO: 1167047 - RNA, 19 nt, Artificial Sequence
  Description of Artificial Sequence: Synthetic oligonucleotide
  Antisense strand to SEQ ID NO: 1167046
uucaacccauaacacuuuc

SEQ ID NO: 1167048 - RNA, 19 nt, Artificial Sequence
  Description of Artificial Sequence: Synthetic oligonucleotide
  Sense strand starting at position 3611 of SEQ ID NO: 916570
ggccuuuacagauauggug

SEQ ID NO: 1167049 - RNA, 19 nt, Artificial Sequence
  Description of Artificial Sequence: Synthetic oligonucleotide
  Antisense strand to SEQ ID NO: 1167048
caccauaucuguaaaggcc

SEQ ID NO: 1167050 - RNA, 19 nt, Artificial Sequence
  Description of Artificial Sequence: Synthetic oligonucleotide
  Sense strand starting at position 3642 of SEQ ID NO: 916570
ggucauuaggaugagccua

SEQ ID NO: 1167051 - RNA, 19 nt, Artificial Sequence
  Description of Artificial Sequence: Synthetic oligonucleotide
  Antisense strand to SEQ ID NO: 1167050
uaggcucauccuaaugacc

SEQ ID NO: 1167052 - RNA, 19 nt, Artificial Sequence
  Description of Artificial Sequence: Synthetic oligonucleotide
  Sense strand starting at position 3650 of SEQ ID NO: 916570
ggaugagccuacucccaua

SEQ ID NO: 1167053 - RNA, 19 nt, Artificial Sequence
  Description of Artificial Sequence: Synthetic oligonucleotide
  Antisense strand to SEQ ID NO: 1167052
uaugggaguaggcucaucc

SEQ ID NO: 1167054 - RNA, 19 nt, Artificial Sequence
  Description of Artificial Sequence: Synthetic oligonucleotide
  Sense strand starting at position 3740 of SEQ ID NO: 916570
ggcugaggucgggauaaug

SEQ ID NO: 1167055 - RNA, 19 nt, Artificial Sequence
  Description of Artificial Sequence: Synthetic oligonucleotide
  Antisense strand to SEQ ID NO: 1167054
cauuaucccgaccucagcc

SEQ ID NO: 1167056 - RNA, 19 nt, Artificial Sequence
  Description of Artificial Sequence: Synthetic oligonucleotide
  Sense strand starting at position 3941 of SEQ ID NO: 916570
ugugauacauacuuuguua

SEQ ID NO: 1167057 - RNA, 19 nt, Artificial Sequence
  Description of Artificial Sequence: Synthetic oligonucleotide
  Antisense strand to SEQ ID NO: 1167056
uaacaaaguauguaucaca

SEQ ID NO: 1167058 - RNA, 19 nt, Artificial Sequence
  Description of Artificial Sequence: Synthetic oligonucleotide
  Sense strand starting at position 3943 of SEQ ID NO: 916570
ugauacauacuuuguuaug

SEQ ID NO: 1167059 - RNA, 19 nt, Artificial Sequence
  Description of Artificial Sequence: Synthetic oligonucleotide
  Antisense strand to SEQ ID NO: 1167058
cauaacaaaguauguauca

SEQ ID NO: 1167060 - RNA, 19 nt, Artificial Sequence
  Description of Artificial Sequence: Synthetic oligonucleotide
  Sense strand starting at position 16 of SEQ ID NO: 916571
ggauaaaguguaugccaga

SEQ ID NO: 1167061 - RNA, 19 nt, Artificial Sequence
  Description of Artificial Sequence: Synthetic oligonucleotide
  Antisense strand to SEQ ID NO: 1167060
ucuggcauacacuuuaucc

SEQ ID NO: 1167062 - RNA, 19 nt, Artificial Sequence
  Description of Artificial Sequence: Synthetic oligonucleotide
  Sense strand starting at position 17 of SEQ ID NO: 916571
gauaaaguguaugccagau

SEQ ID NO: 1167063 - RNA, 19 nt, Artificial Sequence
  Description of Artificial Sequence: Synthetic oligonucleotide
  Antisense strand to SEQ ID NO: 1167062
aucuggcauacacuuuauc

SEQ ID NO: 1167064 - RNA, 19 nt, Artificial Sequence
  Description of Artificial Sequence: Synthetic oligonucleotide
  Sense strand starting at position 430 of SEQ ID NO: 916571
uggguuugauaaucuucua

SEQ ID NO: 1167065 - RNA, 19 nt, Artificial Sequence
  Description of Artificial Sequence: Synthetic oligonucleotide
  Antisense strand to SEQ ID NO: 1167064
uagaagauuaucaaaccca

SEQ ID NO: 1167066 - RNA, 19 nt, Artificial Sequence
  Description of Artificial Sequence: Synthetic oligonucleotide
  Sense strand starting at position 594 of SEQ ID NO: 916571
agaauucugcauugcuagu

SEQ ID NO: 1167067 - RNA, 19 nt, Artificial Sequence
  Description of Artificial Sequence: Synthetic oligonucleotide
  Antisense strand to SEQ ID NO: 1167066
acuagcaaugcagaauucu

SEQ ID NO: 1167068 - RNA, 19 nt, Artificial Sequence
  Description of Artificial Sequence: Synthetic oligonucleotide
  Sense strand starting at position 705 of SEQ ID NO: 916571
cguucuugcucaccaaaua

SEQ ID NO: 1167069 - RNA, 19 nt, Artificial Sequence
  Description of Artificial Sequence: Synthetic oligonucleotide
  Antisense strand to SEQ ID NO: 1167068
uauuuggugagcaagaacg

SEQ ID NO: 1167070 - RNA, 19 nt, Artificial Sequence
  Description of Artificial Sequence: Synthetic oligonucleotide
  Sense strand starting at position 784 of SEQ ID NO: 916571
ucugaauccuccuuggaag

SEQ ID NO: 1167071 - RNA, 19 nt, Artificial Sequence
  Description of Artificial Sequence: Synthetic oligonucleotide
  Antisense strand to SEQ ID NO: 1167070
cuuccaaggaggauucaga

SEQ ID NO: 1167072 - RNA, 19 nt, Artificial Sequence
  Description of Artificial Sequence: Synthetic oligonucleotide
  Sense strand starting at position 814 of SEQ ID NO: 916571
auggauuauugguucccaa

SEQ ID NO: 1167073 - RNA, 19 nt, Artificial Sequence
  Description of Artificial Sequence: Synthetic oligonucleotide
  Antisense strand to SEQ ID NO: 1167072
uugggaaccaauaauccau

SEQ ID NO: 1167074 - RNA, 19 nt, Artificial Sequence
  Description of Artificial Sequence: Synthetic oligonucleotide
  Sense strand starting at position 817 of SEQ ID NO: 916571
gauuauugguucccaaaug

SEQ ID NO: 1167075 - RNA, 19 nt, Artificial Sequence
  Description of Artificial Sequence: Synthetic oligonucleotide
  Antisense strand to SEQ ID NO: 1167074
cauuugggaaccaauaauc

SEQ ID NO: 1167076 - RNA, 19 nt, Artificial Sequence
  Description of Artificial Sequence: Synthetic oligonucleotide
  Sense strand starting at position 874 of SEQ ID NO: 916571
cugagacagucccuaaauu

SEQ ID NO: 1167077 - RNA, 19 nt, Artificial Sequence
  Description of Artificial Sequence: Synthetic oligonucleotide
  Antisense strand to SEQ ID NO: 1167076
aauuuagggacugucucag

SEQ ID NO: 1167078 - RNA, 19 nt, Artificial Sequence
  Description of Artificial Sequence: Synthetic oligonucleotide
  Sense strand starting at position 960 of SEQ ID NO: 916571
ggaaccuccuucguagauu

SEQ ID NO: 1167079 - RNA, 19 nt, Artificial Sequence
  Description of Artificial Sequence: Synthetic oligonucleotide
  Antisense strand to SEQ ID NO: 1167078
aaucuacgaaggagguucc

SEQ ID NO: 1167080 - RNA, 19 nt, Artificial Sequence
  Description of Artificial Sequence: Synthetic oligonucleotide
  Sense strand starting at position 963 of SEQ ID NO: 916571
accuccuucguagauuaca

SEQ ID NO: 1167081 - RNA, 19 nt, Artificial Sequence
  Description of Artificial Sequence: Synthetic oligonucleotide
  Antisense strand to SEQ ID NO: 1167080
uguaaucuacgaaggaggu

SEQ ID NO: 1167082 - RNA, 19 nt, Artificial Sequence
  Description of Artificial Sequence: Synthetic oligonucleotide
  Sense strand starting at position 971 of SEQ ID NO: 916571
cguagauuacaggaacgau

SEQ ID NO: 1167083 - RNA, 19 nt, Artificial Sequence
  Description of Artificial Sequence: Synthetic oligonucleotide
  Antisense strand to SEQ ID NO: 1167082
aucguuccuguaaucuacg

SEQ ID NO: 1167084 - RNA, 19 nt, Artificial Sequence
  Description of Artificial Sequence: Synthetic oligonucleotide
  Sense strand starting at position 1108 of SEQ ID NO: 916571
ccuccucaccgagguuaau

SEQ ID NO: 1167085 - RNA, 19 nt, Artificial Sequence
  Description of Artificial Sequence: Synthetic oligonucleotide
  Antisense strand to SEQ ID NO: 1167084
auuaaccucggugaggagg

SEQ ID NO: 1167086 - RNA, 19 nt, Artificial Sequence
  Description of Artificial Sequence: Synthetic oligonucleotide
  Sense strand starting at position 1114 of SEQ ID NO: 916571
caccgagguuaauggauaa

SEQ ID NO: 1167087 - RNA, 19 nt, Artificial Sequence
  Description of Artificial Sequence: Synthetic oligonucleotide
  Antisense strand to SEQ ID NO: 1167086
uuauccauuaaccucggug

SEQ ID NO: 1167088 - RNA, 19 nt, Artificial Sequence
  Description of Artificial Sequence: Synthetic oligonucleotide
  Sense strand starting at position 1471 of SEQ ID NO: 916571
gaugcagauuucgggcuaa

SEQ ID NO: 1167089 - RNA, 19 nt, Artificial Sequence
  Description of Artificial Sequence: Synthetic oligonucleotide
  Antisense strand to SEQ ID NO: 1167088
uuagcccgaaaucugcauc

SEQ ID NO: 1167090 - RNA, 19 nt, Artificial Sequence
  Description of Artificial Sequence: Synthetic oligonucleotide
  Sense strand starting at position 1533 of SEQ ID NO: 916571
gcgcgaguugugaaguuuc

SEQ ID NO: 1167091 - RNA, 19 nt, Artificial Sequence
  Description of Artificial Sequence: Synthetic oligonucleotide
  Antisense strand to SEQ ID NO: 1167090
gaaacuucacaacucgcgc

SEQ ID NO: 1167092 - RNA, 19 nt, Artificial Sequence
  Description of Artificial Sequence: Synthetic oligonucleotide
  Sense strand starting at position 2438 of SEQ ID NO: 916571
gugaccucucuccgcauua

SEQ ID NO: 1167093 - RNA, 19 nt, Artificial Sequence
  Description of Artificial Sequence: Synthetic oligonucleotide
  Antisense strand to SEQ ID NO: 1167092
uaaugcggagagaggucac

SEQ ID NO: 1167094 - RNA, 19 nt, Artificial Sequence
  Description of Artificial Sequence: Synthetic oligonucleotide
  Sense strand starting at position 2439 of SEQ ID NO: 916571
ugaccucucuccgcauuaa

SEQ ID NO: 1167095 - RNA, 19 nt, Artificial Sequence
  Description of Artificial Sequence: Synthetic oligonucleotide
  Antisense strand to SEQ ID NO: 1167094
uuaaugcggagagagguca

SEQ ID NO: 1167096 - RNA, 19 nt, Artificial Sequence
  Description of Artificial Sequence: Synthetic oligonucleotide
  Sense strand starting at position 2625 of SEQ ID NO: 916571
uuaagaccucaguaaguuu

SEQ ID NO: 1167097 - RNA, 19 nt, Artificial Sequence
  Description of Artificial Sequence: Synthetic oligonucleotide
  Antisense strand to SEQ ID NO: 1167096
aaacuuacugaggucuuaa

SEQ ID NO: 1167098 - RNA, 19 nt, Artificial Sequence
  Description of Artificial Sequence: Synthetic oligonucleotide
  Sense strand starting at position 2628 of SEQ ID NO: 916571
agaccucaguaaguuugaa

SEQ ID NO: 1167099 - RNA, 19 nt, Artificial Sequence
  Description of Artificial Sequence: Synthetic oligonucleotide
  Antisense strand to SEQ ID NO: 1167098
uucaaacuuacugaggucu

SEQ ID NO: 1167100 - RNA, 19 nt, Artificial Sequence
  Description of Artificial Sequence: Synthetic oligonucleotide
  Sense strand starting at position 2710 of SEQ ID NO: 916571
ggcagaggucauuggaaca

SEQ ID NO: 1167101 - RNA, 19 nt, Artificial Sequence
  Description of Artificial Sequence: Synthetic oligonucleotide
  Antisense strand to SEQ ID NO: 1167100
uguuccaaugaccucugcc

SEQ ID NO: 1167102 - RNA, 19 nt, Artificial Sequence
  Description of Artificial Sequence: Synthetic oligonucleotide
  Sense strand starting at position 2861 of SEQ ID NO: 916571
gggcaauucuguguggacu

SEQ ID NO: 1167103 - RNA, 19 nt, Artificial Sequence
  Description of Artificial Sequence: Synthetic oligonucleotide
  Antisense strand to SEQ ID NO: 1167102
aguccacacagaauugccc

SEQ ID NO: 1167104 - RNA, 19 nt, Artificial Sequence
  Description of Artificial Sequence: Synthetic oligonucleotide
  Sense strand starting at position 2862 of SEQ ID NO: 916571
ggcaauucuguguggacug

SEQ ID NO: 1167105 - RNA, 19 nt, Artificial Sequence
  Description of Artificial Sequence: Synthetic oligonucleotide
  Antisense strand to SEQ ID NO: 1167104
caguccacacagaauugcc

SEQ ID NO: 1167106 - RNA, 19 nt, Artificial Sequence
  Description of Artificial Sequence: Synthetic oligonucleotide
  Sense strand starting at position 2886 of SEQ ID NO: 916571
gacagagcuucugcaggaa

SEQ ID NO: 1167107 - RNA, 19 nt, Artificial Sequence
  Description of Artificial Sequence: Synthetic oligonucleotide
  Antisense strand to SEQ ID NO: 1167106
uuccugcagaagcucuguc

SEQ ID NO: 1167108 - RNA, 19 nt, Artificial Sequence
  Description of Artificial Sequence: Synthetic oligonucleotide
  Sense strand starting at position 2889 of SEQ ID NO: 916571
agagcuucugcaggaaaga

SEQ ID NO: 1167109 - RNA, 19 nt, Artificial Sequence
  Description of Artificial Sequence: Synthetic oligonucleotide
  Antisense strand to SEQ ID NO: 1167108
ucuuuccugcagaagcucu

SEQ ID NO: 1167110 - RNA, 19 nt, Artificial Sequence
  Description of Artificial Sequence: Synthetic oligonucleotide
  Sense strand starting at position 2965 of SEQ ID NO: 916571
gcuguccugugguuacuua

SEQ ID NO: 1167111 - RNA, 19 nt, Artificial Sequence
  Description of Artificial Sequence: Synthetic oligonucleotide
  Antisense strand to SEQ ID NO: 1167110
uaaguaaccacaggacagc

SEQ ID NO: 1167112 - RNA, 19 nt, Artificial Sequence
  Description of Artificial Sequence: Synthetic oligonucleotide
  Sense strand starting at position 2966 of SEQ ID NO: 916571
cuguccugugguuacuuaa

SEQ ID NO: 1167113 - RNA, 19 nt, Artificial Sequence
  Description of Artificial Sequence: Synthetic oligonucleotide
  Antisense strand to SEQ ID NO: 1167112
uuaaguaaccacaggacag

SEQ ID NO: 1167114 - RNA, 19 nt, Artificial Sequence
  Description of Artificial Sequence: Synthetic oligonucleotide
  Sense strand starting at position 2969 of SEQ ID NO: 916571
uccugugguuacuuaauuu

SEQ ID NO: 1167115 - RNA, 19 nt, Artificial Sequence
  Description of Artificial Sequence: Synthetic oligonucleotide
  Antisense strand to SEQ ID NO: 1167114
aaauuaaguaaccacagga

SEQ ID NO: 1167116 - RNA, 19 nt, Artificial Sequence
  Description of Artificial Sequence: Synthetic oligonucleotide
  Sense strand starting at position 3041 of SEQ ID NO: 916571
accauacuggcuuguguga

SEQ ID NO: 1167117 - RNA, 19 nt, Artificial Sequence
  Description of Artificial Sequence: Synthetic oligonucleotide
  Antisense strand to SEQ ID NO: 1167116
ucacacaagccaguauggu

SEQ ID NO: 1167118 - RNA, 19 nt, Artificial Sequence
  Description of Artificial Sequence: Synthetic oligonucleotide
  Sense strand starting at position 3052 of SEQ ID NO: 916571
uugugugaaauggguggaa

SEQ ID NO: 1167119 - RNA, 19 nt, Artificial Sequence
  Description of Artificial Sequence: Synthetic oligonucleotide
  Antisense strand to SEQ ID NO: 1167118
uuccacccauuucacacaa

SEQ ID NO: 1167120 - RNA, 19 nt, Artificial Sequence
  Description of Artificial Sequence: Synthetic oligonucleotide
  Sense strand starting at position 3054 of SEQ ID NO: 916571
gugugaaauggguggaaca

SEQ ID NO: 1167121 - RNA, 19 nt, Artificial Sequence
  Description of Artificial Sequence: Synthetic oligonucleotide
  Antisense strand to SEQ ID NO: 1167120
uguuccacccauuucacac

SEQ ID NO: 1167122 - RNA, 19 nt, Artificial Sequence
  Description of Artificial Sequence: Synthetic oligonucleotide
  Sense strand starting at position 3095 of SEQ ID NO: 916571
ggcauuaguguaugcucca

SEQ ID NO: 1167123 - RNA, 19 nt, Artificial Sequence
  Description of Artificial Sequence: Synthetic oligonucleotide
  Antisense strand to SEQ ID NO: 1167122
uggagcauacacuaaugcc

SEQ ID NO: 1167124 - RNA, 19 nt, Artificial Sequence
  Description of Artificial Sequence: Synthetic oligonucleotide
  Sense strand starting at position 3098 of SEQ ID NO: 916571
auuaguguaugcuccaguu

SEQ ID NO: 1167125 - RNA, 19 nt, Artificial Sequence
  Description of Artificial Sequence: Synthetic oligonucleotide
  Antisense strand to SEQ ID NO: 1167124
aacuggagcauacacuaau

SEQ ID NO: 1167126 - RNA, 19 nt, Artificial Sequence
  Description of Artificial Sequence: Synthetic oligonucleotide
  Sense strand starting at position 3100 of SEQ ID NO: 916571
uaguguaugcuccaguugu

SEQ ID NO: 1167127 - RNA, 19 nt, Artificial Sequence
  Description of Artificial Sequence: Synthetic oligonucleotide
  Antisense strand to SEQ ID NO: 1167126
acaacuggagcauacacua

SEQ ID NO: 1167128 - RNA, 19 nt, Artificial Sequence
  Description of Artificial Sequence: Synthetic oligonucleotide
  Sense strand starting at position 3104 of SEQ ID NO: 916571
guaugcuccaguuguggga

SEQ ID NO: 1167129 - RNA, 19 nt, Artificial Sequence
  Description of Artificial Sequence: Synthetic oligonucleotide
  Antisense strand to SEQ ID NO: 1167128
ucccacaacuggagcauac

SEQ ID NO: 1167130 - RNA, 19 nt, Artificial Sequence
  Description of Artificial Sequence: Synthetic oligonucleotide
  Sense strand starting at position 3154 of SEQ ID NO: 916571
gguggcaucuggguuuaaa

SEQ ID NO: 1167131 - RNA, 19 nt, Artificial Sequence
  Description of Artificial Sequence: Synthetic oligonucleotide
  Antisense strand to SEQ ID NO: 1167130
uuuaaacccagaugccacc

SEQ ID NO: 1167132 - RNA, 19 nt, Artificial Sequence
  Description of Artificial Sequence: Synthetic oligonucleotide
  Sense strand starting at position 3157 of SEQ ID NO: 916571
ggcaucuggguuuaaacua

SEQ ID NO: 1167133 - RNA, 19 nt, Artificial Sequence
  Description of Artificial Sequence: Synthetic oligonucleotide
  Antisense strand to SEQ ID NO: 1167132
uaguuuaaacccagaugcc

SEQ ID NO: 1167134 - RNA, 19 nt, Artificial Sequence
  Description of Artificial Sequence: Synthetic oligonucleotide
  Sense strand starting at position 3292 of SEQ ID NO: 916571
gagaaucgguuccagaaca

SEQ ID NO: 1167135 - RNA, 19 nt, Artificial Sequence
  Description of Artificial Sequence: Synthetic oligonucleotide
  Antisense strand to SEQ ID NO: 1167134
uguucuggaaccgauucuc

SEQ ID NO: 1167136 - RNA, 19 nt, Artificial Sequence
  Description of Artificial Sequence: Synthetic oligonucleotide
  Sense strand starting at position 3864 of SEQ ID NO: 916571
acagaaggcugacaguaau

SEQ ID NO: 1167137 - RNA, 19 nt, Artificial Sequence
  Description of Artificial Sequence: Synthetic oligonucleotide
  Antisense strand to SEQ ID NO: 1167136
auuacugucagccuucugu

SEQ ID NO: 1167138 - RNA, 19 nt, Artificial Sequence
  Description of Artificial Sequence: Synthetic oligonucleotide
  Sense strand starting at position 3958 of SEQ ID NO: 916571
aacauauaguauguaggau

SEQ ID NO: 1167139 - RNA, 19 nt, Artificial Sequence
  Description of Artificial Sequence: Synthetic oligonucleotide
  Antisense strand to SEQ ID NO: 1167138
auccuacauacuauauguu

SEQ ID NO: 1167140 - RNA, 19 nt, Artificial Sequence
  Description of Artificial Sequence: Synthetic oligonucleotide
  Sense strand starting at position 2 of SEQ ID NO: 916572
ggcugaguacgcuggagaa

SEQ ID NO: 1167141 - RNA, 19 nt, Artificial Sequence
  Description of Artificial Sequence: Synthetic oligonucleotide
  Antisense strand to SEQ ID NO: 1167140
uucuccagcguacucagcc

SEQ ID NO: 1167142 - RNA, 19 nt, Artificial Sequence
  Description of Artificial Sequence: Synthetic oligonucleotide
  Sense strand starting at position 4 of SEQ ID NO: 916572
cugaguacgcuggagaacu

SEQ ID NO: 1167143 - RNA, 19 nt, Artificial Sequence
  Description of Artificial Sequence: Synthetic oligonucleotide
  Antisense strand to SEQ ID NO: 1167142
aguucuccagcguacucag

SEQ ID NO: 1167144 - RNA, 19 nt, Artificial Sequence
  Description of Artificial Sequence: Synthetic oligonucleotide
  Sense strand starting at position 14 of SEQ ID NO: 916572
uggagaacuucugaguguu

SEQ ID NO: 1167145 - RNA, 19 nt, Artificial Sequence
  Description of Artificial Sequence: Synthetic oligonucleotide
  Antisense strand to SEQ ID NO: 1167144
aacacucagaaguucucca

SEQ ID NO: 1167146 - RNA, 19 nt, Artificial Sequence
  Description of Artificial Sequence: Synthetic oligonucleotide
  Sense strand starting at position 16 of SEQ ID NO: 916572
gagaacuucugaguguugu

SEQ ID NO: 1167147 - RNA, 19 nt, Artificial Sequence
  Description of Artificial Sequence: Synthetic oligonucleotide
  Antisense strand to SEQ ID NO: 1167146
acaacacucagaaguucuc

SEQ ID NO: 1167148 - RNA, 19 nt, Artificial Sequence
  Description of Artificial Sequence: Synthetic oligonucleotide
  Sense strand starting at position 55 of SEQ ID NO: 916572
agucuccucuauguuacaa

SEQ ID NO: 1167149 - RNA, 19 nt, Artificial Sequence
  Description of Artificial Sequence: Synthetic oligonucleotide
  Antisense strand to SEQ ID NO: 1167148
uuguaacauagaggagacu

SEQ ID NO: 1167150 - RNA, 19 nt, Artificial Sequence
  Description of Artificial Sequence: Synthetic oligonucleotide
  Sense strand starting at position 145 of SEQ ID NO: 916572
gcgggcaccucuuuauuua

SEQ ID NO: 1167151 - RNA, 19 nt, Artificial Sequence
  Description of Artificial Sequence: Synthetic oligonucleotide
  Antisense strand to SEQ ID NO: 1167150
uaaauaaagaggugcccgc

SEQ ID NO: 1167152 - RNA, 19 nt, Artificial Sequence
  Description of Artificial Sequence: Synthetic oligonucleotide
  Sense strand starting at position 184 of SEQ ID NO: 916572
acuccauaaucagcugagu

SEQ ID NO: 1167153 - RNA, 19 nt, Artificial Sequence
  Description of Artificial Sequence: Synthetic oligonucleotide
  Antisense strand to SEQ ID NO: 1167152
acucagcugauuauggagu

SEQ ID NO: 1167154 - RNA, 19 nt, Artificial Sequence
  Description of Artificial Sequence: Synthetic oligonucleotide
  Sense strand starting at position 189 of SEQ ID NO: 916572
auaaucagcugaguuacaa

SEQ ID NO: 1167155 - RNA, 19 nt, Artificial Sequence
  Description of Artificial Sequence: Synthetic oligonucleotide
  Antisense strand to SEQ ID NO: 1167154
uuguaacucagcugauuau

SEQ ID NO: 1167156 - RNA, 19 nt, Artificial Sequence
  Description of Artificial Sequence: Synthetic oligonucleotide
  Sense strand starting at position 559 of SEQ ID NO: 916572
gccaaacucccgcaaagaa

SEQ ID NO: 1167157 - RNA, 19 nt, Artificial Sequence
  Description of Artificial Sequence: Synthetic oligonucleotide
  Antisense strand to SEQ ID NO: 1167156
uucuuugcgggaguuuggc

SEQ ID NO: 1167158 - RNA, 19 nt, Artificial Sequence
  Description of Artificial Sequence: Synthetic oligonucleotide
  Sense strand starting at position 685 of SEQ ID NO: 916572
ucccaagcgucccaaauuu

SEQ ID NO: 1167159 - RNA, 19 nt, Artificial Sequence
  Description of Artificial Sequence: Synthetic oligonucleotide
  Antisense strand to SEQ ID NO: 1167158
aaauuugggacgcuuggga

SEQ ID NO: 1167160 - RNA, 19 nt, Artificial Sequence
  Description of Artificial Sequence: Synthetic oligonucleotide
  Sense strand starting at position 1334 of SEQ ID NO: 916572
gugguugauucuguugaau

SEQ ID NO: 1167161 - RNA, 19 nt, Artificial Sequence
  Description of Artificial Sequence: Synthetic oligonucleotide
  Antisense strand to SEQ ID NO: 1167160
auucaacagaaucaaccac

SEQ ID NO: 1167162 - RNA, 19 nt, Artificial Sequence
  Description of Artificial Sequence: Synthetic oligonucleotide
  Sense strand starting at position 1427 of SEQ ID NO: 916572
ugaucacuuucccagauug

SEQ ID NO: 1167163 - RNA, 19 nt, Artificial Sequence
  Description of Artificial Sequence: Synthetic oligonucleotide
  Antisense strand to SEQ ID NO: 1167162
caaucugggaaagugauca

SEQ ID NO: 1167164 - RNA, 19 nt, Artificial Sequence
  Description of Artificial Sequence: Synthetic oligonucleotide
  Sense strand starting at position 2000 of SEQ ID NO: 916572
cucugagucccgugaacag

SEQ ID NO: 1167165 - RNA, 19 nt, Artificial Sequence
  Description of Artificial Sequence: Synthetic oligonucleotide
  Antisense strand to SEQ ID NO: 1167164
cuguucacgggacucagag

SEQ ID NO: 1167166 - RNA, 19 nt, Artificial Sequence
  Description of Artificial Sequence: Synthetic oligonucleotide
  Sense strand starting at position 2014 of SEQ ID NO: 916572
aacagaaucugcgcgguua

SEQ ID NO: 1167167 - RNA, 19 nt, Artificial Sequence
  Description of Artificial Sequence: Synthetic oligonucleotide
  Antisense strand to SEQ ID NO: 1167166
uaaccgcgcagauucuguu

SEQ ID NO: 1167168 - RNA, 19 nt, Artificial Sequence
  Description of Artificial Sequence: Synthetic oligonucleotide
  Sense strand starting at position 2015 of SEQ ID NO: 916572
acagaaucugcgcgguuau

SEQ ID NO: 1167169 - RNA, 19 nt, Artificial Sequence
  Description of Artificial Sequence: Synthetic oligonucleotide
  Antisense strand to SEQ ID NO: 1167168
auaaccgcgcagauucugu

SEQ ID NO: 1167170 - RNA, 19 nt, Artificial Sequence
  Description of Artificial Sequence: Synthetic oligonucleotide
  Sense strand starting at position 2016 of SEQ ID NO: 916572
cagaaucugcgcgguuaua

SEQ ID NO: 1167171 - RNA, 19 nt, Artificial Sequence
  Description of Artificial Sequence: Synthetic oligonucleotide
  Antisense strand to SEQ ID NO: 1167170
uauaaccgcgcagauucug

SEQ ID NO: 1167172 - RNA, 19 nt, Artificial Sequence
  Description of Artificial Sequence: Synthetic oligonucleotide
  Sense strand starting at position 2246 of SEQ ID NO: 916572
acuuccaaaucuguaguau

SEQ ID NO: 1167173 - RNA, 19 nt, Artificial Sequence
  Description of Artificial Sequence: Synthetic oligonucleotide
  Antisense strand to SEQ ID NO: 1167172
auacuacagauuuggaagu

SEQ ID NO: 1167174 - RNA, 19 nt, Artificial Sequence
  Description of Artificial Sequence: Synthetic oligonucleotide
  Sense strand starting at position 2247 of SEQ ID NO: 916572
cuuccaaaucuguaguauu

SEQ ID NO: 1167175 - RNA, 19 nt, Artificial Sequence
  Description of Artificial Sequence: Synthetic oligonucleotide
  Antisense strand to SEQ ID NO: 1167174
aauacuacagauuuggaag

SEQ ID NO: 1167176 - RNA, 19 nt, Artificial Sequence
  Description of Artificial Sequence: Synthetic oligonucleotide
  Sense strand starting at position 2479 of SEQ ID NO: 916572
ggcguaaacuccuccucca

SEQ ID NO: 1167177 - RNA, 19 nt, Artificial Sequence
  Description of Artificial Sequence: Synthetic oligonucleotide
  Antisense strand to SEQ ID NO: 1167176
uggaggaggaguuuacgcc

SEQ ID NO: 1167178 - RNA, 19 nt, Artificial Sequence
  Description of Artificial Sequence: Synthetic oligonucleotide
  Sense strand starting at position 2966 of SEQ ID NO: 916572
guggauacauucgaggaga

SEQ ID NO: 1167179 - RNA, 19 nt, Artificial Sequence
  Description of Artificial Sequence: Synthetic oligonucleotide
  Antisense strand to SEQ ID NO: 1167178
ucuccucgaauguauccac

SEQ ID NO: 1167180 - RNA, 19 nt, Artificial Sequence
  Description of Artificial Sequence: Synthetic oligonucleotide
  Sense strand starting at position 3006 of SEQ ID NO: 916572
aucucuuauuuggagauaa

SEQ ID NO: 1167181 - RNA, 19 nt, Artificial Sequence
  Description of Artificial Sequence: Synthetic oligonucleotide
  Antisense strand to SEQ ID NO: 1167180
uuaucuccaaauaagagau

SEQ ID NO: 1167182 - RNA, 19 nt, Artificial Sequence
  Description of Artificial Sequence: Synthetic oligonucleotide
  Sense strand starting at position 3054 of SEQ ID NO: 916572
ccgagccguucucucuaaa

SEQ ID NO: 1167183 - RNA, 19 nt, Artificial Sequence
  Description of Artificial Sequence: Synthetic oligonucleotide
  Antisense strand to SEQ ID NO: 1167182
uuuagagagaacggcucgg

SEQ ID NO: 1167184 - RNA, 19 nt, Artificial Sequence
  Description of Artificial Sequence: Synthetic oligonucleotide
  Sense strand starting at position 3057 of SEQ ID NO: 916572
agccguucucucuaaauuu

SEQ ID NO: 1167185 - RNA, 19 nt, Artificial Sequence
  Description of Artificial Sequence: Synthetic oligonucleotide
  Antisense strand to SEQ ID NO: 1167184
aaauuuagagagaacggcu

SEQ ID NO: 1167186 - RNA, 19 nt, Artificial Sequence
  Description of Artificial Sequence: Synthetic oligonucleotide
  Sense strand starting at position 3132 of SEQ ID NO: 916572
accacuuagugaucaacga

SEQ ID NO: 1167187 - RNA, 19 nt, Artificial Sequence
  Description of Artificial Sequence: Synthetic oligonucleotide
  Antisense strand to SEQ ID NO: 1167186
ucguugaucacuaaguggu

SEQ ID NO: 1167188 - RNA, 19 nt, Artificial Sequence
  Description of Artificial Sequence: Synthetic oligonucleotide
  Sense strand starting at position 3136 of SEQ ID NO: 916572
cuuagugaucaacgagaaa

SEQ ID NO: 1167189 - RNA, 19 nt, Artificial Sequence
  Description of Artificial Sequence: Synthetic oligonucleotide
  Antisense strand to SEQ ID NO: 1167188
uuucucguugaucacuaag

SEQ ID NO: 1167190 - RNA, 19 nt, Artificial Sequence
  Description of Artificial Sequence: Synthetic oligonucleotide
  Sense strand starting at position 3318 of SEQ ID NO: 916572
gcgaguaucccguuuccuc

SEQ ID NO: 1167191 - RNA, 19 nt, Artificial Sequence
  Description of Artificial Sequence: Synthetic oligonucleotide
  Antisense strand to SEQ ID NO: 1167190
gaggaaacgggauacucgc

SEQ ID NO: 1167192 - RNA, 19 nt, Artificial Sequence
  Description of Artificial Sequence: Synthetic oligonucleotide
  Sense strand starting at position 3343 of SEQ ID NO: 916572
cugucguucgaggugucua

SEQ ID NO: 1167193 - RNA, 19 nt, Artificial Sequence
  Description of Artificial Sequence: Synthetic oligonucleotide
  Antisense strand to SEQ ID NO: 1167192
uagacaccucgaacgacag

SEQ ID NO: 1167194 - RNA, 19 nt, Artificial Sequence
  Description of Artificial Sequence: Synthetic oligonucleotide
  Sense strand starting at position 3345 of SEQ ID NO: 916572
gucguucgaggugucuaau

SEQ ID NO: 1167195 - RNA, 19 nt, Artificial Sequence
  Description of Artificial Sequence: Synthetic oligonucleotide
  Antisense strand to SEQ ID NO: 1167194
auuagacaccucgaacgac

SEQ ID NO: 1167196 - RNA, 19 nt, Artificial Sequence
  Description of Artificial Sequence: Synthetic oligonucleotide
  Sense strand starting at position 3348 of SEQ ID NO: 916572
guucgaggugucuaauaag

SEQ ID NO: 1167197 - RNA, 19 nt, Artificial Sequence
  Description of Artificial Sequence: Synthetic oligonucleotide
  Antisense strand to SEQ ID NO: 1167196
cuuauuagacaccucgaac

SEQ ID NO: 1167198 - RNA, 19 nt, Artificial Sequence
  Description of Artificial Sequence: Synthetic oligonucleotide
  Sense strand starting at position 3416 of SEQ ID NO: 916572
ccuugaaauugcuugagaa

SEQ ID NO: 1167199 - RNA, 19 nt, Artificial Sequence
  Description of Artificial Sequence: Synthetic oligonucleotide
  Antisense strand to SEQ ID NO: 1167198
uucucaagcaauuucaagg

SEQ ID NO: 1167200 - RNA, 19 nt, Artificial Sequence
  Description of Artificial Sequence: Synthetic oligonucleotide
  Sense strand starting at position 3417 of SEQ ID NO: 916572
cuugaaauugcuugagaau

SEQ ID NO: 1167201 - RNA, 19 nt, Artificial Sequence
  Description of Artificial Sequence: Synthetic oligonucleotide
  Antisense strand to SEQ ID NO: 1167200
auucucaagcaauuucaag

SEQ ID NO: 1167202 - RNA, 19 nt, Artificial Sequence
  Description of Artificial Sequence: Synthetic oligonucleotide
  Sense strand starting at position 3420 of SEQ ID NO: 916572
gaaauugcuugagaauuug

SEQ ID NO: 1167203 - RNA, 19 nt, Artificial Sequence
  Description of Artificial Sequence: Synthetic oligonucleotide
  Antisense strand to SEQ ID NO: 1167202
caaauucucaagcaauuuc

SEQ ID NO: 1167204 - RNA, 19 nt, Artificial Sequence
  Description of Artificial Sequence: Synthetic oligonucleotide
  Sense strand starting at position 3426 of SEQ ID NO: 916572
gcuugagaauuugguuaaa

SEQ ID NO: 1167205 - RNA, 19 nt, Artificial Sequence
  Description of Artificial Sequence: Synthetic oligonucleotide
  Antisense strand to SEQ ID NO: 1167204
uuuaaccaaauucucaagc

SEQ ID NO: 1167206 - RNA, 19 nt, Artificial Sequence
  Description of Artificial Sequence: Synthetic oligonucleotide
  Sense strand starting at position 3436 of SEQ ID NO: 916572
uugguuaaacaucggaacu

SEQ ID NO: 1167207 - RNA, 19 nt, Artificial Sequence
  Description of Artificial Sequence: Synthetic oligonucleotide
  Antisense strand to SEQ ID NO: 1167206
aguuccgauguuuaaccaa

SEQ ID NO: 1167208 - RNA, 19 nt, Artificial Sequence
  Description of Artificial Sequence: Synthetic oligonucleotide
  Sense strand starting at position 3539 of SEQ ID NO: 916572
ggcugcguacuagauagau

SEQ ID NO: 1167209 - RNA, 19 nt, Artificial Sequence
  Description of Artificial Sequence: Synthetic oligonucleotide
  Antisense strand to SEQ ID NO: 1167208
aucuaucuaguacgcagcc

SEQ ID NO: 1167210 - RNA, 19 nt, Artificial Sequence
  Description of Artificial Sequence: Synthetic oligonucleotide
  Sense strand starting at position 3543 of SEQ ID NO: 916572
gcguacuagauagauugua

SEQ ID NO: 1167211 - RNA, 19 nt, Artificial Sequence
  Description of Artificial Sequence: Synthetic oligonucleotide
  Antisense strand to SEQ ID NO: 1167210
uacaaucuaucuaguacgc

SEQ ID NO: 1167212 - RNA, 19 nt, Artificial Sequence
  Description of Artificial Sequence: Synthetic oligonucleotide
  Sense strand starting at position 3557 of SEQ ID NO: 916572
uuguaccugccucaucauu

SEQ ID NO: 1167213 - RNA, 19 nt, Artificial Sequence
  Description of Artificial Sequence: Synthetic oligonucleotide
  Antisense strand to SEQ ID NO: 1167212
aaugaugaggcagguacaa

SEQ ID NO: 1167214 - RNA, 19 nt, Artificial Sequence
  Description of Artificial Sequence: Synthetic oligonucleotide
  Sense strand starting at position 3559 of SEQ ID NO: 916572
guaccugccucaucauuau

SEQ ID NO: 1167215 - RNA, 19 nt, Artificial Sequence
  Description of Artificial Sequence: Synthetic oligonucleotide
  Antisense strand to SEQ ID NO: 1167214
auaaugaugaggcagguac

SEQ ID NO: 1167216 - RNA, 19 nt, Artificial Sequence
  Description of Artificial Sequence: Synthetic oligonucleotide
  Sense strand starting at position 3874 of SEQ ID NO: 916572
gcuucucgcccuggucaaa

SEQ ID NO: 1167217 - RNA, 19 nt, Artificial Sequence
  Description of Artificial Sequence: Synthetic oligonucleotide
  Antisense strand to SEQ ID NO: 1167216
uuugaccagggcgagaagc

SEQ ID NO: 1167218 - RNA, 19 nt, Artificial Sequence
  Description of Artificial Sequence: Synthetic oligonucleotide
  Sense strand starting at position 3962 of SEQ ID NO: 916572
accugaagauugcaaggaa

SEQ ID NO: 1167219 - RNA, 19 nt, Artificial Sequence
  Description of Artificial Sequence: Synthetic oligonucleotide
  Antisense strand to SEQ ID NO: 1167218
uuccuugcaaucuucaggu

SEQ ID NO: 1167220 - RNA, 19 nt, Artificial Sequence
  Description of Artificial Sequence: Synthetic oligonucleotide
  Sense strand starting at position 107 of SEQ ID NO: 916573
guacuaacauucuugaaug

SEQ ID NO: 1167221 - RNA, 19 nt, Artificial Sequence
  Description of Artificial Sequence: Synthetic oligonucleotide
  Antisense strand to SEQ ID NO: 1167220
cauucaagaauguuaguac

SEQ ID NO: 1167222 - RNA, 19 nt, Artificial Sequence
  Description of Artificial Sequence: Synthetic oligonucleotide
  Sense strand starting at position 117 of SEQ ID NO: 916573
ucuugaaugccugcgcuau

SEQ ID NO: 1167223 - RNA, 19 nt, Artificial Sequence
  Description of Artificial Sequence: Synthetic oligonucleotide
  Antisense strand to SEQ ID NO: 1167222
auagcgcaggcauucaaga

SEQ ID NO: 1167224 - RNA, 19 nt, Artificial Sequence
  Description of Artificial Sequence: Synthetic oligonucleotide
  Sense strand starting at position 125 of SEQ ID NO: 916573
gccugcgcuaugcuagaaa

SEQ ID NO: 1167225 - RNA, 19 nt, Artificial Sequence
  Description of Artificial Sequence: Synthetic oligonucleotide
  Antisense strand to SEQ ID NO: 1167224
uuucuagcauagcgcaggc

SEQ ID NO: 1167226 - RNA, 19 nt, Artificial Sequence
  Description of Artificial Sequence: Synthetic oligonucleotide
  Sense strand starting at position 356 of SEQ ID NO: 916573
ggcugagagucggccauaa

SEQ ID NO: 1167227 - RNA, 19 nt, Artificial Sequence
  Description of Artificial Sequence: Synthetic oligonucleotide
  Antisense strand to SEQ ID NO: 1167226
uuauggccgacucucagcc

SEQ ID NO: 1167228 - RNA, 19 nt, Artificial Sequence
  Description of Artificial Sequence: Synthetic oligonucleotide
  Sense strand starting at position 358 of SEQ ID NO: 916573
cugagagucggccauaaau

SEQ ID NO: 1167229 - RNA, 19 nt, Artificial Sequence
  Description of Artificial Sequence: Synthetic oligonucleotide
  Antisense strand to SEQ ID NO: 1167228
auuuauggccgacucucag

SEQ ID NO: 1167230 - RNA, 19 nt, Artificial Sequence
  Description of Artificial Sequence: Synthetic oligonucleotide
  Sense strand starting at position 360 of SEQ ID NO: 916573
gagagucggccauaaauaa

SEQ ID NO: 1167231 - RNA, 19 nt, Artificial Sequence
  Description of Artificial Sequence: Synthetic oligonucleotide
  Antisense strand to SEQ ID NO: 1167230
uuauuuauggccgacucuc

SEQ ID NO: 1167232 - RNA, 19 nt, Artificial Sequence
  Description of Artificial Sequence: Synthetic oligonucleotide
  Sense strand starting at position 380 of SEQ ID NO: 916573
uuuauccucuauguauaga

SEQ ID NO: 1167233 - RNA, 19 nt, Artificial Sequence
  Description of Artificial Sequence: Synthetic oligonucleotide
  Antisense strand to SEQ ID NO: 1167232
ucuauacauagaggauaaa

SEQ ID NO: 1167234 - RNA, 19 nt, Artificial Sequence
  Description of Artificial Sequence: Synthetic oligonucleotide
  Sense strand starting at position 419 of SEQ ID NO: 916573
uuugcuucuggguagucau

SEQ ID NO: 1167235 - RNA, 19 nt, Artificial Sequence
  Description of Artificial Sequence: Synthetic oligonucleotide
  Antisense strand to SEQ ID NO: 1167234
augacuacccagaagcaaa

SEQ ID NO: 1167236 - RNA, 19 nt, Artificial Sequence
  Description of Artificial Sequence: Synthetic oligonucleotide
  Sense strand starting at position 427 of SEQ ID NO: 916573
uggguagucaugcaauuau

SEQ ID NO: 1167237 - RNA, 19 nt, Artificial Sequence
  Description of Artificial Sequence: Synthetic oligonucleotide
  Antisense strand to SEQ ID NO: 1167236
auaauugcaugacuaccca

SEQ ID NO: 1167238 - RNA, 19 nt, Artificial Sequence
  Description of Artificial Sequence: Synthetic oligonucleotide
  Sense strand starting at position 573 of SEQ ID NO: 916573
acaaaugugcugcaaagaa

SEQ ID NO: 1167239 - RNA, 19 nt, Artificial Sequence
  Description of Artificial Sequence: Synthetic oligonucleotide
  Antisense strand to SEQ ID NO: 1167238
uucuuugcagcacauuugu

SEQ ID NO: 1167240 - RNA, 19 nt, Artificial Sequence
  Description of Artificial Sequence: Synthetic oligonucleotide
  Sense strand starting at position 622 of SEQ ID NO: 916573
guuauuguuccaggaccau

SEQ ID NO: 1167241 - RNA, 19 nt, Artificial Sequence
  Description of Artificial Sequence: Synthetic oligonucleotide
  Antisense strand to SEQ ID NO: 1167240
augguccuggaacaauaac

SEQ ID NO: 1167242 - RNA, 19 nt, Artificial Sequence
  Description of Artificial Sequence: Synthetic oligonucleotide
  Sense strand starting at position 681 of SEQ ID NO: 916573
agcagagaauuugauauag

SEQ ID NO: 1167243 - RNA, 19 nt, Artificial Sequence
  Description of Artificial Sequence: Synthetic oligonucleotide
  Antisense strand to SEQ ID NO: 1167242
cuauaucaaauucucugcu

SEQ ID NO: 1167244 - RNA, 19 nt, Artificial Sequence
  Description of Artificial Sequence: Synthetic oligonucleotide
  Sense strand starting at position 712 of SEQ ID NO: 916573
agagcuacaggguaucauu

SEQ ID NO: 1167245 - RNA, 19 nt, Artificial Sequence
  Description of Artificial Sequence: Synthetic oligonucleotide
  Antisense strand to SEQ ID NO: 1167244
aaugauacccuguagcucu

SEQ ID NO: 1167246 - RNA, 19 nt, Artificial Sequence
  Description of Artificial Sequence: Synthetic oligonucleotide
  Sense strand starting at position 794 of SEQ ID NO: 916573
gagggauauaacuguguuu

SEQ ID NO: 1167247 - RNA, 19 nt, Artificial Sequence
  Description of Artificial Sequence: Synthetic oligonucleotide
  Antisense strand to SEQ ID NO: 1167246
aaacacaguuauaucccuc

SEQ ID NO: 1167248 - RNA, 19 nt, Artificial Sequence
  Description of Artificial Sequence: Synthetic oligonucleotide
  Sense strand starting at position 796 of SEQ ID NO: 916573
gggauauaacuguguuuau

SEQ ID NO: 1167249 - RNA, 19 nt, Artificial Sequence
  Description of Artificial Sequence: Synthetic oligonucleotide
  Antisense strand to SEQ ID NO: 1167248
auaaacacaguuauauccc

SEQ ID NO: 1167250 - RNA, 19 nt, Artificial Sequence
  Description of Artificial Sequence: Synthetic oligonucleotide
  Sense strand starting at position 797 of SEQ ID NO: 916573
ggauauaacuguguuuaua

SEQ ID NO: 1167251 - RNA, 19 nt, Artificial Sequence
  Description of Artificial Sequence: Synthetic oligonucleotide
  Antisense strand to SEQ ID NO: 1167250
uauaaacacaguuauaucc

SEQ ID NO: 1167252 - RNA, 19 nt, Artificial Sequence
  Description of Artificial Sequence: Synthetic oligonucleotide
  Sense strand starting at position 2084 of SEQ ID NO: 916573
acauucugaagaggugauu

SEQ ID NO: 1167253 - RNA, 19 nt, Artificial Sequence
  Description of Artificial Sequence: Synthetic oligonucleotide
  Antisense strand to SEQ ID NO: 1167252
aaucaccucuucagaaugu

SEQ ID NO: 1167254 - RNA, 19 nt, Artificial Sequence
  Description of Artificial Sequence: Synthetic oligonucleotide
  Sense strand starting at position 2309 of SEQ ID NO: 916573
accugagaauuguaaacau

SEQ ID NO: 1167255 - RNA, 19 nt, Artificial Sequence
  Description of Artificial Sequence: Synthetic oligonucleotide
  Antisense strand to SEQ ID NO: 1167254
auguuuacaauucucaggu

SEQ ID NO: 1167256 - RNA, 19 nt, Artificial Sequence
  Description of Artificial Sequence: Synthetic oligonucleotide
  Sense strand starting at position 2316 of SEQ ID NO: 916573
aauuguaaacauggaguaa

SEQ ID NO: 1167257 - RNA, 19 nt, Artificial Sequence
  Description of Artificial Sequence: Synthetic oligonucleotide
  Antisense strand to SEQ ID NO: 1167256
uuacuccauguuuacaauu

SEQ ID NO: 1167258 - RNA, 19 nt, Artificial Sequence
  Description of Artificial Sequence: Synthetic oligonucleotide
  Sense strand starting at position 2361 of SEQ ID NO: 916573
ccuuguaauugucucaaga

SEQ ID NO: 1167259 - RNA, 19 nt, Artificial Sequence
  Description of Artificial Sequence: Synthetic oligonucleotide
  Antisense strand to SEQ ID NO: 1167258
ucuugagacaauuacaagg

SEQ ID NO: 1167260 - RNA, 19 nt, Artificial Sequence
  Description of Artificial Sequence: Synthetic oligonucleotide
  Sense strand starting at position 2447 of SEQ ID NO: 916573
cccauauugcagugucaga

SEQ ID NO: 1167261 - RNA, 19 nt, Artificial Sequence
  Description of Artificial Sequence: Synthetic oligonucleotide
  Antisense strand to SEQ ID NO: 1167260
ucugacacugcaauauggg

SEQ ID NO: 1167262 - RNA, 19 nt, Artificial Sequence
  Description of Artificial Sequence: Synthetic oligonucleotide
  Sense strand starting at position 2664 of SEQ ID NO: 916573
gcacuacuugcagaagaca

SEQ ID NO: 1167263 - RNA, 19 nt, Artificial Sequence
  Description of Artificial Sequence: Synthetic oligonucleotide
  Antisense strand to SEQ ID NO: 1167262
ugucuucugcaaguagugc

SEQ ID NO: 1167264 - RNA, 19 nt, Artificial Sequence
  Description of Artificial Sequence: Synthetic oligonucleotide
  Sense strand starting at position 2714 of SEQ ID NO: 916573
gcuggacuugcccagaaua

SEQ ID NO: 1167265 - RNA, 19 nt, Artificial Sequence
  Description of Artificial Sequence: Synthetic oligonucleotide
  Antisense strand to SEQ ID NO: 1167264
uauucugggcaaguccagc

SEQ ID NO: 1167266 - RNA, 19 nt, Artificial Sequence
  Description of Artificial Sequence: Synthetic oligonucleotide
  Sense strand starting at position 2730 of SEQ ID NO: 916573
auagaagagucauuguuga

SEQ ID NO: 1167267 - RNA, 19 nt, Artificial Sequence
  Description of Artificial Sequence: Synthetic oligonucleotide
  Antisense strand to SEQ ID NO: 1167266
ucaacaaugacucuucuau

SEQ ID NO: 1167268 - RNA, 19 nt, Artificial Sequence
  Description of Artificial Sequence: Synthetic oligonucleotide
  Sense strand starting at position 2918 of SEQ ID NO: 916573
guggaauuacagugcugau

SEQ ID NO: 1167269 - RNA, 19 nt, Artificial Sequence
  Description of Artificial Sequence: Synthetic oligonucleotide
  Antisense strand to SEQ ID NO: 1167268
aucagcacuguaauuccac

SEQ ID NO: 1167270 - RNA, 19 nt, Artificial Sequence
  Description of Artificial Sequence: Synthetic oligonucleotide
  Sense strand starting at position 2954 of SEQ ID NO: 916573
gcuagucucucccucacua

SEQ ID NO: 1167271 - RNA, 19 nt, Artificial Sequence
  Description of Artificial Sequence: Synthetic oligonucleotide
  Antisense strand to SEQ ID NO: 1167270
uagugagggagagacuagc

SEQ ID NO: 1167272 - RNA, 19 nt, Artificial Sequence
  Description of Artificial Sequence: Synthetic oligonucleotide
  Sense strand starting at position 2984 of SEQ ID NO: 916573
agauguucugaggguagca

SEQ ID NO: 1167273 - RNA, 19 nt, Artificial Sequence
  Description of Artificial Sequence: Synthetic oligonucleotide
  Antisense strand to SEQ ID NO: 1167272
ugcuacccucagaacaucu

SEQ ID NO: 1167274 - RNA, 19 nt, Artificial Sequence
  Description of Artificial Sequence: Synthetic oligonucleotide
  Sense strand starting at position 3057 of SEQ ID NO: 916573
ucguccaccuccuugagau

SEQ ID NO: 1167275 - RNA, 19 nt, Artificial Sequence
  Description of Artificial Sequence: Synthetic oligonucleotide
  Antisense strand to SEQ ID NO: 1167274
aucucaaggagguggacga

SEQ ID NO: 1167276 - RNA, 19 nt, Artificial Sequence
  Description of Artificial Sequence: Synthetic oligonucleotide
  Sense strand starting at position 3058 of SEQ ID NO: 916573
cguccaccuccuugagaua

SEQ ID NO: 1167277 - RNA, 19 nt, Artificial Sequence
  Description of Artificial Sequence: Synthetic oligonucleotide
  Antisense strand to SEQ ID NO: 1167276
uaucucaaggagguggacg

SEQ ID NO: 1167278 - RNA, 19 nt, Artificial Sequence
  Description of Artificial Sequence: Synthetic oligonucleotide
  Sense strand starting at position 3059 of SEQ ID NO: 916573
guccaccuccuugagauau

SEQ ID NO: 1167279 - RNA, 19 nt, Artificial Sequence
  Description of Artificial Sequence: Synthetic oligonucleotide
  Antisense strand to SEQ ID NO: 1167278
auaucucaaggagguggac

SEQ ID NO: 1167280 - RNA, 19 nt, Artificial Sequence
  Description of Artificial Sequence: Synthetic oligonucleotide
  Sense strand starting at position 3138 of SEQ ID NO: 916573
cuuuaaaguucuguccaaa

SEQ ID NO: 1167281 - RNA, 19 nt, Artificial Sequence
  Description of Artificial Sequence: Synthetic oligonucleotide
  Antisense strand to SEQ ID NO: 1167280
uuuggacagaacuuuaaag

SEQ ID NO: 1167282 - RNA, 19 nt, Artificial Sequence
  Description of Artificial Sequence: Synthetic oligonucleotide
  Sense strand starting at position 3345 of SEQ ID NO: 916573
uuucccagcuugucugaaa

SEQ ID NO: 1167283 - RNA, 19 nt, Artificial Sequence
  Description of Artificial Sequence: Synthetic oligonucleotide
  Antisense strand to SEQ ID NO: 1167282
uuucagacaagcugggaaa

SEQ ID NO: 1167284 - RNA, 19 nt, Artificial Sequence
  Description of Artificial Sequence: Synthetic oligonucleotide
  Sense strand starting at position 3346 of SEQ ID NO: 916573
uucccagcuugucugaaau

SEQ ID NO: 1167285 - RNA, 19 nt, Artificial Sequence
  Description of Artificial Sequence: Synthetic oligonucleotide
  Antisense strand to SEQ ID NO: 1167284
auuucagacaagcugggaa

SEQ ID NO: 1167286 - RNA, 19 nt, Artificial Sequence
  Description of Artificial Sequence: Synthetic oligonucleotide
  Sense strand starting at position 3373 of SEQ ID NO: 916573
cucacuugucccuagaggu

SEQ ID NO: 1167287 - RNA, 19 nt, Artificial Sequence
  Description of Artificial Sequence: Synthetic oligonucleotide
  Antisense strand to SEQ ID NO: 1167286
accucuagggacaagugag

SEQ ID NO: 1167288 - RNA, 19 nt, Artificial Sequence
  Description of Artificial Sequence: Synthetic oligonucleotide
  Sense strand starting at position 3451 of SEQ ID NO: 916573
aucuucuuuccaugggaac

SEQ ID NO: 1167289 - RNA, 19 nt, Artificial Sequence
  Description of Artificial Sequence: Synthetic oligonucleotide
  Antisense strand to SEQ ID NO: 1167288
guucccauggaaagaagau

SEQ ID NO: 1167290 - RNA, 19 nt, Artificial Sequence
  Description of Artificial Sequence: Synthetic oligonucleotide
  Sense strand starting at position 3512 of SEQ ID NO: 916573
gagggauucuagcuuugcu

SEQ ID NO: 1167291 - RNA, 19 nt, Artificial Sequence
  Description of Artificial Sequence: Synthetic oligonucleotide
  Antisense strand to SEQ ID NO: 1167290
agcaaagcuagaaucccuc

SEQ ID NO: 1167292 - RNA, 19 nt, Artificial Sequence
  Description of Artificial Sequence: Synthetic oligonucleotide
  Sense strand starting at position 3528 of SEQ ID NO: 916573
gcugcucacccuuagagau

SEQ ID NO: 1167293 - RNA, 19 nt, Artificial Sequence
  Description of Artificial Sequence: Synthetic oligonucleotide
  Antisense strand to SEQ ID NO: 1167292
aucucuaagggugagcagc

SEQ ID NO: 1167294 - RNA, 19 nt, Artificial Sequence
  Description of Artificial Sequence: Synthetic oligonucleotide
  Sense strand starting at position 3577 of SEQ ID NO: 916573
augguuccucuacagcaua

SEQ ID NO: 1167295 - RNA, 19 nt, Artificial Sequence
  Description of Artificial Sequence: Synthetic oligonucleotide
  Antisense strand to SEQ ID NO: 1167294
uaugcuguagaggaaccau

SEQ ID NO: 1167296 - RNA, 19 nt, Artificial Sequence
  Description of Artificial Sequence: Synthetic oligonucleotide
  Sense strand starting at position 3850 of SEQ ID NO: 916573
aaucaaguaugguuaguga

SEQ ID NO: 1167297 - RNA, 19 nt, Artificial Sequence
  Description of Artificial Sequence: Synthetic oligonucleotide
  Antisense strand to SEQ ID NO: 1167296
ucacuaaccauacuugauu

SEQ ID NO: 1167298 - RNA, 19 nt, Artificial Sequence
  Description of Artificial Sequence: Synthetic oligonucleotide
  Sense strand starting at position 3892 of SEQ ID NO: 916573
agucaagguacagauuagu

SEQ ID NO: 1167299 - RNA, 19 nt, Artificial Sequence
  Description of Artificial Sequence: Synthetic oligonucleotide
  Antisense strand to SEQ ID NO: 1167298
acuaaucuguaccuugacu

SEQ ID NO: 1167300 - RNA, 19 nt, Artificial Sequence
  Description of Artificial Sequence: Synthetic oligonucleotide
  Sense strand starting at position 79 of SEQ ID NO: 916574
ugcuaugacucaccuguaa

SEQ ID NO: 1167301 - RNA, 19 nt, Artificial Sequence
  Description of Artificial Sequence: Synthetic oligonucleotide
  Antisense strand to SEQ ID NO: 1167300
uuacaggugagucauagca

SEQ ID NO: 1167302 - RNA, 19 nt, Artificial Sequence
  Description of Artificial Sequence: Synthetic oligonucleotide
  Sense strand starting at position 113 of SEQ ID NO: 916574
aucauauacugccuguaca

SEQ ID NO: 1167303 - RNA, 19 nt, Artificial Sequence
  Description of Artificial Sequence: Synthetic oligonucleotide
  Antisense strand to SEQ ID NO: 1167302
uguacaggcaguauaugau

SEQ ID NO: 1167304 - RNA, 19 nt, Artificial Sequence
  Description of Artificial Sequence: Synthetic oligonucleotide
  Sense strand starting at position 116 of SEQ ID NO: 916574
auauacugccuguacaagu

SEQ ID NO: 1167305 - RNA, 19 nt, Artificial Sequence
  Description of Artificial Sequence: Synthetic oligonucleotide
  Antisense strand to SEQ ID NO: 1167304
acuuguacaggcaguauau

SEQ ID NO: 1167306 - RNA, 19 nt, Artificial Sequence
  Description of Artificial Sequence: Synthetic oligonucleotide
  Sense strand starting at position 147 of SEQ ID NO: 916574
aaacacuugccuugugaug

SEQ ID NO: 1167307 - RNA, 19 nt, Artificial Sequence
  Description of Artificial Sequence: Synthetic oligonucleotide
  Antisense strand to SEQ ID NO: 1167306
caucacaaggcaaguguuu

SEQ ID NO: 1167308 - RNA, 19 nt, Artificial Sequence
  Description of Artificial Sequence: Synthetic oligonucleotide
  Sense strand starting at position 201 of SEQ ID NO: 916574
gccauaauaugguuugaga

SEQ ID NO: 1167309 - RNA, 19 nt, Artificial Sequence
  Description of Artificial Sequence: Synthetic oligonucleotide
  Antisense strand to SEQ ID NO: 1167308
ucucaaaccauauuauggc

SEQ ID NO: 1167310 - RNA, 19 nt, Artificial Sequence
  Description of Artificial Sequence: Synthetic oligonucleotide
  Sense strand starting at position 284 of SEQ ID NO: 916574
uuuaauaggucccugggaa

SEQ ID NO: 1167311 - RNA, 19 nt, Artificial Sequence
  Description of Artificial Sequence: Synthetic oligonucleotide
  Antisense strand to SEQ ID NO: 1167310
uucccagggaccuauuaaa

SEQ ID NO: 1167312 - RNA, 19 nt, Artificial Sequence
  Description of Artificial Sequence: Synthetic oligonucleotide
  Sense strand starting at position 285 of SEQ ID NO: 916574
uuaauaggucccugggaaa

SEQ ID NO: 1167313 - RNA, 19 nt, Artificial Sequence
  Description of Artificial Sequence: Synthetic oligonucleotide
  Antisense strand to SEQ ID NO: 1167312
uuucccagggaccuauuaa

SEQ ID NO: 1167314 - RNA, 19 nt, Artificial Sequence
  Description of Artificial Sequence: Synthetic oligonucleotide
  Sense strand starting at position 590 of SEQ ID NO: 916574
agucaagauccgcacgaga

SEQ ID NO: 1167315 - RNA, 19 nt, Artificial Sequence
  Description of Artificial Sequence: Synthetic oligonucleotide
  Antisense strand to SEQ ID NO: 1167314
ucucgugcggaucuugacu

SEQ ID NO: 1167316 - RNA, 19 nt, Artificial Sequence
  Description of Artificial Sequence: Synthetic oligonucleotide
  Sense strand starting at position 592 of SEQ ID NO: 916574
ucaagauccgcacgagaga

SEQ ID NO: 1167317 - RNA, 19 nt, Artificial Sequence
  Description of Artificial Sequence: Synthetic oligonucleotide
  Antisense strand to SEQ ID NO: 1167316
ucucucgugcggaucuuga

SEQ ID NO: 1167318 - RNA, 19 nt, Artificial Sequence
  Description of Artificial Sequence: Synthetic oligonucleotide
  Sense strand starting at position 1269 of SEQ ID NO: 916574
caggauagcugguuaucca

SEQ ID NO: 1167319 - RNA, 19 nt, Artificial Sequence
  Description of Artificial Sequence: Synthetic oligonucleotide
  Antisense strand to SEQ ID NO: 1167318
uggauaaccagcuauccug

SEQ ID NO: 1167320 - RNA, 19 nt, Artificial Sequence
  Description of Artificial Sequence: Synthetic oligonucleotide
  Sense strand starting at position 1270 of SEQ ID NO: 916574
aggauagcugguuauccaa

SEQ ID NO: 1167321 - RNA, 19 nt, Artificial Sequence
  Description of Artificial Sequence: Synthetic oligonucleotide
  Antisense strand to SEQ ID NO: 1167320
uuggauaaccagcuauccu

SEQ ID NO: 1167322 - RNA, 19 nt, Artificial Sequence
  Description of Artificial Sequence: Synthetic oligonucleotide
  Sense strand starting at position 1895 of SEQ ID NO: 916574
ugaacuuugcgagaccuuu

SEQ ID NO: 1167323 - RNA, 19 nt, Artificial Sequence
  Description of Artificial Sequence: Synthetic oligonucleotide
  Antisense strand to SEQ ID NO: 1167322
aaaggucucgcaaaguuca

SEQ ID NO: 1167324 - RNA, 19 nt, Artificial Sequence
  Description of Artificial Sequence: Synthetic oligonucleotide
  Sense strand starting at position 2350 of SEQ ID NO: 916574
ccaccuucucccggaacau

SEQ ID NO: 1167325 - RNA, 19 nt, Artificial Sequence
  Description of Artificial Sequence: Synthetic oligonucleotide
  Antisense strand to SEQ ID NO: 1167324
auguuccgggagaaggugg

SEQ ID NO: 1167326 - RNA, 19 nt, Artificial Sequence
  Description of Artificial Sequence: Synthetic oligonucleotide
  Sense strand starting at position 2377 of SEQ ID NO: 916574
gcaguagacucccucuaga

SEQ ID NO: 1167327 - RNA, 19 nt, Artificial Sequence
  Description of Artificial Sequence: Synthetic oligonucleotide
  Antisense strand to SEQ ID NO: 1167326
ucuagagggagucuacugc

SEQ ID NO: 1167328 - RNA, 19 nt, Artificial Sequence
  Description of Artificial Sequence: Synthetic oligonucleotide
  Sense strand starting at position 2380 of SEQ ID NO: 916574
guagacucccucuagauca

SEQ ID NO: 1167329 - RNA, 19 nt, Artificial Sequence
  Description of Artificial Sequence: Synthetic oligonucleotide
  Antisense strand to SEQ ID NO: 1167328
ugaucuagagggagucuac

SEQ ID NO: 1167330 - RNA, 19 nt, Artificial Sequence
  Description of Artificial Sequence: Synthetic oligonucleotide
  Sense strand starting at position 2626 of SEQ ID NO: 916574
ggaugucucggcuaaacaa

SEQ ID NO: 1167331 - RNA, 19 nt, Artificial Sequence
  Description of Artificial Sequence: Synthetic oligonucleotide
  Antisense strand to SEQ ID NO: 1167330
uuguuuagccgagacaucc

SEQ ID NO: 1167332 - RNA, 19 nt, Artificial Sequence
  Description of Artificial Sequence: Synthetic oligonucleotide
  Sense strand starting at position 2686 of SEQ ID NO: 916574
agagguauugccuaacuca

SEQ ID NO: 1167333 - RNA, 19 nt, Artificial Sequence
  Description of Artificial Sequence: Synthetic oligonucleotide
  Antisense strand to SEQ ID NO: 1167332
ugaguuaggcaauaccucu

SEQ ID NO: 1167334 - RNA, 19 nt, Artificial Sequence
  Description of Artificial Sequence: Synthetic oligonucleotide
  Sense strand starting at position 2689 of SEQ ID NO: 916574
gguauugccuaacucaaac

SEQ ID NO: 1167335 - RNA, 19 nt, Artificial Sequence
  Description of Artificial Sequence: Synthetic oligonucleotide
  Antisense strand to SEQ ID NO: 1167334
guuugaguuaggcaauacc

SEQ ID NO: 1167336 - RNA, 19 nt, Artificial Sequence
  Description of Artificial Sequence: Synthetic oligonucleotide
  Sense strand starting at position 2754 of SEQ ID NO: 916574
guaagaacaucguugucca

SEQ ID NO: 1167337 - RNA, 19 nt, Artificial Sequence
  Description of Artificial Sequence: Synthetic oligonucleotide
  Antisense strand to SEQ ID NO: 1167336
uggacaacgauguucuuac

SEQ ID NO: 1167338 - RNA, 19 nt, Artificial Sequence
  Description of Artificial Sequence: Synthetic oligonucleotide
  Sense strand starting at position 2819 of SEQ ID NO: 916574
gcguucucccuuuauagag

SEQ ID NO: 1167339 - RNA, 19 nt, Artificial Sequence
  Description of Artificial Sequence: Synthetic oligonucleotide
  Antisense strand to SEQ ID NO: 1167338
cucuauaaagggagaacgc

SEQ ID NO: 1167340 - RNA, 19 nt, Artificial Sequence
  Description of Artificial Sequence: Synthetic oligonucleotide
  Sense strand starting at position 2834 of SEQ ID NO: 916574
agaguaugccgugcuguga

SEQ ID NO: 1167341 - RNA, 19 nt, Artificial Sequence
  Description of Artificial Sequence: Synthetic oligonucleotide
  Antisense strand to SEQ ID NO: 1167340
ucacagcacggcauacucu

SEQ ID NO: 1167342 - RNA, 19 nt, Artificial Sequence
  Description of Artificial Sequence: Synthetic oligonucleotide
  Sense strand starting at position 2835 of SEQ ID NO: 916574
gaguaugccgugcugugaa

SEQ ID NO: 1167343 - RNA, 19 nt, Artificial Sequence
  Description of Artificial Sequence: Synthetic oligonucleotide
  Antisense strand to SEQ ID NO: 1167342
uucacagcacggcauacuc

SEQ ID NO: 1167344 - RNA, 19 nt, Artificial Sequence
  Description of Artificial Sequence: Synthetic oligonucleotide
  Sense strand starting at position 2903 of SEQ ID NO: 916574
cagcuaauugcagauagga

SEQ ID NO: 1167345 - RNA, 19 nt, Artificial Sequence
  Description of Artificial Sequence: Synthetic oligonucleotide
  Antisense strand to SEQ ID NO: 1167344
uccuaucugcaauuagcug

SEQ ID NO: 1167346 - RNA, 19 nt, Artificial Sequence
  Description of Artificial Sequence: Synthetic oligonucleotide
  Sense strand starting at position 2905 of SEQ ID NO: 916574
gcuaauugcagauaggauu

SEQ ID NO: 1167347 - RNA, 19 nt, Artificial Sequence
  Description of Artificial Sequence: Synthetic oligonucleotide
  Antisense strand to SEQ ID NO: 1167346
aauccuaucugcaauuagc

SEQ ID NO: 1167348 - RNA, 19 nt, Artificial Sequence
  Description of Artificial Sequence: Synthetic oligonucleotide
  Sense strand starting at position 3031 of SEQ ID NO: 916574
aaguuaagucgacagcaau

SEQ ID NO: 1167349 - RNA, 19 nt, Artificial Sequence
  Description of Artificial Sequence: Synthetic oligonucleotide
  Antisense strand to SEQ ID NO: 1167348
auugcugucgacuuaacuu

SEQ ID NO: 1167350 - RNA, 19 nt, Artificial Sequence
  Description of Artificial Sequence: Synthetic oligonucleotide
  Sense strand starting at position 3115 of SEQ ID NO: 916574
ccauuuagucguugugucu

SEQ ID NO: 1167351 - RNA, 19 nt, Artificial Sequence
  Description of Artificial Sequence: Synthetic oligonucleotide
  Antisense strand to SEQ ID NO: 1167350
agacacaacgacuaaaugg

SEQ ID NO: 1167352 - RNA, 19 nt, Artificial Sequence
  Description of Artificial Sequence: Synthetic oligonucleotide
  Sense strand starting at position 3119 of SEQ ID NO: 916574
uuagucguugugucuguua

SEQ ID NO: 1167353 - RNA, 19 nt, Artificial Sequence
  Description of Artificial Sequence: Synthetic oligonucleotide
  Antisense strand to SEQ ID NO: 1167352
uaacagacacaacgacuaa

SEQ ID NO: 1167354 - RNA, 19 nt, Artificial Sequence
  Description of Artificial Sequence: Synthetic oligonucleotide
  Sense strand starting at position 3234 of SEQ ID NO: 916574
cuggguugaggucagcaua

SEQ ID NO: 1167355 - RNA, 19 nt, Artificial Sequence
  Description of Artificial Sequence: Synthetic oligonucleotide
  Antisense strand to SEQ ID NO: 1167354
uaugcugaccucaacccag

SEQ ID NO: 1167356 - RNA, 19 nt, Artificial Sequence
  Description of Artificial Sequence: Synthetic oligonucleotide
  Sense strand starting at position 3237 of SEQ ID NO: 916574
gguugaggucagcauaauc

SEQ ID NO: 1167357 - RNA, 19 nt, Artificial Sequence
  Description of Artificial Sequence: Synthetic oligonucleotide
  Antisense strand to SEQ ID NO: 1167356
gauuaugcugaccucaacc

SEQ ID NO: 1167358 - RNA, 19 nt, Artificial Sequence
  Description of Artificial Sequence: Synthetic oligonucleotide
  Sense strand starting at position 3248 of SEQ ID NO: 916574
gcauaauccauuugggcga

SEQ ID NO: 1167359 - RNA, 19 nt, Artificial Sequence
  Description of Artificial Sequence: Synthetic oligonucleotide
  Antisense strand to SEQ ID NO: 1167358
ucgcccaaauggauuaugc

SEQ ID NO: 1167360 - RNA, 19 nt, Artificial Sequence
  Description of Artificial Sequence: Synthetic oligonucleotide
  Sense strand starting at position 3330 of SEQ ID NO: 916574
agcaucaccugcuuuagaa

SEQ ID NO: 1167361 - RNA, 19 nt, Artificial Sequence
  Description of Artificial Sequence: Synthetic oligonucleotide
  Antisense strand to SEQ ID NO: 1167360
uucuaaagcaggugaugcu

SEQ ID NO: 1167362 - RNA, 19 nt, Artificial Sequence
  Description of Artificial Sequence: Synthetic oligonucleotide
  Sense strand starting at position 3348 of SEQ ID NO: 916574
aaauaaacgcuuugaguuc

SEQ ID NO: 1167363 - RNA, 19 nt, Artificial Sequence
  Description of Artificial Sequence: Synthetic oligonucleotide
  Antisense strand to SEQ ID NO: 1167362
gaacucaaagcguuuauuu

SEQ ID NO: 1167364 - RNA, 19 nt, Artificial Sequence
  Description of Artificial Sequence: Synthetic oligonucleotide
  Sense strand starting at position 3445 of SEQ ID NO: 916574
ccaaauaaaugauaggaaa

SEQ ID NO: 1167365 - RNA, 19 nt, Artificial Sequence
  Description of Artificial Sequence: Synthetic oligonucleotide
  Antisense strand to SEQ ID NO: 1167364
uuuccuaucauuuauuugg

SEQ ID NO: 1167366 - RNA, 19 nt, Artificial Sequence
  Description of Artificial Sequence: Synthetic oligonucleotide
  Sense strand starting at position 3477 of SEQ ID NO: 916574
agguucuuagcauaaaugu

SEQ ID NO: 1167367 - RNA, 19 nt, Artificial Sequence
  Description of Artificial Sequence: Synthetic oligonucleotide
  Antisense strand to SEQ ID NO: 1167366
acauuuaugcuaagaaccu

SEQ ID NO: 1167368 - RNA, 19 nt, Artificial Sequence
  Description of Artificial Sequence: Synthetic oligonucleotide
  Sense strand starting at position 3546 of SEQ ID NO: 916574
auuaacuucugagucuagu

SEQ ID NO: 1167369 - RNA, 19 nt, Artificial Sequence
  Description of Artificial Sequence: Synthetic oligonucleotide
  Antisense strand to SEQ ID NO: 1167368
acuagacucagaaguuaau

SEQ ID NO: 1167370 - RNA, 19 nt, Artificial Sequence
  Description of Artificial Sequence: Synthetic oligonucleotide
  Sense strand starting at position 3912 of SEQ ID NO: 916574
ccauuuacugucugcacga

SEQ ID NO: 1167371 - RNA, 19 nt, Artificial Sequence
  Description of Artificial Sequence: Synthetic oligonucleotide
  Antisense strand to SEQ ID NO: 1167370
ucgugcagacaguaaaugg

SEQ ID NO: 1167372 - RNA, 19 nt, Artificial Sequence
  Description of Artificial Sequence: Synthetic oligonucleotide
  Sense strand starting at position 3913 of SEQ ID NO: 916574
cauuuacugucugcacgaa

SEQ ID NO: 1167373 - RNA, 19 nt, Artificial Sequence
  Description of Artificial Sequence: Synthetic oligonucleotide
  Antisense strand to SEQ ID NO: 1167372
uucgugcagacaguaaaug

SEQ ID NO: 1167374 - RNA, 19 nt, Artificial Sequence
  Description of Artificial Sequence: Synthetic oligonucleotide
  Sense strand starting at position 3925 of SEQ ID NO: 916574
gcacgaauccugcauugau

SEQ ID NO: 1167375 - RNA, 19 nt, Artificial Sequence
  Description of Artificial Sequence: Synthetic oligonucleotide
  Antisense strand to SEQ ID NO: 1167374
aucaaugcaggauucgugc

SEQ ID NO: 1167376 - RNA, 19 nt, Artificial Sequence
  Description of Artificial Sequence: Synthetic oligonucleotide
  Sense strand starting at position 3928 of SEQ ID NO: 916574
cgaauccugcauugauaau

SEQ ID NO: 1167377 - RNA, 19 nt, Artificial Sequence
  Description of Artificial Sequence: Synthetic oligonucleotide
  Antisense strand to SEQ ID NO: 1167376
auuaucaaugcaggauucg

SEQ ID NO: 1167378 - RNA, 19 nt, Artificial Sequence
  Description of Artificial Sequence: Synthetic oligonucleotide
  Sense strand starting at position 3958 of SEQ ID NO: 916574
cugaauaacuggcucuuau

SEQ ID NO: 1167379 - RNA, 19 nt, Artificial Sequence
  Description of Artificial Sequence: Synthetic oligonucleotide
  Antisense strand to SEQ ID NO: 1167378
auaagagccaguuauucag

SEQ ID NO: 1167380 - RNA, 19 nt, Artificial Sequence
  Description of Artificial Sequence: Synthetic oligonucleotide
  Sense strand starting at position 94 of SEQ ID NO: 916575
gggaauugcuuacugauaa

SEQ ID NO: 1167381 - RNA, 19 nt, Artificial Sequence
  Description of Artificial Sequence: Synthetic oligonucleotide
  Antisense strand to SEQ ID NO: 1167380
uuaucaguaagcaauuccc

SEQ ID NO: 1167382 - RNA, 19 nt, Artificial Sequence
  Description of Artificial Sequence: Synthetic oligonucleotide
  Sense strand starting at position 135 of SEQ ID NO: 916575
agguuuacuuaacuugaga

SEQ ID NO: 1167383 - RNA, 19 nt, Artificial Sequence
  Description of Artificial Sequence: Synthetic oligonucleotide
  Antisense strand to SEQ ID NO: 1167382
ucucaaguuaaguaaaccu

SEQ ID NO: 1167384 - RNA, 19 nt, Artificial Sequence
  Description of Artificial Sequence: Synthetic oligonucleotide
  Sense strand starting at position 138 of SEQ ID NO: 916575
uuuacuuaacuugagaugu

SEQ ID NO: 1167385 - RNA, 19 nt, Artificial Sequence
  Description of Artificial Sequence: Synthetic oligonucleotide
  Antisense strand to SEQ ID NO: 1167384
acaucucaaguuaaguaaa

SEQ ID NO: 1167386 - RNA, 19 nt, Artificial Sequence
  Description of Artificial Sequence: Synthetic oligonucleotide
  Sense strand starting at position 184 of SEQ ID NO: 916575
uguauuguacuuuaagaga

SEQ ID NO: 1167387 - RNA, 19 nt, Artificial Sequence
  Description of Artificial Sequence: Synthetic oligonucleotide
  Antisense strand to SEQ ID NO: 1167386
ucucuuaaaguacaauaca

SEQ ID NO: 1167388 - RNA, 19 nt, Artificial Sequence
  Description of Artificial Sequence: Synthetic oligonucleotide
  Sense strand starting at position 462 of SEQ ID NO: 916575
uggagaacccauuggcuua

SEQ ID NO: 1167389 - RNA, 19 nt, Artificial Sequence
  Description of Artificial Sequence: Synthetic oligonucleotide
  Antisense strand to SEQ ID NO: 1167388
uaagccaauggguucucca

SEQ ID NO: 1167390 - RNA, 19 nt, Artificial Sequence
  Description of Artificial Sequence: Synthetic oligonucleotide
  Sense strand starting at position 591 of SEQ ID NO: 916575
gcauuauuacaacaaguag

SEQ ID NO: 1167391 - RNA, 19 nt, Artificial Sequence
  Description of Artificial Sequence: Synthetic oligonucleotide
  Antisense strand to SEQ ID NO: 1167390
cuacuuguuguaauaaugc

SEQ ID NO: 1167392 - RNA, 19 nt, Artificial Sequence
  Description of Artificial Sequence: Synthetic oligonucleotide
  Sense strand starting at position 654 of SEQ ID NO: 916575
cuuccagaaguaugugaau

SEQ ID NO: 1167393 - RNA, 19 nt, Artificial Sequence
  Description of Artificial Sequence: Synthetic oligonucleotide
  Antisense strand to SEQ ID NO: 1167392
auucacauacuucuggaag

SEQ ID NO: 1167394 - RNA, 19 nt, Artificial Sequence
  Description of Artificial Sequence: Synthetic oligonucleotide
  Sense strand starting at position 929 of SEQ ID NO: 916575
ugcauuugcuuccuaaugu

SEQ ID NO: 1167395 - RNA, 19 nt, Artificial Sequence
  Description of Artificial Sequence: Synthetic oligonucleotide
  Antisense strand to SEQ ID NO: 1167394
acauuaggaagcaaaugca

SEQ ID NO: 1167396 - RNA, 19 nt, Artificial Sequence
  Description of Artificial Sequence: Synthetic oligonucleotide
  Sense strand starting at position 1063 of SEQ ID NO: 916575
gaguuauucguagauacuu

SEQ ID NO: 1167397 - RNA, 19 nt, Artificial Sequence
  Description of Artificial Sequence: Synthetic oligonucleotide
  Antisense strand to SEQ ID NO: 1167396
aaguaucuacgaauaacuc

SEQ ID NO: 1167398 - RNA, 19 nt, Artificial Sequence
  Description of Artificial Sequence: Synthetic oligonucleotide
  Sense strand starting at position 1069 of SEQ ID NO: 916575
uucguagauacuuaggacu

SEQ ID NO: 1167399 - RNA, 19 nt, Artificial Sequence
  Description of Artificial Sequence: Synthetic oligonucleotide
  Antisense strand to SEQ ID NO: 1167398
aguccuaaguaucuacgaa

SEQ ID NO: 1167400 - RNA, 19 nt, Artificial Sequence
  Description of Artificial Sequence: Synthetic oligonucleotide
  Sense strand starting at position 1496 of SEQ ID NO: 916575
gccucuguauuucucauua

SEQ ID NO: 1167401 - RNA, 19 nt, Artificial Sequence
  Description of Artificial Sequence: Synthetic oligonucleotide
  Antisense strand to SEQ ID NO: 1167400
uaaugagaaauacagaggc

SEQ ID NO: 1167402 - RNA, 19 nt, Artificial Sequence
  Description of Artificial Sequence: Synthetic oligonucleotide
  Sense strand starting at position 1520 of SEQ ID NO: 916575
ugaucagccuaauugaaag

SEQ ID NO: 1167403 - RNA, 19 nt, Artificial Sequence
  Description of Artificial Sequence: Synthetic oligonucleotide
  Antisense strand to SEQ ID NO: 1167402
cuuucaauuaggcugauca

SEQ ID NO: 1167404 - RNA, 19 nt, Artificial Sequence
  Description of Artificial Sequence: Synthetic oligonucleotide
  Sense strand starting at position 1582 of SEQ ID NO: 916575
ggucgugcaguguuucauu

SEQ ID NO: 1167405 - RNA, 19 nt, Artificial Sequence
  Description of Artificial Sequence: Synthetic oligonucleotide
  Antisense strand to SEQ ID NO: 1167404
aaugaaacacugcacgacc

SEQ ID NO: 1167406 - RNA, 19 nt, Artificial Sequence
  Description of Artificial Sequence: Synthetic oligonucleotide
  Sense strand starting at position 1584 of SEQ ID NO: 916575
ucgugcaguguuucauuga

SEQ ID NO: 1167407 - RNA, 19 nt, Artificial Sequence
  Description of Artificial Sequence: Synthetic oligonucleotide
  Antisense strand to SEQ ID NO: 1167406
ucaaugaaacacugcacga

SEQ ID NO: 1167408 - RNA, 19 nt, Artificial Sequence
  Description of Artificial Sequence: Synthetic oligonucleotide
  Sense strand starting at position 1671 of SEQ ID NO: 916575
aagagauacucaguuucug

SEQ ID NO: 1167409 - RNA, 19 nt, Artificial Sequence
  Description of Artificial Sequence: Synthetic oligonucleotide
  Antisense strand to SEQ ID NO: 1167408
cagaaacugaguaucucuu

SEQ ID NO: 1167410 - RNA, 19 nt, Artificial Sequence
  Description of Artificial Sequence: Synthetic oligonucleotide
  Sense strand starting at position 2042 of SEQ ID NO: 916575
ggaugaugucauugauugu

SEQ ID NO: 1167411 - RNA, 19 nt, Artificial Sequence
  Description of Artificial Sequence: Synthetic oligonucleotide
  Antisense strand to SEQ ID NO: 1167410
acaaucaaugacaucaucc

SEQ ID NO: 1167412 - RNA, 19 nt, Artificial Sequence
  Description of Artificial Sequence: Synthetic oligonucleotide
  Sense strand starting at position 2045 of SEQ ID NO: 916575
ugaugucauugauuguaca

SEQ ID NO: 1167413 - RNA, 19 nt, Artificial Sequence
  Description of Artificial Sequence: Synthetic oligonucleotide
  Antisense strand to SEQ ID NO: 1167412
uguacaaucaaugacauca

SEQ ID NO: 1167414 - RNA, 19 nt, Artificial Sequence
  Description of Artificial Sequence: Synthetic oligonucleotide
  Sense strand starting at position 2046 of SEQ ID NO: 916575
gaugucauugauuguacag

SEQ ID NO: 1167415 - RNA, 19 nt, Artificial Sequence
  Description of Artificial Sequence: Synthetic oligonucleotide
  Antisense strand to SEQ ID NO: 1167414
cuguacaaucaaugacauc

SEQ ID NO: 1167416 - RNA, 19 nt, Artificial Sequence
  Description of Artificial Sequence: Synthetic oligonucleotide
  Sense strand starting at position 2063 of SEQ ID NO: 916575
agacauuaucuuugcagga

SEQ ID NO: 1167417 - RNA, 19 nt, Artificial Sequence
  Description of Artificial Sequence: Synthetic oligonucleotide
  Antisense strand to SEQ ID NO: 1167416
uccugcaaagauaaugucu

SEQ ID NO: 1167418 - RNA, 19 nt, Artificial Sequence
  Description of Artificial Sequence: Synthetic oligonucleotide
  Sense strand starting at position 2064 of SEQ ID NO: 916575
gacauuaucuuugcaggau

SEQ ID NO: 1167419 - RNA, 19 nt, Artificial Sequence
  Description of Artificial Sequence: Synthetic oligonucleotide
  Antisense strand to SEQ ID NO: 1167418
auccugcaaagauaauguc

SEQ ID NO: 1167420 - RNA, 19 nt, Artificial Sequence
  Description of Artificial Sequence: Synthetic oligonucleotide
  Sense strand starting at position 2171 of SEQ ID NO: 916575
cugaaccuugagugaaagu

SEQ ID NO: 1167421 - RNA, 19 nt, Artificial Sequence
  Description of Artificial Sequence: Synthetic oligonucleotide
  Antisense strand to SEQ ID NO: 1167420
acuuucacucaagguucag

SEQ ID NO: 1167422 - RNA, 19 nt, Artificial Sequence
  Description of Artificial Sequence: Synthetic oligonucleotide
  Sense strand starting at position 2186 of SEQ ID NO: 916575
aagugacgaucuucccuaa

SEQ ID NO: 1167423 - RNA, 19 nt, Artificial Sequence
  Description of Artificial Sequence: Synthetic oligonucleotide
  Antisense strand to SEQ ID NO: 1167422
uuagggaagaucgucacuu

SEQ ID NO: 1167424 - RNA, 19 nt, Artificial Sequence
  Description of Artificial Sequence: Synthetic oligonucleotide
  Sense strand starting at position 2189 of SEQ ID NO: 916575
ugacgaucuucccuaauug

SEQ ID NO: 1167425 - RNA, 19 nt, Artificial Sequence
  Description of Artificial Sequence: Synthetic oligonucleotide
  Antisense strand to SEQ ID NO: 1167424
caauuagggaagaucguca

SEQ ID NO: 1167426 - RNA, 19 nt, Artificial Sequence
  Description of Artificial Sequence: Synthetic oligonucleotide
  Sense strand starting at position 2414 of SEQ ID NO: 916575
gcaugaaaucagugauucc

SEQ ID NO: 1167427 - RNA, 19 nt, Artificial Sequence
  Description of Artificial Sequence: Synthetic oligonucleotide
  Antisense strand to SEQ ID NO: 1167426
ggaaucacugauuucaugc

SEQ ID NO: 1167428 - RNA, 19 nt, Artificial Sequence
  Description of Artificial Sequence: Synthetic oligonucleotide
  Sense strand starting at position 2417 of SEQ ID NO: 916575
ugaaaucagugauuccuua

SEQ ID NO: 1167429 - RNA, 19 nt, Artificial Sequence
  Description of Artificial Sequence: Synthetic oligonucleotide
  Antisense strand to SEQ ID NO: 1167428
uaaggaaucacugauuuca

SEQ ID NO: 1167430 - RNA, 19 nt, Artificial Sequence
  Description of Artificial Sequence: Synthetic oligonucleotide
  Sense strand starting at position 2439 of SEQ ID NO: 916575
uuggaaguucuugaagagu

SEQ ID NO: 1167431 - RNA, 19 nt, Artificial Sequence
  Description of Artificial Sequence: Synthetic oligonucleotide
  Antisense strand to SEQ ID NO: 1167430
acucuucaagaacuuccaa

SEQ ID NO: 1167432 - RNA, 19 nt, Artificial Sequence
  Description of Artificial Sequence: Synthetic oligonucleotide
  Sense strand starting at position 2478 of SEQ ID NO: 916575
ucaaacuucugagcaaaug

SEQ ID NO: 1167433 - RNA, 19 nt, Artificial Sequence
  Description of Artificial Sequence: Synthetic oligonucleotide
  Antisense strand to SEQ ID NO: 1167432
cauuugcucagaaguuuga

SEQ ID NO: 1167434 - RNA, 19 nt, Artificial Sequence
  Description of Artificial Sequence: Synthetic oligonucleotide
  Sense strand starting at position 2525 of SEQ ID NO: 916575
uuaaauaauccaugcugga

SEQ ID NO: 1167435 - RNA, 19 nt, Artificial Sequence
  Description of Artificial Sequence: Synthetic oligonucleotide
  Antisense strand to SEQ ID NO: 1167434
uccagcauggauuauuuaa

SEQ ID NO: 1167436 - RNA, 19 nt, Artificial Sequence
  Description of Artificial Sequence: Synthetic oligonucleotide
  Sense strand starting at position 2720 of SEQ ID NO: 916575
uuugguugaauguauuaga

SEQ ID NO: 1167437 - RNA, 19 nt, Artificial Sequence
  Description of Artificial Sequence: Synthetic oligonucleotide
  Antisense strand to SEQ ID NO: 1167436
ucuaauacauucaaccaaa

SEQ ID NO: 1167438 - RNA, 19 nt, Artificial Sequence
  Description of Artificial Sequence: Synthetic oligonucleotide
  Sense strand starting at position 2796 of SEQ ID NO: 916575
aaauuuguguuguuguauc

SEQ ID NO: 1167439 - RNA, 19 nt, Artificial Sequence
  Description of Artificial Sequence: Synthetic oligonucleotide
  Antisense strand to SEQ ID NO: 1167438
gauacaacaacacaaauuu

SEQ ID NO: 1167440 - RNA, 19 nt, Artificial Sequence
  Description of Artificial Sequence: Synthetic oligonucleotide
  Sense strand starting at position 3193 of SEQ ID NO: 916575
agugcuguuagagauguga

SEQ ID NO: 1167441 - RNA, 19 nt, Artificial Sequence
  Description of Artificial Sequence: Synthetic oligonucleotide
  Antisense strand to SEQ ID NO: 1167440
ucacaucucuaacagcacu

SEQ ID NO: 1167442 - RNA, 19 nt, Artificial Sequence
  Description of Artificial Sequence: Synthetic oligonucleotide
  Sense strand starting at position 3197 of SEQ ID NO: 916575
cuguuagagaugugaauau

SEQ ID NO: 1167443 - RNA, 19 nt, Artificial Sequence
  Description of Artificial Sequence: Synthetic oligonucleotide
  Antisense strand to SEQ ID NO: 1167442
auauucacaucucuaacag

SEQ ID NO: 1167444 - RNA, 19 nt, Artificial Sequence
  Description of Artificial Sequence: Synthetic oligonucleotide
  Sense strand starting at position 3266 of SEQ ID NO: 916575
uguaguaacaguugagaaa

SEQ ID NO: 1167445 - RNA, 19 nt, Artificial Sequence
  Description of Artificial Sequence: Synthetic oligonucleotide
  Antisense strand to SEQ ID NO: 1167444
uuucucaacuguuacuaca

SEQ ID NO: 1167446 - RNA, 19 nt, Artificial Sequence
  Description of Artificial Sequence: Synthetic oligonucleotide
  Sense strand starting at position 3288 of SEQ ID NO: 916575
uaggauugguuccuauaga

SEQ ID NO: 1167447 - RNA, 19 nt, Artificial Sequence
  Description of Artificial Sequence: Synthetic oligonucleotide
  Antisense strand to SEQ ID NO: 1167446
ucuauaggaaccaauccua

SEQ ID NO: 1167448 - RNA, 19 nt, Artificial Sequence
  Description of Artificial Sequence: Synthetic oligonucleotide
  Sense strand starting at position 3518 of SEQ ID NO: 916575
ggaggaagguuucuguaaa

SEQ ID NO: 1167449 - RNA, 19 nt, Artificial Sequence
  Description of Artificial Sequence: Synthetic oligonucleotide
  Antisense strand to SEQ ID NO: 1167448
uuuacagaaaccuuccucc

SEQ ID NO: 1167450 - RNA, 19 nt, Artificial Sequence
  Description of Artificial Sequence: Synthetic oligonucleotide
  Sense strand starting at position 3555 of SEQ ID NO: 916575
ugaaauacauacgucuaga

SEQ ID NO: 1167451 - RNA, 19 nt, Artificial Sequence
  Description of Artificial Sequence: Synthetic oligonucleotide
  Antisense strand to SEQ ID NO: 1167450
ucuagacguauguauuuca

SEQ ID NO: 1167452 - RNA, 19 nt, Artificial Sequence
  Description of Artificial Sequence: Synthetic oligonucleotide
  Sense strand starting at position 3558 of SEQ ID NO: 916575
aauacauacgucuagaugu

SEQ ID NO: 1167453 - RNA, 19 nt, Artificial Sequence
  Description of Artificial Sequence: Synthetic oligonucleotide
  Antisense strand to SEQ ID NO: 1167452
acaucuagacguauguauu

SEQ ID NO: 1167454 - RNA, 19 nt, Artificial Sequence
  Description of Artificial Sequence: Synthetic oligonucleotide
  Sense strand starting at position 3638 of SEQ ID NO: 916575
cagagucucagugaggauu

SEQ ID NO: 1167455 - RNA, 19 nt, Artificial Sequence
  Description of Artificial Sequence: Synthetic oligonucleotide
  Antisense strand to SEQ ID NO: 1167454
aauccucacugagacucug

SEQ ID NO: 1167456 - RNA, 19 nt, Artificial Sequence
  Description of Artificial Sequence: Synthetic oligonucleotide
  Sense strand starting at position 3692 of SEQ ID NO: 916575
gugacagaauccucuuaaa

SEQ ID NO: 1167457 - RNA, 19 nt, Artificial Sequence
  Description of Artificial Sequence: Synthetic oligonucleotide
  Antisense strand to SEQ ID NO: 1167456
uuuaagaggauucugucac

SEQ ID NO: 1167458 - RNA, 19 nt, Artificial Sequence
  Description of Artificial Sequence: Synthetic oligonucleotide
  Sense strand starting at position 3843 of SEQ ID NO: 916575
aaggaaaugugauucuuau

SEQ ID NO: 1167459 - RNA, 19 nt, Artificial Sequence
  Description of Artificial Sequence: Synthetic oligonucleotide
  Antisense strand to SEQ ID NO: 1167458
auaagaaucacauuuccuu

SEQ ID NO: 1167460 - RNA, 19 nt, Artificial Sequence
  Description of Artificial Sequence: Synthetic oligonucleotide
  Sense strand starting at position 84 of SEQ ID NO: 916576
cugcaaaguguuugcaaau

SEQ ID NO: 1167461 - RNA, 19 nt, Artificial Sequence
  Description of Artificial Sequence: Synthetic oligonucleotide
  Antisense strand to SEQ ID NO: 1167460
auuugcaaacacuuugcag

SEQ ID NO: 1167462 - RNA, 19 nt, Artificial Sequence
  Description of Artificial Sequence: Synthetic oligonucleotide
  Sense strand starting at position 85 of SEQ ID NO: 916576
ugcaaaguguuugcaaauc

SEQ ID NO: 1167463 - RNA, 19 nt, Artificial Sequence
  Description of Artificial Sequence: Synthetic oligonucleotide
  Antisense strand to SEQ ID NO: 1167462
gauuugcaaacacuuugca

SEQ ID NO: 1167464 - RNA, 19 nt, Artificial Sequence
  Description of Artificial Sequence: Synthetic oligonucleotide
  Sense strand starting at position 892 of SEQ ID NO: 916576
gugguguuugcaggaggga

SEQ ID NO: 1167465 - RNA, 19 nt, Artificial Sequence
  Description of Artificial Sequence: Synthetic oligonucleotide
  Antisense strand to SEQ ID NO: 1167464
ucccuccugcaaacaccac

SEQ ID NO: 1167466 - RNA, 19 nt, Artificial Sequence
  Description of Artificial Sequence: Synthetic oligonucleotide
  Sense strand starting at position 1980 of SEQ ID NO: 916576
cuccuuaggccuugggaga

SEQ ID NO: 1167467 - RNA, 19 nt, Artificial Sequence
  Description of Artificial Sequence: Synthetic oligonucleotide
  Antisense strand to SEQ ID NO: 1167466
ucucccaaggccuaaggag

SEQ ID NO: 1167468 - RNA, 19 nt, Artificial Sequence
  Description of Artificial Sequence: Synthetic oligonucleotide
  Sense strand starting at position 1981 of SEQ ID NO: 916576
uccuuaggccuugggagau

SEQ ID NO: 1167469 - RNA, 19 nt, Artificial Sequence
  Description of Artificial Sequence: Synthetic oligonucleotide
  Antisense strand to SEQ ID NO: 1167468
aucucccaaggccuaagga

SEQ ID NO: 1167470 - RNA, 19 nt, Artificial Sequence
  Description of Artificial Sequence: Synthetic oligonucleotide
  Sense strand starting at position 2177 of SEQ ID NO: 916576
uaacaaguggugcaaugua

SEQ ID NO: 1167471 - RNA, 19 nt, Artificial Sequence
  Description of Artificial Sequence: Synthetic oligonucleotide
  Antisense strand to SEQ ID NO: 1167470
uacauugcaccacuuguua

SEQ ID NO: 1167472 - RNA, 19 nt, Artificial Sequence
  Description of Artificial Sequence: Synthetic oligonucleotide
  Sense strand starting at position 2428 of SEQ ID NO: 916576
agaguaauggccugaaaca

SEQ ID NO: 1167473 - RNA, 19 nt, Artificial Sequence
  Description of Artificial Sequence: Synthetic oligonucleotide
  Antisense strand to SEQ ID NO: 1167472
uguuucaggccauuacucu

SEQ ID NO: 1167474 - RNA, 19 nt, Artificial Sequence
  Description of Artificial Sequence: Synthetic oligonucleotide
  Sense strand starting at position 2490 of SEQ ID NO: 916576
ugauauucuuaccugucca

SEQ ID NO: 1167475 - RNA, 19 nt, Artificial Sequence
  Description of Artificial Sequence: Synthetic oligonucleotide
  Antisense strand to SEQ ID NO: 1167474
uggacagguaagaauauca

SEQ ID NO: 1167476 - RNA, 19 nt, Artificial Sequence
  Description of Artificial Sequence: Synthetic oligonucleotide
  Sense strand starting at position 2663 of SEQ ID NO: 916576
uccugaaacuguucugcuu

SEQ ID NO: 1167477 - RNA, 19 nt, Artificial Sequence
  Description of Artificial Sequence: Synthetic oligonucleotide
  Antisense strand to SEQ ID NO: 1167476
aagcagaacaguuucagga

SEQ ID NO: 1167478 - RNA, 19 nt, Artificial Sequence
  Description of Artificial Sequence: Synthetic oligonucleotide
  Sense strand starting at position 2666 of SEQ ID NO: 916576
ugaaacuguucugcuucua

SEQ ID NO: 1167479 - RNA, 19 nt, Artificial Sequence
  Description of Artificial Sequence: Synthetic oligonucleotide
  Antisense strand to SEQ ID NO: 1167478
uagaagcagaacaguuuca

SEQ ID NO: 1167480 - RNA, 19 nt, Artificial Sequence
  Description of Artificial Sequence: Synthetic oligonucleotide
  Sense strand starting at position 2695 of SEQ ID NO: 916576
ggacguugugccuauagau

SEQ ID NO: 1167481 - RNA, 19 nt, Artificial Sequence
  Description of Artificial Sequence: Synthetic oligonucleotide
  Antisense strand to SEQ ID NO: 1167480
aucuauaggcacaacgucc

SEQ ID NO: 1167482 - RNA, 19 nt, Artificial Sequence
  Description of Artificial Sequence: Synthetic oligonucleotide
  Sense strand starting at position 2748 of SEQ ID NO: 916576
ccuggcuucccagaggauu

SEQ ID NO: 1167483 - RNA, 19 nt, Artificial Sequence
  Description of Artificial Sequence: Synthetic oligonucleotide
  Antisense strand to SEQ ID NO: 1167482
aauccucugggaagccagg

SEQ ID NO: 1167484 - RNA, 19 nt, Artificial Sequence
  Description of Artificial Sequence: Synthetic oligonucleotide
  Sense strand starting at position 2816 of SEQ ID NO: 916576
cucuuaagauauggauuua

SEQ ID NO: 1167485 - RNA, 19 nt, Artificial Sequence
  Description of Artificial Sequence: Synthetic oligonucleotide
  Antisense strand to SEQ ID NO: 1167484
uaaauccauaucuuaagag

SEQ ID NO: 1167486 - RNA, 19 nt, Artificial Sequence
  Description of Artificial Sequence: Synthetic oligonucleotide
  Sense strand starting at position 2856 of SEQ ID NO: 916576
acacauugugucuacagua

SEQ ID NO: 1167487 - RNA, 19 nt, Artificial Sequence
  Description of Artificial Sequence: Synthetic oligonucleotide
  Antisense strand to SEQ ID NO: 1167486
uacuguagacacaaugugu

SEQ ID NO: 1167488 - RNA, 19 nt, Artificial Sequence
  Description of Artificial Sequence: Synthetic oligonucleotide
  Sense strand starting at position 2861 of SEQ ID NO: 916576
uugugucuacaguaguauu

SEQ ID NO: 1167489 - RNA, 19 nt, Artificial Sequence
  Description of Artificial Sequence: Synthetic oligonucleotide
  Antisense strand to SEQ ID NO: 1167488
aauacuacuguagacacaa

SEQ ID NO: 1167490 - RNA, 19 nt, Artificial Sequence
  Description of Artificial Sequence: Synthetic oligonucleotide
  Sense strand starting at position 2951 of SEQ ID NO: 916576
agaugagaccaucggacuu

SEQ ID NO: 1167491 - RNA, 19 nt, Artificial Sequence
  Description of Artificial Sequence: Synthetic oligonucleotide
  Antisense strand to SEQ ID NO: 1167490
aaguccgauggucucaucu

SEQ ID NO: 1167492 - RNA, 19 nt, Artificial Sequence
  Description of Artificial Sequence: Synthetic oligonucleotide
  Sense strand starting at position 2990 of SEQ ID NO: 916576
agcagaagugauuguguug

SEQ ID NO: 1167493 - RNA, 19 nt, Artificial Sequence
  Description of Artificial Sequence: Synthetic oligonucleotide
  Antisense strand to SEQ ID NO: 1167492
caacacaaucacuucugcu

SEQ ID NO: 1167494 - RNA, 19 nt, Artificial Sequence
  Description of Artificial Sequence: Synthetic oligonucleotide
  Sense strand starting at position 2993 of SEQ ID NO: 916576
agaagugauuguguugcuu

SEQ ID NO: 1167495 - RNA, 19 nt, Artificial Sequence
  Description of Artificial Sequence: Synthetic oligonucleotide
  Antisense strand to SEQ ID NO: 1167494
aagcaacacaaucacuucu

SEQ ID NO: 1167496 - RNA, 19 nt, Artificial Sequence
  Description of Artificial Sequence: Synthetic oligonucleotide
  Sense strand starting at position 3067 of SEQ ID NO: 916576
cuugacaaucaugguggua

SEQ ID NO: 1167497 - RNA, 19 nt, Artificial Sequence
  Description of Artificial Sequence: Synthetic oligonucleotide
  Antisense strand to SEQ ID NO: 1167496
uaccaccaugauugucaag

SEQ ID NO: 1167498 - RNA, 19 nt, Artificial Sequence
  Description of Artificial Sequence: Synthetic oligonucleotide
  Sense strand starting at position 3070 of SEQ ID NO: 916576
gacaaucauggugguacaa

SEQ ID NO: 1167499 - RNA, 19 nt, Artificial Sequence
  Description of Artificial Sequence: Synthetic oligonucleotide
  Antisense strand to SEQ ID NO: 1167498
uuguaccaccaugauuguc

SEQ ID NO: 1167500 - RNA, 19 nt, Artificial Sequence
  Description of Artificial Sequence: Synthetic oligonucleotide
  Sense strand starting at position 3112 of SEQ ID NO: 916576
cugagucucuguguaaaga

SEQ ID NO: 1167501 - RNA, 19 nt, Artificial Sequence
  Description of Artificial Sequence: Synthetic oligonucleotide
  Antisense strand to SEQ ID NO: 1167500
ucuuuacacagagacucag

SEQ ID NO: 1167502 - RNA, 19 nt, Artificial Sequence
  Description of Artificial Sequence: Synthetic oligonucleotide
  Sense strand starting at position 3113 of SEQ ID NO: 916576
ugagucucuguguaaagau

SEQ ID NO: 1167503 - RNA, 19 nt, Artificial Sequence
  Description of Artificial Sequence: Synthetic oligonucleotide
  Antisense strand to SEQ ID NO: 1167502
aucuuuacacagagacuca

SEQ ID NO: 1167504 - RNA, 19 nt, Artificial Sequence
  Description of Artificial Sequence: Synthetic oligonucleotide
  Sense strand starting at position 3162 of SEQ ID NO: 916576
aaaguagugucagcaaaua

SEQ ID NO: 1167505 - RNA, 19 nt, Artificial Sequence
  Description of Artificial Sequence: Synthetic oligonucleotide
  Antisense strand to SEQ ID NO: 1167504
uauuugcugacacuacuuu

SEQ ID NO: 1167506 - RNA, 19 nt, Artificial Sequence
  Description of Artificial Sequence: Synthetic oligonucleotide
  Sense strand starting at position 3193 of SEQ ID NO: 916576
uauguuaagucagugggau

SEQ ID NO: 1167507 - RNA, 19 nt, Artificial Sequence
  Description of Artificial Sequence: Synthetic oligonucleotide
  Antisense strand to SEQ ID NO: 1167506
aucccacugacuuaacaua

SEQ ID NO: 1167508 - RNA, 19 nt, Artificial Sequence
  Description of Artificial Sequence: Synthetic oligonucleotide
  Sense strand starting at position 3194 of SEQ ID NO: 916576
auguuaagucagugggauu

SEQ ID NO: 1167509 - RNA, 19 nt, Artificial Sequence
  Description of Artificial Sequence: Synthetic oligonucleotide
  Antisense strand to SEQ ID NO: 1167508
aaucccacugacuuaacau

SEQ ID NO: 1167510 - RNA, 19 nt, Artificial Sequence
  Description of Artificial Sequence: Synthetic oligonucleotide
  Sense strand starting at position 3220 of SEQ ID NO: 916576
gcagcauaaccuggcuuau

SEQ ID NO: 1167511 - RNA, 19 nt, Artificial Sequence
  Description of Artificial Sequence: Synthetic oligonucleotide
  Antisense strand to SEQ ID NO: 1167510
auaagccagguuaugcugc

SEQ ID NO: 1167512 - RNA, 19 nt, Artificial Sequence
  Description of Artificial Sequence: Synthetic oligonucleotide
  Sense strand starting at position 3232 of SEQ ID NO: 916576
ggcuuauucuggcugauag

SEQ ID NO: 1167513 - RNA, 19 nt, Artificial Sequence
  Description of Artificial Sequence: Synthetic oligonucleotide
  Antisense strand to SEQ ID NO: 1167512
cuaucagccagaauaagcc

SEQ ID NO: 1167514 - RNA, 19 nt, Artificial Sequence
  Description of Artificial Sequence: Synthetic oligonucleotide
  Sense strand starting at position 3250 of SEQ ID NO: 916576
guguuacucccagauaugu

SEQ ID NO: 1167515 - RNA, 19 nt, Artificial Sequence
  Description of Artificial Sequence: Synthetic oligonucleotide
  Antisense strand to SEQ ID NO: 1167514
acauaucugggaguaacac

SEQ ID NO: 1167516 - RNA, 19 nt, Artificial Sequence
  Description of Artificial Sequence: Synthetic oligonucleotide
  Sense strand starting at position 3334 of SEQ ID NO: 916576
aguaaacccuccucuguaa

SEQ ID NO: 1167517 - RNA, 19 nt, Artificial Sequence
  Description of Artificial Sequence: Synthetic oligonucleotide
  Antisense strand to SEQ ID NO: 1167516
uuacagaggaggguuuacu

SEQ ID NO: 1167518 - RNA, 19 nt, Artificial Sequence
  Description of Artificial Sequence: Synthetic oligonucleotide
  Sense strand starting at position 3346 of SEQ ID NO: 916576
ucuguaaaguagcuguuua

SEQ ID NO: 1167519 - RNA, 19 nt, Artificial Sequence
  Description of Artificial Sequence: Synthetic oligonucleotide
  Antisense strand to SEQ ID NO: 1167518
uaaacagcuacuuuacaga

SEQ ID NO: 1167520 - RNA, 19 nt, Artificial Sequence
  Description of Artificial Sequence: Synthetic oligonucleotide
  Sense strand starting at position 3390 of SEQ ID NO: 916576
ccguaucagaaagguuaag

SEQ ID NO: 1167521 - RNA, 19 nt, Artificial Sequence
  Description of Artificial Sequence: Synthetic oligonucleotide
  Antisense strand to SEQ ID NO: 1167520
cuuaaccuuucugauacgg

SEQ ID NO: 1167522 - RNA, 19 nt, Artificial Sequence
  Description of Artificial Sequence: Synthetic oligonucleotide
  Sense strand starting at position 3405 of SEQ ID NO: 916576
uaaguaauuucccagaggu

SEQ ID NO: 1167523 - RNA, 19 nt, Artificial Sequence
  Description of Artificial Sequence: Synthetic oligonucleotide
  Antisense strand to SEQ ID NO: 1167522
accucugggaaauuacuua

SEQ ID NO: 1167524 - RNA, 19 nt, Artificial Sequence
  Description of Artificial Sequence: Synthetic oligonucleotide
  Sense strand starting at position 3516 of SEQ ID NO: 916576
cuccuuaaaugggaaggau

SEQ ID NO: 1167525 - RNA, 19 nt, Artificial Sequence
  Description of Artificial Sequence: Synthetic oligonucleotide
  Antisense strand to SEQ ID NO: 1167524
auccuucccauuuaaggag

SEQ ID NO: 1167526 - RNA, 19 nt, Artificial Sequence
  Description of Artificial Sequence: Synthetic oligonucleotide
  Sense strand starting at position 3582 of SEQ ID NO: 916576
gggaguuccucuccagacu

SEQ ID NO: 1167527 - RNA, 19 nt, Artificial Sequence
  Description of Artificial Sequence: Synthetic oligonucleotide
  Antisense strand to SEQ ID NO: 1167526
agucuggagaggaacuccc

SEQ ID NO: 1167528 - RNA, 19 nt, Artificial Sequence
  Description of Artificial Sequence: Synthetic oligonucleotide
  Sense strand starting at position 3585 of SEQ ID NO: 916576
aguuccucuccagacugaa

SEQ ID NO: 1167529 - RNA, 19 nt, Artificial Sequence
  Description of Artificial Sequence: Synthetic oligonucleotide
  Antisense strand to SEQ ID NO: 1167528
uucagucuggagaggaacu

SEQ ID NO: 1167530 - RNA, 19 nt, Artificial Sequence
  Description of Artificial Sequence: Synthetic oligonucleotide
  Sense strand starting at position 3702 of SEQ ID NO: 916576
agcccaggcuccuugauua

SEQ ID NO: 1167531 - RNA, 19 nt, Artificial Sequence
  Description of Artificial Sequence: Synthetic oligonucleotide
  Antisense strand to SEQ ID NO: 1167530
uaaucaaggagccugggcu

SEQ ID NO: 1167532 - RNA, 19 nt, Artificial Sequence
  Description of Artificial Sequence: Synthetic oligonucleotide
  Sense strand starting at position 3771 of SEQ ID NO: 916576
cucuuaugaucaucuugga

SEQ ID NO: 1167533 - RNA, 19 nt, Artificial Sequence
  Description of Artificial Sequence: Synthetic oligonucleotide
  Antisense strand to SEQ ID NO: 1167532
uccaagaugaucauaagag

SEQ ID NO: 1167534 - RNA, 19 nt, Artificial Sequence
  Description of Artificial Sequence: Synthetic oligonucleotide
  Sense strand starting at position 3776 of SEQ ID NO: 916576
augaucaucuuggauaauu

SEQ ID NO: 1167535 - RNA, 19 nt, Artificial Sequence
  Description of Artificial Sequence: Synthetic oligonucleotide
  Antisense strand to SEQ ID NO: 1167534
aauuauccaagaugaucau

SEQ ID NO: 1167536 - RNA, 19 nt, Artificial Sequence
  Description of Artificial Sequence: Synthetic oligonucleotide
  Sense strand starting at position 3816 of SEQ ID NO: 916576
guucucuaaucugcaaagu

SEQ ID NO: 1167537 - RNA, 19 nt, Artificial Sequence
  Description of Artificial Sequence: Synthetic oligonucleotide
  Antisense strand to SEQ ID NO: 1167536
acuuugcagauuagagaac

SEQ ID NO: 1167538 - RNA, 19 nt, Artificial Sequence
  Description of Artificial Sequence: Synthetic oligonucleotide
  Sense strand starting at position 3834 of SEQ ID NO: 916576
uggcgaugguaacuuucau

SEQ ID NO: 1167539 - RNA, 19 nt, Artificial Sequence
  Description of Artificial Sequence: Synthetic oligonucleotide
  Antisense strand to SEQ ID NO: 1167538
augaaaguuaccaucgcca

SEQ ID NO: 1167540 - RNA, 19 nt, Artificial Sequence
  Description of Artificial Sequence: Synthetic oligonucleotide
  Sense strand starting at position 12 of SEQ ID NO: 916577
accuacagguuaucagauu

SEQ ID NO: 1167541 - RNA, 19 nt, Artificial Sequence
  Description of Artificial Sequence: Synthetic oligonucleotide
  Antisense strand to SEQ ID NO: 1167540
aaucugauaaccuguaggu

SEQ ID NO: 1167542 - RNA, 19 nt, Artificial Sequence
  Description of Artificial Sequence: Synthetic oligonucleotide
  Sense strand starting at position 122 of SEQ ID NO: 916577
acuagaggcuaugaauuua

SEQ ID NO: 1167543 - RNA, 19 nt, Artificial Sequence
  Description of Artificial Sequence: Synthetic oligonucleotide
  Antisense strand to SEQ ID NO: 1167542
uaaauucauagccucuagu

SEQ ID NO: 1167544 - RNA, 19 nt, Artificial Sequence
  Description of Artificial Sequence: Synthetic oligonucleotide
  Sense strand starting at position 460 of SEQ ID NO: 916577
cuuccuaauugugucauuu

SEQ ID NO: 1167545 - RNA, 19 nt, Artificial Sequence
  Description of Artificial Sequence: Synthetic oligonucleotide
  Antisense strand to SEQ ID NO: 1167544
aaaugacacaauuaggaag

SEQ ID NO: 1167546 - RNA, 19 nt, Artificial Sequence
  Description of Artificial Sequence: Synthetic oligonucleotide
  Sense strand starting at position 469 of SEQ ID NO: 916577
ugugucauuugggaaggua

SEQ ID NO: 1167547 - RNA, 19 nt, Artificial Sequence
  Description of Artificial Sequence: Synthetic oligonucleotide
  Antisense strand to SEQ ID NO: 1167546
uaccuucccaaaugacaca

SEQ ID NO: 1167548 - RNA, 19 nt, Artificial Sequence
  Description of Artificial Sequence: Synthetic oligonucleotide
  Sense strand starting at position 483 of SEQ ID NO: 916577
agguacuuaugcucugcaa

SEQ ID NO: 1167549 - RNA, 19 nt, Artificial Sequence
  Description of Artificial Sequence: Synthetic oligonucleotide
  Antisense strand to SEQ ID NO: 1167548
uugcagagcauaaguaccu

SEQ ID NO: 1167550 - RNA, 19 nt, Artificial Sequence
  Description of Artificial Sequence: Synthetic oligonucleotide
  Sense strand starting at position 535 of SEQ ID NO: 916577
acuaccucccaguguuaaa

SEQ ID NO: 1167551 - RNA, 19 nt, Artificial Sequence
  Description of Artificial Sequence: Synthetic oligonucleotide
  Antisense strand to SEQ ID NO: 1167550
uuuaacacugggagguagu

SEQ ID NO: 1167552 - RNA, 19 nt, Artificial Sequence
  Description of Artificial Sequence: Synthetic oligonucleotide
  Sense strand starting at position 735 of SEQ ID NO: 916577
ccgcuaaggcuuuaucuuu

SEQ ID NO: 1167553 - RNA, 19 nt, Artificial Sequence
  Description of Artificial Sequence: Synthetic oligonucleotide
  Antisense strand to SEQ ID NO: 1167552
aaagauaaagccuuagcgg

SEQ ID NO: 1167554 - RNA, 19 nt, Artificial Sequence
  Description of Artificial Sequence: Synthetic oligonucleotide
  Sense strand starting at position 766 of SEQ ID NO: 916577
acuuaaugcuuguugacuu

SEQ ID NO: 1167555 - RNA, 19 nt, Artificial Sequence
  Description of Artificial Sequence: Synthetic oligonucleotide
  Antisense strand to SEQ ID NO: 1167554
aagucaacaagcauuaagu

SEQ ID NO: 1167556 - RNA, 19 nt, Artificial Sequence
  Description of Artificial Sequence: Synthetic oligonucleotide
  Sense strand starting at position 874 of SEQ ID NO: 916577
ugcacacucguuugggauu

SEQ ID NO: 1167557 - RNA, 19 nt, Artificial Sequence
  Description of Artificial Sequence: Synthetic oligonucleotide
  Antisense strand to SEQ ID NO: 1167556
aaucccaaacgagugugca

SEQ ID NO: 1167558 - RNA, 19 nt, Artificial Sequence
  Description of Artificial Sequence: Synthetic oligonucleotide
  Sense strand starting at position 901 of SEQ ID NO: 916577
auacguaaagguuaugagu

SEQ ID NO: 1167559 - RNA, 19 nt, Artificial Sequence
  Description of Artificial Sequence: Synthetic oligonucleotide
  Antisense strand to SEQ ID NO: 1167558
acucauaaccuuuacguau

SEQ ID NO: 1167560 - RNA, 19 nt, Artificial Sequence
  Description of Artificial Sequence: Synthetic oligonucleotide
  Sense strand starting at position 908 of SEQ ID NO: 916577
aagguuaugagugagcaca

SEQ ID NO: 1167561 - RNA, 19 nt, Artificial Sequence
  Description of Artificial Sequence: Synthetic oligonucleotide
  Antisense strand to SEQ ID NO: 1167560
ugugcucacucauaaccuu

SEQ ID NO: 1167562 - RNA, 19 nt, Artificial Sequence
  Description of Artificial Sequence: Synthetic oligonucleotide
  Sense strand starting at position 910 of SEQ ID NO: 916577
gguuaugagugagcacaga

SEQ ID NO: 1167563 - RNA, 19 nt, Artificial Sequence
  Description of Artificial Sequence: Synthetic oligonucleotide
  Antisense strand to SEQ ID NO: 1167562
ucugugcucacucauaacc

SEQ ID NO: 1167564 - RNA, 19 nt, Artificial Sequence
  Description of Artificial Sequence: Synthetic oligonucleotide
  Sense strand starting at position 981 of SEQ ID NO: 916577
aaggguuugaagggcaaau

SEQ ID NO: 1167565 - RNA, 19 nt, Artificial Sequence
  Description of Artificial Sequence: Synthetic oligonucleotide
  Antisense strand to SEQ ID NO: 1167564
auuugcccuucaaacccuu

SEQ ID NO: 1167566 - RNA, 19 nt, Artificial Sequence
  Description of Artificial Sequence: Synthetic oligonucleotide
  Sense strand starting at position 991 of SEQ ID NO: 916577
agggcaaauuucgagaacu

SEQ ID NO: 1167567 - RNA, 19 nt, Artificial Sequence
  Description of Artificial Sequence: Synthetic oligonucleotide
  Antisense strand to SEQ ID NO: 1167566
aguucucgaaauuugcccu

SEQ ID NO: 1167568 - RNA, 19 nt, Artificial Sequence
  Description of Artificial Sequence: Synthetic oligonucleotide
  Sense strand starting at position 1027 of SEQ ID NO: 916577
gaacuaagccacugagugu

SEQ ID NO: 1167569 - RNA, 19 nt, Artificial Sequence
  Description of Artificial Sequence: Synthetic oligonucleotide
  Antisense strand to SEQ ID NO: 1167568
acacucaguggcuuaguuc

SEQ ID NO: 1167570 - RNA, 19 nt, Artificial Sequence
  Description of Artificial Sequence: Synthetic oligonucleotide
  Sense strand starting at position 1040 of SEQ ID NO: 916577
gaguguauucugugucaua

SEQ ID NO: 1167571 - RNA, 19 nt, Artificial Sequence
  Description of Artificial Sequence: Synthetic oligonucleotide
  Antisense strand to SEQ ID NO: 1167570
uaugacacagaauacacuc

SEQ ID NO: 1167572 - RNA, 19 nt, Artificial Sequence
  Description of Artificial Sequence: Synthetic oligonucleotide
  Sense strand starting at position 1041 of SEQ ID NO: 916577
aguguauucugugucauau

SEQ ID NO: 1167573 - RNA, 19 nt, Artificial Sequence
  Description of Artificial Sequence: Synthetic oligonucleotide
  Antisense strand to SEQ ID NO: 1167572
auaugacacagaauacacu

SEQ ID NO: 1167574 - RNA, 19 nt, Artificial Sequence
  Description of Artificial Sequence: Synthetic oligonucleotide
  Sense strand starting at position 1110 of SEQ ID NO: 916577
ccagccuuagccuaguauu

SEQ ID NO: 1167575 - RNA, 19 nt, Artificial Sequence
  Description of Artificial Sequence: Synthetic oligonucleotide
  Antisense strand to SEQ ID NO: 1167574
aauacuaggcuaaggcugg

SEQ ID NO: 1167576 - RNA, 19 nt, Artificial Sequence
  Description of Artificial Sequence: Synthetic oligonucleotide
  Sense strand starting at position 1321 of SEQ ID NO: 916577
gcccaaugcagauggguaa

SEQ ID NO: 1167577 - RNA, 19 nt, Artificial Sequence
  Description of Artificial Sequence: Synthetic oligonucleotide
  Antisense strand to SEQ ID NO: 1167576
uuacccaucugcauugggc

SEQ ID NO: 1167578 - RNA, 19 nt, Artificial Sequence
  Description of Artificial Sequence: Synthetic oligonucleotide
  Sense strand starting at position 1324 of SEQ ID NO: 916577
caaugcagauggguaaauu

SEQ ID NO: 1167579 - RNA, 19 nt, Artificial Sequence
  Description of Artificial Sequence: Synthetic oligonucleotide
  Antisense strand to SEQ ID NO: 1167578
aauuuacccaucugcauug

SEQ ID NO: 1167580 - RNA, 19 nt, Artificial Sequence
  Description of Artificial Sequence: Synthetic oligonucleotide
  Sense strand starting at position 1347 of SEQ ID NO: 916577
aagaacgacugcucugaga

SEQ ID NO: 1167581 - RNA, 19 nt, Artificial Sequence
  Description of Artificial Sequence: Synthetic oligonucleotide
  Antisense strand to SEQ ID NO: 1167580
ucucagagcagucguucuu

SEQ ID NO: 1167582 - RNA, 19 nt, Artificial Sequence
  Description of Artificial Sequence: Synthetic oligonucleotide
  Sense strand starting at position 1349 of SEQ ID NO: 916577
gaacgacugcucugagaac

SEQ ID NO: 1167583 - RNA, 19 nt, Artificial Sequence
  Description of Artificial Sequence: Synthetic oligonucleotide
  Antisense strand to SEQ ID NO: 1167582
guucucagagcagucguuc

SEQ ID NO: 1167584 - RNA, 19 nt, Artificial Sequence
  Description of Artificial Sequence: Synthetic oligonucleotide
  Sense strand starting at position 1355 of SEQ ID NO: 916577
cugcucugagaacgagaaa

SEQ ID NO: 1167585 - RNA, 19 nt, Artificial Sequence
  Description of Artificial Sequence: Synthetic oligonucleotide
  Antisense strand to SEQ ID NO: 1167584
uuucucguucucagagcag

SEQ ID NO: 1167586 - RNA, 19 nt, Artificial Sequence
  Description of Artificial Sequence: Synthetic oligonucleotide
  Sense strand starting at position 1426 of SEQ ID NO: 916577
agcugagagcuggagauua

SEQ ID NO: 1167587 - RNA, 19 nt, Artificial Sequence
  Description of Artificial Sequence: Synthetic oligonucleotide
  Antisense strand to SEQ ID NO: 1167586
uaaucuccagcucucagcu

SEQ ID NO: 1167588 - RNA, 19 nt, Artificial Sequence
  Description of Artificial Sequence: Synthetic oligonucleotide
  Sense strand starting at position 1572 of SEQ ID NO: 916577
aggcauaauuaugccaaca

SEQ ID NO: 1167589 - RNA, 19 nt, Artificial Sequence
  Description of Artificial Sequence: Synthetic oligonucleotide
  Antisense strand to SEQ ID NO: 1167588
uguuggcauaauuaugccu

SEQ ID NO: 1167590 - RNA, 19 nt, Artificial Sequence
  Description of Artificial Sequence: Synthetic oligonucleotide
  Sense strand starting at position 1646 of SEQ ID NO: 916577
cgaggacugucuguuacuc

SEQ ID NO: 1167591 - RNA, 19 nt, Artificial Sequence
  Description of Artificial Sequence: Synthetic oligonucleotide
  Antisense strand to SEQ ID NO: 1167590
gaguaacagacaguccucg

SEQ ID NO: 1167592 - RNA, 19 nt, Artificial Sequence
  Description of Artificial Sequence: Synthetic oligonucleotide
  Sense strand starting at position 1651 of SEQ ID NO: 916577
acugucuguuacuccacaa

SEQ ID NO: 1167593 - RNA, 19 nt, Artificial Sequence
  Description of Artificial Sequence: Synthetic oligonucleotide
  Antisense strand to SEQ ID NO: 1167592
uuguggaguaacagacagu

SEQ ID NO: 1167594 - RNA, 19 nt, Artificial Sequence
  Description of Artificial Sequence: Synthetic oligonucleotide
  Sense strand starting at position 2639 of SEQ ID NO: 916577
cucugcucuguuuaaauga

SEQ ID NO: 1167595 - RNA, 19 nt, Artificial Sequence
  Description of Artificial Sequence: Synthetic oligonucleotide
  Antisense strand to SEQ ID NO: 1167594
ucauuuaaacagagcagag

SEQ ID NO: 1167596 - RNA, 19 nt, Artificial Sequence
  Description of Artificial Sequence: Synthetic oligonucleotide
  Sense strand starting at position 3052 of SEQ ID NO: 916577
uguagauacguccagaauu

SEQ ID NO: 1167597 - RNA, 19 nt, Artificial Sequence
  Description of Artificial Sequence: Synthetic oligonucleotide
  Antisense strand to SEQ ID NO: 1167596
aauucuggacguaucuaca

SEQ ID NO: 1167598 - RNA, 19 nt, Artificial Sequence
  Description of Artificial Sequence: Synthetic oligonucleotide
  Sense strand starting at position 3113 of SEQ ID NO: 916577
aaguuaagacguuaacugu

SEQ ID NO: 1167599 - RNA, 19 nt, Artificial Sequence
  Description of Artificial Sequence: Synthetic oligonucleotide
  Antisense strand to SEQ ID NO: 1167598
acaguuaacgucuuaacuu

SEQ ID NO: 1167600 - RNA, 19 nt, Artificial Sequence
  Description of Artificial Sequence: Synthetic oligonucleotide
  Sense strand starting at position 3217 of SEQ ID NO: 916577
gauggcuuguauuauuuaa

SEQ ID NO: 1167601 - RNA, 19 nt, Artificial Sequence
  Description of Artificial Sequence: Synthetic oligonucleotide
  Antisense strand to SEQ ID NO: 1167600
uuaaauaauacaagccauc

SEQ ID NO: 1167602 - RNA, 19 nt, Artificial Sequence
  Description of Artificial Sequence: Synthetic oligonucleotide
  Sense strand starting at position 3249 of SEQ ID NO: 916577
gcuuaaacguuucuuugaa

SEQ ID NO: 1167603 - RNA, 19 nt, Artificial Sequence
  Description of Artificial Sequence: Synthetic oligonucleotide
  Antisense strand to SEQ ID NO: 1167602
uucaaagaaacguuuaagc

SEQ ID NO: 1167604 - RNA, 19 nt, Artificial Sequence
  Description of Artificial Sequence: Synthetic oligonucleotide
  Sense strand starting at position 3250 of SEQ ID NO: 916577
cuuaaacguuucuuugaag

SEQ ID NO: 1167605 - RNA, 19 nt, Artificial Sequence
  Description of Artificial Sequence: Synthetic oligonucleotide
  Antisense strand to SEQ ID NO: 1167604
cuucaaagaaacguuuaag

SEQ ID NO: 1167606 - RNA, 19 nt, Artificial Sequence
  Description of Artificial Sequence: Synthetic oligonucleotide
  Sense strand starting at position 3261 of SEQ ID NO: 916577
cuuugaagcugucuauaac

SEQ ID NO: 1167607 - RNA, 19 nt, Artificial Sequence
  Description of Artificial Sequence: Synthetic oligonucleotide
  Antisense strand to SEQ ID NO: 1167606
guuauagacagcuucaaag

SEQ ID NO: 1167608 - RNA, 19 nt, Artificial Sequence
  Description of Artificial Sequence: Synthetic oligonucleotide
  Sense strand starting at position 3262 of SEQ ID NO: 916577
uuugaagcugucuauaaca

SEQ ID NO: 1167609 - RNA, 19 nt, Artificial Sequence
  Description of Artificial Sequence: Synthetic oligonucleotide
  Antisense strand to SEQ ID NO: 1167608
uguuauagacagcuucaaa

SEQ ID NO: 1167610 - RNA, 19 nt, Artificial Sequence
  Description of Artificial Sequence: Synthetic oligonucleotide
  Sense strand starting at position 3264 of SEQ ID NO: 916577
ugaagcugucuauaacauc

SEQ ID NO: 1167611 - RNA, 19 nt, Artificial Sequence
  Description of Artificial Sequence: Synthetic oligonucleotide
  Antisense strand to SEQ ID NO: 1167610
gauguuauagacagcuuca

SEQ ID NO: 1167612 - RNA, 19 nt, Artificial Sequence
  Description of Artificial Sequence: Synthetic oligonucleotide
  Sense strand starting at position 3293 of SEQ ID NO: 916577
ugccaccuuccggaaagua

SEQ ID NO: 1167613 - RNA, 19 nt, Artificial Sequence
  Description of Artificial Sequence: Synthetic oligonucleotide
  Antisense strand to SEQ ID NO: 1167612
uacuuuccggaagguggca

SEQ ID NO: 1167614 - RNA, 19 nt, Artificial Sequence
  Description of Artificial Sequence: Synthetic oligonucleotide
  Sense strand starting at position 3324 of SEQ ID NO: 916577
auggcuaauaguugcgaaa

SEQ ID NO: 1167615 - RNA, 19 nt, Artificial Sequence
  Description of Artificial Sequence: Synthetic oligonucleotide
  Antisense strand to SEQ ID NO: 1167614
uuucgcaacuauuagccau

SEQ ID NO: 1167616 - RNA, 19 nt, Artificial Sequence
  Description of Artificial Sequence: Synthetic oligonucleotide
  Sense strand starting at position 3697 of SEQ ID NO: 916577
agagcacaccgucaaauau

SEQ ID NO: 1167617 - RNA, 19 nt, Artificial Sequence
  Description of Artificial Sequence: Synthetic oligonucleotide
  Antisense strand to SEQ ID NO: 1167616
auauuugacggugugcucu

SEQ ID NO: 1167618 - RNA, 19 nt, Artificial Sequence
  Description of Artificial Sequence: Synthetic oligonucleotide
  Sense strand starting at position 3750 of SEQ ID NO: 916577
uguaaugggcucuaagguu

SEQ ID NO: 1167619 - RNA, 19 nt, Artificial Sequence
  Description of Artificial Sequence: Synthetic oligonucleotide
  Antisense strand to SEQ ID NO: 1167618
aaccuuagagcccauuaca

SEQ ID NO: 1167620 - RNA, 19 nt, Artificial Sequence
  Description of Artificial Sequence: Synthetic oligonucleotide
  Sense strand starting at position 139 of SEQ ID NO: 916578
acuuaaugcuuguugacuu

SEQ ID NO: 1167621 - RNA, 19 nt, Artificial Sequence
  Description of Artificial Sequence: Synthetic oligonucleotide
  Antisense strand to SEQ ID NO: 1167620
aagucaacaagcauuaagu

SEQ ID NO: 1167622 - RNA, 19 nt, Artificial Sequence
  Description of Artificial Sequence: Synthetic oligonucleotide
  Sense strand starting at position 274 of SEQ ID NO: 916578
auacguaaagguuaugagu

SEQ ID NO: 1167623 - RNA, 19 nt, Artificial Sequence
  Description of Artificial Sequence: Synthetic oligonucleotide
  Antisense strand to SEQ ID NO: 1167622
acucauaaccuuuacguau

SEQ ID NO: 1167624 - RNA, 19 nt, Artificial Sequence
  Description of Artificial Sequence: Synthetic oligonucleotide
  Sense strand starting at position 281 of SEQ ID NO: 916578
aagguuaugagugagcaca

SEQ ID NO: 1167625 - RNA, 19 nt, Artificial Sequence
  Description of Artificial Sequence: Synthetic oligonucleotide
  Antisense strand to SEQ ID NO: 1167624
ugugcucacucauaaccuu

SEQ ID NO: 1167626 - RNA, 19 nt, Artificial Sequence
  Description of Artificial Sequence: Synthetic oligonucleotide
  Sense strand starting at position 283 of SEQ ID NO: 916578
gguuaugagugagcacaga

SEQ ID NO: 1167627 - RNA, 19 nt, Artificial Sequence
  Description of Artificial Sequence: Synthetic oligonucleotide
  Antisense strand to SEQ ID NO: 1167626
ucugugcucacucauaacc

SEQ ID NO: 1167628 - RNA, 19 nt, Artificial Sequence
  Description of Artificial Sequence: Synthetic oligonucleotide
  Sense strand starting at position 354 of SEQ ID NO: 916578
aaggguuugaagggcaaau

SEQ ID NO: 1167629 - RNA, 19 nt, Artificial Sequence
  Description of Artificial Sequence: Synthetic oligonucleotide
  Antisense strand to SEQ ID NO: 1167628
auuugcccuucaaacccuu

SEQ ID NO: 1167630 - RNA, 19 nt, Artificial Sequence
  Description of Artificial Sequence: Synthetic oligonucleotide
  Sense strand starting at position 364 of SEQ ID NO: 916578
agggcaaauuucgagaacu

SEQ ID NO: 1167631 - RNA, 19 nt, Artificial Sequence
  Description of Artificial Sequence: Synthetic oligonucleotide
  Antisense strand to SEQ ID NO: 1167630
aguucucgaaauuugcccu

SEQ ID NO: 1167632 - RNA, 19 nt, Artificial Sequence
  Description of Artificial Sequence: Synthetic oligonucleotide
  Sense strand starting at position 400 of SEQ ID NO: 916578
gaacuaagccacugagugu

SEQ ID NO: 1167633 - RNA, 19 nt, Artificial Sequence
  Description of Artificial Sequence: Synthetic oligonucleotide
  Antisense strand to SEQ ID NO: 1167632
acacucaguggcuuaguuc

SEQ ID NO: 1167634 - RNA, 19 nt, Artificial Sequence
  Description of Artificial Sequence: Synthetic oligonucleotide
  Sense strand starting at position 483 of SEQ ID NO: 916578
ccagccuuagccuaguauu

SEQ ID NO: 1167635 - RNA, 19 nt, Artificial Sequence
  Description of Artificial Sequence: Synthetic oligonucleotide
  Antisense strand to SEQ ID NO: 1167634
aauacuaggcuaaggcugg

SEQ ID NO: 1167636 - RNA, 19 nt, Artificial Sequence
  Description of Artificial Sequence: Synthetic oligonucleotide
  Sense strand starting at position 694 of SEQ ID NO: 916578
gcccaaugcagauggguaa

SEQ ID NO: 1167637 - RNA, 19 nt, Artificial Sequence
  Description of Artificial Sequence: Synthetic oligonucleotide
  Antisense strand to SEQ ID NO: 1167636
uuacccaucugcauugggc

SEQ ID NO: 1167638 - RNA, 19 nt, Artificial Sequence
  Description of Artificial Sequence: Synthetic oligonucleotide
  Sense strand starting at position 697 of SEQ ID NO: 916578
caaugcagauggguaaauu

SEQ ID NO: 1167639 - RNA, 19 nt, Artificial Sequence
  Description of Artificial Sequence: Synthetic oligonucleotide
  Antisense strand to SEQ ID NO: 1167638
aauuuacccaucugcauug

SEQ ID NO: 1167640 - RNA, 19 nt, Artificial Sequence
  Description of Artificial Sequence: Synthetic oligonucleotide
  Sense strand starting at position 720 of SEQ ID NO: 916578
aagaacgacugcucugaga

SEQ ID NO: 1167641 - RNA, 19 nt, Artificial Sequence
  Description of Artificial Sequence: Synthetic oligonucleotide
  Antisense strand to SEQ ID NO: 1167640
ucucagagcagucguucuu

SEQ ID NO: 1167642 - RNA, 19 nt, Artificial Sequence
  Description of Artificial Sequence: Synthetic oligonucleotide
  Sense strand starting at position 722 of SEQ ID NO: 916578
gaacgacugcucugagaac

SEQ ID NO: 1167643 - RNA, 19 nt, Artificial Sequence
  Description of Artificial Sequence: Synthetic oligonucleotide
  Antisense strand to SEQ ID NO: 1167642
guucucagagcagucguuc

SEQ ID NO: 1167644 - RNA, 19 nt, Artificial Sequence
  Description of Artificial Sequence: Synthetic oligonucleotide
  Sense strand starting at position 728 of SEQ ID NO: 916578
cugcucugagaacgagaaa

SEQ ID NO: 1167645 - RNA, 19 nt, Artificial Sequence
  Description of Artificial Sequence: Synthetic oligonucleotide
  Antisense strand to SEQ ID NO: 1167644
uuucucguucucagagcag

SEQ ID NO: 1167646 - RNA, 19 nt, Artificial Sequence
  Description of Artificial Sequence: Synthetic oligonucleotide
  Sense strand starting at position 799 of SEQ ID NO: 916578
agcugagagcuggagauua

SEQ ID NO: 1167647 - RNA, 19 nt, Artificial Sequence
  Description of Artificial Sequence: Synthetic oligonucleotide
  Antisense strand to SEQ ID NO: 1167646
uaaucuccagcucucagcu

SEQ ID NO: 1167648 - RNA, 19 nt, Artificial Sequence
  Description of Artificial Sequence: Synthetic oligonucleotide
  Sense strand starting at position 945 of SEQ ID NO: 916578
aggcauaauuaugccaaca

SEQ ID NO: 1167649 - RNA, 19 nt, Artificial Sequence
  Description of Artificial Sequence: Synthetic oligonucleotide
  Antisense strand to SEQ ID NO: 1167648
uguuggcauaauuaugccu

SEQ ID NO: 1167650 - RNA, 19 nt, Artificial Sequence
  Description of Artificial Sequence: Synthetic oligonucleotide
  Sense strand starting at position 1019 of SEQ ID NO: 916578
cgaggacugucuguuacuc

SEQ ID NO: 1167651 - RNA, 19 nt, Artificial Sequence
  Description of Artificial Sequence: Synthetic oligonucleotide
  Antisense strand to SEQ ID NO: 1167650
gaguaacagacaguccucg

SEQ ID NO: 1167652 - RNA, 19 nt, Artificial Sequence
  Description of Artificial Sequence: Synthetic oligonucleotide
  Sense strand starting at position 1024 of SEQ ID NO: 916578
acugucuguuacuccacaa

SEQ ID NO: 1167653 - RNA, 19 nt, Artificial Sequence
  Description of Artificial Sequence: Synthetic oligonucleotide
  Antisense strand to SEQ ID NO: 1167652
uuguggaguaacagacagu

SEQ ID NO: 1167654 - RNA, 19 nt, Artificial Sequence
  Description of Artificial Sequence: Synthetic oligonucleotide
  Sense strand starting at position 2012 of SEQ ID NO: 916578
cucugcucuguuuaaauga

SEQ ID NO: 1167655 - RNA, 19 nt, Artificial Sequence
  Description of Artificial Sequence: Synthetic oligonucleotide
  Antisense strand to SEQ ID NO: 1167654
ucauuuaaacagagcagag

SEQ ID NO: 1167656 - RNA, 19 nt, Artificial Sequence
  Description of Artificial Sequence: Synthetic oligonucleotide
  Sense strand starting at position 2425 of SEQ ID NO: 916578
uguagauacguccagaauu

SEQ ID NO: 1167657 - RNA, 19 nt, Artificial Sequence
  Description of Artificial Sequence: Synthetic oligonucleotide
  Antisense strand to SEQ ID NO: 1167656
aauucuggacguaucuaca

SEQ ID NO: 1167658 - RNA, 19 nt, Artificial Sequence
  Description of Artificial Sequence: Synthetic oligonucleotide
  Sense strand starting at position 2486 of SEQ ID NO: 916578
aaguuaagacguuaacugu

SEQ ID NO: 1167659 - RNA, 19 nt, Artificial Sequence
  Description of Artificial Sequence: Synthetic oligonucleotide
  Antisense strand to SEQ ID NO: 1167658
acaguuaacgucuuaacuu

SEQ ID NO: 1167660 - RNA, 19 nt, Artificial Sequence
  Description of Artificial Sequence: Synthetic oligonucleotide
  Sense strand starting at position 2590 of SEQ ID NO: 916578
gauggcuuguauuauuuaa

SEQ ID NO: 1167661 - RNA, 19 nt, Artificial Sequence
  Description of Artificial Sequence: Synthetic oligonucleotide
  Antisense strand to SEQ ID NO: 1167660
uuaaauaauacaagccauc

SEQ ID NO: 1167662 - RNA, 19 nt, Artificial Sequence
  Description of Artificial Sequence: Synthetic oligonucleotide
  Sense strand starting at position 2623 of SEQ ID NO: 916578
cuuaaacguuucuuugaag

SEQ ID NO: 1167663 - RNA, 19 nt, Artificial Sequence
  Description of Artificial Sequence: Synthetic oligonucleotide
  Antisense strand to SEQ ID NO: 1167662
cuucaaagaaacguuuaag

SEQ ID NO: 1167664 - RNA, 19 nt, Artificial Sequence
  Description of Artificial Sequence: Synthetic oligonucleotide
  Sense strand starting at position 2634 of SEQ ID NO: 916578
cuuugaagcugucuauaac

SEQ ID NO: 1167665 - RNA, 19 nt, Artificial Sequence
  Description of Artificial Sequence: Synthetic oligonucleotide
  Antisense strand to SEQ ID NO: 1167664
guuauagacagcuucaaag

SEQ ID NO: 1167666 - RNA, 19 nt, Artificial Sequence
  Description of Artificial Sequence: Synthetic oligonucleotide
  Sense strand starting at position 2635 of SEQ ID NO: 916578
uuugaagcugucuauaaca

SEQ ID NO: 1167667 - RNA, 19 nt, Artificial Sequence
  Description of Artificial Sequence: Synthetic oligonucleotide
  Antisense strand to SEQ ID NO: 1167666
uguuauagacagcuucaaa

SEQ ID NO: 1167668 - RNA, 19 nt, Artificial Sequence
  Description of Artificial Sequence: Synthetic oligonucleotide
  Sense strand starting at position 2637 of SEQ ID NO: 916578
ugaagcugucuauaacauc

SEQ ID NO: 1167669 - RNA, 19 nt, Artificial Sequence
  Description of Artificial Sequence: Synthetic oligonucleotide
  Antisense strand to SEQ ID NO: 1167668
gauguuauagacagcuuca

SEQ ID NO: 1167670 - RNA, 19 nt, Artificial Sequence
  Description of Artificial Sequence: Synthetic oligonucleotide
  Sense strand starting at position 2666 of SEQ ID NO: 916578
ugccaccuuccggaaagua

SEQ ID NO: 1167671 - RNA, 19 nt, Artificial Sequence
  Description of Artificial Sequence: Synthetic oligonucleotide
  Antisense strand to SEQ ID NO: 1167670
uacuuuccggaagguggca

SEQ ID NO: 1167672 - RNA, 19 nt, Artificial Sequence
  Description of Artificial Sequence: Synthetic oligonucleotide
  Sense strand starting at position 2697 of SEQ ID NO: 916578
auggcuaauaguugcgaaa

SEQ ID NO: 1167673 - RNA, 19 nt, Artificial Sequence
  Description of Artificial Sequence: Synthetic oligonucleotide
  Antisense strand to SEQ ID NO: 1167672
uuucgcaacuauuagccau

SEQ ID NO: 1167674 - RNA, 19 nt, Artificial Sequence
  Description of Artificial Sequence: Synthetic oligonucleotide
  Sense strand starting at position 3070 of SEQ ID NO: 916578
agagcacaccgucaaauau

SEQ ID NO: 1167675 - RNA, 19 nt, Artificial Sequence
  Description of Artificial Sequence: Synthetic oligonucleotide
  Antisense strand to SEQ ID NO: 1167674
auauuugacggugugcucu

SEQ ID NO: 1167676 - RNA, 19 nt, Artificial Sequence
  Description of Artificial Sequence: Synthetic oligonucleotide
  Sense strand starting at position 3123 of SEQ ID NO: 916578
uguaaugggcucuaagguu

SEQ ID NO: 1167677 - RNA, 19 nt, Artificial Sequence
  Description of Artificial Sequence: Synthetic oligonucleotide
  Antisense strand to SEQ ID NO: 1167676
aaccuuagagcccauuaca

SEQ ID NO: 1167678 - RNA, 19 nt, Artificial Sequence
  Description of Artificial Sequence: Synthetic oligonucleotide
  Sense strand starting at position 3430 of SEQ ID NO: 916578
uggucuuucuagucuccaa

SEQ ID NO: 1167679 - RNA, 19 nt, Artificial Sequence
  Description of Artificial Sequence: Synthetic oligonucleotide
  Antisense strand to SEQ ID NO: 1167678
uuggagacuagaaagacca

SEQ ID NO: 1167680 - RNA, 19 nt, Artificial Sequence
  Description of Artificial Sequence: Synthetic oligonucleotide
  Sense strand starting at position 3461 of SEQ ID NO: 916578
uugggacugcugcaucuaa

SEQ ID NO: 1167681 - RNA, 19 nt, Artificial Sequence
  Description of Artificial Sequence: Synthetic oligonucleotide
  Antisense strand to SEQ ID NO: 1167680
uuagaugcagcagucccaa

SEQ ID NO: 1167682 - RNA, 19 nt, Artificial Sequence
  Description of Artificial Sequence: Synthetic oligonucleotide
  Sense strand starting at position 3481 of SEQ ID NO: 916578
ucaucuuguuacucccaga

SEQ ID NO: 1167683 - RNA, 19 nt, Artificial Sequence
  Description of Artificial Sequence: Synthetic oligonucleotide
  Antisense strand to SEQ ID NO: 1167682
ucugggaguaacaagauga

SEQ ID NO: 1167684 - RNA, 19 nt, Artificial Sequence
  Description of Artificial Sequence: Synthetic oligonucleotide
  Sense strand starting at position 3513 of SEQ ID NO: 916578
aaguuuguagaauggguua

SEQ ID NO: 1167685 - RNA, 19 nt, Artificial Sequence
  Description of Artificial Sequence: Synthetic oligonucleotide
  Antisense strand to SEQ ID NO: 1167684
uaacccauucuacaaacuu

SEQ ID NO: 1167686 - RNA, 19 nt, Artificial Sequence
  Description of Artificial Sequence: Synthetic oligonucleotide
  Sense strand starting at position 3515 of SEQ ID NO: 916578
guuuguagaauggguuagu

SEQ ID NO: 1167687 - RNA, 19 nt, Artificial Sequence
  Description of Artificial Sequence: Synthetic oligonucleotide
  Antisense strand to SEQ ID NO: 1167686
acuaacccauucuacaaac

SEQ ID NO: 1167688 - RNA, 19 nt, Artificial Sequence
  Description of Artificial Sequence: Synthetic oligonucleotide
  Sense strand starting at position 3518 of SEQ ID NO: 916578
uguagaauggguuaguguu

SEQ ID NO: 1167689 - RNA, 19 nt, Artificial Sequence
  Description of Artificial Sequence: Synthetic oligonucleotide
  Antisense strand to SEQ ID NO: 1167688
aacacuaacccauucuaca

SEQ ID NO: 1167690 - RNA, 19 nt, Artificial Sequence
  Description of Artificial Sequence: Synthetic oligonucleotide
  Sense strand starting at position 3525 of SEQ ID NO: 916578
uggguuaguguugaauaaa

SEQ ID NO: 1167691 - RNA, 19 nt, Artificial Sequence
  Description of Artificial Sequence: Synthetic oligonucleotide
  Antisense strand to SEQ ID NO: 1167690
uuuauucaacacuaaccca

SEQ ID NO: 1167692 - RNA, 19 nt, Artificial Sequence
  Description of Artificial Sequence: Synthetic oligonucleotide
  Sense strand starting at position 3642 of SEQ ID NO: 916578
uuuaacuauguccaggauu

SEQ ID NO: 1167693 - RNA, 19 nt, Artificial Sequence
  Description of Artificial Sequence: Synthetic oligonucleotide
  Antisense strand to SEQ ID NO: 1167692
aauccuggacauaguuaaa

SEQ ID NO: 1167694 - RNA, 19 nt, Artificial Sequence
  Description of Artificial Sequence: Synthetic oligonucleotide
  Sense strand starting at position 3700 of SEQ ID NO: 916578
uauggcuaauaugugauua

SEQ ID NO: 1167695 - RNA, 19 nt, Artificial Sequence
  Description of Artificial Sequence: Synthetic oligonucleotide
  Antisense strand to SEQ ID NO: 1167694
uaaucacauauuagccaua

SEQ ID NO: 1167696 - RNA, 19 nt, Artificial Sequence
  Description of Artificial Sequence: Synthetic oligonucleotide
  Sense strand starting at position 3753 of SEQ ID NO: 916578
uauuaauccuggcuugguu

SEQ ID NO: 1167697 - RNA, 19 nt, Artificial Sequence
  Description of Artificial Sequence: Synthetic oligonucleotide
  Antisense strand to SEQ ID NO: 1167696
aaccaagccaggauuaaua

SEQ ID NO: 1167698 - RNA, 19 nt, Artificial Sequence
  Description of Artificial Sequence: Synthetic oligonucleotide
  Sense strand starting at position 3895 of SEQ ID NO: 916578
cugguuaauuuguggauuu

SEQ ID NO: 1167699 - RNA, 19 nt, Artificial Sequence
  Description of Artificial Sequence: Synthetic oligonucleotide
  Antisense strand to SEQ ID NO: 1167698
aaauccacaaauuaaccag

SEQ ID NO: 1167700 - RNA, 19 nt, Artificial Sequence
  Description of Artificial Sequence: Synthetic oligonucleotide
  Sense strand starting at position 9 of SEQ ID NO: 916579
gcuuauauaagugaaacga

SEQ ID NO: 1167701 - RNA, 19 nt, Artificial Sequence
  Description of Artificial Sequence: Synthetic oligonucleotide
  Antisense strand to SEQ ID NO: 1167700
ucguuucacuuauauaagc

SEQ ID NO: 1167702 - RNA, 19 nt, Artificial Sequence
  Description of Artificial Sequence: Synthetic oligonucleotide
  Sense strand starting at position 67 of SEQ ID NO: 916579
aguaaaggacccugaguaa

SEQ ID NO: 1167703 - RNA, 19 nt, Artificial Sequence
  Description of Artificial Sequence: Synthetic oligonucleotide
  Antisense strand to SEQ ID NO: 1167702
uuacucaggguccuuuacu

SEQ ID NO: 1167704 - RNA, 19 nt, Artificial Sequence
  Description of Artificial Sequence: Synthetic oligonucleotide
  Sense strand starting at position 70 of SEQ ID NO: 916579
aaaggacccugaguaaguu

SEQ ID NO: 1167705 - RNA, 19 nt, Artificial Sequence
  Description of Artificial Sequence: Synthetic oligonucleotide
  Antisense strand to SEQ ID NO: 1167704
aacuuacucaggguccuuu

SEQ ID NO: 1167706 - RNA, 19 nt, Artificial Sequence
  Description of Artificial Sequence: Synthetic oligonucleotide
  Sense strand starting at position 76 of SEQ ID NO: 916579
cccugaguaaguuaaggua

SEQ ID NO: 1167707 - RNA, 19 nt, Artificial Sequence
  Description of Artificial Sequence: Synthetic oligonucleotide
  Antisense strand to SEQ ID NO: 1167706
uaccuuaacuuacucaggg

SEQ ID NO: 1167708 - RNA, 19 nt, Artificial Sequence
  Description of Artificial Sequence: Synthetic oligonucleotide
  Sense strand starting at position 83 of SEQ ID NO: 916579
uaaguuaagguauagucau

SEQ ID NO: 1167709 - RNA, 19 nt, Artificial Sequence
  Description of Artificial Sequence: Synthetic oligonucleotide
  Antisense strand to SEQ ID NO: 1167708
augacuauaccuuaacuua

SEQ ID NO: 1167710 - RNA, 19 nt, Artificial Sequence
  Description of Artificial Sequence: Synthetic oligonucleotide
  Sense strand starting at position 213 of SEQ ID NO: 916579
ucuaguacucacuauguua

SEQ ID NO: 1167711 - RNA, 19 nt, Artificial Sequence
  Description of Artificial Sequence: Synthetic oligonucleotide
  Antisense strand to SEQ ID NO: 1167710
uaacauagugaguacuaga

SEQ ID NO: 1167712 - RNA, 19 nt, Artificial Sequence
  Description of Artificial Sequence: Synthetic oligonucleotide
  Sense strand starting at position 319 of SEQ ID NO: 916579
ccuuguuggauugaggagu

SEQ ID NO: 1167713 - RNA, 19 nt, Artificial Sequence
  Description of Artificial Sequence: Synthetic oligonucleotide
  Antisense strand to SEQ ID NO: 1167712
acuccucaauccaacaagg

SEQ ID NO: 1167714 - RNA, 19 nt, Artificial Sequence
  Description of Artificial Sequence: Synthetic oligonucleotide
  Sense strand starting at position 461 of SEQ ID NO: 916579
acaaacagagcuugugaga

SEQ ID NO: 1167715 - RNA, 19 nt, Artificial Sequence
  Description of Artificial Sequence: Synthetic oligonucleotide
  Antisense strand to SEQ ID NO: 1167714
ucucacaagcucuguuugu

SEQ ID NO: 1167716 - RNA, 19 nt, Artificial Sequence
  Description of Artificial Sequence: Synthetic oligonucleotide
  Sense strand starting at position 474 of SEQ ID NO: 916579
gugagauagaaggguaagu

SEQ ID NO: 1167717 - RNA, 19 nt, Artificial Sequence
  Description of Artificial Sequence: Synthetic oligonucleotide
  Antisense strand to SEQ ID NO: 1167716
acuuacccuucuaucucac

SEQ ID NO: 1167718 - RNA, 19 nt, Artificial Sequence
  Description of Artificial Sequence: Synthetic oligonucleotide
  Sense strand starting at position 603 of SEQ ID NO: 916579
cuaaauugugcggacuaaa

SEQ ID NO: 1167719 - RNA, 19 nt, Artificial Sequence
  Description of Artificial Sequence: Synthetic oligonucleotide
  Antisense strand to SEQ ID NO: 1167718
uuuaguccgcacaauuuag

SEQ ID NO: 1167720 - RNA, 19 nt, Artificial Sequence
  Description of Artificial Sequence: Synthetic oligonucleotide
  Sense strand starting at position 621 of SEQ ID NO: 916579
aaggccuguguuuaagaca

SEQ ID NO: 1167721 - RNA, 19 nt, Artificial Sequence
  Description of Artificial Sequence: Synthetic oligonucleotide
  Antisense strand to SEQ ID NO: 1167720
ugucuuaaacacaggccuu

SEQ ID NO: 1167722 - RNA, 19 nt, Artificial Sequence
  Description of Artificial Sequence: Synthetic oligonucleotide
  Sense strand starting at position 775 of SEQ ID NO: 916579
agcucucuggucuauagaa

SEQ ID NO: 1167723 - RNA, 19 nt, Artificial Sequence
  Description of Artificial Sequence: Synthetic oligonucleotide
  Antisense strand to SEQ ID NO: 1167722
uucuauagaccagagagcu

SEQ ID NO: 1167724 - RNA, 19 nt, Artificial Sequence
  Description of Artificial Sequence: Synthetic oligonucleotide
  Sense strand starting at position 777 of SEQ ID NO: 916579
cucucuggucuauagaagu

SEQ ID NO: 1167725 - RNA, 19 nt, Artificial Sequence
  Description of Artificial Sequence: Synthetic oligonucleotide
  Antisense strand to SEQ ID NO: 1167724
acuucuauagaccagagag

SEQ ID NO: 1167726 - RNA, 19 nt, Artificial Sequence
  Description of Artificial Sequence: Synthetic oligonucleotide
  Sense strand starting at position 1047 of SEQ ID NO: 916579
gcaauuugguucuuguauu

SEQ ID NO: 1167727 - RNA, 19 nt, Artificial Sequence
  Description of Artificial Sequence: Synthetic oligonucleotide
  Antisense strand to SEQ ID NO: 1167726
aauacaagaaccaaauugc

SEQ ID NO: 1167728 - RNA, 19 nt, Artificial Sequence
  Description of Artificial Sequence: Synthetic oligonucleotide
  Sense strand starting at position 1060 of SEQ ID NO: 916579
uguauuuauuagcuuccga

SEQ ID NO: 1167729 - RNA, 19 nt, Artificial Sequence
  Description of Artificial Sequence: Synthetic oligonucleotide
  Antisense strand to SEQ ID NO: 1167728
ucggaagcuaauaaauaca

SEQ ID NO: 1167730 - RNA, 19 nt, Artificial Sequence
  Description of Artificial Sequence: Synthetic oligonucleotide
  Sense strand starting at position 1226 of SEQ ID NO: 916579
auaguagguacucaauguu

SEQ ID NO: 1167731 - RNA, 19 nt, Artificial Sequence
  Description of Artificial Sequence: Synthetic oligonucleotide
  Antisense strand to SEQ ID NO: 1167730
aacauugaguaccuacuau

SEQ ID NO: 1167732 - RNA, 19 nt, Artificial Sequence
  Description of Artificial Sequence: Synthetic oligonucleotide
  Sense strand starting at position 1238 of SEQ ID NO: 916579
caauguuuggaguacgaau

SEQ ID NO: 1167733 - RNA, 19 nt, Artificial Sequence
  Description of Artificial Sequence: Synthetic oligonucleotide
  Antisense strand to SEQ ID NO: 1167732
auucguacuccaaacauug

SEQ ID NO: 1167734 - RNA, 19 nt, Artificial Sequence
  Description of Artificial Sequence: Synthetic oligonucleotide
  Sense strand starting at position 1240 of SEQ ID NO: 916579
auguuuggaguacgaauaa

SEQ ID NO: 1167735 - RNA, 19 nt, Artificial Sequence
  Description of Artificial Sequence: Synthetic oligonucleotide
  Antisense strand to SEQ ID NO: 1167734
uuauucguacuccaaacau

SEQ ID NO: 1167736 - RNA, 19 nt, Artificial Sequence
  Description of Artificial Sequence: Synthetic oligonucleotide
  Sense strand starting at position 1376 of SEQ ID NO: 916579
gguugucuccauuacacaa

SEQ ID NO: 1167737 - RNA, 19 nt, Artificial Sequence
  Description of Artificial Sequence: Synthetic oligonucleotide
  Antisense strand to SEQ ID NO: 1167736
uuguguaauggagacaacc

SEQ ID NO: 1167738 - RNA, 19 nt, Artificial Sequence
  Description of Artificial Sequence: Synthetic oligonucleotide
  Sense strand starting at position 1418 of SEQ ID NO: 916579
uugaauaacugaucuuugu

SEQ ID NO: 1167739 - RNA, 19 nt, Artificial Sequence
  Description of Artificial Sequence: Synthetic oligonucleotide
  Antisense strand to SEQ ID NO: 1167738
acaaagaucaguuauucaa

SEQ ID NO: 1167740 - RNA, 19 nt, Artificial Sequence
  Description of Artificial Sequence: Synthetic oligonucleotide
  Sense strand starting at position 1490 of SEQ ID NO: 916579
uggcacuuguaaucagaaa

SEQ ID NO: 1167741 - RNA, 19 nt, Artificial Sequence
  Description of Artificial Sequence: Synthetic oligonucleotide
  Antisense strand to SEQ ID NO: 1167740
uuucugauuacaagugcca

SEQ ID NO: 1167742 - RNA, 19 nt, Artificial Sequence
  Description of Artificial Sequence: Synthetic oligonucleotide
  Sense strand starting at position 1503 of SEQ ID NO: 916579
cagaaagucugggcugaga

SEQ ID NO: 1167743 - RNA, 19 nt, Artificial Sequence
  Description of Artificial Sequence: Synthetic oligonucleotide
  Antisense strand to SEQ ID NO: 1167742
ucucagcccagacuuucug

SEQ ID NO: 1167744 - RNA, 19 nt, Artificial Sequence
  Description of Artificial Sequence: Synthetic oligonucleotide
  Sense strand starting at position 1505 of SEQ ID NO: 916579
gaaagucugggcugagauc

SEQ ID NO: 1167745 - RNA, 19 nt, Artificial Sequence
  Description of Artificial Sequence: Synthetic oligonucleotide
  Antisense strand to SEQ ID NO: 1167744
gaucucagcccagacuuuc

SEQ ID NO: 1167746 - RNA, 19 nt, Artificial Sequence
  Description of Artificial Sequence: Synthetic oligonucleotide
  Sense strand starting at position 1516 of SEQ ID NO: 916579
cugagaucccaguaucuuc

SEQ ID NO: 1167747 - RNA, 19 nt, Artificial Sequence
  Description of Artificial Sequence: Synthetic oligonucleotide
  Antisense strand to SEQ ID NO: 1167746
gaagauacugggaucucag

SEQ ID NO: 1167748 - RNA, 19 nt, Artificial Sequence
  Description of Artificial Sequence: Synthetic oligonucleotide
  Sense strand starting at position 1638 of SEQ ID NO: 916579
cgaauagaucgcagaacgu

SEQ ID NO: 1167749 - RNA, 19 nt, Artificial Sequence
  Description of Artificial Sequence: Synthetic oligonucleotide
  Antisense strand to SEQ ID NO: 1167748
acguucugcgaucuauucg

SEQ ID NO: 1167750 - RNA, 19 nt, Artificial Sequence
  Description of Artificial Sequence: Synthetic oligonucleotide
  Sense strand starting at position 1671 of SEQ ID NO: 916579
ggacuauuaugaucuguac

SEQ ID NO: 1167751 - RNA, 19 nt, Artificial Sequence
  Description of Artificial Sequence: Synthetic oligonucleotide
  Antisense strand to SEQ ID NO: 1167750
guacagaucauaauagucc

SEQ ID NO: 1167752 - RNA, 19 nt, Artificial Sequence
  Description of Artificial Sequence: Synthetic oligonucleotide
  Sense strand starting at position 2192 of SEQ ID NO: 916579
gguucuccuacugggaaga

SEQ ID NO: 1167753 - RNA, 19 nt, Artificial Sequence
  Description of Artificial Sequence: Synthetic oligonucleotide
  Antisense strand to SEQ ID NO: 1167752
ucuucccaguaggagaacc

SEQ ID NO: 1167754 - RNA, 19 nt, Artificial Sequence
  Description of Artificial Sequence: Synthetic oligonucleotide
  Sense strand starting at position 2193 of SEQ ID NO: 916579
guucuccuacugggaagaa

SEQ ID NO: 1167755 - RNA, 19 nt, Artificial Sequence
  Description of Artificial Sequence: Synthetic oligonucleotide
  Antisense strand to SEQ ID NO: 1167754
uucuucccaguaggagaac

SEQ ID NO: 1167756 - RNA, 19 nt, Artificial Sequence
  Description of Artificial Sequence: Synthetic oligonucleotide
  Sense strand starting at position 2397 of SEQ ID NO: 916579
gcuauuuguucuuuacuug

SEQ ID NO: 1167757 - RNA, 19 nt, Artificial Sequence
  Description of Artificial Sequence: Synthetic oligonucleotide
  Antisense strand to SEQ ID NO: 1167756
caaguaaagaacaaauagc

SEQ ID NO: 1167758 - RNA, 19 nt, Artificial Sequence
  Description of Artificial Sequence: Synthetic oligonucleotide
  Sense strand starting at position 2464 of SEQ ID NO: 916579
aaaggcaagcgugaaauau

SEQ ID NO: 1167759 - RNA, 19 nt, Artificial Sequence
  Description of Artificial Sequence: Synthetic oligonucleotide
  Antisense strand to SEQ ID NO: 1167758
auauuucacgcuugccuuu

SEQ ID NO: 1167760 - RNA, 19 nt, Artificial Sequence
  Description of Artificial Sequence: Synthetic oligonucleotide
  Sense strand starting at position 2474 of SEQ ID NO: 916579
gugaaauaugaugguauug

SEQ ID NO: 1167761 - RNA, 19 nt, Artificial Sequence
  Description of Artificial Sequence: Synthetic oligonucleotide
  Antisense strand to SEQ ID NO: 1167760
caauaccaucauauuucac

SEQ ID NO: 1167762 - RNA, 19 nt, Artificial Sequence
  Description of Artificial Sequence: Synthetic oligonucleotide
  Sense strand starting at position 2534 of SEQ ID NO: 916579
uuuggucuugaaggaguca

SEQ ID NO: 1167763 - RNA, 19 nt, Artificial Sequence
  Description of Artificial Sequence: Synthetic oligonucleotide
  Antisense strand to SEQ ID NO: 1167762
ugacuccuucaagaccaaa

SEQ ID NO: 1167764 - RNA, 19 nt, Artificial Sequence
  Description of Artificial Sequence: Synthetic oligonucleotide
  Sense strand starting at position 2604 of SEQ ID NO: 916579
gcuauuaacugaccagauu

SEQ ID NO: 1167765 - RNA, 19 nt, Artificial Sequence
  Description of Artificial Sequence: Synthetic oligonucleotide
  Antisense strand to SEQ ID NO: 1167764
aaucuggucaguuaauagc

SEQ ID NO: 1167766 - RNA, 19 nt, Artificial Sequence
  Description of Artificial Sequence: Synthetic oligonucleotide
  Sense strand starting at position 2646 of SEQ ID NO: 916579
aguuuauccguuuaauaag

SEQ ID NO: 1167767 - RNA, 19 nt, Artificial Sequence
  Description of Artificial Sequence: Synthetic oligonucleotide
  Antisense strand to SEQ ID NO: 1167766
cuuauuaaacggauaaacu

SEQ ID NO: 1167768 - RNA, 19 nt, Artificial Sequence
  Description of Artificial Sequence: Synthetic oligonucleotide
  Sense strand starting at position 2736 of SEQ ID NO: 916579
cucccucguggagaagaua

SEQ ID NO: 1167769 - RNA, 19 nt, Artificial Sequence
  Description of Artificial Sequence: Synthetic oligonucleotide
  Antisense strand to SEQ ID NO: 1167768
uaucuucuccacgagggag

SEQ ID NO: 1167770 - RNA, 19 nt, Artificial Sequence
  Description of Artificial Sequence: Synthetic oligonucleotide
  Sense strand starting at position 2866 of SEQ ID NO: 916579
cuguuaagguaauuuguuu

SEQ ID NO: 1167771 - RNA, 19 nt, Artificial Sequence
  Description of Artificial Sequence: Synthetic oligonucleotide
  Antisense strand to SEQ ID NO: 1167770
aaacaaauuaccuuaacag

SEQ ID NO: 1167772 - RNA, 19 nt, Artificial Sequence
  Description of Artificial Sequence: Synthetic oligonucleotide
  Sense strand starting at position 2990 of SEQ ID NO: 916579
ccuuguugaguuuaacaaa

SEQ ID NO: 1167773 - RNA, 19 nt, Artificial Sequence
  Description of Artificial Sequence: Synthetic oligonucleotide
  Antisense strand to SEQ ID NO: 1167772
uuuguuaaacucaacaagg

SEQ ID NO: 1167774 - RNA, 19 nt, Artificial Sequence
  Description of Artificial Sequence: Synthetic oligonucleotide
  Sense strand starting at position 3058 of SEQ ID NO: 916579
ggcucacaccauugauaca

SEQ ID NO: 1167775 - RNA, 19 nt, Artificial Sequence
  Description of Artificial Sequence: Synthetic oligonucleotide
  Antisense strand to SEQ ID NO: 1167774
uguaucaauggugugagcc

SEQ ID NO: 1167776 - RNA, 19 nt, Artificial Sequence
  Description of Artificial Sequence: Synthetic oligonucleotide
  Sense strand starting at position 3140 of SEQ ID NO: 916579
ugccauauauuucuuguga

SEQ ID NO: 1167777 - RNA, 19 nt, Artificial Sequence
  Description of Artificial Sequence: Synthetic oligonucleotide
  Antisense strand to SEQ ID NO: 1167776
ucacaagaaauauauggca

SEQ ID NO: 1167778 - RNA, 19 nt, Artificial Sequence
  Description of Artificial Sequence: Synthetic oligonucleotide
  Sense strand starting at position 3141 of SEQ ID NO: 916579
gccauauauuucuugugac

SEQ ID NO: 1167779 - RNA, 19 nt, Artificial Sequence
  Description of Artificial Sequence: Synthetic oligonucleotide
  Antisense strand to SEQ ID NO: 1167778
gucacaagaaauauauggc

SEQ ID NO: 1167780 - RNA, 19 nt, Artificial Sequence
  Description of Artificial Sequence: Synthetic oligonucleotide
  Sense strand starting at position 440 of SEQ ID NO: 916580
agaauugccuucucaguaa

SEQ ID NO: 1167781 - RNA, 19 nt, Artificial Sequence
  Description of Artificial Sequence: Synthetic oligonucleotide
  Antisense strand to SEQ ID NO: 1167780
uuacugagaaggcaauucu

SEQ ID NO: 1167782 - RNA, 19 nt, Artificial Sequence
  Description of Artificial Sequence: Synthetic oligonucleotide
  Sense strand starting at position 444 of SEQ ID NO: 916580
uugccuucucaguaaagga

SEQ ID NO: 1167783 - RNA, 19 nt, Artificial Sequence
  Description of Artificial Sequence: Synthetic oligonucleotide
  Antisense strand to SEQ ID NO: 1167782
uccuuuacugagaaggcaa

SEQ ID NO: 1167784 - RNA, 19 nt, Artificial Sequence
  Description of Artificial Sequence: Synthetic oligonucleotide
  Sense strand starting at position 790 of SEQ ID NO: 916580
ccgggagaugaagguuaua

SEQ ID NO: 1167785 - RNA, 19 nt, Artificial Sequence
  Description of Artificial Sequence: Synthetic oligonucleotide
  Antisense strand to SEQ ID NO: 1167784
uauaaccuucaucucccgg

SEQ ID NO: 1167786 - RNA, 19 nt, Artificial Sequence
  Description of Artificial Sequence: Synthetic oligonucleotide
  Sense strand starting at position 908 of SEQ ID NO: 916580
ccagauaguccugaggguu

SEQ ID NO: 1167787 - RNA, 19 nt, Artificial Sequence
  Description of Artificial Sequence: Synthetic oligonucleotide
  Antisense strand to SEQ ID NO: 1167786
aacccucaggacuaucugg

SEQ ID NO: 1167788 - RNA, 19 nt, Artificial Sequence
  Description of Artificial Sequence: Synthetic oligonucleotide
  Sense strand starting at position 911 of SEQ ID NO: 916580
gauaguccugaggguugaa

SEQ ID NO: 1167789 - RNA, 19 nt, Artificial Sequence
  Description of Artificial Sequence: Synthetic oligonucleotide
  Antisense strand to SEQ ID NO: 1167788
uucaacccucaggacuauc

SEQ ID NO: 1167790 - RNA, 19 nt, Artificial Sequence
  Description of Artificial Sequence: Synthetic oligonucleotide
  Sense strand starting at position 964 of SEQ ID NO: 916580
cuagcuuuccucugggaaa

SEQ ID NO: 1167791 - RNA, 19 nt, Artificial Sequence
  Description of Artificial Sequence: Synthetic oligonucleotide
  Antisense strand to SEQ ID NO: 1167790
uuucccagaggaaagcuag

SEQ ID NO: 1167792 - RNA, 19 nt, Artificial Sequence
  Description of Artificial Sequence: Synthetic oligonucleotide
  Sense strand starting at position 1010 of SEQ ID NO: 916580
ucuuacuuuggugauuaaa

SEQ ID NO: 1167793 - RNA, 19 nt, Artificial Sequence
  Description of Artificial Sequence: Synthetic oligonucleotide
  Antisense strand to SEQ ID NO: 1167792
uuuaaucaccaaaguaaga

SEQ ID NO: 1167794 - RNA, 19 nt, Artificial Sequence
  Description of Artificial Sequence: Synthetic oligonucleotide
  Sense strand starting at position 1019 of SEQ ID NO: 916580
ggugauuaaaccugagagu

SEQ ID NO: 1167795 - RNA, 19 nt, Artificial Sequence
  Description of Artificial Sequence: Synthetic oligonucleotide
  Antisense strand to SEQ ID NO: 1167794
acucucagguuuaaucacc

SEQ ID NO: 1167796 - RNA, 19 nt, Artificial Sequence
  Description of Artificial Sequence: Synthetic oligonucleotide
  Sense strand starting at position 1035 of SEQ ID NO: 916580
aguguuaccacugcucgua

SEQ ID NO: 1167797 - RNA, 19 nt, Artificial Sequence
  Description of Artificial Sequence: Synthetic oligonucleotide
  Antisense strand to SEQ ID NO: 1167796
uacgagcagugguaacacu

SEQ ID NO: 1167798 - RNA, 19 nt, Artificial Sequence
  Description of Artificial Sequence: Synthetic oligonucleotide
  Sense strand starting at position 1036 of SEQ ID NO: 916580
guguuaccacugcucguau

SEQ ID NO: 1167799 - RNA, 19 nt, Artificial Sequence
  Description of Artificial Sequence: Synthetic oligonucleotide
  Antisense strand to SEQ ID NO: 1167798
auacgagcagugguaacac

SEQ ID NO: 1167800 - RNA, 19 nt, Artificial Sequence
  Description of Artificial Sequence: Synthetic oligonucleotide
  Sense strand starting at position 1081 of SEQ ID NO: 916580
auuacaauguugucagaug

SEQ ID NO: 1167801 - RNA, 19 nt, Artificial Sequence
  Description of Artificial Sequence: Synthetic oligonucleotide
  Antisense strand to SEQ ID NO: 1167800
caucugacaacauuguaau

SEQ ID NO: 1167802 - RNA, 19 nt, Artificial Sequence
  Description of Artificial Sequence: Synthetic oligonucleotide
  Sense strand starting at position 1203 of SEQ ID NO: 916580
gcuaguaagaaguaaguaa

SEQ ID NO: 1167803 - RNA, 19 nt, Artificial Sequence
  Description of Artificial Sequence: Synthetic oligonucleotide
  Antisense strand to SEQ ID NO: 1167802
uuacuuacuucuuacuagc

SEQ ID NO: 1167804 - RNA, 19 nt, Artificial Sequence
  Description of Artificial Sequence: Synthetic oligonucleotide
  Sense strand starting at position 1207 of SEQ ID NO: 916580
guaagaaguaaguaaagca

SEQ ID NO: 1167805 - RNA, 19 nt, Artificial Sequence
  Description of Artificial Sequence: Synthetic oligonucleotide
  Antisense strand to SEQ ID NO: 1167804
ugcuuuacuuacuucuuac

SEQ ID NO: 1167806 - RNA, 19 nt, Artificial Sequence
  Description of Artificial Sequence: Synthetic oligonucleotide
  Sense strand starting at position 1214 of SEQ ID NO: 916580
guaaguaaagcaggaguaa

SEQ ID NO: 1167807 - RNA, 19 nt, Artificial Sequence
  Description of Artificial Sequence: Synthetic oligonucleotide
  Antisense strand to SEQ ID NO: 1167806
uuacuccugcuuuacuuac

SEQ ID NO: 1167808 - RNA, 19 nt, Artificial Sequence
  Description of Artificial Sequence: Synthetic oligonucleotide
  Sense strand starting at position 1226 of SEQ ID NO: 916580
ggaguaaacauguaggcau

SEQ ID NO: 1167809 - RNA, 19 nt, Artificial Sequence
  Description of Artificial Sequence: Synthetic oligonucleotide
  Antisense strand to SEQ ID NO: 1167808
augccuacauguuuacucc

SEQ ID NO: 1167810 - RNA, 19 nt, Artificial Sequence
  Description of Artificial Sequence: Synthetic oligonucleotide
  Sense strand starting at position 1634 of SEQ ID NO: 916580
cugggaacaucuuucucua

SEQ ID NO: 1167811 - RNA, 19 nt, Artificial Sequence
  Description of Artificial Sequence: Synthetic oligonucleotide
  Antisense strand to SEQ ID NO: 1167810
uagagaaagauguucccag

SEQ ID NO: 1167812 - RNA, 19 nt, Artificial Sequence
  Description of Artificial Sequence: Synthetic oligonucleotide
  Sense strand starting at position 1705 of SEQ ID NO: 916580
uuagauuugguuuguguaa

SEQ ID NO: 1167813 - RNA, 19 nt, Artificial Sequence
  Description of Artificial Sequence: Synthetic oligonucleotide
  Antisense strand to SEQ ID NO: 1167812
uuacacaaaccaaaucuaa

SEQ ID NO: 1167814 - RNA, 19 nt, Artificial Sequence
  Description of Artificial Sequence: Synthetic oligonucleotide
  Sense strand starting at position 1750 of SEQ ID NO: 916580
cugucauucggugcaguuu

SEQ ID NO: 1167815 - RNA, 19 nt, Artificial Sequence
  Description of Artificial Sequence: Synthetic oligonucleotide
  Antisense strand to SEQ ID NO: 1167814
aaacugcaccgaaugacag

SEQ ID NO: 1167816 - RNA, 19 nt, Artificial Sequence
  Description of Artificial Sequence: Synthetic oligonucleotide
  Sense strand starting at position 1767 of SEQ ID NO: 916580
uuuguagacuaaccugaaa

SEQ ID NO: 1167817 - RNA, 19 nt, Artificial Sequence
  Description of Artificial Sequence: Synthetic oligonucleotide
  Antisense strand to SEQ ID NO: 1167816
uuucagguuagucuacaaa

SEQ ID NO: 1167818 - RNA, 19 nt, Artificial Sequence
  Description of Artificial Sequence: Synthetic oligonucleotide
  Sense strand starting at position 1826 of SEQ ID NO: 916580
gcaauuagguuuccugaau

SEQ ID NO: 1167819 - RNA, 19 nt, Artificial Sequence
  Description of Artificial Sequence: Synthetic oligonucleotide
  Antisense strand to SEQ ID NO: 1167818
auucaggaaaccuaauugc

SEQ ID NO: 1167820 - RNA, 19 nt, Artificial Sequence
  Description of Artificial Sequence: Synthetic oligonucleotide
  Sense strand starting at position 2019 of SEQ ID NO: 916580
guacaauuacaauggucaa

SEQ ID NO: 1167821 - RNA, 19 nt, Artificial Sequence
  Description of Artificial Sequence: Synthetic oligonucleotide
  Antisense strand to SEQ ID NO: 1167820
uugaccauuguaauuguac

SEQ ID NO: 1167822 - RNA, 19 nt, Artificial Sequence
  Description of Artificial Sequence: Synthetic oligonucleotide
  Sense strand starting at position 2161 of SEQ ID NO: 916580
aguuauuaaugguuccaca

SEQ ID NO: 1167823 - RNA, 19 nt, Artificial Sequence
  Description of Artificial Sequence: Synthetic oligonucleotide
  Antisense strand to SEQ ID NO: 1167822
uguggaaccauuaauaacu

SEQ ID NO: 1167824 - RNA, 19 nt, Artificial Sequence
  Description of Artificial Sequence: Synthetic oligonucleotide
  Sense strand starting at position 2196 of SEQ ID NO: 916580
uucccauaucugugauucu

SEQ ID NO: 1167825 - RNA, 19 nt, Artificial Sequence
  Description of Artificial Sequence: Synthetic oligonucleotide
  Antisense strand to SEQ ID NO: 1167824
agaaucacagauaugggaa

SEQ ID NO: 1167826 - RNA, 19 nt, Artificial Sequence
  Description of Artificial Sequence: Synthetic oligonucleotide
  Sense strand starting at position 2207 of SEQ ID NO: 916580
gugauucuagcagacaaua

SEQ ID NO: 1167827 - RNA, 19 nt, Artificial Sequence
  Description of Artificial Sequence: Synthetic oligonucleotide
  Antisense strand to SEQ ID NO: 1167826
uauugucugcuagaaucac

SEQ ID NO: 1167828 - RNA, 19 nt, Artificial Sequence
  Description of Artificial Sequence: Synthetic oligonucleotide
  Sense strand starting at position 2378 of SEQ ID NO: 916580
cugguaucuguacaaaucu

SEQ ID NO: 1167829 - RNA, 19 nt, Artificial Sequence
  Description of Artificial Sequence: Synthetic oligonucleotide
  Antisense strand to SEQ ID NO: 1167828
agauuuguacagauaccag

SEQ ID NO: 1167830 - RNA, 19 nt, Artificial Sequence
  Description of Artificial Sequence: Synthetic oligonucleotide
  Sense strand starting at position 2516 of SEQ ID NO: 916580
gagaaccagcgcuaaugaa

SEQ ID NO: 1167831 - RNA, 19 nt, Artificial Sequence
  Description of Artificial Sequence: Synthetic oligonucleotide
  Antisense strand to SEQ ID NO: 1167830
uucauuagcgcugguucuc

SEQ ID NO: 1167832 - RNA, 19 nt, Artificial Sequence
  Description of Artificial Sequence: Synthetic oligonucleotide
  Sense strand starting at position 2578 of SEQ ID NO: 916580
auaguuaugacucaacgug

SEQ ID NO: 1167833 - RNA, 19 nt, Artificial Sequence
  Description of Artificial Sequence: Synthetic oligonucleotide
  Antisense strand to SEQ ID NO: 1167832
cacguugagucauaacuau

SEQ ID NO: 1167834 - RNA, 19 nt, Artificial Sequence
  Description of Artificial Sequence: Synthetic oligonucleotide
  Sense strand starting at position 2625 of SEQ ID NO: 916580
aauacaggaucuguuguua

SEQ ID NO: 1167835 - RNA, 19 nt, Artificial Sequence
  Description of Artificial Sequence: Synthetic oligonucleotide
  Antisense strand to SEQ ID NO: 1167834
uaacaacagauccuguauu

SEQ ID NO: 1167836 - RNA, 19 nt, Artificial Sequence
  Description of Artificial Sequence: Synthetic oligonucleotide
  Sense strand starting at position 2629 of SEQ ID NO: 916580
caggaucuguuguuaagga

SEQ ID NO: 1167837 - RNA, 19 nt, Artificial Sequence
  Description of Artificial Sequence: Synthetic oligonucleotide
  Antisense strand to SEQ ID NO: 1167836
uccuuaacaacagauccug

SEQ ID NO: 1167838 - RNA, 19 nt, Artificial Sequence
  Description of Artificial Sequence: Synthetic oligonucleotide
  Sense strand starting at position 2637 of SEQ ID NO: 916580
guuguuaaggaguaccaaa

SEQ ID NO: 1167839 - RNA, 19 nt, Artificial Sequence
  Description of Artificial Sequence: Synthetic oligonucleotide
  Antisense strand to SEQ ID NO: 1167838
uuugguacuccuuaacaac

SEQ ID NO: 1167840 - RNA, 19 nt, Artificial Sequence
  Description of Artificial Sequence: Synthetic oligonucleotide
  Sense strand starting at position 2889 of SEQ ID NO: 916580
gcauucuggaaguagcauu

SEQ ID NO: 1167841 - RNA, 19 nt, Artificial Sequence
  Description of Artificial Sequence: Synthetic oligonucleotide
  Antisense strand to SEQ ID NO: 1167840
aaugcuacuuccagaaugc

SEQ ID NO: 1167842 - RNA, 19 nt, Artificial Sequence
  Description of Artificial Sequence: Synthetic oligonucleotide
  Sense strand starting at position 2900 of SEQ ID NO: 916580
guagcauucccacaugaga

SEQ ID NO: 1167843 - RNA, 19 nt, Artificial Sequence
  Description of Artificial Sequence: Synthetic oligonucleotide
  Antisense strand to SEQ ID NO: 1167842
ucucaugugggaaugcuac

SEQ ID NO: 1167844 - RNA, 19 nt, Artificial Sequence
  Description of Artificial Sequence: Synthetic oligonucleotide
  Sense strand starting at position 2903 of SEQ ID NO: 916580
gcauucccacaugagaauu

SEQ ID NO: 1167845 - RNA, 19 nt, Artificial Sequence
  Description of Artificial Sequence: Synthetic oligonucleotide
  Antisense strand to SEQ ID NO: 1167844
aauucucaugugggaaugc

SEQ ID NO: 1167846 - RNA, 19 nt, Artificial Sequence
  Description of Artificial Sequence: Synthetic oligonucleotide
  Sense strand starting at position 2958 of SEQ ID NO: 916580
acacaaggguuguccugaa

SEQ ID NO: 1167847 - RNA, 19 nt, Artificial Sequence
  Description of Artificial Sequence: Synthetic oligonucleotide
  Antisense strand to SEQ ID NO: 1167846
uucaggacaacccuugugu

SEQ ID NO: 1167848 - RNA, 19 nt, Artificial Sequence
  Description of Artificial Sequence: Synthetic oligonucleotide
  Sense strand starting at position 3041 of SEQ ID NO: 916580
ccucgagacgcuuauaaac

SEQ ID NO: 1167849 - RNA, 19 nt, Artificial Sequence
  Description of Artificial Sequence: Synthetic oligonucleotide
  Antisense strand to SEQ ID NO: 1167848
guuuauaagcgucucgagg

SEQ ID NO: 1167850 - RNA, 19 nt, Artificial Sequence
  Description of Artificial Sequence: Synthetic oligonucleotide
  Sense strand starting at position 3155 of SEQ ID NO: 916580
gagauucgaggucacgaaa

SEQ ID NO: 1167851 - RNA, 19 nt, Artificial Sequence
  Description of Artificial Sequence: Synthetic oligonucleotide
  Antisense strand to SEQ ID NO: 1167850
uuucgugaccucgaaucuc

SEQ ID NO: 1167852 - RNA, 19 nt, Artificial Sequence
  Description of Artificial Sequence: Synthetic oligonucleotide
  Sense strand starting at position 3288 of SEQ ID NO: 916580
agauaagucucugcaauga

SEQ ID NO: 1167853 - RNA, 19 nt, Artificial Sequence
  Description of Artificial Sequence: Synthetic oligonucleotide
  Antisense strand to SEQ ID NO: 1167852
ucauugcagagacuuaucu

SEQ ID NO: 1167854 - RNA, 19 nt, Artificial Sequence
  Description of Artificial Sequence: Synthetic oligonucleotide
  Sense strand starting at position 3383 of SEQ ID NO: 916580
aagaacuccugggaauaga

SEQ ID NO: 1167855 - RNA, 19 nt, Artificial Sequence
  Description of Artificial Sequence: Synthetic oligonucleotide
  Antisense strand to SEQ ID NO: 1167854
ucuauucccaggaguucuu

SEQ ID NO: 1167856 - RNA, 19 nt, Artificial Sequence
  Description of Artificial Sequence: Synthetic oligonucleotide
  Sense strand starting at position 3813 of SEQ ID NO: 916580
gugggaccgaaguauuaug

SEQ ID NO: 1167857 - RNA, 19 nt, Artificial Sequence
  Description of Artificial Sequence: Synthetic oligonucleotide
  Antisense strand to SEQ ID NO: 1167856
cauaauacuucggucccac

SEQ ID NO: 1167858 - RNA, 19 nt, Artificial Sequence
  Description of Artificial Sequence: Synthetic oligonucleotide
  Sense strand starting at position 3968 of SEQ ID NO: 916580
uccauuaguuaggcaggaa

SEQ ID NO: 1167859 - RNA, 19 nt, Artificial Sequence
  Description of Artificial Sequence: Synthetic oligonucleotide
  Antisense strand to SEQ ID NO: 1167858
uuccugccuaacuaaugga

SEQ ID NO: 1167860 - RNA, 19 nt, Artificial Sequence
  Description of Artificial Sequence: Synthetic oligonucleotide
  Sense strand starting at position 133 of SEQ ID NO: 916581
ucagauagaucccauugcu

SEQ ID NO: 1167861 - RNA, 19 nt, Artificial Sequence
  Description of Artificial Sequence: Synthetic oligonucleotide
  Antisense strand to SEQ ID NO: 1167860
agcaaugggaucuaucuga

SEQ ID NO: 1167862 - RNA, 19 nt, Artificial Sequence
  Description of Artificial Sequence: Synthetic oligonucleotide
  Sense strand starting at position 175 of SEQ ID NO: 916581
ucaagucuccaccagaugu

SEQ ID NO: 1167863 - RNA, 19 nt, Artificial Sequence
  Description of Artificial Sequence: Synthetic oligonucleotide
  Antisense strand to SEQ ID NO: 1167862
acaucugguggagacuuga

SEQ ID NO: 1167864 - RNA, 19 nt, Artificial Sequence
  Description of Artificial Sequence: Synthetic oligonucleotide
  Sense strand starting at position 411 of SEQ ID NO: 916581
gcagcaagucccuaagaag

SEQ ID NO: 1167865 - RNA, 19 nt, Artificial Sequence
  Description of Artificial Sequence: Synthetic oligonucleotide
  Antisense strand to SEQ ID NO: 1167864
cuucuuagggacuugcugc

SEQ ID NO: 1167866 - RNA, 19 nt, Artificial Sequence
  Description of Artificial Sequence: Synthetic oligonucleotide
  Sense strand starting at position 563 of SEQ ID NO: 916581
ggguuugccaaaugugauu

SEQ ID NO: 1167867 - RNA, 19 nt, Artificial Sequence
  Description of Artificial Sequence: Synthetic oligonucleotide
  Antisense strand to SEQ ID NO: 1167866
aaucacauuuggcaaaccc

SEQ ID NO: 1167868 - RNA, 19 nt, Artificial Sequence
  Description of Artificial Sequence: Synthetic oligonucleotide
  Sense strand starting at position 568 of SEQ ID NO: 916581
ugccaaaugugauuuggcu

SEQ ID NO: 1167869 - RNA, 19 nt, Artificial Sequence
  Description of Artificial Sequence: Synthetic oligonucleotide
  Antisense strand to SEQ ID NO: 1167868
agccaaaucacauuuggca

SEQ ID NO: 1167870 - RNA, 19 nt, Artificial Sequence
  Description of Artificial Sequence: Synthetic oligonucleotide
  Sense strand starting at position 574 of SEQ ID NO: 916581
augugauuuggcugagcag

SEQ ID NO: 1167871 - RNA, 19 nt, Artificial Sequence
  Description of Artificial Sequence: Synthetic oligonucleotide
  Antisense strand to SEQ ID NO: 1167870
cugcucagccaaaucacau

SEQ ID NO: 1167872 - RNA, 19 nt, Artificial Sequence
  Description of Artificial Sequence: Synthetic oligonucleotide
  Sense strand starting at position 924 of SEQ ID NO: 916581
cuggcuucccuggacacau

SEQ ID NO: 1167873 - RNA, 19 nt, Artificial Sequence
  Description of Artificial Sequence: Synthetic oligonucleotide
  Antisense strand to SEQ ID NO: 1167872
auguguccagggaagccag

SEQ ID NO: 1167874 - RNA, 19 nt, Artificial Sequence
  Description of Artificial Sequence: Synthetic oligonucleotide
  Sense strand starting at position 1007 of SEQ ID NO: 916581
gguugaagccuccaaguca

SEQ ID NO: 1167875 - RNA, 19 nt, Artificial Sequence
  Description of Artificial Sequence: Synthetic oligonucleotide
  Antisense strand to SEQ ID NO: 1167874
ugacuuggaggcuucaacc

SEQ ID NO: 1167876 - RNA, 19 nt, Artificial Sequence
  Description of Artificial Sequence: Synthetic oligonucleotide
  Sense strand starting at position 1211 of SEQ ID NO: 916581
gauggugucuccgugggaa

SEQ ID NO: 1167877 - RNA, 19 nt, Artificial Sequence
  Description of Artificial Sequence: Synthetic oligonucleotide
  Antisense strand to SEQ ID NO: 1167876
uucccacggagacaccauc

SEQ ID NO: 1167878 - RNA, 19 nt, Artificial Sequence
  Description of Artificial Sequence: Synthetic oligonucleotide
  Sense strand starting at position 1213 of SEQ ID NO: 916581
uggugucuccgugggaaau

SEQ ID NO: 1167879 - RNA, 19 nt, Artificial Sequence
  Description of Artificial Sequence: Synthetic oligonucleotide
  Antisense strand to SEQ ID NO: 1167878
auuucccacggagacacca

SEQ ID NO: 1167880 - RNA, 19 nt, Artificial Sequence
  Description of Artificial Sequence: Synthetic oligonucleotide
  Sense strand starting at position 1214 of SEQ ID NO: 916581
ggugucuccgugggaaaug

SEQ ID NO: 1167881 - RNA, 19 nt, Artificial Sequence
  Description of Artificial Sequence: Synthetic oligonucleotide
  Antisense strand to SEQ ID NO: 1167880
cauuucccacggagacacc

SEQ ID NO: 1167882 - RNA, 19 nt, Artificial Sequence
  Description of Artificial Sequence: Synthetic oligonucleotide
  Sense strand starting at position 1215 of SEQ ID NO: 916581
gugucuccgugggaaaugu

SEQ ID NO: 1167883 - RNA, 19 nt, Artificial Sequence
  Description of Artificial Sequence: Synthetic oligonucleotide
  Antisense strand to SEQ ID NO: 1167882
acauuucccacggagacac

SEQ ID NO: 1167884 - RNA, 19 nt, Artificial Sequence
  Description of Artificial Sequence: Synthetic oligonucleotide
  Sense strand starting at position 1303 of SEQ ID NO: 916581
cauggaugcucccgacaca

SEQ ID NO: 1167885 - RNA, 19 nt, Artificial Sequence
  Description of Artificial Sequence: Synthetic oligonucleotide
  Antisense strand to SEQ ID NO: 1167884
ugugucgggagcauccaug

SEQ ID NO: 1167886 - RNA, 19 nt, Artificial Sequence
  Description of Artificial Sequence: Synthetic oligonucleotide
  Sense strand starting at position 1583 of SEQ ID NO: 916581
gccaacuugcgcuaggaga

SEQ ID NO: 1167887 - RNA, 19 nt, Artificial Sequence
  Description of Artificial Sequence: Synthetic oligonucleotide
  Antisense strand to SEQ ID NO: 1167886
ucuccuagcgcaaguuggc

SEQ ID NO: 1167888 - RNA, 19 nt, Artificial Sequence
  Description of Artificial Sequence: Synthetic oligonucleotide
  Sense strand starting at position 2022 of SEQ ID NO: 916581
gggagaaaguugggucuga

SEQ ID NO: 1167889 - RNA, 19 nt, Artificial Sequence
  Description of Artificial Sequence: Synthetic oligonucleotide
  Antisense strand to SEQ ID NO: 1167888
ucagacccaacuuucuccc

SEQ ID NO: 1167890 - RNA, 19 nt, Artificial Sequence
  Description of Artificial Sequence: Synthetic oligonucleotide
  Sense strand starting at position 2462 of SEQ ID NO: 916581
gcucauucggcccggagau

SEQ ID NO: 1167891 - RNA, 19 nt, Artificial Sequence
  Description of Artificial Sequence: Synthetic oligonucleotide
  Antisense strand to SEQ ID NO: 1167890
aucuccgggccgaaugagc

SEQ ID NO: 1167892 - RNA, 19 nt, Artificial Sequence
  Description of Artificial Sequence: Synthetic oligonucleotide
  Sense strand starting at position 2485 of SEQ ID NO: 916581
aucauugaucacggacgga

SEQ ID NO: 1167893 - RNA, 19 nt, Artificial Sequence
  Description of Artificial Sequence: Synthetic oligonucleotide
  Antisense strand to SEQ ID NO: 1167892
uccguccgugaucaaugau

SEQ ID NO: 1167894 - RNA, 19 nt, Artificial Sequence
  Description of Artificial Sequence: Synthetic oligonucleotide
  Sense strand starting at position 2507 of SEQ ID NO: 916581
cccaucacgucugucaaua

SEQ ID NO: 1167895 - RNA, 19 nt, Artificial Sequence
  Description of Artificial Sequence: Synthetic oligonucleotide
  Antisense strand to SEQ ID NO: 1167894
uauugacagacgugauggg

SEQ ID NO: 1167896 - RNA, 19 nt, Artificial Sequence
  Description of Artificial Sequence: Synthetic oligonucleotide
  Sense strand starting at position 2518 of SEQ ID NO: 916581
ugucaauagggcugacaaa

SEQ ID NO: 1167897 - RNA, 19 nt, Artificial Sequence
  Description of Artificial Sequence: Synthetic oligonucleotide
  Antisense strand to SEQ ID NO: 1167896
uuugucagcccuauugaca

SEQ ID NO: 1167898 - RNA, 19 nt, Artificial Sequence
  Description of Artificial Sequence: Synthetic oligonucleotide
  Sense strand starting at position 2936 of SEQ ID NO: 916581
ggcugagguugugguauga

SEQ ID NO: 1167899 - RNA, 19 nt, Artificial Sequence
  Description of Artificial Sequence: Synthetic oligonucleotide
  Antisense strand to SEQ ID NO: 1167898
ucauaccacaaccucagcc

SEQ ID NO: 1167900 - RNA, 19 nt, Artificial Sequence
  Description of Artificial Sequence: Synthetic oligonucleotide
  Sense strand starting at position 2940 of SEQ ID NO: 916581
gagguugugguaugaccaa

SEQ ID NO: 1167901 - RNA, 19 nt, Artificial Sequence
  Description of Artificial Sequence: Synthetic oligonucleotide
  Antisense strand to SEQ ID NO: 1167900
uuggucauaccacaaccuc

SEQ ID NO: 1167902 - RNA, 19 nt, Artificial Sequence
  Description of Artificial Sequence: Synthetic oligonucleotide
  Sense strand starting at position 3189 of SEQ ID NO: 916581
cucucuuugucuuggcaga

SEQ ID NO: 1167903 - RNA, 19 nt, Artificial Sequence
  Description of Artificial Sequence: Synthetic oligonucleotide
  Antisense strand to SEQ ID NO: 1167902
ucugccaagacaaagagag

SEQ ID NO: 1167904 - RNA, 19 nt, Artificial Sequence
  Description of Artificial Sequence: Synthetic oligonucleotide
  Sense strand starting at position 3191 of SEQ ID NO: 916581
cucuuugucuuggcagaga

SEQ ID NO: 1167905 - RNA, 19 nt, Artificial Sequence
  Description of Artificial Sequence: Synthetic oligonucleotide
  Antisense strand to SEQ ID NO: 1167904
ucucugccaagacaaagag

SEQ ID NO: 1167906 - RNA, 19 nt, Artificial Sequence
  Description of Artificial Sequence: Synthetic oligonucleotide
  Sense strand starting at position 3196 of SEQ ID NO: 916581
ugucuuggcagagagcaaa

SEQ ID NO: 1167907 - RNA, 19 nt, Artificial Sequence
  Description of Artificial Sequence: Synthetic oligonucleotide
  Antisense strand to SEQ ID NO: 1167906
uuugcucucugccaagaca

SEQ ID NO: 1167908 - RNA, 19 nt, Artificial Sequence
  Description of Artificial Sequence: Synthetic oligonucleotide
  Sense strand starting at position 3314 of SEQ ID NO: 916581
auagauaugggacgugaca

SEQ ID NO: 1167909 - RNA, 19 nt, Artificial Sequence
  Description of Artificial Sequence: Synthetic oligonucleotide
  Antisense strand to SEQ ID NO: 1167908
ugucacgucccauaucuau

SEQ ID NO: 1167910 - RNA, 19 nt, Artificial Sequence
  Description of Artificial Sequence: Synthetic oligonucleotide
  Sense strand starting at position 3582 of SEQ ID NO: 916581
guaggcuguccaggacaga

SEQ ID NO: 1167911 - RNA, 19 nt, Artificial Sequence
  Description of Artificial Sequence: Synthetic oligonucleotide
  Antisense strand to SEQ ID NO: 1167910
ucuguccuggacagccuac

SEQ ID NO: 1167912 - RNA, 19 nt, Artificial Sequence
  Description of Artificial Sequence: Synthetic oligonucleotide
  Sense strand starting at position 3913 of SEQ ID NO: 916581
ggguggguaguuugagaaa

SEQ ID NO: 1167913 - RNA, 19 nt, Artificial Sequence
  Description of Artificial Sequence: Synthetic oligonucleotide
  Antisense strand to SEQ ID NO: 1167912
uuucucaaacuacccaccc

SEQ ID NO: 1167914 - RNA, 19 nt, Artificial Sequence
  Description of Artificial Sequence: Synthetic oligonucleotide
  Sense strand starting at position 42 of SEQ ID NO: 916582
gcucucaaacugugggaga

SEQ ID NO: 1167915 - RNA, 19 nt, Artificial Sequence
  Description of Artificial Sequence: Synthetic oligonucleotide
  Antisense strand to SEQ ID NO: 1167914
ucucccacaguuugagagc

SEQ ID NO: 1167916 - RNA, 19 nt, Artificial Sequence
  Description of Artificial Sequence: Synthetic oligonucleotide
  Sense strand starting at position 44 of SEQ ID NO: 916582
ucucaaacugugggagauu

SEQ ID NO: 1167917 - RNA, 19 nt, Artificial Sequence
  Description of Artificial Sequence: Synthetic oligonucleotide
  Antisense strand to SEQ ID NO: 1167916
aaucucccacaguuugaga

SEQ ID NO: 1167918 - RNA, 19 nt, Artificial Sequence
  Description of Artificial Sequence: Synthetic oligonucleotide
  Sense strand starting at position 45 of SEQ ID NO: 916582
cucaaacugugggagauuu

SEQ ID NO: 1167919 - RNA, 19 nt, Artificial Sequence
  Description of Artificial Sequence: Synthetic oligonucleotide
  Antisense strand to SEQ ID NO: 1167918
aaaucucccacaguuugag

SEQ ID NO: 1167920 - RNA, 19 nt, Artificial Sequence
  Description of Artificial Sequence: Synthetic oligonucleotide
  Sense strand starting at position 59 of SEQ ID NO: 916582
gauuucugcucagaaaugg

SEQ ID NO: 1167921 - RNA, 19 nt, Artificial Sequence
  Description of Artificial Sequence: Synthetic oligonucleotide
  Antisense strand to SEQ ID NO: 1167920
ccauuucugagcagaaauc

SEQ ID NO: 1167922 - RNA, 19 nt, Artificial Sequence
  Description of Artificial Sequence: Synthetic oligonucleotide
  Sense strand starting at position 420 of SEQ ID NO: 916582
aauaauugaugcuuaguga

SEQ ID NO: 1167923 - RNA, 19 nt, Artificial Sequence
  Description of Artificial Sequence: Synthetic oligonucleotide
  Antisense strand to SEQ ID NO: 1167922
ucacuaagcaucaauuauu

SEQ ID NO: 1167924 - RNA, 19 nt, Artificial Sequence
  Description of Artificial Sequence: Synthetic oligonucleotide
  Sense strand starting at position 560 of SEQ ID NO: 916582
augccauuaucauuaguuc

SEQ ID NO: 1167925 - RNA, 19 nt, Artificial Sequence
  Description of Artificial Sequence: Synthetic oligonucleotide
  Antisense strand to SEQ ID NO: 1167924
gaacuaaugauaauggcau

SEQ ID NO: 1167926 - RNA, 19 nt, Artificial Sequence
  Description of Artificial Sequence: Synthetic oligonucleotide
  Sense strand starting at position 597 of SEQ ID NO: 916582
aauggaugcucagugagau

SEQ ID NO: 1167927 - RNA, 19 nt, Artificial Sequence
  Description of Artificial Sequence: Synthetic oligonucleotide
  Antisense strand to SEQ ID NO: 1167926
aucucacugagcauccauu

SEQ ID NO: 1167928 - RNA, 19 nt, Artificial Sequence
  Description of Artificial Sequence: Synthetic oligonucleotide
  Sense strand starting at position 598 of SEQ ID NO: 916582
auggaugcucagugagaua

SEQ ID NO: 1167929 - RNA, 19 nt, Artificial Sequence
  Description of Artificial Sequence: Synthetic oligonucleotide
  Antisense strand to SEQ ID NO: 1167928
uaucucacugagcauccau

SEQ ID NO: 1167930 - RNA, 19 nt, Artificial Sequence
  Description of Artificial Sequence: Synthetic oligonucleotide
  Sense strand starting at position 642 of SEQ ID NO: 916582
guagguggcaaauacaauu

SEQ ID NO: 1167931 - RNA, 19 nt, Artificial Sequence
  Description of Artificial Sequence: Synthetic oligonucleotide
  Antisense strand to SEQ ID NO: 1167930
aauuguauuugccaccuac

SEQ ID NO: 1167932 - RNA, 19 nt, Artificial Sequence
  Description of Artificial Sequence: Synthetic oligonucleotide
  Sense strand starting at position 672 of SEQ ID NO: 916582
gccuucuuccaggaucugu

SEQ ID NO: 1167933 - RNA, 19 nt, Artificial Sequence
  Description of Artificial Sequence: Synthetic oligonucleotide
  Antisense strand to SEQ ID NO: 1167932
acagauccuggaagaaggc

SEQ ID NO: 1167934 - RNA, 19 nt, Artificial Sequence
  Description of Artificial Sequence: Synthetic oligonucleotide
  Sense strand starting at position 773 of SEQ ID NO: 916582
ggcccuaugagguauugag

SEQ ID NO: 1167935 - RNA, 19 nt, Artificial Sequence
  Description of Artificial Sequence: Synthetic oligonucleotide
  Antisense strand to SEQ ID NO: 1167934
cucaauaccucauagggcc

SEQ ID NO: 1167936 - RNA, 19 nt, Artificial Sequence
  Description of Artificial Sequence: Synthetic oligonucleotide
  Sense strand starting at position 780 of SEQ ID NO: 916582
ugagguauugagggaaagu

SEQ ID NO: 1167937 - RNA, 19 nt, Artificial Sequence
  Description of Artificial Sequence: Synthetic oligonucleotide
  Antisense strand to SEQ ID NO: 1167936
acuuucccucaauaccuca

SEQ ID NO: 1167938 - RNA, 19 nt, Artificial Sequence
  Description of Artificial Sequence: Synthetic oligonucleotide
  Sense strand starting at position 922 of SEQ ID NO: 916582
cgcuuuaugcuugccuaga

SEQ ID NO: 1167939 - RNA, 19 nt, Artificial Sequence
  Description of Artificial Sequence: Synthetic oligonucleotide
  Antisense strand to SEQ ID NO: 1167938
ucuaggcaagcauaaagcg

SEQ ID NO: 1167940 - RNA, 19 nt, Artificial Sequence
  Description of Artificial Sequence: Synthetic oligonucleotide
  Sense strand starting at position 927 of SEQ ID NO: 916582
uaugcuugccuagagauau

SEQ ID NO: 1167941 - RNA, 19 nt, Artificial Sequence
  Description of Artificial Sequence: Synthetic oligonucleotide
  Antisense strand to SEQ ID NO: 1167940
auaucucuaggcaagcaua

SEQ ID NO: 1167942 - RNA, 19 nt, Artificial Sequence
  Description of Artificial Sequence: Synthetic oligonucleotide
  Sense strand starting at position 972 of SEQ ID NO: 916582
guugcacagcuuuacugau

SEQ ID NO: 1167943 - RNA, 19 nt, Artificial Sequence
  Description of Artificial Sequence: Synthetic oligonucleotide
  Antisense strand to SEQ ID NO: 1167942
aucaguaaagcugugcaac

SEQ ID NO: 1167944 - RNA, 19 nt, Artificial Sequence
  Description of Artificial Sequence: Synthetic oligonucleotide
  Sense strand starting at position 974 of SEQ ID NO: 916582
ugcacagcuuuacugauaa

SEQ ID NO: 1167945 - RNA, 19 nt, Artificial Sequence
  Description of Artificial Sequence: Synthetic oligonucleotide
  Antisense strand to SEQ ID NO: 1167944
uuaucaguaaagcugugca

SEQ ID NO: 1167946 - RNA, 19 nt, Artificial Sequence
  Description of Artificial Sequence: Synthetic oligonucleotide
  Sense strand starting at position 1015 of SEQ ID NO: 916582
ggaggagagugguuucuua

SEQ ID NO: 1167947 - RNA, 19 nt, Artificial Sequence
  Description of Artificial Sequence: Synthetic oligonucleotide
  Antisense strand to SEQ ID NO: 1167946
uaagaaaccacucuccucc

SEQ ID NO: 1167948 - RNA, 19 nt, Artificial Sequence
  Description of Artificial Sequence: Synthetic oligonucleotide
  Sense strand starting at position 1019 of SEQ ID NO: 916582
gagagugguuucuuauaaa

SEQ ID NO: 1167949 - RNA, 19 nt, Artificial Sequence
  Description of Artificial Sequence: Synthetic oligonucleotide
  Antisense strand to SEQ ID NO: 1167948
uuuauaagaaaccacucuc

SEQ ID NO: 1167950 - RNA, 19 nt, Artificial Sequence
  Description of Artificial Sequence: Synthetic oligonucleotide
  Sense strand starting at position 1094 of SEQ ID NO: 916582
ggagacagcuuucuucuuu

SEQ ID NO: 1167951 - RNA, 19 nt, Artificial Sequence
  Description of Artificial Sequence: Synthetic oligonucleotide
  Antisense strand to SEQ ID NO: 1167950
aaagaagaaagcugucucc

SEQ ID NO: 1167952 - RNA, 19 nt, Artificial Sequence
  Description of Artificial Sequence: Synthetic oligonucleotide
  Sense strand starting at position 1233 of SEQ ID NO: 916582
gcaagacugcaacaguauu

SEQ ID NO: 1167953 - RNA, 19 nt, Artificial Sequence
  Description of Artificial Sequence: Synthetic oligonucleotide
  Antisense strand to SEQ ID NO: 1167952
aauacuguugcagucuugc

SEQ ID NO: 1167954 - RNA, 19 nt, Artificial Sequence
  Description of Artificial Sequence: Synthetic oligonucleotide
  Sense strand starting at position 1488 of SEQ ID NO: 916582
gagggucacuuguuaauaa

SEQ ID NO: 1167955 - RNA, 19 nt, Artificial Sequence
  Description of Artificial Sequence: Synthetic oligonucleotide
  Antisense strand to SEQ ID NO: 1167954
uuauuaacaagugacccuc

SEQ ID NO: 1167956 - RNA, 19 nt, Artificial Sequence
  Description of Artificial Sequence: Synthetic oligonucleotide
  Sense strand starting at position 1539 of SEQ ID NO: 916582
uuaacaugcuguguggaua

SEQ ID NO: 1167957 - RNA, 19 nt, Artificial Sequence
  Description of Artificial Sequence: Synthetic oligonucleotide
  Antisense strand to SEQ ID NO: 1167956
uauccacacagcauguuaa

SEQ ID NO: 1167958 - RNA, 19 nt, Artificial Sequence
  Description of Artificial Sequence: Synthetic oligonucleotide
  Sense strand starting at position 1540 of SEQ ID NO: 916582
uaacaugcuguguggauaa

SEQ ID NO: 1167959 - RNA, 19 nt, Artificial Sequence
  Description of Artificial Sequence: Synthetic oligonucleotide
  Antisense strand to SEQ ID NO: 1167958
uuauccacacagcauguua

SEQ ID NO: 1167960 - RNA, 19 nt, Artificial Sequence
  Description of Artificial Sequence: Synthetic oligonucleotide
  Sense strand starting at position 1542 of SEQ ID NO: 916582
acaugcuguguggauaaau

SEQ ID NO: 1167961 - RNA, 19 nt, Artificial Sequence
  Description of Artificial Sequence: Synthetic oligonucleotide
  Antisense strand to SEQ ID NO: 1167960
auuuauccacacagcaugu

SEQ ID NO: 1167962 - RNA, 19 nt, Artificial Sequence
  Description of Artificial Sequence: Synthetic oligonucleotide
  Sense strand starting at position 2042 of SEQ ID NO: 916582
cccugaucccagugcugaa

SEQ ID NO: 1167963 - RNA, 19 nt, Artificial Sequence
  Description of Artificial Sequence: Synthetic oligonucleotide
  Antisense strand to SEQ ID NO: 1167962
uucagcacugggaucaggg

SEQ ID NO: 1167964 - RNA, 19 nt, Artificial Sequence
  Description of Artificial Sequence: Synthetic oligonucleotide
  Sense strand starting at position 2138 of SEQ ID NO: 916582
ugaacucugcucuggaaau

SEQ ID NO: 1167965 - RNA, 19 nt, Artificial Sequence
  Description of Artificial Sequence: Synthetic oligonucleotide
  Antisense strand to SEQ ID NO: 1167964
auuuccagagcagaguuca

SEQ ID NO: 1167966 - RNA, 19 nt, Artificial Sequence
  Description of Artificial Sequence: Synthetic oligonucleotide
  Sense strand starting at position 2554 of SEQ ID NO: 916582
augaucaugacucgugcaa

SEQ ID NO: 1167967 - RNA, 19 nt, Artificial Sequence
  Description of Artificial Sequence: Synthetic oligonucleotide
  Antisense strand to SEQ ID NO: 1167966
uugcacgagucaugaucau

SEQ ID NO: 1167968 - RNA, 19 nt, Artificial Sequence
  Description of Artificial Sequence: Synthetic oligonucleotide
  Sense strand starting at position 2749 of SEQ ID NO: 916582
gcugaaugugcagagaguu

SEQ ID NO: 1167969 - RNA, 19 nt, Artificial Sequence
  Description of Artificial Sequence: Synthetic oligonucleotide
  Antisense strand to SEQ ID NO: 1167968
aacucucugcacauucagc

SEQ ID NO: 1167970 - RNA, 19 nt, Artificial Sequence
  Description of Artificial Sequence: Synthetic oligonucleotide
  Sense strand starting at position 2759 of SEQ ID NO: 916582
cagagaguuccauaagcuc

SEQ ID NO: 1167971 - RNA, 19 nt, Artificial Sequence
  Description of Artificial Sequence: Synthetic oligonucleotide
  Antisense strand to SEQ ID NO: 1167970
gagcuuauggaacucucug

SEQ ID NO: 1167972 - RNA, 19 nt, Artificial Sequence
  Description of Artificial Sequence: Synthetic oligonucleotide
  Sense strand starting at position 2806 of SEQ ID NO: 916582
uuaacaguacugugauaca

SEQ ID NO: 1167973 - RNA, 19 nt, Artificial Sequence
  Description of Artificial Sequence: Synthetic oligonucleotide
  Antisense strand to SEQ ID NO: 1167972
uguaucacaguacuguuaa

SEQ ID NO: 1167974 - RNA, 19 nt, Artificial Sequence
  Description of Artificial Sequence: Synthetic oligonucleotide
  Sense strand starting at position 2809 of SEQ ID NO: 916582
acaguacugugauacauuu

SEQ ID NO: 1167975 - RNA, 19 nt, Artificial Sequence
  Description of Artificial Sequence: Synthetic oligonucleotide
  Antisense strand to SEQ ID NO: 1167974
aaauguaucacaguacugu

SEQ ID NO: 1167976 - RNA, 19 nt, Artificial Sequence
  Description of Artificial Sequence: Synthetic oligonucleotide
  Sense strand starting at position 2884 of SEQ ID NO: 916582
uaagguuuacauuaagguu

SEQ ID NO: 1167977 - RNA, 19 nt, Artificial Sequence
  Description of Artificial Sequence: Synthetic oligonucleotide
  Antisense strand to SEQ ID NO: 1167976
aaccuuaauguaaaccuua

SEQ ID NO: 1167978 - RNA, 19 nt, Artificial Sequence
  Description of Artificial Sequence: Synthetic oligonucleotide
  Sense strand starting at position 3148 of SEQ ID NO: 916582
uggguaugaaugugacuau

SEQ ID NO: 1167979 - RNA, 19 nt, Artificial Sequence
  Description of Artificial Sequence: Synthetic oligonucleotide
  Antisense strand to SEQ ID NO: 1167978
auagucacauucauaccca

SEQ ID NO: 1167980 - RNA, 19 nt, Artificial Sequence
  Description of Artificial Sequence: Synthetic oligonucleotide
  Sense strand starting at position 3151 of SEQ ID NO: 916582
guaugaaugugacuauaga

SEQ ID NO: 1167981 - RNA, 19 nt, Artificial Sequence
  Description of Artificial Sequence: Synthetic oligonucleotide
  Antisense strand to SEQ ID NO: 1167980
ucuauagucacauucauac

SEQ ID NO: 1167982 - RNA, 19 nt, Artificial Sequence
  Description of Artificial Sequence: Synthetic oligonucleotide
  Sense strand starting at position 3293 of SEQ ID NO: 916582
gaauuccuuccuggacgaa

SEQ ID NO: 1167983 - RNA, 19 nt, Artificial Sequence
  Description of Artificial Sequence: Synthetic oligonucleotide
  Antisense strand to SEQ ID NO: 1167982
uucguccaggaaggaauuc

SEQ ID NO: 1167984 - RNA, 19 nt, Artificial Sequence
  Description of Artificial Sequence: Synthetic oligonucleotide
  Sense strand starting at position 3405 of SEQ ID NO: 916582
aucccucucugaguuagau

SEQ ID NO: 1167985 - RNA, 19 nt, Artificial Sequence
  Description of Artificial Sequence: Synthetic oligonucleotide
  Antisense strand to SEQ ID NO: 1167984
aucuaacucagagagggau

SEQ ID NO: 1167986 - RNA, 19 nt, Artificial Sequence
  Description of Artificial Sequence: Synthetic oligonucleotide
  Sense strand starting at position 3414 of SEQ ID NO: 916582
ugaguuagaucuuucuucu

SEQ ID NO: 1167987 - RNA, 19 nt, Artificial Sequence
  Description of Artificial Sequence: Synthetic oligonucleotide
  Antisense strand to SEQ ID NO: 1167986
agaagaaagaucuaacuca

SEQ ID NO: 1167988 - RNA, 19 nt, Artificial Sequence
  Description of Artificial Sequence: Synthetic oligonucleotide
  Sense strand starting at position 3883 of SEQ ID NO: 916582
guuauuuagagguguguuc

SEQ ID NO: 1167989 - RNA, 19 nt, Artificial Sequence
  Description of Artificial Sequence: Synthetic oligonucleotide
  Antisense strand to SEQ ID NO: 1167988
gaacacaccucuaaauaac

SEQ ID NO: 1167990 - RNA, 19 nt, Artificial Sequence
  Description of Artificial Sequence: Synthetic oligonucleotide
  Sense strand starting at position 3890 of SEQ ID NO: 916582
agagguguguucuuuaauc

SEQ ID NO: 1167991 - RNA, 19 nt, Artificial Sequence
  Description of Artificial Sequence: Synthetic oligonucleotide
  Antisense strand to SEQ ID NO: 1167990
gauuaaagaacacaccucu

SEQ ID NO: 1167992 - RNA, 19 nt, Artificial Sequence
  Description of Artificial Sequence: Synthetic oligonucleotide
  Sense strand starting at position 3980 of SEQ ID NO: 916582
gcaugcuuugcauaacaua

SEQ ID NO: 1167993 - RNA, 19 nt, Artificial Sequence
  Description of Artificial Sequence: Synthetic oligonucleotide
  Antisense strand to SEQ ID NO: 1167992
uauguuaugcaaagcaugc

SEQ ID NO: 1167994 - RNA, 19 nt, Artificial Sequence
  Description of Artificial Sequence: Synthetic oligonucleotide
  Sense strand starting at position 25 of SEQ ID NO: 916583
gguagagaguaggaucaua

SEQ ID NO: 1167995 - RNA, 19 nt, Artificial Sequence
  Description of Artificial Sequence: Synthetic oligonucleotide
  Antisense strand to SEQ ID NO: 1167994
uaugauccuacucucuacc

SEQ ID NO: 1167996 - RNA, 19 nt, Artificial Sequence
  Description of Artificial Sequence: Synthetic oligonucleotide
  Sense strand starting at position 284 of SEQ ID NO: 916583
uuguauccauguguccaaa

SEQ ID NO: 1167997 - RNA, 19 nt, Artificial Sequence
  Description of Artificial Sequence: Synthetic oligonucleotide
  Antisense strand to SEQ ID NO: 1167996
uuuggacacauggauacaa

SEQ ID NO: 1167998 - RNA, 19 nt, Artificial Sequence
  Description of Artificial Sequence: Synthetic oligonucleotide
  Sense strand starting at position 286 of SEQ ID NO: 916583
guauccauguguccaaaua

SEQ ID NO: 1167999 - RNA, 19 nt, Artificial Sequence
  Description of Artificial Sequence: Synthetic oligonucleotide
  Antisense strand to SEQ ID NO: 1167998
uauuuggacacauggauac

SEQ ID NO: 1168000 - RNA, 19 nt, Artificial Sequence
  Description of Artificial Sequence: Synthetic oligonucleotide
  Sense strand starting at position 449 of SEQ ID NO: 916583
caucauaggucagagaaac

SEQ ID NO: 1168001 - RNA, 19 nt, Artificial Sequence
  Description of Artificial Sequence: Synthetic oligonucleotide
  Antisense strand to SEQ ID NO: 1168000
guuucucugaccuaugaug

SEQ ID NO: 1168002 - RNA, 19 nt, Artificial Sequence
  Description of Artificial Sequence: Synthetic oligonucleotide
  Sense strand starting at position 487 of SEQ ID NO: 916583
agcccaugaugccauuuau

SEQ ID NO: 1168003 - RNA, 19 nt, Artificial Sequence
  Description of Artificial Sequence: Synthetic oligonucleotide
  Antisense strand to SEQ ID NO: 1168002
auaaauggcaucaugggcu

SEQ ID NO: 1168004 - RNA, 19 nt, Artificial Sequence
  Description of Artificial Sequence: Synthetic oligonucleotide
  Sense strand starting at position 598 of SEQ ID NO: 916583
gauaguuggucacccuaua

SEQ ID NO: 1168005 - RNA, 19 nt, Artificial Sequence
  Description of Artificial Sequence: Synthetic oligonucleotide
  Antisense strand to SEQ ID NO: 1168004
uauagggugaccaacuauc

SEQ ID NO: 1168006 - RNA, 19 nt, Artificial Sequence
  Description of Artificial Sequence: Synthetic oligonucleotide
  Sense strand starting at position 603 of SEQ ID NO: 916583
uuggucacccuauaauugu

SEQ ID NO: 1168007 - RNA, 19 nt, Artificial Sequence
  Description of Artificial Sequence: Synthetic oligonucleotide
  Antisense strand to SEQ ID NO: 1168006
acaauuauagggugaccaa

SEQ ID NO: 1168008 - RNA, 19 nt, Artificial Sequence
  Description of Artificial Sequence: Synthetic oligonucleotide
  Sense strand starting at position 606 of SEQ ID NO: 916583
gucacccuauaauuguaaa

SEQ ID NO: 1168009 - RNA, 19 nt, Artificial Sequence
  Description of Artificial Sequence: Synthetic oligonucleotide
  Antisense strand to SEQ ID NO: 1168008
uuuacaauuauagggugac

SEQ ID NO: 1168010 - RNA, 19 nt, Artificial Sequence
  Description of Artificial Sequence: Synthetic oligonucleotide
  Sense strand starting at position 774 of SEQ ID NO: 916583
cauuguuuguggcuaccua

SEQ ID NO: 1168011 - RNA, 19 nt, Artificial Sequence
  Description of Artificial Sequence: Synthetic oligonucleotide
  Antisense strand to SEQ ID NO: 1168010
uagguagccacaaacaaug

SEQ ID NO: 1168012 - RNA, 19 nt, Artificial Sequence
  Description of Artificial Sequence: Synthetic oligonucleotide
  Sense strand starting at position 778 of SEQ ID NO: 916583
guuuguggcuaccuaucaa

SEQ ID NO: 1168013 - RNA, 19 nt, Artificial Sequence
  Description of Artificial Sequence: Synthetic oligonucleotide
  Antisense strand to SEQ ID NO: 1168012
uugauagguagccacaaac

SEQ ID NO: 1168014 - RNA, 19 nt, Artificial Sequence
  Description of Artificial Sequence: Synthetic oligonucleotide
  Sense strand starting at position 803 of SEQ ID NO: 916583
cacuuugaucugggcacuu

SEQ ID NO: 1168015 - RNA, 19 nt, Artificial Sequence
  Description of Artificial Sequence: Synthetic oligonucleotide
  Antisense strand to SEQ ID NO: 1168014
aagugcccagaucaaagug

SEQ ID NO: 1168016 - RNA, 19 nt, Artificial Sequence
  Description of Artificial Sequence: Synthetic oligonucleotide
  Sense strand starting at position 866 of SEQ ID NO: 916583
uaguguagugguuaaacau

SEQ ID NO: 1168017 - RNA, 19 nt, Artificial Sequence
  Description of Artificial Sequence: Synthetic oligonucleotide
  Antisense strand to SEQ ID NO: 1168016
auguuuaaccacuacacua

SEQ ID NO: 1168018 - RNA, 19 nt, Artificial Sequence
  Description of Artificial Sequence: Synthetic oligonucleotide
  Sense strand starting at position 897 of SEQ ID NO: 916583
gccaauuacccaggcuuaa

SEQ ID NO: 1168019 - RNA, 19 nt, Artificial Sequence
  Description of Artificial Sequence: Synthetic oligonucleotide
  Antisense strand to SEQ ID NO: 1168018
uuaagccuggguaauuggc

SEQ ID NO: 1168020 - RNA, 19 nt, Artificial Sequence
  Description of Artificial Sequence: Synthetic oligonucleotide
  Sense strand starting at position 983 of SEQ ID NO: 916583
gacaccacgugucuagauu

SEQ ID NO: 1168021 - RNA, 19 nt, Artificial Sequence
  Description of Artificial Sequence: Synthetic oligonucleotide
  Antisense strand to SEQ ID NO: 1168020
aaucuagacacgugguguc

SEQ ID NO: 1168022 - RNA, 19 nt, Artificial Sequence
  Description of Artificial Sequence: Synthetic oligonucleotide
  Sense strand starting at position 991 of SEQ ID NO: 916583
gugucuagauuucuuuauu

SEQ ID NO: 1168023 - RNA, 19 nt, Artificial Sequence
  Description of Artificial Sequence: Synthetic oligonucleotide
  Antisense strand to SEQ ID NO: 1168022
aauaaagaaaucuagacac

SEQ ID NO: 1168024 - RNA, 19 nt, Artificial Sequence
  Description of Artificial Sequence: Synthetic oligonucleotide
  Sense strand starting at position 997 of SEQ ID NO: 916583
agauuucuuuauugaggca

SEQ ID NO: 1168025 - RNA, 19 nt, Artificial Sequence
  Description of Artificial Sequence: Synthetic oligonucleotide
  Antisense strand to SEQ ID NO: 1168024
ugccucaauaaagaaaucu

SEQ ID NO: 1168026 - RNA, 19 nt, Artificial Sequence
  Description of Artificial Sequence: Synthetic oligonucleotide
  Sense strand starting at position 1362 of SEQ ID NO: 916583
gaguaaucacagugaauuc

SEQ ID NO: 1168027 - RNA, 19 nt, Artificial Sequence
  Description of Artificial Sequence: Synthetic oligonucleotide
  Antisense strand to SEQ ID NO: 1168026
gaauucacugugauuacuc

SEQ ID NO: 1168028 - RNA, 19 nt, Artificial Sequence
  Description of Artificial Sequence: Synthetic oligonucleotide
  Sense strand starting at position 1409 of SEQ ID NO: 916583
acaugaugugcucaagccu

SEQ ID NO: 1168029 - RNA, 19 nt, Artificial Sequence
  Description of Artificial Sequence: Synthetic oligonucleotide
  Antisense strand to SEQ ID NO: 1168028
aggcuugagcacaucaugu

SEQ ID NO: 1168030 - RNA, 19 nt, Artificial Sequence
  Description of Artificial Sequence: Synthetic oligonucleotide
  Sense strand starting at position 1416 of SEQ ID NO: 916583
gugcucaagccuuacgaua

SEQ ID NO: 1168031 - RNA, 19 nt, Artificial Sequence
  Description of Artificial Sequence: Synthetic oligonucleotide
  Antisense strand to SEQ ID NO: 1168030
uaucguaaggcuugagcac

SEQ ID NO: 1168032 - RNA, 19 nt, Artificial Sequence
  Description of Artificial Sequence: Synthetic oligonucleotide
  Sense strand starting at position 1431 of SEQ ID NO: 916583
gauacucugaaguggguau

SEQ ID NO: 1168033 - RNA, 19 nt, Artificial Sequence
  Description of Artificial Sequence: Synthetic oligonucleotide
  Antisense strand to SEQ ID NO: 1168032
auacccacuucagaguauc

SEQ ID NO: 1168034 - RNA, 19 nt, Artificial Sequence
  Description of Artificial Sequence: Synthetic oligonucleotide
  Sense strand starting at position 1435 of SEQ ID NO: 916583
cucugaaguggguauuaug

SEQ ID NO: 1168035 - RNA, 19 nt, Artificial Sequence
  Description of Artificial Sequence: Synthetic oligonucleotide
  Antisense strand to SEQ ID NO: 1168034
cauaauacccacuucagag

SEQ ID NO: 1168036 - RNA, 19 nt, Artificial Sequence
  Description of Artificial Sequence: Synthetic oligonucleotide
  Sense strand starting at position 1582 of SEQ ID NO: 916583
gugggccucgcacauaaua

SEQ ID NO: 1168037 - RNA, 19 nt, Artificial Sequence
  Description of Artificial Sequence: Synthetic oligonucleotide
  Antisense strand to SEQ ID NO: 1168036
uauuaugugcgaggcccac

SEQ ID NO: 1168038 - RNA, 19 nt, Artificial Sequence
  Description of Artificial Sequence: Synthetic oligonucleotide
  Sense strand starting at position 2307 of SEQ ID NO: 916583
agaugucuguccuugagca

SEQ ID NO: 1168039 - RNA, 19 nt, Artificial Sequence
  Description of Artificial Sequence: Synthetic oligonucleotide
  Antisense strand to SEQ ID NO: 1168038
ugcucaaggacagacaucu

SEQ ID NO: 1168040 - RNA, 19 nt, Artificial Sequence
  Description of Artificial Sequence: Synthetic oligonucleotide
  Sense strand starting at position 2309 of SEQ ID NO: 916583
augucuguccuugagcaca

SEQ ID NO: 1168041 - RNA, 19 nt, Artificial Sequence
  Description of Artificial Sequence: Synthetic oligonucleotide
  Antisense strand to SEQ ID NO: 1168040
ugugcucaaggacagacau

SEQ ID NO: 1168042 - RNA, 19 nt, Artificial Sequence
  Description of Artificial Sequence: Synthetic oligonucleotide
  Sense strand starting at position 2392 of SEQ ID NO: 916583
guaggauuagcuugaugau

SEQ ID NO: 1168043 - RNA, 19 nt, Artificial Sequence
  Description of Artificial Sequence: Synthetic oligonucleotide
  Antisense strand to SEQ ID NO: 1168042
aucaucaagcuaauccuac

SEQ ID NO: 1168044 - RNA, 19 nt, Artificial Sequence
  Description of Artificial Sequence: Synthetic oligonucleotide
  Sense strand starting at position 2608 of SEQ ID NO: 916583
gucugcuucuggguaaaca

SEQ ID NO: 1168045 - RNA, 19 nt, Artificial Sequence
  Description of Artificial Sequence: Synthetic oligonucleotide
  Antisense strand to SEQ ID NO: 1168044
uguuuacccagaagcagac

SEQ ID NO: 1168046 - RNA, 19 nt, Artificial Sequence
  Description of Artificial Sequence: Synthetic oligonucleotide
  Sense strand starting at position 2666 of SEQ ID NO: 916583
uccaguuucucagcacacu

SEQ ID NO: 1168047 - RNA, 19 nt, Artificial Sequence
  Description of Artificial Sequence: Synthetic oligonucleotide
  Antisense strand to SEQ ID NO: 1168046
agugugcugagaaacugga

SEQ ID NO: 1168048 - RNA, 19 nt, Artificial Sequence
  Description of Artificial Sequence: Synthetic oligonucleotide
  Sense strand starting at position 2667 of SEQ ID NO: 916583
ccaguuucucagcacacuu

SEQ ID NO: 1168049 - RNA, 19 nt, Artificial Sequence
  Description of Artificial Sequence: Synthetic oligonucleotide
  Antisense strand to SEQ ID NO: 1168048
aagugugcugagaaacugg

SEQ ID NO: 1168050 - RNA, 19 nt, Artificial Sequence
  Description of Artificial Sequence: Synthetic oligonucleotide
  Sense strand starting at position 2748 of SEQ ID NO: 916583
ccaagugugugagccagaa

SEQ ID NO: 1168051 - RNA, 19 nt, Artificial Sequence
  Description of Artificial Sequence: Synthetic oligonucleotide
  Antisense strand to SEQ ID NO: 1168050
uucuggcucacacacuugg

SEQ ID NO: 1168052 - RNA, 19 nt, Artificial Sequence
  Description of Artificial Sequence: Synthetic oligonucleotide
  Sense strand starting at position 2908 of SEQ ID NO: 916583
uccauacugggaugguuaa

SEQ ID NO: 1168053 - RNA, 19 nt, Artificial Sequence
  Description of Artificial Sequence: Synthetic oligonucleotide
  Antisense strand to SEQ ID NO: 1168052
uuaaccaucccaguaugga

SEQ ID NO: 1168054 - RNA, 19 nt, Artificial Sequence
  Description of Artificial Sequence: Synthetic oligonucleotide
  Sense strand starting at position 2909 of SEQ ID NO: 916583
ccauacugggaugguuaau

SEQ ID NO: 1168055 - RNA, 19 nt, Artificial Sequence
  Description of Artificial Sequence: Synthetic oligonucleotide
  Antisense strand to SEQ ID NO: 1168054
auuaaccaucccaguaugg

SEQ ID NO: 1168056 - RNA, 19 nt, Artificial Sequence
  Description of Artificial Sequence: Synthetic oligonucleotide
  Sense strand starting at position 3056 of SEQ ID NO: 916583
aguggauuaucaucuguaa

SEQ ID NO: 1168057 - RNA, 19 nt, Artificial Sequence
  Description of Artificial Sequence: Synthetic oligonucleotide
  Antisense strand to SEQ ID NO: 1168056
uuacagaugauaauccacu

SEQ ID NO: 1168058 - RNA, 19 nt, Artificial Sequence
  Description of Artificial Sequence: Synthetic oligonucleotide
  Sense strand starting at position 3058 of SEQ ID NO: 916583
uggauuaucaucuguaagg

SEQ ID NO: 1168059 - RNA, 19 nt, Artificial Sequence
  Description of Artificial Sequence: Synthetic oligonucleotide
  Antisense strand to SEQ ID NO: 1168058
ccuuacagaugauaaucca

SEQ ID NO: 1168060 - RNA, 19 nt, Artificial Sequence
  Description of Artificial Sequence: Synthetic oligonucleotide
  Sense strand starting at position 3059 of SEQ ID NO: 916583
ggauuaucaucuguaaggu

SEQ ID NO: 1168061 - RNA, 19 nt, Artificial Sequence
  Description of Artificial Sequence: Synthetic oligonucleotide
  Antisense strand to SEQ ID NO: 1168060
accuuacagaugauaaucc

SEQ ID NO: 1168062 - RNA, 19 nt, Artificial Sequence
  Description of Artificial Sequence: Synthetic oligonucleotide
  Sense strand starting at position 3060 of SEQ ID NO: 916583
gauuaucaucuguaaggug

SEQ ID NO: 1168063 - RNA, 19 nt, Artificial Sequence
  Description of Artificial Sequence: Synthetic oligonucleotide
  Antisense strand to SEQ ID NO: 1168062
caccuuacagaugauaauc

SEQ ID NO: 1168064 - RNA, 19 nt, Artificial Sequence
  Description of Artificial Sequence: Synthetic oligonucleotide
  Sense strand starting at position 3075 of SEQ ID NO: 916583
gguggugggccugauucaa

SEQ ID NO: 1168065 - RNA, 19 nt, Artificial Sequence
  Description of Artificial Sequence: Synthetic oligonucleotide
  Antisense strand to SEQ ID NO: 1168064
uugaaucaggcccaccacc

SEQ ID NO: 1168066 - RNA, 19 nt, Artificial Sequence
  Description of Artificial Sequence: Synthetic oligonucleotide
  Sense strand starting at position 3289 of SEQ ID NO: 916583
auauaaauacccuguuagu

SEQ ID NO: 1168067 - RNA, 19 nt, Artificial Sequence
  Description of Artificial Sequence: Synthetic oligonucleotide
  Antisense strand to SEQ ID NO: 1168066
acuaacaggguauuuauau

SEQ ID NO: 1168068 - RNA, 19 nt, Artificial Sequence
  Description of Artificial Sequence: Synthetic oligonucleotide
  Sense strand starting at position 3458 of SEQ ID NO: 916583
gaaacauuugcccgugauc

SEQ ID NO: 1168069 - RNA, 19 nt, Artificial Sequence
  Description of Artificial Sequence: Synthetic oligonucleotide
  Antisense strand to SEQ ID NO: 1168068
gaucacgggcaaauguuuc

SEQ ID NO: 1168070 - RNA, 19 nt, Artificial Sequence
  Description of Artificial Sequence: Synthetic oligonucleotide
  Sense strand starting at position 3460 of SEQ ID NO: 916583
aacauuugcccgugaucac

SEQ ID NO: 1168071 - RNA, 19 nt, Artificial Sequence
  Description of Artificial Sequence: Synthetic oligonucleotide
  Antisense strand to SEQ ID NO: 1168070
gugaucacgggcaaauguu

SEQ ID NO: 1168072 - RNA, 19 nt, Artificial Sequence
  Description of Artificial Sequence: Synthetic oligonucleotide
  Sense strand starting at position 3535 of SEQ ID NO: 916583
gccugugcuuuauuuguua

SEQ ID NO: 1168073 - RNA, 19 nt, Artificial Sequence
  Description of Artificial Sequence: Synthetic oligonucleotide
  Antisense strand to SEQ ID NO: 1168072
uaacaaauaaagcacaggc

SEQ ID NO: 1168074 - RNA, 19 nt, Artificial Sequence
  Description of Artificial Sequence: Synthetic oligonucleotide
  Sense strand starting at position 133 of SEQ ID NO: 916584
ccuacuuaucccgaugauu

SEQ ID NO: 1168075 - RNA, 19 nt, Artificial Sequence
  Description of Artificial Sequence: Synthetic oligonucleotide
  Antisense strand to SEQ ID NO: 1168074
aaucaucgggauaaguagg

SEQ ID NO: 1168076 - RNA, 19 nt, Artificial Sequence
  Description of Artificial Sequence: Synthetic oligonucleotide
  Sense strand starting at position 136 of SEQ ID NO: 916584
acuuaucccgaugauuaug

SEQ ID NO: 1168077 - RNA, 19 nt, Artificial Sequence
  Description of Artificial Sequence: Synthetic oligonucleotide
  Antisense strand to SEQ ID NO: 1168076
cauaaucaucgggauaagu

SEQ ID NO: 1168078 - RNA, 19 nt, Artificial Sequence
  Description of Artificial Sequence: Synthetic oligonucleotide
  Sense strand starting at position 373 of SEQ ID NO: 916584
gggagauugugcuccagaa

SEQ ID NO: 1168079 - RNA, 19 nt, Artificial Sequence
  Description of Artificial Sequence: Synthetic oligonucleotide
  Antisense strand to SEQ ID NO: 1168078
uucuggagcacaaucuccc

SEQ ID NO: 1168080 - RNA, 19 nt, Artificial Sequence
  Description of Artificial Sequence: Synthetic oligonucleotide
  Sense strand starting at position 375 of SEQ ID NO: 916584
gagauugugcuccagaacc

SEQ ID NO: 1168081 - RNA, 19 nt, Artificial Sequence
  Description of Artificial Sequence: Synthetic oligonucleotide
  Antisense strand to SEQ ID NO: 1168080
gguucuggagcacaaucuc

SEQ ID NO: 1168082 - RNA, 19 nt, Artificial Sequence
  Description of Artificial Sequence: Synthetic oligonucleotide
  Sense strand starting at position 436 of SEQ ID NO: 916584
ucccuugcugcacagaaau

SEQ ID NO: 1168083 - RNA, 19 nt, Artificial Sequence
  Description of Artificial Sequence: Synthetic oligonucleotide
  Antisense strand to SEQ ID NO: 1168082
auuucugugcagcaaggga

SEQ ID NO: 1168084 - RNA, 19 nt, Artificial Sequence
  Description of Artificial Sequence: Synthetic oligonucleotide
  Sense strand starting at position 462 of SEQ ID NO: 916584
guccaucuccaagguagaa

SEQ ID NO: 1168085 - RNA, 19 nt, Artificial Sequence
  Description of Artificial Sequence: Synthetic oligonucleotide
  Antisense strand to SEQ ID NO: 1168084
uucuaccuuggagauggac

SEQ ID NO: 1168086 - RNA, 19 nt, Artificial Sequence
  Description of Artificial Sequence: Synthetic oligonucleotide
  Sense strand starting at position 662 of SEQ ID NO: 916584
ccaaaucuacccugaggau

SEQ ID NO: 1168087 - RNA, 19 nt, Artificial Sequence
  Description of Artificial Sequence: Synthetic oligonucleotide
  Antisense strand to SEQ ID NO: 1168086
auccucaggguagauuugg

SEQ ID NO: 1168088 - RNA, 19 nt, Artificial Sequence
  Description of Artificial Sequence: Synthetic oligonucleotide
  Sense strand starting at position 1141 of SEQ ID NO: 916584
ugugacucagaguaguaau

SEQ ID NO: 1168089 - RNA, 19 nt, Artificial Sequence
  Description of Artificial Sequence: Synthetic oligonucleotide
  Antisense strand to SEQ ID NO: 1168088
auuacuacucugagucaca

SEQ ID NO: 1168090 - RNA, 19 nt, Artificial Sequence
  Description of Artificial Sequence: Synthetic oligonucleotide
  Sense strand starting at position 1144 of SEQ ID NO: 916584
gacucagaguaguaauuua

SEQ ID NO: 1168091 - RNA, 19 nt, Artificial Sequence
  Description of Artificial Sequence: Synthetic oligonucleotide
  Antisense strand to SEQ ID NO: 1168090
uaaauuacuacucugaguc

SEQ ID NO: 1168092 - RNA, 19 nt, Artificial Sequence
  Description of Artificial Sequence: Synthetic oligonucleotide
  Sense strand starting at position 1151 of SEQ ID NO: 916584
aguaguaauuuagcgucua

SEQ ID NO: 1168093 - RNA, 19 nt, Artificial Sequence
  Description of Artificial Sequence: Synthetic oligonucleotide
  Antisense strand to SEQ ID NO: 1168092
uagacgcuaaauuacuacu

SEQ ID NO: 1168094 - RNA, 19 nt, Artificial Sequence
  Description of Artificial Sequence: Synthetic oligonucleotide
  Sense strand starting at position 1308 of SEQ ID NO: 916584
cuguuacgcggaguguuau

SEQ ID NO: 1168095 - RNA, 19 nt, Artificial Sequence
  Description of Artificial Sequence: Synthetic oligonucleotide
  Antisense strand to SEQ ID NO: 1168094
auaacacuccgcguaacag

SEQ ID NO: 1168096 - RNA, 19 nt, Artificial Sequence
  Description of Artificial Sequence: Synthetic oligonucleotide
  Sense strand starting at position 1336 of SEQ ID NO: 916584
aaccuuaaggucuggcaua

SEQ ID NO: 1168097 - RNA, 19 nt, Artificial Sequence
  Description of Artificial Sequence: Synthetic oligonucleotide
  Antisense strand to SEQ ID NO: 1168096
uaugccagaccuuaagguu

SEQ ID NO: 1168098 - RNA, 19 nt, Artificial Sequence
  Description of Artificial Sequence: Synthetic oligonucleotide
  Sense strand starting at position 1363 of SEQ ID NO: 916584
cccacagucuguuugaaug

SEQ ID NO: 1168099 - RNA, 19 nt, Artificial Sequence
  Description of Artificial Sequence: Synthetic oligonucleotide
  Antisense strand to SEQ ID NO: 1168098
cauucaaacagacuguggg

SEQ ID NO: 1168100 - RNA, 19 nt, Artificial Sequence
  Description of Artificial Sequence: Synthetic oligonucleotide
  Sense strand starting at position 1434 of SEQ ID NO: 916584
aguagagaugcaggaauca

SEQ ID NO: 1168101 - RNA, 19 nt, Artificial Sequence
  Description of Artificial Sequence: Synthetic oligonucleotide
  Antisense strand to SEQ ID NO: 1168100
ugauuccugcaucucuacu

SEQ ID NO: 1168102 - RNA, 19 nt, Artificial Sequence
  Description of Artificial Sequence: Synthetic oligonucleotide
  Sense strand starting at position 1447 of SEQ ID NO: 916584
gaaucaggcuacuuggauu

SEQ ID NO: 1168103 - RNA, 19 nt, Artificial Sequence
  Description of Artificial Sequence: Synthetic oligonucleotide
  Antisense strand to SEQ ID NO: 1168102
aauccaaguagccugauuc

SEQ ID NO: 1168104 - RNA, 19 nt, Artificial Sequence
  Description of Artificial Sequence: Synthetic oligonucleotide
  Sense strand starting at position 1605 of SEQ ID NO: 916584
ggaaguauuuguuaaagaa

SEQ ID NO: 1168105 - RNA, 19 nt, Artificial Sequence
  Description of Artificial Sequence: Synthetic oligonucleotide
  Antisense strand to SEQ ID NO: 1168104
uucuuuaacaaauacuucc

SEQ ID NO: 1168106 - RNA, 19 nt, Artificial Sequence
  Description of Artificial Sequence: Synthetic oligonucleotide
  Sense strand starting at position 2089 of SEQ ID NO: 916584
uugggaaauucccugcuuu

SEQ ID NO: 1168107 - RNA, 19 nt, Artificial Sequence
  Description of Artificial Sequence: Synthetic oligonucleotide
  Antisense strand to SEQ ID NO: 1168106
aaagcagggaauuucccaa

SEQ ID NO: 1168108 - RNA, 19 nt, Artificial Sequence
  Description of Artificial Sequence: Synthetic oligonucleotide
  Sense strand starting at position 2090 of SEQ ID NO: 916584
ugggaaauucccugcuuuc

SEQ ID NO: 1168109 - RNA, 19 nt, Artificial Sequence
  Description of Artificial Sequence: Synthetic oligonucleotide
  Antisense strand to SEQ ID NO: 1168108
gaaagcagggaauuuccca

SEQ ID NO: 1168110 - RNA, 19 nt, Artificial Sequence
  Description of Artificial Sequence: Synthetic oligonucleotide
  Sense strand starting at position 2273 of SEQ ID NO: 916584
guacauacugaguaacgua

SEQ ID NO: 1168111 - RNA, 19 nt, Artificial Sequence
  Description of Artificial Sequence: Synthetic oligonucleotide
  Antisense strand to SEQ ID NO: 1168110
uacguuacucaguauguac

SEQ ID NO: 1168112 - RNA, 19 nt, Artificial Sequence
  Description of Artificial Sequence: Synthetic oligonucleotide
  Sense strand starting at position 2302 of SEQ ID NO: 916584
uucagaaacgugcagguuu

SEQ ID NO: 1168113 - RNA, 19 nt, Artificial Sequence
  Description of Artificial Sequence: Synthetic oligonucleotide
  Antisense strand to SEQ ID NO: 1168112
aaaccugcacguuucugaa

SEQ ID NO: 1168114 - RNA, 19 nt, Artificial Sequence
  Description of Artificial Sequence: Synthetic oligonucleotide
  Sense strand starting at position 2369 of SEQ ID NO: 916584
cgcugucugacugagggau

SEQ ID NO: 1168115 - RNA, 19 nt, Artificial Sequence
  Description of Artificial Sequence: Synthetic oligonucleotide
  Antisense strand to SEQ ID NO: 1168114
aucccucagucagacagcg

SEQ ID NO: 1168116 - RNA, 19 nt, Artificial Sequence
  Description of Artificial Sequence: Synthetic oligonucleotide
  Sense strand starting at position 2526 of SEQ ID NO: 916584
uagguaacuguccaaggua

SEQ ID NO: 1168117 - RNA, 19 nt, Artificial Sequence
  Description of Artificial Sequence: Synthetic oligonucleotide
  Antisense strand to SEQ ID NO: 1168116
uaccuuggacaguuaccua

SEQ ID NO: 1168118 - RNA, 19 nt, Artificial Sequence
  Description of Artificial Sequence: Synthetic oligonucleotide
  Sense strand starting at position 2529 of SEQ ID NO: 916584
guaacuguccaagguaaca

SEQ ID NO: 1168119 - RNA, 19 nt, Artificial Sequence
  Description of Artificial Sequence: Synthetic oligonucleotide
  Antisense strand to SEQ ID NO: 1168118
uguuaccuuggacaguuac

SEQ ID NO: 1168120 - RNA, 19 nt, Artificial Sequence
  Description of Artificial Sequence: Synthetic oligonucleotide
  Sense strand starting at position 2542 of SEQ ID NO: 916584
guaacacagcuggaaaguu

SEQ ID NO: 1168121 - RNA, 19 nt, Artificial Sequence
  Description of Artificial Sequence: Synthetic oligonucleotide
  Antisense strand to SEQ ID NO: 1168120
aacuuuccagcuguguuac

SEQ ID NO: 1168122 - RNA, 19 nt, Artificial Sequence
  Description of Artificial Sequence: Synthetic oligonucleotide
  Sense strand starting at position 2558 of SEQ ID NO: 916584
guugucuggcuggauucaa

SEQ ID NO: 1168123 - RNA, 19 nt, Artificial Sequence
  Description of Artificial Sequence: Synthetic oligonucleotide
  Antisense strand to SEQ ID NO: 1168122
uugaauccagccagacaac

SEQ ID NO: 1168124 - RNA, 19 nt, Artificial Sequence
  Description of Artificial Sequence: Synthetic oligonucleotide
  Sense strand starting at position 2693 of SEQ ID NO: 916584
uaaagucugucugcaagaa

SEQ ID NO: 1168125 - RNA, 19 nt, Artificial Sequence
  Description of Artificial Sequence: Synthetic oligonucleotide
  Antisense strand to SEQ ID NO: 1168124
uucuugcagacagacuuua

SEQ ID NO: 1168126 - RNA, 19 nt, Artificial Sequence
  Description of Artificial Sequence: Synthetic oligonucleotide
  Sense strand starting at position 2694 of SEQ ID NO: 916584
aaagucugucugcaagaau

SEQ ID NO: 1168127 - RNA, 19 nt, Artificial Sequence
  Description of Artificial Sequence: Synthetic oligonucleotide
  Antisense strand to SEQ ID NO: 1168126
auucuugcagacagacuuu

SEQ ID NO: 1168128 - RNA, 19 nt, Artificial Sequence
  Description of Artificial Sequence: Synthetic oligonucleotide
  Sense strand starting at position 2697 of SEQ ID NO: 916584
gucugucugcaagaauuaa

SEQ ID NO: 1168129 - RNA, 19 nt, Artificial Sequence
  Description of Artificial Sequence: Synthetic oligonucleotide
  Antisense strand to SEQ ID NO: 1168128
uuaauucuugcagacagac

SEQ ID NO: 1168130 - RNA, 19 nt, Artificial Sequence
  Description of Artificial Sequence: Synthetic oligonucleotide
  Sense strand starting at position 2739 of SEQ ID NO: 916584
gaaggaaagucagucaguu

SEQ ID NO: 1168131 - RNA, 19 nt, Artificial Sequence
  Description of Artificial Sequence: Synthetic oligonucleotide
  Antisense strand to SEQ ID NO: 1168130
aacugacugacuuuccuuc

SEQ ID NO: 1168132 - RNA, 19 nt, Artificial Sequence
  Description of Artificial Sequence: Synthetic oligonucleotide
  Sense strand starting at position 2741 of SEQ ID NO: 916584
aggaaagucagucaguuua

SEQ ID NO: 1168133 - RNA, 19 nt, Artificial Sequence
  Description of Artificial Sequence: Synthetic oligonucleotide
  Antisense strand to SEQ ID NO: 1168132
uaaacugacugacuuuccu

SEQ ID NO: 1168134 - RNA, 19 nt, Artificial Sequence
  Description of Artificial Sequence: Synthetic oligonucleotide
  Sense strand starting at position 3130 of SEQ ID NO: 916584
uccugacaucugcacggua

SEQ ID NO: 1168135 - RNA, 19 nt, Artificial Sequence
  Description of Artificial Sequence: Synthetic oligonucleotide
  Antisense strand to SEQ ID NO: 1168134
uaccgugcagaugucagga

SEQ ID NO: 1168136 - RNA, 19 nt, Artificial Sequence
  Description of Artificial Sequence: Synthetic oligonucleotide
  Sense strand starting at position 3156 of SEQ ID NO: 916584
ggaaauagauaggaucaga

SEQ ID NO: 1168137 - RNA, 19 nt, Artificial Sequence
  Description of Artificial Sequence: Synthetic oligonucleotide
  Antisense strand to SEQ ID NO: 1168136
ucugauccuaucuauuucc

SEQ ID NO: 1168138 - RNA, 19 nt, Artificial Sequence
  Description of Artificial Sequence: Synthetic oligonucleotide
  Sense strand starting at position 3164 of SEQ ID NO: 916584
auaggaucagagugugaau

SEQ ID NO: 1168139 - RNA, 19 nt, Artificial Sequence
  Description of Artificial Sequence: Synthetic oligonucleotide
  Antisense strand to SEQ ID NO: 1168138
auucacacucugauccuau

SEQ ID NO: 1168140 - RNA, 19 nt, Artificial Sequence
  Description of Artificial Sequence: Synthetic oligonucleotide
  Sense strand starting at position 3167 of SEQ ID NO: 916584
ggaucagagugugaauuuc

SEQ ID NO: 1168141 - RNA, 19 nt, Artificial Sequence
  Description of Artificial Sequence: Synthetic oligonucleotide
  Antisense strand to SEQ ID NO: 1168140
gaaauucacacucugaucc

SEQ ID NO: 1168142 - RNA, 19 nt, Artificial Sequence
  Description of Artificial Sequence: Synthetic oligonucleotide
  Sense strand starting at position 3208 of SEQ ID NO: 916584
gagagaugcugggucugua

SEQ ID NO: 1168143 - RNA, 19 nt, Artificial Sequence
  Description of Artificial Sequence: Synthetic oligonucleotide
  Antisense strand to SEQ ID NO: 1168142
uacagacccagcaucucuc

SEQ ID NO: 1168144 - RNA, 19 nt, Artificial Sequence
  Description of Artificial Sequence: Synthetic oligonucleotide
  Sense strand starting at position 3253 of SEQ ID NO: 916584
uagugaaugcugcaucacu

SEQ ID NO: 1168145 - RNA, 19 nt, Artificial Sequence
  Description of Artificial Sequence: Synthetic oligonucleotide
  Antisense strand to SEQ ID NO: 1168144
agugaugcagcauucacua

SEQ ID NO: 1168146 - RNA, 19 nt, Artificial Sequence
  Description of Artificial Sequence: Synthetic oligonucleotide
  Sense strand starting at position 3326 of SEQ ID NO: 916584
aagucaagggauugagcaa

SEQ ID NO: 1168147 - RNA, 19 nt, Artificial Sequence
  Description of Artificial Sequence: Synthetic oligonucleotide
  Antisense strand to SEQ ID NO: 1168146
uugcucaaucccuugacuu

SEQ ID NO: 1168148 - RNA, 19 nt, Artificial Sequence
  Description of Artificial Sequence: Synthetic oligonucleotide
  Sense strand starting at position 3571 of SEQ ID NO: 916584
ggucaauauugggucauga

SEQ ID NO: 1168149 - RNA, 19 nt, Artificial Sequence
  Description of Artificial Sequence: Synthetic oligonucleotide
  Antisense strand to SEQ ID NO: 1168148
ucaugacccaauauugacc

SEQ ID NO: 1168150 - RNA, 19 nt, Artificial Sequence
  Description of Artificial Sequence: Synthetic oligonucleotide
  Sense strand starting at position 3727 of SEQ ID NO: 916584
cugucagagauaugagacu

SEQ ID NO: 1168151 - RNA, 19 nt, Artificial Sequence
  Description of Artificial Sequence: Synthetic oligonucleotide
  Antisense strand to SEQ ID NO: 1168150
agucucauaucucugacag

SEQ ID NO: 1168152 - RNA, 19 nt, Artificial Sequence
  Description of Artificial Sequence: Synthetic oligonucleotide
  Sense strand starting at position 3882 of SEQ ID NO: 916584
ucaguugugcuggcauagu

SEQ ID NO: 1168153 - RNA, 19 nt, Artificial Sequence
  Description of Artificial Sequence: Synthetic oligonucleotide
  Antisense strand to SEQ ID NO: 1168152
acuaugccagcacaacuga

SEQ ID NO: 1168154 - RNA, 19 nt, Artificial Sequence
  Description of Artificial Sequence: Synthetic oligonucleotide
  Sense strand starting at position 14 of SEQ ID NO: 916585
uuaagugagucauugguga

SEQ ID NO: 1168155 - RNA, 19 nt, Artificial Sequence
  Description of Artificial Sequence: Synthetic oligonucleotide
  Antisense strand to SEQ ID NO: 1168154
ucaccaaugacucacuuaa

SEQ ID NO: 1168156 - RNA, 19 nt, Artificial Sequence
  Description of Artificial Sequence: Synthetic oligonucleotide
  Sense strand starting at position 16 of SEQ ID NO: 916585
aagugagucauuggugaga

SEQ ID NO: 1168157 - RNA, 19 nt, Artificial Sequence
  Description of Artificial Sequence: Synthetic oligonucleotide
  Antisense strand to SEQ ID NO: 1168156
ucucaccaaugacucacuu

SEQ ID NO: 1168158 - RNA, 19 nt, Artificial Sequence
  Description of Artificial Sequence: Synthetic oligonucleotide
  Sense strand starting at position 27 of SEQ ID NO: 916585
uggugagacugucugauuc

SEQ ID NO: 1168159 - RNA, 19 nt, Artificial Sequence
  Description of Artificial Sequence: Synthetic oligonucleotide
  Antisense strand to SEQ ID NO: 1168158
gaaucagacagucucacca

SEQ ID NO: 1168160 - RNA, 19 nt, Artificial Sequence
  Description of Artificial Sequence: Synthetic oligonucleotide
  Sense strand starting at position 31 of SEQ ID NO: 916585
gagacugucugauucucca

SEQ ID NO: 1168161 - RNA, 19 nt, Artificial Sequence
  Description of Artificial Sequence: Synthetic oligonucleotide
  Antisense strand to SEQ ID NO: 1168160
uggagaaucagacagucuc

SEQ ID NO: 1168162 - RNA, 19 nt, Artificial Sequence
  Description of Artificial Sequence: Synthetic oligonucleotide
  Sense strand starting at position 35 of SEQ ID NO: 916585
cugucugauucuccaaagu

SEQ ID NO: 1168163 - RNA, 19 nt, Artificial Sequence
  Description of Artificial Sequence: Synthetic oligonucleotide
  Antisense strand to SEQ ID NO: 1168162
acuuuggagaaucagacag

SEQ ID NO: 1168164 - RNA, 19 nt, Artificial Sequence
  Description of Artificial Sequence: Synthetic oligonucleotide
  Sense strand starting at position 621 of SEQ ID NO: 916585
gggcauauucuugauccca

SEQ ID NO: 1168165 - RNA, 19 nt, Artificial Sequence
  Description of Artificial Sequence: Synthetic oligonucleotide
  Antisense strand to SEQ ID NO: 1168164
ugggaucaagaauaugccc

SEQ ID NO: 1168166 - RNA, 19 nt, Artificial Sequence
  Description of Artificial Sequence: Synthetic oligonucleotide
  Sense strand starting at position 656 of SEQ ID NO: 916585
augggcaacauuggugaaa

SEQ ID NO: 1168167 - RNA, 19 nt, Artificial Sequence
  Description of Artificial Sequence: Synthetic oligonucleotide
  Antisense strand to SEQ ID NO: 1168166
uuucaccaauguugcccau

SEQ ID NO: 1168168 - RNA, 19 nt, Artificial Sequence
  Description of Artificial Sequence: Synthetic oligonucleotide
  Sense strand starting at position 944 of SEQ ID NO: 916585
gucuaaauuccuggcuaca

SEQ ID NO: 1168169 - RNA, 19 nt, Artificial Sequence
  Description of Artificial Sequence: Synthetic oligonucleotide
  Antisense strand to SEQ ID NO: 1168168
uguagccaggaauuuagac

SEQ ID NO: 1168170 - RNA, 19 nt, Artificial Sequence
  Description of Artificial Sequence: Synthetic oligonucleotide
  Sense strand starting at position 946 of SEQ ID NO: 916585
cuaaauuccuggcuacaug

SEQ ID NO: 1168171 - RNA, 19 nt, Artificial Sequence
  Description of Artificial Sequence: Synthetic oligonucleotide
  Antisense strand to SEQ ID NO: 1168170
cauguagccaggaauuuag

SEQ ID NO: 1168172 - RNA, 19 nt, Artificial Sequence
  Description of Artificial Sequence: Synthetic oligonucleotide
  Sense strand starting at position 957 of SEQ ID NO: 916585
gcuacaugugcuuaaucua

SEQ ID NO: 1168173 - RNA, 19 nt, Artificial Sequence
  Description of Artificial Sequence: Synthetic oligonucleotide
  Antisense strand to SEQ ID NO: 1168172
uagauuaagcacauguagc

SEQ ID NO: 1168174 - RNA, 19 nt, Artificial Sequence
  Description of Artificial Sequence: Synthetic oligonucleotide
  Sense strand starting at position 987 of SEQ ID NO: 916585
aguaaauuauaggcaccaa

SEQ ID NO: 1168175 - RNA, 19 nt, Artificial Sequence
  Description of Artificial Sequence: Synthetic oligonucleotide
  Antisense strand to SEQ ID NO: 1168174
uuggugccuauaauuuacu

SEQ ID NO: 1168176 - RNA, 19 nt, Artificial Sequence
  Description of Artificial Sequence: Synthetic oligonucleotide
  Sense strand starting at position 1130 of SEQ ID NO: 916585
aucugauaucuaggccagu

SEQ ID NO: 1168177 - RNA, 19 nt, Artificial Sequence
  Description of Artificial Sequence: Synthetic oligonucleotide
  Antisense strand to SEQ ID NO: 1168176
acuggccuagauaucagau

SEQ ID NO: 1168178 - RNA, 19 nt, Artificial Sequence
  Description of Artificial Sequence: Synthetic oligonucleotide
  Sense strand starting at position 1233 of SEQ ID NO: 916585
uuugcuaaucuguaaacug

SEQ ID NO: 1168179 - RNA, 19 nt, Artificial Sequence
  Description of Artificial Sequence: Synthetic oligonucleotide
  Antisense strand to SEQ ID NO: 1168178
caguuuacagauuagcaaa

SEQ ID NO: 1168180 - RNA, 19 nt, Artificial Sequence
  Description of Artificial Sequence: Synthetic oligonucleotide
  Sense strand starting at position 1241 of SEQ ID NO: 916585
ucuguaaacugggcaaaga

SEQ ID NO: 1168181 - RNA, 19 nt, Artificial Sequence
  Description of Artificial Sequence: Synthetic oligonucleotide
  Antisense strand to SEQ ID NO: 1168180
ucuuugcccaguuuacaga

SEQ ID NO: 1168182 - RNA, 19 nt, Artificial Sequence
  Description of Artificial Sequence: Synthetic oligonucleotide
  Sense strand starting at position 1290 of SEQ ID NO: 916585
agagauaguguauguuaag

SEQ ID NO: 1168183 - RNA, 19 nt, Artificial Sequence
  Description of Artificial Sequence: Synthetic oligonucleotide
  Antisense strand to SEQ ID NO: 1168182
cuuaacauacacuaucucu

SEQ ID NO: 1168184 - RNA, 19 nt, Artificial Sequence
  Description of Artificial Sequence: Synthetic oligonucleotide
  Sense strand starting at position 1291 of SEQ ID NO: 916585
gagauaguguauguuaaga

SEQ ID NO: 1168185 - RNA, 19 nt, Artificial Sequence
  Description of Artificial Sequence: Synthetic oligonucleotide
  Antisense strand to SEQ ID NO: 1168184
ucuuaacauacacuaucuc

SEQ ID NO: 1168186 - RNA, 19 nt, Artificial Sequence
  Description of Artificial Sequence: Synthetic oligonucleotide
  Sense strand starting at position 1407 of SEQ ID NO: 916585
gguauucugagaugucauc

SEQ ID NO: 1168187 - RNA, 19 nt, Artificial Sequence
  Description of Artificial Sequence: Synthetic oligonucleotide
  Antisense strand to SEQ ID NO: 1168186
gaugacaucucagaauacc

SEQ ID NO: 1168188 - RNA, 19 nt, Artificial Sequence
  Description of Artificial Sequence: Synthetic oligonucleotide
  Sense strand starting at position 1413 of SEQ ID NO: 916585
cugagaugucaucagcaug

SEQ ID NO: 1168189 - RNA, 19 nt, Artificial Sequence
  Description of Artificial Sequence: Synthetic oligonucleotide
  Antisense strand to SEQ ID NO: 1168188
caugcugaugacaucucag

SEQ ID NO: 1168190 - RNA, 19 nt, Artificial Sequence
  Description of Artificial Sequence: Synthetic oligonucleotide
  Sense strand starting at position 1472 of SEQ ID NO: 916585
ggacguggacucugauacu

SEQ ID NO: 1168191 - RNA, 19 nt, Artificial Sequence
  Description of Artificial Sequence: Synthetic oligonucleotide
  Antisense strand to SEQ ID NO: 1168190
aguaucagaguccacgucc

SEQ ID NO: 1168192 - RNA, 19 nt, Artificial Sequence
  Description of Artificial Sequence: Synthetic oligonucleotide
  Sense strand starting at position 1717 of SEQ ID NO: 916585
gcaucagugccaucucugu

SEQ ID NO: 1168193 - RNA, 19 nt, Artificial Sequence
  Description of Artificial Sequence: Synthetic oligonucleotide
  Antisense strand to SEQ ID NO: 1168192
acagagauggcacugaugc

SEQ ID NO: 1168194 - RNA, 19 nt, Artificial Sequence
  Description of Artificial Sequence: Synthetic oligonucleotide
  Sense strand starting at position 1727 of SEQ ID NO: 916585
caucucugucccgagagua

SEQ ID NO: 1168195 - RNA, 19 nt, Artificial Sequence
  Description of Artificial Sequence: Synthetic oligonucleotide
  Antisense strand to SEQ ID NO: 1168194
uacucucgggacagagaug

SEQ ID NO: 1168196 - RNA, 19 nt, Artificial Sequence
  Description of Artificial Sequence: Synthetic oligonucleotide
  Sense strand starting at position 1993 of SEQ ID NO: 916585
ucuagucaaucugucauca

SEQ ID NO: 1168197 - RNA, 19 nt, Artificial Sequence
  Description of Artificial Sequence: Synthetic oligonucleotide
  Antisense strand to SEQ ID NO: 1168196
ugaugacagauugacuaga

SEQ ID NO: 1168198 - RNA, 19 nt, Artificial Sequence
  Description of Artificial Sequence: Synthetic oligonucleotide
  Sense strand starting at position 2031 of SEQ ID NO: 916585
agaguucuccuuuaugacg

SEQ ID NO: 1168199 - RNA, 19 nt, Artificial Sequence
  Description of Artificial Sequence: Synthetic oligonucleotide
  Antisense strand to SEQ ID NO: 1168198
cgucauaaaggagaacucu

SEQ ID NO: 1168200 - RNA, 19 nt, Artificial Sequence
  Description of Artificial Sequence: Synthetic oligonucleotide
  Sense strand starting at position 2039 of SEQ ID NO: 916585
ccuuuaugacguugggaaa

SEQ ID NO: 1168201 - RNA, 19 nt, Artificial Sequence
  Description of Artificial Sequence: Synthetic oligonucleotide
  Antisense strand to SEQ ID NO: 1168200
uuucccaacgucauaaagg

SEQ ID NO: 1168202 - RNA, 19 nt, Artificial Sequence
  Description of Artificial Sequence: Synthetic oligonucleotide
  Sense strand starting at position 2040 of SEQ ID NO: 916585
cuuuaugacguugggaaac

SEQ ID NO: 1168203 - RNA, 19 nt, Artificial Sequence
  Description of Artificial Sequence: Synthetic oligonucleotide
  Antisense strand to SEQ ID NO: 1168202
guuucccaacgucauaaag

SEQ ID NO: 1168204 - RNA, 19 nt, Artificial Sequence
  Description of Artificial Sequence: Synthetic oligonucleotide
  Sense strand starting at position 2057 of SEQ ID NO: 916585
acugaaguuggauaguguu

SEQ ID NO: 1168205 - RNA, 19 nt, Artificial Sequence
  Description of Artificial Sequence: Synthetic oligonucleotide
  Antisense strand to SEQ ID NO: 1168204
aacacuauccaacuucagu

SEQ ID NO: 1168206 - RNA, 19 nt, Artificial Sequence
  Description of Artificial Sequence: Synthetic oligonucleotide
  Sense strand starting at position 2139 of SEQ ID NO: 916585
gcuuacaucugucuaagga

SEQ ID NO: 1168207 - RNA, 19 nt, Artificial Sequence
  Description of Artificial Sequence: Synthetic oligonucleotide
  Antisense strand to SEQ ID NO: 1168206
uccuuagacagauguaagc

SEQ ID NO: 1168208 - RNA, 19 nt, Artificial Sequence
  Description of Artificial Sequence: Synthetic oligonucleotide
  Sense strand starting at position 2156 of SEQ ID NO: 916585
gaaauugaggcuugggaac

SEQ ID NO: 1168209 - RNA, 19 nt, Artificial Sequence
  Description of Artificial Sequence: Synthetic oligonucleotide
  Antisense strand to SEQ ID NO: 1168208
guucccaagccucaauuuc

SEQ ID NO: 1168210 - RNA, 19 nt, Artificial Sequence
  Description of Artificial Sequence: Synthetic oligonucleotide
  Sense strand starting at position 2235 of SEQ ID NO: 916585
ugggaauucuagucuaccu

SEQ ID NO: 1168211 - RNA, 19 nt, Artificial Sequence
  Description of Artificial Sequence: Synthetic oligonucleotide
  Antisense strand to SEQ ID NO: 1168210
agguagacuagaauuccca

SEQ ID NO: 1168212 - RNA, 19 nt, Artificial Sequence
  Description of Artificial Sequence: Synthetic oligonucleotide
  Sense strand starting at position 2612 of SEQ ID NO: 916585
gcccauagaguggguuuaa

SEQ ID NO: 1168213 - RNA, 19 nt, Artificial Sequence
  Description of Artificial Sequence: Synthetic oligonucleotide
  Antisense strand to SEQ ID NO: 1168212
uuaaacccacucuaugggc

SEQ ID NO: 1168214 - RNA, 19 nt, Artificial Sequence
  Description of Artificial Sequence: Synthetic oligonucleotide
  Sense strand starting at position 2621 of SEQ ID NO: 916585
guggguuuaacagguauua

SEQ ID NO: 1168215 - RNA, 19 nt, Artificial Sequence
  Description of Artificial Sequence: Synthetic oligonucleotide
  Antisense strand to SEQ ID NO: 1168214
uaauaccuguuaaacccac

SEQ ID NO: 1168216 - RNA, 19 nt, Artificial Sequence
  Description of Artificial Sequence: Synthetic oligonucleotide
  Sense strand starting at position 2623 of SEQ ID NO: 916585
ggguuuaacagguauuaug

SEQ ID NO: 1168217 - RNA, 19 nt, Artificial Sequence
  Description of Artificial Sequence: Synthetic oligonucleotide
  Antisense strand to SEQ ID NO: 1168216
cauaauaccuguuaaaccc

SEQ ID NO: 1168218 - RNA, 19 nt, Artificial Sequence
  Description of Artificial Sequence: Synthetic oligonucleotide
  Sense strand starting at position 2842 of SEQ ID NO: 916585
ccugcuugagaggaaucuu

SEQ ID NO: 1168219 - RNA, 19 nt, Artificial Sequence
  Description of Artificial Sequence: Synthetic oligonucleotide
  Antisense strand to SEQ ID NO: 1168218
aagauuccucucaagcagg

SEQ ID NO: 1168220 - RNA, 19 nt, Artificial Sequence
  Description of Artificial Sequence: Synthetic oligonucleotide
  Sense strand starting at position 3062 of SEQ ID NO: 916585
gacuuacucccuuggugau

SEQ ID NO: 1168221 - RNA, 19 nt, Artificial Sequence
  Description of Artificial Sequence: Synthetic oligonucleotide
  Antisense strand to SEQ ID NO: 1168220
aucaccaagggaguaaguc

SEQ ID NO: 1168222 - RNA, 19 nt, Artificial Sequence
  Description of Artificial Sequence: Synthetic oligonucleotide
  Sense strand starting at position 3500 of SEQ ID NO: 916585
ccacauuggcuuugaauuc

SEQ ID NO: 1168223 - RNA, 19 nt, Artificial Sequence
  Description of Artificial Sequence: Synthetic oligonucleotide
  Antisense strand to SEQ ID NO: 1168222
gaauucaaagccaaugugg

SEQ ID NO: 1168224 - RNA, 19 nt, Artificial Sequence
  Description of Artificial Sequence: Synthetic oligonucleotide
  Sense strand starting at position 3554 of SEQ ID NO: 916585
uucuguggugaggaugauu

SEQ ID NO: 1168225 - RNA, 19 nt, Artificial Sequence
  Description of Artificial Sequence: Synthetic oligonucleotide
  Antisense strand to SEQ ID NO: 1168224
aaucauccucaccacagaa

SEQ ID NO: 1168226 - RNA, 19 nt, Artificial Sequence
  Description of Artificial Sequence: Synthetic oligonucleotide
  Sense strand starting at position 3565 of SEQ ID NO: 916585
ggaugauugcaagggcaag

SEQ ID NO: 1168227 - RNA, 19 nt, Artificial Sequence
  Description of Artificial Sequence: Synthetic oligonucleotide
  Antisense strand to SEQ ID NO: 1168226
cuugcccuugcaaucaucc

SEQ ID NO: 1168228 - RNA, 19 nt, Artificial Sequence
  Description of Artificial Sequence: Synthetic oligonucleotide
  Sense strand starting at position 3566 of SEQ ID NO: 916585
gaugauugcaagggcaaga

SEQ ID NO: 1168229 - RNA, 19 nt, Artificial Sequence
  Description of Artificial Sequence: Synthetic oligonucleotide
  Antisense strand to SEQ ID NO: 1168228
ucuugcccuugcaaucauc

SEQ ID NO: 1168230 - RNA, 19 nt, Artificial Sequence
  Description of Artificial Sequence: Synthetic oligonucleotide
  Sense strand starting at position 3636 of SEQ ID NO: 916585
agugguggccuggaguuua

SEQ ID NO: 1168231 - RNA, 19 nt, Artificial Sequence
  Description of Artificial Sequence: Synthetic oligonucleotide
  Antisense strand to SEQ ID NO: 1168230
uaaacuccaggccaccacu

SEQ ID NO: 1168232 - RNA, 19 nt, Artificial Sequence
  Description of Artificial Sequence: Synthetic oligonucleotide
  Sense strand starting at position 3927 of SEQ ID NO: 916585
aggauaugccagggacuca

SEQ ID NO: 1168233 - RNA, 19 nt, Artificial Sequence
  Description of Artificial Sequence: Synthetic oligonucleotide
  Antisense strand to SEQ ID NO: 1168232
ugagucccuggcauauccu

SEQ ID NO: 1168234 - RNA, 19 nt, Artificial Sequence
  Description of Artificial Sequence: Synthetic oligonucleotide
  Sense strand starting at position 284 of SEQ ID NO: 916586
gaaucuaucugggucaacu

SEQ ID NO: 1168235 - RNA, 19 nt, Artificial Sequence
  Description of Artificial Sequence: Synthetic oligonucleotide
  Antisense strand to SEQ ID NO: 1168234
aguugacccagauagauuc

SEQ ID NO: 1168236 - RNA, 19 nt, Artificial Sequence
  Description of Artificial Sequence: Synthetic oligonucleotide
  Sense strand starting at position 301 of SEQ ID NO: 916586
cugcaaguuccagacuguu

SEQ ID NO: 1168237 - RNA, 19 nt, Artificial Sequence
  Description of Artificial Sequence: Synthetic oligonucleotide
  Antisense strand to SEQ ID NO: 1168236
aacagucuggaacuugcag

SEQ ID NO: 1168238 - RNA, 19 nt, Artificial Sequence
  Description of Artificial Sequence: Synthetic oligonucleotide
  Sense strand starting at position 309 of SEQ ID NO: 916586
uccagacuguuagcugaaa

SEQ ID NO: 1168239 - RNA, 19 nt, Artificial Sequence
  Description of Artificial Sequence: Synthetic oligonucleotide
  Antisense strand to SEQ ID NO: 1168238
uuucagcuaacagucugga

SEQ ID NO: 1168240 - RNA, 19 nt, Artificial Sequence
  Description of Artificial Sequence: Synthetic oligonucleotide
  Sense strand starting at position 933 of SEQ ID NO: 916586
acugguaccucugcuaaca

SEQ ID NO: 1168241 - RNA, 19 nt, Artificial Sequence
  Description of Artificial Sequence: Synthetic oligonucleotide
  Antisense strand to SEQ ID NO: 1168240
uguuagcagagguaccagu

SEQ ID NO: 1168242 - RNA, 19 nt, Artificial Sequence
  Description of Artificial Sequence: Synthetic oligonucleotide
  Sense strand starting at position 1291 of SEQ ID NO: 916586
gagagaggccgucauucuu

SEQ ID NO: 1168243 - RNA, 19 nt, Artificial Sequence
  Description of Artificial Sequence: Synthetic oligonucleotide
  Antisense strand to SEQ ID NO: 1168242
aagaaugacggccucucuc

SEQ ID NO: 1168244 - RNA, 19 nt, Artificial Sequence
  Description of Artificial Sequence: Synthetic oligonucleotide
  Sense strand starting at position 1493 of SEQ ID NO: 916586
acaaguuaucggugcagaa

SEQ ID NO: 1168245 - RNA, 19 nt, Artificial Sequence
  Description of Artificial Sequence: Synthetic oligonucleotide
  Antisense strand to SEQ ID NO: 1168244
uucugcaccgauaacuugu

SEQ ID NO: 1168246 - RNA, 19 nt, Artificial Sequence
  Description of Artificial Sequence: Synthetic oligonucleotide
  Sense strand starting at position 1575 of SEQ ID NO: 916586
cuaccagcuuccguagaga

SEQ ID NO: 1168247 - RNA, 19 nt, Artificial Sequence
  Description of Artificial Sequence: Synthetic oligonucleotide
  Antisense strand to SEQ ID NO: 1168246
ucucuacggaagcugguag

SEQ ID NO: 1168248 - RNA, 19 nt, Artificial Sequence
  Description of Artificial Sequence: Synthetic oligonucleotide
  Sense strand starting at position 2092 of SEQ ID NO: 916586
cagugagugucuccaccaa

SEQ ID NO: 1168249 - RNA, 19 nt, Artificial Sequence
  Description of Artificial Sequence: Synthetic oligonucleotide
  Antisense strand to SEQ ID NO: 1168248
uugguggagacacucacug

SEQ ID NO: 1168250 - RNA, 19 nt, Artificial Sequence
  Description of Artificial Sequence: Synthetic oligonucleotide
  Sense strand starting at position 2249 of SEQ ID NO: 916586
cggaccuuugcucaggaau

SEQ ID NO: 1168251 - RNA, 19 nt, Artificial Sequence
  Description of Artificial Sequence: Synthetic oligonucleotide
  Antisense strand to SEQ ID NO: 1168250
auuccugagcaaagguccg

SEQ ID NO: 1168252 - RNA, 19 nt, Artificial Sequence
  Description of Artificial Sequence: Synthetic oligonucleotide
  Sense strand starting at position 2252 of SEQ ID NO: 916586
accuuugcucaggaaucua

SEQ ID NO: 1168253 - RNA, 19 nt, Artificial Sequence
  Description of Artificial Sequence: Synthetic oligonucleotide
  Antisense strand to SEQ ID NO: 1168252
uagauuccugagcaaaggu

SEQ ID NO: 1168254 - RNA, 19 nt, Artificial Sequence
  Description of Artificial Sequence: Synthetic oligonucleotide
  Sense strand starting at position 2274 of SEQ ID NO: 916586
gcauuaaaccuuugagcua

SEQ ID NO: 1168255 - RNA, 19 nt, Artificial Sequence
  Description of Artificial Sequence: Synthetic oligonucleotide
  Antisense strand to SEQ ID NO: 1168254
uagcucaaagguuuaaugc

SEQ ID NO: 1168256 - RNA, 19 nt, Artificial Sequence
  Description of Artificial Sequence: Synthetic oligonucleotide
  Sense strand starting at position 2281 of SEQ ID NO: 916586
accuuugagcuagguacua

SEQ ID NO: 1168257 - RNA, 19 nt, Artificial Sequence
  Description of Artificial Sequence: Synthetic oligonucleotide
  Antisense strand to SEQ ID NO: 1168256
uaguaccuagcucaaaggu

SEQ ID NO: 1168258 - RNA, 19 nt, Artificial Sequence
  Description of Artificial Sequence: Synthetic oligonucleotide
  Sense strand starting at position 2296 of SEQ ID NO: 916586
acuauuauaucaccgucuu

SEQ ID NO: 1168259 - RNA, 19 nt, Artificial Sequence
  Description of Artificial Sequence: Synthetic oligonucleotide
  Antisense strand to SEQ ID NO: 1168258
aagacggugauauaauagu

SEQ ID NO: 1168260 - RNA, 19 nt, Artificial Sequence
  Description of Artificial Sequence: Synthetic oligonucleotide
  Sense strand starting at position 2297 of SEQ ID NO: 916586
cuauuauaucaccgucuua

SEQ ID NO: 1168261 - RNA, 19 nt, Artificial Sequence
  Description of Artificial Sequence: Synthetic oligonucleotide
  Antisense strand to SEQ ID NO: 1168260
uaagacggugauauaauag

SEQ ID NO: 1168262 - RNA, 19 nt, Artificial Sequence
  Description of Artificial Sequence: Synthetic oligonucleotide
  Sense strand starting at position 2392 of SEQ ID NO: 916586
guuugaacccuacagaguu

SEQ ID NO: 1168263 - RNA, 19 nt, Artificial Sequence
  Description of Artificial Sequence: Synthetic oligonucleotide
  Antisense strand to SEQ ID NO: 1168262
aacucuguaggguucaaac

SEQ ID NO: 1168264 - RNA, 19 nt, Artificial Sequence
  Description of Artificial Sequence: Synthetic oligonucleotide
  Sense strand starting at position 2435 of SEQ ID NO: 916586
cugggagugguggaaguau

SEQ ID NO: 1168265 - RNA, 19 nt, Artificial Sequence
  Description of Artificial Sequence: Synthetic oligonucleotide
  Antisense strand to SEQ ID NO: 1168264
auacuuccaccacucccag

SEQ ID NO: 1168266 - RNA, 19 nt, Artificial Sequence
  Description of Artificial Sequence: Synthetic oligonucleotide
  Sense strand starting at position 2443 of SEQ ID NO: 916586
gguggaaguaugugggauu

SEQ ID NO: 1168267 - RNA, 19 nt, Artificial Sequence
  Description of Artificial Sequence: Synthetic oligonucleotide
  Antisense strand to SEQ ID NO: 1168266
aaucccacauacuuccacc

SEQ ID NO: 1168268 - RNA, 19 nt, Artificial Sequence
  Description of Artificial Sequence: Synthetic oligonucleotide
  Sense strand starting at position 2492 of SEQ ID NO: 916586
cgagaagguguuuaacguu

SEQ ID NO: 1168269 - RNA, 19 nt, Artificial Sequence
  Description of Artificial Sequence: Synthetic oligonucleotide
  Antisense strand to SEQ ID NO: 1168268
aacguuaaacaccuucucg

SEQ ID NO: 1168270 - RNA, 19 nt, Artificial Sequence
  Description of Artificial Sequence: Synthetic oligonucleotide
  Sense strand starting at position 2522 of SEQ ID NO: 916586
uugauugcccagugauagu

SEQ ID NO: 1168271 - RNA, 19 nt, Artificial Sequence
  Description of Artificial Sequence: Synthetic oligonucleotide
  Antisense strand to SEQ ID NO: 1168270
acuaucacugggcaaucaa

SEQ ID NO: 1168272 - RNA, 19 nt, Artificial Sequence
  Description of Artificial Sequence: Synthetic oligonucleotide
  Sense strand starting at position 2545 of SEQ ID NO: 916586
ggcccugcuaucuaggaaa

SEQ ID NO: 1168273 - RNA, 19 nt, Artificial Sequence
  Description of Artificial Sequence: Synthetic oligonucleotide
  Antisense strand to SEQ ID NO: 1168272
uuuccuagauagcagggcc

SEQ ID NO: 1168274 - RNA, 19 nt, Artificial Sequence
  Description of Artificial Sequence: Synthetic oligonucleotide
  Sense strand starting at position 2711 of SEQ ID NO: 916586
agcaguuugcaagaugagu

SEQ ID NO: 1168275 - RNA, 19 nt, Artificial Sequence
  Description of Artificial Sequence: Synthetic oligonucleotide
  Antisense strand to SEQ ID NO: 1168274
acucaucuugcaaacugcu

SEQ ID NO: 1168276 - RNA, 19 nt, Artificial Sequence
  Description of Artificial Sequence: Synthetic oligonucleotide
  Sense strand starting at position 2713 of SEQ ID NO: 916586
caguuugcaagaugagugu

SEQ ID NO: 1168277 - RNA, 19 nt, Artificial Sequence
  Description of Artificial Sequence: Synthetic oligonucleotide
  Antisense strand to SEQ ID NO: 1168276
acacucaucuugcaaacug

SEQ ID NO: 1168278 - RNA, 19 nt, Artificial Sequence
  Description of Artificial Sequence: Synthetic oligonucleotide
  Sense strand starting at position 2733 of SEQ ID NO: 916586
uuguaccuaucaguuuauu

SEQ ID NO: 1168279 - RNA, 19 nt, Artificial Sequence
  Description of Artificial Sequence: Synthetic oligonucleotide
  Antisense strand to SEQ ID NO: 1168278
aauaaacugauagguacaa

SEQ ID NO: 1168280 - RNA, 19 nt, Artificial Sequence
  Description of Artificial Sequence: Synthetic oligonucleotide
  Sense strand starting at position 3600 of SEQ ID NO: 916586
ugcuuaucaguuuagauug

SEQ ID NO: 1168281 - RNA, 19 nt, Artificial Sequence
  Description of Artificial Sequence: Synthetic oligonucleotide
  Antisense strand to SEQ ID NO: 1168280
caaucuaaacugauaagca

SEQ ID NO: 1168282 - RNA, 19 nt, Artificial Sequence
  Description of Artificial Sequence: Synthetic oligonucleotide
  Sense strand starting at position 3733 of SEQ ID NO: 916586
agcgcugacauguaucuuu

SEQ ID NO: 1168283 - RNA, 19 nt, Artificial Sequence
  Description of Artificial Sequence: Synthetic oligonucleotide
  Antisense strand to SEQ ID NO: 1168282
aaagauacaugucagcgcu

SEQ ID NO: 1168284 - RNA, 19 nt, Artificial Sequence
  Description of Artificial Sequence: Synthetic oligonucleotide
  Sense strand starting at position 3738 of SEQ ID NO: 916586
ugacauguaucuuuguuga

SEQ ID NO: 1168285 - RNA, 19 nt, Artificial Sequence
  Description of Artificial Sequence: Synthetic oligonucleotide
  Antisense strand to SEQ ID NO: 1168284
ucaacaaagauacauguca

SEQ ID NO: 1168286 - RNA, 19 nt, Artificial Sequence
  Description of Artificial Sequence: Synthetic oligonucleotide
  Sense strand starting at position 3740 of SEQ ID NO: 916586
acauguaucuuuguugacu

SEQ ID NO: 1168287 - RNA, 19 nt, Artificial Sequence
  Description of Artificial Sequence: Synthetic oligonucleotide
  Antisense strand to SEQ ID NO: 1168286
agucaacaaagauacaugu

SEQ ID NO: 1168288 - RNA, 19 nt, Artificial Sequence
  Description of Artificial Sequence: Synthetic oligonucleotide
  Sense strand starting at position 3746 of SEQ ID NO: 916586
aucuuuguugacugcuuaa

SEQ ID NO: 1168289 - RNA, 19 nt, Artificial Sequence
  Description of Artificial Sequence: Synthetic oligonucleotide
  Antisense strand to SEQ ID NO: 1168288
uuaagcagucaacaaagau

SEQ ID NO: 1168290 - RNA, 19 nt, Artificial Sequence
  Description of Artificial Sequence: Synthetic oligonucleotide
  Sense strand starting at position 3809 of SEQ ID NO: 916586
acaggaaucugucuagagu

SEQ ID NO: 1168291 - RNA, 19 nt, Artificial Sequence
  Description of Artificial Sequence: Synthetic oligonucleotide
  Antisense strand to SEQ ID NO: 1168290
acucuagacagauuccugu

SEQ ID NO: 1168292 - RNA, 19 nt, Artificial Sequence
  Description of Artificial Sequence: Synthetic oligonucleotide
  Sense strand starting at position 3810 of SEQ ID NO: 916586
caggaaucugucuagaguc

SEQ ID NO: 1168293 - RNA, 19 nt, Artificial Sequence
  Description of Artificial Sequence: Synthetic oligonucleotide
  Antisense strand to SEQ ID NO: 1168292
gacucuagacagauuccug

SEQ ID NO: 1168294 - RNA, 19 nt, Artificial Sequence
  Description of Artificial Sequence: Synthetic oligonucleotide
  Sense strand starting at position 3812 of SEQ ID NO: 916586
ggaaucugucuagagucau

SEQ ID NO: 1168295 - RNA, 19 nt, Artificial Sequence
  Description of Artificial Sequence: Synthetic oligonucleotide
  Antisense strand to SEQ ID NO: 1168294
augacucuagacagauucc

SEQ ID NO: 1168296 - RNA, 19 nt, Artificial Sequence
  Description of Artificial Sequence: Synthetic oligonucleotide
  Sense strand starting at position 3855 of SEQ ID NO: 916586
auuagaacgcuccagaauu

SEQ ID NO: 1168297 - RNA, 19 nt, Artificial Sequence
  Description of Artificial Sequence: Synthetic oligonucleotide
  Antisense strand to SEQ ID NO: 1168296
aauucuggagcguucuaau

SEQ ID NO: 1168298 - RNA, 19 nt, Artificial Sequence
  Description of Artificial Sequence: Synthetic oligonucleotide
  Sense strand starting at position 3869 of SEQ ID NO: 916586
gaauuagaguaucuugauu

SEQ ID NO: 1168299 - RNA, 19 nt, Artificial Sequence
  Description of Artificial Sequence: Synthetic oligonucleotide
  Antisense strand to SEQ ID NO: 1168298
aaucaagauacucuaauuc

SEQ ID NO: 1168300 - RNA, 19 nt, Artificial Sequence
  Description of Artificial Sequence: Synthetic oligonucleotide
  Sense strand starting at position 3874 of SEQ ID NO: 916586
agaguaucuugauuccaga

SEQ ID NO: 1168301 - RNA, 19 nt, Artificial Sequence
  Description of Artificial Sequence: Synthetic oligonucleotide
  Antisense strand to SEQ ID NO: 1168300
ucuggaaucaagauacucu

SEQ ID NO: 1168302 - RNA, 19 nt, Artificial Sequence
  Description of Artificial Sequence: Synthetic oligonucleotide
  Sense strand starting at position 3887 of SEQ ID NO: 916586
uccagagucguauguauau

SEQ ID NO: 1168303 - RNA, 19 nt, Artificial Sequence
  Description of Artificial Sequence: Synthetic oligonucleotide
  Antisense strand to SEQ ID NO: 1168302
auauacauacgacucugga

SEQ ID NO: 1168304 - RNA, 19 nt, Artificial Sequence
  Description of Artificial Sequence: Synthetic oligonucleotide
  Sense strand starting at position 3889 of SEQ ID NO: 916586
cagagucguauguauaugu

SEQ ID NO: 1168305 - RNA, 19 nt, Artificial Sequence
  Description of Artificial Sequence: Synthetic oligonucleotide
  Antisense strand to SEQ ID NO: 1168304
acauauacauacgacucug

SEQ ID NO: 1168306 - RNA, 19 nt, Artificial Sequence
  Description of Artificial Sequence: Synthetic oligonucleotide
  Sense strand starting at position 3919 of SEQ ID NO: 916586
uauguauaugaaugugcaa

SEQ ID NO: 1168307 - RNA, 19 nt, Artificial Sequence
  Description of Artificial Sequence: Synthetic oligonucleotide
  Antisense strand to SEQ ID NO: 1168306
uugcacauucauauacaua

SEQ ID NO: 1168308 - RNA, 19 nt, Artificial Sequence
  Description of Artificial Sequence: Synthetic oligonucleotide
  Sense strand starting at position 3922 of SEQ ID NO: 916586
guauaugaaugugcaauca

SEQ ID NO: 1168309 - RNA, 19 nt, Artificial Sequence
  Description of Artificial Sequence: Synthetic oligonucleotide
  Antisense strand to SEQ ID NO: 1168308
ugauugcacauucauauac

SEQ ID NO: 1168310 - RNA, 19 nt, Artificial Sequence
  Description of Artificial Sequence: Synthetic oligonucleotide
  Sense strand starting at position 3932 of SEQ ID NO: 916586
gugcaaucauauguauaug

SEQ ID NO: 1168311 - RNA, 19 nt, Artificial Sequence
  Description of Artificial Sequence: Synthetic oligonucleotide
  Antisense strand to SEQ ID NO: 1168310
cauauacauaugauugcac

SEQ ID NO: 1168312 - RNA, 19 nt, Artificial Sequence
  Description of Artificial Sequence: Synthetic oligonucleotide
  Sense strand starting at position 3948 of SEQ ID NO: 916586
augucuguauauguguaua

SEQ ID NO: 1168313 - RNA, 19 nt, Artificial Sequence
  Description of Artificial Sequence: Synthetic oligonucleotide
  Antisense strand to SEQ ID NO: 1168312
uauacacauauacagacau

SEQ ID NO: 1168314 - RNA, 19 nt, Artificial Sequence
  Description of Artificial Sequence: Synthetic oligonucleotide
  Sense strand starting at position 45 of SEQ ID NO: 916587
uguguuagacuccacaaau

SEQ ID NO: 1168315 - RNA, 19 nt, Artificial Sequence
  Description of Artificial Sequence: Synthetic oligonucleotide
  Antisense strand to SEQ ID NO: 1168314
auuuguggagucuaacaca

SEQ ID NO: 1168316 - RNA, 19 nt, Artificial Sequence
  Description of Artificial Sequence: Synthetic oligonucleotide
  Sense strand starting at position 217 of SEQ ID NO: 916587
ggcaaauaccucuauguaa

SEQ ID NO: 1168317 - RNA, 19 nt, Artificial Sequence
  Description of Artificial Sequence: Synthetic oligonucleotide
  Antisense strand to SEQ ID NO: 1168316
uuacauagagguauuugcc

SEQ ID NO: 1168318 - RNA, 19 nt, Artificial Sequence
  Description of Artificial Sequence: Synthetic oligonucleotide
  Sense strand starting at position 779 of SEQ ID NO: 916587
gcaguagguaccgaucuaa

SEQ ID NO: 1168319 - RNA, 19 nt, Artificial Sequence
  Description of Artificial Sequence: Synthetic oligonucleotide
  Antisense strand to SEQ ID NO: 1168318
uuagaucgguaccuacugc

SEQ ID NO: 1168320 - RNA, 19 nt, Artificial Sequence
  Description of Artificial Sequence: Synthetic oligonucleotide
  Sense strand starting at position 985 of SEQ ID NO: 916587
acacuuauguucucuauug

SEQ ID NO: 1168321 - RNA, 19 nt, Artificial Sequence
  Description of Artificial Sequence: Synthetic oligonucleotide
  Antisense strand to SEQ ID NO: 1168320
caauagagaacauaagugu

SEQ ID NO: 1168322 - RNA, 19 nt, Artificial Sequence
  Description of Artificial Sequence: Synthetic oligonucleotide
  Sense strand starting at position 987 of SEQ ID NO: 916587
acuuauguucucuauugag

SEQ ID NO: 1168323 - RNA, 19 nt, Artificial Sequence
  Description of Artificial Sequence: Synthetic oligonucleotide
  Antisense strand to SEQ ID NO: 1168322
cucaauagagaacauaagu

SEQ ID NO: 1168324 - RNA, 19 nt, Artificial Sequence
  Description of Artificial Sequence: Synthetic oligonucleotide
  Sense strand starting at position 1140 of SEQ ID NO: 916587
cccagauugucuguggaau

SEQ ID NO: 1168325 - RNA, 19 nt, Artificial Sequence
  Description of Artificial Sequence: Synthetic oligonucleotide
  Antisense strand to SEQ ID NO: 1168324
auuccacagacaaucuggg

SEQ ID NO: 1168326 - RNA, 19 nt, Artificial Sequence
  Description of Artificial Sequence: Synthetic oligonucleotide
  Sense strand starting at position 1148 of SEQ ID NO: 916587
gucuguggaauugggauua

SEQ ID NO: 1168327 - RNA, 19 nt, Artificial Sequence
  Description of Artificial Sequence: Synthetic oligonucleotide
  Antisense strand to SEQ ID NO: 1168326
uaaucccaauuccacagac

SEQ ID NO: 1168328 - RNA, 19 nt, Artificial Sequence
  Description of Artificial Sequence: Synthetic oligonucleotide
  Sense strand starting at position 1191 of SEQ ID NO: 916587
uuaauuacuguauggguca

SEQ ID NO: 1168329 - RNA, 19 nt, Artificial Sequence
  Description of Artificial Sequence: Synthetic oligonucleotide
  Antisense strand to SEQ ID NO: 1168328
ugacccauacaguaauuaa

SEQ ID NO: 1168330 - RNA, 19 nt, Artificial Sequence
  Description of Artificial Sequence: Synthetic oligonucleotide
  Sense strand starting at position 1386 of SEQ ID NO: 916587
agcccuccgauguauagaa

SEQ ID NO: 1168331 - RNA, 19 nt, Artificial Sequence
  Description of Artificial Sequence: Synthetic oligonucleotide
  Antisense strand to SEQ ID NO: 1168330
uucuauacaucggagggcu

SEQ ID NO: 1168332 - RNA, 19 nt, Artificial Sequence
  Description of Artificial Sequence: Synthetic oligonucleotide
  Sense strand starting at position 1388 of SEQ ID NO: 916587
cccuccgauguauagaauu

SEQ ID NO: 1168333 - RNA, 19 nt, Artificial Sequence
  Description of Artificial Sequence: Synthetic oligonucleotide
  Antisense strand to SEQ ID NO: 1168332
aauucuauacaucggaggg

SEQ ID NO: 1168334 - RNA, 19 nt, Artificial Sequence
  Description of Artificial Sequence: Synthetic oligonucleotide
  Sense strand starting at position 1456 of SEQ ID NO: 916587
cuccgugaaacuggaugau

SEQ ID NO: 1168335 - RNA, 19 nt, Artificial Sequence
  Description of Artificial Sequence: Synthetic oligonucleotide
  Antisense strand to SEQ ID NO: 1168334
aucauccaguuucacggag

SEQ ID NO: 1168336 - RNA, 19 nt, Artificial Sequence
  Description of Artificial Sequence: Synthetic oligonucleotide
  Sense strand starting at position 1634 of SEQ ID NO: 916587
auaaguugucaucaucauc

SEQ ID NO: 1168337 - RNA, 19 nt, Artificial Sequence
  Description of Artificial Sequence: Synthetic oligonucleotide
  Antisense strand to SEQ ID NO: 1168336
gaugaugaugacaacuuau

SEQ ID NO: 1168338 - RNA, 19 nt, Artificial Sequence
  Description of Artificial Sequence: Synthetic oligonucleotide
  Sense strand starting at position 1734 of SEQ ID NO: 916587
cccauucuucggugaauuu

SEQ ID NO: 1168339 - RNA, 19 nt, Artificial Sequence
  Description of Artificial Sequence: Synthetic oligonucleotide
  Antisense strand to SEQ ID NO: 1168338
aaauucaccgaagaauggg

SEQ ID NO: 1168340 - RNA, 19 nt, Artificial Sequence
  Description of Artificial Sequence: Synthetic oligonucleotide
  Sense strand starting at position 1761 of SEQ ID NO: 916587
gggcuaacacugggauucu

SEQ ID NO: 1168341 - RNA, 19 nt, Artificial Sequence
  Description of Artificial Sequence: Synthetic oligonucleotide
  Antisense strand to SEQ ID NO: 1168340
agaaucccaguguuagccc

SEQ ID NO: 1168342 - RNA, 19 nt, Artificial Sequence
  Description of Artificial Sequence: Synthetic oligonucleotide
  Sense strand starting at position 1772 of SEQ ID NO: 916587
gggauucuuucccuguaca

SEQ ID NO: 1168343 - RNA, 19 nt, Artificial Sequence
  Description of Artificial Sequence: Synthetic oligonucleotide
  Antisense strand to SEQ ID NO: 1168342
uguacagggaaagaauccc

SEQ ID NO: 1168344 - RNA, 19 nt, Artificial Sequence
  Description of Artificial Sequence: Synthetic oligonucleotide
  Sense strand starting at position 1951 of SEQ ID NO: 916587
ugagcuucugcagaaguau

SEQ ID NO: 1168345 - RNA, 19 nt, Artificial Sequence
  Description of Artificial Sequence: Synthetic oligonucleotide
  Antisense strand to SEQ ID NO: 1168344
auacuucugcagaagcuca

SEQ ID NO: 1168346 - RNA, 19 nt, Artificial Sequence
  Description of Artificial Sequence: Synthetic oligonucleotide
  Sense strand starting at position 2058 of SEQ ID NO: 916587
acgcaaauucuugaguuau

SEQ ID NO: 1168347 - RNA, 19 nt, Artificial Sequence
  Description of Artificial Sequence: Synthetic oligonucleotide
  Antisense strand to SEQ ID NO: 1168346
auaacucaagaauuugcgu

SEQ ID NO: 1168348 - RNA, 19 nt, Artificial Sequence
  Description of Artificial Sequence: Synthetic oligonucleotide
  Sense strand starting at position 2078 of SEQ ID NO: 916587
uguauugcagguggagaaa

SEQ ID NO: 1168349 - RNA, 19 nt, Artificial Sequence
  Description of Artificial Sequence: Synthetic oligonucleotide
  Antisense strand to SEQ ID NO: 1168348
uuucuccaccugcaauaca

SEQ ID NO: 1168350 - RNA, 19 nt, Artificial Sequence
  Description of Artificial Sequence: Synthetic oligonucleotide
  Sense strand starting at position 2117 of SEQ ID NO: 916587
ucaggauauuucgcuaagu

SEQ ID NO: 1168351 - RNA, 19 nt, Artificial Sequence
  Description of Artificial Sequence: Synthetic oligonucleotide
  Antisense strand to SEQ ID NO: 1168350
acuuagcgaaauauccuga

SEQ ID NO: 1168352 - RNA, 19 nt, Artificial Sequence
  Description of Artificial Sequence: Synthetic oligonucleotide
  Sense strand starting at position 2130 of SEQ ID NO: 916587
cuaaguaauuuaugaaagg

SEQ ID NO: 1168353 - RNA, 19 nt, Artificial Sequence
  Description of Artificial Sequence: Synthetic oligonucleotide
  Antisense strand to SEQ ID NO: 1168352
ccuuucauaaauuacuuag

SEQ ID NO: 1168354 - RNA, 19 nt, Artificial Sequence
  Description of Artificial Sequence: Synthetic oligonucleotide
  Sense strand starting at position 2401 of SEQ ID NO: 916587
gggugaaucacauauggcu

SEQ ID NO: 1168355 - RNA, 19 nt, Artificial Sequence
  Description of Artificial Sequence: Synthetic oligonucleotide
  Antisense strand to SEQ ID NO: 1168354
agccauaugugauucaccc

SEQ ID NO: 1168356 - RNA, 19 nt, Artificial Sequence
  Description of Artificial Sequence: Synthetic oligonucleotide
  Sense strand starting at position 2509 of SEQ ID NO: 916587
gagcacuuugaaugcagaa

SEQ ID NO: 1168357 - RNA, 19 nt, Artificial Sequence
  Description of Artificial Sequence: Synthetic oligonucleotide
  Antisense strand to SEQ ID NO: 1168356
uucugcauucaaagugcuc

SEQ ID NO: 1168358 - RNA, 19 nt, Artificial Sequence
  Description of Artificial Sequence: Synthetic oligonucleotide
  Sense strand starting at position 2554 of SEQ ID NO: 916587
gucuacaaucuugggaaau

SEQ ID NO: 1168359 - RNA, 19 nt, Artificial Sequence
  Description of Artificial Sequence: Synthetic oligonucleotide
  Antisense strand to SEQ ID NO: 1168358
auuucccaagauuguagac

SEQ ID NO: 1168360 - RNA, 19 nt, Artificial Sequence
  Description of Artificial Sequence: Synthetic oligonucleotide
  Sense strand starting at position 2591 of SEQ ID NO: 916587
ugucuuugucuggaaauua

SEQ ID NO: 1168361 - RNA, 19 nt, Artificial Sequence
  Description of Artificial Sequence: Synthetic oligonucleotide
  Antisense strand to SEQ ID NO: 1168360
uaauuuccagacaaagaca

SEQ ID NO: 1168362 - RNA, 19 nt, Artificial Sequence
  Description of Artificial Sequence: Synthetic oligonucleotide
  Sense strand starting at position 2707 of SEQ ID NO: 916587
aaaugacaugcuggguaaa

SEQ ID NO: 1168363 - RNA, 19 nt, Artificial Sequence
  Description of Artificial Sequence: Synthetic oligonucleotide
  Antisense strand to SEQ ID NO: 1168362
uuuacccagcaugucauuu

SEQ ID NO: 1168364 - RNA, 19 nt, Artificial Sequence
  Description of Artificial Sequence: Synthetic oligonucleotide
  Sense strand starting at position 2740 of SEQ ID NO: 916587
uuacacuagguuugugaaa

SEQ ID NO: 1168365 - RNA, 19 nt, Artificial Sequence
  Description of Artificial Sequence: Synthetic oligonucleotide
  Antisense strand to SEQ ID NO: 1168364
uuucacaaaccuaguguaa

SEQ ID NO: 1168366 - RNA, 19 nt, Artificial Sequence
  Description of Artificial Sequence: Synthetic oligonucleotide
  Sense strand starting at position 2783 of SEQ ID NO: 916587
aaaugacacgcugguuaaa

SEQ ID NO: 1168367 - RNA, 19 nt, Artificial Sequence
  Description of Artificial Sequence: Synthetic oligonucleotide
  Antisense strand to SEQ ID NO: 1168366
uuuaaccagcgugucauuu

SEQ ID NO: 1168368 - RNA, 19 nt, Artificial Sequence
  Description of Artificial Sequence: Synthetic oligonucleotide
  Sense strand starting at position 2813 of SEQ ID NO: 916587
uuguacuuggagcauaaua

SEQ ID NO: 1168369 - RNA, 19 nt, Artificial Sequence
  Description of Artificial Sequence: Synthetic oligonucleotide
  Antisense strand to SEQ ID NO: 1168368
uauuaugcuccaaguacaa

SEQ ID NO: 1168370 - RNA, 19 nt, Artificial Sequence
  Description of Artificial Sequence: Synthetic oligonucleotide
  Sense strand starting at position 2956 of SEQ ID NO: 916587
acccauaaguaugucuaua

SEQ ID NO: 1168371 - RNA, 19 nt, Artificial Sequence
  Description of Artificial Sequence: Synthetic oligonucleotide
  Antisense strand to SEQ ID NO: 1168370
uauagacauacuuaugggu

SEQ ID NO: 1168372 - RNA, 19 nt, Artificial Sequence
  Description of Artificial Sequence: Synthetic oligonucleotide
  Sense strand starting at position 2958 of SEQ ID NO: 916587
ccauaaguaugucuauaug

SEQ ID NO: 1168373 - RNA, 19 nt, Artificial Sequence
  Description of Artificial Sequence: Synthetic oligonucleotide
  Antisense strand to SEQ ID NO: 1168372
cauauagacauacuuaugg

SEQ ID NO: 1168374 - RNA, 19 nt, Artificial Sequence
  Description of Artificial Sequence: Synthetic oligonucleotide
  Sense strand starting at position 3045 of SEQ ID NO: 916587
augucuucugaaggaagua

SEQ ID NO: 1168375 - RNA, 19 nt, Artificial Sequence
  Description of Artificial Sequence: Synthetic oligonucleotide
  Antisense strand to SEQ ID NO: 1168374
uacuuccuucagaagacau

SEQ ID NO: 1168376 - RNA, 19 nt, Artificial Sequence
  Description of Artificial Sequence: Synthetic oligonucleotide
  Sense strand starting at position 3046 of SEQ ID NO: 916587
ugucuucugaaggaaguau

SEQ ID NO: 1168377 - RNA, 19 nt, Artificial Sequence
  Description of Artificial Sequence: Synthetic oligonucleotide
  Antisense strand to SEQ ID NO: 1168376
auacuuccuucagaagaca

SEQ ID NO: 1168378 - RNA, 19 nt, Artificial Sequence
  Description of Artificial Sequence: Synthetic oligonucleotide
  Sense strand starting at position 3076 of SEQ ID NO: 916587
augauaugauaucuggcau

SEQ ID NO: 1168379 - RNA, 19 nt, Artificial Sequence
  Description of Artificial Sequence: Synthetic oligonucleotide
  Antisense strand to SEQ ID NO: 1168378
augccagauaucauaucau

SEQ ID NO: 1168380 - RNA, 19 nt, Artificial Sequence
  Description of Artificial Sequence: Synthetic oligonucleotide
  Sense strand starting at position 3211 of SEQ ID NO: 916587
uugacagccuaauuaggau

SEQ ID NO: 1168381 - RNA, 19 nt, Artificial Sequence
  Description of Artificial Sequence: Synthetic oligonucleotide
  Antisense strand to SEQ ID NO: 1168380
auccuaauuaggcugucaa

SEQ ID NO: 1168382 - RNA, 19 nt, Artificial Sequence
  Description of Artificial Sequence: Synthetic oligonucleotide
  Sense strand starting at position 3267 of SEQ ID NO: 916587
uuauuaugugcagaguauu

SEQ ID NO: 1168383 - RNA, 19 nt, Artificial Sequence
  Description of Artificial Sequence: Synthetic oligonucleotide
  Antisense strand to SEQ ID NO: 1168382
aauacucugcacauaauaa

SEQ ID NO: 1168384 - RNA, 19 nt, Artificial Sequence
  Description of Artificial Sequence: Synthetic oligonucleotide
  Sense strand starting at position 3277 of SEQ ID NO: 916587
cagaguauuugagaacaaa

SEQ ID NO: 1168385 - RNA, 19 nt, Artificial Sequence
  Description of Artificial Sequence: Synthetic oligonucleotide
  Antisense strand to SEQ ID NO: 1168384
uuuguucucaaauacucug

SEQ ID NO: 1168386 - RNA, 19 nt, Artificial Sequence
  Description of Artificial Sequence: Synthetic oligonucleotide
  Sense strand starting at position 3557 of SEQ ID NO: 916587
gagcgagacucccuuuaaa

SEQ ID NO: 1168387 - RNA, 19 nt, Artificial Sequence
  Description of Artificial Sequence: Synthetic oligonucleotide
  Antisense strand to SEQ ID NO: 1168386
uuuaaagggagucucgcuc

SEQ ID NO: 1168388 - RNA, 19 nt, Artificial Sequence
  Description of Artificial Sequence: Synthetic oligonucleotide
  Sense strand starting at position 3685 of SEQ ID NO: 916587
acauaaaguguuuaccauu

SEQ ID NO: 1168389 - RNA, 19 nt, Artificial Sequence
  Description of Artificial Sequence: Synthetic oligonucleotide
  Antisense strand to SEQ ID NO: 1168388
aaugguaaacacuuuaugu

SEQ ID NO: 1168390 - RNA, 19 nt, Artificial Sequence
  Description of Artificial Sequence: Synthetic oligonucleotide
  Sense strand starting at position 3826 of SEQ ID NO: 916587
caauaacuccugugauggu

SEQ ID NO: 1168391 - RNA, 19 nt, Artificial Sequence
  Description of Artificial Sequence: Synthetic oligonucleotide
  Antisense strand to SEQ ID NO: 1168390
accaucacaggaguuauug

SEQ ID NO: 1168392 - RNA, 19 nt, Artificial Sequence
  Description of Artificial Sequence: Synthetic oligonucleotide
  Sense strand starting at position 3830 of SEQ ID NO: 916587
aacuccugugauggugaau

SEQ ID NO: 1168393 - RNA, 19 nt, Artificial Sequence
  Description of Artificial Sequence: Synthetic oligonucleotide
  Antisense strand to SEQ ID NO: 1168392
auucaccaucacaggaguu

SEQ ID NO: 1168394 - RNA, 19 nt, Artificial Sequence
  Description of Artificial Sequence: Synthetic oligonucleotide
  Sense strand starting at position 150 of SEQ ID NO: 916588
gcaugugucaaagacaguu

SEQ ID NO: 1168395 - RNA, 19 nt, Artificial Sequence
  Description of Artificial Sequence: Synthetic oligonucleotide
  Antisense strand to SEQ ID NO: 1168394
aacugucuuugacacaugc

SEQ ID NO: 1168396 - RNA, 19 nt, Artificial Sequence
  Description of Artificial Sequence: Synthetic oligonucleotide
  Sense strand starting at position 380 of SEQ ID NO: 916588
aagaauuuguauuauggac

SEQ ID NO: 1168397 - RNA, 19 nt, Artificial Sequence
  Description of Artificial Sequence: Synthetic oligonucleotide
  Antisense strand to SEQ ID NO: 1168396
guccauaauacaaauucuu

SEQ ID NO: 1168398 - RNA, 19 nt, Artificial Sequence
  Description of Artificial Sequence: Synthetic oligonucleotide
  Sense strand starting at position 441 of SEQ ID NO: 916588
guuagaugccaugauucgu

SEQ ID NO: 1168399 - RNA, 19 nt, Artificial Sequence
  Description of Artificial Sequence: Synthetic oligonucleotide
  Antisense strand to SEQ ID NO: 1168398
acgaaucauggcaucuaac

SEQ ID NO: 1168400 - RNA, 19 nt, Artificial Sequence
  Description of Artificial Sequence: Synthetic oligonucleotide
  Sense strand starting at position 450 of SEQ ID NO: 916588
caugauucguuguuacacu

SEQ ID NO: 1168401 - RNA, 19 nt, Artificial Sequence
  Description of Artificial Sequence: Synthetic oligonucleotide
  Antisense strand to SEQ ID NO: 1168400
aguguaacaacgaaucaug

SEQ ID NO: 1168402 - RNA, 19 nt, Artificial Sequence
  Description of Artificial Sequence: Synthetic oligonucleotide
  Sense strand starting at position 467 of SEQ ID NO: 916588
cugcaauagcugcagaaua

SEQ ID NO: 1168403 - RNA, 19 nt, Artificial Sequence
  Description of Artificial Sequence: Synthetic oligonucleotide
  Antisense strand to SEQ ID NO: 1168402
uauucugcagcuauugcag

SEQ ID NO: 1168404 - RNA, 19 nt, Artificial Sequence
  Description of Artificial Sequence: Synthetic oligonucleotide
  Sense strand starting at position 469 of SEQ ID NO: 916588
gcaauagcugcagaauaua

SEQ ID NO: 1168405 - RNA, 19 nt, Artificial Sequence
  Description of Artificial Sequence: Synthetic oligonucleotide
  Antisense strand to SEQ ID NO: 1168404
uauauucugcagcuauugc

SEQ ID NO: 1168406 - RNA, 19 nt, Artificial Sequence
  Description of Artificial Sequence: Synthetic oligonucleotide
  Sense strand starting at position 480 of SEQ ID NO: 916588
agaauauacagugguuugu

SEQ ID NO: 1168407 - RNA, 19 nt, Artificial Sequence
  Description of Artificial Sequence: Synthetic oligonucleotide
  Antisense strand to SEQ ID NO: 1168406
acaaaccacuguauauucu

SEQ ID NO: 1168408 - RNA, 19 nt, Artificial Sequence
  Description of Artificial Sequence: Synthetic oligonucleotide
  Sense strand starting at position 560 of SEQ ID NO: 916588
ccaggagacucgcauuuau

SEQ ID NO: 1168409 - RNA, 19 nt, Artificial Sequence
  Description of Artificial Sequence: Synthetic oligonucleotide
  Antisense strand to SEQ ID NO: 1168408
auaaaugcgagucuccugg

SEQ ID NO: 1168410 - RNA, 19 nt, Artificial Sequence
  Description of Artificial Sequence: Synthetic oligonucleotide
  Sense strand starting at position 607 of SEQ ID NO: 916588
uuguauuugguuuggcuua

SEQ ID NO: 1168411 - RNA, 19 nt, Artificial Sequence
  Description of Artificial Sequence: Synthetic oligonucleotide
  Antisense strand to SEQ ID NO: 1168410
uaagccaaaccaaauacaa

SEQ ID NO: 1168412 - RNA, 19 nt, Artificial Sequence
  Description of Artificial Sequence: Synthetic oligonucleotide
  Sense strand starting at position 609 of SEQ ID NO: 916588
guauuugguuuggcuuaga

SEQ ID NO: 1168413 - RNA, 19 nt, Artificial Sequence
  Description of Artificial Sequence: Synthetic oligonucleotide
  Antisense strand to SEQ ID NO: 1168412
ucuaagccaaaccaaauac

SEQ ID NO: 1168414 - RNA, 19 nt, Artificial Sequence
  Description of Artificial Sequence: Synthetic oligonucleotide
  Sense strand starting at position 612 of SEQ ID NO: 916588
uuugguuuggcuuagaaca

SEQ ID NO: 1168415 - RNA, 19 nt, Artificial Sequence
  Description of Artificial Sequence: Synthetic oligonucleotide
  Antisense strand to SEQ ID NO: 1168414
uguucuaagccaaaccaaa

SEQ ID NO: 1168416 - RNA, 19 nt, Artificial Sequence
  Description of Artificial Sequence: Synthetic oligonucleotide
  Sense strand starting at position 647 of SEQ ID NO: 916588
uugagagagucagaucaaa

SEQ ID NO: 1168417 - RNA, 19 nt, Artificial Sequence
  Description of Artificial Sequence: Synthetic oligonucleotide
  Antisense strand to SEQ ID NO: 1168416
uuugaucugacucucucaa

SEQ ID NO: 1168418 - RNA, 19 nt, Artificial Sequence
  Description of Artificial Sequence: Synthetic oligonucleotide
  Sense strand starting at position 1025 of SEQ ID NO: 916588
uuggaagcauucuuacaca

SEQ ID NO: 1168419 - RNA, 19 nt, Artificial Sequence
  Description of Artificial Sequence: Synthetic oligonucleotide
  Antisense strand to SEQ ID NO: 1168418
uguguaagaaugcuuccaa

SEQ ID NO: 1168420 - RNA, 19 nt, Artificial Sequence
  Description of Artificial Sequence: Synthetic oligonucleotide
  Sense strand starting at position 2005 of SEQ ID NO: 916588
uuagaugaguuucucucua

SEQ ID NO: 1168421 - RNA, 19 nt, Artificial Sequence
  Description of Artificial Sequence: Synthetic oligonucleotide
  Antisense strand to SEQ ID NO: 1168420
uagagagaaacucaucuaa

SEQ ID NO: 1168422 - RNA, 19 nt, Artificial Sequence
  Description of Artificial Sequence: Synthetic oligonucleotide
  Sense strand starting at position 2007 of SEQ ID NO: 916588
agaugaguuucucucuaaa

SEQ ID NO: 1168423 - RNA, 19 nt, Artificial Sequence
  Description of Artificial Sequence: Synthetic oligonucleotide
  Antisense strand to SEQ ID NO: 1168422
uuuagagagaaacucaucu

SEQ ID NO: 1168424 - RNA, 19 nt, Artificial Sequence
  Description of Artificial Sequence: Synthetic oligonucleotide
  Sense strand starting at position 2036 of SEQ ID NO: 916588
ugugcaucaaaggguauua

SEQ ID NO: 1168425 - RNA, 19 nt, Artificial Sequence
  Description of Artificial Sequence: Synthetic oligonucleotide
  Antisense strand to SEQ ID NO: 1168424
uaauacccuuugaugcaca

SEQ ID NO: 1168426 - RNA, 19 nt, Artificial Sequence
  Description of Artificial Sequence: Synthetic oligonucleotide
  Sense strand starting at position 2143 of SEQ ID NO: 916588
cagaaaugauguuuaugau

SEQ ID NO: 1168427 - RNA, 19 nt, Artificial Sequence
  Description of Artificial Sequence: Synthetic oligonucleotide
  Antisense strand to SEQ ID NO: 1168426
aucauaaacaucauuucug

SEQ ID NO: 1168428 - RNA, 19 nt, Artificial Sequence
  Description of Artificial Sequence: Synthetic oligonucleotide
  Sense strand starting at position 2210 of SEQ ID NO: 916588
guuuaccaccuagauguaa

SEQ ID NO: 1168429 - RNA, 19 nt, Artificial Sequence
  Description of Artificial Sequence: Synthetic oligonucleotide
  Antisense strand to SEQ ID NO: 1168428
uuacaucuaggugguaaac

SEQ ID NO: 1168430 - RNA, 19 nt, Artificial Sequence
  Description of Artificial Sequence: Synthetic oligonucleotide
  Sense strand starting at position 2235 of SEQ ID NO: 916588
ucucaugaguagucauagu

SEQ ID NO: 1168431 - RNA, 19 nt, Artificial Sequence
  Description of Artificial Sequence: Synthetic oligonucleotide
  Antisense strand to SEQ ID NO: 1168430
acuaugacuacucaugaga

SEQ ID NO: 1168432 - RNA, 19 nt, Artificial Sequence
  Description of Artificial Sequence: Synthetic oligonucleotide
  Sense strand starting at position 2373 of SEQ ID NO: 916588
gauaaauaaugggcuaguu

SEQ ID NO: 1168433 - RNA, 19 nt, Artificial Sequence
  Description of Artificial Sequence: Synthetic oligonucleotide
  Antisense strand to SEQ ID NO: 1168432
aacuagcccauuauuuauc

SEQ ID NO: 1168434 - RNA, 19 nt, Artificial Sequence
  Description of Artificial Sequence: Synthetic oligonucleotide
  Sense strand starting at position 2579 of SEQ ID NO: 916588
agccuaauaguuuaugaca

SEQ ID NO: 1168435 - RNA, 19 nt, Artificial Sequence
  Description of Artificial Sequence: Synthetic oligonucleotide
  Antisense strand to SEQ ID NO: 1168434
ugucauaaacuauuaggcu

SEQ ID NO: 1168436 - RNA, 19 nt, Artificial Sequence
  Description of Artificial Sequence: Synthetic oligonucleotide
  Sense strand starting at position 2963 of SEQ ID NO: 916588
aggucauucuuaguaccaa

SEQ ID NO: 1168437 - RNA, 19 nt, Artificial Sequence
  Description of Artificial Sequence: Synthetic oligonucleotide
  Antisense strand to SEQ ID NO: 1168436
uugguacuaagaaugaccu

SEQ ID NO: 1168438 - RNA, 19 nt, Artificial Sequence
  Description of Artificial Sequence: Synthetic oligonucleotide
  Sense strand starting at position 2985 of SEQ ID NO: 916588
uuagcaauuacaggaggau

SEQ ID NO: 1168439 - RNA, 19 nt, Artificial Sequence
  Description of Artificial Sequence: Synthetic oligonucleotide
  Antisense strand to SEQ ID NO: 1168438
auccuccuguaauugcuaa

SEQ ID NO: 1168440 - RNA, 19 nt, Artificial Sequence
  Description of Artificial Sequence: Synthetic oligonucleotide
  Sense strand starting at position 3142 of SEQ ID NO: 916588
uccugaagucaguagguaa

SEQ ID NO: 1168441 - RNA, 19 nt, Artificial Sequence
  Description of Artificial Sequence: Synthetic oligonucleotide
  Antisense strand to SEQ ID NO: 1168440
uuaccuacugacuucagga

SEQ ID NO: 1168442 - RNA, 19 nt, Artificial Sequence
  Description of Artificial Sequence: Synthetic oligonucleotide
  Sense strand starting at position 3240 of SEQ ID NO: 916588
guaacaucuuaccugugua

SEQ ID NO: 1168443 - RNA, 19 nt, Artificial Sequence
  Description of Artificial Sequence: Synthetic oligonucleotide
  Antisense strand to SEQ ID NO: 1168442
uacacagguaagauguuac

SEQ ID NO: 1168444 - RNA, 19 nt, Artificial Sequence
  Description of Artificial Sequence: Synthetic oligonucleotide
  Sense strand starting at position 3243 of SEQ ID NO: 916588
acaucuuaccuguguauuu

SEQ ID NO: 1168445 - RNA, 19 nt, Artificial Sequence
  Description of Artificial Sequence: Synthetic oligonucleotide
  Antisense strand to SEQ ID NO: 1168444
aaauacacagguaagaugu

SEQ ID NO: 1168446 - RNA, 19 nt, Artificial Sequence
  Description of Artificial Sequence: Synthetic oligonucleotide
  Sense strand starting at position 3262 of SEQ ID NO: 916588
uccauauuguaaguucuca

SEQ ID NO: 1168447 - RNA, 19 nt, Artificial Sequence
  Description of Artificial Sequence: Synthetic oligonucleotide
  Antisense strand to SEQ ID NO: 1168446
ugagaacuuacaauaugga

SEQ ID NO: 1168448 - RNA, 19 nt, Artificial Sequence
  Description of Artificial Sequence: Synthetic oligonucleotide
  Sense strand starting at position 3266 of SEQ ID NO: 916588
uauuguaaguucucaaagg

SEQ ID NO: 1168449 - RNA, 19 nt, Artificial Sequence
  Description of Artificial Sequence: Synthetic oligonucleotide
  Antisense strand to SEQ ID NO: 1168448
ccuuugagaacuuacaaua

SEQ ID NO: 1168450 - RNA, 19 nt, Artificial Sequence
  Description of Artificial Sequence: Synthetic oligonucleotide
  Sense strand starting at position 3280 of SEQ ID NO: 916588
aaaggaauguccucaguag

SEQ ID NO: 1168451 - RNA, 19 nt, Artificial Sequence
  Description of Artificial Sequence: Synthetic oligonucleotide
  Antisense strand to SEQ ID NO: 1168450
cuacugaggacauuccuuu

SEQ ID NO: 1168452 - RNA, 19 nt, Artificial Sequence
  Description of Artificial Sequence: Synthetic oligonucleotide
  Sense strand starting at position 3284 of SEQ ID NO: 916588
gaauguccucaguagcaaa

SEQ ID NO: 1168453 - RNA, 19 nt, Artificial Sequence
  Description of Artificial Sequence: Synthetic oligonucleotide
  Antisense strand to SEQ ID NO: 1168452
uuugcuacugaggacauuc

SEQ ID NO: 1168454 - RNA, 19 nt, Artificial Sequence
  Description of Artificial Sequence: Synthetic oligonucleotide
  Sense strand starting at position 3361 of SEQ ID NO: 916588
auagguaacaugugacagu

SEQ ID NO: 1168455 - RNA, 19 nt, Artificial Sequence
  Description of Artificial Sequence: Synthetic oligonucleotide
  Antisense strand to SEQ ID NO: 1168454
acugucacauguuaccuau

SEQ ID NO: 1168456 - RNA, 19 nt, Artificial Sequence
  Description of Artificial Sequence: Synthetic oligonucleotide
  Sense strand starting at position 3370 of SEQ ID NO: 916588
augugacagugauuacaac

SEQ ID NO: 1168457 - RNA, 19 nt, Artificial Sequence
  Description of Artificial Sequence: Synthetic oligonucleotide
  Antisense strand to SEQ ID NO: 1168456
guuguaaucacugucacau

SEQ ID NO: 1168458 - RNA, 19 nt, Artificial Sequence
  Description of Artificial Sequence: Synthetic oligonucleotide
  Sense strand starting at position 3425 of SEQ ID NO: 916588
cuaucauucuugucaucag

SEQ ID NO: 1168459 - RNA, 19 nt, Artificial Sequence
  Description of Artificial Sequence: Synthetic oligonucleotide
  Antisense strand to SEQ ID NO: 1168458
cugaugacaagaaugauag

SEQ ID NO: 1168460 - RNA, 19 nt, Artificial Sequence
  Description of Artificial Sequence: Synthetic oligonucleotide
  Sense strand starting at position 3428 of SEQ ID NO: 916588
ucauucuugucaucaggaa

SEQ ID NO: 1168461 - RNA, 19 nt, Artificial Sequence
  Description of Artificial Sequence: Synthetic oligonucleotide
  Antisense strand to SEQ ID NO: 1168460
uuccugaugacaagaauga

SEQ ID NO: 1168462 - RNA, 19 nt, Artificial Sequence
  Description of Artificial Sequence: Synthetic oligonucleotide
  Sense strand starting at position 3679 of SEQ ID NO: 916588
uaauauuaacaguggcaga

SEQ ID NO: 1168463 - RNA, 19 nt, Artificial Sequence
  Description of Artificial Sequence: Synthetic oligonucleotide
  Antisense strand to SEQ ID NO: 1168462
ucugccacuguuaauauua

SEQ ID NO: 1168464 - RNA, 19 nt, Artificial Sequence
  Description of Artificial Sequence: Synthetic oligonucleotide
  Sense strand starting at position 3745 of SEQ ID NO: 916588
auguacaauccaugugaaa

SEQ ID NO: 1168465 - RNA, 19 nt, Artificial Sequence
  Description of Artificial Sequence: Synthetic oligonucleotide
  Antisense strand to SEQ ID NO: 1168464
uuucacauggauuguacau

SEQ ID NO: 1168466 - RNA, 19 nt, Artificial Sequence
  Description of Artificial Sequence: Synthetic oligonucleotide
  Sense strand starting at position 3784 of SEQ ID NO: 916588
aauggucaguuucucgaau

SEQ ID NO: 1168467 - RNA, 19 nt, Artificial Sequence
  Description of Artificial Sequence: Synthetic oligonucleotide
  Antisense strand to SEQ ID NO: 1168466
auucgagaaacugaccauu

SEQ ID NO: 1168468 - RNA, 19 nt, Artificial Sequence
  Description of Artificial Sequence: Synthetic oligonucleotide
  Sense strand starting at position 3785 of SEQ ID NO: 916588
auggucaguuucucgaauu

SEQ ID NO: 1168469 - RNA, 19 nt, Artificial Sequence
  Description of Artificial Sequence: Synthetic oligonucleotide
  Antisense strand to SEQ ID NO: 1168468
aauucgagaaacugaccau

SEQ ID NO: 1168470 - RNA, 19 nt, Artificial Sequence
  Description of Artificial Sequence: Synthetic oligonucleotide
  Sense strand starting at position 3976 of SEQ ID NO: 916588
agagauuaauuagcaguga

SEQ ID NO: 1168471 - RNA, 19 nt, Artificial Sequence
  Description of Artificial Sequence: Synthetic oligonucleotide
  Antisense strand to SEQ ID NO: 1168470
ucacugcuaauuaaucucu

SEQ ID NO: 1168472 - RNA, 19 nt, Artificial Sequence
  Description of Artificial Sequence: Synthetic oligonucleotide
  Sense strand starting at position 3980 of SEQ ID NO: 916588
auuaauuagcagugauguu

SEQ ID NO: 1168473 - RNA, 19 nt, Artificial Sequence
  Description of Artificial Sequence: Synthetic oligonucleotide
  Antisense strand to SEQ ID NO: 1168472
aacaucacugcuaauuaau

SEQ ID NO: 1168474 - RNA, 19 nt, Artificial Sequence
  Description of Artificial Sequence: Synthetic oligonucleotide
  Sense strand starting at position 95 of SEQ ID NO: 916589
ccaugacugguggaagcua

SEQ ID NO: 1168475 - RNA, 19 nt, Artificial Sequence
  Description of Artificial Sequence: Synthetic oligonucleotide
  Antisense strand to SEQ ID NO: 1168474
uagcuuccaccagucaugg

SEQ ID NO: 1168476 - RNA, 19 nt, Artificial Sequence
  Description of Artificial Sequence: Synthetic oligonucleotide
  Sense strand starting at position 695 of SEQ ID NO: 916589
gggacuagcauguaaaggu

SEQ ID NO: 1168477 - RNA, 19 nt, Artificial Sequence
  Description of Artificial Sequence: Synthetic oligonucleotide
  Antisense strand to SEQ ID NO: 1168476
accuuuacaugcuaguccc

SEQ ID NO: 1168478 - RNA, 19 nt, Artificial Sequence
  Description of Artificial Sequence: Synthetic oligonucleotide
  Sense strand starting at position 813 of SEQ ID NO: 916589
aaauucucccgaggaaggu

SEQ ID NO: 1168479 - RNA, 19 nt, Artificial Sequence
  Description of Artificial Sequence: Synthetic oligonucleotide
  Antisense strand to SEQ ID NO: 1168478
accuuccucgggagaauuu

SEQ ID NO: 1168480 - RNA, 19 nt, Artificial Sequence
  Description of Artificial Sequence: Synthetic oligonucleotide
  Sense strand starting at position 1115 of SEQ ID NO: 916589
uguugcggaaacuauaaau

SEQ ID NO: 1168481 - RNA, 19 nt, Artificial Sequence
  Description of Artificial Sequence: Synthetic oligonucleotide
  Antisense strand to SEQ ID NO: 1168480
auuuauaguuuccgcaaca

SEQ ID NO: 1168482 - RNA, 19 nt, Artificial Sequence
  Description of Artificial Sequence: Synthetic oligonucleotide
  Sense strand starting at position 1173 of SEQ ID NO: 916589
ggagaaagguuugucuuug

SEQ ID NO: 1168483 - RNA, 19 nt, Artificial Sequence
  Description of Artificial Sequence: Synthetic oligonucleotide
  Antisense strand to SEQ ID NO: 1168482
caaagacaaaccuuucucc

SEQ ID NO: 1168484 - RNA, 19 nt, Artificial Sequence
  Description of Artificial Sequence: Synthetic oligonucleotide
  Sense strand starting at position 1395 of SEQ ID NO: 916589
ggcaaagauugcccacaga

SEQ ID NO: 1168485 - RNA, 19 nt, Artificial Sequence
  Description of Artificial Sequence: Synthetic oligonucleotide
  Antisense strand to SEQ ID NO: 1168484
ucugugggcaaucuuugcc

SEQ ID NO: 1168486 - RNA, 19 nt, Artificial Sequence
  Description of Artificial Sequence: Synthetic oligonucleotide
  Sense strand starting at position 1497 of SEQ ID NO: 916589
gggcucucggaaugaaaua

SEQ ID NO: 1168487 - RNA, 19 nt, Artificial Sequence
  Description of Artificial Sequence: Synthetic oligonucleotide
  Antisense strand to SEQ ID NO: 1168486
uauuucauuccgagagccc

SEQ ID NO: 1168488 - RNA, 19 nt, Artificial Sequence
  Description of Artificial Sequence: Synthetic oligonucleotide
  Sense strand starting at position 1498 of SEQ ID NO: 916589
ggcucucggaaugaaauau

SEQ ID NO: 1168489 - RNA, 19 nt, Artificial Sequence
  Description of Artificial Sequence: Synthetic oligonucleotide
  Antisense strand to SEQ ID NO: 1168488
auauuucauuccgagagcc

SEQ ID NO: 1168490 - RNA, 19 nt, Artificial Sequence
  Description of Artificial Sequence: Synthetic oligonucleotide
  Sense strand starting at position 1523 of SEQ ID NO: 916589
gaaagaugccauugaucag

SEQ ID NO: 1168491 - RNA, 19 nt, Artificial Sequence
  Description of Artificial Sequence: Synthetic oligonucleotide
  Antisense strand to SEQ ID NO: 1168490
cugaucaauggcaucuuuc

SEQ ID NO: 1168492 - RNA, 19 nt, Artificial Sequence
  Description of Artificial Sequence: Synthetic oligonucleotide
  Sense strand starting at position 1578 of SEQ ID NO: 916589
gaccuucuggcuuaugauc

SEQ ID NO: 1168493 - RNA, 19 nt, Artificial Sequence
  Description of Artificial Sequence: Synthetic oligonucleotide
  Antisense strand to SEQ ID NO: 1168492
gaucauaagccagaagguc

SEQ ID NO: 1168494 - RNA, 19 nt, Artificial Sequence
  Description of Artificial Sequence: Synthetic oligonucleotide
  Sense strand starting at position 1587 of SEQ ID NO: 916589
gcuuaugaucgggacauag

SEQ ID NO: 1168495 - RNA, 19 nt, Artificial Sequence
  Description of Artificial Sequence: Synthetic oligonucleotide
  Antisense strand to SEQ ID NO: 1168494
cuaugucccgaucauaagc

SEQ ID NO: 1168496 - RNA, 19 nt, Artificial Sequence
  Description of Artificial Sequence: Synthetic oligonucleotide
  Sense strand starting at position 1589 of SEQ ID NO: 916589
uuaugaucgggacauaguu

SEQ ID NO: 1168497 - RNA, 19 nt, Artificial Sequence
  Description of Artificial Sequence: Synthetic oligonucleotide
  Antisense strand to SEQ ID NO: 1168496
aacuaugucccgaucauaa

SEQ ID NO: 1168498 - RNA, 19 nt, Artificial Sequence
  Description of Artificial Sequence: Synthetic oligonucleotide
  Sense strand starting at position 1598 of SEQ ID NO: 916589
ggacauaguuaagugggua

SEQ ID NO: 1168499 - RNA, 19 nt, Artificial Sequence
  Description of Artificial Sequence: Synthetic oligonucleotide
  Antisense strand to SEQ ID NO: 1168498
uacccacuuaacuaugucc

SEQ ID NO: 1168500 - RNA, 19 nt, Artificial Sequence
  Description of Artificial Sequence: Synthetic oligonucleotide
  Sense strand starting at position 1720 of SEQ ID NO: 916589
gagacaauguggucccuga

SEQ ID NO: 1168501 - RNA, 19 nt, Artificial Sequence
  Description of Artificial Sequence: Synthetic oligonucleotide
  Antisense strand to SEQ ID NO: 1168500
ucagggaccacauugucuc

SEQ ID NO: 1168502 - RNA, 19 nt, Artificial Sequence
  Description of Artificial Sequence: Synthetic oligonucleotide
  Sense strand starting at position 1748 of SEQ ID NO: 916589
ggaucaacaucugugggau

SEQ ID NO: 1168503 - RNA, 19 nt, Artificial Sequence
  Description of Artificial Sequence: Synthetic oligonucleotide
  Antisense strand to SEQ ID NO: 1168502
aucccacagauguugaucc

SEQ ID NO: 1168504 - RNA, 19 nt, Artificial Sequence
  Description of Artificial Sequence: Synthetic oligonucleotide
  Sense strand starting at position 1749 of SEQ ID NO: 916589
gaucaacaucugugggaug

SEQ ID NO: 1168505 - RNA, 19 nt, Artificial Sequence
  Description of Artificial Sequence: Synthetic oligonucleotide
  Antisense strand to SEQ ID NO: 1168504
caucccacagauguugauc

SEQ ID NO: 1168506 - RNA, 19 nt, Artificial Sequence
  Description of Artificial Sequence: Synthetic oligonucleotide
  Sense strand starting at position 1844 of SEQ ID NO: 916589
cuguccaggaggugauaaa

SEQ ID NO: 1168507 - RNA, 19 nt, Artificial Sequence
  Description of Artificial Sequence: Synthetic oligonucleotide
  Antisense strand to SEQ ID NO: 1168506
uuuaucaccuccuggacag

SEQ ID NO: 1168508 - RNA, 19 nt, Artificial Sequence
  Description of Artificial Sequence: Synthetic oligonucleotide
  Sense strand starting at position 1963 of SEQ ID NO: 916589
aggauaaauuccgucacua

SEQ ID NO: 1168509 - RNA, 19 nt, Artificial Sequence
  Description of Artificial Sequence: Synthetic oligonucleotide
  Antisense strand to SEQ ID NO: 1168508
uagugacggaauuuauccu

SEQ ID NO: 1168510 - RNA, 19 nt, Artificial Sequence
  Description of Artificial Sequence: Synthetic oligonucleotide
  Sense strand starting at position 1965 of SEQ ID NO: 916589
gauaaauuccgucacuaug

SEQ ID NO: 1168511 - RNA, 19 nt, Artificial Sequence
  Description of Artificial Sequence: Synthetic oligonucleotide
  Antisense strand to SEQ ID NO: 1168510
cauagugacggaauuuauc

SEQ ID NO: 1168512 - RNA, 19 nt, Artificial Sequence
  Description of Artificial Sequence: Synthetic oligonucleotide
  Sense strand starting at position 2079 of SEQ ID NO: 916589
gucccagaagcccaauuau

SEQ ID NO: 1168513 - RNA, 19 nt, Artificial Sequence
  Description of Artificial Sequence: Synthetic oligonucleotide
  Antisense strand to SEQ ID NO: 1168512
auaauugggcuucugggac

SEQ ID NO: 1168514 - RNA, 19 nt, Artificial Sequence
  Description of Artificial Sequence: Synthetic oligonucleotide
  Sense strand starting at position 2109 of SEQ ID NO: 916589
gaugaaugguggucaaccu

SEQ ID NO: 1168515 - RNA, 19 nt, Artificial Sequence
  Description of Artificial Sequence: Synthetic oligonucleotide
  Antisense strand to SEQ ID NO: 1168514
agguugaccaccauucauc

SEQ ID NO: 1168516 - RNA, 19 nt, Artificial Sequence
  Description of Artificial Sequence: Synthetic oligonucleotide
  Sense strand starting at position 2143 of SEQ ID NO: 916589
acuaguaauuuggcagugu

SEQ ID NO: 1168517 - RNA, 19 nt, Artificial Sequence
  Description of Artificial Sequence: Synthetic oligonucleotide
  Antisense strand to SEQ ID NO: 1168516
acacugccaaauuacuagu

SEQ ID NO: 1168518 - RNA, 19 nt, Artificial Sequence
  Description of Artificial Sequence: Synthetic oligonucleotide
  Sense strand starting at position 2323 of SEQ ID NO: 916589
gccauuaaccaggauguau

SEQ ID NO: 1168519 - RNA, 19 nt, Artificial Sequence
  Description of Artificial Sequence: Synthetic oligonucleotide
  Antisense strand to SEQ ID NO: 1168518
auacauccugguuaauggc

SEQ ID NO: 1168520 - RNA, 19 nt, Artificial Sequence
  Description of Artificial Sequence: Synthetic oligonucleotide
  Sense strand starting at position 2407 of SEQ ID NO: 916589
ugaagaauggaguguguga

SEQ ID NO: 1168521 - RNA, 19 nt, Artificial Sequence
  Description of Artificial Sequence: Synthetic oligonucleotide
  Antisense strand to SEQ ID NO: 1168520
ucacacacuccauucuuca

SEQ ID NO: 1168522 - RNA, 19 nt, Artificial Sequence
  Description of Artificial Sequence: Synthetic oligonucleotide
  Sense strand starting at position 2439 of SEQ ID NO: 916589
uggcuaucagguuauagaa

SEQ ID NO: 1168523 - RNA, 19 nt, Artificial Sequence
  Description of Artificial Sequence: Synthetic oligonucleotide
  Antisense strand to SEQ ID NO: 1168522
uucuauaaccugauagcca

SEQ ID NO: 1168524 - RNA, 19 nt, Artificial Sequence
  Description of Artificial Sequence: Synthetic oligonucleotide
  Sense strand starting at position 2466 of SEQ ID NO: 916589
uuaggaagcacuugagaua

SEQ ID NO: 1168525 - RNA, 19 nt, Artificial Sequence
  Description of Artificial Sequence: Synthetic oligonucleotide
  Antisense strand to SEQ ID NO: 1168524
uaucucaagugcuuccuaa

SEQ ID NO: 1168526 - RNA, 19 nt, Artificial Sequence
  Description of Artificial Sequence: Synthetic oligonucleotide
  Sense strand starting at position 2544 of SEQ ID NO: 916589
ugaugaauggguugaaguu

SEQ ID NO: 1168527 - RNA, 19 nt, Artificial Sequence
  Description of Artificial Sequence: Synthetic oligonucleotide
  Antisense strand to SEQ ID NO: 1168526
aacuucaacccauucauca

SEQ ID NO: 1168528 - RNA, 19 nt, Artificial Sequence
  Description of Artificial Sequence: Synthetic oligonucleotide
  Sense strand starting at position 2627 of SEQ ID NO: 916589
uuuggagacagucauguca

SEQ ID NO: 1168529 - RNA, 19 nt, Artificial Sequence
  Description of Artificial Sequence: Synthetic oligonucleotide
  Antisense strand to SEQ ID NO: 1168528
ugacaugacugucuccaaa

SEQ ID NO: 1168530 - RNA, 19 nt, Artificial Sequence
  Description of Artificial Sequence: Synthetic oligonucleotide
  Sense strand starting at position 2861 of SEQ ID NO: 916589
cuaugagcagggcauauau

SEQ ID NO: 1168531 - RNA, 19 nt, Artificial Sequence
  Description of Artificial Sequence: Synthetic oligonucleotide
  Antisense strand to SEQ ID NO: 1168530
auauaugcccugcucauag

SEQ ID NO: 1168532 - RNA, 19 nt, Artificial Sequence
  Description of Artificial Sequence: Synthetic oligonucleotide
  Sense strand starting at position 3142 of SEQ ID NO: 916589
acagguacucacuauguca

SEQ ID NO: 1168533 - RNA, 19 nt, Artificial Sequence
  Description of Artificial Sequence: Synthetic oligonucleotide
  Antisense strand to SEQ ID NO: 1168532
ugacauagugaguaccugu

SEQ ID NO: 1168534 - RNA, 19 nt, Artificial Sequence
  Description of Artificial Sequence: Synthetic oligonucleotide
  Sense strand starting at position 3265 of SEQ ID NO: 916589
augcuuauagaugauaagu

SEQ ID NO: 1168535 - RNA, 19 nt, Artificial Sequence
  Description of Artificial Sequence: Synthetic oligonucleotide
  Antisense strand to SEQ ID NO: 1168534
acuuaucaucuauaagcau

SEQ ID NO: 1168536 - RNA, 19 nt, Artificial Sequence
  Description of Artificial Sequence: Synthetic oligonucleotide
  Sense strand starting at position 3570 of SEQ ID NO: 916589
cuagauucccucuagguau

SEQ ID NO: 1168537 - RNA, 19 nt, Artificial Sequence
  Description of Artificial Sequence: Synthetic oligonucleotide
  Antisense strand to SEQ ID NO: 1168536
auaccuagagggaaucuag

SEQ ID NO: 1168538 - RNA, 19 nt, Artificial Sequence
  Description of Artificial Sequence: Synthetic oligonucleotide
  Sense strand starting at position 3572 of SEQ ID NO: 916589
agauucccucuagguauga

SEQ ID NO: 1168539 - RNA, 19 nt, Artificial Sequence
  Description of Artificial Sequence: Synthetic oligonucleotide
  Antisense strand to SEQ ID NO: 1168538
ucauaccuagagggaaucu

SEQ ID NO: 1168540 - RNA, 19 nt, Artificial Sequence
  Description of Artificial Sequence: Synthetic oligonucleotide
  Sense strand starting at position 3636 of SEQ ID NO: 916589
ucaucuuuacuuugggaua

SEQ ID NO: 1168541 - RNA, 19 nt, Artificial Sequence
  Description of Artificial Sequence: Synthetic oligonucleotide
  Antisense strand to SEQ ID NO: 1168540
uaucccaaaguaaagauga

SEQ ID NO: 1168542 - RNA, 19 nt, Artificial Sequence
  Description of Artificial Sequence: Synthetic oligonucleotide
  Sense strand starting at position 3818 of SEQ ID NO: 916589
ggauuugucuaagaauaaa

SEQ ID NO: 1168543 - RNA, 19 nt, Artificial Sequence
  Description of Artificial Sequence: Synthetic oligonucleotide
  Antisense strand to SEQ ID NO: 1168542
uuuauucuuagacaaaucc

SEQ ID NO: 1168544 - RNA, 19 nt, Artificial Sequence
  Description of Artificial Sequence: Synthetic oligonucleotide
  Sense strand starting at position 3850 of SEQ ID NO: 916589
ugaggaauuacuugguccu

SEQ ID NO: 1168545 - RNA, 19 nt, Artificial Sequence
  Description of Artificial Sequence: Synthetic oligonucleotide
  Antisense strand to SEQ ID NO: 1168544
aggaccaaguaauuccuca

SEQ ID NO: 1168546 - RNA, 19 nt, Artificial Sequence
  Description of Artificial Sequence: Synthetic oligonucleotide
  Sense strand starting at position 3851 of SEQ ID NO: 916589
gaggaauuacuugguccua

SEQ ID NO: 1168547 - RNA, 19 nt, Artificial Sequence
  Description of Artificial Sequence: Synthetic oligonucleotide
  Antisense strand to SEQ ID NO: 1168546
uaggaccaaguaauuccuc

SEQ ID NO: 1168548 - RNA, 19 nt, Artificial Sequence
  Description of Artificial Sequence: Synthetic oligonucleotide
  Sense strand starting at position 3874 of SEQ ID NO: 916589
aggauaaaugcuuaccugu

SEQ ID NO: 1168549 - RNA, 19 nt, Artificial Sequence
  Description of Artificial Sequence: Synthetic oligonucleotide
  Antisense strand to SEQ ID NO: 1168548
acagguaagcauuuauccu

SEQ ID NO: 1168550 - RNA, 19 nt, Artificial Sequence
  Description of Artificial Sequence: Synthetic oligonucleotide
  Sense strand starting at position 3907 of SEQ ID NO: 916589
gaaagaauucugugauacc

SEQ ID NO: 1168551 - RNA, 19 nt, Artificial Sequence
  Description of Artificial Sequence: Synthetic oligonucleotide
  Antisense strand to SEQ ID NO: 1168550
gguaucacagaauucuuuc

SEQ ID NO: 1168552 - RNA, 19 nt, Artificial Sequence
  Description of Artificial Sequence: Synthetic oligonucleotide
  Sense strand starting at position 3956 of SEQ ID NO: 916589
gagguuacuaggugaagga

SEQ ID NO: 1168553 - RNA, 19 nt, Artificial Sequence
  Description of Artificial Sequence: Synthetic oligonucleotide
  Antisense strand to SEQ ID NO: 1168552
uccuucaccuaguaaccuc

SEQ ID NO: 1168554 - RNA, 19 nt, Artificial Sequence
  Description of Artificial Sequence: Synthetic oligonucleotide
  Sense strand starting at position 9 of SEQ ID NO: 916590
uccugaacagcucauguua

SEQ ID NO: 1168555 - RNA, 19 nt, Artificial Sequence
  Description of Artificial Sequence: Synthetic oligonucleotide
  Antisense strand to SEQ ID NO: 1168554
uaacaugagcuguucagga

SEQ ID NO: 1168556 - RNA, 19 nt, Artificial Sequence
  Description of Artificial Sequence: Synthetic oligonucleotide
  Sense strand starting at position 16 of SEQ ID NO: 916590
cagcucauguuauugauga

SEQ ID NO: 1168557 - RNA, 19 nt, Artificial Sequence
  Description of Artificial Sequence: Synthetic oligonucleotide
  Antisense strand to SEQ ID NO: 1168556
ucaucaauaacaugagcug

SEQ ID NO: 1168558 - RNA, 19 nt, Artificial Sequence
  Description of Artificial Sequence: Synthetic oligonucleotide
  Sense strand starting at position 21 of SEQ ID NO: 916590
cauguuauugaugaaaugu

SEQ ID NO: 1168559 - RNA, 19 nt, Artificial Sequence
  Description of Artificial Sequence: Synthetic oligonucleotide
  Antisense strand to SEQ ID NO: 1168558
acauuucaucaauaacaug

SEQ ID NO: 1168560 - RNA, 19 nt, Artificial Sequence
  Description of Artificial Sequence: Synthetic oligonucleotide
  Sense strand starting at position 29 of SEQ ID NO: 916590
ugaugaaauguugaggucu

SEQ ID NO: 1168561 - RNA, 19 nt, Artificial Sequence
  Description of Artificial Sequence: Synthetic oligonucleotide
  Antisense strand to SEQ ID NO: 1168560
agaccucaacauuucauca

SEQ ID NO: 1168562 - RNA, 19 nt, Artificial Sequence
  Description of Artificial Sequence: Synthetic oligonucleotide
  Sense strand starting at position 40 of SEQ ID NO: 916590
ugaggucucuccucacuga

SEQ ID NO: 1168563 - RNA, 19 nt, Artificial Sequence
  Description of Artificial Sequence: Synthetic oligonucleotide
  Antisense strand to SEQ ID NO: 1168562
ucagugaggagagaccuca

SEQ ID NO: 1168564 - RNA, 19 nt, Artificial Sequence
  Description of Artificial Sequence: Synthetic oligonucleotide
  Sense strand starting at position 41 of SEQ ID NO: 916590
gaggucucuccucacugaa

SEQ ID NO: 1168565 - RNA, 19 nt, Artificial Sequence
  Description of Artificial Sequence: Synthetic oligonucleotide
  Antisense strand to SEQ ID NO: 1168564
uucagugaggagagaccuc

SEQ ID NO: 1168566 - RNA, 19 nt, Artificial Sequence
  Description of Artificial Sequence: Synthetic oligonucleotide
  Sense strand starting at position 43 of SEQ ID NO: 916590
ggucucuccucacugaaag

SEQ ID NO: 1168567 - RNA, 19 nt, Artificial Sequence
  Description of Artificial Sequence: Synthetic oligonucleotide
  Antisense strand to SEQ ID NO: 1168566
cuuucagugaggagagacc

SEQ ID NO: 1168568 - RNA, 19 nt, Artificial Sequence
  Description of Artificial Sequence: Synthetic oligonucleotide
  Sense strand starting at position 415 of SEQ ID NO: 916590
guguuucugggagacaugu

SEQ ID NO: 1168569 - RNA, 19 nt, Artificial Sequence
  Description of Artificial Sequence: Synthetic oligonucleotide
  Antisense strand to SEQ ID NO: 1168568
acaugucucccagaaacac

SEQ ID NO: 1168570 - RNA, 19 nt, Artificial Sequence
  Description of Artificial Sequence: Synthetic oligonucleotide
  Sense strand starting at position 417 of SEQ ID NO: 916590
guuucugggagacauguau

SEQ ID NO: 1168571 - RNA, 19 nt, Artificial Sequence
  Description of Artificial Sequence: Synthetic oligonucleotide
  Antisense strand to SEQ ID NO: 1168570
auacaugucucccagaaac

SEQ ID NO: 1168572 - RNA, 19 nt, Artificial Sequence
  Description of Artificial Sequence: Synthetic oligonucleotide
  Sense strand starting at position 434 of SEQ ID NO: 916590
auaggcuguccugggagau

SEQ ID NO: 1168573 - RNA, 19 nt, Artificial Sequence
  Description of Artificial Sequence: Synthetic oligonucleotide
  Antisense strand to SEQ ID NO: 1168572
aucucccaggacagccuau

SEQ ID NO: 1168574 - RNA, 19 nt, Artificial Sequence
  Description of Artificial Sequence: Synthetic oligonucleotide
  Sense strand starting at position 435 of SEQ ID NO: 916590
uaggcuguccugggagaua

SEQ ID NO: 1168575 - RNA, 19 nt, Artificial Sequence
  Description of Artificial Sequence: Synthetic oligonucleotide
  Antisense strand to SEQ ID NO: 1168574
uaucucccaggacagccua

SEQ ID NO: 1168576 - RNA, 19 nt, Artificial Sequence
  Description of Artificial Sequence: Synthetic oligonucleotide
  Sense strand starting at position 686 of SEQ ID NO: 916590
cacuuaguuggaugucaag

SEQ ID NO: 1168577 - RNA, 19 nt, Artificial Sequence
  Description of Artificial Sequence: Synthetic oligonucleotide
  Antisense strand to SEQ ID NO: 1168576
cuugacauccaacuaagug

SEQ ID NO: 1168578 - RNA, 19 nt, Artificial Sequence
  Description of Artificial Sequence: Synthetic oligonucleotide
  Sense strand starting at position 878 of SEQ ID NO: 916590
gaguguggacucugggaua

SEQ ID NO: 1168579 - RNA, 19 nt, Artificial Sequence
  Description of Artificial Sequence: Synthetic oligonucleotide
  Antisense strand to SEQ ID NO: 1168578
uaucccagaguccacacuc

SEQ ID NO: 1168580 - RNA, 19 nt, Artificial Sequence
  Description of Artificial Sequence: Synthetic oligonucleotide
  Sense strand starting at position 971 of SEQ ID NO: 916590
gcaugauuucugugagagu

SEQ ID NO: 1168581 - RNA, 19 nt, Artificial Sequence
  Description of Artificial Sequence: Synthetic oligonucleotide
  Antisense strand to SEQ ID NO: 1168580
acucucacagaaaucaugc

SEQ ID NO: 1168582 - RNA, 19 nt, Artificial Sequence
  Description of Artificial Sequence: Synthetic oligonucleotide
  Sense strand starting at position 998 of SEQ ID NO: 916590
aauccagucccugaagagu

SEQ ID NO: 1168583 - RNA, 19 nt, Artificial Sequence
  Description of Artificial Sequence: Synthetic oligonucleotide
  Antisense strand to SEQ ID NO: 1168582
acucuucagggacuggauu

SEQ ID NO: 1168584 - RNA, 19 nt, Artificial Sequence
  Description of Artificial Sequence: Synthetic oligonucleotide
  Sense strand starting at position 1019 of SEQ ID NO: 916590
gaggaugagcacugaguga

SEQ ID NO: 1168585 - RNA, 19 nt, Artificial Sequence
  Description of Artificial Sequence: Synthetic oligonucleotide
  Antisense strand to SEQ ID NO: 1168584
ucacucagugcucauccuc

SEQ ID NO: 1168586 - RNA, 19 nt, Artificial Sequence
  Description of Artificial Sequence: Synthetic oligonucleotide
  Sense strand starting at position 2164 of SEQ ID NO: 916590
uaaauaaugugucugaggu

SEQ ID NO: 1168587 - RNA, 19 nt, Artificial Sequence
  Description of Artificial Sequence: Synthetic oligonucleotide
  Antisense strand to SEQ ID NO: 1168586
accucagacacauuauuua

SEQ ID NO: 1168588 - RNA, 19 nt, Artificial Sequence
  Description of Artificial Sequence: Synthetic oligonucleotide
  Sense strand starting at position 2165 of SEQ ID NO: 916590
aaauaaugugucugaggua

SEQ ID NO: 1168589 - RNA, 19 nt, Artificial Sequence
  Description of Artificial Sequence: Synthetic oligonucleotide
  Antisense strand to SEQ ID NO: 1168588
uaccucagacacauuauuu

SEQ ID NO: 1168590 - RNA, 19 nt, Artificial Sequence
  Description of Artificial Sequence: Synthetic oligonucleotide
  Sense strand starting at position 2170 of SEQ ID NO: 916590
augugucugagguaauauc

SEQ ID NO: 1168591 - RNA, 19 nt, Artificial Sequence
  Description of Artificial Sequence: Synthetic oligonucleotide
  Antisense strand to SEQ ID NO: 1168590
gauauuaccucagacacau

SEQ ID NO: 1168592 - RNA, 19 nt, Artificial Sequence
  Description of Artificial Sequence: Synthetic oligonucleotide
  Sense strand starting at position 2287 of SEQ ID NO: 916590
ugacucucauauguaaaga

SEQ ID NO: 1168593 - RNA, 19 nt, Artificial Sequence
  Description of Artificial Sequence: Synthetic oligonucleotide
  Antisense strand to SEQ ID NO: 1168592
ucuuuacauaugagaguca

SEQ ID NO: 1168594 - RNA, 19 nt, Artificial Sequence
  Description of Artificial Sequence: Synthetic oligonucleotide
  Sense strand starting at position 2303 of SEQ ID NO: 916590
agacucuagcucugaucuu

SEQ ID NO: 1168595 - RNA, 19 nt, Artificial Sequence
  Description of Artificial Sequence: Synthetic oligonucleotide
  Antisense strand to SEQ ID NO: 1168594
aagaucagagcuagagucu

SEQ ID NO: 1168596 - RNA, 19 nt, Artificial Sequence
  Description of Artificial Sequence: Synthetic oligonucleotide
  Sense strand starting at position 2374 of SEQ ID NO: 916590
uuguacucucuagauggau

SEQ ID NO: 1168597 - RNA, 19 nt, Artificial Sequence
  Description of Artificial Sequence: Synthetic oligonucleotide
  Antisense strand to SEQ ID NO: 1168596
auccaucuagagaguacaa

SEQ ID NO: 1168598 - RNA, 19 nt, Artificial Sequence
  Description of Artificial Sequence: Synthetic oligonucleotide
  Sense strand starting at position 2461 of SEQ ID NO: 916590
ugagcuguggguuaagagu

SEQ ID NO: 1168599 - RNA, 19 nt, Artificial Sequence
  Description of Artificial Sequence: Synthetic oligonucleotide
  Antisense strand to SEQ ID NO: 1168598
acucuuaacccacagcuca

SEQ ID NO: 1168600 - RNA, 19 nt, Artificial Sequence
  Description of Artificial Sequence: Synthetic oligonucleotide
  Sense strand starting at position 2505 of SEQ ID NO: 916590
gauaauacugcccaauggu

SEQ ID NO: 1168601 - RNA, 19 nt, Artificial Sequence
  Description of Artificial Sequence: Synthetic oligonucleotide
  Antisense strand to SEQ ID NO: 1168600
accauugggcaguauuauc

SEQ ID NO: 1168602 - RNA, 19 nt, Artificial Sequence
  Description of Artificial Sequence: Synthetic oligonucleotide
  Sense strand starting at position 2546 of SEQ ID NO: 916590
cccugauuucucuguucuc

SEQ ID NO: 1168603 - RNA, 19 nt, Artificial Sequence
  Description of Artificial Sequence: Synthetic oligonucleotide
  Antisense strand to SEQ ID NO: 1168602
gagaacagagaaaucaggg

SEQ ID NO: 1168604 - RNA, 19 nt, Artificial Sequence
  Description of Artificial Sequence: Synthetic oligonucleotide
  Sense strand starting at position 2793 of SEQ ID NO: 916590
aagugacauuuaggaacau

SEQ ID NO: 1168605 - RNA, 19 nt, Artificial Sequence
  Description of Artificial Sequence: Synthetic oligonucleotide
  Antisense strand to SEQ ID NO: 1168604
auguuccuaaaugucacuu

SEQ ID NO: 1168606 - RNA, 19 nt, Artificial Sequence
  Description of Artificial Sequence: Synthetic oligonucleotide
  Sense strand starting at position 2794 of SEQ ID NO: 916590
agugacauuuaggaacaua

SEQ ID NO: 1168607 - RNA, 19 nt, Artificial Sequence
  Description of Artificial Sequence: Synthetic oligonucleotide
  Antisense strand to SEQ ID NO: 1168606
uauguuccuaaaugucacu

SEQ ID NO: 1168608 - RNA, 19 nt, Artificial Sequence
  Description of Artificial Sequence: Synthetic oligonucleotide
  Sense strand starting at position 2812 of SEQ ID NO: 916590
auauuuccauaugacagua

SEQ ID NO: 1168609 - RNA, 19 nt, Artificial Sequence
  Description of Artificial Sequence: Synthetic oligonucleotide
  Antisense strand to SEQ ID NO: 1168608
uacugucauauggaaauau

SEQ ID NO: 1168610 - RNA, 19 nt, Artificial Sequence
  Description of Artificial Sequence: Synthetic oligonucleotide
  Sense strand starting at position 2878 of SEQ ID NO: 916590
uuugaacaucugcagugau

SEQ ID NO: 1168611 - RNA, 19 nt, Artificial Sequence
  Description of Artificial Sequence: Synthetic oligonucleotide
  Antisense strand to SEQ ID NO: 1168610
aucacugcagauguucaaa

SEQ ID NO: 1168612 - RNA, 19 nt, Artificial Sequence
  Description of Artificial Sequence: Synthetic oligonucleotide
  Sense strand starting at position 2940 of SEQ ID NO: 916590
cucuucugccuguaggaaa

SEQ ID NO: 1168613 - RNA, 19 nt, Artificial Sequence
  Description of Artificial Sequence: Synthetic oligonucleotide
  Antisense strand to SEQ ID NO: 1168612
uuuccuacaggcagaagag

SEQ ID NO: 1168614 - RNA, 19 nt, Artificial Sequence
  Description of Artificial Sequence: Synthetic oligonucleotide
  Sense strand starting at position 2979 of SEQ ID NO: 916590
uggcuaaaugcuuaguauu

SEQ ID NO: 1168615 - RNA, 19 nt, Artificial Sequence
  Description of Artificial Sequence: Synthetic oligonucleotide
  Antisense strand to SEQ ID NO: 1168614
aauacuaagcauuuagcca

SEQ ID NO: 1168616 - RNA, 19 nt, Artificial Sequence
  Description of Artificial Sequence: Synthetic oligonucleotide
  Sense strand starting at position 2981 of SEQ ID NO: 916590
gcuaaaugcuuaguauuuc

SEQ ID NO: 1168617 - RNA, 19 nt, Artificial Sequence
  Description of Artificial Sequence: Synthetic oligonucleotide
  Antisense strand to SEQ ID NO: 1168616
gaaauacuaagcauuuagc

SEQ ID NO: 1168618 - RNA, 19 nt, Artificial Sequence
  Description of Artificial Sequence: Synthetic oligonucleotide
  Sense strand starting at position 3025 of SEQ ID NO: 916590
cagagagcccuugaguauu

SEQ ID NO: 1168619 - RNA, 19 nt, Artificial Sequence
  Description of Artificial Sequence: Synthetic oligonucleotide
  Antisense strand to SEQ ID NO: 1168618
aauacucaagggcucucug

SEQ ID NO: 1168620 - RNA, 19 nt, Artificial Sequence
  Description of Artificial Sequence: Synthetic oligonucleotide
  Sense strand starting at position 3033 of SEQ ID NO: 916590
ccuugaguauuugaggaag

SEQ ID NO: 1168621 - RNA, 19 nt, Artificial Sequence
  Description of Artificial Sequence: Synthetic oligonucleotide
  Antisense strand to SEQ ID NO: 1168620
cuuccucaaauacucaagg

SEQ ID NO: 1168622 - RNA, 19 nt, Artificial Sequence
  Description of Artificial Sequence: Synthetic oligonucleotide
  Sense strand starting at position 3104 of SEQ ID NO: 916590
uuauuacuccacugugaga

SEQ ID NO: 1168623 - RNA, 19 nt, Artificial Sequence
  Description of Artificial Sequence: Synthetic oligonucleotide
  Antisense strand to SEQ ID NO: 1168622
ucucacaguggaguaauaa

SEQ ID NO: 1168624 - RNA, 19 nt, Artificial Sequence
  Description of Artificial Sequence: Synthetic oligonucleotide
  Sense strand starting at position 3106 of SEQ ID NO: 916590
auuacuccacugugagauc

SEQ ID NO: 1168625 - RNA, 19 nt, Artificial Sequence
  Description of Artificial Sequence: Synthetic oligonucleotide
  Antisense strand to SEQ ID NO: 1168624
gaucucacaguggaguaau

SEQ ID NO: 1168626 - RNA, 19 nt, Artificial Sequence
  Description of Artificial Sequence: Synthetic oligonucleotide
  Sense strand starting at position 3437 of SEQ ID NO: 916590
ggagguuaaucaccaguca

SEQ ID NO: 1168627 - RNA, 19 nt, Artificial Sequence
  Description of Artificial Sequence: Synthetic oligonucleotide
  Antisense strand to SEQ ID NO: 1168626
ugacuggugauuaaccucc

SEQ ID NO: 1168628 - RNA, 19 nt, Artificial Sequence
  Description of Artificial Sequence: Synthetic oligonucleotide
  Sense strand starting at position 3840 of SEQ ID NO: 916590
ccaugucgaguguucgcua

SEQ ID NO: 1168629 - RNA, 19 nt, Artificial Sequence
  Description of Artificial Sequence: Synthetic oligonucleotide
  Antisense strand to SEQ ID NO: 1168628
uagcgaacacucgacaugg

SEQ ID NO: 1168630 - RNA, 19 nt, Artificial Sequence
  Description of Artificial Sequence: Synthetic oligonucleotide
  Sense strand starting at position 3864 of SEQ ID NO: 916590
uuauuagaugagugaacga

SEQ ID NO: 1168631 - RNA, 19 nt, Artificial Sequence
  Description of Artificial Sequence: Synthetic oligonucleotide
  Antisense strand to SEQ ID NO: 1168630
ucguucacucaucuaauaa

SEQ ID NO: 1168632 - RNA, 19 nt, Artificial Sequence
  Description of Artificial Sequence: Synthetic oligonucleotide
  Sense strand starting at position 3934 of SEQ ID NO: 916590
gccuaaauuuaggcagcua

SEQ ID NO: 1168633 - RNA, 19 nt, Artificial Sequence
  Description of Artificial Sequence: Synthetic oligonucleotide
  Antisense strand to SEQ ID NO: 1168632
uagcugccuaaauuuaggc

SEQ ID NO: 1168634 - RNA, 19 nt, Artificial Sequence
  Description of Artificial Sequence: Synthetic oligonucleotide
  Sense strand starting at position 72 of SEQ ID NO: 916591
cauguuaaggauugugaaa

SEQ ID NO: 1168635 - RNA, 19 nt, Artificial Sequence
  Description of Artificial Sequence: Synthetic oligonucleotide
  Antisense strand to SEQ ID NO: 1168634
uuucacaauccuuaacaug

SEQ ID NO: 1168636 - RNA, 19 nt, Artificial Sequence
  Description of Artificial Sequence: Synthetic oligonucleotide
  Sense strand starting at position 226 of SEQ ID NO: 916591
cucagucuccuuggauuga

SEQ ID NO: 1168637 - RNA, 19 nt, Artificial Sequence
  Description of Artificial Sequence: Synthetic oligonucleotide
  Antisense strand to SEQ ID NO: 1168636
ucaauccaaggagacugag

SEQ ID NO: 1168638 - RNA, 19 nt, Artificial Sequence
  Description of Artificial Sequence: Synthetic oligonucleotide
  Sense strand starting at position 230 of SEQ ID NO: 916591
gucuccuuggauugaaauu

SEQ ID NO: 1168639 - RNA, 19 nt, Artificial Sequence
  Description of Artificial Sequence: Synthetic oligonucleotide
  Antisense strand to SEQ ID NO: 1168638
aauuucaauccaaggagac

SEQ ID NO: 1168640 - RNA, 19 nt, Artificial Sequence
  Description of Artificial Sequence: Synthetic oligonucleotide
  Sense strand starting at position 320 of SEQ ID NO: 916591
ucucuaacuuagguugagu

SEQ ID NO: 1168641 - RNA, 19 nt, Artificial Sequence
  Description of Artificial Sequence: Synthetic oligonucleotide
  Antisense strand to SEQ ID NO: 1168640
acucaaccuaaguuagaga

SEQ ID NO: 1168642 - RNA, 19 nt, Artificial Sequence
  Description of Artificial Sequence: Synthetic oligonucleotide
  Sense strand starting at position 322 of SEQ ID NO: 916591
ucuaacuuagguugaguua

SEQ ID NO: 1168643 - RNA, 19 nt, Artificial Sequence
  Description of Artificial Sequence: Synthetic oligonucleotide
  Antisense strand to SEQ ID NO: 1168642
uaacucaaccuaaguuaga

SEQ ID NO: 1168644 - RNA, 19 nt, Artificial Sequence
  Description of Artificial Sequence: Synthetic oligonucleotide
  Sense strand starting at position 323 of SEQ ID NO: 916591
cuaacuuagguugaguuau

SEQ ID NO: 1168645 - RNA, 19 nt, Artificial Sequence
  Description of Artificial Sequence: Synthetic oligonucleotide
  Antisense strand to SEQ ID NO: 1168644
auaacucaaccuaaguuag

SEQ ID NO: 1168646 - RNA, 19 nt, Artificial Sequence
  Description of Artificial Sequence: Synthetic oligonucleotide
  Sense strand starting at position 454 of SEQ ID NO: 916591
aguacuuaguaacuaucaa

SEQ ID NO: 1168647 - RNA, 19 nt, Artificial Sequence
  Description of Artificial Sequence: Synthetic oligonucleotide
  Antisense strand to SEQ ID NO: 1168646
uugauaguuacuaaguacu

SEQ ID NO: 1168648 - RNA, 19 nt, Artificial Sequence
  Description of Artificial Sequence: Synthetic oligonucleotide
  Sense strand starting at position 472 of SEQ ID NO: 916591
aagagcuuaguacauagua

SEQ ID NO: 1168649 - RNA, 19 nt, Artificial Sequence
  Description of Artificial Sequence: Synthetic oligonucleotide
  Antisense strand to SEQ ID NO: 1168648
uacuauguacuaagcucuu

SEQ ID NO: 1168650 - RNA, 19 nt, Artificial Sequence
  Description of Artificial Sequence: Synthetic oligonucleotide
  Sense strand starting at position 1039 of SEQ ID NO: 916591
gaauaaugucgcgaugcau

SEQ ID NO: 1168651 - RNA, 19 nt, Artificial Sequence
  Description of Artificial Sequence: Synthetic oligonucleotide
  Antisense strand to SEQ ID NO: 1168650
augcaucgcgacauuauuc

SEQ ID NO: 1168652 - RNA, 19 nt, Artificial Sequence
  Description of Artificial Sequence: Synthetic oligonucleotide
  Sense strand starting at position 2135 of SEQ ID NO: 916591
ugacauaguccagaccagu

SEQ ID NO: 1168653 - RNA, 19 nt, Artificial Sequence
  Description of Artificial Sequence: Synthetic oligonucleotide
  Antisense strand to SEQ ID NO: 1168652
acuggucuggacuauguca

SEQ ID NO: 1168654 - RNA, 19 nt, Artificial Sequence
  Description of Artificial Sequence: Synthetic oligonucleotide
  Sense strand starting at position 2157 of SEQ ID NO: 916591
ccauuugaaugauguugga

SEQ ID NO: 1168655 - RNA, 19 nt, Artificial Sequence
  Description of Artificial Sequence: Synthetic oligonucleotide
  Antisense strand to SEQ ID NO: 1168654
uccaacaucauucaaaugg

SEQ ID NO: 1168656 - RNA, 19 nt, Artificial Sequence
  Description of Artificial Sequence: Synthetic oligonucleotide
  Sense strand starting at position 2193 of SEQ ID NO: 916591
ugcccuauggaggaaaguu

SEQ ID NO: 1168657 - RNA, 19 nt, Artificial Sequence
  Description of Artificial Sequence: Synthetic oligonucleotide
  Antisense strand to SEQ ID NO: 1168656
aacuuuccuccauagggca

SEQ ID NO: 1168658 - RNA, 19 nt, Artificial Sequence
  Description of Artificial Sequence: Synthetic oligonucleotide
  Sense strand starting at position 2201 of SEQ ID NO: 916591
ggaggaaaguucuugucau

SEQ ID NO: 1168659 - RNA, 19 nt, Artificial Sequence
  Description of Artificial Sequence: Synthetic oligonucleotide
  Antisense strand to SEQ ID NO: 1168658
augacaagaacuuuccucc

SEQ ID NO: 1168660 - RNA, 19 nt, Artificial Sequence
  Description of Artificial Sequence: Synthetic oligonucleotide
  Sense strand starting at position 2208 of SEQ ID NO: 916591
aguucuugucauuauguuu

SEQ ID NO: 1168661 - RNA, 19 nt, Artificial Sequence
  Description of Artificial Sequence: Synthetic oligonucleotide
  Antisense strand to SEQ ID NO: 1168660
aaacauaaugacaagaacu

SEQ ID NO: 1168662 - RNA, 19 nt, Artificial Sequence
  Description of Artificial Sequence: Synthetic oligonucleotide
  Sense strand starting at position 2213 of SEQ ID NO: 916591
uugucauuauguuuccaca

SEQ ID NO: 1168663 - RNA, 19 nt, Artificial Sequence
  Description of Artificial Sequence: Synthetic oligonucleotide
  Antisense strand to SEQ ID NO: 1168662
uguggaaacauaaugacaa

SEQ ID NO: 1168664 - RNA, 19 nt, Artificial Sequence
  Description of Artificial Sequence: Synthetic oligonucleotide
  Sense strand starting at position 2215 of SEQ ID NO: 916591
gucauuauguuuccacauu

SEQ ID NO: 1168665 - RNA, 19 nt, Artificial Sequence
  Description of Artificial Sequence: Synthetic oligonucleotide
  Antisense strand to SEQ ID NO: 1168664
aauguggaaacauaaugac

SEQ ID NO: 1168666 - RNA, 19 nt, Artificial Sequence
  Description of Artificial Sequence: Synthetic oligonucleotide
  Sense strand starting at position 2239 of SEQ ID NO: 916591
cucccuagugcucacauga

SEQ ID NO: 1168667 - RNA, 19 nt, Artificial Sequence
  Description of Artificial Sequence: Synthetic oligonucleotide
  Antisense strand to SEQ ID NO: 1168666
ucaugugagcacuagggag

SEQ ID NO: 1168668 - RNA, 19 nt, Artificial Sequence
  Description of Artificial Sequence: Synthetic oligonucleotide
  Sense strand starting at position 2333 of SEQ ID NO: 916591
cuccuuccagaaugguuau

SEQ ID NO: 1168669 - RNA, 19 nt, Artificial Sequence
  Description of Artificial Sequence: Synthetic oligonucleotide
  Antisense strand to SEQ ID NO: 1168668
auaaccauucuggaaggag

SEQ ID NO: 1168670 - RNA, 19 nt, Artificial Sequence
  Description of Artificial Sequence: Synthetic oligonucleotide
  Sense strand starting at position 2336 of SEQ ID NO: 916591
cuuccagaaugguuaugaa

SEQ ID NO: 1168671 - RNA, 19 nt, Artificial Sequence
  Description of Artificial Sequence: Synthetic oligonucleotide
  Antisense strand to SEQ ID NO: 1168670
uucauaaccauucuggaag

SEQ ID NO: 1168672 - RNA, 19 nt, Artificial Sequence
  Description of Artificial Sequence: Synthetic oligonucleotide
  Sense strand starting at position 2339 of SEQ ID NO: 916591
ccagaaugguuaugaauuu

SEQ ID NO: 1168673 - RNA, 19 nt, Artificial Sequence
  Description of Artificial Sequence: Synthetic oligonucleotide
  Antisense strand to SEQ ID NO: 1168672
aaauucauaaccauucugg

SEQ ID NO: 1168674 - RNA, 19 nt, Artificial Sequence
  Description of Artificial Sequence: Synthetic oligonucleotide
  Sense strand starting at position 2418 of SEQ ID NO: 916591
gugccuaacucuucucaga

SEQ ID NO: 1168675 - RNA, 19 nt, Artificial Sequence
  Description of Artificial Sequence: Synthetic oligonucleotide
  Antisense strand to SEQ ID NO: 1168674
ucugagaagaguuaggcac

SEQ ID NO: 1168676 - RNA, 19 nt, Artificial Sequence
  Description of Artificial Sequence: Synthetic oligonucleotide
  Sense strand starting at position 2615 of SEQ ID NO: 916591
guguauuaggguuaugcua

SEQ ID NO: 1168677 - RNA, 19 nt, Artificial Sequence
  Description of Artificial Sequence: Synthetic oligonucleotide
  Antisense strand to SEQ ID NO: 1168676
uagcauaacccuaauacac

SEQ ID NO: 1168678 - RNA, 19 nt, Artificial Sequence
  Description of Artificial Sequence: Synthetic oligonucleotide
  Sense strand starting at position 2628 of SEQ ID NO: 916591
augcuauucuguccuuuga

SEQ ID NO: 1168679 - RNA, 19 nt, Artificial Sequence
  Description of Artificial Sequence: Synthetic oligonucleotide
  Antisense strand to SEQ ID NO: 1168678
ucaaaggacagaauagcau

SEQ ID NO: 1168680 - RNA, 19 nt, Artificial Sequence
  Description of Artificial Sequence: Synthetic oligonucleotide
  Sense strand starting at position 2630 of SEQ ID NO: 916591
gcuauucuguccuuugaaa

SEQ ID NO: 1168681 - RNA, 19 nt, Artificial Sequence
  Description of Artificial Sequence: Synthetic oligonucleotide
  Antisense strand to SEQ ID NO: 1168680
uuucaaaggacagaauagc

SEQ ID NO: 1168682 - RNA, 19 nt, Artificial Sequence
  Description of Artificial Sequence: Synthetic oligonucleotide
  Sense strand starting at position 2845 of SEQ ID NO: 916591
uuuacuaugucugugaauc

SEQ ID NO: 1168683 - RNA, 19 nt, Artificial Sequence
  Description of Artificial Sequence: Synthetic oligonucleotide
  Antisense strand to SEQ ID NO: 1168682
gauucacagacauaguaaa

SEQ ID NO: 1168684 - RNA, 19 nt, Artificial Sequence
  Description of Artificial Sequence: Synthetic oligonucleotide
  Sense strand starting at position 2846 of SEQ ID NO: 916591
uuacuaugucugugaaucc

SEQ ID NO: 1168685 - RNA, 19 nt, Artificial Sequence
  Description of Artificial Sequence: Synthetic oligonucleotide
  Antisense strand to SEQ ID NO: 1168684
ggauucacagacauaguaa

SEQ ID NO: 1168686 - RNA, 19 nt, Artificial Sequence
  Description of Artificial Sequence: Synthetic oligonucleotide
  Sense strand starting at position 2988 of SEQ ID NO: 916591
guuucuacuuuauuuguga

SEQ ID NO: 1168687 - RNA, 19 nt, Artificial Sequence
  Description of Artificial Sequence: Synthetic oligonucleotide
  Antisense strand to SEQ ID NO: 1168686
ucacaaauaaaguagaaac

SEQ ID NO: 1168688 - RNA, 19 nt, Artificial Sequence
  Description of Artificial Sequence: Synthetic oligonucleotide
  Sense strand starting at position 3023 of SEQ ID NO: 916591
agucacauuaucugggagu

SEQ ID NO: 1168689 - RNA, 19 nt, Artificial Sequence
  Description of Artificial Sequence: Synthetic oligonucleotide
  Antisense strand to SEQ ID NO: 1168688
acucccagauaaugugacu

SEQ ID NO: 1168690 - RNA, 19 nt, Artificial Sequence
  Description of Artificial Sequence: Synthetic oligonucleotide
  Sense strand starting at position 3188 of SEQ ID NO: 916591
uagagcguuccuuaccaca

SEQ ID NO: 1168691 - RNA, 19 nt, Artificial Sequence
  Description of Artificial Sequence: Synthetic oligonucleotide
  Antisense strand to SEQ ID NO: 1168690
ugugguaaggaacgcucua

SEQ ID NO: 1168692 - RNA, 19 nt, Artificial Sequence
  Description of Artificial Sequence: Synthetic oligonucleotide
  Sense strand starting at position 3190 of SEQ ID NO: 916591
gagcguuccuuaccacaua

SEQ ID NO: 1168693 - RNA, 19 nt, Artificial Sequence
  Description of Artificial Sequence: Synthetic oligonucleotide
  Antisense strand to SEQ ID NO: 1168692
uaugugguaaggaacgcuc

SEQ ID NO: 1168694 - RNA, 19 nt, Artificial Sequence
  Description of Artificial Sequence: Synthetic oligonucleotide
  Sense strand starting at position 3274 of SEQ ID NO: 916591
gcauuagcaugaucaugac

SEQ ID NO: 1168695 - RNA, 19 nt, Artificial Sequence
  Description of Artificial Sequence: Synthetic oligonucleotide
  Antisense strand to SEQ ID NO: 1168694
gucaugaucaugcuaaugc

SEQ ID NO: 1168696 - RNA, 19 nt, Artificial Sequence
  Description of Artificial Sequence: Synthetic oligonucleotide
  Sense strand starting at position 3280 of SEQ ID NO: 916591
gcaugaucaugacucacuu

SEQ ID NO: 1168697 - RNA, 19 nt, Artificial Sequence
  Description of Artificial Sequence: Synthetic oligonucleotide
  Antisense strand to SEQ ID NO: 1168696
aagugagucaugaucaugc

SEQ ID NO: 1168698 - RNA, 19 nt, Artificial Sequence
  Description of Artificial Sequence: Synthetic oligonucleotide
  Sense strand starting at position 3516 of SEQ ID NO: 916591
guaccugacccaugugaua

SEQ ID NO: 1168699 - RNA, 19 nt, Artificial Sequence
  Description of Artificial Sequence: Synthetic oligonucleotide
  Antisense strand to SEQ ID NO: 1168698
uaucacaugggucagguac

SEQ ID NO: 1168700 - RNA, 19 nt, Artificial Sequence
  Description of Artificial Sequence: Synthetic oligonucleotide
  Sense strand starting at position 3606 of SEQ ID NO: 916591
uuggguugcagucaacagu

SEQ ID NO: 1168701 - RNA, 19 nt, Artificial Sequence
  Description of Artificial Sequence: Synthetic oligonucleotide
  Antisense strand to SEQ ID NO: 1168700
acuguugacugcaacccaa

SEQ ID NO: 1168702 - RNA, 19 nt, Artificial Sequence
  Description of Artificial Sequence: Synthetic oligonucleotide
  Sense strand starting at position 3706 of SEQ ID NO: 916591
agaaguuagcuuggagaug

SEQ ID NO: 1168703 - RNA, 19 nt, Artificial Sequence
  Description of Artificial Sequence: Synthetic oligonucleotide
  Antisense strand to SEQ ID NO: 1168702
caucuccaagcuaacuucu

SEQ ID NO: 1168704 - RNA, 19 nt, Artificial Sequence
  Description of Artificial Sequence: Synthetic oligonucleotide
  Sense strand starting at position 3785 of SEQ ID NO: 916591
guuacuaaccuggagucuu

SEQ ID NO: 1168705 - RNA, 19 nt, Artificial Sequence
  Description of Artificial Sequence: Synthetic oligonucleotide
  Antisense strand to SEQ ID NO: 1168704
aagacuccagguuaguaac

SEQ ID NO: 1168706 - RNA, 19 nt, Artificial Sequence
  Description of Artificial Sequence: Synthetic oligonucleotide
  Sense strand starting at position 3915 of SEQ ID NO: 916591
aaugacuauugugagauuu

SEQ ID NO: 1168707 - RNA, 19 nt, Artificial Sequence
  Description of Artificial Sequence: Synthetic oligonucleotide
  Antisense strand to SEQ ID NO: 1168706
aaaucucacaauagucauu

SEQ ID NO: 1168708 - RNA, 19 nt, Artificial Sequence
  Description of Artificial Sequence: Synthetic oligonucleotide
  Sense strand starting at position 3939 of SEQ ID NO: 916591
cuaaauauucuugguggca

SEQ ID NO: 1168709 - RNA, 19 nt, Artificial Sequence
  Description of Artificial Sequence: Synthetic oligonucleotide
  Antisense strand to SEQ ID NO: 1168708
ugccaccaagaauauuuag

SEQ ID NO: 1168710 - RNA, 19 nt, Artificial Sequence
  Description of Artificial Sequence: Synthetic oligonucleotide
  Sense strand starting at position 3940 of SEQ ID NO: 916591
uaaauauucuugguggcaa

SEQ ID NO: 1168711 - RNA, 19 nt, Artificial Sequence
  Description of Artificial Sequence: Synthetic oligonucleotide
  Antisense strand to SEQ ID NO: 1168710
uugccaccaagaauauuua

SEQ ID NO: 1168712 - RNA, 19 nt, Artificial Sequence
  Description of Artificial Sequence: Synthetic oligonucleotide
  Sense strand starting at position 3942 of SEQ ID NO: 916591
aauauucuugguggcaaau

SEQ ID NO: 1168713 - RNA, 19 nt, Artificial Sequence
  Description of Artificial Sequence: Synthetic oligonucleotide
  Antisense strand to SEQ ID NO: 1168712
auuugccaccaagaauauu

SEQ ID NO: 1168714 - RNA, 19 nt, Artificial Sequence
  Description of Artificial Sequence: Synthetic oligonucleotide
  Sense strand starting at position 406 of SEQ ID NO: 916592
guauuugcauaugugucua

SEQ ID NO: 1168715 - RNA, 19 nt, Artificial Sequence
  Description of Artificial Sequence: Synthetic oligonucleotide
  Antisense strand to SEQ ID NO: 1168714
uagacacauaugcaaauac

SEQ ID NO: 1168716 - RNA, 19 nt, Artificial Sequence
  Description of Artificial Sequence: Synthetic oligonucleotide
  Sense strand starting at position 411 of SEQ ID NO: 916592
ugcauaugugucuauccau

SEQ ID NO: 1168717 - RNA, 19 nt, Artificial Sequence
  Description of Artificial Sequence: Synthetic oligonucleotide
  Antisense strand to SEQ ID NO: 1168716
auggauagacacauaugca

SEQ ID NO: 1168718 - RNA, 19 nt, Artificial Sequence
  Description of Artificial Sequence: Synthetic oligonucleotide
  Sense strand starting at position 414 of SEQ ID NO: 916592
auaugugucuauccaucau

SEQ ID NO: 1168719 - RNA, 19 nt, Artificial Sequence
  Description of Artificial Sequence: Synthetic oligonucleotide
  Antisense strand to SEQ ID NO: 1168718
augauggauagacacauau

SEQ ID NO: 1168720 - RNA, 19 nt, Artificial Sequence
  Description of Artificial Sequence: Synthetic oligonucleotide
  Sense strand starting at position 418 of SEQ ID NO: 916592
gugucuauccaucaucugu

SEQ ID NO: 1168721 - RNA, 19 nt, Artificial Sequence
  Description of Artificial Sequence: Synthetic oligonucleotide
  Antisense strand to SEQ ID NO: 1168720
acagaugauggauagacac

SEQ ID NO: 1168722 - RNA, 19 nt, Artificial Sequence
  Description of Artificial Sequence: Synthetic oligonucleotide
  Sense strand starting at position 519 of SEQ ID NO: 916592
ggucuaggcuccuuuauua

SEQ ID NO: 1168723 - RNA, 19 nt, Artificial Sequence
  Description of Artificial Sequence: Synthetic oligonucleotide
  Antisense strand to SEQ ID NO: 1168722
uaauaaaggagccuagacc

SEQ ID NO: 1168724 - RNA, 19 nt, Artificial Sequence
  Description of Artificial Sequence: Synthetic oligonucleotide
  Sense strand starting at position 651 of SEQ ID NO: 916592
ccuagaacaucaguagcau

SEQ ID NO: 1168725 - RNA, 19 nt, Artificial Sequence
  Description of Artificial Sequence: Synthetic oligonucleotide
  Antisense strand to SEQ ID NO: 1168724
augcuacugauguucuagg

SEQ ID NO: 1168726 - RNA, 19 nt, Artificial Sequence
  Description of Artificial Sequence: Synthetic oligonucleotide
  Sense strand starting at position 657 of SEQ ID NO: 916592
acaucaguagcauagugaa

SEQ ID NO: 1168727 - RNA, 19 nt, Artificial Sequence
  Description of Artificial Sequence: Synthetic oligonucleotide
  Antisense strand to SEQ ID NO: 1168726
uucacuaugcuacugaugu

SEQ ID NO: 1168728 - RNA, 19 nt, Artificial Sequence
  Description of Artificial Sequence: Synthetic oligonucleotide
  Sense strand starting at position 664 of SEQ ID NO: 916592
uagcauagugaagggaauu

SEQ ID NO: 1168729 - RNA, 19 nt, Artificial Sequence
  Description of Artificial Sequence: Synthetic oligonucleotide
  Antisense strand to SEQ ID NO: 1168728
aauucccuucacuaugcua

SEQ ID NO: 1168730 - RNA, 19 nt, Artificial Sequence
  Description of Artificial Sequence: Synthetic oligonucleotide
  Sense strand starting at position 710 of SEQ ID NO: 916592
acuauauguucuguguaua

SEQ ID NO: 1168731 - RNA, 19 nt, Artificial Sequence
  Description of Artificial Sequence: Synthetic oligonucleotide
  Antisense strand to SEQ ID NO: 1168730
uauacacagaacauauagu

SEQ ID NO: 1168732 - RNA, 19 nt, Artificial Sequence
  Description of Artificial Sequence: Synthetic oligonucleotide
  Sense strand starting at position 711 of SEQ ID NO: 916592
cuauauguucuguguauaa

SEQ ID NO: 1168733 - RNA, 19 nt, Artificial Sequence
  Description of Artificial Sequence: Synthetic oligonucleotide
  Antisense strand to SEQ ID NO: 1168732
uuauacacagaacauauag

SEQ ID NO: 1168734 - RNA, 19 nt, Artificial Sequence
  Description of Artificial Sequence: Synthetic oligonucleotide
  Sense strand starting at position 713 of SEQ ID NO: 916592
auauguucuguguauaaca

SEQ ID NO: 1168735 - RNA, 19 nt, Artificial Sequence
  Description of Artificial Sequence: Synthetic oligonucleotide
  Antisense strand to SEQ ID NO: 1168734
uguuauacacagaacauau

SEQ ID NO: 1168736 - RNA, 19 nt, Artificial Sequence
  Description of Artificial Sequence: Synthetic oligonucleotide
  Sense strand starting at position 763 of SEQ ID NO: 916592
auuccaauguaucuaggua

SEQ ID NO: 1168737 - RNA, 19 nt, Artificial Sequence
  Description of Artificial Sequence: Synthetic oligonucleotide
  Antisense strand to SEQ ID NO: 1168736
uaccuagauacauuggaau

SEQ ID NO: 1168738 - RNA, 19 nt, Artificial Sequence
  Description of Artificial Sequence: Synthetic oligonucleotide
  Sense strand starting at position 833 of SEQ ID NO: 916592
ucuugaagagcuuguaauu

SEQ ID NO: 1168739 - RNA, 19 nt, Artificial Sequence
  Description of Artificial Sequence: Synthetic oligonucleotide
  Antisense strand to SEQ ID NO: 1168738
aauuacaagcucuucaaga

SEQ ID NO: 1168740 - RNA, 19 nt, Artificial Sequence
  Description of Artificial Sequence: Synthetic oligonucleotide
  Sense strand starting at position 2061 of SEQ ID NO: 916592
cuugaagaguuaucaauua

SEQ ID NO: 1168741 - RNA, 19 nt, Artificial Sequence
  Description of Artificial Sequence: Synthetic oligonucleotide
  Antisense strand to SEQ ID NO: 1168740
uaauugauaacucuucaag

SEQ ID NO: 1168742 - RNA, 19 nt, Artificial Sequence
  Description of Artificial Sequence: Synthetic oligonucleotide
  Sense strand starting at position 2099 of SEQ ID NO: 916592
gcuggaguuugguugacau

SEQ ID NO: 1168743 - RNA, 19 nt, Artificial Sequence
  Description of Artificial Sequence: Synthetic oligonucleotide
  Antisense strand to SEQ ID NO: 1168742
augucaaccaaacuccagc

SEQ ID NO: 1168744 - RNA, 19 nt, Artificial Sequence
  Description of Artificial Sequence: Synthetic oligonucleotide
  Sense strand starting at position 2101 of SEQ ID NO: 916592
uggaguuugguugacauag

SEQ ID NO: 1168745 - RNA, 19 nt, Artificial Sequence
  Description of Artificial Sequence: Synthetic oligonucleotide
  Antisense strand to SEQ ID NO: 1168744
cuaugucaaccaaacucca

SEQ ID NO: 1168746 - RNA, 19 nt, Artificial Sequence
  Description of Artificial Sequence: Synthetic oligonucleotide
  Sense strand starting at position 2110 of SEQ ID NO: 916592
guugacauaguaugccauu

SEQ ID NO: 1168747 - RNA, 19 nt, Artificial Sequence
  Description of Artificial Sequence: Synthetic oligonucleotide
  Antisense strand to SEQ ID NO: 1168746
aauggcauacuaugucaac

SEQ ID NO: 1168748 - RNA, 19 nt, Artificial Sequence
  Description of Artificial Sequence: Synthetic oligonucleotide
  Sense strand starting at position 2238 of SEQ ID NO: 916592
uguuaucacaguuggaagu

SEQ ID NO: 1168749 - RNA, 19 nt, Artificial Sequence
  Description of Artificial Sequence: Synthetic oligonucleotide
  Antisense strand to SEQ ID NO: 1168748
acuuccaacugugauaaca

SEQ ID NO: 1168750 - RNA, 19 nt, Artificial Sequence
  Description of Artificial Sequence: Synthetic oligonucleotide
  Sense strand starting at position 2402 of SEQ ID NO: 916592
aaguuugauuacucugaug

SEQ ID NO: 1168751 - RNA, 19 nt, Artificial Sequence
  Description of Artificial Sequence: Synthetic oligonucleotide
  Antisense strand to SEQ ID NO: 1168750
caucagaguaaucaaacuu

SEQ ID NO: 1168752 - RNA, 19 nt, Artificial Sequence
  Description of Artificial Sequence: Synthetic oligonucleotide
  Sense strand starting at position 2404 of SEQ ID NO: 916592
guuugauuacucugaugau

SEQ ID NO: 1168753 - RNA, 19 nt, Artificial Sequence
  Description of Artificial Sequence: Synthetic oligonucleotide
  Antisense strand to SEQ ID NO: 1168752
aucaucagaguaaucaaac

SEQ ID NO: 1168754 - RNA, 19 nt, Artificial Sequence
  Description of Artificial Sequence: Synthetic oligonucleotide
  Sense strand starting at position 2767 of SEQ ID NO: 916592
guccuuagccauugugaaa

SEQ ID NO: 1168755 - RNA, 19 nt, Artificial Sequence
  Description of Artificial Sequence: Synthetic oligonucleotide
  Antisense strand to SEQ ID NO: 1168754
uuucacaauggcuaaggac

SEQ ID NO: 1168756 - RNA, 19 nt, Artificial Sequence
  Description of Artificial Sequence: Synthetic oligonucleotide
  Sense strand starting at position 2779 of SEQ ID NO: 916592
ugugaaaguugauuguaug

SEQ ID NO: 1168757 - RNA, 19 nt, Artificial Sequence
  Description of Artificial Sequence: Synthetic oligonucleotide
  Antisense strand to SEQ ID NO: 1168756
cauacaaucaacuuucaca

SEQ ID NO: 1168758 - RNA, 19 nt, Artificial Sequence
  Description of Artificial Sequence: Synthetic oligonucleotide
  Sense strand starting at position 2875 of SEQ ID NO: 916592
auggcauugcucuaagaau

SEQ ID NO: 1168759 - RNA, 19 nt, Artificial Sequence
  Description of Artificial Sequence: Synthetic oligonucleotide
  Antisense strand to SEQ ID NO: 1168758
auucuuagagcaaugccau

SEQ ID NO: 1168760 - RNA, 19 nt, Artificial Sequence
  Description of Artificial Sequence: Synthetic oligonucleotide
  Sense strand starting at position 2890 of SEQ ID NO: 916592
gaauguaauucuguguaag

SEQ ID NO: 1168761 - RNA, 19 nt, Artificial Sequence
  Description of Artificial Sequence: Synthetic oligonucleotide
  Antisense strand to SEQ ID NO: 1168760
cuuacacagaauuacauuc

SEQ ID NO: 1168762 - RNA, 19 nt, Artificial Sequence
  Description of Artificial Sequence: Synthetic oligonucleotide
  Sense strand starting at position 2893 of SEQ ID NO: 916592
uguaauucuguguaagccu

SEQ ID NO: 1168763 - RNA, 19 nt, Artificial Sequence
  Description of Artificial Sequence: Synthetic oligonucleotide
  Antisense strand to SEQ ID NO: 1168762
aggcuuacacagaauuaca

SEQ ID NO: 1168764 - RNA, 19 nt, Artificial Sequence
  Description of Artificial Sequence: Synthetic oligonucleotide
  Sense strand starting at position 2935 of SEQ ID NO: 916592
accugaaaucuguguuauc

SEQ ID NO: 1168765 - RNA, 19 nt, Artificial Sequence
  Description of Artificial Sequence: Synthetic oligonucleotide
  Antisense strand to SEQ ID NO: 1168764
gauaacacagauuucaggu

SEQ ID NO: 1168766 - RNA, 19 nt, Artificial Sequence
  Description of Artificial Sequence: Synthetic oligonucleotide
  Sense strand starting at position 2936 of SEQ ID NO: 916592
ccugaaaucuguguuaucu

SEQ ID NO: 1168767 - RNA, 19 nt, Artificial Sequence
  Description of Artificial Sequence: Synthetic oligonucleotide
  Antisense strand to SEQ ID NO: 1168766
agauaacacagauuucagg

SEQ ID NO: 1168768 - RNA, 19 nt, Artificial Sequence
  Description of Artificial Sequence: Synthetic oligonucleotide
  Sense strand starting at position 2953 of SEQ ID NO: 916592
cuaauagcugcugaaauca

SEQ ID NO: 1168769 - RNA, 19 nt, Artificial Sequence
  Description of Artificial Sequence: Synthetic oligonucleotide
  Antisense strand to SEQ ID NO: 1168768
ugauuucagcagcuauuag

SEQ ID NO: 1168770 - RNA, 19 nt, Artificial Sequence
  Description of Artificial Sequence: Synthetic oligonucleotide
  Sense strand starting at position 2988 of SEQ ID NO: 916592
ggguauccuauggguaguu

SEQ ID NO: 1168771 - RNA, 19 nt, Artificial Sequence
  Description of Artificial Sequence: Synthetic oligonucleotide
  Antisense strand to SEQ ID NO: 1168770
aacuacccauaggauaccc

SEQ ID NO: 1168772 - RNA, 19 nt, Artificial Sequence
  Description of Artificial Sequence: Synthetic oligonucleotide
  Sense strand starting at position 3168 of SEQ ID NO: 916592
uguguauuccuugaauuga

SEQ ID NO: 1168773 - RNA, 19 nt, Artificial Sequence
  Description of Artificial Sequence: Synthetic oligonucleotide
  Antisense strand to SEQ ID NO: 1168772
ucaauucaaggaauacaca

SEQ ID NO: 1168774 - RNA, 19 nt, Artificial Sequence
  Description of Artificial Sequence: Synthetic oligonucleotide
  Sense strand starting at position 3249 of SEQ ID NO: 916592
ccuuaaugccaucgaucaa

SEQ ID NO: 1168775 - RNA, 19 nt, Artificial Sequence
  Description of Artificial Sequence: Synthetic oligonucleotide
  Antisense strand to SEQ ID NO: 1168774
uugaucgauggcauuaagg

SEQ ID NO: 1168776 - RNA, 19 nt, Artificial Sequence
  Description of Artificial Sequence: Synthetic oligonucleotide
  Sense strand starting at position 3297 of SEQ ID NO: 916592
cuacguccacuuuauugaa

SEQ ID NO: 1168777 - RNA, 19 nt, Artificial Sequence
  Description of Artificial Sequence: Synthetic oligonucleotide
  Antisense strand to SEQ ID NO: 1168776
uucaauaaaguggacguag

SEQ ID NO: 1168778 - RNA, 19 nt, Artificial Sequence
  Description of Artificial Sequence: Synthetic oligonucleotide
  Sense strand starting at position 3385 of SEQ ID NO: 916592
agaauaauguaagcuggaa

SEQ ID NO: 1168779 - RNA, 19 nt, Artificial Sequence
  Description of Artificial Sequence: Synthetic oligonucleotide
  Antisense strand to SEQ ID NO: 1168778
uuccagcuuacauuauucu

SEQ ID NO: 1168780 - RNA, 19 nt, Artificial Sequence
  Description of Artificial Sequence: Synthetic oligonucleotide
  Sense strand starting at position 3564 of SEQ ID NO: 916592
gaaggaugcccucaguuaa

SEQ ID NO: 1168781 - RNA, 19 nt, Artificial Sequence
  Description of Artificial Sequence: Synthetic oligonucleotide
  Antisense strand to SEQ ID NO: 1168780
uuaacugagggcauccuuc

SEQ ID NO: 1168782 - RNA, 19 nt, Artificial Sequence
  Description of Artificial Sequence: Synthetic oligonucleotide
  Sense strand starting at position 3608 of SEQ ID NO: 916592
agauuugcuuaauugugua

SEQ ID NO: 1168783 - RNA, 19 nt, Artificial Sequence
  Description of Artificial Sequence: Synthetic oligonucleotide
  Antisense strand to SEQ ID NO: 1168782
uacacaauuaagcaaaucu

SEQ ID NO: 1168784 - RNA, 19 nt, Artificial Sequence
  Description of Artificial Sequence: Synthetic oligonucleotide
  Sense strand starting at position 3712 of SEQ ID NO: 916592
gagugagguuaucuaguuu

SEQ ID NO: 1168785 - RNA, 19 nt, Artificial Sequence
  Description of Artificial Sequence: Synthetic oligonucleotide
  Antisense strand to SEQ ID NO: 1168784
aaacuagauaaccucacuc

SEQ ID NO: 1168786 - RNA, 19 nt, Artificial Sequence
  Description of Artificial Sequence: Synthetic oligonucleotide
  Sense strand starting at position 3778 of SEQ ID NO: 916592
gucucaguauccucaccua

SEQ ID NO: 1168787 - RNA, 19 nt, Artificial Sequence
  Description of Artificial Sequence: Synthetic oligonucleotide
  Antisense strand to SEQ ID NO: 1168786
uaggugaggauacugagac

SEQ ID NO: 1168788 - RNA, 19 nt, Artificial Sequence
  Description of Artificial Sequence: Synthetic oligonucleotide
  Sense strand starting at position 3781 of SEQ ID NO: 916592
ucaguauccucaccuauag

SEQ ID NO: 1168789 - RNA, 19 nt, Artificial Sequence
  Description of Artificial Sequence: Synthetic oligonucleotide
  Antisense strand to SEQ ID NO: 1168788
cuauaggugaggauacuga

SEQ ID NO: 1168790 - RNA, 19 nt, Artificial Sequence
  Description of Artificial Sequence: Synthetic oligonucleotide
  Sense strand starting at position 3811 of SEQ ID NO: 916592
guauacaagucugucucau

SEQ ID NO: 1168791 - RNA, 19 nt, Artificial Sequence
  Description of Artificial Sequence: Synthetic oligonucleotide
  Antisense strand to SEQ ID NO: 1168790
augagacagacuuguauac

SEQ ID NO: 1168792 - RNA, 19 nt, Artificial Sequence
  Description of Artificial Sequence: Synthetic oligonucleotide
  Sense strand starting at position 3813 of SEQ ID NO: 916592
auacaagucugucucauag

SEQ ID NO: 1168793 - RNA, 19 nt, Artificial Sequence
  Description of Artificial Sequence: Synthetic oligonucleotide
  Antisense strand to SEQ ID NO: 1168792
cuaugagacagacuuguau

SEQ ID NO: 1168794 - RNA, 19 nt, Artificial Sequence
  Description of Artificial Sequence: Synthetic oligonucleotide
  Sense strand starting at position 268 of SEQ ID NO: 916593
aaagaauauugguugguua

SEQ ID NO: 1168795 - RNA, 19 nt, Artificial Sequence
  Description of Artificial Sequence: Synthetic oligonucleotide
  Antisense strand to SEQ ID NO: 1168794
uaaccaaccaauauucuuu

SEQ ID NO: 1168796 - RNA, 19 nt, Artificial Sequence
  Description of Artificial Sequence: Synthetic oligonucleotide
  Sense strand starting at position 269 of SEQ ID NO: 916593
aagaauauugguugguuau

SEQ ID NO: 1168797 - RNA, 19 nt, Artificial Sequence
  Description of Artificial Sequence: Synthetic oligonucleotide
  Antisense strand to SEQ ID NO: 1168796
auaaccaaccaauauucuu

SEQ ID NO: 1168798 - RNA, 19 nt, Artificial Sequence
  Description of Artificial Sequence: Synthetic oligonucleotide
  Sense strand starting at position 270 of SEQ ID NO: 916593
agaauauugguugguuauc

SEQ ID NO: 1168799 - RNA, 19 nt, Artificial Sequence
  Description of Artificial Sequence: Synthetic oligonucleotide
  Antisense strand to SEQ ID NO: 1168798
gauaaccaaccaauauucu

SEQ ID NO: 1168800 - RNA, 19 nt, Artificial Sequence
  Description of Artificial Sequence: Synthetic oligonucleotide
  Sense strand starting at position 280 of SEQ ID NO: 916593
uugguuauccuccauaucu

SEQ ID NO: 1168801 - RNA, 19 nt, Artificial Sequence
  Description of Artificial Sequence: Synthetic oligonucleotide
  Antisense strand to SEQ ID NO: 1168800
agauauggaggauaaccaa

SEQ ID NO: 1168802 - RNA, 19 nt, Artificial Sequence
  Description of Artificial Sequence: Synthetic oligonucleotide
  Sense strand starting at position 282 of SEQ ID NO: 916593
gguuauccuccauaucuuc

SEQ ID NO: 1168803 - RNA, 19 nt, Artificial Sequence
  Description of Artificial Sequence: Synthetic oligonucleotide
  Antisense strand to SEQ ID NO: 1168802
gaagauauggaggauaacc

SEQ ID NO: 1168804 - RNA, 19 nt, Artificial Sequence
  Description of Artificial Sequence: Synthetic oligonucleotide
  Sense strand starting at position 322 of SEQ ID NO: 916593
uguugugguaaauaguuau

SEQ ID NO: 1168805 - RNA, 19 nt, Artificial Sequence
  Description of Artificial Sequence: Synthetic oligonucleotide
  Antisense strand to SEQ ID NO: 1168804
auaacuauuuaccacaaca

SEQ ID NO: 1168806 - RNA, 19 nt, Artificial Sequence
  Description of Artificial Sequence: Synthetic oligonucleotide
  Sense strand starting at position 326 of SEQ ID NO: 916593
gugguaaauaguuaucuua

SEQ ID NO: 1168807 - RNA, 19 nt, Artificial Sequence
  Description of Artificial Sequence: Synthetic oligonucleotide
  Antisense strand to SEQ ID NO: 1168806
uaagauaacuauuuaccac

SEQ ID NO: 1168808 - RNA, 19 nt, Artificial Sequence
  Description of Artificial Sequence: Synthetic oligonucleotide
  Sense strand starting at position 499 of SEQ ID NO: 916593
uaauaugucuugccagaga

SEQ ID NO: 1168809 - RNA, 19 nt, Artificial Sequence
  Description of Artificial Sequence: Synthetic oligonucleotide
  Antisense strand to SEQ ID NO: 1168808
ucucuggcaagacauauua

SEQ ID NO: 1168810 - RNA, 19 nt, Artificial Sequence
  Description of Artificial Sequence: Synthetic oligonucleotide
  Sense strand starting at position 580 of SEQ ID NO: 916593
cccaguuauccugauagac

SEQ ID NO: 1168811 - RNA, 19 nt, Artificial Sequence
  Description of Artificial Sequence: Synthetic oligonucleotide
  Antisense strand to SEQ ID NO: 1168810
gucuaucaggauaacuggg

SEQ ID NO: 1168812 - RNA, 19 nt, Artificial Sequence
  Description of Artificial Sequence: Synthetic oligonucleotide
  Sense strand starting at position 882 of SEQ ID NO: 916593
augaccuugguucgaaaua

SEQ ID NO: 1168813 - RNA, 19 nt, Artificial Sequence
  Description of Artificial Sequence: Synthetic oligonucleotide
  Antisense strand to SEQ ID NO: 1168812
uauuucgaaccaaggucau

SEQ ID NO: 1168814 - RNA, 19 nt, Artificial Sequence
  Description of Artificial Sequence: Synthetic oligonucleotide
  Sense strand starting at position 965 of SEQ ID NO: 916593
acuaaacuguagucaggaa

SEQ ID NO: 1168815 - RNA, 19 nt, Artificial Sequence
  Description of Artificial Sequence: Synthetic oligonucleotide
  Antisense strand to SEQ ID NO: 1168814
uuccugacuacaguuuagu

SEQ ID NO: 1168816 - RNA, 19 nt, Artificial Sequence
  Description of Artificial Sequence: Synthetic oligonucleotide
  Sense strand starting at position 969 of SEQ ID NO: 916593
aacuguagucaggaagcaa

SEQ ID NO: 1168817 - RNA, 19 nt, Artificial Sequence
  Description of Artificial Sequence: Synthetic oligonucleotide
  Antisense strand to SEQ ID NO: 1168816
uugcuuccugacuacaguu

SEQ ID NO: 1168818 - RNA, 19 nt, Artificial Sequence
  Description of Artificial Sequence: Synthetic oligonucleotide
  Sense strand starting at position 1000 of SEQ ID NO: 916593
aaagcuguaggaugacauu

SEQ ID NO: 1168819 - RNA, 19 nt, Artificial Sequence
  Description of Artificial Sequence: Synthetic oligonucleotide
  Antisense strand to SEQ ID NO: 1168818
aaugucauccuacagcuuu

SEQ ID NO: 1168820 - RNA, 19 nt, Artificial Sequence
  Description of Artificial Sequence: Synthetic oligonucleotide
  Sense strand starting at position 1058 of SEQ ID NO: 916593
agcuucuacuucuuugaga

SEQ ID NO: 1168821 - RNA, 19 nt, Artificial Sequence
  Description of Artificial Sequence: Synthetic oligonucleotide
  Antisense strand to SEQ ID NO: 1168820
ucucaaagaaguagaagcu

SEQ ID NO: 1168822 - RNA, 19 nt, Artificial Sequence
  Description of Artificial Sequence: Synthetic oligonucleotide
  Sense strand starting at position 1998 of SEQ ID NO: 916593
ucaucacuguucuuugaua

SEQ ID NO: 1168823 - RNA, 19 nt, Artificial Sequence
  Description of Artificial Sequence: Synthetic oligonucleotide
  Antisense strand to SEQ ID NO: 1168822
uaucaaagaacagugauga

SEQ ID NO: 1168824 - RNA, 19 nt, Artificial Sequence
  Description of Artificial Sequence: Synthetic oligonucleotide
  Sense strand starting at position 2000 of SEQ ID NO: 916593
aucacuguucuuugauauc

SEQ ID NO: 1168825 - RNA, 19 nt, Artificial Sequence
  Description of Artificial Sequence: Synthetic oligonucleotide
  Antisense strand to SEQ ID NO: 1168824
gauaucaaagaacagugau

SEQ ID NO: 1168826 - RNA, 19 nt, Artificial Sequence
  Description of Artificial Sequence: Synthetic oligonucleotide
  Sense strand starting at position 2006 of SEQ ID NO: 916593
guucuuugauaucuaccca

SEQ ID NO: 1168827 - RNA, 19 nt, Artificial Sequence
  Description of Artificial Sequence: Synthetic oligonucleotide
  Antisense strand to SEQ ID NO: 1168826
uggguagauaucaaagaac

SEQ ID NO: 1168828 - RNA, 19 nt, Artificial Sequence
  Description of Artificial Sequence: Synthetic oligonucleotide
  Sense strand starting at position 2184 of SEQ ID NO: 916593
auauaugagcaguggauau

SEQ ID NO: 1168829 - RNA, 19 nt, Artificial Sequence
  Description of Artificial Sequence: Synthetic oligonucleotide
  Antisense strand to SEQ ID NO: 1168828
auauccacugcucauauau

SEQ ID NO: 1168830 - RNA, 19 nt, Artificial Sequence
  Description of Artificial Sequence: Synthetic oligonucleotide
  Sense strand starting at position 2195 of SEQ ID NO: 916593
guggauaucuccuuaagaa

SEQ ID NO: 1168831 - RNA, 19 nt, Artificial Sequence
  Description of Artificial Sequence: Synthetic oligonucleotide
  Antisense strand to SEQ ID NO: 1168830
uucuuaaggagauauccac

SEQ ID NO: 1168832 - RNA, 19 nt, Artificial Sequence
  Description of Artificial Sequence: Synthetic oligonucleotide
  Sense strand starting at position 2292 of SEQ ID NO: 916593
guuuguuacauggaaugga

SEQ ID NO: 1168833 - RNA, 19 nt, Artificial Sequence
  Description of Artificial Sequence: Synthetic oligonucleotide
  Antisense strand to SEQ ID NO: 1168832
uccauuccauguaacaaac

SEQ ID NO: 1168834 - RNA, 19 nt, Artificial Sequence
  Description of Artificial Sequence: Synthetic oligonucleotide
  Sense strand starting at position 2389 of SEQ ID NO: 916593
aggauauauccagguaauu

SEQ ID NO: 1168835 - RNA, 19 nt, Artificial Sequence
  Description of Artificial Sequence: Synthetic oligonucleotide
  Antisense strand to SEQ ID NO: 1168834
aauuaccuggauauauccu

SEQ ID NO: 1168836 - RNA, 19 nt, Artificial Sequence
  Description of Artificial Sequence: Synthetic oligonucleotide
  Sense strand starting at position 2428 of SEQ ID NO: 916593
guuguuaucaucugaggau

SEQ ID NO: 1168837 - RNA, 19 nt, Artificial Sequence
  Description of Artificial Sequence: Synthetic oligonucleotide
  Antisense strand to SEQ ID NO: 1168836
auccucagaugauaacaac

SEQ ID NO: 1168838 - RNA, 19 nt, Artificial Sequence
  Description of Artificial Sequence: Synthetic oligonucleotide
  Sense strand starting at position 2435 of SEQ ID NO: 916593
ucaucugaggauuguauua

SEQ ID NO: 1168839 - RNA, 19 nt, Artificial Sequence
  Description of Artificial Sequence: Synthetic oligonucleotide
  Antisense strand to SEQ ID NO: 1168838
uaauacaauccucagauga

SEQ ID NO: 1168840 - RNA, 19 nt, Artificial Sequence
  Description of Artificial Sequence: Synthetic oligonucleotide
  Sense strand starting at position 2592 of SEQ ID NO: 916593
uggguugauguacaauuau

SEQ ID NO: 1168841 - RNA, 19 nt, Artificial Sequence
  Description of Artificial Sequence: Synthetic oligonucleotide
  Antisense strand to SEQ ID NO: 1168840
auaauuguacaucaaccca

SEQ ID NO: 1168842 - RNA, 19 nt, Artificial Sequence
  Description of Artificial Sequence: Synthetic oligonucleotide
  Sense strand starting at position 2779 of SEQ ID NO: 916593
aucuuuagguccuuuagaa

SEQ ID NO: 1168843 - RNA, 19 nt, Artificial Sequence
  Description of Artificial Sequence: Synthetic oligonucleotide
  Antisense strand to SEQ ID NO: 1168842
uucuaaaggaccuaaagau

SEQ ID NO: 1168844 - RNA, 19 nt, Artificial Sequence
  Description of Artificial Sequence: Synthetic oligonucleotide
  Sense strand starting at position 2792 of SEQ ID NO: 916593
uuagaaagacaucguaugu

SEQ ID NO: 1168845 - RNA, 19 nt, Artificial Sequence
  Description of Artificial Sequence: Synthetic oligonucleotide
  Antisense strand to SEQ ID NO: 1168844
acauacgaugucuuucuaa

SEQ ID NO: 1168846 - RNA, 19 nt, Artificial Sequence
  Description of Artificial Sequence: Synthetic oligonucleotide
  Sense strand starting at position 2813 of SEQ ID NO: 916593
ucacuuauucgugacaucu

SEQ ID NO: 1168847 - RNA, 19 nt, Artificial Sequence
  Description of Artificial Sequence: Synthetic oligonucleotide
  Antisense strand to SEQ ID NO: 1168846
agaugucacgaauaaguga

SEQ ID NO: 1168848 - RNA, 19 nt, Artificial Sequence
  Description of Artificial Sequence: Synthetic oligonucleotide
  Sense strand starting at position 2915 of SEQ ID NO: 916593
gguaggugggaaugguuaa

SEQ ID NO: 1168849 - RNA, 19 nt, Artificial Sequence
  Description of Artificial Sequence: Synthetic oligonucleotide
  Antisense strand to SEQ ID NO: 1168848
uuaaccauucccaccuacc

SEQ ID NO: 1168850 - RNA, 19 nt, Artificial Sequence
  Description of Artificial Sequence: Synthetic oligonucleotide
  Sense strand starting at position 2916 of SEQ ID NO: 916593
guaggugggaaugguuaau

SEQ ID NO: 1168851 - RNA, 19 nt, Artificial Sequence
  Description of Artificial Sequence: Synthetic oligonucleotide
  Antisense strand to SEQ ID NO: 1168850
auuaaccauucccaccuac

SEQ ID NO: 1168852 - RNA, 19 nt, Artificial Sequence
  Description of Artificial Sequence: Synthetic oligonucleotide
  Sense strand starting at position 3084 of SEQ ID NO: 916593
acucauucuccaugauguc

SEQ ID NO: 1168853 - RNA, 19 nt, Artificial Sequence
  Description of Artificial Sequence: Synthetic oligonucleotide
  Antisense strand to SEQ ID NO: 1168852
gacaucauggagaaugagu

SEQ ID NO: 1168854 - RNA, 19 nt, Artificial Sequence
  Description of Artificial Sequence: Synthetic oligonucleotide
  Sense strand starting at position 3136 of SEQ ID NO: 916593
ucauguggccuauaaauac

SEQ ID NO: 1168855 - RNA, 19 nt, Artificial Sequence
  Description of Artificial Sequence: Synthetic oligonucleotide
  Antisense strand to SEQ ID NO: 1168854
guauuuauaggccacauga

SEQ ID NO: 1168856 - RNA, 19 nt, Artificial Sequence
  Description of Artificial Sequence: Synthetic oligonucleotide
  Sense strand starting at position 3159 of SEQ ID NO: 916593
auuugcuauguacgcauaa

SEQ ID NO: 1168857 - RNA, 19 nt, Artificial Sequence
  Description of Artificial Sequence: Synthetic oligonucleotide
  Antisense strand to SEQ ID NO: 1168856
uuaugcguacauagcaaau

SEQ ID NO: 1168858 - RNA, 19 nt, Artificial Sequence
  Description of Artificial Sequence: Synthetic oligonucleotide
  Sense strand starting at position 3468 of SEQ ID NO: 916593
ugugaaauauugguauucu

SEQ ID NO: 1168859 - RNA, 19 nt, Artificial Sequence
  Description of Artificial Sequence: Synthetic oligonucleotide
  Antisense strand to SEQ ID NO: 1168858
agaauaccaauauuucaca

SEQ ID NO: 1168860 - RNA, 19 nt, Artificial Sequence
  Description of Artificial Sequence: Synthetic oligonucleotide
  Sense strand starting at position 3569 of SEQ ID NO: 916593
auguaugugauguagccaa

SEQ ID NO: 1168861 - RNA, 19 nt, Artificial Sequence
  Description of Artificial Sequence: Synthetic oligonucleotide
  Antisense strand to SEQ ID NO: 1168860
uuggcuacaucacauacau

SEQ ID NO: 1168862 - RNA, 19 nt, Artificial Sequence
  Description of Artificial Sequence: Synthetic oligonucleotide
  Sense strand starting at position 3573 of SEQ ID NO: 916593
augugauguagccaaagau

SEQ ID NO: 1168863 - RNA, 19 nt, Artificial Sequence
  Description of Artificial Sequence: Synthetic oligonucleotide
  Antisense strand to SEQ ID NO: 1168862
aucuuuggcuacaucacau

SEQ ID NO: 1168864 - RNA, 19 nt, Artificial Sequence
  Description of Artificial Sequence: Synthetic oligonucleotide
  Sense strand starting at position 3705 of SEQ ID NO: 916593
guguuaccuauugcuuguu

SEQ ID NO: 1168865 - RNA, 19 nt, Artificial Sequence
  Description of Artificial Sequence: Synthetic oligonucleotide
  Antisense strand to SEQ ID NO: 1168864
aacaagcaauagguaacac

SEQ ID NO: 1168866 - RNA, 19 nt, Artificial Sequence
  Description of Artificial Sequence: Synthetic oligonucleotide
  Sense strand starting at position 3721 of SEQ ID NO: 916593
guuacagguuaaucacuuu

SEQ ID NO: 1168867 - RNA, 19 nt, Artificial Sequence
  Description of Artificial Sequence: Synthetic oligonucleotide
  Antisense strand to SEQ ID NO: 1168866
aaagugauuaaccuguaac

SEQ ID NO: 1168868 - RNA, 19 nt, Artificial Sequence
  Description of Artificial Sequence: Synthetic oligonucleotide
  Sense strand starting at position 3905 of SEQ ID NO: 916593
gacugacuggugcauacau

SEQ ID NO: 1168869 - RNA, 19 nt, Artificial Sequence
  Description of Artificial Sequence: Synthetic oligonucleotide
  Antisense strand to SEQ ID NO: 1168868
auguaugcaccagucaguc

SEQ ID NO: 1168870 - RNA, 19 nt, Artificial Sequence
  Description of Artificial Sequence: Synthetic oligonucleotide
  Sense strand starting at position 3907 of SEQ ID NO: 916593
cugacuggugcauacauau

SEQ ID NO: 1168871 - RNA, 19 nt, Artificial Sequence
  Description of Artificial Sequence: Synthetic oligonucleotide
  Antisense strand to SEQ ID NO: 1168870
auauguaugcaccagucag

SEQ ID NO: 1168872 - RNA, 19 nt, Artificial Sequence
  Description of Artificial Sequence: Synthetic oligonucleotide
  Sense strand starting at position 3953 of SEQ ID NO: 916593
ccacacagugaaugugaaa

SEQ ID NO: 1168873 - RNA, 19 nt, Artificial Sequence
  Description of Artificial Sequence: Synthetic oligonucleotide
  Antisense strand to SEQ ID NO: 1168872
uuucacauucacugugugg

SEQ ID NO: 1168874 - RNA, 19 nt, Artificial Sequence
  Description of Artificial Sequence: Synthetic oligonucleotide
  Sense strand starting at position 290 of SEQ ID NO: 916594
acagauaaagugugcuaga

SEQ ID NO: 1168875 - RNA, 19 nt, Artificial Sequence
  Description of Artificial Sequence: Synthetic oligonucleotide
  Antisense strand to SEQ ID NO: 1168874
ucuagcacacuuuaucugu

SEQ ID NO: 1168876 - RNA, 19 nt, Artificial Sequence
  Description of Artificial Sequence: Synthetic oligonucleotide
  Sense strand starting at position 295 of SEQ ID NO: 916594
uaaagugugcuagaccuaa

SEQ ID NO: 1168877 - RNA, 19 nt, Artificial Sequence
  Description of Artificial Sequence: Synthetic oligonucleotide
  Antisense strand to SEQ ID NO: 1168876
uuaggucuagcacacuuua

SEQ ID NO: 1168878 - RNA, 19 nt, Artificial Sequence
  Description of Artificial Sequence: Synthetic oligonucleotide
  Sense strand starting at position 336 of SEQ ID NO: 916594
gggagaacaugagaguaaa

SEQ ID NO: 1168879 - RNA, 19 nt, Artificial Sequence
  Description of Artificial Sequence: Synthetic oligonucleotide
  Antisense strand to SEQ ID NO: 1168878
uuuacucucauguucuccc

SEQ ID NO: 1168880 - RNA, 19 nt, Artificial Sequence
  Description of Artificial Sequence: Synthetic oligonucleotide
  Sense strand starting at position 371 of SEQ ID NO: 916594
ggaauucuccgauagucca

SEQ ID NO: 1168881 - RNA, 19 nt, Artificial Sequence
  Description of Artificial Sequence: Synthetic oligonucleotide
  Antisense strand to SEQ ID NO: 1168880
uggacuaucggagaauucc

SEQ ID NO: 1168882 - RNA, 19 nt, Artificial Sequence
  Description of Artificial Sequence: Synthetic oligonucleotide
  Sense strand starting at position 389 of SEQ ID NO: 916594
agccauuaaucagugacuu

SEQ ID NO: 1168883 - RNA, 19 nt, Artificial Sequence
  Description of Artificial Sequence: Synthetic oligonucleotide
  Antisense strand to SEQ ID NO: 1168882
aagucacugauuaauggcu

SEQ ID NO: 1168884 - RNA, 19 nt, Artificial Sequence
  Description of Artificial Sequence: Synthetic oligonucleotide
  Sense strand starting at position 390 of SEQ ID NO: 916594
gccauuaaucagugacuua

SEQ ID NO: 1168885 - RNA, 19 nt, Artificial Sequence
  Description of Artificial Sequence: Synthetic oligonucleotide
  Antisense strand to SEQ ID NO: 1168884
uaagucacugauuaauggc

SEQ ID NO: 1168886 - RNA, 19 nt, Artificial Sequence
  Description of Artificial Sequence: Synthetic oligonucleotide
  Sense strand starting at position 646 of SEQ ID NO: 916594
guguuaugacauuaucaau

SEQ ID NO: 1168887 - RNA, 19 nt, Artificial Sequence
  Description of Artificial Sequence: Synthetic oligonucleotide
  Antisense strand to SEQ ID NO: 1168886
auugauaaugucauaacac

SEQ ID NO: 1168888 - RNA, 19 nt, Artificial Sequence
  Description of Artificial Sequence: Synthetic oligonucleotide
  Sense strand starting at position 722 of SEQ ID NO: 916594
gaugacauaugugccuuua

SEQ ID NO: 1168889 - RNA, 19 nt, Artificial Sequence
  Description of Artificial Sequence: Synthetic oligonucleotide
  Antisense strand to SEQ ID NO: 1168888
uaaaggcacauaugucauc

SEQ ID NO: 1168890 - RNA, 19 nt, Artificial Sequence
  Description of Artificial Sequence: Synthetic oligonucleotide
  Sense strand starting at position 724 of SEQ ID NO: 916594
ugacauaugugccuuuaag

SEQ ID NO: 1168891 - RNA, 19 nt, Artificial Sequence
  Description of Artificial Sequence: Synthetic oligonucleotide
  Antisense strand to SEQ ID NO: 1168890
cuuaaaggcacauauguca

SEQ ID NO: 1168892 - RNA, 19 nt, Artificial Sequence
  Description of Artificial Sequence: Synthetic oligonucleotide
  Sense strand starting at position 895 of SEQ ID NO: 916594
aguggagaaacuuguauag

SEQ ID NO: 1168893 - RNA, 19 nt, Artificial Sequence
  Description of Artificial Sequence: Synthetic oligonucleotide
  Antisense strand to SEQ ID NO: 1168892
cuauacaaguuucuccacu

SEQ ID NO: 1168894 - RNA, 19 nt, Artificial Sequence
  Description of Artificial Sequence: Synthetic oligonucleotide
  Sense strand starting at position 905 of SEQ ID NO: 916594
cuuguauagaaguggaaga

SEQ ID NO: 1168895 - RNA, 19 nt, Artificial Sequence
  Description of Artificial Sequence: Synthetic oligonucleotide
  Antisense strand to SEQ ID NO: 1168894
ucuuccacuucuauacaag

SEQ ID NO: 1168896 - RNA, 19 nt, Artificial Sequence
  Description of Artificial Sequence: Synthetic oligonucleotide
  Sense strand starting at position 1995 of SEQ ID NO: 916594
gguucaugucucguccuuu

SEQ ID NO: 1168897 - RNA, 19 nt, Artificial Sequence
  Description of Artificial Sequence: Synthetic oligonucleotide
  Antisense strand to SEQ ID NO: 1168896
aaaggacgagacaugaacc

SEQ ID NO: 1168898 - RNA, 19 nt, Artificial Sequence
  Description of Artificial Sequence: Synthetic oligonucleotide
  Sense strand starting at position 2603 of SEQ ID NO: 916594
uuggucuaauugucaagau

SEQ ID NO: 1168899 - RNA, 19 nt, Artificial Sequence
  Description of Artificial Sequence: Synthetic oligonucleotide
  Antisense strand to SEQ ID NO: 1168898
aucuugacaauuagaccaa

SEQ ID NO: 1168900 - RNA, 19 nt, Artificial Sequence
  Description of Artificial Sequence: Synthetic oligonucleotide
  Sense strand starting at position 2756 of SEQ ID NO: 916594
ugaugucuucuaugacuca

SEQ ID NO: 1168901 - RNA, 19 nt, Artificial Sequence
  Description of Artificial Sequence: Synthetic oligonucleotide
  Antisense strand to SEQ ID NO: 1168900
ugagucauagaagacauca

SEQ ID NO: 1168902 - RNA, 19 nt, Artificial Sequence
  Description of Artificial Sequence: Synthetic oligonucleotide
  Sense strand starting at position 2825 of SEQ ID NO: 916594
aagggaacaugugauauuu

SEQ ID NO: 1168903 - RNA, 19 nt, Artificial Sequence
  Description of Artificial Sequence: Synthetic oligonucleotide
  Antisense strand to SEQ ID NO: 1168902
aaauaucacauguucccuu

SEQ ID NO: 1168904 - RNA, 19 nt, Artificial Sequence
  Description of Artificial Sequence: Synthetic oligonucleotide
  Sense strand starting at position 2827 of SEQ ID NO: 916594
gggaacaugugauauuuau

SEQ ID NO: 1168905 - RNA, 19 nt, Artificial Sequence
  Description of Artificial Sequence: Synthetic oligonucleotide
  Antisense strand to SEQ ID NO: 1168904
auaaauaucacauguuccc

SEQ ID NO: 1168906 - RNA, 19 nt, Artificial Sequence
  Description of Artificial Sequence: Synthetic oligonucleotide
  Sense strand starting at position 2882 of SEQ ID NO: 916594
aguaacuacuugccuuaga

SEQ ID NO: 1168907 - RNA, 19 nt, Artificial Sequence
  Description of Artificial Sequence: Synthetic oligonucleotide
  Antisense strand to SEQ ID NO: 1168906
ucuaaggcaaguaguuacu

SEQ ID NO: 1168908 - RNA, 19 nt, Artificial Sequence
  Description of Artificial Sequence: Synthetic oligonucleotide
  Sense strand starting at position 2883 of SEQ ID NO: 916594
guaacuacuugccuuagau

SEQ ID NO: 1168909 - RNA, 19 nt, Artificial Sequence
  Description of Artificial Sequence: Synthetic oligonucleotide
  Antisense strand to SEQ ID NO: 1168908
aucuaaggcaaguaguuac

SEQ ID NO: 1168910 - RNA, 19 nt, Artificial Sequence
  Description of Artificial Sequence: Synthetic oligonucleotide
  Sense strand starting at position 2906 of SEQ ID NO: 916594
gcaacucucucacuuggau

SEQ ID NO: 1168911 - RNA, 19 nt, Artificial Sequence
  Description of Artificial Sequence: Synthetic oligonucleotide
  Antisense strand to SEQ ID NO: 1168910
auccaagugagagaguugc

SEQ ID NO: 1168912 - RNA, 19 nt, Artificial Sequence
  Description of Artificial Sequence: Synthetic oligonucleotide
  Sense strand starting at position 2920 of SEQ ID NO: 916594
uggauuauagcuuagugca

SEQ ID NO: 1168913 - RNA, 19 nt, Artificial Sequence
  Description of Artificial Sequence: Synthetic oligonucleotide
  Antisense strand to SEQ ID NO: 1168912
ugcacuaagcuauaaucca

SEQ ID NO: 1168914 - RNA, 19 nt, Artificial Sequence
  Description of Artificial Sequence: Synthetic oligonucleotide
  Sense strand starting at position 3085 of SEQ ID NO: 916594
auucuaaccuagucaguua

SEQ ID NO: 1168915 - RNA, 19 nt, Artificial Sequence
  Description of Artificial Sequence: Synthetic oligonucleotide
  Antisense strand to SEQ ID NO: 1168914
uaacugacuagguuagaau

SEQ ID NO: 1168916 - RNA, 19 nt, Artificial Sequence
  Description of Artificial Sequence: Synthetic oligonucleotide
  Sense strand starting at position 3088 of SEQ ID NO: 916594
cuaaccuagucaguuaauu

SEQ ID NO: 1168917 - RNA, 19 nt, Artificial Sequence
  Description of Artificial Sequence: Synthetic oligonucleotide
  Antisense strand to SEQ ID NO: 1168916
aauuaacugacuagguuag

SEQ ID NO: 1168918 - RNA, 19 nt, Artificial Sequence
  Description of Artificial Sequence: Synthetic oligonucleotide
  Sense strand starting at position 3116 of SEQ ID NO: 916594
ucaagaacugcuggauguu

SEQ ID NO: 1168919 - RNA, 19 nt, Artificial Sequence
  Description of Artificial Sequence: Synthetic oligonucleotide
  Antisense strand to SEQ ID NO: 1168918
aacauccagcaguucuuga

SEQ ID NO: 1168920 - RNA, 19 nt, Artificial Sequence
  Description of Artificial Sequence: Synthetic oligonucleotide
  Sense strand starting at position 3131 of SEQ ID NO: 916594
uguucuauucuauagaugu

SEQ ID NO: 1168921 - RNA, 19 nt, Artificial Sequence
  Description of Artificial Sequence: Synthetic oligonucleotide
  Antisense strand to SEQ ID NO: 1168920
acaucuauagaauagaaca

SEQ ID NO: 1168922 - RNA, 19 nt, Artificial Sequence
  Description of Artificial Sequence: Synthetic oligonucleotide
  Sense strand starting at position 3201 of SEQ ID NO: 916594
uucugcuaugauggauaga

SEQ ID NO: 1168923 - RNA, 19 nt, Artificial Sequence
  Description of Artificial Sequence: Synthetic oligonucleotide
  Antisense strand to SEQ ID NO: 1168922
ucuauccaucauagcagaa

SEQ ID NO: 1168924 - RNA, 19 nt, Artificial Sequence
  Description of Artificial Sequence: Synthetic oligonucleotide
  Sense strand starting at position 3233 of SEQ ID NO: 916594
gcuucucuucuggacacua

SEQ ID NO: 1168925 - RNA, 19 nt, Artificial Sequence
  Description of Artificial Sequence: Synthetic oligonucleotide
  Antisense strand to SEQ ID NO: 1168924
uaguguccagaagagaagc

SEQ ID NO: 1168926 - RNA, 19 nt, Artificial Sequence
  Description of Artificial Sequence: Synthetic oligonucleotide
  Sense strand starting at position 3341 of SEQ ID NO: 916594
gccagaaaccuuuggaaga

SEQ ID NO: 1168927 - RNA, 19 nt, Artificial Sequence
  Description of Artificial Sequence: Synthetic oligonucleotide
  Antisense strand to SEQ ID NO: 1168926
ucuuccaaagguuucuggc

SEQ ID NO: 1168928 - RNA, 19 nt, Artificial Sequence
  Description of Artificial Sequence: Synthetic oligonucleotide
  Sense strand starting at position 3432 of SEQ ID NO: 916594
aauguugagcuagaaguua

SEQ ID NO: 1168929 - RNA, 19 nt, Artificial Sequence
  Description of Artificial Sequence: Synthetic oligonucleotide
  Antisense strand to SEQ ID NO: 1168928
uaacuucuagcucaacauu

SEQ ID NO: 1168930 - RNA, 19 nt, Artificial Sequence
  Description of Artificial Sequence: Synthetic oligonucleotide
  Sense strand starting at position 3492 of SEQ ID NO: 916594
uggauauuaugaguuagau

SEQ ID NO: 1168931 - RNA, 19 nt, Artificial Sequence
  Description of Artificial Sequence: Synthetic oligonucleotide
  Antisense strand to SEQ ID NO: 1168930
aucuaacucauaauaucca

SEQ ID NO: 1168932 - RNA, 19 nt, Artificial Sequence
  Description of Artificial Sequence: Synthetic oligonucleotide
  Sense strand starting at position 3585 of SEQ ID NO: 916594
uuugaucuccugggaacaa

SEQ ID NO: 1168933 - RNA, 19 nt, Artificial Sequence
  Description of Artificial Sequence: Synthetic oligonucleotide
  Antisense strand to SEQ ID NO: 1168932
uuguucccaggagaucaaa

SEQ ID NO: 1168934 - RNA, 19 nt, Artificial Sequence
  Description of Artificial Sequence: Synthetic oligonucleotide
  Sense strand starting at position 3619 of SEQ ID NO: 916594
acaucucugcuguauuaua

SEQ ID NO: 1168935 - RNA, 19 nt, Artificial Sequence
  Description of Artificial Sequence: Synthetic oligonucleotide
  Antisense strand to SEQ ID NO: 1168934
uauaauacagcagagaugu

SEQ ID NO: 1168936 - RNA, 19 nt, Artificial Sequence
  Description of Artificial Sequence: Synthetic oligonucleotide
  Sense strand starting at position 3642 of SEQ ID NO: 916594
augaaagauuucuggaagu

SEQ ID NO: 1168937 - RNA, 19 nt, Artificial Sequence
  Description of Artificial Sequence: Synthetic oligonucleotide
  Antisense strand to SEQ ID NO: 1168936
acuuccagaaaucuuucau

SEQ ID NO: 1168938 - RNA, 19 nt, Artificial Sequence
  Description of Artificial Sequence: Synthetic oligonucleotide
  Sense strand starting at position 3655 of SEQ ID NO: 916594
ggaagucgccuuuggauuu

SEQ ID NO: 1168939 - RNA, 19 nt, Artificial Sequence
  Description of Artificial Sequence: Synthetic oligonucleotide
  Antisense strand to SEQ ID NO: 1168938
aaauccaaaggcgacuucc

SEQ ID NO: 1168940 - RNA, 19 nt, Artificial Sequence
  Description of Artificial Sequence: Synthetic oligonucleotide
  Sense strand starting at position 3662 of SEQ ID NO: 916594
gccuuuggauuucucagua

SEQ ID NO: 1168941 - RNA, 19 nt, Artificial Sequence
  Description of Artificial Sequence: Synthetic oligonucleotide
  Antisense strand to SEQ ID NO: 1168940
uacugagaaauccaaaggc

SEQ ID NO: 1168942 - RNA, 19 nt, Artificial Sequence
  Description of Artificial Sequence: Synthetic oligonucleotide
  Sense strand starting at position 3666 of SEQ ID NO: 916594
uuggauuucucaguagccu

SEQ ID NO: 1168943 - RNA, 19 nt, Artificial Sequence
  Description of Artificial Sequence: Synthetic oligonucleotide
  Antisense strand to SEQ ID NO: 1168942
aggcuacugagaaauccaa

SEQ ID NO: 1168944 - RNA, 19 nt, Artificial Sequence
  Description of Artificial Sequence: Synthetic oligonucleotide
  Sense strand starting at position 3688 of SEQ ID NO: 916594
aacucuuaucuguagucga

SEQ ID NO: 1168945 - RNA, 19 nt, Artificial Sequence
  Description of Artificial Sequence: Synthetic oligonucleotide
  Antisense strand to SEQ ID NO: 1168944
ucgacuacagauaagaguu

SEQ ID NO: 1168946 - RNA, 19 nt, Artificial Sequence
  Description of Artificial Sequence: Synthetic oligonucleotide
  Sense strand starting at position 3758 of SEQ ID NO: 916594
uauugucuucuguggaaua

SEQ ID NO: 1168947 - RNA, 19 nt, Artificial Sequence
  Description of Artificial Sequence: Synthetic oligonucleotide
  Antisense strand to SEQ ID NO: 1168946
uauuccacagaagacaaua

SEQ ID NO: 1168948 - RNA, 19 nt, Artificial Sequence
  Description of Artificial Sequence: Synthetic oligonucleotide
  Sense strand starting at position 3760 of SEQ ID NO: 916594
uugucuucuguggaauauu

SEQ ID NO: 1168949 - RNA, 19 nt, Artificial Sequence
  Description of Artificial Sequence: Synthetic oligonucleotide
  Antisense strand to SEQ ID NO: 1168948
aauauuccacagaagacaa

SEQ ID NO: 1168950 - RNA, 19 nt, Artificial Sequence
  Description of Artificial Sequence: Synthetic oligonucleotide
  Sense strand starting at position 3945 of SEQ ID NO: 916594
auacuuaggcuuuguuaag

SEQ ID NO: 1168951 - RNA, 19 nt, Artificial Sequence
  Description of Artificial Sequence: Synthetic oligonucleotide
  Antisense strand to SEQ ID NO: 1168950
cuuaacaaagccuaaguau

SEQ ID NO: 1168952 - RNA, 19 nt, Artificial Sequence
  Description of Artificial Sequence: Synthetic oligonucleotide
  Sense strand starting at position 3963 of SEQ ID NO: 916594
guguuagggcaucaagaag

SEQ ID NO: 1168953 - RNA, 19 nt, Artificial Sequence
  Description of Artificial Sequence: Synthetic oligonucleotide
  Antisense strand to SEQ ID NO: 1168952
cuucuugaugcccuaacac

SEQ ID NO: 1168954 - RNA, 19 nt, Artificial Sequence
  Description of Artificial Sequence: Synthetic oligonucleotide
  Sense strand starting at position 74 of SEQ ID NO: 916595
auaagauugcauugacacu

SEQ ID NO: 1168955 - RNA, 19 nt, Artificial Sequence
  Description of Artificial Sequence: Synthetic oligonucleotide
  Antisense strand to SEQ ID NO: 1168954
agugucaaugcaaucuuau

SEQ ID NO: 1168956 - RNA, 19 nt, Artificial Sequence
  Description of Artificial Sequence: Synthetic oligonucleotide
  Sense strand starting at position 115 of SEQ ID NO: 916595
aauggucauccaugguuua

SEQ ID NO: 1168957 - RNA, 19 nt, Artificial Sequence
  Description of Artificial Sequence: Synthetic oligonucleotide
  Antisense strand to SEQ ID NO: 1168956
uaaaccauggaugaccauu

SEQ ID NO: 1168958 - RNA, 19 nt, Artificial Sequence
  Description of Artificial Sequence: Synthetic oligonucleotide
  Sense strand starting at position 116 of SEQ ID NO: 916595
auggucauccaugguuuau

SEQ ID NO: 1168959 - RNA, 19 nt, Artificial Sequence
  Description of Artificial Sequence: Synthetic oligonucleotide
  Antisense strand to SEQ ID NO: 1168958
auaaaccauggaugaccau

SEQ ID NO: 1168960 - RNA, 19 nt, Artificial Sequence
  Description of Artificial Sequence: Synthetic oligonucleotide
  Sense strand starting at position 120 of SEQ ID NO: 916595
ucauccaugguuuauguua

SEQ ID NO: 1168961 - RNA, 19 nt, Artificial Sequence
  Description of Artificial Sequence: Synthetic oligonucleotide
  Antisense strand to SEQ ID NO: 1168960
uaacauaaaccauggauga

SEQ ID NO: 1168962 - RNA, 19 nt, Artificial Sequence
  Description of Artificial Sequence: Synthetic oligonucleotide
  Sense strand starting at position 240 of SEQ ID NO: 916595
aaaucaugauaggaaggaa

SEQ ID NO: 1168963 - RNA, 19 nt, Artificial Sequence
  Description of Artificial Sequence: Synthetic oligonucleotide
  Antisense strand to SEQ ID NO: 1168962
uuccuuccuaucaugauuu

SEQ ID NO: 1168964 - RNA, 19 nt, Artificial Sequence
  Description of Artificial Sequence: Synthetic oligonucleotide
  Sense strand starting at position 412 of SEQ ID NO: 916595
uggacauauuaaguugaca

SEQ ID NO: 1168965 - RNA, 19 nt, Artificial Sequence
  Description of Artificial Sequence: Synthetic oligonucleotide
  Antisense strand to SEQ ID NO: 1168964
ugucaacuuaauaugucca

SEQ ID NO: 1168966 - RNA, 19 nt, Artificial Sequence
  Description of Artificial Sequence: Synthetic oligonucleotide
  Sense strand starting at position 446 of SEQ ID NO: 916595
uucuccucauuuggagaaa

SEQ ID NO: 1168967 - RNA, 19 nt, Artificial Sequence
  Description of Artificial Sequence: Synthetic oligonucleotide
  Antisense strand to SEQ ID NO: 1168966
uuucuccaaaugaggagaa

SEQ ID NO: 1168968 - RNA, 19 nt, Artificial Sequence
  Description of Artificial Sequence: Synthetic oligonucleotide
  Sense strand starting at position 510 of SEQ ID NO: 916595
ggaaguugcaaugguuaca

SEQ ID NO: 1168969 - RNA, 19 nt, Artificial Sequence
  Description of Artificial Sequence: Synthetic oligonucleotide
  Antisense strand to SEQ ID NO: 1168968
uguaaccauugcaacuucc

SEQ ID NO: 1168970 - RNA, 19 nt, Artificial Sequence
  Description of Artificial Sequence: Synthetic oligonucleotide
  Sense strand starting at position 678 of SEQ ID NO: 916595
cuaacucaguaguuguaau

SEQ ID NO: 1168971 - RNA, 19 nt, Artificial Sequence
  Description of Artificial Sequence: Synthetic oligonucleotide
  Antisense strand to SEQ ID NO: 1168970
auuacaacuacugaguuag

SEQ ID NO: 1168972 - RNA, 19 nt, Artificial Sequence
  Description of Artificial Sequence: Synthetic oligonucleotide
  Sense strand starting at position 929 of SEQ ID NO: 916595
uugauucuagacuauaguu

SEQ ID NO: 1168973 - RNA, 19 nt, Artificial Sequence
  Description of Artificial Sequence: Synthetic oligonucleotide
  Antisense strand to SEQ ID NO: 1168972
aacuauagucuagaaucaa

SEQ ID NO: 1168974 - RNA, 19 nt, Artificial Sequence
  Description of Artificial Sequence: Synthetic oligonucleotide
  Sense strand starting at position 1051 of SEQ ID NO: 916595
uuugaaguguaaucuccuu

SEQ ID NO: 1168975 - RNA, 19 nt, Artificial Sequence
  Description of Artificial Sequence: Synthetic oligonucleotide
  Antisense strand to SEQ ID NO: 1168974
aaggagauuacacuucaaa

SEQ ID NO: 1168976 - RNA, 19 nt, Artificial Sequence
  Description of Artificial Sequence: Synthetic oligonucleotide
  Sense strand starting at position 2048 of SEQ ID NO: 916595
auugaagaguuucuuagag

SEQ ID NO: 1168977 - RNA, 19 nt, Artificial Sequence
  Description of Artificial Sequence: Synthetic oligonucleotide
  Antisense strand to SEQ ID NO: 1168976
cucuaagaaacucuucaau

SEQ ID NO: 1168978 - RNA, 19 nt, Artificial Sequence
  Description of Artificial Sequence: Synthetic oligonucleotide
  Sense strand starting at position 2057 of SEQ ID NO: 916595
uuucuuagaguaggagaca

SEQ ID NO: 1168979 - RNA, 19 nt, Artificial Sequence
  Description of Artificial Sequence: Synthetic oligonucleotide
  Antisense strand to SEQ ID NO: 1168978
ugucuccuacucuaagaaa

SEQ ID NO: 1168980 - RNA, 19 nt, Artificial Sequence
  Description of Artificial Sequence: Synthetic oligonucleotide
  Sense strand starting at position 2104 of SEQ ID NO: 916595
gucauacauugcucaccau

SEQ ID NO: 1168981 - RNA, 19 nt, Artificial Sequence
  Description of Artificial Sequence: Synthetic oligonucleotide
  Antisense strand to SEQ ID NO: 1168980
auggugagcaauguaugac

SEQ ID NO: 1168982 - RNA, 19 nt, Artificial Sequence
  Description of Artificial Sequence: Synthetic oligonucleotide
  Sense strand starting at position 2336 of SEQ ID NO: 916595
gcacuuacucuugacugua

SEQ ID NO: 1168983 - RNA, 19 nt, Artificial Sequence
  Description of Artificial Sequence: Synthetic oligonucleotide
  Antisense strand to SEQ ID NO: 1168982
uacagucaagaguaagugc

SEQ ID NO: 1168984 - RNA, 19 nt, Artificial Sequence
  Description of Artificial Sequence: Synthetic oligonucleotide
  Sense strand starting at position 2338 of SEQ ID NO: 916595
acuuacucuugacuguauu

SEQ ID NO: 1168985 - RNA, 19 nt, Artificial Sequence
  Description of Artificial Sequence: Synthetic oligonucleotide
  Antisense strand to SEQ ID NO: 1168984
aauacagucaagaguaagu

SEQ ID NO: 1168986 - RNA, 19 nt, Artificial Sequence
  Description of Artificial Sequence: Synthetic oligonucleotide
  Sense strand starting at position 2339 of SEQ ID NO: 916595
cuuacucuugacuguauua

SEQ ID NO: 1168987 - RNA, 19 nt, Artificial Sequence
  Description of Artificial Sequence: Synthetic oligonucleotide
  Antisense strand to SEQ ID NO: 1168986
uaauacagucaagaguaag

SEQ ID NO: 1168988 - RNA, 19 nt, Artificial Sequence
  Description of Artificial Sequence: Synthetic oligonucleotide
  Sense strand starting at position 2452 of SEQ ID NO: 916595
uuugaugccucacuggaua

SEQ ID NO: 1168989 - RNA, 19 nt, Artificial Sequence
  Description of Artificial Sequence: Synthetic oligonucleotide
  Antisense strand to SEQ ID NO: 1168988
uauccagugaggcaucaaa

SEQ ID NO: 1168990 - RNA, 19 nt, Artificial Sequence
  Description of Artificial Sequence: Synthetic oligonucleotide
  Sense strand starting at position 2557 of SEQ ID NO: 916595
ugcugaagaucaucucauu

SEQ ID NO: 1168991 - RNA, 19 nt, Artificial Sequence
  Description of Artificial Sequence: Synthetic oligonucleotide
  Antisense strand to SEQ ID NO: 1168990
aaugagaugaucuucagca

SEQ ID NO: 1168992 - RNA, 19 nt, Artificial Sequence
  Description of Artificial Sequence: Synthetic oligonucleotide
  Sense strand starting at position 2675 of SEQ ID NO: 916595
aggcacugauuugagauau

SEQ ID NO: 1168993 - RNA, 19 nt, Artificial Sequence
  Description of Artificial Sequence: Synthetic oligonucleotide
  Antisense strand to SEQ ID NO: 1168992
auaucucaaaucagugccu

SEQ ID NO: 1168994 - RNA, 19 nt, Artificial Sequence
  Description of Artificial Sequence: Synthetic oligonucleotide
  Sense strand starting at position 2687 of SEQ ID NO: 916595
gagauaugucucggagaag

SEQ ID NO: 1168995 - RNA, 19 nt, Artificial Sequence
  Description of Artificial Sequence: Synthetic oligonucleotide
  Antisense strand to SEQ ID NO: 1168994
cuucuccgagacauaucuc

SEQ ID NO: 1168996 - RNA, 19 nt, Artificial Sequence
  Description of Artificial Sequence: Synthetic oligonucleotide
  Sense strand starting at position 2713 of SEQ ID NO: 916595
uugagaacucuguaagcag

SEQ ID NO: 1168997 - RNA, 19 nt, Artificial Sequence
  Description of Artificial Sequence: Synthetic oligonucleotide
  Antisense strand to SEQ ID NO: 1168996
cugcuuacagaguucucaa

SEQ ID NO: 1168998 - RNA, 19 nt, Artificial Sequence
  Description of Artificial Sequence: Synthetic oligonucleotide
  Sense strand starting at position 2855 of SEQ ID NO: 916595
uaauaagaguucuuuguag

SEQ ID NO: 1168999 - RNA, 19 nt, Artificial Sequence
  Description of Artificial Sequence: Synthetic oligonucleotide
  Antisense strand to SEQ ID NO: 1168998
cuacaaagaacucuuauua

SEQ ID NO: 1169000 - RNA, 19 nt, Artificial Sequence
  Description of Artificial Sequence: Synthetic oligonucleotide
  Sense strand starting at position 2857 of SEQ ID NO: 916595
auaagaguucuuuguagau

SEQ ID NO: 1169001 - RNA, 19 nt, Artificial Sequence
  Description of Artificial Sequence: Synthetic oligonucleotide
  Antisense strand to SEQ ID NO: 1169000
aucuacaaagaacucuuau

SEQ ID NO: 1169002 - RNA, 19 nt, Artificial Sequence
  Description of Artificial Sequence: Synthetic oligonucleotide
  Sense strand starting at position 2863 of SEQ ID NO: 916595
guucuuuguagauaaagug

SEQ ID NO: 1169003 - RNA, 19 nt, Artificial Sequence
  Description of Artificial Sequence: Synthetic oligonucleotide
  Antisense strand to SEQ ID NO: 1169002
cacuuuaucuacaaagaac

SEQ ID NO: 1169004 - RNA, 19 nt, Artificial Sequence
  Description of Artificial Sequence: Synthetic oligonucleotide
  Sense strand starting at position 2869 of SEQ ID NO: 916595
uguagauaaagugguaauu

SEQ ID NO: 1169005 - RNA, 19 nt, Artificial Sequence
  Description of Artificial Sequence: Synthetic oligonucleotide
  Antisense strand to SEQ ID NO: 1169004
aauuaccacuuuaucuaca

SEQ ID NO: 1169006 - RNA, 19 nt, Artificial Sequence
  Description of Artificial Sequence: Synthetic oligonucleotide
  Sense strand starting at position 2909 of SEQ ID NO: 916595
gguaguauugugagugcau

SEQ ID NO: 1169007 - RNA, 19 nt, Artificial Sequence
  Description of Artificial Sequence: Synthetic oligonucleotide
  Antisense strand to SEQ ID NO: 1169006
augcacucacaauacuacc

SEQ ID NO: 1169008 - RNA, 19 nt, Artificial Sequence
  Description of Artificial Sequence: Synthetic oligonucleotide
  Sense strand starting at position 3027 of SEQ ID NO: 916595
gucaacuuuccauacaggu

SEQ ID NO: 1169009 - RNA, 19 nt, Artificial Sequence
  Description of Artificial Sequence: Synthetic oligonucleotide
  Antisense strand to SEQ ID NO: 1169008
accuguauggaaaguugac

SEQ ID NO: 1169010 - RNA, 19 nt, Artificial Sequence
  Description of Artificial Sequence: Synthetic oligonucleotide
  Sense strand starting at position 3049 of SEQ ID NO: 916595
ggaggucuuagaugaugug

SEQ ID NO: 1169011 - RNA, 19 nt, Artificial Sequence
  Description of Artificial Sequence: Synthetic oligonucleotide
  Antisense strand to SEQ ID NO: 1169010
cacaucaucuaagaccucc

SEQ ID NO: 1169012 - RNA, 19 nt, Artificial Sequence
  Description of Artificial Sequence: Synthetic oligonucleotide
  Sense strand starting at position 3246 of SEQ ID NO: 916595
auaguauacuguuuaccuu

SEQ ID NO: 1169013 - RNA, 19 nt, Artificial Sequence
  Description of Artificial Sequence: Synthetic oligonucleotide
  Antisense strand to SEQ ID NO: 1169012
aagguaaacaguauacuau

SEQ ID NO: 1169014 - RNA, 19 nt, Artificial Sequence
  Description of Artificial Sequence: Synthetic oligonucleotide
  Sense strand starting at position 3300 of SEQ ID NO: 916595
ccacgugaaucuuugagua

SEQ ID NO: 1169015 - RNA, 19 nt, Artificial Sequence
  Description of Artificial Sequence: Synthetic oligonucleotide
  Antisense strand to SEQ ID NO: 1169014
uacucaaagauucacgugg

SEQ ID NO: 1169016 - RNA, 19 nt, Artificial Sequence
  Description of Artificial Sequence: Synthetic oligonucleotide
  Sense strand starting at position 3304 of SEQ ID NO: 916595
gugaaucuuugaguaguau

SEQ ID NO: 1169017 - RNA, 19 nt, Artificial Sequence
  Description of Artificial Sequence: Synthetic oligonucleotide
  Antisense strand to SEQ ID NO: 1169016
auacuacucaaagauucac

SEQ ID NO: 1169018 - RNA, 19 nt, Artificial Sequence
  Description of Artificial Sequence: Synthetic oligonucleotide
  Sense strand starting at position 3305 of SEQ ID NO: 916595
ugaaucuuugaguaguaua

SEQ ID NO: 1169019 - RNA, 19 nt, Artificial Sequence
  Description of Artificial Sequence: Synthetic oligonucleotide
  Antisense strand to SEQ ID NO: 1169018
uauacuacucaaagauuca

SEQ ID NO: 1169020 - RNA, 19 nt, Artificial Sequence
  Description of Artificial Sequence: Synthetic oligonucleotide
  Sense strand starting at position 3310 of SEQ ID NO: 916595
cuuugaguaguauauacuu

SEQ ID NO: 1169021 - RNA, 19 nt, Artificial Sequence
  Description of Artificial Sequence: Synthetic oligonucleotide
  Antisense strand to SEQ ID NO: 1169020
aaguauauacuacucaaag

SEQ ID NO: 1169022 - RNA, 19 nt, Artificial Sequence
  Description of Artificial Sequence: Synthetic oligonucleotide
  Sense strand starting at position 3454 of SEQ ID NO: 916595
aaaucauaguuccugagag

SEQ ID NO: 1169023 - RNA, 19 nt, Artificial Sequence
  Description of Artificial Sequence: Synthetic oligonucleotide
  Antisense strand to SEQ ID NO: 1169022
cucucaggaacuaugauuu

SEQ ID NO: 1169024 - RNA, 19 nt, Artificial Sequence
  Description of Artificial Sequence: Synthetic oligonucleotide
  Sense strand starting at position 3629 of SEQ ID NO: 916595
gcaguuucuguguuagcua

SEQ ID NO: 1169025 - RNA, 19 nt, Artificial Sequence
  Description of Artificial Sequence: Synthetic oligonucleotide
  Antisense strand to SEQ ID NO: 1169024
uagcuaacacagaaacugc

SEQ ID NO: 1169026 - RNA, 19 nt, Artificial Sequence
  Description of Artificial Sequence: Synthetic oligonucleotide
  Sense strand starting at position 3691 of SEQ ID NO: 916595
ggaucaauuuccugaagaa

SEQ ID NO: 1169027 - RNA, 19 nt, Artificial Sequence
  Description of Artificial Sequence: Synthetic oligonucleotide
  Antisense strand to SEQ ID NO: 1169026
uucuucaggaaauugaucc

SEQ ID NO: 1169028 - RNA, 19 nt, Artificial Sequence
  Description of Artificial Sequence: Synthetic oligonucleotide
  Sense strand starting at position 3789 of SEQ ID NO: 916595
acauaugacugagaagaga

SEQ ID NO: 1169029 - RNA, 19 nt, Artificial Sequence
  Description of Artificial Sequence: Synthetic oligonucleotide
  Antisense strand to SEQ ID NO: 1169028
ucucuucucagucauaugu

SEQ ID NO: 1169030 - RNA, 19 nt, Artificial Sequence
  Description of Artificial Sequence: Synthetic oligonucleotide
  Sense strand starting at position 3863 of SEQ ID NO: 916595
gaaguuuguggagaaaugu

SEQ ID NO: 1169031 - RNA, 19 nt, Artificial Sequence
  Description of Artificial Sequence: Synthetic oligonucleotide
  Antisense strand to SEQ ID NO: 1169030
acauuucuccacaaacuuc

SEQ ID NO: 1169032 - RNA, 19 nt, Artificial Sequence
  Description of Artificial Sequence: Synthetic oligonucleotide
  Sense strand starting at position 3915 of SEQ ID NO: 916595
gugccuggccuugucauua

SEQ ID NO: 1169033 - RNA, 19 nt, Artificial Sequence
  Description of Artificial Sequence: Synthetic oligonucleotide
  Antisense strand to SEQ ID NO: 1169032
uaaugacaaggccaggcac

SEQ ID NO: 1169034 - RNA, 19 nt, Artificial Sequence
  Description of Artificial Sequence: Synthetic oligonucleotide
  Sense strand starting at position 114 of SEQ ID NO: 916596
ggaaguacacuuggauguu

SEQ ID NO: 1169035 - RNA, 19 nt, Artificial Sequence
  Description of Artificial Sequence: Synthetic oligonucleotide
  Antisense strand to SEQ ID NO: 1169034
aacauccaaguguacuucc

SEQ ID NO: 1169036 - RNA, 19 nt, Artificial Sequence
  Description of Artificial Sequence: Synthetic oligonucleotide
  Sense strand starting at position 214 of SEQ ID NO: 916596
guuuauguccuuuaaacaa

SEQ ID NO: 1169037 - RNA, 19 nt, Artificial Sequence
  Description of Artificial Sequence: Synthetic oligonucleotide
  Antisense strand to SEQ ID NO: 1169036
uuguuuaaaggacauaaac

SEQ ID NO: 1169038 - RNA, 19 nt, Artificial Sequence
  Description of Artificial Sequence: Synthetic oligonucleotide
  Sense strand starting at position 238 of SEQ ID NO: 916596
gcuucuuaaagguaccgau

SEQ ID NO: 1169039 - RNA, 19 nt, Artificial Sequence
  Description of Artificial Sequence: Synthetic oligonucleotide
  Antisense strand to SEQ ID NO: 1169038
aucgguaccuuuaagaagc

SEQ ID NO: 1169040 - RNA, 19 nt, Artificial Sequence
  Description of Artificial Sequence: Synthetic oligonucleotide
  Sense strand starting at position 301 of SEQ ID NO: 916596
uauggugaauuaguuauca

SEQ ID NO: 1169041 - RNA, 19 nt, Artificial Sequence
  Description of Artificial Sequence: Synthetic oligonucleotide
  Antisense strand to SEQ ID NO: 1169040
ugauaacuaauucaccaua

SEQ ID NO: 1169042 - RNA, 19 nt, Artificial Sequence
  Description of Artificial Sequence: Synthetic oligonucleotide
  Sense strand starting at position 389 of SEQ ID NO: 916596
augccauaaagagguguua

SEQ ID NO: 1169043 - RNA, 19 nt, Artificial Sequence
  Description of Artificial Sequence: Synthetic oligonucleotide
  Antisense strand to SEQ ID NO: 1169042
uaacaccucuuuauggcau

SEQ ID NO: 1169044 - RNA, 19 nt, Artificial Sequence
  Description of Artificial Sequence: Synthetic oligonucleotide
  Sense strand starting at position 430 of SEQ ID NO: 916596
cgaggaaagugauuguagu

SEQ ID NO: 1169045 - RNA, 19 nt, Artificial Sequence
  Description of Artificial Sequence: Synthetic oligonucleotide
  Antisense strand to SEQ ID NO: 1169044
acuacaaucacuuuccucg

SEQ ID NO: 1169046 - RNA, 19 nt, Artificial Sequence
  Description of Artificial Sequence: Synthetic oligonucleotide
  Sense strand starting at position 431 of SEQ ID NO: 916596
gaggaaagugauuguagua

SEQ ID NO: 1169047 - RNA, 19 nt, Artificial Sequence
  Description of Artificial Sequence: Synthetic oligonucleotide
  Antisense strand to SEQ ID NO: 1169046
uacuacaaucacuuuccuc

SEQ ID NO: 1169048 - RNA, 19 nt, Artificial Sequence
  Description of Artificial Sequence: Synthetic oligonucleotide
  Sense strand starting at position 514 of SEQ ID NO: 916596
gagacuacccuaugugaga

SEQ ID NO: 1169049 - RNA, 19 nt, Artificial Sequence
  Description of Artificial Sequence: Synthetic oligonucleotide
  Antisense strand to SEQ ID NO: 1169048
ucucacauaggguagucuc

SEQ ID NO: 1169050 - RNA, 19 nt, Artificial Sequence
  Description of Artificial Sequence: Synthetic oligonucleotide
  Sense strand starting at position 515 of SEQ ID NO: 916596
agacuacccuaugugagau

SEQ ID NO: 1169051 - RNA, 19 nt, Artificial Sequence
  Description of Artificial Sequence: Synthetic oligonucleotide
  Antisense strand to SEQ ID NO: 1169050
aucucacauaggguagucu

SEQ ID NO: 1169052 - RNA, 19 nt, Artificial Sequence
  Description of Artificial Sequence: Synthetic oligonucleotide
  Sense strand starting at position 615 of SEQ ID NO: 916596
auaggauagucucuugaag

SEQ ID NO: 1169053 - RNA, 19 nt, Artificial Sequence
  Description of Artificial Sequence: Synthetic oligonucleotide
  Antisense strand to SEQ ID NO: 1169052
cuucaagagacuauccuau

SEQ ID NO: 1169054 - RNA, 19 nt, Artificial Sequence
  Description of Artificial Sequence: Synthetic oligonucleotide
  Sense strand starting at position 632 of SEQ ID NO: 916596
agaacuuuauggcucaguu

SEQ ID NO: 1169055 - RNA, 19 nt, Artificial Sequence
  Description of Artificial Sequence: Synthetic oligonucleotide
  Antisense strand to SEQ ID NO: 1169054
aacugagccauaaaguucu

SEQ ID NO: 1169056 - RNA, 19 nt, Artificial Sequence
  Description of Artificial Sequence: Synthetic oligonucleotide
  Sense strand starting at position 1162 of SEQ ID NO: 916596
gcaauugagguauagagca

SEQ ID NO: 1169057 - RNA, 19 nt, Artificial Sequence
  Description of Artificial Sequence: Synthetic oligonucleotide
  Antisense strand to SEQ ID NO: 1169056
ugcucuauaccucaauugc

SEQ ID NO: 1169058 - RNA, 19 nt, Artificial Sequence
  Description of Artificial Sequence: Synthetic oligonucleotide
  Sense strand starting at position 1248 of SEQ ID NO: 916596
accguaugucauggagaca

SEQ ID NO: 1169059 - RNA, 19 nt, Artificial Sequence
  Description of Artificial Sequence: Synthetic oligonucleotide
  Antisense strand to SEQ ID NO: 1169058
ugucuccaugacauacggu

SEQ ID NO: 1169060 - RNA, 19 nt, Artificial Sequence
  Description of Artificial Sequence: Synthetic oligonucleotide
  Sense strand starting at position 1249 of SEQ ID NO: 916596
ccguaugucauggagacaa

SEQ ID NO: 1169061 - RNA, 19 nt, Artificial Sequence
  Description of Artificial Sequence: Synthetic oligonucleotide
  Antisense strand to SEQ ID NO: 1169060
uugucuccaugacauacgg

SEQ ID NO: 1169062 - RNA, 19 nt, Artificial Sequence
  Description of Artificial Sequence: Synthetic oligonucleotide
  Sense strand starting at position 1266 of SEQ ID NO: 916596
aacaaucaugugggaagua

SEQ ID NO: 1169063 - RNA, 19 nt, Artificial Sequence
  Description of Artificial Sequence: Synthetic oligonucleotide
  Antisense strand to SEQ ID NO: 1169062
uacuucccacaugauuguu

SEQ ID NO: 1169064 - RNA, 19 nt, Artificial Sequence
  Description of Artificial Sequence: Synthetic oligonucleotide
  Sense strand starting at position 1306 of SEQ ID NO: 916596
cuuugcugugcagaagaga

SEQ ID NO: 1169065 - RNA, 19 nt, Artificial Sequence
  Description of Artificial Sequence: Synthetic oligonucleotide
  Antisense strand to SEQ ID NO: 1169064
ucucuucugcacagcaaag

SEQ ID NO: 1169066 - RNA, 19 nt, Artificial Sequence
  Description of Artificial Sequence: Synthetic oligonucleotide
  Sense strand starting at position 1309 of SEQ ID NO: 916596
ugcugugcagaagagaauu

SEQ ID NO: 1169067 - RNA, 19 nt, Artificial Sequence
  Description of Artificial Sequence: Synthetic oligonucleotide
  Antisense strand to SEQ ID NO: 1169066
aauucucuucugcacagca

SEQ ID NO: 1169068 - RNA, 19 nt, Artificial Sequence
  Description of Artificial Sequence: Synthetic oligonucleotide
  Sense strand starting at position 1429 of SEQ ID NO: 916596
uggguaucugugcaggaga

SEQ ID NO: 1169069 - RNA, 19 nt, Artificial Sequence
  Description of Artificial Sequence: Synthetic oligonucleotide
  Antisense strand to SEQ ID NO: 1169068
ucuccugcacagauaccca

SEQ ID NO: 1169070 - RNA, 19 nt, Artificial Sequence
  Description of Artificial Sequence: Synthetic oligonucleotide
  Sense strand starting at position 1552 of SEQ ID NO: 916596
ccaguuacccaagagcuaa

SEQ ID NO: 1169071 - RNA, 19 nt, Artificial Sequence
  Description of Artificial Sequence: Synthetic oligonucleotide
  Antisense strand to SEQ ID NO: 1169070
uuagcucuuggguaacugg

SEQ ID NO: 1169072 - RNA, 19 nt, Artificial Sequence
  Description of Artificial Sequence: Synthetic oligonucleotide
  Sense strand starting at position 1595 of SEQ ID NO: 916596
ugcucauaaugauuggaua

SEQ ID NO: 1169073 - RNA, 19 nt, Artificial Sequence
  Description of Artificial Sequence: Synthetic oligonucleotide
  Antisense strand to SEQ ID NO: 1169072
uauccaaucauuaugagca

SEQ ID NO: 1169074 - RNA, 19 nt, Artificial Sequence
  Description of Artificial Sequence: Synthetic oligonucleotide
  Sense strand starting at position 1596 of SEQ ID NO: 916596
gcucauaaugauuggauaa

SEQ ID NO: 1169075 - RNA, 19 nt, Artificial Sequence
  Description of Artificial Sequence: Synthetic oligonucleotide
  Antisense strand to SEQ ID NO: 1169074
uuauccaaucauuaugagc

SEQ ID NO: 1169076 - RNA, 19 nt, Artificial Sequence
  Description of Artificial Sequence: Synthetic oligonucleotide
  Sense strand starting at position 1896 of SEQ ID NO: 916596
caagguguaguugagaaau

SEQ ID NO: 1169077 - RNA, 19 nt, Artificial Sequence
  Description of Artificial Sequence: Synthetic oligonucleotide
  Antisense strand to SEQ ID NO: 1169076
auuucucaacuacaccuug

SEQ ID NO: 1169078 - RNA, 19 nt, Artificial Sequence
  Description of Artificial Sequence: Synthetic oligonucleotide
  Sense strand starting at position 1952 of SEQ ID NO: 916596
cugucaauccuaggagaau

SEQ ID NO: 1169079 - RNA, 19 nt, Artificial Sequence
  Description of Artificial Sequence: Synthetic oligonucleotide
  Antisense strand to SEQ ID NO: 1169078
auucuccuaggauugacag

SEQ ID NO: 1169080 - RNA, 19 nt, Artificial Sequence
  Description of Artificial Sequence: Synthetic oligonucleotide
  Sense strand starting at position 2403 of SEQ ID NO: 916596
uuauaacgaguaugaggau

SEQ ID NO: 1169081 - RNA, 19 nt, Artificial Sequence
  Description of Artificial Sequence: Synthetic oligonucleotide
  Antisense strand to SEQ ID NO: 1169080
auccucauacucguuauaa

SEQ ID NO: 1169082 - RNA, 19 nt, Artificial Sequence
  Description of Artificial Sequence: Synthetic oligonucleotide
  Sense strand starting at position 2409 of SEQ ID NO: 916596
cgaguaugaggaugauguu

SEQ ID NO: 1169083 - RNA, 19 nt, Artificial Sequence
  Description of Artificial Sequence: Synthetic oligonucleotide
  Antisense strand to SEQ ID NO: 1169082
aacaucauccucauacucg

SEQ ID NO: 1169084 - RNA, 19 nt, Artificial Sequence
  Description of Artificial Sequence: Synthetic oligonucleotide
  Sense strand starting at position 2474 of SEQ ID NO: 916596
ugacuauggcagcacugau

SEQ ID NO: 1169085 - RNA, 19 nt, Artificial Sequence
  Description of Artificial Sequence: Synthetic oligonucleotide
  Antisense strand to SEQ ID NO: 1169084
aucagugcugccauaguca

SEQ ID NO: 1169086 - RNA, 19 nt, Artificial Sequence
  Description of Artificial Sequence: Synthetic oligonucleotide
  Sense strand starting at position 2599 of SEQ ID NO: 916596
aaucaacagucguuuaaga

SEQ ID NO: 1169087 - RNA, 19 nt, Artificial Sequence
  Description of Artificial Sequence: Synthetic oligonucleotide
  Antisense strand to SEQ ID NO: 1169086
ucuuaaacgacuguugauu

SEQ ID NO: 1169088 - RNA, 19 nt, Artificial Sequence
  Description of Artificial Sequence: Synthetic oligonucleotide
  Sense strand starting at position 2609 of SEQ ID NO: 916596
cguuuaagagcuuauggga

SEQ ID NO: 1169089 - RNA, 19 nt, Artificial Sequence
  Description of Artificial Sequence: Synthetic oligonucleotide
  Antisense strand to SEQ ID NO: 1169088
ucccauaagcucuuaaacg

SEQ ID NO: 1169090 - RNA, 19 nt, Artificial Sequence
  Description of Artificial Sequence: Synthetic oligonucleotide
  Sense strand starting at position 3125 of SEQ ID NO: 916596
ggaagagaugcaugcuaac

SEQ ID NO: 1169091 - RNA, 19 nt, Artificial Sequence
  Description of Artificial Sequence: Synthetic oligonucleotide
  Antisense strand to SEQ ID NO: 1169090
guuagcaugcaucucuucc

SEQ ID NO: 1169092 - RNA, 19 nt, Artificial Sequence
  Description of Artificial Sequence: Synthetic oligonucleotide
  Sense strand starting at position 3136 of SEQ ID NO: 916596
augcuaacauaauuaguga

SEQ ID NO: 1169093 - RNA, 19 nt, Artificial Sequence
  Description of Artificial Sequence: Synthetic oligonucleotide
  Antisense strand to SEQ ID NO: 1169092
ucacuaauuauguuagcau

SEQ ID NO: 1169094 - RNA, 19 nt, Artificial Sequence
  Description of Artificial Sequence: Synthetic oligonucleotide
  Sense strand starting at position 3237 of SEQ ID NO: 916596
guacguauuguguuucugu

SEQ ID NO: 1169095 - RNA, 19 nt, Artificial Sequence
  Description of Artificial Sequence: Synthetic oligonucleotide
  Antisense strand to SEQ ID NO: 1169094
acagaaacacaauacguac

SEQ ID NO: 1169096 - RNA, 19 nt, Artificial Sequence
  Description of Artificial Sequence: Synthetic oligonucleotide
  Sense strand starting at position 3245 of SEQ ID NO: 916596
uguguuucuguagagaauu

SEQ ID NO: 1169097 - RNA, 19 nt, Artificial Sequence
  Description of Artificial Sequence: Synthetic oligonucleotide
  Antisense strand to SEQ ID NO: 1169096
aauucucuacagaaacaca

SEQ ID NO: 1169098 - RNA, 19 nt, Artificial Sequence
  Description of Artificial Sequence: Synthetic oligonucleotide
  Sense strand starting at position 3675 of SEQ ID NO: 916596
aggcuacuuuagcugaaga

SEQ ID NO: 1169099 - RNA, 19 nt, Artificial Sequence
  Description of Artificial Sequence: Synthetic oligonucleotide
  Antisense strand to SEQ ID NO: 1169098
ucuucagcuaaaguagccu

SEQ ID NO: 1169100 - RNA, 19 nt, Artificial Sequence
  Description of Artificial Sequence: Synthetic oligonucleotide
  Sense strand starting at position 3677 of SEQ ID NO: 916596
gcuacuuuagcugaagaaa

SEQ ID NO: 1169101 - RNA, 19 nt, Artificial Sequence
  Description of Artificial Sequence: Synthetic oligonucleotide
  Antisense strand to SEQ ID NO: 1169100
uuucuucagcuaaaguagc

SEQ ID NO: 1169102 - RNA, 19 nt, Artificial Sequence
  Description of Artificial Sequence: Synthetic oligonucleotide
  Sense strand starting at position 3738 of SEQ ID NO: 916596
ugagauauuuaacaguaac

SEQ ID NO: 1169103 - RNA, 19 nt, Artificial Sequence
  Description of Artificial Sequence: Synthetic oligonucleotide
  Antisense strand to SEQ ID NO: 1169102
guuacuguuaaauaucuca

SEQ ID NO: 1169104 - RNA, 19 nt, Artificial Sequence
  Description of Artificial Sequence: Synthetic oligonucleotide
  Sense strand starting at position 3801 of SEQ ID NO: 916596
gguuuacacauauaucgga

SEQ ID NO: 1169105 - RNA, 19 nt, Artificial Sequence
  Description of Artificial Sequence: Synthetic oligonucleotide
  Antisense strand to SEQ ID NO: 1169104
uccgauauauguguaaacc

SEQ ID NO: 1169106 - RNA, 19 nt, Artificial Sequence
  Description of Artificial Sequence: Synthetic oligonucleotide
  Sense strand starting at position 3857 of SEQ ID NO: 916596
augguaugcuaagugaaag

SEQ ID NO: 1169107 - RNA, 19 nt, Artificial Sequence
  Description of Artificial Sequence: Synthetic oligonucleotide
  Antisense strand to SEQ ID NO: 1169106
cuuucacuuagcauaccau

SEQ ID NO: 1169108 - RNA, 19 nt, Artificial Sequence
  Description of Artificial Sequence: Synthetic oligonucleotide
  Sense strand starting at position 3858 of SEQ ID NO: 916596
ugguaugcuaagugaaaga

SEQ ID NO: 1169109 - RNA, 19 nt, Artificial Sequence
  Description of Artificial Sequence: Synthetic oligonucleotide
  Antisense strand to SEQ ID NO: 1169108
ucuuucacuuagcauacca

SEQ ID NO: 1169110 - RNA, 19 nt, Artificial Sequence
  Description of Artificial Sequence: Synthetic oligonucleotide
  Sense strand starting at position 3966 of SEQ ID NO: 916596
uuugaucaguaguuccaga

SEQ ID NO: 1169111 - RNA, 19 nt, Artificial Sequence
  Description of Artificial Sequence: Synthetic oligonucleotide
  Antisense strand to SEQ ID NO: 1169110
ucuggaacuacugaucaaa

SEQ ID NO: 1169112 - RNA, 19 nt, Artificial Sequence
  Description of Artificial Sequence: Synthetic oligonucleotide
  Sense strand starting at position 3973 of SEQ ID NO: 916596
aguaguuccagaggcagaa

SEQ ID NO: 1169113 - RNA, 19 nt, Artificial Sequence
  Description of Artificial Sequence: Synthetic oligonucleotide
  Antisense strand to SEQ ID NO: 1169112
uucugccucuggaacuacu

SEQ ID NO: 1169114 - RNA, 19 nt, Artificial Sequence
  Description of Artificial Sequence: Synthetic oligonucleotide
  Sense strand starting at position 92 of SEQ ID NO: 916597
gaugguggauuguuaugau

SEQ ID NO: 1169115 - RNA, 19 nt, Artificial Sequence
  Description of Artificial Sequence: Synthetic oligonucleotide
  Antisense strand to SEQ ID NO: 1169114
aucauaacaauccaccauc

SEQ ID NO: 1169116 - RNA, 19 nt, Artificial Sequence
  Description of Artificial Sequence: Synthetic oligonucleotide
  Sense strand starting at position 124 of SEQ ID NO: 916597
auguaaagucacugcauuu

SEQ ID NO: 1169117 - RNA, 19 nt, Artificial Sequence
  Description of Artificial Sequence: Synthetic oligonucleotide
  Antisense strand to SEQ ID NO: 1169116
aaaugcagugacuuuacau

SEQ ID NO: 1169118 - RNA, 19 nt, Artificial Sequence
  Description of Artificial Sequence: Synthetic oligonucleotide
  Sense strand starting at position 181 of SEQ ID NO: 916597
cacuuuauuggagauuguu

SEQ ID NO: 1169119 - RNA, 19 nt, Artificial Sequence
  Description of Artificial Sequence: Synthetic oligonucleotide
  Antisense strand to SEQ ID NO: 1169118
aacaaucuccaauaaagug

SEQ ID NO: 1169120 - RNA, 19 nt, Artificial Sequence
  Description of Artificial Sequence: Synthetic oligonucleotide
  Sense strand starting at position 302 of SEQ ID NO: 916597
aaacuuggauggcuugaaa

SEQ ID NO: 1169121 - RNA, 19 nt, Artificial Sequence
  Description of Artificial Sequence: Synthetic oligonucleotide
  Antisense strand to SEQ ID NO: 1169120
uuucaagccauccaaguuu

SEQ ID NO: 1169122 - RNA, 19 nt, Artificial Sequence
  Description of Artificial Sequence: Synthetic oligonucleotide
  Sense strand starting at position 335 of SEQ ID NO: 916597
agaagauuauuguuucuca

SEQ ID NO: 1169123 - RNA, 19 nt, Artificial Sequence
  Description of Artificial Sequence: Synthetic oligonucleotide
  Antisense strand to SEQ ID NO: 1169122
ugagaaacaauaaucuucu

SEQ ID NO: 1169124 - RNA, 19 nt, Artificial Sequence
  Description of Artificial Sequence: Synthetic oligonucleotide
  Sense strand starting at position 336 of SEQ ID NO: 916597
gaagauuauuguuucucag

SEQ ID NO: 1169125 - RNA, 19 nt, Artificial Sequence
  Description of Artificial Sequence: Synthetic oligonucleotide
  Antisense strand to SEQ ID NO: 1169124
cugagaaacaauaaucuuc

SEQ ID NO: 1169126 - RNA, 19 nt, Artificial Sequence
  Description of Artificial Sequence: Synthetic oligonucleotide
  Sense strand starting at position 419 of SEQ ID NO: 916597
uuucucaacguugaaauua

SEQ ID NO: 1169127 - RNA, 19 nt, Artificial Sequence
  Description of Artificial Sequence: Synthetic oligonucleotide
  Antisense strand to SEQ ID NO: 1169126
uaauuucaacguugagaaa

SEQ ID NO: 1169128 - RNA, 19 nt, Artificial Sequence
  Description of Artificial Sequence: Synthetic oligonucleotide
  Sense strand starting at position 517 of SEQ ID NO: 916597
cuauuuagagcuugcuaua

SEQ ID NO: 1169129 - RNA, 19 nt, Artificial Sequence
  Description of Artificial Sequence: Synthetic oligonucleotide
  Antisense strand to SEQ ID NO: 1169128
uauagcaagcucuaaauag

SEQ ID NO: 1169130 - RNA, 19 nt, Artificial Sequence
  Description of Artificial Sequence: Synthetic oligonucleotide
  Sense strand starting at position 586 of SEQ ID NO: 916597
ucuugaucugcuugauaaa

SEQ ID NO: 1169131 - RNA, 19 nt, Artificial Sequence
  Description of Artificial Sequence: Synthetic oligonucleotide
  Antisense strand to SEQ ID NO: 1169130
uuuaucaagcagaucaaga

SEQ ID NO: 1169132 - RNA, 19 nt, Artificial Sequence
  Description of Artificial Sequence: Synthetic oligonucleotide
  Sense strand starting at position 587 of SEQ ID NO: 916597
cuugaucugcuugauaaau

SEQ ID NO: 1169133 - RNA, 19 nt, Artificial Sequence
  Description of Artificial Sequence: Synthetic oligonucleotide
  Antisense strand to SEQ ID NO: 1169132
auuuaucaagcagaucaag

SEQ ID NO: 1169134 - RNA, 19 nt, Artificial Sequence
  Description of Artificial Sequence: Synthetic oligonucleotide
  Sense strand starting at position 768 of SEQ ID NO: 916597
gcuuuaagaugaccaugaa

SEQ ID NO: 1169135 - RNA, 19 nt, Artificial Sequence
  Description of Artificial Sequence: Synthetic oligonucleotide
  Antisense strand to SEQ ID NO: 1169134
uucauggucaucuuaaagc

SEQ ID NO: 1169136 - RNA, 19 nt, Artificial Sequence
  Description of Artificial Sequence: Synthetic oligonucleotide
  Sense strand starting at position 783 of SEQ ID NO: 916597
ugaaaucuuugaccaagcu

SEQ ID NO: 1169137 - RNA, 19 nt, Artificial Sequence
  Description of Artificial Sequence: Synthetic oligonucleotide
  Antisense strand to SEQ ID NO: 1169136
agcuuggucaaagauuuca

SEQ ID NO: 1169138 - RNA, 19 nt, Artificial Sequence
  Description of Artificial Sequence: Synthetic oligonucleotide
  Sense strand starting at position 880 of SEQ ID NO: 916597
acuaaaguacuagguaauu

SEQ ID NO: 1169139 - RNA, 19 nt, Artificial Sequence
  Description of Artificial Sequence: Synthetic oligonucleotide
  Antisense strand to SEQ ID NO: 1169138
aauuaccuaguacuuuagu

SEQ ID NO: 1169140 - RNA, 19 nt, Artificial Sequence
  Description of Artificial Sequence: Synthetic oligonucleotide
  Sense strand starting at position 941 of SEQ ID NO: 916597
aaguaagcucuacaauggu

SEQ ID NO: 1169141 - RNA, 19 nt, Artificial Sequence
  Description of Artificial Sequence: Synthetic oligonucleotide
  Antisense strand to SEQ ID NO: 1169140
accauuguagagcuuacuu

SEQ ID NO: 1169142 - RNA, 19 nt, Artificial Sequence
  Description of Artificial Sequence: Synthetic oligonucleotide
  Sense strand starting at position 949 of SEQ ID NO: 916597
ucuacaauggugugaaucu

SEQ ID NO: 1169143 - RNA, 19 nt, Artificial Sequence
  Description of Artificial Sequence: Synthetic oligonucleotide
  Antisense strand to SEQ ID NO: 1169142
agauucacaccauuguaga

SEQ ID NO: 1169144 - RNA, 19 nt, Artificial Sequence
  Description of Artificial Sequence: Synthetic oligonucleotide
  Sense strand starting at position 972 of SEQ ID NO: 916597
auguguguuccuuugugua

SEQ ID NO: 1169145 - RNA, 19 nt, Artificial Sequence
  Description of Artificial Sequence: Synthetic oligonucleotide
  Antisense strand to SEQ ID NO: 1169144
uacacaaaggaacacacau

SEQ ID NO: 1169146 - RNA, 19 nt, Artificial Sequence
  Description of Artificial Sequence: Synthetic oligonucleotide
  Sense strand starting at position 1989 of SEQ ID NO: 916597
ucauauuuggcauggcuua

SEQ ID NO: 1169147 - RNA, 19 nt, Artificial Sequence
  Description of Artificial Sequence: Synthetic oligonucleotide
  Antisense strand to SEQ ID NO: 1169146
uaagccaugccaaauauga

SEQ ID NO: 1169148 - RNA, 19 nt, Artificial Sequence
  Description of Artificial Sequence: Synthetic oligonucleotide
  Sense strand starting at position 2013 of SEQ ID NO: 916597
gaauucugauaggucugua

SEQ ID NO: 1169149 - RNA, 19 nt, Artificial Sequence
  Description of Artificial Sequence: Synthetic oligonucleotide
  Antisense strand to SEQ ID NO: 1169148
uacagaccuaucagaauuc

SEQ ID NO: 1169150 - RNA, 19 nt, Artificial Sequence
  Description of Artificial Sequence: Synthetic oligonucleotide
  Sense strand starting at position 2017 of SEQ ID NO: 916597
ucugauaggucuguagaua

SEQ ID NO: 1169151 - RNA, 19 nt, Artificial Sequence
  Description of Artificial Sequence: Synthetic oligonucleotide
  Antisense strand to SEQ ID NO: 1169150
uaucuacagaccuaucaga

SEQ ID NO: 1169152 - RNA, 19 nt, Artificial Sequence
  Description of Artificial Sequence: Synthetic oligonucleotide
  Sense strand starting at position 2044 of SEQ ID NO: 916597
agugaaugucaauacguga

SEQ ID NO: 1169153 - RNA, 19 nt, Artificial Sequence
  Description of Artificial Sequence: Synthetic oligonucleotide
  Antisense strand to SEQ ID NO: 1169152
ucacguauugacauucacu

SEQ ID NO: 1169154 - RNA, 19 nt, Artificial Sequence
  Description of Artificial Sequence: Synthetic oligonucleotide
  Sense strand starting at position 2076 of SEQ ID NO: 916597
acacuaggauugcucuuau

SEQ ID NO: 1169155 - RNA, 19 nt, Artificial Sequence
  Description of Artificial Sequence: Synthetic oligonucleotide
  Antisense strand to SEQ ID NO: 1169154
auaagagcaauccuagugu

SEQ ID NO: 1169156 - RNA, 19 nt, Artificial Sequence
  Description of Artificial Sequence: Synthetic oligonucleotide
  Sense strand starting at position 3148 of SEQ ID NO: 916597
auaugaauugcucagcaug

SEQ ID NO: 1169157 - RNA, 19 nt, Artificial Sequence
  Description of Artificial Sequence: Synthetic oligonucleotide
  Antisense strand to SEQ ID NO: 1169156
caugcugagcaauucauau

SEQ ID NO: 1169158 - RNA, 19 nt, Artificial Sequence
  Description of Artificial Sequence: Synthetic oligonucleotide
  Sense strand starting at position 3151 of SEQ ID NO: 916597
ugaauugcucagcaugauc

SEQ ID NO: 1169159 - RNA, 19 nt, Artificial Sequence
  Description of Artificial Sequence: Synthetic oligonucleotide
  Antisense strand to SEQ ID NO: 1169158
gaucaugcugagcaauuca

SEQ ID NO: 1169160 - RNA, 19 nt, Artificial Sequence
  Description of Artificial Sequence: Synthetic oligonucleotide
  Sense strand starting at position 3214 of SEQ ID NO: 916597
uugagugacccaugagagu

SEQ ID NO: 1169161 - RNA, 19 nt, Artificial Sequence
  Description of Artificial Sequence: Synthetic oligonucleotide
  Antisense strand to SEQ ID NO: 1169160
acucucaugggucacucaa

SEQ ID NO: 1169162 - RNA, 19 nt, Artificial Sequence
  Description of Artificial Sequence: Synthetic oligonucleotide
  Sense strand starting at position 3223 of SEQ ID NO: 916597
ccaugagaguaaucugauu

SEQ ID NO: 1169163 - RNA, 19 nt, Artificial Sequence
  Description of Artificial Sequence: Synthetic oligonucleotide
  Antisense strand to SEQ ID NO: 1169162
aaucagauuacucucaugg

SEQ ID NO: 1169164 - RNA, 19 nt, Artificial Sequence
  Description of Artificial Sequence: Synthetic oligonucleotide
  Sense strand starting at position 3250 of SEQ ID NO: 916597
agagucaaagugugagaua

SEQ ID NO: 1169165 - RNA, 19 nt, Artificial Sequence
  Description of Artificial Sequence: Synthetic oligonucleotide
  Antisense strand to SEQ ID NO: 1169164
uaucucacacuuugacucu

SEQ ID NO: 1169166 - RNA, 19 nt, Artificial Sequence
  Description of Artificial Sequence: Synthetic oligonucleotide
  Sense strand starting at position 3340 of SEQ ID NO: 916597
ccagcugagguuuaucuaa

SEQ ID NO: 1169167 - RNA, 19 nt, Artificial Sequence
  Description of Artificial Sequence: Synthetic oligonucleotide
  Antisense strand to SEQ ID NO: 1169166
uuagauaaaccucagcugg

SEQ ID NO: 1169168 - RNA, 19 nt, Artificial Sequence
  Description of Artificial Sequence: Synthetic oligonucleotide
  Sense strand starting at position 3342 of SEQ ID NO: 916597
agcugagguuuaucuaaga

SEQ ID NO: 1169169 - RNA, 19 nt, Artificial Sequence
  Description of Artificial Sequence: Synthetic oligonucleotide
  Antisense strand to SEQ ID NO: 1169168
ucuuagauaaaccucagcu

SEQ ID NO: 1169170 - RNA, 19 nt, Artificial Sequence
  Description of Artificial Sequence: Synthetic oligonucleotide
  Sense strand starting at position 3387 of SEQ ID NO: 916597
cagguauuuguaugcuucu

SEQ ID NO: 1169171 - RNA, 19 nt, Artificial Sequence
  Description of Artificial Sequence: Synthetic oligonucleotide
  Antisense strand to SEQ ID NO: 1169170
agaagcauacaaauaccug

SEQ ID NO: 1169172 - RNA, 19 nt, Artificial Sequence
  Description of Artificial Sequence: Synthetic oligonucleotide
  Sense strand starting at position 3390 of SEQ ID NO: 916597
guauuuguaugcuucugaa

SEQ ID NO: 1169173 - RNA, 19 nt, Artificial Sequence
  Description of Artificial Sequence: Synthetic oligonucleotide
  Antisense strand to SEQ ID NO: 1169172
uucagaagcauacaaauac

SEQ ID NO: 1169174 - RNA, 19 nt, Artificial Sequence
  Description of Artificial Sequence: Synthetic oligonucleotide
  Sense strand starting at position 3405 of SEQ ID NO: 916597
ugaacuaagcugugacaaa

SEQ ID NO: 1169175 - RNA, 19 nt, Artificial Sequence
  Description of Artificial Sequence: Synthetic oligonucleotide
  Antisense strand to SEQ ID NO: 1169174
uuugucacagcuuaguuca

SEQ ID NO: 1169176 - RNA, 19 nt, Artificial Sequence
  Description of Artificial Sequence: Synthetic oligonucleotide
  Sense strand starting at position 3438 of SEQ ID NO: 916597
gagaucuacguugaaguuu

SEQ ID NO: 1169177 - RNA, 19 nt, Artificial Sequence
  Description of Artificial Sequence: Synthetic oligonucleotide
  Antisense strand to SEQ ID NO: 1169176
aaacuucaacguagaucuc

SEQ ID NO: 1169178 - RNA, 19 nt, Artificial Sequence
  Description of Artificial Sequence: Synthetic oligonucleotide
  Sense strand starting at position 3548 of SEQ ID NO: 916597
uagguacuuggcuauugaa

SEQ ID NO: 1169179 - RNA, 19 nt, Artificial Sequence
  Description of Artificial Sequence: Synthetic oligonucleotide
  Antisense strand to SEQ ID NO: 1169178
uucaauagccaaguaccua

SEQ ID NO: 1169180 - RNA, 19 nt, Artificial Sequence
  Description of Artificial Sequence: Synthetic oligonucleotide
  Sense strand starting at position 3606 of SEQ ID NO: 916597
uuucauggucuugauggga

SEQ ID NO: 1169181 - RNA, 19 nt, Artificial Sequence
  Description of Artificial Sequence: Synthetic oligonucleotide
  Antisense strand to SEQ ID NO: 1169180
ucccaucaagaccaugaaa

SEQ ID NO: 1169182 - RNA, 19 nt, Artificial Sequence
  Description of Artificial Sequence: Synthetic oligonucleotide
  Sense strand starting at position 3619 of SEQ ID NO: 916597
augggaucgucuuuaaauu

SEQ ID NO: 1169183 - RNA, 19 nt, Artificial Sequence
  Description of Artificial Sequence: Synthetic oligonucleotide
  Antisense strand to SEQ ID NO: 1169182
aauuuaaagacgaucccau

SEQ ID NO: 1169184 - RNA, 19 nt, Artificial Sequence
  Description of Artificial Sequence: Synthetic oligonucleotide
  Sense strand starting at position 3669 of SEQ ID NO: 916597
aggauaucuggugaccagu

SEQ ID NO: 1169185 - RNA, 19 nt, Artificial Sequence
  Description of Artificial Sequence: Synthetic oligonucleotide
  Antisense strand to SEQ ID NO: 1169184
acuggucaccagauauccu

SEQ ID NO: 1169186 - RNA, 19 nt, Artificial Sequence
  Description of Artificial Sequence: Synthetic oligonucleotide
  Sense strand starting at position 3767 of SEQ ID NO: 916597
agugaugcucuugaucaag

SEQ ID NO: 1169187 - RNA, 19 nt, Artificial Sequence
  Description of Artificial Sequence: Synthetic oligonucleotide
  Antisense strand to SEQ ID NO: 1169186
cuugaucaagagcaucacu

SEQ ID NO: 1169188 - RNA, 19 nt, Artificial Sequence
  Description of Artificial Sequence: Synthetic oligonucleotide
  Sense strand starting at position 3853 of SEQ ID NO: 916597
ugcuaagauuguucuagga

SEQ ID NO: 1169189 - RNA, 19 nt, Artificial Sequence
  Description of Artificial Sequence: Synthetic oligonucleotide
  Antisense strand to SEQ ID NO: 1169188
uccuagaacaaucuuagca

SEQ ID NO: 1169190 - RNA, 19 nt, Artificial Sequence
  Description of Artificial Sequence: Synthetic oligonucleotide
  Sense strand starting at position 3857 of SEQ ID NO: 916597
aagauuguucuaggacauu

SEQ ID NO: 1169191 - RNA, 19 nt, Artificial Sequence
  Description of Artificial Sequence: Synthetic oligonucleotide
  Antisense strand to SEQ ID NO: 1169190
aauguccuagaacaaucuu

SEQ ID NO: 1169192 - RNA, 19 nt, Artificial Sequence
  Description of Artificial Sequence: Synthetic oligonucleotide
  Sense strand starting at position 3882 of SEQ ID NO: 916597
aucaucuuugauuagagca

SEQ ID NO: 1169193 - RNA, 19 nt, Artificial Sequence
  Description of Artificial Sequence: Synthetic oligonucleotide
  Antisense strand to SEQ ID NO: 1169192
ugcucuaaucaaagaugau

SEQ ID NO: 1169194 - RNA, 19 nt, Artificial Sequence
  Description of Artificial Sequence: Synthetic oligonucleotide
  Sense strand starting at position 24 of SEQ ID NO: 916598
uuagcauacuggcuaauau

SEQ ID NO: 1169195 - RNA, 19 nt, Artificial Sequence
  Description of Artificial Sequence: Synthetic oligonucleotide
  Antisense strand to SEQ ID NO: 1169194
auauuagccaguaugcuaa

SEQ ID NO: 1169196 - RNA, 19 nt, Artificial Sequence
  Description of Artificial Sequence: Synthetic oligonucleotide
  Sense strand starting at position 35 of SEQ ID NO: 916598
gcuaauauugaacauacga

SEQ ID NO: 1169197 - RNA, 19 nt, Artificial Sequence
  Description of Artificial Sequence: Synthetic oligonucleotide
  Antisense strand to SEQ ID NO: 1169196
ucguauguucaauauuagc

SEQ ID NO: 1169198 - RNA, 19 nt, Artificial Sequence
  Description of Artificial Sequence: Synthetic oligonucleotide
  Sense strand starting at position 67 of SEQ ID NO: 916598
ugcaaauaugaugggugaa

SEQ ID NO: 1169199 - RNA, 19 nt, Artificial Sequence
  Description of Artificial Sequence: Synthetic oligonucleotide
  Antisense strand to SEQ ID NO: 1169198
uucacccaucauauuugca

SEQ ID NO: 1169200 - RNA, 19 nt, Artificial Sequence
  Description of Artificial Sequence: Synthetic oligonucleotide
  Sense strand starting at position 68 of SEQ ID NO: 916598
gcaaauaugaugggugaaa

SEQ ID NO: 1169201 - RNA, 19 nt, Artificial Sequence
  Description of Artificial Sequence: Synthetic oligonucleotide
  Antisense strand to SEQ ID NO: 1169200
uuucacccaucauauuugc

SEQ ID NO: 1169202 - RNA, 19 nt, Artificial Sequence
  Description of Artificial Sequence: Synthetic oligonucleotide
  Sense strand starting at position 108 of SEQ ID NO: 916598
uuaaaucuguggcuaauaa

SEQ ID NO: 1169203 - RNA, 19 nt, Artificial Sequence
  Description of Artificial Sequence: Synthetic oligonucleotide
  Antisense strand to SEQ ID NO: 1169202
uuauuagccacagauuuaa

SEQ ID NO: 1169204 - RNA, 19 nt, Artificial Sequence
  Description of Artificial Sequence: Synthetic oligonucleotide
  Sense strand starting at position 143 of SEQ ID NO: 916598
uuccuauugcuauagguaa

SEQ ID NO: 1169205 - RNA, 19 nt, Artificial Sequence
  Description of Artificial Sequence: Synthetic oligonucleotide
  Antisense strand to SEQ ID NO: 1169204
uuaccuauagcaauaggaa

SEQ ID NO: 1169206 - RNA, 19 nt, Artificial Sequence
  Description of Artificial Sequence: Synthetic oligonucleotide
  Sense strand starting at position 271 of SEQ ID NO: 916598
ucauguuaacuguaccaua

SEQ ID NO: 1169207 - RNA, 19 nt, Artificial Sequence
  Description of Artificial Sequence: Synthetic oligonucleotide
  Antisense strand to SEQ ID NO: 1169206
uaugguacaguuaacauga

SEQ ID NO: 1169208 - RNA, 19 nt, Artificial Sequence
  Description of Artificial Sequence: Synthetic oligonucleotide
  Sense strand starting at position 408 of SEQ ID NO: 916598
uuguaucuugauuaagagu

SEQ ID NO: 1169209 - RNA, 19 nt, Artificial Sequence
  Description of Artificial Sequence: Synthetic oligonucleotide
  Antisense strand to SEQ ID NO: 1169208
acucuuaaucaagauacaa

SEQ ID NO: 1169210 - RNA, 19 nt, Artificial Sequence
  Description of Artificial Sequence: Synthetic oligonucleotide
  Sense strand starting at position 414 of SEQ ID NO: 916598
cuugauuaagagugaauuc

SEQ ID NO: 1169211 - RNA, 19 nt, Artificial Sequence
  Description of Artificial Sequence: Synthetic oligonucleotide
  Antisense strand to SEQ ID NO: 1169210
gaauucacucuuaaucaag

SEQ ID NO: 1169212 - RNA, 19 nt, Artificial Sequence
  Description of Artificial Sequence: Synthetic oligonucleotide
  Sense strand starting at position 839 of SEQ ID NO: 916598
agugguuuaaucugguuaa

SEQ ID NO: 1169213 - RNA, 19 nt, Artificial Sequence
  Description of Artificial Sequence: Synthetic oligonucleotide
  Antisense strand to SEQ ID NO: 1169212
uuaaccagauuaaaccacu

SEQ ID NO: 1169214 - RNA, 19 nt, Artificial Sequence
  Description of Artificial Sequence: Synthetic oligonucleotide
  Sense strand starting at position 842 of SEQ ID NO: 916598
gguuuaaucugguuaagga

SEQ ID NO: 1169215 - RNA, 19 nt, Artificial Sequence
  Description of Artificial Sequence: Synthetic oligonucleotide
  Antisense strand to SEQ ID NO: 1169214
uccuuaaccagauuaaacc

SEQ ID NO: 1169216 - RNA, 19 nt, Artificial Sequence
  Description of Artificial Sequence: Synthetic oligonucleotide
  Sense strand starting at position 843 of SEQ ID NO: 916598
guuuaaucugguuaaggau

SEQ ID NO: 1169217 - RNA, 19 nt, Artificial Sequence
  Description of Artificial Sequence: Synthetic oligonucleotide
  Antisense strand to SEQ ID NO: 1169216
auccuuaaccagauuaaac

SEQ ID NO: 1169218 - RNA, 19 nt, Artificial Sequence
  Description of Artificial Sequence: Synthetic oligonucleotide
  Sense strand starting at position 962 of SEQ ID NO: 916598
acuugauugcucuauagac

SEQ ID NO: 1169219 - RNA, 19 nt, Artificial Sequence
  Description of Artificial Sequence: Synthetic oligonucleotide
  Antisense strand to SEQ ID NO: 1169218
gucuauagagcaaucaagu

SEQ ID NO: 1169220 - RNA, 19 nt, Artificial Sequence
  Description of Artificial Sequence: Synthetic oligonucleotide
  Sense strand starting at position 964 of SEQ ID NO: 916598
uugauugcucuauagacua

SEQ ID NO: 1169221 - RNA, 19 nt, Artificial Sequence
  Description of Artificial Sequence: Synthetic oligonucleotide
  Antisense strand to SEQ ID NO: 1169220
uagucuauagagcaaucaa

SEQ ID NO: 1169222 - RNA, 19 nt, Artificial Sequence
  Description of Artificial Sequence: Synthetic oligonucleotide
  Sense strand starting at position 998 of SEQ ID NO: 916598
gguuauuggcuuuaugaaa

SEQ ID NO: 1169223 - RNA, 19 nt, Artificial Sequence
  Description of Artificial Sequence: Synthetic oligonucleotide
  Antisense strand to SEQ ID NO: 1169222
uuucauaaagccaauaacc

SEQ ID NO: 1169224 - RNA, 19 nt, Artificial Sequence
  Description of Artificial Sequence: Synthetic oligonucleotide
  Sense strand starting at position 2132 of SEQ ID NO: 916598
acuuguugaucugcagaag

SEQ ID NO: 1169225 - RNA, 19 nt, Artificial Sequence
  Description of Artificial Sequence: Synthetic oligonucleotide
  Antisense strand to SEQ ID NO: 1169224
cuucugcagaucaacaagu

SEQ ID NO: 1169226 - RNA, 19 nt, Artificial Sequence
  Description of Artificial Sequence: Synthetic oligonucleotide
  Sense strand starting at position 2133 of SEQ ID NO: 916598
cuuguugaucugcagaagu

SEQ ID NO: 1169227 - RNA, 19 nt, Artificial Sequence
  Description of Artificial Sequence: Synthetic oligonucleotide
  Antisense strand to SEQ ID NO: 1169226
acuucugcagaucaacaag

SEQ ID NO: 1169228 - RNA, 19 nt, Artificial Sequence
  Description of Artificial Sequence: Synthetic oligonucleotide
  Sense strand starting at position 2135 of SEQ ID NO: 916598
uguugaucugcagaaguuu

SEQ ID NO: 1169229 - RNA, 19 nt, Artificial Sequence
  Description of Artificial Sequence: Synthetic oligonucleotide
  Antisense strand to SEQ ID NO: 1169228
aaacuucugcagaucaaca

SEQ ID NO: 1169230 - RNA, 19 nt, Artificial Sequence
  Description of Artificial Sequence: Synthetic oligonucleotide
  Sense strand starting at position 2197 of SEQ ID NO: 916598
uugagcucccuugaucuau

SEQ ID NO: 1169231 - RNA, 19 nt, Artificial Sequence
  Description of Artificial Sequence: Synthetic oligonucleotide
  Antisense strand to SEQ ID NO: 1169230
auagaucaagggagcucaa

SEQ ID NO: 1169232 - RNA, 19 nt, Artificial Sequence
  Description of Artificial Sequence: Synthetic oligonucleotide
  Sense strand starting at position 2616 of SEQ ID NO: 916598
ggcauccacguuuauaauu

SEQ ID NO: 1169233 - RNA, 19 nt, Artificial Sequence
  Description of Artificial Sequence: Synthetic oligonucleotide
  Antisense strand to SEQ ID NO: 1169232
aauuauaaacguggaugcc

SEQ ID NO: 1169234 - RNA, 19 nt, Artificial Sequence
  Description of Artificial Sequence: Synthetic oligonucleotide
  Sense strand starting at position 2789 of SEQ ID NO: 916598
ugucuuccugcguucaguu

SEQ ID NO: 1169235 - RNA, 19 nt, Artificial Sequence
  Description of Artificial Sequence: Synthetic oligonucleotide
  Antisense strand to SEQ ID NO: 1169234
aacugaacgcaggaagaca

SEQ ID NO: 1169236 - RNA, 19 nt, Artificial Sequence
  Description of Artificial Sequence: Synthetic oligonucleotide
  Sense strand starting at position 2790 of SEQ ID NO: 916598
gucuuccugcguucaguua

SEQ ID NO: 1169237 - RNA, 19 nt, Artificial Sequence
  Description of Artificial Sequence: Synthetic oligonucleotide
  Antisense strand to SEQ ID NO: 1169236
uaacugaacgcaggaagac

SEQ ID NO: 1169238 - RNA, 19 nt, Artificial Sequence
  Description of Artificial Sequence: Synthetic oligonucleotide
  Sense strand starting at position 2802 of SEQ ID NO: 916598
ucaguuagcuacucagauu

SEQ ID NO: 1169239 - RNA, 19 nt, Artificial Sequence
  Description of Artificial Sequence: Synthetic oligonucleotide
  Antisense strand to SEQ ID NO: 1169238
aaucugaguagcuaacuga

SEQ ID NO: 1169240 - RNA, 19 nt, Artificial Sequence
  Description of Artificial Sequence: Synthetic oligonucleotide
  Sense strand starting at position 2865 of SEQ ID NO: 916598
ugaauauccucgccaugac

SEQ ID NO: 1169241 - RNA, 19 nt, Artificial Sequence
  Description of Artificial Sequence: Synthetic oligonucleotide
  Antisense strand to SEQ ID NO: 1169240
gucauggcgaggauauuca

SEQ ID NO: 1169242 - RNA, 19 nt, Artificial Sequence
  Description of Artificial Sequence: Synthetic oligonucleotide
  Sense strand starting at position 2868 of SEQ ID NO: 916598
auauccucgccaugacaca

SEQ ID NO: 1169243 - RNA, 19 nt, Artificial Sequence
  Description of Artificial Sequence: Synthetic oligonucleotide
  Antisense strand to SEQ ID NO: 1169242
ugugucauggcgaggauau

SEQ ID NO: 1169244 - RNA, 19 nt, Artificial Sequence
  Description of Artificial Sequence: Synthetic oligonucleotide
  Sense strand starting at position 2943 of SEQ ID NO: 916598
guacgcauucguuucucaa

SEQ ID NO: 1169245 - RNA, 19 nt, Artificial Sequence
  Description of Artificial Sequence: Synthetic oligonucleotide
  Antisense strand to SEQ ID NO: 1169244
uugagaaacgaaugcguac

SEQ ID NO: 1169246 - RNA, 19 nt, Artificial Sequence
  Description of Artificial Sequence: Synthetic oligonucleotide
  Sense strand starting at position 3142 of SEQ ID NO: 916598
uaggacaaccugugaagua

SEQ ID NO: 1169247 - RNA, 19 nt, Artificial Sequence
  Description of Artificial Sequence: Synthetic oligonucleotide
  Antisense strand to SEQ ID NO: 1169246
uacuucacagguuguccua

SEQ ID NO: 1169248 - RNA, 19 nt, Artificial Sequence
  Description of Artificial Sequence: Synthetic oligonucleotide
  Sense strand starting at position 3151 of SEQ ID NO: 916598
cugugaaguagggagguau

SEQ ID NO: 1169249 - RNA, 19 nt, Artificial Sequence
  Description of Artificial Sequence: Synthetic oligonucleotide
  Antisense strand to SEQ ID NO: 1169248
auaccucccuacuucacag

SEQ ID NO: 1169250 - RNA, 19 nt, Artificial Sequence
  Description of Artificial Sequence: Synthetic oligonucleotide
  Sense strand starting at position 3165 of SEQ ID NO: 916598
gguauauuaucuccacuua

SEQ ID NO: 1169251 - RNA, 19 nt, Artificial Sequence
  Description of Artificial Sequence: Synthetic oligonucleotide
  Antisense strand to SEQ ID NO: 1169250
uaaguggagauaauauacc

SEQ ID NO: 1169252 - RNA, 19 nt, Artificial Sequence
  Description of Artificial Sequence: Synthetic oligonucleotide
  Sense strand starting at position 3237 of SEQ ID NO: 916598
gauaguaaguggcuagaga

SEQ ID NO: 1169253 - RNA, 19 nt, Artificial Sequence
  Description of Artificial Sequence: Synthetic oligonucleotide
  Antisense strand to SEQ ID NO: 1169252
ucucuagccacuuacuauc

SEQ ID NO: 1169254 - RNA, 19 nt, Artificial Sequence
  Description of Artificial Sequence: Synthetic oligonucleotide
  Sense strand starting at position 3264 of SEQ ID NO: 916598
agucccaguucuuuaauca

SEQ ID NO: 1169255 - RNA, 19 nt, Artificial Sequence
  Description of Artificial Sequence: Synthetic oligonucleotide
  Antisense strand to SEQ ID NO: 1169254
ugauuaaagaacugggacu

SEQ ID NO: 1169256 - RNA, 19 nt, Artificial Sequence
  Description of Artificial Sequence: Synthetic oligonucleotide
  Sense strand starting at position 3265 of SEQ ID NO: 916598
gucccaguucuuuaaucac

SEQ ID NO: 1169257 - RNA, 19 nt, Artificial Sequence
  Description of Artificial Sequence: Synthetic oligonucleotide
  Antisense strand to SEQ ID NO: 1169256
gugauuaaagaacugggac

SEQ ID NO: 1169258 - RNA, 19 nt, Artificial Sequence
  Description of Artificial Sequence: Synthetic oligonucleotide
  Sense strand starting at position 3292 of SEQ ID NO: 916598
guuuguggugaacacuuua

SEQ ID NO: 1169259 - RNA, 19 nt, Artificial Sequence
  Description of Artificial Sequence: Synthetic oligonucleotide
  Antisense strand to SEQ ID NO: 1169258
uaaaguguucaccacaaac

SEQ ID NO: 1169260 - RNA, 19 nt, Artificial Sequence
  Description of Artificial Sequence: Synthetic oligonucleotide
  Sense strand starting at position 3299 of SEQ ID NO: 916598
gugaacacuuuaccugaau

SEQ ID NO: 1169261 - RNA, 19 nt, Artificial Sequence
  Description of Artificial Sequence: Synthetic oligonucleotide
  Antisense strand to SEQ ID NO: 1169260
auucagguaaaguguucac

SEQ ID NO: 1169262 - RNA, 19 nt, Artificial Sequence
  Description of Artificial Sequence: Synthetic oligonucleotide
  Sense strand starting at position 3330 of SEQ ID NO: 916598
ugaagauaauauucugucu

SEQ ID NO: 1169263 - RNA, 19 nt, Artificial Sequence
  Description of Artificial Sequence: Synthetic oligonucleotide
  Antisense strand to SEQ ID NO: 1169262
agacagaauauuaucuuca

SEQ ID NO: 1169264 - RNA, 19 nt, Artificial Sequence
  Description of Artificial Sequence: Synthetic oligonucleotide
  Sense strand starting at position 3345 of SEQ ID NO: 916598
gucuauugguaauugaaac

SEQ ID NO: 1169265 - RNA, 19 nt, Artificial Sequence
  Description of Artificial Sequence: Synthetic oligonucleotide
  Antisense strand to SEQ ID NO: 1169264
guuucaauuaccaauagac

SEQ ID NO: 1169266 - RNA, 19 nt, Artificial Sequence
  Description of Artificial Sequence: Synthetic oligonucleotide
  Sense strand starting at position 3440 of SEQ ID NO: 916598
guugauacaacugguguaa

SEQ ID NO: 1169267 - RNA, 19 nt, Artificial Sequence
  Description of Artificial Sequence: Synthetic oligonucleotide
  Antisense strand to SEQ ID NO: 1169266
uuacaccaguuguaucaac

SEQ ID NO: 1169268 - RNA, 19 nt, Artificial Sequence
  Description of Artificial Sequence: Synthetic oligonucleotide
  Sense strand starting at position 3607 of SEQ ID NO: 916598
uuaguauauugaucccuca

SEQ ID NO: 1169269 - RNA, 19 nt, Artificial Sequence
  Description of Artificial Sequence: Synthetic oligonucleotide
  Antisense strand to SEQ ID NO: 1169268
ugagggaucaauauacuaa

SEQ ID NO: 1169270 - RNA, 19 nt, Artificial Sequence
  Description of Artificial Sequence: Synthetic oligonucleotide
  Sense strand starting at position 3610 of SEQ ID NO: 916598
guauauugaucccucaaug

SEQ ID NO: 1169271 - RNA, 19 nt, Artificial Sequence
  Description of Artificial Sequence: Synthetic oligonucleotide
  Antisense strand to SEQ ID NO: 1169270
cauugagggaucaauauac

SEQ ID NO: 1169272 - RNA, 19 nt, Artificial Sequence
  Description of Artificial Sequence: Synthetic oligonucleotide
  Sense strand starting at position 3698 of SEQ ID NO: 916598
ucaauagcuagguagaagu

SEQ ID NO: 1169273 - RNA, 19 nt, Artificial Sequence
  Description of Artificial Sequence: Synthetic oligonucleotide
  Antisense strand to SEQ ID NO: 1169272
acuucuaccuagcuauuga

SEQ ID NO: 1169274 - RNA, 19 nt, Artificial Sequence
  Description of Artificial Sequence: Synthetic oligonucleotide
  Sense strand starting at position 23 of SEQ ID NO: 916599
uauaauguacugugggaaa

SEQ ID NO: 1169275 - RNA, 19 nt, Artificial Sequence
  Description of Artificial Sequence: Synthetic oligonucleotide
  Antisense strand to SEQ ID NO: 1169274
uuucccacaguacauuaua

SEQ ID NO: 1169276 - RNA, 19 nt, Artificial Sequence
  Description of Artificial Sequence: Synthetic oligonucleotide
  Sense strand starting at position 25 of SEQ ID NO: 916599
uaauguacugugggaaacu

SEQ ID NO: 1169277 - RNA, 19 nt, Artificial Sequence
  Description of Artificial Sequence: Synthetic oligonucleotide
  Antisense strand to SEQ ID NO: 1169276
aguuucccacaguacauua

SEQ ID NO: 1169278 - RNA, 19 nt, Artificial Sequence
  Description of Artificial Sequence: Synthetic oligonucleotide
  Sense strand starting at position 174 of SEQ ID NO: 916599
gaaaucaacugcuugugau

SEQ ID NO: 1169279 - RNA, 19 nt, Artificial Sequence
  Description of Artificial Sequence: Synthetic oligonucleotide
  Antisense strand to SEQ ID NO: 1169278
aucacaagcaguugauuuc

SEQ ID NO: 1169280 - RNA, 19 nt, Artificial Sequence
  Description of Artificial Sequence: Synthetic oligonucleotide
  Sense strand starting at position 263 of SEQ ID NO: 916599
ugaaauguaugauucccuu

SEQ ID NO: 1169281 - RNA, 19 nt, Artificial Sequence
  Description of Artificial Sequence: Synthetic oligonucleotide
  Antisense strand to SEQ ID NO: 1169280
aagggaaucauacauuuca

SEQ ID NO: 1169282 - RNA, 19 nt, Artificial Sequence
  Description of Artificial Sequence: Synthetic oligonucleotide
  Sense strand starting at position 365 of SEQ ID NO: 916599
ggaguaagcuuucuugaaa

SEQ ID NO: 1169283 - RNA, 19 nt, Artificial Sequence
  Description of Artificial Sequence: Synthetic oligonucleotide
  Antisense strand to SEQ ID NO: 1169282
uuucaagaaagcuuacucc

SEQ ID NO: 1169284 - RNA, 19 nt, Artificial Sequence
  Description of Artificial Sequence: Synthetic oligonucleotide
  Sense strand starting at position 366 of SEQ ID NO: 916599
gaguaagcuuucuugaaac

SEQ ID NO: 1169285 - RNA, 19 nt, Artificial Sequence
  Description of Artificial Sequence: Synthetic oligonucleotide
  Antisense strand to SEQ ID NO: 1169284
guuucaagaaagcuuacuc

SEQ ID NO: 1169286 - RNA, 19 nt, Artificial Sequence
  Description of Artificial Sequence: Synthetic oligonucleotide
  Sense strand starting at position 518 of SEQ ID NO: 916599
ggagacuacagucgauaau

SEQ ID NO: 1169287 - RNA, 19 nt, Artificial Sequence
  Description of Artificial Sequence: Synthetic oligonucleotide
  Antisense strand to SEQ ID NO: 1169286
auuaucgacuguagucucc

SEQ ID NO: 1169288 - RNA, 19 nt, Artificial Sequence
  Description of Artificial Sequence: Synthetic oligonucleotide
  Sense strand starting at position 929 of SEQ ID NO: 916599
cugauuguuggacaagcua

SEQ ID NO: 1169289 - RNA, 19 nt, Artificial Sequence
  Description of Artificial Sequence: Synthetic oligonucleotide
  Antisense strand to SEQ ID NO: 1169288
uagcuuguccaacaaucag

SEQ ID NO: 1169290 - RNA, 19 nt, Artificial Sequence
  Description of Artificial Sequence: Synthetic oligonucleotide
  Sense strand starting at position 962 of SEQ ID NO: 916599
auugaauauuggguaucaa

SEQ ID NO: 1169291 - RNA, 19 nt, Artificial Sequence
  Description of Artificial Sequence: Synthetic oligonucleotide
  Antisense strand to SEQ ID NO: 1169290
uugauacccaauauucaau

SEQ ID NO: 1169292 - RNA, 19 nt, Artificial Sequence
  Description of Artificial Sequence: Synthetic oligonucleotide
  Sense strand starting at position 972 of SEQ ID NO: 916599
ggguaucaauucuuaaacu

SEQ ID NO: 1169293 - RNA, 19 nt, Artificial Sequence
  Description of Artificial Sequence: Synthetic oligonucleotide
  Antisense strand to SEQ ID NO: 1169292
aguuuaagaauugauaccc

SEQ ID NO: 1169294 - RNA, 19 nt, Artificial Sequence
  Description of Artificial Sequence: Synthetic oligonucleotide
  Sense strand starting at position 1167 of SEQ ID NO: 916599
ugaaguauugagcacaguu

SEQ ID NO: 1169295 - RNA, 19 nt, Artificial Sequence
  Description of Artificial Sequence: Synthetic oligonucleotide
  Antisense strand to SEQ ID NO: 1169294
aacugugcucaauacuuca

SEQ ID NO: 1169296 - RNA, 19 nt, Artificial Sequence
  Description of Artificial Sequence: Synthetic oligonucleotide
  Sense strand starting at position 1221 of SEQ ID NO: 916599
uggcuuuauguagauaaac

SEQ ID NO: 1169297 - RNA, 19 nt, Artificial Sequence
  Description of Artificial Sequence: Synthetic oligonucleotide
  Antisense strand to SEQ ID NO: 1169296
guuuaucuacauaaagcca

SEQ ID NO: 1169298 - RNA, 19 nt, Artificial Sequence
  Description of Artificial Sequence: Synthetic oligonucleotide
  Sense strand starting at position 1332 of SEQ ID NO: 916599
aauugucuugaugauguaa

SEQ ID NO: 1169299 - RNA, 19 nt, Artificial Sequence
  Description of Artificial Sequence: Synthetic oligonucleotide
  Antisense strand to SEQ ID NO: 1169298
uuacaucaucaagacaauu

SEQ ID NO: 1169300 - RNA, 19 nt, Artificial Sequence
  Description of Artificial Sequence: Synthetic oligonucleotide
  Sense strand starting at position 1432 of SEQ ID NO: 916599
gugucugagcaagaaaguu

SEQ ID NO: 1169301 - RNA, 19 nt, Artificial Sequence
  Description of Artificial Sequence: Synthetic oligonucleotide
  Antisense strand to SEQ ID NO: 1169300
aacuuucuugcucagacac

SEQ ID NO: 1169302 - RNA, 19 nt, Artificial Sequence
  Description of Artificial Sequence: Synthetic oligonucleotide
  Sense strand starting at position 1593 of SEQ ID NO: 916599
guuacucaugauggacaua

SEQ ID NO: 1169303 - RNA, 19 nt, Artificial Sequence
  Description of Artificial Sequence: Synthetic oligonucleotide
  Antisense strand to SEQ ID NO: 1169302
uauguccaucaugaguaac

SEQ ID NO: 1169304 - RNA, 19 nt, Artificial Sequence
  Description of Artificial Sequence: Synthetic oligonucleotide
  Sense strand starting at position 1605 of SEQ ID NO: 916599
ggacauauaacgcaaaggu

SEQ ID NO: 1169305 - RNA, 19 nt, Artificial Sequence
  Description of Artificial Sequence: Synthetic oligonucleotide
  Antisense strand to SEQ ID NO: 1169304
accuuugcguuauaugucc

SEQ ID NO: 1169306 - RNA, 19 nt, Artificial Sequence
  Description of Artificial Sequence: Synthetic oligonucleotide
  Sense strand starting at position 1743 of SEQ ID NO: 916599
ccugguaacaauggugauu

SEQ ID NO: 1169307 - RNA, 19 nt, Artificial Sequence
  Description of Artificial Sequence: Synthetic oligonucleotide
  Antisense strand to SEQ ID NO: 1169306
aaucaccauuguuaccagg

SEQ ID NO: 1169308 - RNA, 19 nt, Artificial Sequence
  Description of Artificial Sequence: Synthetic oligonucleotide
  Sense strand starting at position 1779 of SEQ ID NO: 916599
agcaguugugaaugaaauu

SEQ ID NO: 1169309 - RNA, 19 nt, Artificial Sequence
  Description of Artificial Sequence: Synthetic oligonucleotide
  Antisense strand to SEQ ID NO: 1169308
aauuucauucacaacugcu

SEQ ID NO: 1169310 - RNA, 19 nt, Artificial Sequence
  Description of Artificial Sequence: Synthetic oligonucleotide
  Sense strand starting at position 1835 of SEQ ID NO: 916599
gagucuugagcugggaauc

SEQ ID NO: 1169311 - RNA, 19 nt, Artificial Sequence
  Description of Artificial Sequence: Synthetic oligonucleotide
  Antisense strand to SEQ ID NO: 1169310
gauucccagcucaagacuc

SEQ ID NO: 1169312 - RNA, 19 nt, Artificial Sequence
  Description of Artificial Sequence: Synthetic oligonucleotide
  Sense strand starting at position 1859 of SEQ ID NO: 916599
gaaugagggcaaugauagu

SEQ ID NO: 1169313 - RNA, 19 nt, Artificial Sequence
  Description of Artificial Sequence: Synthetic oligonucleotide
  Antisense strand to SEQ ID NO: 1169312
acuaucauugcccucauuc

SEQ ID NO: 1169314 - RNA, 19 nt, Artificial Sequence
  Description of Artificial Sequence: Synthetic oligonucleotide
  Sense strand starting at position 1875 of SEQ ID NO: 916599
agugaaguucccuaucaug

SEQ ID NO: 1169315 - RNA, 19 nt, Artificial Sequence
  Description of Artificial Sequence: Synthetic oligonucleotide
  Antisense strand to SEQ ID NO: 1169314
caugauagggaacuucacu

SEQ ID NO: 1169316 - RNA, 19 nt, Artificial Sequence
  Description of Artificial Sequence: Synthetic oligonucleotide
  Sense strand starting at position 1937 of SEQ ID NO: 916599
guaacugagaauuauccgu

SEQ ID NO: 1169317 - RNA, 19 nt, Artificial Sequence
  Description of Artificial Sequence: Synthetic oligonucleotide
  Antisense strand to SEQ ID NO: 1169316
acggauaauucucaguuac

SEQ ID NO: 1169318 - RNA, 19 nt, Artificial Sequence
  Description of Artificial Sequence: Synthetic oligonucleotide
  Sense strand starting at position 1939 of SEQ ID NO: 916599
aacugagaauuauccguca

SEQ ID NO: 1169319 - RNA, 19 nt, Artificial Sequence
  Description of Artificial Sequence: Synthetic oligonucleotide
  Antisense strand to SEQ ID NO: 1169318
ugacggauaauucucaguu

SEQ ID NO: 1169320 - RNA, 19 nt, Artificial Sequence
  Description of Artificial Sequence: Synthetic oligonucleotide
  Sense strand starting at position 1952 of SEQ ID NO: 916599
ccgucagucccagaagaau

SEQ ID NO: 1169321 - RNA, 19 nt, Artificial Sequence
  Description of Artificial Sequence: Synthetic oligonucleotide
  Antisense strand to SEQ ID NO: 1169320
auucuucugggacugacgg

SEQ ID NO: 1169322 - RNA, 19 nt, Artificial Sequence
  Description of Artificial Sequence: Synthetic oligonucleotide
  Sense strand starting at position 2073 of SEQ ID NO: 916599
acaggaaaguuuccacacu

SEQ ID NO: 1169323 - RNA, 19 nt, Artificial Sequence
  Description of Artificial Sequence: Synthetic oligonucleotide
  Antisense strand to SEQ ID NO: 1169322
aguguggaaacuuuccugu

SEQ ID NO: 1169324 - RNA, 19 nt, Artificial Sequence
  Description of Artificial Sequence: Synthetic oligonucleotide
  Sense strand starting at position 2111 of SEQ ID NO: 916599
gagguaguacuccauggau

SEQ ID NO: 1169325 - RNA, 19 nt, Artificial Sequence
  Description of Artificial Sequence: Synthetic oligonucleotide
  Antisense strand to SEQ ID NO: 1169324
auccauggaguacuaccuc

SEQ ID NO: 1169326 - RNA, 19 nt, Artificial Sequence
  Description of Artificial Sequence: Synthetic oligonucleotide
  Sense strand starting at position 2117 of SEQ ID NO: 916599
guacuccauggauguugaa

SEQ ID NO: 1169327 - RNA, 19 nt, Artificial Sequence
  Description of Artificial Sequence: Synthetic oligonucleotide
  Antisense strand to SEQ ID NO: 1169326
uucaacauccauggaguac

SEQ ID NO: 1169328 - RNA, 19 nt, Artificial Sequence
  Description of Artificial Sequence: Synthetic oligonucleotide
  Sense strand starting at position 2329 of SEQ ID NO: 916599
gguaaagaucuugguucag

SEQ ID NO: 1169329 - RNA, 19 nt, Artificial Sequence
  Description of Artificial Sequence: Synthetic oligonucleotide
  Antisense strand to SEQ ID NO: 1169328
cugaaccaagaucuuuacc

SEQ ID NO: 1169330 - RNA, 19 nt, Artificial Sequence
  Description of Artificial Sequence: Synthetic oligonucleotide
  Sense strand starting at position 2397 of SEQ ID NO: 916599
aaaugaugccaguguaaug

SEQ ID NO: 1169331 - RNA, 19 nt, Artificial Sequence
  Description of Artificial Sequence: Synthetic oligonucleotide
  Antisense strand to SEQ ID NO: 1169330
cauuacacuggcaucauuu

SEQ ID NO: 1169332 - RNA, 19 nt, Artificial Sequence
  Description of Artificial Sequence: Synthetic oligonucleotide
  Sense strand starting at position 2843 of SEQ ID NO: 916599
uuguguaaucaagaccaua

SEQ ID NO: 1169333 - RNA, 19 nt, Artificial Sequence
  Description of Artificial Sequence: Synthetic oligonucleotide
  Antisense strand to SEQ ID NO: 1169332
uauggucuugauuacacaa

SEQ ID NO: 1169334 - RNA, 19 nt, Artificial Sequence
  Description of Artificial Sequence: Synthetic oligonucleotide
  Sense strand starting at position 2947 of SEQ ID NO: 916599
gauguaauacugugaguga

SEQ ID NO: 1169335 - RNA, 19 nt, Artificial Sequence
  Description of Artificial Sequence: Synthetic oligonucleotide
  Antisense strand to SEQ ID NO: 1169334
ucacucacaguauuacauc

SEQ ID NO: 1169336 - RNA, 19 nt, Artificial Sequence
  Description of Artificial Sequence: Synthetic oligonucleotide
  Sense strand starting at position 3055 of SEQ ID NO: 916599
guaggaaggguguaaucau

SEQ ID NO: 1169337 - RNA, 19 nt, Artificial Sequence
  Description of Artificial Sequence: Synthetic oligonucleotide
  Antisense strand to SEQ ID NO: 1169336
augauuacacccuuccuac

SEQ ID NO: 1169338 - RNA, 19 nt, Artificial Sequence
  Description of Artificial Sequence: Synthetic oligonucleotide
  Sense strand starting at position 3119 of SEQ ID NO: 916599
guagguuucccagaguauc

SEQ ID NO: 1169339 - RNA, 19 nt, Artificial Sequence
  Description of Artificial Sequence: Synthetic oligonucleotide
  Antisense strand to SEQ ID NO: 1169338
gauacucugggaaaccuac

SEQ ID NO: 1169340 - RNA, 19 nt, Artificial Sequence
  Description of Artificial Sequence: Synthetic oligonucleotide
  Sense strand starting at position 3154 of SEQ ID NO: 916599
aagugaagugaguaauagu

SEQ ID NO: 1169341 - RNA, 19 nt, Artificial Sequence
  Description of Artificial Sequence: Synthetic oligonucleotide
  Antisense strand to SEQ ID NO: 1169340
acuauuacucacuucacuu

SEQ ID NO: 1169342 - RNA, 19 nt, Artificial Sequence
  Description of Artificial Sequence: Synthetic oligonucleotide
  Sense strand starting at position 3192 of SEQ ID NO: 916599
gacagacugcuaggaauua

SEQ ID NO: 1169343 - RNA, 19 nt, Artificial Sequence
  Description of Artificial Sequence: Synthetic oligonucleotide
  Antisense strand to SEQ ID NO: 1169342
uaauuccuagcagucuguc

SEQ ID NO: 1169344 - RNA, 19 nt, Artificial Sequence
  Description of Artificial Sequence: Synthetic oligonucleotide
  Sense strand starting at position 3280 of SEQ ID NO: 916599
auccacucucaggguuaaa

SEQ ID NO: 1169345 - RNA, 19 nt, Artificial Sequence
  Description of Artificial Sequence: Synthetic oligonucleotide
  Antisense strand to SEQ ID NO: 1169344
uuuaacccugagaguggau

SEQ ID NO: 1169346 - RNA, 19 nt, Artificial Sequence
  Description of Artificial Sequence: Synthetic oligonucleotide
  Sense strand starting at position 3283 of SEQ ID NO: 916599
cacucucaggguuaaaguu

SEQ ID NO: 1169347 - RNA, 19 nt, Artificial Sequence
  Description of Artificial Sequence: Synthetic oligonucleotide
  Antisense strand to SEQ ID NO: 1169346
aacuuuaacccugagagug

SEQ ID NO: 1169348 - RNA, 19 nt, Artificial Sequence
  Description of Artificial Sequence: Synthetic oligonucleotide
  Sense strand starting at position 3301 of SEQ ID NO: 916599
uugggaagcuucuuuauug

SEQ ID NO: 1169349 - RNA, 19 nt, Artificial Sequence
  Description of Artificial Sequence: Synthetic oligonucleotide
  Antisense strand to SEQ ID NO: 1169348
caauaaagaagcuucccaa

SEQ ID NO: 1169350 - RNA, 19 nt, Artificial Sequence
  Description of Artificial Sequence: Synthetic oligonucleotide
  Sense strand starting at position 3337 of SEQ ID NO: 916599
aaauguuaagcugaguauc

SEQ ID NO: 1169351 - RNA, 19 nt, Artificial Sequence
  Description of Artificial Sequence: Synthetic oligonucleotide
  Antisense strand to SEQ ID NO: 1169350
gauacucagcuuaacauuu

SEQ ID NO: 1169352 - RNA, 19 nt, Artificial Sequence
  Description of Artificial Sequence: Synthetic oligonucleotide
  Sense strand starting at position 3340 of SEQ ID NO: 916599
uguuaagcugaguaucaca

SEQ ID NO: 1169353 - RNA, 19 nt, Artificial Sequence
  Description of Artificial Sequence: Synthetic oligonucleotide
  Antisense strand to SEQ ID NO: 1169352
ugugauacucagcuuaaca

SEQ ID NO: 1169354 - RNA, 19 nt, Artificial Sequence
  Description of Artificial Sequence: Synthetic oligonucleotide
  Sense strand starting at position 39 of SEQ ID NO: 916600
ugcacaugaucagucauua

SEQ ID NO: 1169355 - RNA, 19 nt, Artificial Sequence
  Description of Artificial Sequence: Synthetic oligonucleotide
  Antisense strand to SEQ ID NO: 1169354
uaaugacugaucaugugca

SEQ ID NO: 1169356 - RNA, 19 nt, Artificial Sequence
  Description of Artificial Sequence: Synthetic oligonucleotide
  Sense strand starting at position 299 of SEQ ID NO: 916600
uguugucaucaacaaauua

SEQ ID NO: 1169357 - RNA, 19 nt, Artificial Sequence
  Description of Artificial Sequence: Synthetic oligonucleotide
  Antisense strand to SEQ ID NO: 1169356
uaauuuguugaugacaaca

SEQ ID NO: 1169358 - RNA, 19 nt, Artificial Sequence
  Description of Artificial Sequence: Synthetic oligonucleotide
  Sense strand starting at position 417 of SEQ ID NO: 916600
ggcacauuguaagcaauca

SEQ ID NO: 1169359 - RNA, 19 nt, Artificial Sequence
  Description of Artificial Sequence: Synthetic oligonucleotide
  Antisense strand to SEQ ID NO: 1169358
ugauugcuuacaaugugcc

SEQ ID NO: 1169360 - RNA, 19 nt, Artificial Sequence
  Description of Artificial Sequence: Synthetic oligonucleotide
  Sense strand starting at position 447 of SEQ ID NO: 916600
cuguaaguucuauaugaua

SEQ ID NO: 1169361 - RNA, 19 nt, Artificial Sequence
  Description of Artificial Sequence: Synthetic oligonucleotide
  Antisense strand to SEQ ID NO: 1169360
uaucauauagaacuuacag

SEQ ID NO: 1169362 - RNA, 19 nt, Artificial Sequence
  Description of Artificial Sequence: Synthetic oligonucleotide
  Sense strand starting at position 455 of SEQ ID NO: 916600
ucuauaugauagcugcaau

SEQ ID NO: 1169363 - RNA, 19 nt, Artificial Sequence
  Description of Artificial Sequence: Synthetic oligonucleotide
  Antisense strand to SEQ ID NO: 1169362
auugcagcuaucauauaga

SEQ ID NO: 1169364 - RNA, 19 nt, Artificial Sequence
  Description of Artificial Sequence: Synthetic oligonucleotide
  Sense strand starting at position 475 of SEQ ID NO: 916600
gcaguaaugcuuuaaccuc

SEQ ID NO: 1169365 - RNA, 19 nt, Artificial Sequence
  Description of Artificial Sequence: Synthetic oligonucleotide
  Antisense strand to SEQ ID NO: 1169364
gagguuaaagcauuacugc

SEQ ID NO: 1169366 - RNA, 19 nt, Artificial Sequence
  Description of Artificial Sequence: Synthetic oligonucleotide
  Sense strand starting at position 532 of SEQ ID NO: 916600
aucucuaagccugguuaaa

SEQ ID NO: 1169367 - RNA, 19 nt, Artificial Sequence
  Description of Artificial Sequence: Synthetic oligonucleotide
  Antisense strand to SEQ ID NO: 1169366
uuuaaccaggcuuagagau

SEQ ID NO: 1169368 - RNA, 19 nt, Artificial Sequence
  Description of Artificial Sequence: Synthetic oligonucleotide
  Sense strand starting at position 671 of SEQ ID NO: 916600
gcguuaagugaucaaaccu

SEQ ID NO: 1169369 - RNA, 19 nt, Artificial Sequence
  Description of Artificial Sequence: Synthetic oligonucleotide
  Antisense strand to SEQ ID NO: 1169368
agguuugaucacuuaacgc

SEQ ID NO: 1169370 - RNA, 19 nt, Artificial Sequence
  Description of Artificial Sequence: Synthetic oligonucleotide
  Sense strand starting at position 699 of SEQ ID NO: 916600
acugaacucuauguagaau

SEQ ID NO: 1169371 - RNA, 19 nt, Artificial Sequence
  Description of Artificial Sequence: Synthetic oligonucleotide
  Antisense strand to SEQ ID NO: 1169370
auucuacauagaguucagu

SEQ ID NO: 1169372 - RNA, 19 nt, Artificial Sequence
  Description of Artificial Sequence: Synthetic oligonucleotide
  Sense strand starting at position 724 of SEQ ID NO: 916600
caaauuggguccuugaauu

SEQ ID NO: 1169373 - RNA, 19 nt, Artificial Sequence
  Description of Artificial Sequence: Synthetic oligonucleotide
  Antisense strand to SEQ ID NO: 1169372
aauucaaggacccaauuug

SEQ ID NO: 1169374 - RNA, 19 nt, Artificial Sequence
  Description of Artificial Sequence: Synthetic oligonucleotide
  Sense strand starting at position 784 of SEQ ID NO: 916600
uuugucuuccucugagaga

SEQ ID NO: 1169375 - RNA, 19 nt, Artificial Sequence
  Description of Artificial Sequence: Synthetic oligonucleotide
  Antisense strand to SEQ ID NO: 1169374
ucucucagaggaagacaaa

SEQ ID NO: 1169376 - RNA, 19 nt, Artificial Sequence
  Description of Artificial Sequence: Synthetic oligonucleotide
  Sense strand starting at position 879 of SEQ ID NO: 916600
gugaucucagcaugaggga

SEQ ID NO: 1169377 - RNA, 19 nt, Artificial Sequence
  Description of Artificial Sequence: Synthetic oligonucleotide
  Antisense strand to SEQ ID NO: 1169376
ucccucaugcugagaucac

SEQ ID NO: 1169378 - RNA, 19 nt, Artificial Sequence
  Description of Artificial Sequence: Synthetic oligonucleotide
  Sense strand starting at position 896 of SEQ ID NO: 916600
gagaaauggcagugaaggu

SEQ ID NO: 1169379 - RNA, 19 nt, Artificial Sequence
  Description of Artificial Sequence: Synthetic oligonucleotide
  Antisense strand to SEQ ID NO: 1169378
accuucacugccauuucuc

SEQ ID NO: 1169380 - RNA, 19 nt, Artificial Sequence
  Description of Artificial Sequence: Synthetic oligonucleotide
  Sense strand starting at position 910 of SEQ ID NO: 916600
aagguuaggcuuuggagau

SEQ ID NO: 1169381 - RNA, 19 nt, Artificial Sequence
  Description of Artificial Sequence: Synthetic oligonucleotide
  Antisense strand to SEQ ID NO: 1169380
aucuccaaagccuaaccuu

SEQ ID NO: 1169382 - RNA, 19 nt, Artificial Sequence
  Description of Artificial Sequence: Synthetic oligonucleotide
  Sense strand starting at position 2046 of SEQ ID NO: 916600
agaggaaaggucugcauga

SEQ ID NO: 1169383 - RNA, 19 nt, Artificial Sequence
  Description of Artificial Sequence: Synthetic oligonucleotide
  Antisense strand to SEQ ID NO: 1169382
ucaugcagaccuuuccucu

SEQ ID NO: 1169384 - RNA, 19 nt, Artificial Sequence
  Description of Artificial Sequence: Synthetic oligonucleotide
  Sense strand starting at position 2047 of SEQ ID NO: 916600
gaggaaaggucugcaugag

SEQ ID NO: 1169385 - RNA, 19 nt, Artificial Sequence
  Description of Artificial Sequence: Synthetic oligonucleotide
  Antisense strand to SEQ ID NO: 1169384
cucaugcagaccuuuccuc

SEQ ID NO: 1169386 - RNA, 19 nt, Artificial Sequence
  Description of Artificial Sequence: Synthetic oligonucleotide
  Sense strand starting at position 2209 of SEQ ID NO: 916600
ucucaauggccauaaaugu

SEQ ID NO: 1169387 - RNA, 19 nt, Artificial Sequence
  Description of Artificial Sequence: Synthetic oligonucleotide
  Antisense strand to SEQ ID NO: 1169386
acauuuauggccauugaga

SEQ ID NO: 1169388 - RNA, 19 nt, Artificial Sequence
  Description of Artificial Sequence: Synthetic oligonucleotide
  Sense strand starting at position 2228 of SEQ ID NO: 916600
aagcauugcgaagggauaa

SEQ ID NO: 1169389 - RNA, 19 nt, Artificial Sequence
  Description of Artificial Sequence: Synthetic oligonucleotide
  Antisense strand to SEQ ID NO: 1169388
uuaucccuucgcaaugcuu

SEQ ID NO: 1169390 - RNA, 19 nt, Artificial Sequence
  Description of Artificial Sequence: Synthetic oligonucleotide
  Sense strand starting at position 2229 of SEQ ID NO: 916600
agcauugcgaagggauaau

SEQ ID NO: 1169391 - RNA, 19 nt, Artificial Sequence
  Description of Artificial Sequence: Synthetic oligonucleotide
  Antisense strand to SEQ ID NO: 1169390
auuaucccuucgcaaugcu

SEQ ID NO: 1169392 - RNA, 19 nt, Artificial Sequence
  Description of Artificial Sequence: Synthetic oligonucleotide
  Sense strand starting at position 2238 of SEQ ID NO: 916600
aagggauaauauguugcau

SEQ ID NO: 1169393 - RNA, 19 nt, Artificial Sequence
  Description of Artificial Sequence: Synthetic oligonucleotide
  Antisense strand to SEQ ID NO: 1169392
augcaacauauuaucccuu

SEQ ID NO: 1169394 - RNA, 19 nt, Artificial Sequence
  Description of Artificial Sequence: Synthetic oligonucleotide
  Sense strand starting at position 2506 of SEQ ID NO: 916600
uggcuuccacagugggaau

SEQ ID NO: 1169395 - RNA, 19 nt, Artificial Sequence
  Description of Artificial Sequence: Synthetic oligonucleotide
  Antisense strand to SEQ ID NO: 1169394
auucccacuguggaagcca

SEQ ID NO: 1169396 - RNA, 19 nt, Artificial Sequence
  Description of Artificial Sequence: Synthetic oligonucleotide
  Sense strand starting at position 2507 of SEQ ID NO: 916600
ggcuuccacagugggaauu

SEQ ID NO: 1169397 - RNA, 19 nt, Artificial Sequence
  Description of Artificial Sequence: Synthetic oligonucleotide
  Antisense strand to SEQ ID NO: 1169396
aauucccacuguggaagcc

SEQ ID NO: 1169398 - RNA, 19 nt, Artificial Sequence
  Description of Artificial Sequence: Synthetic oligonucleotide
  Sense strand starting at position 2702 of SEQ ID NO: 916600
uuguguuauguagugcauu

SEQ ID NO: 1169399 - RNA, 19 nt, Artificial Sequence
  Description of Artificial Sequence: Synthetic oligonucleotide
  Antisense strand to SEQ ID NO: 1169398
aaugcacuacauaacacaa

SEQ ID NO: 1169400 - RNA, 19 nt, Artificial Sequence
  Description of Artificial Sequence: Synthetic oligonucleotide
  Sense strand starting at position 2710 of SEQ ID NO: 916600
uguagugcauuugcagaau

SEQ ID NO: 1169401 - RNA, 19 nt, Artificial Sequence
  Description of Artificial Sequence: Synthetic oligonucleotide
  Antisense strand to SEQ ID NO: 1169400
auucugcaaaugcacuaca

SEQ ID NO: 1169402 - RNA, 19 nt, Artificial Sequence
  Description of Artificial Sequence: Synthetic oligonucleotide
  Sense strand starting at position 2824 of SEQ ID NO: 916600
ggaagauugcuuugagacc

SEQ ID NO: 1169403 - RNA, 19 nt, Artificial Sequence
  Description of Artificial Sequence: Synthetic oligonucleotide
  Antisense strand to SEQ ID NO: 1169402
ggucucaaagcaaucuucc

SEQ ID NO: 1169404 - RNA, 19 nt, Artificial Sequence
  Description of Artificial Sequence: Synthetic oligonucleotide
  Sense strand starting at position 2903 of SEQ ID NO: 916600
gcaagaccaugccuauaaa

SEQ ID NO: 1169405 - RNA, 19 nt, Artificial Sequence
  Description of Artificial Sequence: Synthetic oligonucleotide
  Antisense strand to SEQ ID NO: 1169404
uuuauaggcauggucuugc

SEQ ID NO: 1169406 - RNA, 19 nt, Artificial Sequence
  Description of Artificial Sequence: Synthetic oligonucleotide
  Sense strand starting at position 3141 of SEQ ID NO: 916600
ucacguuuaucaccugaca

SEQ ID NO: 1169407 - RNA, 19 nt, Artificial Sequence
  Description of Artificial Sequence: Synthetic oligonucleotide
  Antisense strand to SEQ ID NO: 1169406
ugucaggugauaaacguga

SEQ ID NO: 1169408 - RNA, 19 nt, Artificial Sequence
  Description of Artificial Sequence: Synthetic oligonucleotide
  Sense strand starting at position 3144 of SEQ ID NO: 916600
cguuuaucaccugacaagu

SEQ ID NO: 1169409 - RNA, 19 nt, Artificial Sequence
  Description of Artificial Sequence: Synthetic oligonucleotide
  Antisense strand to SEQ ID NO: 1169408
acuugucaggugauaaacg

SEQ ID NO: 1169410 - RNA, 19 nt, Artificial Sequence
  Description of Artificial Sequence: Synthetic oligonucleotide
  Sense strand starting at position 3160 of SEQ ID NO: 916600
agucuaucaucaccaaguu

SEQ ID NO: 1169411 - RNA, 19 nt, Artificial Sequence
  Description of Artificial Sequence: Synthetic oligonucleotide
  Antisense strand to SEQ ID NO: 1169410
aacuuggugaugauagacu

SEQ ID NO: 1169412 - RNA, 19 nt, Artificial Sequence
  Description of Artificial Sequence: Synthetic oligonucleotide
  Sense strand starting at position 3161 of SEQ ID NO: 916600
gucuaucaucaccaaguuu

SEQ ID NO: 1169413 - RNA, 19 nt, Artificial Sequence
  Description of Artificial Sequence: Synthetic oligonucleotide
  Antisense strand to SEQ ID NO: 1169412
aaacuuggugaugauagac

SEQ ID NO: 1169414 - RNA, 19 nt, Artificial Sequence
  Description of Artificial Sequence: Synthetic oligonucleotide
  Sense strand starting at position 3208 of SEQ ID NO: 916600
gaagaauauugugccauau

SEQ ID NO: 1169415 - RNA, 19 nt, Artificial Sequence
  Description of Artificial Sequence: Synthetic oligonucleotide
  Antisense strand to SEQ ID NO: 1169414
auauggcacaauauucuuc

SEQ ID NO: 1169416 - RNA, 19 nt, Artificial Sequence
  Description of Artificial Sequence: Synthetic oligonucleotide
  Sense strand starting at position 3226 of SEQ ID NO: 916600
uguuaaacuguauaugaac

SEQ ID NO: 1169417 - RNA, 19 nt, Artificial Sequence
  Description of Artificial Sequence: Synthetic oligonucleotide
  Antisense strand to SEQ ID NO: 1169416
guucauauacaguuuaaca

SEQ ID NO: 1169418 - RNA, 19 nt, Artificial Sequence
  Description of Artificial Sequence: Synthetic oligonucleotide
  Sense strand starting at position 3262 of SEQ ID NO: 916600
auuccagcucuggagugaa

SEQ ID NO: 1169419 - RNA, 19 nt, Artificial Sequence
  Description of Artificial Sequence: Synthetic oligonucleotide
  Antisense strand to SEQ ID NO: 1169418
uucacuccagagcuggaau

SEQ ID NO: 1169420 - RNA, 19 nt, Artificial Sequence
  Description of Artificial Sequence: Synthetic oligonucleotide
  Sense strand starting at position 3265 of SEQ ID NO: 916600
ccagcucuggagugaaaca

SEQ ID NO: 1169421 - RNA, 19 nt, Artificial Sequence
  Description of Artificial Sequence: Synthetic oligonucleotide
  Antisense strand to SEQ ID NO: 1169420
uguuucacuccagagcugg

SEQ ID NO: 1169422 - RNA, 19 nt, Artificial Sequence
  Description of Artificial Sequence: Synthetic oligonucleotide
  Sense strand starting at position 3552 of SEQ ID NO: 916600
gaaaguaauuuauauggac

SEQ ID NO: 1169423 - RNA, 19 nt, Artificial Sequence
  Description of Artificial Sequence: Synthetic oligonucleotide
  Antisense strand to SEQ ID NO: 1169422
guccauauaaauuacuuuc

SEQ ID NO: 1169424 - RNA, 19 nt, Artificial Sequence
  Description of Artificial Sequence: Synthetic oligonucleotide
  Sense strand starting at position 3709 of SEQ ID NO: 916600
agucauauguuuccaacca

SEQ ID NO: 1169425 - RNA, 19 nt, Artificial Sequence
  Description of Artificial Sequence: Synthetic oligonucleotide
  Antisense strand to SEQ ID NO: 1169424
ugguuggaaacauaugacu

SEQ ID NO: 1169426 - RNA, 19 nt, Artificial Sequence
  Description of Artificial Sequence: Synthetic oligonucleotide
  Sense strand starting at position 3725 of SEQ ID NO: 916600
ccaccaguauagucccaaa

SEQ ID NO: 1169427 - RNA, 19 nt, Artificial Sequence
  Description of Artificial Sequence: Synthetic oligonucleotide
  Antisense strand to SEQ ID NO: 1169426
uuugggacuauacuggugg

SEQ ID NO: 1169428 - RNA, 19 nt, Artificial Sequence
  Description of Artificial Sequence: Synthetic oligonucleotide
  Sense strand starting at position 3761 of SEQ ID NO: 916600
uggcaaguuauagguaaga

SEQ ID NO: 1169429 - RNA, 19 nt, Artificial Sequence
  Description of Artificial Sequence: Synthetic oligonucleotide
  Antisense strand to SEQ ID NO: 1169428
ucuuaccuauaacuugcca

SEQ ID NO: 1169430 - RNA, 19 nt, Artificial Sequence
  Description of Artificial Sequence: Synthetic oligonucleotide
  Sense strand starting at position 3763 of SEQ ID NO: 916600
gcaaguuauagguaagaua

SEQ ID NO: 1169431 - RNA, 19 nt, Artificial Sequence
  Description of Artificial Sequence: Synthetic oligonucleotide
  Antisense strand to SEQ ID NO: 1169430
uaucuuaccuauaacuugc

SEQ ID NO: 1169432 - RNA, 19 nt, Artificial Sequence
  Description of Artificial Sequence: Synthetic oligonucleotide
  Sense strand starting at position 3933 of SEQ ID NO: 916600
auacuagaggcauaugcaa

SEQ ID NO: 1169433 - RNA, 19 nt, Artificial Sequence
  Description of Artificial Sequence: Synthetic oligonucleotide
  Antisense strand to SEQ ID NO: 1169432
uugcauaugccucuaguau

SEQ ID NO: 1169434 - RNA, 19 nt, Artificial Sequence
  Description of Artificial Sequence: Synthetic oligonucleotide
  Sense strand starting at position 87 of SEQ ID NO: 916601
gcaguaucacaccauugua

SEQ ID NO: 1169435 - RNA, 19 nt, Artificial Sequence
  Description of Artificial Sequence: Synthetic oligonucleotide
  Antisense strand to SEQ ID NO: 1169434
uacaauggugugauacugc

SEQ ID NO: 1169436 - RNA, 19 nt, Artificial Sequence
  Description of Artificial Sequence: Synthetic oligonucleotide
  Sense strand starting at position 103 of SEQ ID NO: 916601
guagacucuuacuuuguca

SEQ ID NO: 1169437 - RNA, 19 nt, Artificial Sequence
  Description of Artificial Sequence: Synthetic oligonucleotide
  Antisense strand to SEQ ID NO: 1169436
ugacaaaguaagagucuac

SEQ ID NO: 1169438 - RNA, 19 nt, Artificial Sequence
  Description of Artificial Sequence: Synthetic oligonucleotide
  Sense strand starting at position 105 of SEQ ID NO: 916601
agacucuuacuuugucauu

SEQ ID NO: 1169439 - RNA, 19 nt, Artificial Sequence
  Description of Artificial Sequence: Synthetic oligonucleotide
  Antisense strand to SEQ ID NO: 1169438
aaugacaaaguaagagucu

SEQ ID NO: 1169440 - RNA, 19 nt, Artificial Sequence
  Description of Artificial Sequence: Synthetic oligonucleotide
  Sense strand starting at position 128 of SEQ ID NO: 916601
ucaucauaucaguaguaag

SEQ ID NO: 1169441 - RNA, 19 nt, Artificial Sequence
  Description of Artificial Sequence: Synthetic oligonucleotide
  Antisense strand to SEQ ID NO: 1169440
cuuacuacugauaugauga

SEQ ID NO: 1169442 - RNA, 19 nt, Artificial Sequence
  Description of Artificial Sequence: Synthetic oligonucleotide
  Sense strand starting at position 267 of SEQ ID NO: 916601
aggaaauauuaucaaagga

SEQ ID NO: 1169443 - RNA, 19 nt, Artificial Sequence
  Description of Artificial Sequence: Synthetic oligonucleotide
  Antisense strand to SEQ ID NO: 1169442
uccuuugauaauauuuccu

SEQ ID NO: 1169444 - RNA, 19 nt, Artificial Sequence
  Description of Artificial Sequence: Synthetic oligonucleotide
  Sense strand starting at position 395 of SEQ ID NO: 916601
ucugcacauuugucuuaca

SEQ ID NO: 1169445 - RNA, 19 nt, Artificial Sequence
  Description of Artificial Sequence: Synthetic oligonucleotide
  Antisense strand to SEQ ID NO: 1169444
uguaagacaaaugugcaga

SEQ ID NO: 1169446 - RNA, 19 nt, Artificial Sequence
  Description of Artificial Sequence: Synthetic oligonucleotide
  Sense strand starting at position 847 of SEQ ID NO: 916601
uuuaguuacauaggugaga

SEQ ID NO: 1169447 - RNA, 19 nt, Artificial Sequence
  Description of Artificial Sequence: Synthetic oligonucleotide
  Antisense strand to SEQ ID NO: 1169446
ucucaccuauguaacuaaa

SEQ ID NO: 1169448 - RNA, 19 nt, Artificial Sequence
  Description of Artificial Sequence: Synthetic oligonucleotide
  Sense strand starting at position 849 of SEQ ID NO: 916601
uaguuacauaggugagaga

SEQ ID NO: 1169449 - RNA, 19 nt, Artificial Sequence
  Description of Artificial Sequence: Synthetic oligonucleotide
  Antisense strand to SEQ ID NO: 1169448
ucucucaccuauguaacua

SEQ ID NO: 1169450 - RNA, 19 nt, Artificial Sequence
  Description of Artificial Sequence: Synthetic oligonucleotide
  Sense strand starting at position 867 of SEQ ID NO: 916601
agcgaacacuuucuauaua

SEQ ID NO: 1169451 - RNA, 19 nt, Artificial Sequence
  Description of Artificial Sequence: Synthetic oligonucleotide
  Antisense strand to SEQ ID NO: 1169450
uauauagaaaguguucgcu

SEQ ID NO: 1169452 - RNA, 19 nt, Artificial Sequence
  Description of Artificial Sequence: Synthetic oligonucleotide
  Sense strand starting at position 928 of SEQ ID NO: 916601
agaaguguugaugauaugu

SEQ ID NO: 1169453 - RNA, 19 nt, Artificial Sequence
  Description of Artificial Sequence: Synthetic oligonucleotide
  Antisense strand to SEQ ID NO: 1169452
acauaucaucaacacuucu

SEQ ID NO: 1169454 - RNA, 19 nt, Artificial Sequence
  Description of Artificial Sequence: Synthetic oligonucleotide
  Sense strand starting at position 933 of SEQ ID NO: 916601
uguugaugauauguaacua

SEQ ID NO: 1169455 - RNA, 19 nt, Artificial Sequence
  Description of Artificial Sequence: Synthetic oligonucleotide
  Antisense strand to SEQ ID NO: 1169454
uaguuacauaucaucaaca

SEQ ID NO: 1169456 - RNA, 19 nt, Artificial Sequence
  Description of Artificial Sequence: Synthetic oligonucleotide
  Sense strand starting at position 966 of SEQ ID NO: 916601
ugugaaauaagguguuuag

SEQ ID NO: 1169457 - RNA, 19 nt, Artificial Sequence
  Description of Artificial Sequence: Synthetic oligonucleotide
  Antisense strand to SEQ ID NO: 1169456
cuaaacaccuuauuucaca

SEQ ID NO: 1169458 - RNA, 19 nt, Artificial Sequence
  Description of Artificial Sequence: Synthetic oligonucleotide
  Sense strand starting at position 1987 of SEQ ID NO: 916601
uguggaauuucucauuauu

SEQ ID NO: 1169459 - RNA, 19 nt, Artificial Sequence
  Description of Artificial Sequence: Synthetic oligonucleotide
  Antisense strand to SEQ ID NO: 1169458
aauaaugagaaauuccaca

SEQ ID NO: 1169460 - RNA, 19 nt, Artificial Sequence
  Description of Artificial Sequence: Synthetic oligonucleotide
  Sense strand starting at position 2196 of SEQ ID NO: 916601
auaacauuccauugugucu

SEQ ID NO: 1169461 - RNA, 19 nt, Artificial Sequence
  Description of Artificial Sequence: Synthetic oligonucleotide
  Antisense strand to SEQ ID NO: 1169460
agacacaauggaauguuau

SEQ ID NO: 1169462 - RNA, 19 nt, Artificial Sequence
  Description of Artificial Sequence: Synthetic oligonucleotide
  Sense strand starting at position 2273 of SEQ ID NO: 916601
aggguuuaaacuuguaguu

SEQ ID NO: 1169463 - RNA, 19 nt, Artificial Sequence
  Description of Artificial Sequence: Synthetic oligonucleotide
  Antisense strand to SEQ ID NO: 1169462
aacuacaaguuuaaacccu

SEQ ID NO: 1169464 - RNA, 19 nt, Artificial Sequence
  Description of Artificial Sequence: Synthetic oligonucleotide
  Sense strand starting at position 2283 of SEQ ID NO: 916601
cuuguaguuauguacgaug

SEQ ID NO: 1169465 - RNA, 19 nt, Artificial Sequence
  Description of Artificial Sequence: Synthetic oligonucleotide
  Antisense strand to SEQ ID NO: 1169464
caucguacauaacuacaag

SEQ ID NO: 1169466 - RNA, 19 nt, Artificial Sequence
  Description of Artificial Sequence: Synthetic oligonucleotide
  Sense strand starting at position 2285 of SEQ ID NO: 916601
uguaguuauguacgaugaa

SEQ ID NO: 1169467 - RNA, 19 nt, Artificial Sequence
  Description of Artificial Sequence: Synthetic oligonucleotide
  Antisense strand to SEQ ID NO: 1169466
uucaucguacauaacuaca

SEQ ID NO: 1169468 - RNA, 19 nt, Artificial Sequence
  Description of Artificial Sequence: Synthetic oligonucleotide
  Sense strand starting at position 2288 of SEQ ID NO: 916601
aguuauguacgaugaauaa

SEQ ID NO: 1169469 - RNA, 19 nt, Artificial Sequence
  Description of Artificial Sequence: Synthetic oligonucleotide
  Antisense strand to SEQ ID NO: 1169468
uuauucaucguacauaacu

SEQ ID NO: 1169470 - RNA, 19 nt, Artificial Sequence
  Description of Artificial Sequence: Synthetic oligonucleotide
  Sense strand starting at position 2313 of SEQ ID NO: 916601
agagcuaauguauagcaca

SEQ ID NO: 1169471 - RNA, 19 nt, Artificial Sequence
  Description of Artificial Sequence: Synthetic oligonucleotide
  Antisense strand to SEQ ID NO: 1169470
ugugcuauacauuagcucu

SEQ ID NO: 1169472 - RNA, 19 nt, Artificial Sequence
  Description of Artificial Sequence: Synthetic oligonucleotide
  Sense strand starting at position 2365 of SEQ ID NO: 916601
guaacuaugggaugugaug

SEQ ID NO: 1169473 - RNA, 19 nt, Artificial Sequence
  Description of Artificial Sequence: Synthetic oligonucleotide
  Antisense strand to SEQ ID NO: 1169472
caucacaucccauaguuac

SEQ ID NO: 1169474 - RNA, 19 nt, Artificial Sequence
  Description of Artificial Sequence: Synthetic oligonucleotide
  Sense strand starting at position 2395 of SEQ ID NO: 916601
uuugcuuggagguaguaau

SEQ ID NO: 1169475 - RNA, 19 nt, Artificial Sequence
  Description of Artificial Sequence: Synthetic oligonucleotide
  Antisense strand to SEQ ID NO: 1169474
auuacuaccuccaagcaaa

SEQ ID NO: 1169476 - RNA, 19 nt, Artificial Sequence
  Description of Artificial Sequence: Synthetic oligonucleotide
  Sense strand starting at position 3218 of SEQ ID NO: 916601
uucuguuguuaccuuauaa

SEQ ID NO: 1169477 - RNA, 19 nt, Artificial Sequence
  Description of Artificial Sequence: Synthetic oligonucleotide
  Antisense strand to SEQ ID NO: 1169476
uuauaagguaacaacagaa

SEQ ID NO: 1169478 - RNA, 19 nt, Artificial Sequence
  Description of Artificial Sequence: Synthetic oligonucleotide
  Sense strand starting at position 3399 of SEQ ID NO: 916601
auacuaugguagucuuuga

SEQ ID NO: 1169479 - RNA, 19 nt, Artificial Sequence
  Description of Artificial Sequence: Synthetic oligonucleotide
  Antisense strand to SEQ ID NO: 1169478
ucaaagacuaccauaguau

SEQ ID NO: 1169480 - RNA, 19 nt, Artificial Sequence
  Description of Artificial Sequence: Synthetic oligonucleotide
  Sense strand starting at position 3474 of SEQ ID NO: 916601
uggagaaagauaugcuuau

SEQ ID NO: 1169481 - RNA, 19 nt, Artificial Sequence
  Description of Artificial Sequence: Synthetic oligonucleotide
  Antisense strand to SEQ ID NO: 1169480
auaagcauaucuuucucca

SEQ ID NO: 1169482 - RNA, 19 nt, Artificial Sequence
  Description of Artificial Sequence: Synthetic oligonucleotide
  Sense strand starting at position 3475 of SEQ ID NO: 916601
ggagaaagauaugcuuauu

SEQ ID NO: 1169483 - RNA, 19 nt, Artificial Sequence
  Description of Artificial Sequence: Synthetic oligonucleotide
  Antisense strand to SEQ ID NO: 1169482
aauaagcauaucuuucucc

SEQ ID NO: 1169484 - RNA, 19 nt, Artificial Sequence
  Description of Artificial Sequence: Synthetic oligonucleotide
  Sense strand starting at position 3559 of SEQ ID NO: 916601
uuuauaauugacugaguug

SEQ ID NO: 1169485 - RNA, 19 nt, Artificial Sequence
  Description of Artificial Sequence: Synthetic oligonucleotide
  Antisense strand to SEQ ID NO: 1169484
caacucagucaauuauaaa

SEQ ID NO: 1169486 - RNA, 19 nt, Artificial Sequence
  Description of Artificial Sequence: Synthetic oligonucleotide
  Sense strand starting at position 3562 of SEQ ID NO: 916601
auaauugacugaguuguaa

SEQ ID NO: 1169487 - RNA, 19 nt, Artificial Sequence
  Description of Artificial Sequence: Synthetic oligonucleotide
  Antisense strand to SEQ ID NO: 1169486
uuacaacucagucaauuau

SEQ ID NO: 1169488 - RNA, 19 nt, Artificial Sequence
  Description of Artificial Sequence: Synthetic oligonucleotide
  Sense strand starting at position 3598 of SEQ ID NO: 916601
agagacaugucccugauaa

SEQ ID NO: 1169489 - RNA, 19 nt, Artificial Sequence
  Description of Artificial Sequence: Synthetic oligonucleotide
  Antisense strand to SEQ ID NO: 1169488
uuaucagggacaugucucu

SEQ ID NO: 1169490 - RNA, 19 nt, Artificial Sequence
  Description of Artificial Sequence: Synthetic oligonucleotide
  Sense strand starting at position 3599 of SEQ ID NO: 916601
gagacaugucccugauaau

SEQ ID NO: 1169491 - RNA, 19 nt, Artificial Sequence
  Description of Artificial Sequence: Synthetic oligonucleotide
  Antisense strand to SEQ ID NO: 1169490
auuaucagggacaugucuc

SEQ ID NO: 1169492 - RNA, 19 nt, Artificial Sequence
  Description of Artificial Sequence: Synthetic oligonucleotide
  Sense strand starting at position 3618 of SEQ ID NO: 916601
gguauauagaaguguuuag

SEQ ID NO: 1169493 - RNA, 19 nt, Artificial Sequence
  Description of Artificial Sequence: Synthetic oligonucleotide
  Antisense strand to SEQ ID NO: 1169492
cuaaacacuucuauauacc

SEQ ID NO: 1169494 - RNA, 19 nt, Artificial Sequence
  Description of Artificial Sequence: Synthetic oligonucleotide
  Sense strand starting at position 3622 of SEQ ID NO: 916601
uauagaaguguuuagugga

SEQ ID NO: 1169495 - RNA, 19 nt, Artificial Sequence
  Description of Artificial Sequence: Synthetic oligonucleotide
  Antisense strand to SEQ ID NO: 1169494
uccacuaaacacuucuaua

SEQ ID NO: 1169496 - RNA, 19 nt, Artificial Sequence
  Description of Artificial Sequence: Synthetic oligonucleotide
  Sense strand starting at position 3627 of SEQ ID NO: 916601
aaguguuuaguggacagaa

SEQ ID NO: 1169497 - RNA, 19 nt, Artificial Sequence
  Description of Artificial Sequence: Synthetic oligonucleotide
  Antisense strand to SEQ ID NO: 1169496
uucuguccacuaaacacuu

SEQ ID NO: 1169498 - RNA, 19 nt, Artificial Sequence
  Description of Artificial Sequence: Synthetic oligonucleotide
  Sense strand starting at position 3629 of SEQ ID NO: 916601
guguuuaguggacagaaga

SEQ ID NO: 1169499 - RNA, 19 nt, Artificial Sequence
  Description of Artificial Sequence: Synthetic oligonucleotide
  Antisense strand to SEQ ID NO: 1169498
ucuucuguccacuaaacac

SEQ ID NO: 1169500 - RNA, 19 nt, Artificial Sequence
  Description of Artificial Sequence: Synthetic oligonucleotide
  Sense strand starting at position 3802 of SEQ ID NO: 916601
gguaaauaugaaugguuua

SEQ ID NO: 1169501 - RNA, 19 nt, Artificial Sequence
  Description of Artificial Sequence: Synthetic oligonucleotide
  Antisense strand to SEQ ID NO: 1169500
uaaaccauucauauuuacc

SEQ ID NO: 1169502 - RNA, 19 nt, Artificial Sequence
  Description of Artificial Sequence: Synthetic oligonucleotide
  Sense strand starting at position 3803 of SEQ ID NO: 916601
guaaauaugaaugguuuag

SEQ ID NO: 1169503 - RNA, 19 nt, Artificial Sequence
  Description of Artificial Sequence: Synthetic oligonucleotide
  Antisense strand to SEQ ID NO: 1169502
cuaaaccauucauauuuac

SEQ ID NO: 1169504 - RNA, 19 nt, Artificial Sequence
  Description of Artificial Sequence: Synthetic oligonucleotide
  Sense strand starting at position 3807 of SEQ ID NO: 916601
auaugaaugguuuagugua

SEQ ID NO: 1169505 - RNA, 19 nt, Artificial Sequence
  Description of Artificial Sequence: Synthetic oligonucleotide
  Antisense strand to SEQ ID NO: 1169504
uacacuaaaccauucauau

SEQ ID NO: 1169506 - RNA, 19 nt, Artificial Sequence
  Description of Artificial Sequence: Synthetic oligonucleotide
  Sense strand starting at position 3812 of SEQ ID NO: 916601
aaugguuuaguguaucuua

SEQ ID NO: 1169507 - RNA, 19 nt, Artificial Sequence
  Description of Artificial Sequence: Synthetic oligonucleotide
  Antisense strand to SEQ ID NO: 1169506
uaagauacacuaaaccauu

SEQ ID NO: 1169508 - RNA, 19 nt, Artificial Sequence
  Description of Artificial Sequence: Synthetic oligonucleotide
  Sense strand starting at position 3815 of SEQ ID NO: 916601
gguuuaguguaucuuauuu

SEQ ID NO: 1169509 - RNA, 19 nt, Artificial Sequence
  Description of Artificial Sequence: Synthetic oligonucleotide
  Antisense strand to SEQ ID NO: 1169508
aaauaagauacacuaaacc

SEQ ID NO: 1169510 - RNA, 19 nt, Artificial Sequence
  Description of Artificial Sequence: Synthetic oligonucleotide
  Sense strand starting at position 3964 of SEQ ID NO: 916601
agagcuucucuauaacguu

SEQ ID NO: 1169511 - RNA, 19 nt, Artificial Sequence
  Description of Artificial Sequence: Synthetic oligonucleotide
  Antisense strand to SEQ ID NO: 1169510
aacguuauagagaagcucu

SEQ ID NO: 1169512 - RNA, 19 nt, Artificial Sequence
  Description of Artificial Sequence: Synthetic oligonucleotide
  Sense strand starting at position 3971 of SEQ ID NO: 916601
cucuauaacguuuacaaga

SEQ ID NO: 1169513 - RNA, 19 nt, Artificial Sequence
  Description of Artificial Sequence: Synthetic oligonucleotide
  Antisense strand to SEQ ID NO: 1169512
ucuuguaaacguuauagag

SEQ ID NO: 1169514 - RNA, 19 nt, Artificial Sequence
  Description of Artificial Sequence: Synthetic oligonucleotide
  Sense strand starting at position 36 of SEQ ID NO: 916602
ggaaauuauucuuaaugac

SEQ ID NO: 1169515 - RNA, 19 nt, Artificial Sequence
  Description of Artificial Sequence: Synthetic oligonucleotide
  Antisense strand to SEQ ID NO: 1169514
gucauuaagaauaauuucc

SEQ ID NO: 1169516 - RNA, 19 nt, Artificial Sequence
  Description of Artificial Sequence: Synthetic oligonucleotide
  Sense strand starting at position 50 of SEQ ID NO: 916602
augacacaguuuguuauau

SEQ ID NO: 1169517 - RNA, 19 nt, Artificial Sequence
  Description of Artificial Sequence: Synthetic oligonucleotide
  Antisense strand to SEQ ID NO: 1169516
auauaacaaacugugucau

SEQ ID NO: 1169518 - RNA, 19 nt, Artificial Sequence
  Description of Artificial Sequence: Synthetic oligonucleotide
  Sense strand starting at position 51 of SEQ ID NO: 916602
ugacacaguuuguuauauu

SEQ ID NO: 1169519 - RNA, 19 nt, Artificial Sequence
  Description of Artificial Sequence: Synthetic oligonucleotide
  Antisense strand to SEQ ID NO: 1169518
aauauaacaaacuguguca

SEQ ID NO: 1169520 - RNA, 19 nt, Artificial Sequence
  Description of Artificial Sequence: Synthetic oligonucleotide
  Sense strand starting at position 148 of SEQ ID NO: 916602
auaauuugcugucauaaug

SEQ ID NO: 1169521 - RNA, 19 nt, Artificial Sequence
  Description of Artificial Sequence: Synthetic oligonucleotide
  Antisense strand to SEQ ID NO: 1169520
cauuaugacagcaaauuau

SEQ ID NO: 1169522 - RNA, 19 nt, Artificial Sequence
  Description of Artificial Sequence: Synthetic oligonucleotide
  Sense strand starting at position 687 of SEQ ID NO: 916602
ucaccuaugugaguuaaca

SEQ ID NO: 1169523 - RNA, 19 nt, Artificial Sequence
  Description of Artificial Sequence: Synthetic oligonucleotide
  Antisense strand to SEQ ID NO: 1169522
uguuaacucacauagguga

SEQ ID NO: 1169524 - RNA, 19 nt, Artificial Sequence
  Description of Artificial Sequence: Synthetic oligonucleotide
  Sense strand starting at position 730 of SEQ ID NO: 916602
uugaaauaaguuuggcagu

SEQ ID NO: 1169525 - RNA, 19 nt, Artificial Sequence
  Description of Artificial Sequence: Synthetic oligonucleotide
  Antisense strand to SEQ ID NO: 1169524
acugccaaacuuauuucaa

SEQ ID NO: 1169526 - RNA, 19 nt, Artificial Sequence
  Description of Artificial Sequence: Synthetic oligonucleotide
  Sense strand starting at position 732 of SEQ ID NO: 916602
gaaauaaguuuggcaguga

SEQ ID NO: 1169527 - RNA, 19 nt, Artificial Sequence
  Description of Artificial Sequence: Synthetic oligonucleotide
  Antisense strand to SEQ ID NO: 1169526
ucacugccaaacuuauuuc

SEQ ID NO: 1169528 - RNA, 19 nt, Artificial Sequence
  Description of Artificial Sequence: Synthetic oligonucleotide
  Sense strand starting at position 736 of SEQ ID NO: 916602
uaaguuuggcagugauaaa

SEQ ID NO: 1169529 - RNA, 19 nt, Artificial Sequence
  Description of Artificial Sequence: Synthetic oligonucleotide
  Antisense strand to SEQ ID NO: 1169528
uuuaucacugccaaacuua

SEQ ID NO: 1169530 - RNA, 19 nt, Artificial Sequence
  Description of Artificial Sequence: Synthetic oligonucleotide
  Sense strand starting at position 938 of SEQ ID NO: 916602
aguagaaacaguuguguuc

SEQ ID NO: 1169531 - RNA, 19 nt, Artificial Sequence
  Description of Artificial Sequence: Synthetic oligonucleotide
  Antisense strand to SEQ ID NO: 1169530
gaacacaacuguuucuacu

SEQ ID NO: 1169532 - RNA, 19 nt, Artificial Sequence
  Description of Artificial Sequence: Synthetic oligonucleotide
  Sense strand starting at position 945 of SEQ ID NO: 916602
acaguuguguuccugagaa

SEQ ID NO: 1169533 - RNA, 19 nt, Artificial Sequence
  Description of Artificial Sequence: Synthetic oligonucleotide
  Antisense strand to SEQ ID NO: 1169532
uucucaggaacacaacugu

SEQ ID NO: 1169534 - RNA, 19 nt, Artificial Sequence
  Description of Artificial Sequence: Synthetic oligonucleotide
  Sense strand starting at position 947 of SEQ ID NO: 916602
aguuguguuccugagaaga

SEQ ID NO: 1169535 - RNA, 19 nt, Artificial Sequence
  Description of Artificial Sequence: Synthetic oligonucleotide
  Antisense strand to SEQ ID NO: 1169534
ucuucucaggaacacaacu

SEQ ID NO: 1169536 - RNA, 19 nt, Artificial Sequence
  Description of Artificial Sequence: Synthetic oligonucleotide
  Sense strand starting at position 996 of SEQ ID NO: 916602
agcugaaaucuuuauuggu

SEQ ID NO: 1169537 - RNA, 19 nt, Artificial Sequence
  Description of Artificial Sequence: Synthetic oligonucleotide
  Antisense strand to SEQ ID NO: 1169536
accaauaaagauuucagcu

SEQ ID NO: 1169538 - RNA, 19 nt, Artificial Sequence
  Description of Artificial Sequence: Synthetic oligonucleotide
  Sense strand starting at position 998 of SEQ ID NO: 916602
cugaaaucuuuauugguuc

SEQ ID NO: 1169539 - RNA, 19 nt, Artificial Sequence
  Description of Artificial Sequence: Synthetic oligonucleotide
  Antisense strand to SEQ ID NO: 1169538
gaaccaauaaagauuucag

SEQ ID NO: 1169540 - RNA, 19 nt, Artificial Sequence
  Description of Artificial Sequence: Synthetic oligonucleotide
  Sense strand starting at position 2113 of SEQ ID NO: 916602
auugaauugugacaagaag

SEQ ID NO: 1169541 - RNA, 19 nt, Artificial Sequence
  Description of Artificial Sequence: Synthetic oligonucleotide
  Antisense strand to SEQ ID NO: 1169540
cuucuugucacaauucaau

SEQ ID NO: 1169542 - RNA, 19 nt, Artificial Sequence
  Description of Artificial Sequence: Synthetic oligonucleotide
  Sense strand starting at position 2240 of SEQ ID NO: 916602
uguuuacucugucuccaua

SEQ ID NO: 1169543 - RNA, 19 nt, Artificial Sequence
  Description of Artificial Sequence: Synthetic oligonucleotide
  Antisense strand to SEQ ID NO: 1169542
uauggagacagaguaaaca

SEQ ID NO: 1169544 - RNA, 19 nt, Artificial Sequence
  Description of Artificial Sequence: Synthetic oligonucleotide
  Sense strand starting at position 2243 of SEQ ID NO: 916602
uuacucugucuccauaguu

SEQ ID NO: 1169545 - RNA, 19 nt, Artificial Sequence
  Description of Artificial Sequence: Synthetic oligonucleotide
  Antisense strand to SEQ ID NO: 1169544
aacuauggagacagaguaa

SEQ ID NO: 1169546 - RNA, 19 nt, Artificial Sequence
  Description of Artificial Sequence: Synthetic oligonucleotide
  Sense strand starting at position 2248 of SEQ ID NO: 916602
cugucuccauaguuuacau

SEQ ID NO: 1169547 - RNA, 19 nt, Artificial Sequence
  Description of Artificial Sequence: Synthetic oligonucleotide
  Antisense strand to SEQ ID NO: 1169546
auguaaacuauggagacag

SEQ ID NO: 1169548 - RNA, 19 nt, Artificial Sequence
  Description of Artificial Sequence: Synthetic oligonucleotide
  Sense strand starting at position 2341 of SEQ ID NO: 916602
uuaugcuuugcuuacugua

SEQ ID NO: 1169549 - RNA, 19 nt, Artificial Sequence
  Description of Artificial Sequence: Synthetic oligonucleotide
  Antisense strand to SEQ ID NO: 1169548
uacaguaagcaaagcauaa

SEQ ID NO: 1169550 - RNA, 19 nt, Artificial Sequence
  Description of Artificial Sequence: Synthetic oligonucleotide
  Sense strand starting at position 2389 of SEQ ID NO: 916602
ugauguaaaucagugauca

SEQ ID NO: 1169551 - RNA, 19 nt, Artificial Sequence
  Description of Artificial Sequence: Synthetic oligonucleotide
  Antisense strand to SEQ ID NO: 1169550
ugaucacugauuuacauca

SEQ ID NO: 1169552 - RNA, 19 nt, Artificial Sequence
  Description of Artificial Sequence: Synthetic oligonucleotide
  Sense strand starting at position 2390 of SEQ ID NO: 916602
gauguaaaucagugaucaa

SEQ ID NO: 1169553 - RNA, 19 nt, Artificial Sequence
  Description of Artificial Sequence: Synthetic oligonucleotide
  Antisense strand to SEQ ID NO: 1169552
uugaucacugauuuacauc

SEQ ID NO: 1169554 - RNA, 19 nt, Artificial Sequence
  Description of Artificial Sequence: Synthetic oligonucleotide
  Sense strand starting at position 2516 of SEQ ID NO: 916602
guggguaagucauucuaau

SEQ ID NO: 1169555 - RNA, 19 nt, Artificial Sequence
  Description of Artificial Sequence: Synthetic oligonucleotide
  Antisense strand to SEQ ID NO: 1169554
auuagaaugacuuacccac

SEQ ID NO: 1169556 - RNA, 19 nt, Artificial Sequence
  Description of Artificial Sequence: Synthetic oligonucleotide
  Sense strand starting at position 2836 of SEQ ID NO: 916602
ucacauauguugucuagua

SEQ ID NO: 1169557 - RNA, 19 nt, Artificial Sequence
  Description of Artificial Sequence: Synthetic oligonucleotide
  Antisense strand to SEQ ID NO: 1169556
uacuagacaacauauguga

SEQ ID NO: 1169558 - RNA, 19 nt, Artificial Sequence
  Description of Artificial Sequence: Synthetic oligonucleotide
  Sense strand starting at position 2838 of SEQ ID NO: 916602
acauauguugucuaguaac

SEQ ID NO: 1169559 - RNA, 19 nt, Artificial Sequence
  Description of Artificial Sequence: Synthetic oligonucleotide
  Antisense strand to SEQ ID NO: 1169558
guuacuagacaacauaugu

SEQ ID NO: 1169560 - RNA, 19 nt, Artificial Sequence
  Description of Artificial Sequence: Synthetic oligonucleotide
  Sense strand starting at position 2889 of SEQ ID NO: 916602
agcucuuucuaaguguaaa

SEQ ID NO: 1169561 - RNA, 19 nt, Artificial Sequence
  Description of Artificial Sequence: Synthetic oligonucleotide
  Antisense strand to SEQ ID NO: 1169560
uuuacacuuagaaagagcu

SEQ ID NO: 1169562 - RNA, 19 nt, Artificial Sequence
  Description of Artificial Sequence: Synthetic oligonucleotide
  Sense strand starting at position 3052 of SEQ ID NO: 916602
ugagauuaaucagugcuac

SEQ ID NO: 1169563 - RNA, 19 nt, Artificial Sequence
  Description of Artificial Sequence: Synthetic oligonucleotide
  Antisense strand to SEQ ID NO: 1169562
guagcacugauuaaucuca

SEQ ID NO: 1169564 - RNA, 19 nt, Artificial Sequence
  Description of Artificial Sequence: Synthetic oligonucleotide
  Sense strand starting at position 3053 of SEQ ID NO: 916602
gagauuaaucagugcuaca

SEQ ID NO: 1169565 - RNA, 19 nt, Artificial Sequence
  Description of Artificial Sequence: Synthetic oligonucleotide
  Antisense strand to SEQ ID NO: 1169564
uguagcacugauuaaucuc

SEQ ID NO: 1169566 - RNA, 19 nt, Artificial Sequence
  Description of Artificial Sequence: Synthetic oligonucleotide
  Sense strand starting at position 3305 of SEQ ID NO: 916602
gugaaauagucuccucaug

SEQ ID NO: 1169567 - RNA, 19 nt, Artificial Sequence
  Description of Artificial Sequence: Synthetic oligonucleotide
  Antisense strand to SEQ ID NO: 1169566
caugaggagacuauuucac

SEQ ID NO: 1169568 - RNA, 19 nt, Artificial Sequence
  Description of Artificial Sequence: Synthetic oligonucleotide
  Sense strand starting at position 3441 of SEQ ID NO: 916602
acgauaggcuauucugaua

SEQ ID NO: 1169569 - RNA, 19 nt, Artificial Sequence
  Description of Artificial Sequence: Synthetic oligonucleotide
  Antisense strand to SEQ ID NO: 1169568
uaucagaauagccuaucgu

SEQ ID NO: 1169570 - RNA, 19 nt, Artificial Sequence
  Description of Artificial Sequence: Synthetic oligonucleotide
  Sense strand starting at position 3540 of SEQ ID NO: 916602
ucagaaauaugcuuuaagg

SEQ ID NO: 1169571 - RNA, 19 nt, Artificial Sequence
  Description of Artificial Sequence: Synthetic oligonucleotide
  Antisense strand to SEQ ID NO: 1169570
ccuuaaagcauauuucuga

SEQ ID NO: 1169572 - RNA, 19 nt, Artificial Sequence
  Description of Artificial Sequence: Synthetic oligonucleotide
  Sense strand starting at position 3621 of SEQ ID NO: 916602
guuugacuccagcaaucau

SEQ ID NO: 1169573 - RNA, 19 nt, Artificial Sequence
  Description of Artificial Sequence: Synthetic oligonucleotide
  Antisense strand to SEQ ID NO: 1169572
augauugcuggagucaaac

SEQ ID NO: 1169574 - RNA, 19 nt, Artificial Sequence
  Description of Artificial Sequence: Synthetic oligonucleotide
  Sense strand starting at position 3698 of SEQ ID NO: 916602
gcaggauguuagccaggua

SEQ ID NO: 1169575 - RNA, 19 nt, Artificial Sequence
  Description of Artificial Sequence: Synthetic oligonucleotide
  Antisense strand to SEQ ID NO: 1169574
uaccuggcuaacauccugc

SEQ ID NO: 1169576 - RNA, 19 nt, Artificial Sequence
  Description of Artificial Sequence: Synthetic oligonucleotide
  Sense strand starting at position 3699 of SEQ ID NO: 916602
caggauguuagccagguau

SEQ ID NO: 1169577 - RNA, 19 nt, Artificial Sequence
  Description of Artificial Sequence: Synthetic oligonucleotide
  Antisense strand to SEQ ID NO: 1169576
auaccuggcuaacauccug

SEQ ID NO: 1169578 - RNA, 19 nt, Artificial Sequence
  Description of Artificial Sequence: Synthetic oligonucleotide
  Sense strand starting at position 3770 of SEQ ID NO: 916602
ugucauguaucauccuuaa

SEQ ID NO: 1169579 - RNA, 19 nt, Artificial Sequence
  Description of Artificial Sequence: Synthetic oligonucleotide
  Antisense strand to SEQ ID NO: 1169578
uuaaggaugauacaugaca

SEQ ID NO: 1169580 - RNA, 19 nt, Artificial Sequence
  Description of Artificial Sequence: Synthetic oligonucleotide
  Sense strand starting at position 3829 of SEQ ID NO: 916602
aagccacgggucuaugaaa

SEQ ID NO: 1169581 - RNA, 19 nt, Artificial Sequence
  Description of Artificial Sequence: Synthetic oligonucleotide
  Antisense strand to SEQ ID NO: 1169580
uuucauagacccguggcuu

SEQ ID NO: 1169582 - RNA, 19 nt, Artificial Sequence
  Description of Artificial Sequence: Synthetic oligonucleotide
  Sense strand starting at position 3858 of SEQ ID NO: 916602
cugguauuauaaucuuuga

SEQ ID NO: 1169583 - RNA, 19 nt, Artificial Sequence
  Description of Artificial Sequence: Synthetic oligonucleotide
  Antisense strand to SEQ ID NO: 1169582
ucaaagauuauaauaccag

SEQ ID NO: 1169584 - RNA, 19 nt, Artificial Sequence
  Description of Artificial Sequence: Synthetic oligonucleotide
  Sense strand starting at position 3882 of SEQ ID NO: 916602
uguugaaaucacugaagac

SEQ ID NO: 1169585 - RNA, 19 nt, Artificial Sequence
  Description of Artificial Sequence: Synthetic oligonucleotide
  Antisense strand to SEQ ID NO: 1169584
gucuucagugauuucaaca

SEQ ID NO: 1169586 - RNA, 19 nt, Artificial Sequence
  Description of Artificial Sequence: Synthetic oligonucleotide
  Sense strand starting at position 3905 of SEQ ID NO: 916602
auacacuaucacuggugaa

SEQ ID NO: 1169587 - RNA, 19 nt, Artificial Sequence
  Description of Artificial Sequence: Synthetic oligonucleotide
  Antisense strand to SEQ ID NO: 1169586
uucaccagugauaguguau

SEQ ID NO: 1169588 - RNA, 19 nt, Artificial Sequence
  Description of Artificial Sequence: Synthetic oligonucleotide
  Sense strand starting at position 3926 of SEQ ID NO: 916602
uuauauagggaguguaacu

SEQ ID NO: 1169589 - RNA, 19 nt, Artificial Sequence
  Description of Artificial Sequence: Synthetic oligonucleotide
  Antisense strand to SEQ ID NO: 1169588
aguuacacucccuauauaa

SEQ ID NO: 1169590 - RNA, 19 nt, Artificial Sequence
  Description of Artificial Sequence: Synthetic oligonucleotide
  Sense strand starting at position 3954 of SEQ ID NO: 916602
aauugagcugacuaguauu

SEQ ID NO: 1169591 - RNA, 19 nt, Artificial Sequence
  Description of Artificial Sequence: Synthetic oligonucleotide
  Antisense strand to SEQ ID NO: 1169590
aauacuagucagcucaauu

SEQ ID NO: 1169592 - RNA, 19 nt, Artificial Sequence
  Description of Artificial Sequence: Synthetic oligonucleotide
  Sense strand starting at position 3957 of SEQ ID NO: 916602
ugagcugacuaguauuuau

SEQ ID NO: 1169593 - RNA, 19 nt, Artificial Sequence
  Description of Artificial Sequence: Synthetic oligonucleotide
  Antisense strand to SEQ ID NO: 1169592
auaaauacuagucagcuca

SEQ ID NO: 1169594 - RNA, 19 nt, Artificial Sequence
  Description of Artificial Sequence: Synthetic oligonucleotide
  Sense strand starting at position 103 of SEQ ID NO: 916603
cugauaagaucagcuaauu

SEQ ID NO: 1169595 - RNA, 19 nt, Artificial Sequence
  Description of Artificial Sequence: Synthetic oligonucleotide
  Antisense strand to SEQ ID NO: 1169594
aauuagcugaucuuaucag

SEQ ID NO: 1169596 - RNA, 19 nt, Artificial Sequence
  Description of Artificial Sequence: Synthetic oligonucleotide
  Sense strand starting at position 137 of SEQ ID NO: 916603
cccguauacagugaaugaa

SEQ ID NO: 1169597 - RNA, 19 nt, Artificial Sequence
  Description of Artificial Sequence: Synthetic oligonucleotide
  Antisense strand to SEQ ID NO: 1169596
uucauucacuguauacggg

SEQ ID NO: 1169598 - RNA, 19 nt, Artificial Sequence
  Description of Artificial Sequence: Synthetic oligonucleotide
  Sense strand starting at position 158 of SEQ ID NO: 916603
ccaugugaggaaugaaguu

SEQ ID NO: 1169599 - RNA, 19 nt, Artificial Sequence
  Description of Artificial Sequence: Synthetic oligonucleotide
  Antisense strand to SEQ ID NO: 1169598
aacuucauuccucacaugg

SEQ ID NO: 1169600 - RNA, 19 nt, Artificial Sequence
  Description of Artificial Sequence: Synthetic oligonucleotide
  Sense strand starting at position 242 of SEQ ID NO: 916603
agugaaguucuugggaauu

SEQ ID NO: 1169601 - RNA, 19 nt, Artificial Sequence
  Description of Artificial Sequence: Synthetic oligonucleotide
  Antisense strand to SEQ ID NO: 1169600
aauucccaagaacuucacu

SEQ ID NO: 1169602 - RNA, 19 nt, Artificial Sequence
  Description of Artificial Sequence: Synthetic oligonucleotide
  Sense strand starting at position 475 of SEQ ID NO: 916603
auagauuugcgacgcuaau

SEQ ID NO: 1169603 - RNA, 19 nt, Artificial Sequence
  Description of Artificial Sequence: Synthetic oligonucleotide
  Antisense strand to SEQ ID NO: 1169602
auuagcgucgcaaaucuau

SEQ ID NO: 1169604 - RNA, 19 nt, Artificial Sequence
  Description of Artificial Sequence: Synthetic oligonucleotide
  Sense strand starting at position 506 of SEQ ID NO: 916603
ugcaaagcccaagaugaau

SEQ ID NO: 1169605 - RNA, 19 nt, Artificial Sequence
  Description of Artificial Sequence: Synthetic oligonucleotide
  Antisense strand to SEQ ID NO: 1169604
auucaucuugggcuuugca

SEQ ID NO: 1169606 - RNA, 19 nt, Artificial Sequence
  Description of Artificial Sequence: Synthetic oligonucleotide
  Sense strand starting at position 593 of SEQ ID NO: 916603
uugcuuugucacuaagagg

SEQ ID NO: 1169607 - RNA, 19 nt, Artificial Sequence
  Description of Artificial Sequence: Synthetic oligonucleotide
  Antisense strand to SEQ ID NO: 1169606
ccucuuagugacaaagcaa

SEQ ID NO: 1169608 - RNA, 19 nt, Artificial Sequence
  Description of Artificial Sequence: Synthetic oligonucleotide
  Sense strand starting at position 598 of SEQ ID NO: 916603
uugucacuaagagggauua

SEQ ID NO: 1169609 - RNA, 19 nt, Artificial Sequence
  Description of Artificial Sequence: Synthetic oligonucleotide
  Antisense strand to SEQ ID NO: 1169608
uaaucccucuuagugacaa

SEQ ID NO: 1169610 - RNA, 19 nt, Artificial Sequence
  Description of Artificial Sequence: Synthetic oligonucleotide
  Sense strand starting at position 634 of SEQ ID NO: 916603
uguaauaacuuuguaccau

SEQ ID NO: 1169611 - RNA, 19 nt, Artificial Sequence
  Description of Artificial Sequence: Synthetic oligonucleotide
  Antisense strand to SEQ ID NO: 1169610
augguacaaaguuauuaca

SEQ ID NO: 1169612 - RNA, 19 nt, Artificial Sequence
  Description of Artificial Sequence: Synthetic oligonucleotide
  Sense strand starting at position 673 of SEQ ID NO: 916603
uacagcuugcaguaucaga

SEQ ID NO: 1169613 - RNA, 19 nt, Artificial Sequence
  Description of Artificial Sequence: Synthetic oligonucleotide
  Antisense strand to SEQ ID NO: 1169612
ucugauacugcaagcugua

SEQ ID NO: 1169614 - RNA, 19 nt, Artificial Sequence
  Description of Artificial Sequence: Synthetic oligonucleotide
  Sense strand starting at position 720 of SEQ ID NO: 916603
cuauaaacuuauccagugu

SEQ ID NO: 1169615 - RNA, 19 nt, Artificial Sequence
  Description of Artificial Sequence: Synthetic oligonucleotide
  Antisense strand to SEQ ID NO: 1169614
acacuggauaaguuuauag

SEQ ID NO: 1169616 - RNA, 19 nt, Artificial Sequence
  Description of Artificial Sequence: Synthetic oligonucleotide
  Sense strand starting at position 2195 of SEQ ID NO: 916603
guguaauuaauaugaagag

SEQ ID NO: 1169617 - RNA, 19 nt, Artificial Sequence
  Description of Artificial Sequence: Synthetic oligonucleotide
  Antisense strand to SEQ ID NO: 1169616
cucuucauauuaauuacac

SEQ ID NO: 1169618 - RNA, 19 nt, Artificial Sequence
  Description of Artificial Sequence: Synthetic oligonucleotide
  Sense strand starting at position 2613 of SEQ ID NO: 916603
gcauaugauugaccuagga

SEQ ID NO: 1169619 - RNA, 19 nt, Artificial Sequence
  Description of Artificial Sequence: Synthetic oligonucleotide
  Antisense strand to SEQ ID NO: 1169618
uccuaggucaaucauaugc

SEQ ID NO: 1169620 - RNA, 19 nt, Artificial Sequence
  Description of Artificial Sequence: Synthetic oligonucleotide
  Sense strand starting at position 2661 of SEQ ID NO: 916603
caugaagaauguguucgaa

SEQ ID NO: 1169621 - RNA, 19 nt, Artificial Sequence
  Description of Artificial Sequence: Synthetic oligonucleotide
  Antisense strand to SEQ ID NO: 1169620
uucgaacacauucuucaug

SEQ ID NO: 1169622 - RNA, 19 nt, Artificial Sequence
  Description of Artificial Sequence: Synthetic oligonucleotide
  Sense strand starting at position 2663 of SEQ ID NO: 916603
ugaagaauguguucgaaca

SEQ ID NO: 1169623 - RNA, 19 nt, Artificial Sequence
  Description of Artificial Sequence: Synthetic oligonucleotide
  Antisense strand to SEQ ID NO: 1169622
uguucgaacacauucuuca

SEQ ID NO: 1169624 - RNA, 19 nt, Artificial Sequence
  Description of Artificial Sequence: Synthetic oligonucleotide
  Sense strand starting at position 2664 of SEQ ID NO: 916603
gaagaauguguucgaacac

SEQ ID NO: 1169625 - RNA, 19 nt, Artificial Sequence
  Description of Artificial Sequence: Synthetic oligonucleotide
  Antisense strand to SEQ ID NO: 1169624
guguucgaacacauucuuc

SEQ ID NO: 1169626 - RNA, 19 nt, Artificial Sequence
  Description of Artificial Sequence: Synthetic oligonucleotide
  Sense strand starting at position 2717 of SEQ ID NO: 916603
aaacauggguaguucugaa

SEQ ID NO: 1169627 - RNA, 19 nt, Artificial Sequence
  Description of Artificial Sequence: Synthetic oligonucleotide
  Antisense strand to SEQ ID NO: 1169626
uucagaacuacccauguuu

SEQ ID NO: 1169628 - RNA, 19 nt, Artificial Sequence
  Description of Artificial Sequence: Synthetic oligonucleotide
  Sense strand starting at position 2735 of SEQ ID NO: 916603
aaagcugaugcuuagagua

SEQ ID NO: 1169629 - RNA, 19 nt, Artificial Sequence
  Description of Artificial Sequence: Synthetic oligonucleotide
  Antisense strand to SEQ ID NO: 1169628
uacucuaagcaucagcuuu

SEQ ID NO: 1169630 - RNA, 19 nt, Artificial Sequence
  Description of Artificial Sequence: Synthetic oligonucleotide
  Sense strand starting at position 2740 of SEQ ID NO: 916603
ugaugcuuagaguauaauu

SEQ ID NO: 1169631 - RNA, 19 nt, Artificial Sequence
  Description of Artificial Sequence: Synthetic oligonucleotide
  Antisense strand to SEQ ID NO: 1169630
aauuauacucuaagcauca

SEQ ID NO: 1169632 - RNA, 19 nt, Artificial Sequence
  Description of Artificial Sequence: Synthetic oligonucleotide
  Sense strand starting at position 2742 of SEQ ID NO: 916603
augcuuagaguauaauuga

SEQ ID NO: 1169633 - RNA, 19 nt, Artificial Sequence
  Description of Artificial Sequence: Synthetic oligonucleotide
  Antisense strand to SEQ ID NO: 1169632
ucaauuauacucuaagcau

SEQ ID NO: 1169634 - RNA, 19 nt, Artificial Sequence
  Description of Artificial Sequence: Synthetic oligonucleotide
  Sense strand starting at position 2808 of SEQ ID NO: 916603
acauuccagcuguacuauu

SEQ ID NO: 1169635 - RNA, 19 nt, Artificial Sequence
  Description of Artificial Sequence: Synthetic oligonucleotide
  Antisense strand to SEQ ID NO: 1169634
aauaguacagcuggaaugu

SEQ ID NO: 1169636 - RNA, 19 nt, Artificial Sequence
  Description of Artificial Sequence: Synthetic oligonucleotide
  Sense strand starting at position 3085 of SEQ ID NO: 916603
gcuaaugcugcuguuguua

SEQ ID NO: 1169637 - RNA, 19 nt, Artificial Sequence
  Description of Artificial Sequence: Synthetic oligonucleotide
  Antisense strand to SEQ ID NO: 1169636
uaacaacagcagcauuagc

SEQ ID NO: 1169638 - RNA, 19 nt, Artificial Sequence
  Description of Artificial Sequence: Synthetic oligonucleotide
  Sense strand starting at position 3348 of SEQ ID NO: 916603
agagaaguugguugggacu

SEQ ID NO: 1169639 - RNA, 19 nt, Artificial Sequence
  Description of Artificial Sequence: Synthetic oligonucleotide
  Antisense strand to SEQ ID NO: 1169638
agucccaaccaacuucucu

SEQ ID NO: 1169640 - RNA, 19 nt, Artificial Sequence
  Description of Artificial Sequence: Synthetic oligonucleotide
  Sense strand starting at position 3390 of SEQ ID NO: 916603
ucgauauaauuacuaggga

SEQ ID NO: 1169641 - RNA, 19 nt, Artificial Sequence
  Description of Artificial Sequence: Synthetic oligonucleotide
  Antisense strand to SEQ ID NO: 1169640
ucccuaguaauuauaucga

SEQ ID NO: 1169642 - RNA, 19 nt, Artificial Sequence
  Description of Artificial Sequence: Synthetic oligonucleotide
  Sense strand starting at position 3407 of SEQ ID NO: 916603
gaagauguguaucccagga

SEQ ID NO: 1169643 - RNA, 19 nt, Artificial Sequence
  Description of Artificial Sequence: Synthetic oligonucleotide
  Antisense strand to SEQ ID NO: 1169642
uccugggauacacaucuuc

SEQ ID NO: 1169644 - RNA, 19 nt, Artificial Sequence
  Description of Artificial Sequence: Synthetic oligonucleotide
  Sense strand starting at position 3420 of SEQ ID NO: 916603
ccaggaaugccuggaaucu

SEQ ID NO: 1169645 - RNA, 19 nt, Artificial Sequence
  Description of Artificial Sequence: Synthetic oligonucleotide
  Antisense strand to SEQ ID NO: 1169644
agauuccaggcauuccugg

SEQ ID NO: 1169646 - RNA, 19 nt, Artificial Sequence
  Description of Artificial Sequence: Synthetic oligonucleotide
  Sense strand starting at position 3485 of SEQ ID NO: 916603
ggaauacaugaguggguau

SEQ ID NO: 1169647 - RNA, 19 nt, Artificial Sequence
  Description of Artificial Sequence: Synthetic oligonucleotide
  Antisense strand to SEQ ID NO: 1169646
auacccacucauguauucc

SEQ ID NO: 1169648 - RNA, 19 nt, Artificial Sequence
  Description of Artificial Sequence: Synthetic oligonucleotide
  Sense strand starting at position 3486 of SEQ ID NO: 916603
gaauacaugaguggguaua

SEQ ID NO: 1169649 - RNA, 19 nt, Artificial Sequence
  Description of Artificial Sequence: Synthetic oligonucleotide
  Antisense strand to SEQ ID NO: 1169648
uauacccacucauguauuc

SEQ ID NO: 1169650 - RNA, 19 nt, Artificial Sequence
  Description of Artificial Sequence: Synthetic oligonucleotide
  Sense strand starting at position 3487 of SEQ ID NO: 916603
aauacaugaguggguauau

SEQ ID NO: 1169651 - RNA, 19 nt, Artificial Sequence
  Description of Artificial Sequence: Synthetic oligonucleotide
  Antisense strand to SEQ ID NO: 1169650
auauacccacucauguauu

SEQ ID NO: 1169652 - RNA, 19 nt, Artificial Sequence
  Description of Artificial Sequence: Synthetic oligonucleotide
  Sense strand starting at position 3488 of SEQ ID NO: 916603
auacaugaguggguauaua

SEQ ID NO: 1169653 - RNA, 19 nt, Artificial Sequence
  Description of Artificial Sequence: Synthetic oligonucleotide
  Antisense strand to SEQ ID NO: 1169652
uauauacccacucauguau

SEQ ID NO: 1169654 - RNA, 19 nt, Artificial Sequence
  Description of Artificial Sequence: Synthetic oligonucleotide
  Sense strand starting at position 3592 of SEQ ID NO: 916603
cuuguaggacugcaaaguu

SEQ ID NO: 1169655 - RNA, 19 nt, Artificial Sequence
  Description of Artificial Sequence: Synthetic oligonucleotide
  Antisense strand to SEQ ID NO: 1169654
aacuuugcaguccuacaag

SEQ ID NO: 1169656 - RNA, 19 nt, Artificial Sequence
  Description of Artificial Sequence: Synthetic oligonucleotide
  Sense strand starting at position 3605 of SEQ ID NO: 916603
aaaguuggacucugagcau

SEQ ID NO: 1169657 - RNA, 19 nt, Artificial Sequence
  Description of Artificial Sequence: Synthetic oligonucleotide
  Antisense strand to SEQ ID NO: 1169656
augcucagaguccaacuuu

SEQ ID NO: 1169658 - RNA, 19 nt, Artificial Sequence
  Description of Artificial Sequence: Synthetic oligonucleotide
  Sense strand starting at position 3649 of SEQ ID NO: 916603
gcugguaaucccuaccuua

SEQ ID NO: 1169659 - RNA, 19 nt, Artificial Sequence
  Description of Artificial Sequence: Synthetic oligonucleotide
  Antisense strand to SEQ ID NO: 1169658
uaagguagggauuaccagc

SEQ ID NO: 1169660 - RNA, 19 nt, Artificial Sequence
  Description of Artificial Sequence: Synthetic oligonucleotide
  Sense strand starting at position 3750 of SEQ ID NO: 916603
ccucauggcccucaaguau

SEQ ID NO: 1169661 - RNA, 19 nt, Artificial Sequence
  Description of Artificial Sequence: Synthetic oligonucleotide
  Antisense strand to SEQ ID NO: 1169660
auacuugagggccaugagg

SEQ ID NO: 1169662 - RNA, 19 nt, Artificial Sequence
  Description of Artificial Sequence: Synthetic oligonucleotide
  Sense strand starting at position 3756 of SEQ ID NO: 916603
ggcccucaaguauguauuu

SEQ ID NO: 1169663 - RNA, 19 nt, Artificial Sequence
  Description of Artificial Sequence: Synthetic oligonucleotide
  Antisense strand to SEQ ID NO: 1169662
aaauacauacuugagggcc

SEQ ID NO: 1169664 - RNA, 19 nt, Artificial Sequence
  Description of Artificial Sequence: Synthetic oligonucleotide
  Sense strand starting at position 3802 of SEQ ID NO: 916603
agugcucuauuuccuugaa

SEQ ID NO: 1169665 - RNA, 19 nt, Artificial Sequence
  Description of Artificial Sequence: Synthetic oligonucleotide
  Antisense strand to SEQ ID NO: 1169664
uucaaggaaauagagcacu

SEQ ID NO: 1169666 - RNA, 19 nt, Artificial Sequence
  Description of Artificial Sequence: Synthetic oligonucleotide
  Sense strand starting at position 3812 of SEQ ID NO: 916603
uuccuugaacagugaaugu

SEQ ID NO: 1169667 - RNA, 19 nt, Artificial Sequence
  Description of Artificial Sequence: Synthetic oligonucleotide
  Antisense strand to SEQ ID NO: 1169666
acauucacuguucaaggaa

SEQ ID NO: 1169668 - RNA, 19 nt, Artificial Sequence
  Description of Artificial Sequence: Synthetic oligonucleotide
  Sense strand starting at position 3822 of SEQ ID NO: 916603
agugaauguuuacucauaa

SEQ ID NO: 1169669 - RNA, 19 nt, Artificial Sequence
  Description of Artificial Sequence: Synthetic oligonucleotide
  Antisense strand to SEQ ID NO: 1169668
uuaugaguaaacauucacu

SEQ ID NO: 1169670 - RNA, 19 nt, Artificial Sequence
  Description of Artificial Sequence: Synthetic oligonucleotide
  Sense strand starting at position 3823 of SEQ ID NO: 916603
gugaauguuuacucauaac

SEQ ID NO: 1169671 - RNA, 19 nt, Artificial Sequence
  Description of Artificial Sequence: Synthetic oligonucleotide
  Antisense strand to SEQ ID NO: 1169670
guuaugaguaaacauucac

SEQ ID NO: 1169672 - RNA, 19 nt, Artificial Sequence
  Description of Artificial Sequence: Synthetic oligonucleotide
  Sense strand starting at position 3924 of SEQ ID NO: 916603
cuggcuauuccugaugagu

SEQ ID NO: 1169673 - RNA, 19 nt, Artificial Sequence
  Description of Artificial Sequence: Synthetic oligonucleotide
  Antisense strand to SEQ ID NO: 1169672
acucaucaggaauagccag

SEQ ID NO: 1169674 - RNA, 19 nt, Artificial Sequence
  Description of Artificial Sequence: Synthetic oligonucleotide
  Sense strand starting at position 15 of SEQ ID NO: 916604
cccacuuugugaucucuau

SEQ ID NO: 1169675 - RNA, 19 nt, Artificial Sequence
  Description of Artificial Sequence: Synthetic oligonucleotide
  Antisense strand to SEQ ID NO: 1169674
auagagaucacaaaguggg

SEQ ID NO: 1169676 - RNA, 19 nt, Artificial Sequence
  Description of Artificial Sequence: Synthetic oligonucleotide
  Sense strand starting at position 19 of SEQ ID NO: 916604
cuuugugaucucuaugagu

SEQ ID NO: 1169677 - RNA, 19 nt, Artificial Sequence
  Description of Artificial Sequence: Synthetic oligonucleotide
  Antisense strand to SEQ ID NO: 1169676
acucauagagaucacaaag

SEQ ID NO: 1169678 - RNA, 19 nt, Artificial Sequence
  Description of Artificial Sequence: Synthetic oligonucleotide
  Sense strand starting at position 21 of SEQ ID NO: 916604
uugugaucucuaugaguac

SEQ ID NO: 1169679 - RNA, 19 nt, Artificial Sequence
  Description of Artificial Sequence: Synthetic oligonucleotide
  Antisense strand to SEQ ID NO: 1169678
guacucauagagaucacaa

SEQ ID NO: 1169680 - RNA, 19 nt, Artificial Sequence
  Description of Artificial Sequence: Synthetic oligonucleotide
  Sense strand starting at position 241 of SEQ ID NO: 916604
uuugaugacuucccugauu

SEQ ID NO: 1169681 - RNA, 19 nt, Artificial Sequence
  Description of Artificial Sequence: Synthetic oligonucleotide
  Antisense strand to SEQ ID NO: 1169680
aaucagggaagucaucaaa

SEQ ID NO: 1169682 - RNA, 19 nt, Artificial Sequence
  Description of Artificial Sequence: Synthetic oligonucleotide
  Sense strand starting at position 591 of SEQ ID NO: 916604
ugggcaucuuugucaacua

SEQ ID NO: 1169683 - RNA, 19 nt, Artificial Sequence
  Description of Artificial Sequence: Synthetic oligonucleotide
  Antisense strand to SEQ ID NO: 1169682
uaguugacaaagaugccca

SEQ ID NO: 1169684 - RNA, 19 nt, Artificial Sequence
  Description of Artificial Sequence: Synthetic oligonucleotide
  Sense strand starting at position 602 of SEQ ID NO: 916604
gucaacuacccaugauugu

SEQ ID NO: 1169685 - RNA, 19 nt, Artificial Sequence
  Description of Artificial Sequence: Synthetic oligonucleotide
  Antisense strand to SEQ ID NO: 1169684
acaaucauggguaguugac

SEQ ID NO: 1169686 - RNA, 19 nt, Artificial Sequence
  Description of Artificial Sequence: Synthetic oligonucleotide
  Sense strand starting at position 611 of SEQ ID NO: 916604
ccaugauuguguguaggag

SEQ ID NO: 1169687 - RNA, 19 nt, Artificial Sequence
  Description of Artificial Sequence: Synthetic oligonucleotide
  Antisense strand to SEQ ID NO: 1169686
cuccuacacacaaucaugg

SEQ ID NO: 1169688 - RNA, 19 nt, Artificial Sequence
  Description of Artificial Sequence: Synthetic oligonucleotide
  Sense strand starting at position 757 of SEQ ID NO: 916604
agaccagugagaggguuua

SEQ ID NO: 1169689 - RNA, 19 nt, Artificial Sequence
  Description of Artificial Sequence: Synthetic oligonucleotide
  Antisense strand to SEQ ID NO: 1169688
uaaacccucucacuggucu

SEQ ID NO: 1169690 - RNA, 19 nt, Artificial Sequence
  Description of Artificial Sequence: Synthetic oligonucleotide
  Sense strand starting at position 788 of SEQ ID NO: 916604
uucucuaauguccaggaua

SEQ ID NO: 1169691 - RNA, 19 nt, Artificial Sequence
  Description of Artificial Sequence: Synthetic oligonucleotide
  Antisense strand to SEQ ID NO: 1169690
uauccuggacauuagagaa

SEQ ID NO: 1169692 - RNA, 19 nt, Artificial Sequence
  Description of Artificial Sequence: Synthetic oligonucleotide
  Sense strand starting at position 790 of SEQ ID NO: 916604
cucuaauguccaggauauc

SEQ ID NO: 1169693 - RNA, 19 nt, Artificial Sequence
  Description of Artificial Sequence: Synthetic oligonucleotide
  Antisense strand to SEQ ID NO: 1169692
gauauccuggacauuagag

SEQ ID NO: 1169694 - RNA, 19 nt, Artificial Sequence
  Description of Artificial Sequence: Synthetic oligonucleotide
  Sense strand starting at position 791 of SEQ ID NO: 916604
ucuaauguccaggauaucu

SEQ ID NO: 1169695 - RNA, 19 nt, Artificial Sequence
  Description of Artificial Sequence: Synthetic oligonucleotide
  Antisense strand to SEQ ID NO: 1169694
agauauccuggacauuaga

SEQ ID NO: 1169696 - RNA, 19 nt, Artificial Sequence
  Description of Artificial Sequence: Synthetic oligonucleotide
  Sense strand starting at position 796 of SEQ ID NO: 916604
uguccaggauaucuccaau

SEQ ID NO: 1169697 - RNA, 19 nt, Artificial Sequence
  Description of Artificial Sequence: Synthetic oligonucleotide
  Antisense strand to SEQ ID NO: 1169696
auuggagauauccuggaca

SEQ ID NO: 1169698 - RNA, 19 nt, Artificial Sequence
  Description of Artificial Sequence: Synthetic oligonucleotide
  Sense strand starting at position 830 of SEQ ID NO: 916604
aauuaaugaugucuuggga

SEQ ID NO: 1169699 - RNA, 19 nt, Artificial Sequence
  Description of Artificial Sequence: Synthetic oligonucleotide
  Antisense strand to SEQ ID NO: 1169698
ucccaagacaucauuaauu

SEQ ID NO: 1169700 - RNA, 19 nt, Artificial Sequence
  Description of Artificial Sequence: Synthetic oligonucleotide
  Sense strand starting at position 833 of SEQ ID NO: 916604
uaaugaugucuugggaggu

SEQ ID NO: 1169701 - RNA, 19 nt, Artificial Sequence
  Description of Artificial Sequence: Synthetic oligonucleotide
  Antisense strand to SEQ ID NO: 1169700
accucccaagacaucauua

SEQ ID NO: 1169702 - RNA, 19 nt, Artificial Sequence
  Description of Artificial Sequence: Synthetic oligonucleotide
  Sense strand starting at position 2075 of SEQ ID NO: 916604
auaaguauacugugacuua

SEQ ID NO: 1169703 - RNA, 19 nt, Artificial Sequence
  Description of Artificial Sequence: Synthetic oligonucleotide
  Antisense strand to SEQ ID NO: 1169702
uaagucacaguauacuuau

SEQ ID NO: 1169704 - RNA, 19 nt, Artificial Sequence
  Description of Artificial Sequence: Synthetic oligonucleotide
  Sense strand starting at position 2078 of SEQ ID NO: 916604
aguauacugugacuuaaag

SEQ ID NO: 1169705 - RNA, 19 nt, Artificial Sequence
  Description of Artificial Sequence: Synthetic oligonucleotide
  Antisense strand to SEQ ID NO: 1169704
cuuuaagucacaguauacu

SEQ ID NO: 1169706 - RNA, 19 nt, Artificial Sequence
  Description of Artificial Sequence: Synthetic oligonucleotide
  Sense strand starting at position 2101 of SEQ ID NO: 916604
ucaauugcuguugaaacca

SEQ ID NO: 1169707 - RNA, 19 nt, Artificial Sequence
  Description of Artificial Sequence: Synthetic oligonucleotide
  Antisense strand to SEQ ID NO: 1169706
ugguuucaacagcaauuga

SEQ ID NO: 1169708 - RNA, 19 nt, Artificial Sequence
  Description of Artificial Sequence: Synthetic oligonucleotide
  Sense strand starting at position 2116 of SEQ ID NO: 916604
accaaagauuaguugcauu

SEQ ID NO: 1169709 - RNA, 19 nt, Artificial Sequence
  Description of Artificial Sequence: Synthetic oligonucleotide
  Antisense strand to SEQ ID NO: 1169708
aaugcaacuaaucuuuggu

SEQ ID NO: 1169710 - RNA, 19 nt, Artificial Sequence
  Description of Artificial Sequence: Synthetic oligonucleotide
  Sense strand starting at position 2147 of SEQ ID NO: 916604
aaguguuagaguuagguuu

SEQ ID NO: 1169711 - RNA, 19 nt, Artificial Sequence
  Description of Artificial Sequence: Synthetic oligonucleotide
  Antisense strand to SEQ ID NO: 1169710
aaaccuaacucuaacacuu

SEQ ID NO: 1169712 - RNA, 19 nt, Artificial Sequence
  Description of Artificial Sequence: Synthetic oligonucleotide
  Sense strand starting at position 2326 of SEQ ID NO: 916604
gaagcacauuaguuaguuu

SEQ ID NO: 1169713 - RNA, 19 nt, Artificial Sequence
  Description of Artificial Sequence: Synthetic oligonucleotide
  Antisense strand to SEQ ID NO: 1169712
aaacuaacuaaugugcuuc

SEQ ID NO: 1169714 - RNA, 19 nt, Artificial Sequence
  Description of Artificial Sequence: Synthetic oligonucleotide
  Sense strand starting at position 2337 of SEQ ID NO: 916604
guuaguuuggguugggaga

SEQ ID NO: 1169715 - RNA, 19 nt, Artificial Sequence
  Description of Artificial Sequence: Synthetic oligonucleotide
  Antisense strand to SEQ ID NO: 1169714
ucucccaacccaaacuaac

SEQ ID NO: 1169716 - RNA, 19 nt, Artificial Sequence
  Description of Artificial Sequence: Synthetic oligonucleotide
  Sense strand starting at position 2338 of SEQ ID NO: 916604
uuaguuuggguugggagau

SEQ ID NO: 1169717 - RNA, 19 nt, Artificial Sequence
  Description of Artificial Sequence: Synthetic oligonucleotide
  Antisense strand to SEQ ID NO: 1169716
aucucccaacccaaacuaa

SEQ ID NO: 1169718 - RNA, 19 nt, Artificial Sequence
  Description of Artificial Sequence: Synthetic oligonucleotide
  Sense strand starting at position 2490 of SEQ ID NO: 916604
cuggauucugauggaaguu

SEQ ID NO: 1169719 - RNA, 19 nt, Artificial Sequence
  Description of Artificial Sequence: Synthetic oligonucleotide
  Antisense strand to SEQ ID NO: 1169718
aacuuccaucagaauccag

SEQ ID NO: 1169720 - RNA, 19 nt, Artificial Sequence
  Description of Artificial Sequence: Synthetic oligonucleotide
  Sense strand starting at position 2684 of SEQ ID NO: 916604
acguuugucacauagguaa

SEQ ID NO: 1169721 - RNA, 19 nt, Artificial Sequence
  Description of Artificial Sequence: Synthetic oligonucleotide
  Antisense strand to SEQ ID NO: 1169720
uuaccuaugugacaaacgu

SEQ ID NO: 1169722 - RNA, 19 nt, Artificial Sequence
  Description of Artificial Sequence: Synthetic oligonucleotide
  Sense strand starting at position 2735 of SEQ ID NO: 916604
uuuaaucaccaggguauua

SEQ ID NO: 1169723 - RNA, 19 nt, Artificial Sequence
  Description of Artificial Sequence: Synthetic oligonucleotide
  Antisense strand to SEQ ID NO: 1169722
uaauacccuggugauuaaa

SEQ ID NO: 1169724 - RNA, 19 nt, Artificial Sequence
  Description of Artificial Sequence: Synthetic oligonucleotide
  Sense strand starting at position 2949 of SEQ ID NO: 916604
gggcauugcugauuacacu

SEQ ID NO: 1169725 - RNA, 19 nt, Artificial Sequence
  Description of Artificial Sequence: Synthetic oligonucleotide
  Antisense strand to SEQ ID NO: 1169724
aguguaaucagcaaugccc

SEQ ID NO: 1169726 - RNA, 19 nt, Artificial Sequence
  Description of Artificial Sequence: Synthetic oligonucleotide
  Sense strand starting at position 2950 of SEQ ID NO: 916604
ggcauugcugauuacacuu

SEQ ID NO: 1169727 - RNA, 19 nt, Artificial Sequence
  Description of Artificial Sequence: Synthetic oligonucleotide
  Antisense strand to SEQ ID NO: 1169726
aaguguaaucagcaaugcc

SEQ ID NO: 1169728 - RNA, 19 nt, Artificial Sequence
  Description of Artificial Sequence: Synthetic oligonucleotide
  Sense strand starting at position 3077 of SEQ ID NO: 916604
gggcuuuaugugcaugauu

SEQ ID NO: 1169729 - RNA, 19 nt, Artificial Sequence
  Description of Artificial Sequence: Synthetic oligonucleotide
  Antisense strand to SEQ ID NO: 1169728
aaucaugcacauaaagccc

SEQ ID NO: 1169730 - RNA, 19 nt, Artificial Sequence
  Description of Artificial Sequence: Synthetic oligonucleotide
  Sense strand starting at position 3089 of SEQ ID NO: 916604
caugauucugucuaggcaa

SEQ ID NO: 1169731 - RNA, 19 nt, Artificial Sequence
  Description of Artificial Sequence: Synthetic oligonucleotide
  Antisense strand to SEQ ID NO: 1169730
uugccuagacagaaucaug

SEQ ID NO: 1169732 - RNA, 19 nt, Artificial Sequence
  Description of Artificial Sequence: Synthetic oligonucleotide
  Sense strand starting at position 3091 of SEQ ID NO: 916604
ugauucugucuaggcaaca

SEQ ID NO: 1169733 - RNA, 19 nt, Artificial Sequence
  Description of Artificial Sequence: Synthetic oligonucleotide
  Antisense strand to SEQ ID NO: 1169732
uguugccuagacagaauca

SEQ ID NO: 1169734 - RNA, 19 nt, Artificial Sequence
  Description of Artificial Sequence: Synthetic oligonucleotide
  Sense strand starting at position 3092 of SEQ ID NO: 916604
gauucugucuaggcaacaa

SEQ ID NO: 1169735 - RNA, 19 nt, Artificial Sequence
  Description of Artificial Sequence: Synthetic oligonucleotide
  Antisense strand to SEQ ID NO: 1169734
uuguugccuagacagaauc

SEQ ID NO: 1169736 - RNA, 19 nt, Artificial Sequence
  Description of Artificial Sequence: Synthetic oligonucleotide
  Sense strand starting at position 3096 of SEQ ID NO: 916604
cugucuaggcaacaauaau

SEQ ID NO: 1169737 - RNA, 19 nt, Artificial Sequence
  Description of Artificial Sequence: Synthetic oligonucleotide
  Antisense strand to SEQ ID NO: 1169736
auuauuguugccuagacag

SEQ ID NO: 1169738 - RNA, 19 nt, Artificial Sequence
  Description of Artificial Sequence: Synthetic oligonucleotide
  Sense strand starting at position 3196 of SEQ ID NO: 916604
auaacauuaggugguuauu

SEQ ID NO: 1169739 - RNA, 19 nt, Artificial Sequence
  Description of Artificial Sequence: Synthetic oligonucleotide
  Antisense strand to SEQ ID NO: 1169738
aauaaccaccuaauguuau

SEQ ID NO: 1169740 - RNA, 19 nt, Artificial Sequence
  Description of Artificial Sequence: Synthetic oligonucleotide
  Sense strand starting at position 3198 of SEQ ID NO: 916604
aacauuaggugguuauuau

SEQ ID NO: 1169741 - RNA, 19 nt, Artificial Sequence
  Description of Artificial Sequence: Synthetic oligonucleotide
  Antisense strand to SEQ ID NO: 1169740
auaauaaccaccuaauguu

SEQ ID NO: 1169742 - RNA, 19 nt, Artificial Sequence
  Description of Artificial Sequence: Synthetic oligonucleotide
  Sense strand starting at position 3199 of SEQ ID NO: 916604
acauuaggugguuauuauu

SEQ ID NO: 1169743 - RNA, 19 nt, Artificial Sequence
  Description of Artificial Sequence: Synthetic oligonucleotide
  Antisense strand to SEQ ID NO: 1169742
aauaauaaccaccuaaugu

SEQ ID NO: 1169744 - RNA, 19 nt, Artificial Sequence
  Description of Artificial Sequence: Synthetic oligonucleotide
  Sense strand starting at position 3256 of SEQ ID NO: 916604
agaaaugaagucugcugaa

SEQ ID NO: 1169745 - RNA, 19 nt, Artificial Sequence
  Description of Artificial Sequence: Synthetic oligonucleotide
  Antisense strand to SEQ ID NO: 1169744
uucagcagacuucauuucu

SEQ ID NO: 1169746 - RNA, 19 nt, Artificial Sequence
  Description of Artificial Sequence: Synthetic oligonucleotide
  Sense strand starting at position 3277 of SEQ ID NO: 916604
ucacuuacuugagucagaa

SEQ ID NO: 1169747 - RNA, 19 nt, Artificial Sequence
  Description of Artificial Sequence: Synthetic oligonucleotide
  Antisense strand to SEQ ID NO: 1169746
uucugacucaaguaaguga

SEQ ID NO: 1169748 - RNA, 19 nt, Artificial Sequence
  Description of Artificial Sequence: Synthetic oligonucleotide
  Sense strand starting at position 3423 of SEQ ID NO: 916604
uacuuuagaguguaguuaa

SEQ ID NO: 1169749 - RNA, 19 nt, Artificial Sequence
  Description of Artificial Sequence: Synthetic oligonucleotide
  Antisense strand to SEQ ID NO: 1169748
uuaacuacacucuaaagua

SEQ ID NO: 1169750 - RNA, 19 nt, Artificial Sequence
  Description of Artificial Sequence: Synthetic oligonucleotide
  Sense strand starting at position 3903 of SEQ ID NO: 916604
augacauacguauguaaau

SEQ ID NO: 1169751 - RNA, 19 nt, Artificial Sequence
  Description of Artificial Sequence: Synthetic oligonucleotide
  Antisense strand to SEQ ID NO: 1169750
auuuacauacguaugucau

SEQ ID NO: 1169752 - RNA, 19 nt, Artificial Sequence
  Description of Artificial Sequence: Synthetic oligonucleotide
  Sense strand starting at position 3904 of SEQ ID NO: 916604
ugacauacguauguaaauc

SEQ ID NO: 1169753 - RNA, 19 nt, Artificial Sequence
  Description of Artificial Sequence: Synthetic oligonucleotide
  Antisense strand to SEQ ID NO: 1169752
gauuuacauacguauguca

SEQ ID NO: 1169754 - RNA, 19 nt, Artificial Sequence
  Description of Artificial Sequence: Synthetic oligonucleotide
  Sense strand starting at position 25 of SEQ ID NO: 916605
guagcagccuucuuugauc

SEQ ID NO: 1169755 - RNA, 19 nt, Artificial Sequence
  Description of Artificial Sequence: Synthetic oligonucleotide
  Antisense strand to SEQ ID NO: 1169754
gaucaaagaaggcugcuac

SEQ ID NO: 1169756 - RNA, 19 nt, Artificial Sequence
  Description of Artificial Sequence: Synthetic oligonucleotide
  Sense strand starting at position 27 of SEQ ID NO: 916605
agcagccuucuuugaucaa

SEQ ID NO: 1169757 - RNA, 19 nt, Artificial Sequence
  Description of Artificial Sequence: Synthetic oligonucleotide
  Antisense strand to SEQ ID NO: 1169756
uugaucaaagaaggcugcu

SEQ ID NO: 1169758 - RNA, 19 nt, Artificial Sequence
  Description of Artificial Sequence: Synthetic oligonucleotide
  Sense strand starting at position 68 of SEQ ID NO: 916605
gggagagugaguugcuuga

SEQ ID NO: 1169759 - RNA, 19 nt, Artificial Sequence
  Description of Artificial Sequence: Synthetic oligonucleotide
  Antisense strand to SEQ ID NO: 1169758
ucaagcaacucacucuccc

SEQ ID NO: 1169760 - RNA, 19 nt, Artificial Sequence
  Description of Artificial Sequence: Synthetic oligonucleotide
  Sense strand starting at position 72 of SEQ ID NO: 916605
gagugaguugcuugagguc

SEQ ID NO: 1169761 - RNA, 19 nt, Artificial Sequence
  Description of Artificial Sequence: Synthetic oligonucleotide
  Antisense strand to SEQ ID NO: 1169760
gaccucaagcaacucacuc

SEQ ID NO: 1169762 - RNA, 19 nt, Artificial Sequence
  Description of Artificial Sequence: Synthetic oligonucleotide
  Sense strand starting at position 165 of SEQ ID NO: 916605
gcgugcucugggccuuaaa

SEQ ID NO: 1169763 - RNA, 19 nt, Artificial Sequence
  Description of Artificial Sequence: Synthetic oligonucleotide
  Antisense strand to SEQ ID NO: 1169762
uuuaaggcccagagcacgc

SEQ ID NO: 1169764 - RNA, 19 nt, Artificial Sequence
  Description of Artificial Sequence: Synthetic oligonucleotide
  Sense strand starting at position 315 of SEQ ID NO: 916605
ugcucuggucuacagaacu

SEQ ID NO: 1169765 - RNA, 19 nt, Artificial Sequence
  Description of Artificial Sequence: Synthetic oligonucleotide
  Antisense strand to SEQ ID NO: 1169764
aguucuguagaccagagca

SEQ ID NO: 1169766 - RNA, 19 nt, Artificial Sequence
  Description of Artificial Sequence: Synthetic oligonucleotide
  Sense strand starting at position 342 of SEQ ID NO: 916605
gggagcagaguccauucau

SEQ ID NO: 1169767 - RNA, 19 nt, Artificial Sequence
  Description of Artificial Sequence: Synthetic oligonucleotide
  Antisense strand to SEQ ID NO: 1169766
augaauggacucugcuccc

SEQ ID NO: 1169768 - RNA, 19 nt, Artificial Sequence
  Description of Artificial Sequence: Synthetic oligonucleotide
  Sense strand starting at position 366 of SEQ ID NO: 916605
gcugauaucaccgaguggu

SEQ ID NO: 1169769 - RNA, 19 nt, Artificial Sequence
  Description of Artificial Sequence: Synthetic oligonucleotide
  Antisense strand to SEQ ID NO: 1169768
accacucggugauaucagc

SEQ ID NO: 1169770 - RNA, 19 nt, Artificial Sequence
  Description of Artificial Sequence: Synthetic oligonucleotide
  Sense strand starting at position 369 of SEQ ID NO: 916605
gauaucaccgagugguaau

SEQ ID NO: 1169771 - RNA, 19 nt, Artificial Sequence
  Description of Artificial Sequence: Synthetic oligonucleotide
  Antisense strand to SEQ ID NO: 1169770
auuaccacucggugauauc

SEQ ID NO: 1169772 - RNA, 19 nt, Artificial Sequence
  Description of Artificial Sequence: Synthetic oligonucleotide
  Sense strand starting at position 370 of SEQ ID NO: 916605
auaucaccgagugguaaua

SEQ ID NO: 1169773 - RNA, 19 nt, Artificial Sequence
  Description of Artificial Sequence: Synthetic oligonucleotide
  Antisense strand to SEQ ID NO: 1169772
uauuaccacucggugauau

SEQ ID NO: 1169774 - RNA, 19 nt, Artificial Sequence
  Description of Artificial Sequence: Synthetic oligonucleotide
  Sense strand starting at position 380 of SEQ ID NO: 916605
gugguaauaauguaguuau

SEQ ID NO: 1169775 - RNA, 19 nt, Artificial Sequence
  Description of Artificial Sequence: Synthetic oligonucleotide
  Antisense strand to SEQ ID NO: 1169774
auaacuacauuauuaccac

SEQ ID NO: 1169776 - RNA, 19 nt, Artificial Sequence
  Description of Artificial Sequence: Synthetic oligonucleotide
  Sense strand starting at position 547 of SEQ ID NO: 916605
augccuaugcccuagauca

SEQ ID NO: 1169777 - RNA, 19 nt, Artificial Sequence
  Description of Artificial Sequence: Synthetic oligonucleotide
  Antisense strand to SEQ ID NO: 1169776
ugaucuagggcauaggcau

SEQ ID NO: 1169778 - RNA, 19 nt, Artificial Sequence
  Description of Artificial Sequence: Synthetic oligonucleotide
  Sense strand starting at position 549 of SEQ ID NO: 916605
gccuaugcccuagaucaag

SEQ ID NO: 1169779 - RNA, 19 nt, Artificial Sequence
  Description of Artificial Sequence: Synthetic oligonucleotide
  Antisense strand to SEQ ID NO: 1169778
cuugaucuagggcauaggc

SEQ ID NO: 1169780 - RNA, 19 nt, Artificial Sequence
  Description of Artificial Sequence: Synthetic oligonucleotide
  Sense strand starting at position 625 of SEQ ID NO: 916605
ggccgagauuuggcagauc

SEQ ID NO: 1169781 - RNA, 19 nt, Artificial Sequence
  Description of Artificial Sequence: Synthetic oligonucleotide
  Antisense strand to SEQ ID NO: 1169780
gaucugccaaaucucggcc

SEQ ID NO: 1169782 - RNA, 19 nt, Artificial Sequence
  Description of Artificial Sequence: Synthetic oligonucleotide
  Sense strand starting at position 854 of SEQ ID NO: 916605
uccgucuuggaacaaauaa

SEQ ID NO: 1169783 - RNA, 19 nt, Artificial Sequence
  Description of Artificial Sequence: Synthetic oligonucleotide
  Antisense strand to SEQ ID NO: 1169782
uuauuuguuccaagacgga

SEQ ID NO: 1169784 - RNA, 19 nt, Artificial Sequence
  Description of Artificial Sequence: Synthetic oligonucleotide
  Sense strand starting at position 1099 of SEQ ID NO: 916605
gcgcaaggucuuucuccuu

SEQ ID NO: 1169785 - RNA, 19 nt, Artificial Sequence
  Description of Artificial Sequence: Synthetic oligonucleotide
  Antisense strand to SEQ ID NO: 1169784
aaggagaaagaccuugcgc

SEQ ID NO: 1169786 - RNA, 19 nt, Artificial Sequence
  Description of Artificial Sequence: Synthetic oligonucleotide
  Sense strand starting at position 1193 of SEQ ID NO: 916605
gggcuucuuacagagcuaa

SEQ ID NO: 1169787 - RNA, 19 nt, Artificial Sequence
  Description of Artificial Sequence: Synthetic oligonucleotide
  Antisense strand to SEQ ID NO: 1169786
uuagcucuguaagaagccc

SEQ ID NO: 1169788 - RNA, 19 nt, Artificial Sequence
  Description of Artificial Sequence: Synthetic oligonucleotide
  Sense strand starting at position 1206 of SEQ ID NO: 916605
agcuaacuucgggaugcau

SEQ ID NO: 1169789 - RNA, 19 nt, Artificial Sequence
  Description of Artificial Sequence: Synthetic oligonucleotide
  Antisense strand to SEQ ID NO: 1169788
augcaucccgaaguuagcu

SEQ ID NO: 1169790 - RNA, 19 nt, Artificial Sequence
  Description of Artificial Sequence: Synthetic oligonucleotide
  Sense strand starting at position 1214 of SEQ ID NO: 916605
ucgggaugcaucuaccacu

SEQ ID NO: 1169791 - RNA, 19 nt, Artificial Sequence
  Description of Artificial Sequence: Synthetic oligonucleotide
  Antisense strand to SEQ ID NO: 1169790
agugguagaugcaucccga

SEQ ID NO: 1169792 - RNA, 19 nt, Artificial Sequence
  Description of Artificial Sequence: Synthetic oligonucleotide
  Sense strand starting at position 2373 of SEQ ID NO: 916605
ggcucaaggucuguaggaa

SEQ ID NO: 1169793 - RNA, 19 nt, Artificial Sequence
  Description of Artificial Sequence: Synthetic oligonucleotide
  Antisense strand to SEQ ID NO: 1169792
uuccuacagaccuugagcc

SEQ ID NO: 1169794 - RNA, 19 nt, Artificial Sequence
  Description of Artificial Sequence: Synthetic oligonucleotide
  Sense strand starting at position 2374 of SEQ ID NO: 916605
gcucaaggucuguaggaaa

SEQ ID NO: 1169795 - RNA, 19 nt, Artificial Sequence
  Description of Artificial Sequence: Synthetic oligonucleotide
  Antisense strand to SEQ ID NO: 1169794
uuuccuacagaccuugagc

SEQ ID NO: 1169796 - RNA, 19 nt, Artificial Sequence
  Description of Artificial Sequence: Synthetic oligonucleotide
  Sense strand starting at position 2538 of SEQ ID NO: 916605
agcaucugauacguauuga

SEQ ID NO: 1169797 - RNA, 19 nt, Artificial Sequence
  Description of Artificial Sequence: Synthetic oligonucleotide
  Antisense strand to SEQ ID NO: 1169796
ucaauacguaucagaugcu

SEQ ID NO: 1169798 - RNA, 19 nt, Artificial Sequence
  Description of Artificial Sequence: Synthetic oligonucleotide
  Sense strand starting at position 2539 of SEQ ID NO: 916605
gcaucugauacguauugag

SEQ ID NO: 1169799 - RNA, 19 nt, Artificial Sequence
  Description of Artificial Sequence: Synthetic oligonucleotide
  Antisense strand to SEQ ID NO: 1169798
cucaauacguaucagaugc

SEQ ID NO: 1169800 - RNA, 19 nt, Artificial Sequence
  Description of Artificial Sequence: Synthetic oligonucleotide
  Sense strand starting at position 2842 of SEQ ID NO: 916605
agugucuucugagcaacua

SEQ ID NO: 1169801 - RNA, 19 nt, Artificial Sequence
  Description of Artificial Sequence: Synthetic oligonucleotide
  Antisense strand to SEQ ID NO: 1169800
uaguugcucagaagacacu

SEQ ID NO: 1169802 - RNA, 19 nt, Artificial Sequence
  Description of Artificial Sequence: Synthetic oligonucleotide
  Sense strand starting at position 2843 of SEQ ID NO: 916605
gugucuucugagcaacuau

SEQ ID NO: 1169803 - RNA, 19 nt, Artificial Sequence
  Description of Artificial Sequence: Synthetic oligonucleotide
  Antisense strand to SEQ ID NO: 1169802
auaguugcucagaagacac

SEQ ID NO: 1169804 - RNA, 19 nt, Artificial Sequence
  Description of Artificial Sequence: Synthetic oligonucleotide
  Sense strand starting at position 2864 of SEQ ID NO: 916605
cgugcuacgcugagggauu

SEQ ID NO: 1169805 - RNA, 19 nt, Artificial Sequence
  Description of Artificial Sequence: Synthetic oligonucleotide
  Antisense strand to SEQ ID NO: 1169804
aaucccucagcguagcacg

SEQ ID NO: 1169806 - RNA, 19 nt, Artificial Sequence
  Description of Artificial Sequence: Synthetic oligonucleotide
  Sense strand starting at position 3350 of SEQ ID NO: 916605
gcaggaaauaagugagauc

SEQ ID NO: 1169807 - RNA, 19 nt, Artificial Sequence
  Description of Artificial Sequence: Synthetic oligonucleotide
  Antisense strand to SEQ ID NO: 1169806
gaucucacuuauuuccugc

SEQ ID NO: 1169808 - RNA, 19 nt, Artificial Sequence
  Description of Artificial Sequence: Synthetic oligonucleotide
  Sense strand starting at position 3353 of SEQ ID NO: 916605
ggaaauaagugagaucaca

SEQ ID NO: 1169809 - RNA, 19 nt, Artificial Sequence
  Description of Artificial Sequence: Synthetic oligonucleotide
  Antisense strand to SEQ ID NO: 1169808
ugugaucucacuuauuucc

SEQ ID NO: 1169810 - RNA, 19 nt, Artificial Sequence
  Description of Artificial Sequence: Synthetic oligonucleotide
  Sense strand starting at position 3378 of SEQ ID NO: 916605
ugacuuaggucacauuuaa

SEQ ID NO: 1169811 - RNA, 19 nt, Artificial Sequence
  Description of Artificial Sequence: Synthetic oligonucleotide
  Antisense strand to SEQ ID NO: 1169810
uuaaaugugaccuaaguca

SEQ ID NO: 1169812 - RNA, 19 nt, Artificial Sequence
  Description of Artificial Sequence: Synthetic oligonucleotide
  Sense strand starting at position 3451 of SEQ ID NO: 916605
gagggaacugcucaugcca

SEQ ID NO: 1169813 - RNA, 19 nt, Artificial Sequence
  Description of Artificial Sequence: Synthetic oligonucleotide
  Antisense strand to SEQ ID NO: 1169812
uggcaugagcaguucccuc

SEQ ID NO: 1169814 - RNA, 19 nt, Artificial Sequence
  Description of Artificial Sequence: Synthetic oligonucleotide
  Sense strand starting at position 3471 of SEQ ID NO: 916605
gaccuuuaagcagggauau

SEQ ID NO: 1169815 - RNA, 19 nt, Artificial Sequence
  Description of Artificial Sequence: Synthetic oligonucleotide
  Antisense strand to SEQ ID NO: 1169814
auaucccugcuuaaagguc

SEQ ID NO: 1169816 - RNA, 19 nt, Artificial Sequence
  Description of Artificial Sequence: Synthetic oligonucleotide
  Sense strand starting at position 3472 of SEQ ID NO: 916605
accuuuaagcagggauauu

SEQ ID NO: 1169817 - RNA, 19 nt, Artificial Sequence
  Description of Artificial Sequence: Synthetic oligonucleotide
  Antisense strand to SEQ ID NO: 1169816
aauaucccugcuuaaaggu

SEQ ID NO: 1169818 - RNA, 19 nt, Artificial Sequence
  Description of Artificial Sequence: Synthetic oligonucleotide
  Sense strand starting at position 3561 of SEQ ID NO: 916605
uagggaaugucuccuagga

SEQ ID NO: 1169819 - RNA, 19 nt, Artificial Sequence
  Description of Artificial Sequence: Synthetic oligonucleotide
  Antisense strand to SEQ ID NO: 1169818
uccuaggagacauucccua

SEQ ID NO: 1169820 - RNA, 19 nt, Artificial Sequence
  Description of Artificial Sequence: Synthetic oligonucleotide
  Sense strand starting at position 3563 of SEQ ID NO: 916605
gggaaugucuccuaggagg

SEQ ID NO: 1169821 - RNA, 19 nt, Artificial Sequence
  Description of Artificial Sequence: Synthetic oligonucleotide
  Antisense strand to SEQ ID NO: 1169820
ccuccuaggagacauuccc

SEQ ID NO: 1169822 - RNA, 19 nt, Artificial Sequence
  Description of Artificial Sequence: Synthetic oligonucleotide
  Sense strand starting at position 3565 of SEQ ID NO: 916605
gaaugucuccuaggaggua

SEQ ID NO: 1169823 - RNA, 19 nt, Artificial Sequence
  Description of Artificial Sequence: Synthetic oligonucleotide
  Antisense strand to SEQ ID NO: 1169822
uaccuccuaggagacauuc

SEQ ID NO: 1169824 - RNA, 19 nt, Artificial Sequence
  Description of Artificial Sequence: Synthetic oligonucleotide
  Sense strand starting at position 3635 of SEQ ID NO: 916605
ucuagaauauuccucggca

SEQ ID NO: 1169825 - RNA, 19 nt, Artificial Sequence
  Description of Artificial Sequence: Synthetic oligonucleotide
  Antisense strand to SEQ ID NO: 1169824
ugccgaggaauauucuaga

SEQ ID NO: 1169826 - RNA, 19 nt, Artificial Sequence
  Description of Artificial Sequence: Synthetic oligonucleotide
  Sense strand starting at position 3636 of SEQ ID NO: 916605
cuagaauauuccucggcau

SEQ ID NO: 1169827 - RNA, 19 nt, Artificial Sequence
  Description of Artificial Sequence: Synthetic oligonucleotide
  Antisense strand to SEQ ID NO: 1169826
augccgaggaauauucuag

SEQ ID NO: 1169828 - RNA, 19 nt, Artificial Sequence
  Description of Artificial Sequence: Synthetic oligonucleotide
  Sense strand starting at position 3638 of SEQ ID NO: 916605
agaauauuccucggcauac

SEQ ID NO: 1169829 - RNA, 19 nt, Artificial Sequence
  Description of Artificial Sequence: Synthetic oligonucleotide
  Antisense strand to SEQ ID NO: 1169828
guaugccgaggaauauucu

SEQ ID NO: 1169830 - RNA, 19 nt, Artificial Sequence
  Description of Artificial Sequence: Synthetic oligonucleotide
  Sense strand starting at position 3654 of SEQ ID NO: 916605
uacaaucgguccucaguaa

SEQ ID NO: 1169831 - RNA, 19 nt, Artificial Sequence
  Description of Artificial Sequence: Synthetic oligonucleotide
  Antisense strand to SEQ ID NO: 1169830
uuacugaggaccgauugua

SEQ ID NO: 1169832 - RNA, 19 nt, Artificial Sequence
  Description of Artificial Sequence: Synthetic oligonucleotide
  Sense strand starting at position 3655 of SEQ ID NO: 916605
acaaucgguccucaguaau

SEQ ID NO: 1169833 - RNA, 19 nt, Artificial Sequence
  Description of Artificial Sequence: Synthetic oligonucleotide
  Antisense strand to SEQ ID NO: 1169832
auuacugaggaccgauugu

SEQ ID NO: 1169834 - RNA, 19 nt, Artificial Sequence
  Description of Artificial Sequence: Synthetic oligonucleotide
  Sense strand starting at position 129 of SEQ ID NO: 916606
uguuaaugacauggcaaau

SEQ ID NO: 1169835 - RNA, 19 nt, Artificial Sequence
  Description of Artificial Sequence: Synthetic oligonucleotide
  Antisense strand to SEQ ID NO: 1169834
auuugccaugucauuaaca

SEQ ID NO: 1169836 - RNA, 19 nt, Artificial Sequence
  Description of Artificial Sequence: Synthetic oligonucleotide
  Sense strand starting at position 336 of SEQ ID NO: 916606
aggaaugcuugauuacagu

SEQ ID NO: 1169837 - RNA, 19 nt, Artificial Sequence
  Description of Artificial Sequence: Synthetic oligonucleotide
  Antisense strand to SEQ ID NO: 1169836
acuguaaucaagcauuccu

SEQ ID NO: 1169838 - RNA, 19 nt, Artificial Sequence
  Description of Artificial Sequence: Synthetic oligonucleotide
  Sense strand starting at position 342 of SEQ ID NO: 916606
gcuugauuacaguauugac

SEQ ID NO: 1169839 - RNA, 19 nt, Artificial Sequence
  Description of Artificial Sequence: Synthetic oligonucleotide
  Antisense strand to SEQ ID NO: 1169838
gucaauacuguaaucaagc

SEQ ID NO: 1169840 - RNA, 19 nt, Artificial Sequence
  Description of Artificial Sequence: Synthetic oligonucleotide
  Sense strand starting at position 1224 of SEQ ID NO: 916606
gagacauagucauuauugc

SEQ ID NO: 1169841 - RNA, 19 nt, Artificial Sequence
  Description of Artificial Sequence: Synthetic oligonucleotide
  Antisense strand to SEQ ID NO: 1169840
gcaauaaugacuaugucuc

SEQ ID NO: 1169842 - RNA, 19 nt, Artificial Sequence
  Description of Artificial Sequence: Synthetic oligonucleotide
  Sense strand starting at position 1225 of SEQ ID NO: 916606
agacauagucauuauugcu

SEQ ID NO: 1169843 - RNA, 19 nt, Artificial Sequence
  Description of Artificial Sequence: Synthetic oligonucleotide
  Antisense strand to SEQ ID NO: 1169842
agcaauaaugacuaugucu

SEQ ID NO: 1169844 - RNA, 19 nt, Artificial Sequence
  Description of Artificial Sequence: Synthetic oligonucleotide
  Sense strand starting at position 1321 of SEQ ID NO: 916606
aggaguaucugacuuugcu

SEQ ID NO: 1169845 - RNA, 19 nt, Artificial Sequence
  Description of Artificial Sequence: Synthetic oligonucleotide
  Antisense strand to SEQ ID NO: 1169844
agcaaagucagauacuccu

SEQ ID NO: 1169846 - RNA, 19 nt, Artificial Sequence
  Description of Artificial Sequence: Synthetic oligonucleotide
  Sense strand starting at position 1324 of SEQ ID NO: 916606
aguaucugacuuugcugaa

SEQ ID NO: 1169847 - RNA, 19 nt, Artificial Sequence
  Description of Artificial Sequence: Synthetic oligonucleotide
  Antisense strand to SEQ ID NO: 1169846
uucagcaaagucagauacu

SEQ ID NO: 1169848 - RNA, 19 nt, Artificial Sequence
  Description of Artificial Sequence: Synthetic oligonucleotide
  Sense strand starting at position 1331 of SEQ ID NO: 916606
gacuuugcugaagaaguua

SEQ ID NO: 1169849 - RNA, 19 nt, Artificial Sequence
  Description of Artificial Sequence: Synthetic oligonucleotide
  Antisense strand to SEQ ID NO: 1169848
uaacuucuucagcaaaguc

SEQ ID NO: 1169850 - RNA, 19 nt, Artificial Sequence
  Description of Artificial Sequence: Synthetic oligonucleotide
  Sense strand starting at position 1374 of SEQ ID NO: 916606
cccagaauuccaggcgaaa

SEQ ID NO: 1169851 - RNA, 19 nt, Artificial Sequence
  Description of Artificial Sequence: Synthetic oligonucleotide
  Antisense strand to SEQ ID NO: 1169850
uuucgccuggaauucuggg

SEQ ID NO: 1169852 - RNA, 19 nt, Artificial Sequence
  Description of Artificial Sequence: Synthetic oligonucleotide
  Sense strand starting at position 1386 of SEQ ID NO: 916606
ggcgaaagucauggaauca

SEQ ID NO: 1169853 - RNA, 19 nt, Artificial Sequence
  Description of Artificial Sequence: Synthetic oligonucleotide
  Antisense strand to SEQ ID NO: 1169852
ugauuccaugacuuucgcc

SEQ ID NO: 1169854 - RNA, 19 nt, Artificial Sequence
  Description of Artificial Sequence: Synthetic oligonucleotide
  Sense strand starting at position 1387 of SEQ ID NO: 916606
gcgaaagucauggaaucau

SEQ ID NO: 1169855 - RNA, 19 nt, Artificial Sequence
  Description of Artificial Sequence: Synthetic oligonucleotide
  Antisense strand to SEQ ID NO: 1169854
augauuccaugacuuucgc

SEQ ID NO: 1169856 - RNA, 19 nt, Artificial Sequence
  Description of Artificial Sequence: Synthetic oligonucleotide
  Sense strand starting at position 1592 of SEQ ID NO: 916606
ugagcucaauaccucgaaa

SEQ ID NO: 1169857 - RNA, 19 nt, Artificial Sequence
  Description of Artificial Sequence: Synthetic oligonucleotide
  Antisense strand to SEQ ID NO: 1169856
uuucgagguauugagcuca

SEQ ID NO: 1169858 - RNA, 19 nt, Artificial Sequence
  Description of Artificial Sequence: Synthetic oligonucleotide
  Sense strand starting at position 1595 of SEQ ID NO: 916606
gcucaauaccucgaaaggu

SEQ ID NO: 1169859 - RNA, 19 nt, Artificial Sequence
  Description of Artificial Sequence: Synthetic oligonucleotide
  Antisense strand to SEQ ID NO: 1169858
accuuucgagguauugagc

SEQ ID NO: 1169860 - RNA, 19 nt, Artificial Sequence
  Description of Artificial Sequence: Synthetic oligonucleotide
  Sense strand starting at position 1637 of SEQ ID NO: 916606
ggcagcagugauuaucuga

SEQ ID NO: 1169861 - RNA, 19 nt, Artificial Sequence
  Description of Artificial Sequence: Synthetic oligonucleotide
  Antisense strand to SEQ ID NO: 1169860
ucagauaaucacugcugcc

SEQ ID NO: 1169862 - RNA, 19 nt, Artificial Sequence
  Description of Artificial Sequence: Synthetic oligonucleotide
  Sense strand starting at position 1640 of SEQ ID NO: 916606
agcagugauuaucugaacu

SEQ ID NO: 1169863 - RNA, 19 nt, Artificial Sequence
  Description of Artificial Sequence: Synthetic oligonucleotide
  Antisense strand to SEQ ID NO: 1169862
aguucagauaaucacugcu

SEQ ID NO: 1169864 - RNA, 19 nt, Artificial Sequence
  Description of Artificial Sequence: Synthetic oligonucleotide
  Sense strand starting at position 1691 of SEQ ID NO: 916606
gaugaugucugguuaggaa

SEQ ID NO: 1169865 - RNA, 19 nt, Artificial Sequence
  Description of Artificial Sequence: Synthetic oligonucleotide
  Antisense strand to SEQ ID NO: 1169864
uuccuaaccagacaucauc

SEQ ID NO: 1169866 - RNA, 19 nt, Artificial Sequence
  Description of Artificial Sequence: Synthetic oligonucleotide
  Sense strand starting at position 2143 of SEQ ID NO: 916606
gggcaagcugccuagagaa

SEQ ID NO: 1169867 - RNA, 19 nt, Artificial Sequence
  Description of Artificial Sequence: Synthetic oligonucleotide
  Antisense strand to SEQ ID NO: 1169866
uucucuaggcagcuugccc

SEQ ID NO: 1169868 - RNA, 19 nt, Artificial Sequence
  Description of Artificial Sequence: Synthetic oligonucleotide
  Sense strand starting at position 2177 of SEQ ID NO: 916606
gcuauugaccaaugggaag

SEQ ID NO: 1169869 - RNA, 19 nt, Artificial Sequence
  Description of Artificial Sequence: Synthetic oligonucleotide
  Antisense strand to SEQ ID NO: 1169868
cuucccauuggucaauagc

SEQ ID NO: 1169870 - RNA, 19 nt, Artificial Sequence
  Description of Artificial Sequence: Synthetic oligonucleotide
  Sense strand starting at position 2336 of SEQ ID NO: 916606
gguggagcuccauaagcua

SEQ ID NO: 1169871 - RNA, 19 nt, Artificial Sequence
  Description of Artificial Sequence: Synthetic oligonucleotide
  Antisense strand to SEQ ID NO: 1169870
uagcuuauggagcuccacc

SEQ ID NO: 1169872 - RNA, 19 nt, Artificial Sequence
  Description of Artificial Sequence: Synthetic oligonucleotide
  Sense strand starting at position 2726 of SEQ ID NO: 916606
cugggaugauguuuccagu

SEQ ID NO: 1169873 - RNA, 19 nt, Artificial Sequence
  Description of Artificial Sequence: Synthetic oligonucleotide
  Antisense strand to SEQ ID NO: 1169872
acuggaaacaucaucccag

SEQ ID NO: 1169874 - RNA, 19 nt, Artificial Sequence
  Description of Artificial Sequence: Synthetic oligonucleotide
  Sense strand starting at position 2743 of SEQ ID NO: 916606
gucugucguccgaagcuga

SEQ ID NO: 1169875 - RNA, 19 nt, Artificial Sequence
  Description of Artificial Sequence: Synthetic oligonucleotide
  Antisense strand to SEQ ID NO: 1169874
ucagcuucggacgacagac

SEQ ID NO: 1169876 - RNA, 19 nt, Artificial Sequence
  Description of Artificial Sequence: Synthetic oligonucleotide
  Sense strand starting at position 2758 of SEQ ID NO: 916606
cugagauuucccuguuagc

SEQ ID NO: 1169877 - RNA, 19 nt, Artificial Sequence
  Description of Artificial Sequence: Synthetic oligonucleotide
  Antisense strand to SEQ ID NO: 1169876
gcuaacagggaaaucucag

SEQ ID NO: 1169878 - RNA, 19 nt, Artificial Sequence
  Description of Artificial Sequence: Synthetic oligonucleotide
  Sense strand starting at position 2791 of SEQ ID NO: 916606
uuguguauuucugucuaaa

SEQ ID NO: 1169879 - RNA, 19 nt, Artificial Sequence
  Description of Artificial Sequence: Synthetic oligonucleotide
  Antisense strand to SEQ ID NO: 1169878
uuuagacagaaauacacaa

SEQ ID NO: 1169880 - RNA, 19 nt, Artificial Sequence
  Description of Artificial Sequence: Synthetic oligonucleotide
  Sense strand starting at position 2793 of SEQ ID NO: 916606
guguauuucugucuaaaua

SEQ ID NO: 1169881 - RNA, 19 nt, Artificial Sequence
  Description of Artificial Sequence: Synthetic oligonucleotide
  Antisense strand to SEQ ID NO: 1169880
uauuuagacagaaauacac

SEQ ID NO: 1169882 - RNA, 19 nt, Artificial Sequence
  Description of Artificial Sequence: Synthetic oligonucleotide
  Sense strand starting at position 3088 of SEQ ID NO: 916606
agguuaagauuaucucugu

SEQ ID NO: 1169883 - RNA, 19 nt, Artificial Sequence
  Description of Artificial Sequence: Synthetic oligonucleotide
  Antisense strand to SEQ ID NO: 1169882
acagagauaaucuuaaccu

SEQ ID NO: 1169884 - RNA, 19 nt, Artificial Sequence
  Description of Artificial Sequence: Synthetic oligonucleotide
  Sense strand starting at position 3089 of SEQ ID NO: 916606
gguuaagauuaucucuguu

SEQ ID NO: 1169885 - RNA, 19 nt, Artificial Sequence
  Description of Artificial Sequence: Synthetic oligonucleotide
  Antisense strand to SEQ ID NO: 1169884
aacagagauaaucuuaacc

SEQ ID NO: 1169886 - RNA, 19 nt, Artificial Sequence
  Description of Artificial Sequence: Synthetic oligonucleotide
  Sense strand starting at position 3193 of SEQ ID NO: 916606
augagacucuugguaguuu

SEQ ID NO: 1169887 - RNA, 19 nt, Artificial Sequence
  Description of Artificial Sequence: Synthetic oligonucleotide
  Antisense strand to SEQ ID NO: 1169886
aaacuaccaagagucucau

SEQ ID NO: 1169888 - RNA, 19 nt, Artificial Sequence
  Description of Artificial Sequence: Synthetic oligonucleotide
  Sense strand starting at position 3296 of SEQ ID NO: 916606
aagauaucuugaguaauug

SEQ ID NO: 1169889 - RNA, 19 nt, Artificial Sequence
  Description of Artificial Sequence: Synthetic oligonucleotide
  Antisense strand to SEQ ID NO: 1169888
caauuacucaagauaucuu

SEQ ID NO: 1169890 - RNA, 19 nt, Artificial Sequence
  Description of Artificial Sequence: Synthetic oligonucleotide
  Sense strand starting at position 3297 of SEQ ID NO: 916606
agauaucuugaguaauugu

SEQ ID NO: 1169891 - RNA, 19 nt, Artificial Sequence
  Description of Artificial Sequence: Synthetic oligonucleotide
  Antisense strand to SEQ ID NO: 1169890
acaauuacucaagauaucu

SEQ ID NO: 1169892 - RNA, 19 nt, Artificial Sequence
  Description of Artificial Sequence: Synthetic oligonucleotide
  Sense strand starting at position 3367 of SEQ ID NO: 916606
ggcugauauagcugaaacu

SEQ ID NO: 1169893 - RNA, 19 nt, Artificial Sequence
  Description of Artificial Sequence: Synthetic oligonucleotide
  Antisense strand to SEQ ID NO: 1169892
aguuucagcuauaucagcc

SEQ ID NO: 1169894 - RNA, 19 nt, Artificial Sequence
  Description of Artificial Sequence: Synthetic oligonucleotide
  Sense strand starting at position 3504 of SEQ ID NO: 916606
auuagucuuucugugaaac

SEQ ID NO: 1169895 - RNA, 19 nt, Artificial Sequence
  Description of Artificial Sequence: Synthetic oligonucleotide
  Antisense strand to SEQ ID NO: 1169894
guuucacagaaagacuaau

SEQ ID NO: 1169896 - RNA, 19 nt, Artificial Sequence
  Description of Artificial Sequence: Synthetic oligonucleotide
  Sense strand starting at position 3544 of SEQ ID NO: 916606
auucuaaacucuguuagug

SEQ ID NO: 1169897 - RNA, 19 nt, Artificial Sequence
  Description of Artificial Sequence: Synthetic oligonucleotide
  Antisense strand to SEQ ID NO: 1169896
cacuaacagaguuuagaau

SEQ ID NO: 1169898 - RNA, 19 nt, Artificial Sequence
  Description of Artificial Sequence: Synthetic oligonucleotide
  Sense strand starting at position 3569 of SEQ ID NO: 916606
uguguuauucuggaguuau

SEQ ID NO: 1169899 - RNA, 19 nt, Artificial Sequence
  Description of Artificial Sequence: Synthetic oligonucleotide
  Antisense strand to SEQ ID NO: 1169898
auaacuccagaauaacaca

SEQ ID NO: 1169900 - RNA, 19 nt, Artificial Sequence
  Description of Artificial Sequence: Synthetic oligonucleotide
  Sense strand starting at position 3632 of SEQ ID NO: 916606
ucuugaucuuuauugugau

SEQ ID NO: 1169901 - RNA, 19 nt, Artificial Sequence
  Description of Artificial Sequence: Synthetic oligonucleotide
  Antisense strand to SEQ ID NO: 1169900
aucacaauaaagaucaaga

SEQ ID NO: 1169902 - RNA, 19 nt, Artificial Sequence
  Description of Artificial Sequence: Synthetic oligonucleotide
  Sense strand starting at position 3639 of SEQ ID NO: 916606
cuuuauugugaugaguuaa

SEQ ID NO: 1169903 - RNA, 19 nt, Artificial Sequence
  Description of Artificial Sequence: Synthetic oligonucleotide
  Antisense strand to SEQ ID NO: 1169902
uuaacucaucacaauaaag

SEQ ID NO: 1169904 - RNA, 19 nt, Artificial Sequence
  Description of Artificial Sequence: Synthetic oligonucleotide
  Sense strand starting at position 3707 of SEQ ID NO: 916606
gaaauuguauacuucugga

SEQ ID NO: 1169905 - RNA, 19 nt, Artificial Sequence
  Description of Artificial Sequence: Synthetic oligonucleotide
  Antisense strand to SEQ ID NO: 1169904
uccagaaguauacaauuuc

SEQ ID NO: 1169906 - RNA, 19 nt, Artificial Sequence
  Description of Artificial Sequence: Synthetic oligonucleotide
  Sense strand starting at position 3715 of SEQ ID NO: 916606
auacuucuggacuguuaua

SEQ ID NO: 1169907 - RNA, 19 nt, Artificial Sequence
  Description of Artificial Sequence: Synthetic oligonucleotide
  Antisense strand to SEQ ID NO: 1169906
uauaacaguccagaaguau

SEQ ID NO: 1169908 - RNA, 19 nt, Artificial Sequence
  Description of Artificial Sequence: Synthetic oligonucleotide
  Sense strand starting at position 3821 of SEQ ID NO: 916606
uuugaaaucccuggaguaa

SEQ ID NO: 1169909 - RNA, 19 nt, Artificial Sequence
  Description of Artificial Sequence: Synthetic oligonucleotide
  Antisense strand to SEQ ID NO: 1169908
uuacuccagggauuucaaa

SEQ ID NO: 1169910 - RNA, 19 nt, Artificial Sequence
  Description of Artificial Sequence: Synthetic oligonucleotide
  Sense strand starting at position 3866 of SEQ ID NO: 916606
gcauuuauagauuguguug

SEQ ID NO: 1169911 - RNA, 19 nt, Artificial Sequence
  Description of Artificial Sequence: Synthetic oligonucleotide
  Antisense strand to SEQ ID NO: 1169910
caacacaaucuauaaaugc

SEQ ID NO: 1169912 - RNA, 19 nt, Artificial Sequence
  Description of Artificial Sequence: Synthetic oligonucleotide
  Sense strand starting at position 3877 of SEQ ID NO: 916606
uuguguugguuuauggagu

SEQ ID NO: 1169913 - RNA, 19 nt, Artificial Sequence
  Description of Artificial Sequence: Synthetic oligonucleotide
  Antisense strand to SEQ ID NO: 1169912
acuccauaaaccaacacaa

SEQ ID NO: 1169914 - RNA, 19 nt, Artificial Sequence
  Description of Artificial Sequence: Synthetic oligonucleotide
  Sense strand starting at position 107 of SEQ ID NO: 916607
aguuaccuuccauguggua

SEQ ID NO: 1169915 - RNA, 19 nt, Artificial Sequence
  Description of Artificial Sequence: Synthetic oligonucleotide
  Antisense strand to SEQ ID NO: 1169914
uaccacauggaagguaacu

SEQ ID NO: 1169916 - RNA, 19 nt, Artificial Sequence
  Description of Artificial Sequence: Synthetic oligonucleotide
  Sense strand starting at position 164 of SEQ ID NO: 916607
accaguccuuugucugaca

SEQ ID NO: 1169917 - RNA, 19 nt, Artificial Sequence
  Description of Artificial Sequence: Synthetic oligonucleotide
  Antisense strand to SEQ ID NO: 1169916
ugucagacaaaggacuggu

SEQ ID NO: 1169918 - RNA, 19 nt, Artificial Sequence
  Description of Artificial Sequence: Synthetic oligonucleotide
  Sense strand starting at position 165 of SEQ ID NO: 916607
ccaguccuuugucugacaa

SEQ ID NO: 1169919 - RNA, 19 nt, Artificial Sequence
  Description of Artificial Sequence: Synthetic oligonucleotide
  Antisense strand to SEQ ID NO: 1169918
uugucagacaaaggacugg

SEQ ID NO: 1169920 - RNA, 19 nt, Artificial Sequence
  Description of Artificial Sequence: Synthetic oligonucleotide
  Sense strand starting at position 352 of SEQ ID NO: 916607
uucugugacuuggagagau

SEQ ID NO: 1169921 - RNA, 19 nt, Artificial Sequence
  Description of Artificial Sequence: Synthetic oligonucleotide
  Antisense strand to SEQ ID NO: 1169920
aucucuccaagucacagaa

SEQ ID NO: 1169922 - RNA, 19 nt, Artificial Sequence
  Description of Artificial Sequence: Synthetic oligonucleotide
  Sense strand starting at position 465 of SEQ ID NO: 916607
uaugguaucccugaagcaa

SEQ ID NO: 1169923 - RNA, 19 nt, Artificial Sequence
  Description of Artificial Sequence: Synthetic oligonucleotide
  Antisense strand to SEQ ID NO: 1169922
uugcuucagggauaccaua

SEQ ID NO: 1169924 - RNA, 19 nt, Artificial Sequence
  Description of Artificial Sequence: Synthetic oligonucleotide
  Sense strand starting at position 593 of SEQ ID NO: 916607
cuuugaccucauggaguuu

SEQ ID NO: 1169925 - RNA, 19 nt, Artificial Sequence
  Description of Artificial Sequence: Synthetic oligonucleotide
  Antisense strand to SEQ ID NO: 1169924
aaacuccaugaggucaaag

SEQ ID NO: 1169926 - RNA, 19 nt, Artificial Sequence
  Description of Artificial Sequence: Synthetic oligonucleotide
  Sense strand starting at position 866 of SEQ ID NO: 916607
gcaggauucuuugcuucuu

SEQ ID NO: 1169927 - RNA, 19 nt, Artificial Sequence
  Description of Artificial Sequence: Synthetic oligonucleotide
  Antisense strand to SEQ ID NO: 1169926
aagaagcaaagaauccugc

SEQ ID NO: 1169928 - RNA, 19 nt, Artificial Sequence
  Description of Artificial Sequence: Synthetic oligonucleotide
  Sense strand starting at position 883 of SEQ ID NO: 916607
uuuccuguccguguaaucu

SEQ ID NO: 1169929 - RNA, 19 nt, Artificial Sequence
  Description of Artificial Sequence: Synthetic oligonucleotide
  Antisense strand to SEQ ID NO: 1169928
agauuacacggacaggaaa

SEQ ID NO: 1169930 - RNA, 19 nt, Artificial Sequence
  Description of Artificial Sequence: Synthetic oligonucleotide
  Sense strand starting at position 893 of SEQ ID NO: 916607
guguaaucugucuacuccu

SEQ ID NO: 1169931 - RNA, 19 nt, Artificial Sequence
  Description of Artificial Sequence: Synthetic oligonucleotide
  Antisense strand to SEQ ID NO: 1169930
aggaguagacagauuacac

SEQ ID NO: 1169932 - RNA, 19 nt, Artificial Sequence
  Description of Artificial Sequence: Synthetic oligonucleotide
  Sense strand starting at position 965 of SEQ ID NO: 916607
acuccaguucuuggaugaa

SEQ ID NO: 1169933 - RNA, 19 nt, Artificial Sequence
  Description of Artificial Sequence: Synthetic oligonucleotide
  Antisense strand to SEQ ID NO: 1169932
uucauccaagaacuggagu

SEQ ID NO: 1169934 - RNA, 19 nt, Artificial Sequence
  Description of Artificial Sequence: Synthetic oligonucleotide
  Sense strand starting at position 1196 of SEQ ID NO: 916607
gaagauuggcucugggaaa

SEQ ID NO: 1169935 - RNA, 19 nt, Artificial Sequence
  Description of Artificial Sequence: Synthetic oligonucleotide
  Antisense strand to SEQ ID NO: 1169934
uuucccagagccaaucuuc

SEQ ID NO: 1169936 - RNA, 19 nt, Artificial Sequence
  Description of Artificial Sequence: Synthetic oligonucleotide
  Sense strand starting at position 1393 of SEQ ID NO: 916607
ggguguuucgaucauaaac

SEQ ID NO: 1169937 - RNA, 19 nt, Artificial Sequence
  Description of Artificial Sequence: Synthetic oligonucleotide
  Antisense strand to SEQ ID NO: 1169936
guuuaugaucgaaacaccc

SEQ ID NO: 1169938 - RNA, 19 nt, Artificial Sequence
  Description of Artificial Sequence: Synthetic oligonucleotide
  Sense strand starting at position 1984 of SEQ ID NO: 916607
cuguccgugauuggucaga

SEQ ID NO: 1169939 - RNA, 19 nt, Artificial Sequence
  Description of Artificial Sequence: Synthetic oligonucleotide
  Antisense strand to SEQ ID NO: 1169938
ucugaccaaucacggacag

SEQ ID NO: 1169940 - RNA, 19 nt, Artificial Sequence
  Description of Artificial Sequence: Synthetic oligonucleotide
  Sense strand starting at position 1986 of SEQ ID NO: 916607
guccgugauuggucagaga

SEQ ID NO: 1169941 - RNA, 19 nt, Artificial Sequence
  Description of Artificial Sequence: Synthetic oligonucleotide
  Antisense strand to SEQ ID NO: 1169940
ucucugaccaaucacggac

SEQ ID NO: 1169942 - RNA, 19 nt, Artificial Sequence
  Description of Artificial Sequence: Synthetic oligonucleotide
  Sense strand starting at position 2008 of SEQ ID NO: 916607
gccaaucaucgacaagauc

SEQ ID NO: 1169943 - RNA, 19 nt, Artificial Sequence
  Description of Artificial Sequence: Synthetic oligonucleotide
  Antisense strand to SEQ ID NO: 1169942
gaucuugucgaugauuggc

SEQ ID NO: 1169944 - RNA, 19 nt, Artificial Sequence
  Description of Artificial Sequence: Synthetic oligonucleotide
  Sense strand starting at position 2047 of SEQ ID NO: 916607
auuucagaggcguggucua

SEQ ID NO: 1169945 - RNA, 19 nt, Artificial Sequence
  Description of Artificial Sequence: Synthetic oligonucleotide
  Antisense strand to SEQ ID NO: 1169944
uagaccacgccucugaaau

SEQ ID NO: 1169946 - RNA, 19 nt, Artificial Sequence
  Description of Artificial Sequence: Synthetic oligonucleotide
  Sense strand starting at position 2107 of SEQ ID NO: 916607
cugucaugcgcaucucauu

SEQ ID NO: 1169947 - RNA, 19 nt, Artificial Sequence
  Description of Artificial Sequence: Synthetic oligonucleotide
  Antisense strand to SEQ ID NO: 1169946
aaugagaugcgcaugacag

SEQ ID NO: 1169948 - RNA, 19 nt, Artificial Sequence
  Description of Artificial Sequence: Synthetic oligonucleotide
  Sense strand starting at position 2168 of SEQ ID NO: 916607
ggcggaguauugaggcaga

SEQ ID NO: 1169949 - RNA, 19 nt, Artificial Sequence
  Description of Artificial Sequence: Synthetic oligonucleotide
  Antisense strand to SEQ ID NO: 1169948
ucugccucaauacuccgcc

SEQ ID NO: 1169950 - RNA, 19 nt, Artificial Sequence
  Description of Artificial Sequence: Synthetic oligonucleotide
  Sense strand starting at position 2173 of SEQ ID NO: 916607
aguauugaggcagauaggu

SEQ ID NO: 1169951 - RNA, 19 nt, Artificial Sequence
  Description of Artificial Sequence: Synthetic oligonucleotide
  Antisense strand to SEQ ID NO: 1169950
accuaucugccucaauacu

SEQ ID NO: 1169952 - RNA, 19 nt, Artificial Sequence
  Description of Artificial Sequence: Synthetic oligonucleotide
  Sense strand starting at position 2204 of SEQ ID NO: 916607
gccggugaaaguuauuaaa

SEQ ID NO: 1169953 - RNA, 19 nt, Artificial Sequence
  Description of Artificial Sequence: Synthetic oligonucleotide
  Antisense strand to SEQ ID NO: 1169952
uuuaauaacuuucaccggc

SEQ ID NO: 1169954 - RNA, 19 nt, Artificial Sequence
  Description of Artificial Sequence: Synthetic oligonucleotide
  Sense strand starting at position 2206 of SEQ ID NO: 916607
cggugaaaguuauuaaaug

SEQ ID NO: 1169955 - RNA, 19 nt, Artificial Sequence
  Description of Artificial Sequence: Synthetic oligonucleotide
  Antisense strand to SEQ ID NO: 1169954
cauuuaauaacuuucaccg

SEQ ID NO: 1169956 - RNA, 19 nt, Artificial Sequence
  Description of Artificial Sequence: Synthetic oligonucleotide
  Sense strand starting at position 2215 of SEQ ID NO: 916607
uuauuaaaugcuuguugca

SEQ ID NO: 1169957 - RNA, 19 nt, Artificial Sequence
  Description of Artificial Sequence: Synthetic oligonucleotide
  Antisense strand to SEQ ID NO: 1169956
ugcaacaagcauuuaauaa

SEQ ID NO: 1169958 - RNA, 19 nt, Artificial Sequence
  Description of Artificial Sequence: Synthetic oligonucleotide
  Sense strand starting at position 2276 of SEQ ID NO: 916607
uacauauugcuuugaggca

SEQ ID NO: 1169959 - RNA, 19 nt, Artificial Sequence
  Description of Artificial Sequence: Synthetic oligonucleotide
  Antisense strand to SEQ ID NO: 1169958
ugccucaaagcaauaugua

SEQ ID NO: 1169960 - RNA, 19 nt, Artificial Sequence
  Description of Artificial Sequence: Synthetic oligonucleotide
  Sense strand starting at position 2333 of SEQ ID NO: 916607
gcaguugaccuccaguaaa

SEQ ID NO: 1169961 - RNA, 19 nt, Artificial Sequence
  Description of Artificial Sequence: Synthetic oligonucleotide
  Antisense strand to SEQ ID NO: 1169960
uuuacuggaggucaacugc

SEQ ID NO: 1169962 - RNA, 19 nt, Artificial Sequence
  Description of Artificial Sequence: Synthetic oligonucleotide
  Sense strand starting at position 2504 of SEQ ID NO: 916607
ucaaauaaguacguacaua

SEQ ID NO: 1169963 - RNA, 19 nt, Artificial Sequence
  Description of Artificial Sequence: Synthetic oligonucleotide
  Antisense strand to SEQ ID NO: 1169962
uauguacguacuuauuuga

SEQ ID NO: 1169964 - RNA, 19 nt, Artificial Sequence
  Description of Artificial Sequence: Synthetic oligonucleotide
  Sense strand starting at position 2583 of SEQ ID NO: 916607
aggugaaauuauguauuac

SEQ ID NO: 1169965 - RNA, 19 nt, Artificial Sequence
  Description of Artificial Sequence: Synthetic oligonucleotide
  Antisense strand to SEQ ID NO: 1169964
guaauacauaauuucaccu

SEQ ID NO: 1169966 - RNA, 19 nt, Artificial Sequence
  Description of Artificial Sequence: Synthetic oligonucleotide
  Sense strand starting at position 2601 of SEQ ID NO: 916607
cucuccaggccguaagaaa

SEQ ID NO: 1169967 - RNA, 19 nt, Artificial Sequence
  Description of Artificial Sequence: Synthetic oligonucleotide
  Antisense strand to SEQ ID NO: 1169966
uuucuuacggccuggagag

SEQ ID NO: 1169968 - RNA, 19 nt, Artificial Sequence
  Description of Artificial Sequence: Synthetic oligonucleotide
  Sense strand starting at position 2668 of SEQ ID NO: 916607
gaagaauguuaacugguuu

SEQ ID NO: 1169969 - RNA, 19 nt, Artificial Sequence
  Description of Artificial Sequence: Synthetic oligonucleotide
  Antisense strand to SEQ ID NO: 1169968
aaaccaguuaacauucuuc

SEQ ID NO: 1169970 - RNA, 19 nt, Artificial Sequence
  Description of Artificial Sequence: Synthetic oligonucleotide
  Sense strand starting at position 2672 of SEQ ID NO: 916607
aauguuaacugguuuagca

SEQ ID NO: 1169971 - RNA, 19 nt, Artificial Sequence
  Description of Artificial Sequence: Synthetic oligonucleotide
  Antisense strand to SEQ ID NO: 1169970
ugcuaaaccaguuaacauu

SEQ ID NO: 1169972 - RNA, 19 nt, Artificial Sequence
  Description of Artificial Sequence: Synthetic oligonucleotide
  Sense strand starting at position 2674 of SEQ ID NO: 916607
uguuaacugguuuagcaaa

SEQ ID NO: 1169973 - RNA, 19 nt, Artificial Sequence
  Description of Artificial Sequence: Synthetic oligonucleotide
  Antisense strand to SEQ ID NO: 1169972
uuugcuaaaccaguuaaca

SEQ ID NO: 1169974 - RNA, 19 nt, Artificial Sequence
  Description of Artificial Sequence: Synthetic oligonucleotide
  Sense strand starting at position 2730 of SEQ ID NO: 916607
ggcugauuauaccuuugga

SEQ ID NO: 1169975 - RNA, 19 nt, Artificial Sequence
  Description of Artificial Sequence: Synthetic oligonucleotide
  Antisense strand to SEQ ID NO: 1169974
uccaaagguauaaucagcc

SEQ ID NO: 1169976 - RNA, 19 nt, Artificial Sequence
  Description of Artificial Sequence: Synthetic oligonucleotide
  Sense strand starting at position 3427 of SEQ ID NO: 916607
gaaacuacuugagaguaac

SEQ ID NO: 1169977 - RNA, 19 nt, Artificial Sequence
  Description of Artificial Sequence: Synthetic oligonucleotide
  Antisense strand to SEQ ID NO: 1169976
guuacucucaaguaguuuc

SEQ ID NO: 1169978 - RNA, 19 nt, Artificial Sequence
  Description of Artificial Sequence: Synthetic oligonucleotide
  Sense strand starting at position 3433 of SEQ ID NO: 916607
acuugagaguaacuacuau

SEQ ID NO: 1169979 - RNA, 19 nt, Artificial Sequence
  Description of Artificial Sequence: Synthetic oligonucleotide
  Antisense strand to SEQ ID NO: 1169978
auaguaguuacucucaagu

SEQ ID NO: 1169980 - RNA, 19 nt, Artificial Sequence
  Description of Artificial Sequence: Synthetic oligonucleotide
  Sense strand starting at position 3440 of SEQ ID NO: 916607
aguaacuacuauucggaua

SEQ ID NO: 1169981 - RNA, 19 nt, Artificial Sequence
  Description of Artificial Sequence: Synthetic oligonucleotide
  Antisense strand to SEQ ID NO: 1169980
uauccgaauaguaguuacu

SEQ ID NO: 1169982 - RNA, 19 nt, Artificial Sequence
  Description of Artificial Sequence: Synthetic oligonucleotide
  Sense strand starting at position 3445 of SEQ ID NO: 916607
cuacuauucggauaagcaa

SEQ ID NO: 1169983 - RNA, 19 nt, Artificial Sequence
  Description of Artificial Sequence: Synthetic oligonucleotide
  Antisense strand to SEQ ID NO: 1169982
uugcuuauccgaauaguag

SEQ ID NO: 1169984 - RNA, 19 nt, Artificial Sequence
  Description of Artificial Sequence: Synthetic oligonucleotide
  Sense strand starting at position 3547 of SEQ ID NO: 916607
uuuguucugcuuuaggaga

SEQ ID NO: 1169985 - RNA, 19 nt, Artificial Sequence
  Description of Artificial Sequence: Synthetic oligonucleotide
  Antisense strand to SEQ ID NO: 1169984
ucuccuaaagcagaacaaa

SEQ ID NO: 1169986 - RNA, 19 nt, Artificial Sequence
  Description of Artificial Sequence: Synthetic oligonucleotide
  Sense strand starting at position 3618 of SEQ ID NO: 916607
aaauuagaguuccagaaag

SEQ ID NO: 1169987 - RNA, 19 nt, Artificial Sequence
  Description of Artificial Sequence: Synthetic oligonucleotide
  Antisense strand to SEQ ID NO: 1169986
cuuucuggaacucuaauuu

SEQ ID NO: 1169988 - RNA, 19 nt, Artificial Sequence
  Description of Artificial Sequence: Synthetic oligonucleotide
  Sense strand starting at position 3769 of SEQ ID NO: 916607
auuauagaaucucagagua

SEQ ID NO: 1169989 - RNA, 19 nt, Artificial Sequence
  Description of Artificial Sequence: Synthetic oligonucleotide
  Antisense strand to SEQ ID NO: 1169988
uacucugagauucuauaau

SEQ ID NO: 1169990 - RNA, 19 nt, Artificial Sequence
  Description of Artificial Sequence: Synthetic oligonucleotide
  Sense strand starting at position 3877 of SEQ ID NO: 916607
uguuguugcuuuguuaaua

SEQ ID NO: 1169991 - RNA, 19 nt, Artificial Sequence
  Description of Artificial Sequence: Synthetic oligonucleotide
  Antisense strand to SEQ ID NO: 1169990
uauuaacaaagcaacaaca

SEQ ID NO: 1169992 - RNA, 19 nt, Artificial Sequence
  Description of Artificial Sequence: Synthetic oligonucleotide
  Sense strand starting at position 3912 of SEQ ID NO: 916607
guauaacauuaggauuaag

SEQ ID NO: 1169993 - RNA, 19 nt, Artificial Sequence
  Description of Artificial Sequence: Synthetic oligonucleotide
  Antisense strand to SEQ ID NO: 1169992
cuuaauccuaauguuauac

SEQ ID NO: 1169994 - RNA, 19 nt, Artificial Sequence
  Description of Artificial Sequence: Synthetic oligonucleotide
  Sense strand starting at position 176 of SEQ ID NO: 916608
uguucaaacgguugacaug

SEQ ID NO: 1169995 - RNA, 19 nt, Artificial Sequence
  Description of Artificial Sequence: Synthetic oligonucleotide
  Antisense strand to SEQ ID NO: 1169994
caugucaaccguuugaaca

SEQ ID NO: 1169996 - RNA, 19 nt, Artificial Sequence
  Description of Artificial Sequence: Synthetic oligonucleotide
  Sense strand starting at position 191 of SEQ ID NO: 916608
cauggaaugugaccgcaau

SEQ ID NO: 1169997 - RNA, 19 nt, Artificial Sequence
  Description of Artificial Sequence: Synthetic oligonucleotide
  Antisense strand to SEQ ID NO: 1169996
auugcggucacauuccaug

SEQ ID NO: 1169998 - RNA, 19 nt, Artificial Sequence
  Description of Artificial Sequence: Synthetic oligonucleotide
  Sense strand starting at position 192 of SEQ ID NO: 916608
auggaaugugaccgcaaua

SEQ ID NO: 1169999 - RNA, 19 nt, Artificial Sequence
  Description of Artificial Sequence: Synthetic oligonucleotide
  Antisense strand to SEQ ID NO: 1169998
uauugcggucacauuccau

SEQ ID NO: 1170000 - RNA, 19 nt, Artificial Sequence
  Description of Artificial Sequence: Synthetic oligonucleotide
  Sense strand starting at position 300 of SEQ ID NO: 916608
uccauacacgguuaauauu

SEQ ID NO: 1170001 - RNA, 19 nt, Artificial Sequence
  Description of Artificial Sequence: Synthetic oligonucleotide
  Antisense strand to SEQ ID NO: 1170000
aauauuaaccguguaugga

SEQ ID NO: 1170002 - RNA, 19 nt, Artificial Sequence
  Description of Artificial Sequence: Synthetic oligonucleotide
  Sense strand starting at position 457 of SEQ ID NO: 916608
gguucuagcaagcauagaa

SEQ ID NO: 1170003 - RNA, 19 nt, Artificial Sequence
  Description of Artificial Sequence: Synthetic oligonucleotide
  Antisense strand to SEQ ID NO: 1170002
uucuaugcuugcuagaacc

SEQ ID NO: 1170004 - RNA, 19 nt, Artificial Sequence
  Description of Artificial Sequence: Synthetic oligonucleotide
  Sense strand starting at position 510 of SEQ ID NO: 916608
augaaacucuaggaaauua

SEQ ID NO: 1170005 - RNA, 19 nt, Artificial Sequence
  Description of Artificial Sequence: Synthetic oligonucleotide
  Antisense strand to SEQ ID NO: 1170004
uaauuuccuagaguuucau

SEQ ID NO: 1170006 - RNA, 19 nt, Artificial Sequence
  Description of Artificial Sequence: Synthetic oligonucleotide
  Sense strand starting at position 794 of SEQ ID NO: 916608
uguccaaguuaccuauuau

SEQ ID NO: 1170007 - RNA, 19 nt, Artificial Sequence
  Description of Artificial Sequence: Synthetic oligonucleotide
  Antisense strand to SEQ ID NO: 1170006
auaauagguaacuuggaca

SEQ ID NO: 1170008 - RNA, 19 nt, Artificial Sequence
  Description of Artificial Sequence: Synthetic oligonucleotide
  Sense strand starting at position 865 of SEQ ID NO: 916608
gugucucauaaagaagagu

SEQ ID NO: 1170009 - RNA, 19 nt, Artificial Sequence
  Description of Artificial Sequence: Synthetic oligonucleotide
  Antisense strand to SEQ ID NO: 1170008
acucuucuuuaugagacac

SEQ ID NO: 1170010 - RNA, 19 nt, Artificial Sequence
  Description of Artificial Sequence: Synthetic oligonucleotide
  Sense strand starting at position 979 of SEQ ID NO: 916608
cugugaagcuccuuggaac

SEQ ID NO: 1170011 - RNA, 19 nt, Artificial Sequence
  Description of Artificial Sequence: Synthetic oligonucleotide
  Antisense strand to SEQ ID NO: 1170010
guuccaaggagcuucacag

SEQ ID NO: 1170012 - RNA, 19 nt, Artificial Sequence
  Description of Artificial Sequence: Synthetic oligonucleotide
  Sense strand starting at position 1006 of SEQ ID NO: 916608
acucuugagagagggcuua

SEQ ID NO: 1170013 - RNA, 19 nt, Artificial Sequence
  Description of Artificial Sequence: Synthetic oligonucleotide
  Antisense strand to SEQ ID NO: 1170012
uaagcccucucucaagagu

SEQ ID NO: 1170014 - RNA, 19 nt, Artificial Sequence
  Description of Artificial Sequence: Synthetic oligonucleotide
  Sense strand starting at position 1121 of SEQ ID NO: 916608
ugucgcuuggcucugcaaa

SEQ ID NO: 1170015 - RNA, 19 nt, Artificial Sequence
  Description of Artificial Sequence: Synthetic oligonucleotide
  Antisense strand to SEQ ID NO: 1170014
uuugcagagccaagcgaca

SEQ ID NO: 1170016 - RNA, 19 nt, Artificial Sequence
  Description of Artificial Sequence: Synthetic oligonucleotide
  Sense strand starting at position 2154 of SEQ ID NO: 916608
guguuaucgccagccaguc

SEQ ID NO: 1170017 - RNA, 19 nt, Artificial Sequence
  Description of Artificial Sequence: Synthetic oligonucleotide
  Antisense strand to SEQ ID NO: 1170016
gacuggcuggcgauaacac

SEQ ID NO: 1170018 - RNA, 19 nt, Artificial Sequence
  Description of Artificial Sequence: Synthetic oligonucleotide
  Sense strand starting at position 2354 of SEQ ID NO: 916608
uggugaaagcuuuagcgaa

SEQ ID NO: 1170019 - RNA, 19 nt, Artificial Sequence
  Description of Artificial Sequence: Synthetic oligonucleotide
  Antisense strand to SEQ ID NO: 1170018
uucgcuaaagcuuucacca

SEQ ID NO: 1170020 - RNA, 19 nt, Artificial Sequence
  Description of Artificial Sequence: Synthetic oligonucleotide
  Sense strand starting at position 2398 of SEQ ID NO: 916608
uagaguguauggccuaaga

SEQ ID NO: 1170021 - RNA, 19 nt, Artificial Sequence
  Description of Artificial Sequence: Synthetic oligonucleotide
  Antisense strand to SEQ ID NO: 1170020
ucuuaggccauacacucua

SEQ ID NO: 1170022 - RNA, 19 nt, Artificial Sequence
  Description of Artificial Sequence: Synthetic oligonucleotide
  Sense strand starting at position 2400 of SEQ ID NO: 916608
gaguguauggccuaagaag

SEQ ID NO: 1170023 - RNA, 19 nt, Artificial Sequence
  Description of Artificial Sequence: Synthetic oligonucleotide
  Antisense strand to SEQ ID NO: 1170022
cuucuuaggccauacacuc

SEQ ID NO: 1170024 - RNA, 19 nt, Artificial Sequence
  Description of Artificial Sequence: Synthetic oligonucleotide
  Sense strand starting at position 2411 of SEQ ID NO: 916608
cuaagaagcauucgguaac

SEQ ID NO: 1170025 - RNA, 19 nt, Artificial Sequence
  Description of Artificial Sequence: Synthetic oligonucleotide
  Antisense strand to SEQ ID NO: 1170024
guuaccgaaugcuucuuag

SEQ ID NO: 1170026 - RNA, 19 nt, Artificial Sequence
  Description of Artificial Sequence: Synthetic oligonucleotide
  Sense strand starting at position 2414 of SEQ ID NO: 916608
agaagcauucgguaacuaa

SEQ ID NO: 1170027 - RNA, 19 nt, Artificial Sequence
  Description of Artificial Sequence: Synthetic oligonucleotide
  Antisense strand to SEQ ID NO: 1170026
uuaguuaccgaaugcuucu

SEQ ID NO: 1170028 - RNA, 19 nt, Artificial Sequence
  Description of Artificial Sequence: Synthetic oligonucleotide
  Sense strand starting at position 2417 of SEQ ID NO: 916608
agcauucgguaacuaaacu

SEQ ID NO: 1170029 - RNA, 19 nt, Artificial Sequence
  Description of Artificial Sequence: Synthetic oligonucleotide
  Antisense strand to SEQ ID NO: 1170028
aguuuaguuaccgaaugcu

SEQ ID NO: 1170030 - RNA, 19 nt, Artificial Sequence
  Description of Artificial Sequence: Synthetic oligonucleotide
  Sense strand starting at position 2436 of SEQ ID NO: 916608
acuuguuccuauuucuagu

SEQ ID NO: 1170031 - RNA, 19 nt, Artificial Sequence
  Description of Artificial Sequence: Synthetic oligonucleotide
  Antisense strand to SEQ ID NO: 1170030
acuagaaauaggaacaagu

SEQ ID NO: 1170032 - RNA, 19 nt, Artificial Sequence
  Description of Artificial Sequence: Synthetic oligonucleotide
  Sense strand starting at position 2457 of SEQ ID NO: 916608
cacauuaaccguggcauuu

SEQ ID NO: 1170033 - RNA, 19 nt, Artificial Sequence
  Description of Artificial Sequence: Synthetic oligonucleotide
  Antisense strand to SEQ ID NO: 1170032
aaaugccacgguuaaugug

SEQ ID NO: 1170034 - RNA, 19 nt, Artificial Sequence
  Description of Artificial Sequence: Synthetic oligonucleotide
  Sense strand starting at position 2482 of SEQ ID NO: 916608
cugcuuuccucauuagagg

SEQ ID NO: 1170035 - RNA, 19 nt, Artificial Sequence
  Description of Artificial Sequence: Synthetic oligonucleotide
  Antisense strand to SEQ ID NO: 1170034
ccucuaaugaggaaagcag

SEQ ID NO: 1170036 - RNA, 19 nt, Artificial Sequence
  Description of Artificial Sequence: Synthetic oligonucleotide
  Sense strand starting at position 2483 of SEQ ID NO: 916608
ugcuuuccucauuagaggu

SEQ ID NO: 1170037 - RNA, 19 nt, Artificial Sequence
  Description of Artificial Sequence: Synthetic oligonucleotide
  Antisense strand to SEQ ID NO: 1170036
accucuaaugaggaaagca

SEQ ID NO: 1170038 - RNA, 19 nt, Artificial Sequence
  Description of Artificial Sequence: Synthetic oligonucleotide
  Sense strand starting at position 2530 of SEQ ID NO: 916608
ucaaucaugcugggaugaa

SEQ ID NO: 1170039 - RNA, 19 nt, Artificial Sequence
  Description of Artificial Sequence: Synthetic oligonucleotide
  Antisense strand to SEQ ID NO: 1170038
uucaucccagcaugauuga

SEQ ID NO: 1170040 - RNA, 19 nt, Artificial Sequence
  Description of Artificial Sequence: Synthetic oligonucleotide
  Sense strand starting at position 2668 of SEQ ID NO: 916608
uugacaguuuguuccauuu

SEQ ID NO: 1170041 - RNA, 19 nt, Artificial Sequence
  Description of Artificial Sequence: Synthetic oligonucleotide
  Antisense strand to SEQ ID NO: 1170040
aaauggaacaaacugucaa

SEQ ID NO: 1170042 - RNA, 19 nt, Artificial Sequence
  Description of Artificial Sequence: Synthetic oligonucleotide
  Sense strand starting at position 2892 of SEQ ID NO: 916608
ugagaaagcuuucuguaau

SEQ ID NO: 1170043 - RNA, 19 nt, Artificial Sequence
  Description of Artificial Sequence: Synthetic oligonucleotide
  Antisense strand to SEQ ID NO: 1170042
auuacagaaagcuuucuca

SEQ ID NO: 1170044 - RNA, 19 nt, Artificial Sequence
  Description of Artificial Sequence: Synthetic oligonucleotide
  Sense strand starting at position 2939 of SEQ ID NO: 916608
ccuuguagcccagaacuaa

SEQ ID NO: 1170045 - RNA, 19 nt, Artificial Sequence
  Description of Artificial Sequence: Synthetic oligonucleotide
  Antisense strand to SEQ ID NO: 1170044
uuaguucugggcuacaagg

SEQ ID NO: 1170046 - RNA, 19 nt, Artificial Sequence
  Description of Artificial Sequence: Synthetic oligonucleotide
  Sense strand starting at position 3019 of SEQ ID NO: 916608
uucugauaagcuggauaca

SEQ ID NO: 1170047 - RNA, 19 nt, Artificial Sequence
  Description of Artificial Sequence: Synthetic oligonucleotide
  Antisense strand to SEQ ID NO: 1170046
uguauccagcuuaucagaa

SEQ ID NO: 1170048 - RNA, 19 nt, Artificial Sequence
  Description of Artificial Sequence: Synthetic oligonucleotide
  Sense strand starting at position 3053 of SEQ ID NO: 916608
aauagaguuuggccuauau

SEQ ID NO: 1170049 - RNA, 19 nt, Artificial Sequence
  Description of Artificial Sequence: Synthetic oligonucleotide
  Antisense strand to SEQ ID NO: 1170048
auauaggccaaacucuauu

SEQ ID NO: 1170050 - RNA, 19 nt, Artificial Sequence
  Description of Artificial Sequence: Synthetic oligonucleotide
  Sense strand starting at position 3055 of SEQ ID NO: 916608
uagaguuuggccuauauaa

SEQ ID NO: 1170051 - RNA, 19 nt, Artificial Sequence
  Description of Artificial Sequence: Synthetic oligonucleotide
  Antisense strand to SEQ ID NO: 1170050
uuauauaggccaaacucua

SEQ ID NO: 1170052 - RNA, 19 nt, Artificial Sequence
  Description of Artificial Sequence: Synthetic oligonucleotide
  Sense strand starting at position 3057 of SEQ ID NO: 916608
gaguuuggccuauauaauu

SEQ ID NO: 1170053 - RNA, 19 nt, Artificial Sequence
  Description of Artificial Sequence: Synthetic oligonucleotide
  Antisense strand to SEQ ID NO: 1170052
aauuauauaggccaaacuc

SEQ ID NO: 1170054 - RNA, 19 nt, Artificial Sequence
  Description of Artificial Sequence: Synthetic oligonucleotide
  Sense strand starting at position 3542 of SEQ ID NO: 916608
gucagaaacaacgagucuu

SEQ ID NO: 1170055 - RNA, 19 nt, Artificial Sequence
  Description of Artificial Sequence: Synthetic oligonucleotide
  Antisense strand to SEQ ID NO: 1170054
aagacucguuguuucugac

SEQ ID NO: 1170056 - RNA, 19 nt, Artificial Sequence
  Description of Artificial Sequence: Synthetic oligonucleotide
  Sense strand starting at position 3556 of SEQ ID NO: 916608
gucuuagaaucucugagau

SEQ ID NO: 1170057 - RNA, 19 nt, Artificial Sequence
  Description of Artificial Sequence: Synthetic oligonucleotide
  Antisense strand to SEQ ID NO: 1170056
aucucagagauucuaagac

SEQ ID NO: 1170058 - RNA, 19 nt, Artificial Sequence
  Description of Artificial Sequence: Synthetic oligonucleotide
  Sense strand starting at position 3710 of SEQ ID NO: 916608
uguucugaagccugagaga

SEQ ID NO: 1170059 - RNA, 19 nt, Artificial Sequence
  Description of Artificial Sequence: Synthetic oligonucleotide
  Antisense strand to SEQ ID NO: 1170058
ucucucaggcuucagaaca

SEQ ID NO: 1170060 - RNA, 19 nt, Artificial Sequence
  Description of Artificial Sequence: Synthetic oligonucleotide
  Sense strand starting at position 3736 of SEQ ID NO: 916608
acaaauaaaugugaaggaa

SEQ ID NO: 1170061 - RNA, 19 nt, Artificial Sequence
  Description of Artificial Sequence: Synthetic oligonucleotide
  Antisense strand to SEQ ID NO: 1170060
uuccuucacauuuauuugu

SEQ ID NO: 1170062 - RNA, 19 nt, Artificial Sequence
  Description of Artificial Sequence: Synthetic oligonucleotide
  Sense strand starting at position 3748 of SEQ ID NO: 916608
gaaggaaguuuauuauucu

SEQ ID NO: 1170063 - RNA, 19 nt, Artificial Sequence
  Description of Artificial Sequence: Synthetic oligonucleotide
  Antisense strand to SEQ ID NO: 1170062
agaauaauaaacuuccuuc

SEQ ID NO: 1170064 - RNA, 19 nt, Artificial Sequence
  Description of Artificial Sequence: Synthetic oligonucleotide
  Sense strand starting at position 3752 of SEQ ID NO: 916608
gaaguuuauuauucuguga

SEQ ID NO: 1170065 - RNA, 19 nt, Artificial Sequence
  Description of Artificial Sequence: Synthetic oligonucleotide
  Antisense strand to SEQ ID NO: 1170064
ucacagaauaauaaacuuc

SEQ ID NO: 1170066 - RNA, 19 nt, Artificial Sequence
  Description of Artificial Sequence: Synthetic oligonucleotide
  Sense strand starting at position 3755 of SEQ ID NO: 916608
guuuauuauucugugacau

SEQ ID NO: 1170067 - RNA, 19 nt, Artificial Sequence
  Description of Artificial Sequence: Synthetic oligonucleotide
  Antisense strand to SEQ ID NO: 1170066
augucacagaauaauaaac

SEQ ID NO: 1170068 - RNA, 19 nt, Artificial Sequence
  Description of Artificial Sequence: Synthetic oligonucleotide
  Sense strand starting at position 3811 of SEQ ID NO: 916608
agauuaacuugucuccugu

SEQ ID NO: 1170069 - RNA, 19 nt, Artificial Sequence
  Description of Artificial Sequence: Synthetic oligonucleotide
  Antisense strand to SEQ ID NO: 1170068
acaggagacaaguuaaucu

SEQ ID NO: 1170070 - RNA, 19 nt, Artificial Sequence
  Description of Artificial Sequence: Synthetic oligonucleotide
  Sense strand starting at position 3884 of SEQ ID NO: 916608
ugaaauaggcuaggaugua

SEQ ID NO: 1170071 - RNA, 19 nt, Artificial Sequence
  Description of Artificial Sequence: Synthetic oligonucleotide
  Antisense strand to SEQ ID NO: 1170070
uacauccuagccuauuuca

SEQ ID NO: 1170072 - RNA, 19 nt, Artificial Sequence
  Description of Artificial Sequence: Synthetic oligonucleotide
  Sense strand starting at position 3923 of SEQ ID NO: 916608
gugcauaaugucuaguaag

SEQ ID NO: 1170073 - RNA, 19 nt, Artificial Sequence
  Description of Artificial Sequence: Synthetic oligonucleotide
  Antisense strand to SEQ ID NO: 1170072
cuuacuagacauuaugcac

SEQ ID NO: 1170074 - RNA, 19 nt, Artificial Sequence
  Description of Artificial Sequence: Synthetic oligonucleotide
  Sense strand starting at position 945 of SEQ ID NO: 916609
gaugguguuggacaaguua

SEQ ID NO: 1170075 - RNA, 19 nt, Artificial Sequence
  Description of Artificial Sequence: Synthetic oligonucleotide
  Antisense strand to SEQ ID NO: 1170074
uaacuuguccaacaccauc

SEQ ID NO: 1170076 - RNA, 19 nt, Artificial Sequence
  Description of Artificial Sequence: Synthetic oligonucleotide
  Sense strand starting at position 952 of SEQ ID NO: 916609
uuggacaaguuaucugcaa

SEQ ID NO: 1170077 - RNA, 19 nt, Artificial Sequence
  Description of Artificial Sequence: Synthetic oligonucleotide
  Antisense strand to SEQ ID NO: 1170076
uugcagauaacuuguccaa

SEQ ID NO: 1170078 - RNA, 19 nt, Artificial Sequence
  Description of Artificial Sequence: Synthetic oligonucleotide
  Sense strand starting at position 953 of SEQ ID NO: 916609
uggacaaguuaucugcaaa

SEQ ID NO: 1170079 - RNA, 19 nt, Artificial Sequence
  Description of Artificial Sequence: Synthetic oligonucleotide
  Antisense strand to SEQ ID NO: 1170078
uuugcagauaacuugucca

SEQ ID NO: 1170080 - RNA, 19 nt, Artificial Sequence
  Description of Artificial Sequence: Synthetic oligonucleotide
  Sense strand starting at position 954 of SEQ ID NO: 916609
ggacaaguuaucugcaaag

SEQ ID NO: 1170081 - RNA, 19 nt, Artificial Sequence
  Description of Artificial Sequence: Synthetic oligonucleotide
  Antisense strand to SEQ ID NO: 1170080
cuuugcagauaacuugucc

SEQ ID NO: 1170082 - RNA, 19 nt, Artificial Sequence
  Description of Artificial Sequence: Synthetic oligonucleotide
  Sense strand starting at position 956 of SEQ ID NO: 916609
acaaguuaucugcaaaguc

SEQ ID NO: 1170083 - RNA, 19 nt, Artificial Sequence
  Description of Artificial Sequence: Synthetic oligonucleotide
  Antisense strand to SEQ ID NO: 1170082
gacuuugcagauaacuugu

SEQ ID NO: 1170084 - RNA, 19 nt, Artificial Sequence
  Description of Artificial Sequence: Synthetic oligonucleotide
  Sense strand starting at position 983 of SEQ ID NO: 916609
ucucaagauucugugacau

SEQ ID NO: 1170085 - RNA, 19 nt, Artificial Sequence
  Description of Artificial Sequence: Synthetic oligonucleotide
  Antisense strand to SEQ ID NO: 1170084
augucacagaaucuugaga

SEQ ID NO: 1170086 - RNA, 19 nt, Artificial Sequence
  Description of Artificial Sequence: Synthetic oligonucleotide
  Sense strand starting at position 1183 of SEQ ID NO: 916609
ugauaaagugcuuaucuau

SEQ ID NO: 1170087 - RNA, 19 nt, Artificial Sequence
  Description of Artificial Sequence: Synthetic oligonucleotide
  Antisense strand to SEQ ID NO: 1170086
auagauaagcacuuuauca

SEQ ID NO: 1170088 - RNA, 19 nt, Artificial Sequence
  Description of Artificial Sequence: Synthetic oligonucleotide
  Sense strand starting at position 1289 of SEQ ID NO: 916609
uaguuauggaacuggguga

SEQ ID NO: 1170089 - RNA, 19 nt, Artificial Sequence
  Description of Artificial Sequence: Synthetic oligonucleotide
  Antisense strand to SEQ ID NO: 1170088
ucacccaguuccauaacua

SEQ ID NO: 1170090 - RNA, 19 nt, Artificial Sequence
  Description of Artificial Sequence: Synthetic oligonucleotide
  Sense strand starting at position 1310 of SEQ ID NO: 916609
gcacgugaagguguguuau

SEQ ID NO: 1170091 - RNA, 19 nt, Artificial Sequence
  Description of Artificial Sequence: Synthetic oligonucleotide
  Antisense strand to SEQ ID NO: 1170090
auaacacaccuucacgugc

SEQ ID NO: 1170092 - RNA, 19 nt, Artificial Sequence
  Description of Artificial Sequence: Synthetic oligonucleotide
  Sense strand starting at position 1313 of SEQ ID NO: 916609
cgugaagguguguuauguc

SEQ ID NO: 1170093 - RNA, 19 nt, Artificial Sequence
  Description of Artificial Sequence: Synthetic oligonucleotide
  Antisense strand to SEQ ID NO: 1170092
gacauaacacaccuucacg

SEQ ID NO: 1170094 - RNA, 19 nt, Artificial Sequence
  Description of Artificial Sequence: Synthetic oligonucleotide
  Sense strand starting at position 1809 of SEQ ID NO: 916609
aggugaucugaguaucauu

SEQ ID NO: 1170095 - RNA, 19 nt, Artificial Sequence
  Description of Artificial Sequence: Synthetic oligonucleotide
  Antisense strand to SEQ ID NO: 1170094
aaugauacucagaucaccu

SEQ ID NO: 1170096 - RNA, 19 nt, Artificial Sequence
  Description of Artificial Sequence: Synthetic oligonucleotide
  Sense strand starting at position 2053 of SEQ ID NO: 916609
ccaaauugauggucuuuau

SEQ ID NO: 1170097 - RNA, 19 nt, Artificial Sequence
  Description of Artificial Sequence: Synthetic oligonucleotide
  Antisense strand to SEQ ID NO: 1170096
auaaagaccaucaauuugg

SEQ ID NO: 1170098 - RNA, 19 nt, Artificial Sequence
  Description of Artificial Sequence: Synthetic oligonucleotide
  Sense strand starting at position 2057 of SEQ ID NO: 916609
auugauggucuuuauuaug

SEQ ID NO: 1170099 - RNA, 19 nt, Artificial Sequence
  Description of Artificial Sequence: Synthetic oligonucleotide
  Antisense strand to SEQ ID NO: 1170098
cauaauaaagaccaucaau

SEQ ID NO: 1170100 - RNA, 19 nt, Artificial Sequence
  Description of Artificial Sequence: Synthetic oligonucleotide
  Sense strand starting at position 2081 of SEQ ID NO: 916609
aucuuagaaguaugcauau

SEQ ID NO: 1170101 - RNA, 19 nt, Artificial Sequence
  Description of Artificial Sequence: Synthetic oligonucleotide
  Antisense strand to SEQ ID NO: 1170100
auaugcauacuucuaagau

SEQ ID NO: 1170102 - RNA, 19 nt, Artificial Sequence
  Description of Artificial Sequence: Synthetic oligonucleotide
  Sense strand starting at position 2093 of SEQ ID NO: 916609
ugcauauuuguaggguacu

SEQ ID NO: 1170103 - RNA, 19 nt, Artificial Sequence
  Description of Artificial Sequence: Synthetic oligonucleotide
  Antisense strand to SEQ ID NO: 1170102
aguacccuacaaauaugca

SEQ ID NO: 1170104 - RNA, 19 nt, Artificial Sequence
  Description of Artificial Sequence: Synthetic oligonucleotide
  Sense strand starting at position 2099 of SEQ ID NO: 916609
uuuguaggguacucaaauu

SEQ ID NO: 1170105 - RNA, 19 nt, Artificial Sequence
  Description of Artificial Sequence: Synthetic oligonucleotide
  Antisense strand to SEQ ID NO: 1170104
aauuugaguacccuacaaa

SEQ ID NO: 1170106 - RNA, 19 nt, Artificial Sequence
  Description of Artificial Sequence: Synthetic oligonucleotide
  Sense strand starting at position 2221 of SEQ ID NO: 916609
ugagucucucauuagugau

SEQ ID NO: 1170107 - RNA, 19 nt, Artificial Sequence
  Description of Artificial Sequence: Synthetic oligonucleotide
  Antisense strand to SEQ ID NO: 1170106
aucacuaaugagagacuca

SEQ ID NO: 1170108 - RNA, 19 nt, Artificial Sequence
  Description of Artificial Sequence: Synthetic oligonucleotide
  Sense strand starting at position 2365 of SEQ ID NO: 916609
uugauaucuccugaagcca

SEQ ID NO: 1170109 - RNA, 19 nt, Artificial Sequence
  Description of Artificial Sequence: Synthetic oligonucleotide
  Antisense strand to SEQ ID NO: 1170108
uggcuucaggagauaucaa

SEQ ID NO: 1170110 - RNA, 19 nt, Artificial Sequence
  Description of Artificial Sequence: Synthetic oligonucleotide
  Sense strand starting at position 2400 of SEQ ID NO: 916609
uuccuaaugguugaucuaa

SEQ ID NO: 1170111 - RNA, 19 nt, Artificial Sequence
  Description of Artificial Sequence: Synthetic oligonucleotide
  Antisense strand to SEQ ID NO: 1170110
uuagaucaaccauuaggaa

SEQ ID NO: 1170112 - RNA, 19 nt, Artificial Sequence
  Description of Artificial Sequence: Synthetic oligonucleotide
  Sense strand starting at position 2402 of SEQ ID NO: 916609
ccuaaugguugaucuaauc

SEQ ID NO: 1170113 - RNA, 19 nt, Artificial Sequence
  Description of Artificial Sequence: Synthetic oligonucleotide
  Antisense strand to SEQ ID NO: 1170112
gauuagaucaaccauuagg

SEQ ID NO: 1170114 - RNA, 19 nt, Artificial Sequence
  Description of Artificial Sequence: Synthetic oligonucleotide
  Sense strand starting at position 2485 of SEQ ID NO: 916609
cugucaaucuuuccuagga

SEQ ID NO: 1170115 - RNA, 19 nt, Artificial Sequence
  Description of Artificial Sequence: Synthetic oligonucleotide
  Antisense strand to SEQ ID NO: 1170114
uccuaggaaagauugacag

SEQ ID NO: 1170116 - RNA, 19 nt, Artificial Sequence
  Description of Artificial Sequence: Synthetic oligonucleotide
  Sense strand starting at position 2503 of SEQ ID NO: 916609
augucuacauguucuugaa

SEQ ID NO: 1170117 - RNA, 19 nt, Artificial Sequence
  Description of Artificial Sequence: Synthetic oligonucleotide
  Antisense strand to SEQ ID NO: 1170116
uucaagaacauguagacau

SEQ ID NO: 1170118 - RNA, 19 nt, Artificial Sequence
  Description of Artificial Sequence: Synthetic oligonucleotide
  Sense strand starting at position 2505 of SEQ ID NO: 916609
gucuacauguucuugaaua

SEQ ID NO: 1170119 - RNA, 19 nt, Artificial Sequence
  Description of Artificial Sequence: Synthetic oligonucleotide
  Antisense strand to SEQ ID NO: 1170118
uauucaagaacauguagac

SEQ ID NO: 1170120 - RNA, 19 nt, Artificial Sequence
  Description of Artificial Sequence: Synthetic oligonucleotide
  Sense strand starting at position 2583 of SEQ ID NO: 916609
gucccauuacaguauaguu

SEQ ID NO: 1170121 - RNA, 19 nt, Artificial Sequence
  Description of Artificial Sequence: Synthetic oligonucleotide
  Antisense strand to SEQ ID NO: 1170120
aacuauacuguaaugggac

SEQ ID NO: 1170122 - RNA, 19 nt, Artificial Sequence
  Description of Artificial Sequence: Synthetic oligonucleotide
  Sense strand starting at position 2585 of SEQ ID NO: 916609
cccauuacaguauaguuua

SEQ ID NO: 1170123 - RNA, 19 nt, Artificial Sequence
  Description of Artificial Sequence: Synthetic oligonucleotide
  Antisense strand to SEQ ID NO: 1170122
uaaacuauacuguaauggg

SEQ ID NO: 1170124 - RNA, 19 nt, Artificial Sequence
  Description of Artificial Sequence: Synthetic oligonucleotide
  Sense strand starting at position 2593 of SEQ ID NO: 916609
aguauaguuuaacuugaca

SEQ ID NO: 1170125 - RNA, 19 nt, Artificial Sequence
  Description of Artificial Sequence: Synthetic oligonucleotide
  Antisense strand to SEQ ID NO: 1170124
ugucaaguuaaacuauacu

SEQ ID NO: 1170126 - RNA, 19 nt, Artificial Sequence
  Description of Artificial Sequence: Synthetic oligonucleotide
  Sense strand starting at position 2596 of SEQ ID NO: 916609
auaguuuaacuugacaugu

SEQ ID NO: 1170127 - RNA, 19 nt, Artificial Sequence
  Description of Artificial Sequence: Synthetic oligonucleotide
  Antisense strand to SEQ ID NO: 1170126
acaugucaaguuaaacuau

SEQ ID NO: 1170128 - RNA, 19 nt, Artificial Sequence
  Description of Artificial Sequence: Synthetic oligonucleotide
  Sense strand starting at position 2832 of SEQ ID NO: 916609
gggauugacugcuuacauu

SEQ ID NO: 1170129 - RNA, 19 nt, Artificial Sequence
  Description of Artificial Sequence: Synthetic oligonucleotide
  Antisense strand to SEQ ID NO: 1170128
aauguaagcagucaauccc

SEQ ID NO: 1170130 - RNA, 19 nt, Artificial Sequence
  Description of Artificial Sequence: Synthetic oligonucleotide
  Sense strand starting at position 2843 of SEQ ID NO: 916609
cuuacauuggcaugagaaa

SEQ ID NO: 1170131 - RNA, 19 nt, Artificial Sequence
  Description of Artificial Sequence: Synthetic oligonucleotide
  Antisense strand to SEQ ID NO: 1170130
uuucucaugccaauguaag

SEQ ID NO: 1170132 - RNA, 19 nt, Artificial Sequence
  Description of Artificial Sequence: Synthetic oligonucleotide
  Sense strand starting at position 2951 of SEQ ID NO: 916609
agcagaucccaugaguuaa

SEQ ID NO: 1170133 - RNA, 19 nt, Artificial Sequence
  Description of Artificial Sequence: Synthetic oligonucleotide
  Antisense strand to SEQ ID NO: 1170132
uuaacucaugggaucugcu

SEQ ID NO: 1170134 - RNA, 19 nt, Artificial Sequence
  Description of Artificial Sequence: Synthetic oligonucleotide
  Sense strand starting at position 3151 of SEQ ID NO: 916609
uguuacaugguccaacauu

SEQ ID NO: 1170135 - RNA, 19 nt, Artificial Sequence
  Description of Artificial Sequence: Synthetic oligonucleotide
  Antisense strand to SEQ ID NO: 1170134
aauguuggaccauguaaca

SEQ ID NO: 1170136 - RNA, 19 nt, Artificial Sequence
  Description of Artificial Sequence: Synthetic oligonucleotide
  Sense strand starting at position 3244 of SEQ ID NO: 916609
cuuuccauugccgaaauaa

SEQ ID NO: 1170137 - RNA, 19 nt, Artificial Sequence
  Description of Artificial Sequence: Synthetic oligonucleotide
  Antisense strand to SEQ ID NO: 1170136
uuauuucggcaauggaaag

SEQ ID NO: 1170138 - RNA, 19 nt, Artificial Sequence
  Description of Artificial Sequence: Synthetic oligonucleotide
  Sense strand starting at position 3264 of SEQ ID NO: 916609
agcuaauuccaugagccaa

SEQ ID NO: 1170139 - RNA, 19 nt, Artificial Sequence
  Description of Artificial Sequence: Synthetic oligonucleotide
  Antisense strand to SEQ ID NO: 1170138
uuggcucauggaauuagcu

SEQ ID NO: 1170140 - RNA, 19 nt, Artificial Sequence
  Description of Artificial Sequence: Synthetic oligonucleotide
  Sense strand starting at position 3282 of SEQ ID NO: 916609
acagauguuugucuauaaa

SEQ ID NO: 1170141 - RNA, 19 nt, Artificial Sequence
  Description of Artificial Sequence: Synthetic oligonucleotide
  Antisense strand to SEQ ID NO: 1170140
uuuauagacaaacaucugu

SEQ ID NO: 1170142 - RNA, 19 nt, Artificial Sequence
  Description of Artificial Sequence: Synthetic oligonucleotide
  Sense strand starting at position 3619 of SEQ ID NO: 916609
ucuuaagaauaugugacua

SEQ ID NO: 1170143 - RNA, 19 nt, Artificial Sequence
  Description of Artificial Sequence: Synthetic oligonucleotide
  Antisense strand to SEQ ID NO: 1170142
uagucacauauucuuaaga

SEQ ID NO: 1170144 - RNA, 19 nt, Artificial Sequence
  Description of Artificial Sequence: Synthetic oligonucleotide
  Sense strand starting at position 3660 of SEQ ID NO: 916609
guugaaaucuguuuagaag

SEQ ID NO: 1170145 - RNA, 19 nt, Artificial Sequence
  Description of Artificial Sequence: Synthetic oligonucleotide
  Antisense strand to SEQ ID NO: 1170144
cuucuaaacagauuucaac

SEQ ID NO: 1170146 - RNA, 19 nt, Artificial Sequence
  Description of Artificial Sequence: Synthetic oligonucleotide
  Sense strand starting at position 3716 of SEQ ID NO: 916609
gaauuaguuuaugcagaau

SEQ ID NO: 1170147 - RNA, 19 nt, Artificial Sequence
  Description of Artificial Sequence: Synthetic oligonucleotide
  Antisense strand to SEQ ID NO: 1170146
auucugcauaaacuaauuc

SEQ ID NO: 1170148 - RNA, 19 nt, Artificial Sequence
  Description of Artificial Sequence: Synthetic oligonucleotide
  Sense strand starting at position 3719 of SEQ ID NO: 916609
uuaguuuaugcagaauguu

SEQ ID NO: 1170149 - RNA, 19 nt, Artificial Sequence
  Description of Artificial Sequence: Synthetic oligonucleotide
  Antisense strand to SEQ ID NO: 1170148
aacauucugcauaaacuaa

SEQ ID NO: 1170150 - RNA, 19 nt, Artificial Sequence
  Description of Artificial Sequence: Synthetic oligonucleotide
  Sense strand starting at position 3725 of SEQ ID NO: 916609
uaugcagaauguuuauuga

SEQ ID NO: 1170151 - RNA, 19 nt, Artificial Sequence
  Description of Artificial Sequence: Synthetic oligonucleotide
  Antisense strand to SEQ ID NO: 1170150
ucaauaaacauucugcaua

SEQ ID NO: 1170152 - RNA, 19 nt, Artificial Sequence
  Description of Artificial Sequence: Synthetic oligonucleotide
  Sense strand starting at position 3728 of SEQ ID NO: 916609
gcagaauguuuauugacuu

SEQ ID NO: 1170153 - RNA, 19 nt, Artificial Sequence
  Description of Artificial Sequence: Synthetic oligonucleotide
  Antisense strand to SEQ ID NO: 1170152
aagucaauaaacauucugc

SEQ ID NO: 1170154 - RNA, 19 nt, Artificial Sequence
  Description of Artificial Sequence: Synthetic oligonucleotide
  Sense strand starting at position 133 of SEQ ID NO: 916610
uuuguaauuucugcaguuu

SEQ ID NO: 1170155 - RNA, 19 nt, Artificial Sequence
  Description of Artificial Sequence: Synthetic oligonucleotide
  Antisense strand to SEQ ID NO: 1170154
aaacugcagaaauuacaaa

SEQ ID NO: 1170156 - RNA, 19 nt, Artificial Sequence
  Description of Artificial Sequence: Synthetic oligonucleotide
  Sense strand starting at position 221 of SEQ ID NO: 916610
gcuuuauuacaguaaguaa

SEQ ID NO: 1170157 - RNA, 19 nt, Artificial Sequence
  Description of Artificial Sequence: Synthetic oligonucleotide
  Antisense strand to SEQ ID NO: 1170156
uuacuuacuguaauaaagc

SEQ ID NO: 1170158 - RNA, 19 nt, Artificial Sequence
  Description of Artificial Sequence: Synthetic oligonucleotide
  Sense strand starting at position 274 of SEQ ID NO: 916610
uauagaugaugucugggau

SEQ ID NO: 1170159 - RNA, 19 nt, Artificial Sequence
  Description of Artificial Sequence: Synthetic oligonucleotide
  Antisense strand to SEQ ID NO: 1170158
aucccagacaucaucuaua

SEQ ID NO: 1170160 - RNA, 19 nt, Artificial Sequence
  Description of Artificial Sequence: Synthetic oligonucleotide
  Sense strand starting at position 275 of SEQ ID NO: 916610
auagaugaugucugggauu

SEQ ID NO: 1170161 - RNA, 19 nt, Artificial Sequence
  Description of Artificial Sequence: Synthetic oligonucleotide
  Antisense strand to SEQ ID NO: 1170160
aaucccagacaucaucuau

SEQ ID NO: 1170162 - RNA, 19 nt, Artificial Sequence
  Description of Artificial Sequence: Synthetic oligonucleotide
  Sense strand starting at position 277 of SEQ ID NO: 916610
agaugaugucugggauugu

SEQ ID NO: 1170163 - RNA, 19 nt, Artificial Sequence
  Description of Artificial Sequence: Synthetic oligonucleotide
  Antisense strand to SEQ ID NO: 1170162
acaaucccagacaucaucu

SEQ ID NO: 1170164 - RNA, 19 nt, Artificial Sequence
  Description of Artificial Sequence: Synthetic oligonucleotide
  Sense strand starting at position 281 of SEQ ID NO: 916610
gaugucugggauuguuuaa

SEQ ID NO: 1170165 - RNA, 19 nt, Artificial Sequence
  Description of Artificial Sequence: Synthetic oligonucleotide
  Antisense strand to SEQ ID NO: 1170164
uuaaacaaucccagacauc

SEQ ID NO: 1170166 - RNA, 19 nt, Artificial Sequence
  Description of Artificial Sequence: Synthetic oligonucleotide
  Sense strand starting at position 337 of SEQ ID NO: 916610
acacacauuucugggaauc

SEQ ID NO: 1170167 - RNA, 19 nt, Artificial Sequence
  Description of Artificial Sequence: Synthetic oligonucleotide
  Antisense strand to SEQ ID NO: 1170166
gauucccagaaaugugugu

SEQ ID NO: 1170168 - RNA, 19 nt, Artificial Sequence
  Description of Artificial Sequence: Synthetic oligonucleotide
  Sense strand starting at position 339 of SEQ ID NO: 916610
acacauuucugggaaucag

SEQ ID NO: 1170169 - RNA, 19 nt, Artificial Sequence
  Description of Artificial Sequence: Synthetic oligonucleotide
  Antisense strand to SEQ ID NO: 1170168
cugauucccagaaaugugu

SEQ ID NO: 1170170 - RNA, 19 nt, Artificial Sequence
  Description of Artificial Sequence: Synthetic oligonucleotide
  Sense strand starting at position 444 of SEQ ID NO: 916610
ucgcauagccaggaaucaa

SEQ ID NO: 1170171 - RNA, 19 nt, Artificial Sequence
  Description of Artificial Sequence: Synthetic oligonucleotide
  Antisense strand to SEQ ID NO: 1170170
uugauuccuggcuaugcga

SEQ ID NO: 1170172 - RNA, 19 nt, Artificial Sequence
  Description of Artificial Sequence: Synthetic oligonucleotide
  Sense strand starting at position 532 of SEQ ID NO: 916610
cccgaucuucuugaaucaa

SEQ ID NO: 1170173 - RNA, 19 nt, Artificial Sequence
  Description of Artificial Sequence: Synthetic oligonucleotide
  Antisense strand to SEQ ID NO: 1170172
uugauucaagaagaucggg

SEQ ID NO: 1170174 - RNA, 19 nt, Artificial Sequence
  Description of Artificial Sequence: Synthetic oligonucleotide
  Sense strand starting at position 562 of SEQ ID NO: 916610
agaaguggugcucaucuga

SEQ ID NO: 1170175 - RNA, 19 nt, Artificial Sequence
  Description of Artificial Sequence: Synthetic oligonucleotide
  Antisense strand to SEQ ID NO: 1170174
ucagaugagcaccacuucu

SEQ ID NO: 1170176 - RNA, 19 nt, Artificial Sequence
  Description of Artificial Sequence: Synthetic oligonucleotide
  Sense strand starting at position 640 of SEQ ID NO: 916610
auguaucuccaucggaaac

SEQ ID NO: 1170177 - RNA, 19 nt, Artificial Sequence
  Description of Artificial Sequence: Synthetic oligonucleotide
  Antisense strand to SEQ ID NO: 1170176
guuuccgauggagauacau

SEQ ID NO: 1170178 - RNA, 19 nt, Artificial Sequence
  Description of Artificial Sequence: Synthetic oligonucleotide
  Sense strand starting at position 703 of SEQ ID NO: 916610
ccgacauaaauuggauagu

SEQ ID NO: 1170179 - RNA, 19 nt, Artificial Sequence
  Description of Artificial Sequence: Synthetic oligonucleotide
  Antisense strand to SEQ ID NO: 1170178
acuauccaauuuaugucgg

SEQ ID NO: 1170180 - RNA, 19 nt, Artificial Sequence
  Description of Artificial Sequence: Synthetic oligonucleotide
  Sense strand starting at position 720 of SEQ ID NO: 916610
guaagauaguuccuacgaa

SEQ ID NO: 1170181 - RNA, 19 nt, Artificial Sequence
  Description of Artificial Sequence: Synthetic oligonucleotide
  Antisense strand to SEQ ID NO: 1170180
uucguaggaacuaucuuac

SEQ ID NO: 1170182 - RNA, 19 nt, Artificial Sequence
  Description of Artificial Sequence: Synthetic oligonucleotide
  Sense strand starting at position 843 of SEQ ID NO: 916610
agaaaucaaugccuuuguu

SEQ ID NO: 1170183 - RNA, 19 nt, Artificial Sequence
  Description of Artificial Sequence: Synthetic oligonucleotide
  Antisense strand to SEQ ID NO: 1170182
aacaaaggcauugauuucu

SEQ ID NO: 1170184 - RNA, 19 nt, Artificial Sequence
  Description of Artificial Sequence: Synthetic oligonucleotide
  Sense strand starting at position 1254 of SEQ ID NO: 916610
gggcuuacucugggaagau

SEQ ID NO: 1170185 - RNA, 19 nt, Artificial Sequence
  Description of Artificial Sequence: Synthetic oligonucleotide
  Antisense strand to SEQ ID NO: 1170184
aucuucccagaguaagccc

SEQ ID NO: 1170186 - RNA, 19 nt, Artificial Sequence
  Description of Artificial Sequence: Synthetic oligonucleotide
  Sense strand starting at position 1273 of SEQ ID NO: 916610
gcaaauuuagguuguguua

SEQ ID NO: 1170187 - RNA, 19 nt, Artificial Sequence
  Description of Artificial Sequence: Synthetic oligonucleotide
  Antisense strand to SEQ ID NO: 1170186
uaacacaaccuaaauuugc

SEQ ID NO: 1170188 - RNA, 19 nt, Artificial Sequence
  Description of Artificial Sequence: Synthetic oligonucleotide
  Sense strand starting at position 1282 of SEQ ID NO: 916610
gguuguguuaaagauacca

SEQ ID NO: 1170189 - RNA, 19 nt, Artificial Sequence
  Description of Artificial Sequence: Synthetic oligonucleotide
  Antisense strand to SEQ ID NO: 1170188
ugguaucuuuaacacaacc

SEQ ID NO: 1170190 - RNA, 19 nt, Artificial Sequence
  Description of Artificial Sequence: Synthetic oligonucleotide
  Sense strand starting at position 1647 of SEQ ID NO: 916610
aguuacuucuacuugguua

SEQ ID NO: 1170191 - RNA, 19 nt, Artificial Sequence
  Description of Artificial Sequence: Synthetic oligonucleotide
  Antisense strand to SEQ ID NO: 1170190
uaaccaaguagaaguaacu

SEQ ID NO: 1170192 - RNA, 19 nt, Artificial Sequence
  Description of Artificial Sequence: Synthetic oligonucleotide
  Sense strand starting at position 1663 of SEQ ID NO: 916610
uuagguuuccuuggaggag

SEQ ID NO: 1170193 - RNA, 19 nt, Artificial Sequence
  Description of Artificial Sequence: Synthetic oligonucleotide
  Antisense strand to SEQ ID NO: 1170192
cuccuccaaggaaaccuaa

SEQ ID NO: 1170194 - RNA, 19 nt, Artificial Sequence
  Description of Artificial Sequence: Synthetic oligonucleotide
  Sense strand starting at position 1675 of SEQ ID NO: 916610
ggaggaggcuccuuaguac

SEQ ID NO: 1170195 - RNA, 19 nt, Artificial Sequence
  Description of Artificial Sequence: Synthetic oligonucleotide
  Antisense strand to SEQ ID NO: 1170194
guacuaaggagccuccucc

SEQ ID NO: 1170196 - RNA, 19 nt, Artificial Sequence
  Description of Artificial Sequence: Synthetic oligonucleotide
  Sense strand starting at position 2145 of SEQ ID NO: 916610
ucacgaucauuugaucauu

SEQ ID NO: 1170197 - RNA, 19 nt, Artificial Sequence
  Description of Artificial Sequence: Synthetic oligonucleotide
  Antisense strand to SEQ ID NO: 1170196
aaugaucaaaugaucguga

SEQ ID NO: 1170198 - RNA, 19 nt, Artificial Sequence
  Description of Artificial Sequence: Synthetic oligonucleotide
  Sense strand starting at position 2322 of SEQ ID NO: 916610
acgcuuagcccugcgaauu

SEQ ID NO: 1170199 - RNA, 19 nt, Artificial Sequence
  Description of Artificial Sequence: Synthetic oligonucleotide
  Antisense strand to SEQ ID NO: 1170198
aauucgcagggcuaagcgu

SEQ ID NO: 1170200 - RNA, 19 nt, Artificial Sequence
  Description of Artificial Sequence: Synthetic oligonucleotide
  Sense strand starting at position 2429 of SEQ ID NO: 916610
ucaggaagcuuaguacaau

SEQ ID NO: 1170201 - RNA, 19 nt, Artificial Sequence
  Description of Artificial Sequence: Synthetic oligonucleotide
  Antisense strand to SEQ ID NO: 1170200
auuguacuaagcuuccuga

SEQ ID NO: 1170202 - RNA, 19 nt, Artificial Sequence
  Description of Artificial Sequence: Synthetic oligonucleotide
  Sense strand starting at position 2432 of SEQ ID NO: 916610
ggaagcuuaguacaauacu

SEQ ID NO: 1170203 - RNA, 19 nt, Artificial Sequence
  Description of Artificial Sequence: Synthetic oligonucleotide
  Antisense strand to SEQ ID NO: 1170202
aguauuguacuaagcuucc

SEQ ID NO: 1170204 - RNA, 19 nt, Artificial Sequence
  Description of Artificial Sequence: Synthetic oligonucleotide
  Sense strand starting at position 2496 of SEQ ID NO: 916610
aagagugaauaggaaagau

SEQ ID NO: 1170205 - RNA, 19 nt, Artificial Sequence
  Description of Artificial Sequence: Synthetic oligonucleotide
  Antisense strand to SEQ ID NO: 1170204
aucuuuccuauucacucuu

SEQ ID NO: 1170206 - RNA, 19 nt, Artificial Sequence
  Description of Artificial Sequence: Synthetic oligonucleotide
  Sense strand starting at position 2545 of SEQ ID NO: 916610
gcaguacuguccuccauuu

SEQ ID NO: 1170207 - RNA, 19 nt, Artificial Sequence
  Description of Artificial Sequence: Synthetic oligonucleotide
  Antisense strand to SEQ ID NO: 1170206
aaauggaggacaguacugc

SEQ ID NO: 1170208 - RNA, 19 nt, Artificial Sequence
  Description of Artificial Sequence: Synthetic oligonucleotide
  Sense strand starting at position 2895 of SEQ ID NO: 916610
gggagaugagcagguagau

SEQ ID NO: 1170209 - RNA, 19 nt, Artificial Sequence
  Description of Artificial Sequence: Synthetic oligonucleotide
  Antisense strand to SEQ ID NO: 1170208
aucuaccugcucaucuccc

SEQ ID NO: 1170210 - RNA, 19 nt, Artificial Sequence
  Description of Artificial Sequence: Synthetic oligonucleotide
  Sense strand starting at position 2983 of SEQ ID NO: 916610
gacaaugaccucugugacu

SEQ ID NO: 1170211 - RNA, 19 nt, Artificial Sequence
  Description of Artificial Sequence: Synthetic oligonucleotide
  Antisense strand to SEQ ID NO: 1170210
agucacagaggucauuguc

SEQ ID NO: 1170212 - RNA, 19 nt, Artificial Sequence
  Description of Artificial Sequence: Synthetic oligonucleotide
  Sense strand starting at position 3057 of SEQ ID NO: 916610
gaaugaugccugucgcugu

SEQ ID NO: 1170213 - RNA, 19 nt, Artificial Sequence
  Description of Artificial Sequence: Synthetic oligonucleotide
  Antisense strand to SEQ ID NO: 1170212
acagcgacaggcaucauuc

SEQ ID NO: 1170214 - RNA, 19 nt, Artificial Sequence
  Description of Artificial Sequence: Synthetic oligonucleotide
  Sense strand starting at position 3068 of SEQ ID NO: 916610
gucgcuguggcaucuucaa

SEQ ID NO: 1170215 - RNA, 19 nt, Artificial Sequence
  Description of Artificial Sequence: Synthetic oligonucleotide
  Antisense strand to SEQ ID NO: 1170214
uugaagaugccacagcgac

SEQ ID NO: 1170216 - RNA, 19 nt, Artificial Sequence
  Description of Artificial Sequence: Synthetic oligonucleotide
  Sense strand starting at position 3149 of SEQ ID NO: 916610
uucugucaucaccaauagu

SEQ ID NO: 1170217 - RNA, 19 nt, Artificial Sequence
  Description of Artificial Sequence: Synthetic oligonucleotide
  Antisense strand to SEQ ID NO: 1170216
acuauuggugaugacagaa

SEQ ID NO: 1170218 - RNA, 19 nt, Artificial Sequence
  Description of Artificial Sequence: Synthetic oligonucleotide
  Sense strand starting at position 3242 of SEQ ID NO: 916610
augacaguuugaguagaug

SEQ ID NO: 1170219 - RNA, 19 nt, Artificial Sequence
  Description of Artificial Sequence: Synthetic oligonucleotide
  Antisense strand to SEQ ID NO: 1170218
caucuacucaaacugucau

SEQ ID NO: 1170220 - RNA, 19 nt, Artificial Sequence
  Description of Artificial Sequence: Synthetic oligonucleotide
  Sense strand starting at position 3250 of SEQ ID NO: 916610
uugaguagaugacuccuua

SEQ ID NO: 1170221 - RNA, 19 nt, Artificial Sequence
  Description of Artificial Sequence: Synthetic oligonucleotide
  Antisense strand to SEQ ID NO: 1170220
uaaggagucaucuacucaa

SEQ ID NO: 1170222 - RNA, 19 nt, Artificial Sequence
  Description of Artificial Sequence: Synthetic oligonucleotide
  Sense strand starting at position 3254 of SEQ ID NO: 916610
guagaugacuccuuaguuu

SEQ ID NO: 1170223 - RNA, 19 nt, Artificial Sequence
  Description of Artificial Sequence: Synthetic oligonucleotide
  Antisense strand to SEQ ID NO: 1170222
aaacuaaggagucaucuac

SEQ ID NO: 1170224 - RNA, 19 nt, Artificial Sequence
  Description of Artificial Sequence: Synthetic oligonucleotide
  Sense strand starting at position 3365 of SEQ ID NO: 916610
caguacuguccagggaaug

SEQ ID NO: 1170225 - RNA, 19 nt, Artificial Sequence
  Description of Artificial Sequence: Synthetic oligonucleotide
  Antisense strand to SEQ ID NO: 1170224
cauucccuggacaguacug

SEQ ID NO: 1170226 - RNA, 19 nt, Artificial Sequence
  Description of Artificial Sequence: Synthetic oligonucleotide
  Sense strand starting at position 3366 of SEQ ID NO: 916610
aguacuguccagggaaugu

SEQ ID NO: 1170227 - RNA, 19 nt, Artificial Sequence
  Description of Artificial Sequence: Synthetic oligonucleotide
  Antisense strand to SEQ ID NO: 1170226
acauucccuggacaguacu

SEQ ID NO: 1170228 - RNA, 19 nt, Artificial Sequence
  Description of Artificial Sequence: Synthetic oligonucleotide
  Sense strand starting at position 3376 of SEQ ID NO: 916610
agggaauguccagaugugu

SEQ ID NO: 1170229 - RNA, 19 nt, Artificial Sequence
  Description of Artificial Sequence: Synthetic oligonucleotide
  Antisense strand to SEQ ID NO: 1170228
acacaucuggacauucccu

SEQ ID NO: 1170230 - RNA, 19 nt, Artificial Sequence
  Description of Artificial Sequence: Synthetic oligonucleotide
  Sense strand starting at position 3421 of SEQ ID NO: 916610
cuuuccucccuguagucau

SEQ ID NO: 1170231 - RNA, 19 nt, Artificial Sequence
  Description of Artificial Sequence: Synthetic oligonucleotide
  Antisense strand to SEQ ID NO: 1170230
augacuacagggaggaaag

SEQ ID NO: 1170232 - RNA, 19 nt, Artificial Sequence
  Description of Artificial Sequence: Synthetic oligonucleotide
  Sense strand starting at position 3880 of SEQ ID NO: 916610
aagguuuagucccuuacag

SEQ ID NO: 1170233 - RNA, 19 nt, Artificial Sequence
  Description of Artificial Sequence: Synthetic oligonucleotide
  Antisense strand to SEQ ID NO: 1170232
cuguaagggacuaaaccuu

SEQ ID NO: 1170234 - RNA, 19 nt, Artificial Sequence
  Description of Artificial Sequence: Synthetic oligonucleotide
  Sense strand starting at position 14 of SEQ ID NO: 916611
cauggccagugucaauaau

SEQ ID NO: 1170235 - RNA, 19 nt, Artificial Sequence
  Description of Artificial Sequence: Synthetic oligonucleotide
  Antisense strand to SEQ ID NO: 1170234
auuauugacacuggccaug

SEQ ID NO: 1170236 - RNA, 19 nt, Artificial Sequence
  Description of Artificial Sequence: Synthetic oligonucleotide
  Sense strand starting at position 423 of SEQ ID NO: 916611
gcggcucuuacuuggagaa

SEQ ID NO: 1170237 - RNA, 19 nt, Artificial Sequence
  Description of Artificial Sequence: Synthetic oligonucleotide
  Antisense strand to SEQ ID NO: 1170236
uucuccaaguaagagccgc

SEQ ID NO: 1170238 - RNA, 19 nt, Artificial Sequence
  Description of Artificial Sequence: Synthetic oligonucleotide
  Sense strand starting at position 425 of SEQ ID NO: 916611
ggcucuuacuuggagaagu

SEQ ID NO: 1170239 - RNA, 19 nt, Artificial Sequence
  Description of Artificial Sequence: Synthetic oligonucleotide
  Antisense strand to SEQ ID NO: 1170238
acuucuccaaguaagagcc

SEQ ID NO: 1170240 - RNA, 19 nt, Artificial Sequence
  Description of Artificial Sequence: Synthetic oligonucleotide
  Sense strand starting at position 503 of SEQ ID NO: 916611
cccagaaauuggcugagga

SEQ ID NO: 1170241 - RNA, 19 nt, Artificial Sequence
  Description of Artificial Sequence: Synthetic oligonucleotide
  Antisense strand to SEQ ID NO: 1170240
uccucagccaauuucuggg

SEQ ID NO: 1170242 - RNA, 19 nt, Artificial Sequence
  Description of Artificial Sequence: Synthetic oligonucleotide
  Sense strand starting at position 504 of SEQ ID NO: 916611
ccagaaauuggcugaggag

SEQ ID NO: 1170243 - RNA, 19 nt, Artificial Sequence
  Description of Artificial Sequence: Synthetic oligonucleotide
  Antisense strand to SEQ ID NO: 1170242
cuccucagccaauuucugg

SEQ ID NO: 1170244 - RNA, 19 nt, Artificial Sequence
  Description of Artificial Sequence: Synthetic oligonucleotide
  Sense strand starting at position 791 of SEQ ID NO: 916611
agaggucacugaggcauua

SEQ ID NO: 1170245 - RNA, 19 nt, Artificial Sequence
  Description of Artificial Sequence: Synthetic oligonucleotide
  Antisense strand to SEQ ID NO: 1170244
uaaugccucagugaccucu

SEQ ID NO: 1170246 - RNA, 19 nt, Artificial Sequence
  Description of Artificial Sequence: Synthetic oligonucleotide
  Sense strand starting at position 2296 of SEQ ID NO: 916611
uuccgagcucgaggagaaa

SEQ ID NO: 1170247 - RNA, 19 nt, Artificial Sequence
  Description of Artificial Sequence: Synthetic oligonucleotide
  Antisense strand to SEQ ID NO: 1170246
uuucuccucgagcucggaa

SEQ ID NO: 1170248 - RNA, 19 nt, Artificial Sequence
  Description of Artificial Sequence: Synthetic oligonucleotide
  Sense strand starting at position 2658 of SEQ ID NO: 916611
aucagcauagcauguaauu

SEQ ID NO: 1170249 - RNA, 19 nt, Artificial Sequence
  Description of Artificial Sequence: Synthetic oligonucleotide
  Antisense strand to SEQ ID NO: 1170248
aauuacaugcuaugcugau

SEQ ID NO: 1170250 - RNA, 19 nt, Artificial Sequence
  Description of Artificial Sequence: Synthetic oligonucleotide
  Sense strand starting at position 2844 of SEQ ID NO: 916611
uucugucucagugaaugga

SEQ ID NO: 1170251 - RNA, 19 nt, Artificial Sequence
  Description of Artificial Sequence: Synthetic oligonucleotide
  Antisense strand to SEQ ID NO: 1170250
uccauucacugagacagaa

SEQ ID NO: 1170252 - RNA, 19 nt, Artificial Sequence
  Description of Artificial Sequence: Synthetic oligonucleotide
  Sense strand starting at position 2860 of SEQ ID NO: 916611
ggacuugccuguucuggau

SEQ ID NO: 1170253 - RNA, 19 nt, Artificial Sequence
  Description of Artificial Sequence: Synthetic oligonucleotide
  Antisense strand to SEQ ID NO: 1170252
auccagaacaggcaagucc

SEQ ID NO: 1170254 - RNA, 19 nt, Artificial Sequence
  Description of Artificial Sequence: Synthetic oligonucleotide
  Sense strand starting at position 2899 of SEQ ID NO: 916611
aauauuuguuucuggguua

SEQ ID NO: 1170255 - RNA, 19 nt, Artificial Sequence
  Description of Artificial Sequence: Synthetic oligonucleotide
  Antisense strand to SEQ ID NO: 1170254
uaacccagaaacaaauauu

SEQ ID NO: 1170256 - RNA, 19 nt, Artificial Sequence
  Description of Artificial Sequence: Synthetic oligonucleotide
  Sense strand starting at position 2900 of SEQ ID NO: 916611
auauuuguuucuggguuaa

SEQ ID NO: 1170257 - RNA, 19 nt, Artificial Sequence
  Description of Artificial Sequence: Synthetic oligonucleotide
  Antisense strand to SEQ ID NO: 1170256
uuaacccagaaacaaauau

SEQ ID NO: 1170258 - RNA, 19 nt, Artificial Sequence
  Description of Artificial Sequence: Synthetic oligonucleotide
  Sense strand starting at position 2997 of SEQ ID NO: 916611
ccuucuuauggccaggaga

SEQ ID NO: 1170259 - RNA, 19 nt, Artificial Sequence
  Description of Artificial Sequence: Synthetic oligonucleotide
  Antisense strand to SEQ ID NO: 1170258
ucuccuggccauaagaagg

SEQ ID NO: 1170260 - RNA, 19 nt, Artificial Sequence
  Description of Artificial Sequence: Synthetic oligonucleotide
  Sense strand starting at position 2999 of SEQ ID NO: 916611
uucuuauggccaggagaaa

SEQ ID NO: 1170261 - RNA, 19 nt, Artificial Sequence
  Description of Artificial Sequence: Synthetic oligonucleotide
  Antisense strand to SEQ ID NO: 1170260
uuucuccuggccauaagaa

SEQ ID NO: 1170262 - RNA, 19 nt, Artificial Sequence
  Description of Artificial Sequence: Synthetic oligonucleotide
  Sense strand starting at position 3012 of SEQ ID NO: 916611
gagaaaugucuaggcuauc

SEQ ID NO: 1170263 - RNA, 19 nt, Artificial Sequence
  Description of Artificial Sequence: Synthetic oligonucleotide
  Antisense strand to SEQ ID NO: 1170262
gauagccuagacauuucuc

SEQ ID NO: 1170264 - RNA, 19 nt, Artificial Sequence
  Description of Artificial Sequence: Synthetic oligonucleotide
  Sense strand starting at position 3018 of SEQ ID NO: 916611
ugucuaggcuauccaaaga

SEQ ID NO: 1170265 - RNA, 19 nt, Artificial Sequence
  Description of Artificial Sequence: Synthetic oligonucleotide
  Antisense strand to SEQ ID NO: 1170264
ucuuuggauagccuagaca

SEQ ID NO: 1170266 - RNA, 19 nt, Artificial Sequence
  Description of Artificial Sequence: Synthetic oligonucleotide
  Sense strand starting at position 3098 of SEQ ID NO: 916611
aaguauuuguuugaacugu

SEQ ID NO: 1170267 - RNA, 19 nt, Artificial Sequence
  Description of Artificial Sequence: Synthetic oligonucleotide
  Antisense strand to SEQ ID NO: 1170266
acaguucaaacaaauacuu

SEQ ID NO: 1170268 - RNA, 19 nt, Artificial Sequence
  Description of Artificial Sequence: Synthetic oligonucleotide
  Sense strand starting at position 3140 of SEQ ID NO: 916611
gccucugugccuugaguuu

SEQ ID NO: 1170269 - RNA, 19 nt, Artificial Sequence
  Description of Artificial Sequence: Synthetic oligonucleotide
  Antisense strand to SEQ ID NO: 1170268
aaacucaaggcacagaggc

SEQ ID NO: 1170270 - RNA, 19 nt, Artificial Sequence
  Description of Artificial Sequence: Synthetic oligonucleotide
  Sense strand starting at position 3147 of SEQ ID NO: 916611
ugccuugaguuucuaggua

SEQ ID NO: 1170271 - RNA, 19 nt, Artificial Sequence
  Description of Artificial Sequence: Synthetic oligonucleotide
  Antisense strand to SEQ ID NO: 1170270
uaccuagaaacucaaggca

SEQ ID NO: 1170272 - RNA, 19 nt, Artificial Sequence
  Description of Artificial Sequence: Synthetic oligonucleotide
  Sense strand starting at position 3151 of SEQ ID NO: 916611
uugaguuucuagguaacaa

SEQ ID NO: 1170273 - RNA, 19 nt, Artificial Sequence
  Description of Artificial Sequence: Synthetic oligonucleotide
  Antisense strand to SEQ ID NO: 1170272
uuguuaccuagaaacucaa

SEQ ID NO: 1170274 - RNA, 19 nt, Artificial Sequence
  Description of Artificial Sequence: Synthetic oligonucleotide
  Sense strand starting at position 3207 of SEQ ID NO: 916611
agcuuaaccuaugaguaua

SEQ ID NO: 1170275 - RNA, 19 nt, Artificial Sequence
  Description of Artificial Sequence: Synthetic oligonucleotide
  Antisense strand to SEQ ID NO: 1170274
uauacucauagguuaagcu

SEQ ID NO: 1170276 - RNA, 19 nt, Artificial Sequence
  Description of Artificial Sequence: Synthetic oligonucleotide
  Sense strand starting at position 3262 of SEQ ID NO: 916611
gcugcuaacugaucugauc

SEQ ID NO: 1170277 - RNA, 19 nt, Artificial Sequence
  Description of Artificial Sequence: Synthetic oligonucleotide
  Antisense strand to SEQ ID NO: 1170276
gaucagaucaguuagcagc

SEQ ID NO: 1170278 - RNA, 19 nt, Artificial Sequence
  Description of Artificial Sequence: Synthetic oligonucleotide
  Sense strand starting at position 3270 of SEQ ID NO: 916611
cugaucugaucaugccaua

SEQ ID NO: 1170279 - RNA, 19 nt, Artificial Sequence
  Description of Artificial Sequence: Synthetic oligonucleotide
  Antisense strand to SEQ ID NO: 1170278
uauggcaugaucagaucag

SEQ ID NO: 1170280 - RNA, 19 nt, Artificial Sequence
  Description of Artificial Sequence: Synthetic oligonucleotide
  Sense strand starting at position 3348 of SEQ ID NO: 916611
aucucacuucuguguucua

SEQ ID NO: 1170281 - RNA, 19 nt, Artificial Sequence
  Description of Artificial Sequence: Synthetic oligonucleotide
  Antisense strand to SEQ ID NO: 1170280
uagaacacagaagugagau

SEQ ID NO: 1170282 - RNA, 19 nt, Artificial Sequence
  Description of Artificial Sequence: Synthetic oligonucleotide
  Sense strand starting at position 3349 of SEQ ID NO: 916611
ucucacuucuguguucuau

SEQ ID NO: 1170283 - RNA, 19 nt, Artificial Sequence
  Description of Artificial Sequence: Synthetic oligonucleotide
  Antisense strand to SEQ ID NO: 1170282
auagaacacagaagugaga

SEQ ID NO: 1170284 - RNA, 19 nt, Artificial Sequence
  Description of Artificial Sequence: Synthetic oligonucleotide
  Sense strand starting at position 3353 of SEQ ID NO: 916611
acuucuguguucuaucuau

SEQ ID NO: 1170285 - RNA, 19 nt, Artificial Sequence
  Description of Artificial Sequence: Synthetic oligonucleotide
  Antisense strand to SEQ ID NO: 1170284
auagauagaacacagaagu

SEQ ID NO: 1170286 - RNA, 19 nt, Artificial Sequence
  Description of Artificial Sequence: Synthetic oligonucleotide
  Sense strand starting at position 3618 of SEQ ID NO: 916611
uguuguggcaucuguaauc

SEQ ID NO: 1170287 - RNA, 19 nt, Artificial Sequence
  Description of Artificial Sequence: Synthetic oligonucleotide
  Antisense strand to SEQ ID NO: 1170286
gauuacagaugccacaaca

SEQ ID NO: 1170288 - RNA, 19 nt, Artificial Sequence
  Description of Artificial Sequence: Synthetic oligonucleotide
  Sense strand starting at position 3932 of SEQ ID NO: 916611
caucuagagucauagguga

SEQ ID NO: 1170289 - RNA, 19 nt, Artificial Sequence
  Description of Artificial Sequence: Synthetic oligonucleotide
  Antisense strand to SEQ ID NO: 1170288
ucaccuaugacucuagaug

SEQ ID NO: 1170290 - RNA, 19 nt, Artificial Sequence
  Description of Artificial Sequence: Synthetic oligonucleotide
  Sense strand starting at position 3934 of SEQ ID NO: 916611
ucuagagucauaggugagu

SEQ ID NO: 1170291 - RNA, 19 nt, Artificial Sequence
  Description of Artificial Sequence: Synthetic oligonucleotide
  Antisense strand to SEQ ID NO: 1170290
acucaccuaugacucuaga

SEQ ID NO: 1170292 - RNA, 19 nt, Artificial Sequence
  Description of Artificial Sequence: Synthetic oligonucleotide
  Sense strand starting at position 3947 of SEQ ID NO: 916611
gugaguucucucugcugga

SEQ ID NO: 1170293 - RNA, 19 nt, Artificial Sequence
  Description of Artificial Sequence: Synthetic oligonucleotide
  Antisense strand to SEQ ID NO: 1170292
uccagcagagagaacucac

SEQ ID NO: 1170294 - RNA, 19 nt, Artificial Sequence
  Description of Artificial Sequence: Synthetic oligonucleotide
  Sense strand starting at position 3948 of SEQ ID NO: 916611
ugaguucucucugcuggau

SEQ ID NO: 1170295 - RNA, 19 nt, Artificial Sequence
  Description of Artificial Sequence: Synthetic oligonucleotide
  Antisense strand to SEQ ID NO: 1170294
auccagcagagagaacuca

SEQ ID NO: 1170296 - RNA, 19 nt, Artificial Sequence
  Description of Artificial Sequence: Synthetic oligonucleotide
  Sense strand starting at position 3950 of SEQ ID NO: 916611
aguucucucugcuggauuu

SEQ ID NO: 1170297 - RNA, 19 nt, Artificial Sequence
  Description of Artificial Sequence: Synthetic oligonucleotide
  Antisense strand to SEQ ID NO: 1170296
aaauccagcagagagaacu

SEQ ID NO: 1170298 - RNA, 19 nt, Artificial Sequence
  Description of Artificial Sequence: Synthetic oligonucleotide
  Sense strand starting at position 3965 of SEQ ID NO: 916611
auuugugcucuaugaccau

SEQ ID NO: 1170299 - RNA, 19 nt, Artificial Sequence
  Description of Artificial Sequence: Synthetic oligonucleotide
  Antisense strand to SEQ ID NO: 1170298
auggucauagagcacaaau

SEQ ID NO: 1170300 - RNA, 19 nt, Artificial Sequence
  Description of Artificial Sequence: Synthetic oligonucleotide
  Sense strand starting at position 3971 of SEQ ID NO: 916611
gcucuaugaccauguguuu

SEQ ID NO: 1170301 - RNA, 19 nt, Artificial Sequence
  Description of Artificial Sequence: Synthetic oligonucleotide
  Antisense strand to SEQ ID NO: 1170300
aaacacauggucauagagc

SEQ ID NO: 1170302 - RNA, 19 nt, Artificial Sequence
  Description of Artificial Sequence: Synthetic oligonucleotide
  Sense strand starting at position 292 of SEQ ID NO: 916612
cagguaagccuuuaaagug

SEQ ID NO: 1170303 - RNA, 19 nt, Artificial Sequence
  Description of Artificial Sequence: Synthetic oligonucleotide
  Antisense strand to SEQ ID NO: 1170302
cacuuuaaaggcuuaccug

SEQ ID NO: 1170304 - RNA, 19 nt, Artificial Sequence
  Description of Artificial Sequence: Synthetic oligonucleotide
  Sense strand starting at position 318 of SEQ ID NO: 916612
guggcaagguaauuaucau

SEQ ID NO: 1170305 - RNA, 19 nt, Artificial Sequence
  Description of Artificial Sequence: Synthetic oligonucleotide
  Antisense strand to SEQ ID NO: 1170304
augauaauuaccuugccac

SEQ ID NO: 1170306 - RNA, 19 nt, Artificial Sequence
  Description of Artificial Sequence: Synthetic oligonucleotide
  Sense strand starting at position 1116 of SEQ ID NO: 916612
aguuaaguggugugaucau

SEQ ID NO: 1170307 - RNA, 19 nt, Artificial Sequence
  Description of Artificial Sequence: Synthetic oligonucleotide
  Antisense strand to SEQ ID NO: 1170306
augaucacaccacuuaacu

SEQ ID NO: 1170308 - RNA, 19 nt, Artificial Sequence
  Description of Artificial Sequence: Synthetic oligonucleotide
  Sense strand starting at position 1260 of SEQ ID NO: 916612
ccacgauguugcccaaauu

SEQ ID NO: 1170309 - RNA, 19 nt, Artificial Sequence
  Description of Artificial Sequence: Synthetic oligonucleotide
  Antisense strand to SEQ ID NO: 1170308
aauuugggcaacaucgugg

SEQ ID NO: 1170310 - RNA, 19 nt, Artificial Sequence
  Description of Artificial Sequence: Synthetic oligonucleotide
  Sense strand starting at position 1269 of SEQ ID NO: 916612
ugcccaaauugguuucgaa

SEQ ID NO: 1170311 - RNA, 19 nt, Artificial Sequence
  Description of Artificial Sequence: Synthetic oligonucleotide
  Antisense strand to SEQ ID NO: 1170310
uucgaaaccaauuugggca

SEQ ID NO: 1170312 - RNA, 19 nt, Artificial Sequence
  Description of Artificial Sequence: Synthetic oligonucleotide
  Sense strand starting at position 2582 of SEQ ID NO: 916612
cugugagcccugggugaga

SEQ ID NO: 1170313 - RNA, 19 nt, Artificial Sequence
  Description of Artificial Sequence: Synthetic oligonucleotide
  Antisense strand to SEQ ID NO: 1170312
ucucacccagggcucacag

SEQ ID NO: 1170314 - RNA, 19 nt, Artificial Sequence
  Description of Artificial Sequence: Synthetic oligonucleotide
  Sense strand starting at position 2632 of SEQ ID NO: 916612
uuugaagccuggucgcauu

SEQ ID NO: 1170315 - RNA, 19 nt, Artificial Sequence
  Description of Artificial Sequence: Synthetic oligonucleotide
  Antisense strand to SEQ ID NO: 1170314
aaugcgaccaggcuucaaa

SEQ ID NO: 1170316 - RNA, 19 nt, Artificial Sequence
  Description of Artificial Sequence: Synthetic oligonucleotide
  Sense strand starting at position 2643 of SEQ ID NO: 916612
gucgcauucucacuccaaa

SEQ ID NO: 1170317 - RNA, 19 nt, Artificial Sequence
  Description of Artificial Sequence: Synthetic oligonucleotide
  Antisense strand to SEQ ID NO: 1170316
uuuggagugagaaugcgac

SEQ ID NO: 1170318 - RNA, 19 nt, Artificial Sequence
  Description of Artificial Sequence: Synthetic oligonucleotide
  Sense strand starting at position 2684 of SEQ ID NO: 916612
gggagauaauucugugguc

SEQ ID NO: 1170319 - RNA, 19 nt, Artificial Sequence
  Description of Artificial Sequence: Synthetic oligonucleotide
  Antisense strand to SEQ ID NO: 1170318
gaccacagaauuaucuccc

SEQ ID NO: 1170320 - RNA, 19 nt, Artificial Sequence
  Description of Artificial Sequence: Synthetic oligonucleotide
  Sense strand starting at position 2685 of SEQ ID NO: 916612
ggagauaauucugugguca

SEQ ID NO: 1170321 - RNA, 19 nt, Artificial Sequence
  Description of Artificial Sequence: Synthetic oligonucleotide
  Antisense strand to SEQ ID NO: 1170320
ugaccacagaauuaucucc

SEQ ID NO: 1170322 - RNA, 19 nt, Artificial Sequence
  Description of Artificial Sequence: Synthetic oligonucleotide
  Sense strand starting at position 2686 of SEQ ID NO: 916612
gagauaauucuguggucau

SEQ ID NO: 1170323 - RNA, 19 nt, Artificial Sequence
  Description of Artificial Sequence: Synthetic oligonucleotide
  Antisense strand to SEQ ID NO: 1170322
augaccacagaauuaucuc

SEQ ID NO: 1170324 - RNA, 19 nt, Artificial Sequence
  Description of Artificial Sequence: Synthetic oligonucleotide
  Sense strand starting at position 2687 of SEQ ID NO: 916612
agauaauucuguggucauc

SEQ ID NO: 1170325 - RNA, 19 nt, Artificial Sequence
  Description of Artificial Sequence: Synthetic oligonucleotide
  Antisense strand to SEQ ID NO: 1170324
gaugaccacagaauuaucu

SEQ ID NO: 1170326 - RNA, 19 nt, Artificial Sequence
  Description of Artificial Sequence: Synthetic oligonucleotide
  Sense strand starting at position 2698 of SEQ ID NO: 916612
uggucauccuuuccacuga

SEQ ID NO: 1170327 - RNA, 19 nt, Artificial Sequence
  Description of Artificial Sequence: Synthetic oligonucleotide
  Antisense strand to SEQ ID NO: 1170326
ucaguggaaaggaugacca

SEQ ID NO: 1170328 - RNA, 19 nt, Artificial Sequence
  Description of Artificial Sequence: Synthetic oligonucleotide
  Sense strand starting at position 2727 of SEQ ID NO: 916612
ucacaacuuuaggagagaa

SEQ ID NO: 1170329 - RNA, 19 nt, Artificial Sequence
  Description of Artificial Sequence: Synthetic oligonucleotide
  Antisense strand to SEQ ID NO: 1170328
uucucuccuaaaguuguga

SEQ ID NO: 1170330 - RNA, 19 nt, Artificial Sequence
  Description of Artificial Sequence: Synthetic oligonucleotide
  Sense strand starting at position 2798 of SEQ ID NO: 916612
ccgcauguguauuuguuca

SEQ ID NO: 1170331 - RNA, 19 nt, Artificial Sequence
  Description of Artificial Sequence: Synthetic oligonucleotide
  Antisense strand to SEQ ID NO: 1170330
ugaacaaauacacaugcgg

SEQ ID NO: 1170332 - RNA, 19 nt, Artificial Sequence
  Description of Artificial Sequence: Synthetic oligonucleotide
  Sense strand starting at position 3155 of SEQ ID NO: 916612
acaggugaauguuauauuu

SEQ ID NO: 1170333 - RNA, 19 nt, Artificial Sequence
  Description of Artificial Sequence: Synthetic oligonucleotide
  Antisense strand to SEQ ID NO: 1170332
aaauauaacauucaccugu

SEQ ID NO: 1170334 - RNA, 19 nt, Artificial Sequence
  Description of Artificial Sequence: Synthetic oligonucleotide
  Sense strand starting at position 3157 of SEQ ID NO: 916612
aggugaauguuauauuuag

SEQ ID NO: 1170335 - RNA, 19 nt, Artificial Sequence
  Description of Artificial Sequence: Synthetic oligonucleotide
  Antisense strand to SEQ ID NO: 1170334
cuaaauauaacauucaccu

SEQ ID NO: 1170336 - RNA, 19 nt, Artificial Sequence
  Description of Artificial Sequence: Synthetic oligonucleotide
  Sense strand starting at position 3211 of SEQ ID NO: 916612
ccaaguacuguccagugaa

SEQ ID NO: 1170337 - RNA, 19 nt, Artificial Sequence
  Description of Artificial Sequence: Synthetic oligonucleotide
  Antisense strand to SEQ ID NO: 1170336
uucacuggacaguacuugg

SEQ ID NO: 1170338 - RNA, 19 nt, Artificial Sequence
  Description of Artificial Sequence: Synthetic oligonucleotide
  Sense strand starting at position 3214 of SEQ ID NO: 916612
aguacuguccagugaacag

SEQ ID NO: 1170339 - RNA, 19 nt, Artificial Sequence
  Description of Artificial Sequence: Synthetic oligonucleotide
  Antisense strand to SEQ ID NO: 1170338
cuguucacuggacaguacu

SEQ ID NO: 1170340 - RNA, 19 nt, Artificial Sequence
  Description of Artificial Sequence: Synthetic oligonucleotide
  Sense strand starting at position 3273 of SEQ ID NO: 916612
acagguaauugguauaaag

SEQ ID NO: 1170341 - RNA, 19 nt, Artificial Sequence
  Description of Artificial Sequence: Synthetic oligonucleotide
  Antisense strand to SEQ ID NO: 1170340
cuuuauaccaauuaccugu

SEQ ID NO: 1170342 - RNA, 19 nt, Artificial Sequence
  Description of Artificial Sequence: Synthetic oligonucleotide
  Sense strand starting at position 3275 of SEQ ID NO: 916612
agguaauugguauaaaguu

SEQ ID NO: 1170343 - RNA, 19 nt, Artificial Sequence
  Description of Artificial Sequence: Synthetic oligonucleotide
  Antisense strand to SEQ ID NO: 1170342
aacuuuauaccaauuaccu

SEQ ID NO: 1170344 - RNA, 19 nt, Artificial Sequence
  Description of Artificial Sequence: Synthetic oligonucleotide
  Sense strand starting at position 3293 of SEQ ID NO: 916612
uuugguuuguaaucauagu

SEQ ID NO: 1170345 - RNA, 19 nt, Artificial Sequence
  Description of Artificial Sequence: Synthetic oligonucleotide
  Antisense strand to SEQ ID NO: 1170344
acuaugauuacaaaccaaa

SEQ ID NO: 1170346 - RNA, 19 nt, Artificial Sequence
  Description of Artificial Sequence: Synthetic oligonucleotide
  Sense strand starting at position 3294 of SEQ ID NO: 916612
uugguuuguaaucauaguc

SEQ ID NO: 1170347 - RNA, 19 nt, Artificial Sequence
  Description of Artificial Sequence: Synthetic oligonucleotide
  Antisense strand to SEQ ID NO: 1170346
gacuaugauuacaaaccaa

SEQ ID NO: 1170348 - RNA, 19 nt, Artificial Sequence
  Description of Artificial Sequence: Synthetic oligonucleotide
  Sense strand starting at position 3351 of SEQ ID NO: 916612
guuucuguguuacugcaga

SEQ ID NO: 1170349 - RNA, 19 nt, Artificial Sequence
  Description of Artificial Sequence: Synthetic oligonucleotide
  Antisense strand to SEQ ID NO: 1170348
ucugcaguaacacagaaac

SEQ ID NO: 1170350 - RNA, 19 nt, Artificial Sequence
  Description of Artificial Sequence: Synthetic oligonucleotide
  Sense strand starting at position 3356 of SEQ ID NO: 916612
uguguuacugcagacucau

SEQ ID NO: 1170351 - RNA, 19 nt, Artificial Sequence
  Description of Artificial Sequence: Synthetic oligonucleotide
  Antisense strand to SEQ ID NO: 1170350
augagucugcaguaacaca

SEQ ID NO: 1170352 - RNA, 19 nt, Artificial Sequence
  Description of Artificial Sequence: Synthetic oligonucleotide
  Sense strand starting at position 3461 of SEQ ID NO: 916612
guuuguggauccuaugcau

SEQ ID NO: 1170353 - RNA, 19 nt, Artificial Sequence
  Description of Artificial Sequence: Synthetic oligonucleotide
  Antisense strand to SEQ ID NO: 1170352
augcauaggauccacaaac

SEQ ID NO: 1170354 - RNA, 19 nt, Artificial Sequence
  Description of Artificial Sequence: Synthetic oligonucleotide
  Sense strand starting at position 3464 of SEQ ID NO: 916612
uguggauccuaugcauaau

SEQ ID NO: 1170355 - RNA, 19 nt, Artificial Sequence
  Description of Artificial Sequence: Synthetic oligonucleotide
  Antisense strand to SEQ ID NO: 1170354
auuaugcauaggauccaca

SEQ ID NO: 1170356 - RNA, 19 nt, Artificial Sequence
  Description of Artificial Sequence: Synthetic oligonucleotide
  Sense strand starting at position 3467 of SEQ ID NO: 916612
ggauccuaugcauaaucuu

SEQ ID NO: 1170357 - RNA, 19 nt, Artificial Sequence
  Description of Artificial Sequence: Synthetic oligonucleotide
  Antisense strand to SEQ ID NO: 1170356
aagauuaugcauaggaucc

SEQ ID NO: 1170358 - RNA, 19 nt, Artificial Sequence
  Description of Artificial Sequence: Synthetic oligonucleotide
  Sense strand starting at position 3515 of SEQ ID NO: 916612
auaugagauuccuaaguaa

SEQ ID NO: 1170359 - RNA, 19 nt, Artificial Sequence
  Description of Artificial Sequence: Synthetic oligonucleotide
  Antisense strand to SEQ ID NO: 1170358
uuacuuaggaaucucauau

SEQ ID NO: 1170360 - RNA, 19 nt, Artificial Sequence
  Description of Artificial Sequence: Synthetic oligonucleotide
  Sense strand starting at position 3596 of SEQ ID NO: 916612
agcaucugccucuaagaga

SEQ ID NO: 1170361 - RNA, 19 nt, Artificial Sequence
  Description of Artificial Sequence: Synthetic oligonucleotide
  Antisense strand to SEQ ID NO: 1170360
ucucuuagaggcagaugcu

SEQ ID NO: 1170362 - RNA, 19 nt, Artificial Sequence
  Description of Artificial Sequence: Synthetic oligonucleotide
  Sense strand starting at position 3615 of SEQ ID NO: 916612
uggaauucuuaaguuagag

SEQ ID NO: 1170363 - RNA, 19 nt, Artificial Sequence
  Description of Artificial Sequence: Synthetic oligonucleotide
  Antisense strand to SEQ ID NO: 1170362
cucuaacuuaagaauucca

SEQ ID NO: 1170364 - RNA, 19 nt, Artificial Sequence
  Description of Artificial Sequence: Synthetic oligonucleotide
  Sense strand starting at position 3780 of SEQ ID NO: 916612
aggugagguaucugcccaa

SEQ ID NO: 1170365 - RNA, 19 nt, Artificial Sequence
  Description of Artificial Sequence: Synthetic oligonucleotide
  Antisense strand to SEQ ID NO: 1170364
uugggcagauaccucaccu

SEQ ID NO: 1170366 - RNA, 19 nt, Artificial Sequence
  Description of Artificial Sequence: Synthetic oligonucleotide
  Sense strand starting at position 3783 of SEQ ID NO: 916612
ugagguaucugcccaaaug

SEQ ID NO: 1170367 - RNA, 19 nt, Artificial Sequence
  Description of Artificial Sequence: Synthetic oligonucleotide
  Antisense strand to SEQ ID NO: 1170366
cauuugggcagauaccuca

SEQ ID NO: 1170368 - RNA, 19 nt, Artificial Sequence
  Description of Artificial Sequence: Synthetic oligonucleotide
  Sense strand starting at position 3784 of SEQ ID NO: 916612
gagguaucugcccaaaugg

SEQ ID NO: 1170369 - RNA, 19 nt, Artificial Sequence
  Description of Artificial Sequence: Synthetic oligonucleotide
  Antisense strand to SEQ ID NO: 1170368
ccauuugggcagauaccuc

SEQ ID NO: 1170370 - RNA, 19 nt, Artificial Sequence
  Description of Artificial Sequence: Synthetic oligonucleotide
  Sense strand starting at position 3798 of SEQ ID NO: 916612
aauggaguuuggugcaauu

SEQ ID NO: 1170371 - RNA, 19 nt, Artificial Sequence
  Description of Artificial Sequence: Synthetic oligonucleotide
  Antisense strand to SEQ ID NO: 1170370
aauugcaccaaacuccauu

SEQ ID NO: 1170372 - RNA, 19 nt, Artificial Sequence
  Description of Artificial Sequence: Synthetic oligonucleotide
  Sense strand starting at position 3822 of SEQ ID NO: 916612
gccucaaauuaucuguaga

SEQ ID NO: 1170373 - RNA, 19 nt, Artificial Sequence
  Description of Artificial Sequence: Synthetic oligonucleotide
  Antisense strand to SEQ ID NO: 1170372
ucuacagauaauuugaggc

SEQ ID NO: 1170374 - RNA, 19 nt, Artificial Sequence
  Description of Artificial Sequence: Synthetic oligonucleotide
  Sense strand starting at position 3824 of SEQ ID NO: 916612
cucaaauuaucuguagaag

SEQ ID NO: 1170375 - RNA, 19 nt, Artificial Sequence
  Description of Artificial Sequence: Synthetic oligonucleotide
  Antisense strand to SEQ ID NO: 1170374
cuucuacagauaauuugag

SEQ ID NO: 1170376 - RNA, 19 nt, Artificial Sequence
  Description of Artificial Sequence: Synthetic oligonucleotide
  Sense strand starting at position 3855 of SEQ ID NO: 916612
uugcuaaauccucauugga

SEQ ID NO: 1170377 - RNA, 19 nt, Artificial Sequence
  Description of Artificial Sequence: Synthetic oligonucleotide
  Antisense strand to SEQ ID NO: 1170376
uccaaugaggauuuagcaa

SEQ ID NO: 1170378 - RNA, 19 nt, Artificial Sequence
  Description of Artificial Sequence: Synthetic oligonucleotide
  Sense strand starting at position 3857 of SEQ ID NO: 916612
gcuaaauccucauuggaag

SEQ ID NO: 1170379 - RNA, 19 nt, Artificial Sequence
  Description of Artificial Sequence: Synthetic oligonucleotide
  Antisense strand to SEQ ID NO: 1170378
cuuccaaugaggauuuagc

SEQ ID NO: 1170380 - RNA, 19 nt, Artificial Sequence
  Description of Artificial Sequence: Synthetic oligonucleotide
  Sense strand starting at position 3969 of SEQ ID NO: 916612
ggaugaucaugugagguca

SEQ ID NO: 1170381 - RNA, 19 nt, Artificial Sequence
  Description of Artificial Sequence: Synthetic oligonucleotide
  Antisense strand to SEQ ID NO: 1170380
ugaccucacaugaucaucc

SEQ ID NO: 1170382 - RNA, 19 nt, Artificial Sequence
  Description of Artificial Sequence: Synthetic oligonucleotide
  Sense strand starting at position 574 of SEQ ID NO: 916613
ggugaaacauaguuaacau

SEQ ID NO: 1170383 - RNA, 19 nt, Artificial Sequence
  Description of Artificial Sequence: Synthetic oligonucleotide
  Antisense strand to SEQ ID NO: 1170382
auguuaacuauguuucacc

SEQ ID NO: 1170384 - RNA, 19 nt, Artificial Sequence
  Description of Artificial Sequence: Synthetic oligonucleotide
  Sense strand starting at position 1097 of SEQ ID NO: 916613
caguguuggaaaugauggu

SEQ ID NO: 1170385 - RNA, 19 nt, Artificial Sequence
  Description of Artificial Sequence: Synthetic oligonucleotide
  Antisense strand to SEQ ID NO: 1170384
accaucauuuccaacacug

SEQ ID NO: 1170386 - RNA, 19 nt, Artificial Sequence
  Description of Artificial Sequence: Synthetic oligonucleotide
  Sense strand starting at position 1101 of SEQ ID NO: 916613
guuggaaaugauggugaag

SEQ ID NO: 1170387 - RNA, 19 nt, Artificial Sequence
  Description of Artificial Sequence: Synthetic oligonucleotide
  Antisense strand to SEQ ID NO: 1170386
cuucaccaucauuuccaac

SEQ ID NO: 1170388 - RNA, 19 nt, Artificial Sequence
  Description of Artificial Sequence: Synthetic oligonucleotide
  Sense strand starting at position 1113 of SEQ ID NO: 916613
ggugaaggagugugggauu

SEQ ID NO: 1170389 - RNA, 19 nt, Artificial Sequence
  Description of Artificial Sequence: Synthetic oligonucleotide
  Antisense strand to SEQ ID NO: 1170388
aaucccacacuccuucacc

SEQ ID NO: 1170390 - RNA, 19 nt, Artificial Sequence
  Description of Artificial Sequence: Synthetic oligonucleotide
  Sense strand starting at position 1218 of SEQ ID NO: 916613
cccuuuaaaugggucaauu

SEQ ID NO: 1170391 - RNA, 19 nt, Artificial Sequence
  Description of Artificial Sequence: Synthetic oligonucleotide
  Antisense strand to SEQ ID NO: 1170390
aauugacccauuuaaaggg

SEQ ID NO: 1170392 - RNA, 19 nt, Artificial Sequence
  Description of Artificial Sequence: Synthetic oligonucleotide
  Sense strand starting at position 1228 of SEQ ID NO: 916613
gggucaauuguauggugua

SEQ ID NO: 1170393 - RNA, 19 nt, Artificial Sequence
  Description of Artificial Sequence: Synthetic oligonucleotide
  Antisense strand to SEQ ID NO: 1170392
uacaccauacaauugaccc

SEQ ID NO: 1170394 - RNA, 19 nt, Artificial Sequence
  Description of Artificial Sequence: Synthetic oligonucleotide
  Sense strand starting at position 1364 of SEQ ID NO: 916613
caagcauggugacucagau

SEQ ID NO: 1170395 - RNA, 19 nt, Artificial Sequence
  Description of Artificial Sequence: Synthetic oligonucleotide
  Antisense strand to SEQ ID NO: 1170394
aucugagucaccaugcuug

SEQ ID NO: 1170396 - RNA, 19 nt, Artificial Sequence
  Description of Artificial Sequence: Synthetic oligonucleotide
  Sense strand starting at position 2195 of SEQ ID NO: 916613
ggucucaugucucuuggga

SEQ ID NO: 1170397 - RNA, 19 nt, Artificial Sequence
  Description of Artificial Sequence: Synthetic oligonucleotide
  Antisense strand to SEQ ID NO: 1170396
ucccaagagacaugagacc

SEQ ID NO: 1170398 - RNA, 19 nt, Artificial Sequence
  Description of Artificial Sequence: Synthetic oligonucleotide
  Sense strand starting at position 2246 of SEQ ID NO: 916613
gggagcuuccauuaugccu

SEQ ID NO: 1170399 - RNA, 19 nt, Artificial Sequence
  Description of Artificial Sequence: Synthetic oligonucleotide
  Antisense strand to SEQ ID NO: 1170398
aggcauaauggaagcuccc

SEQ ID NO: 1170400 - RNA, 19 nt, Artificial Sequence
  Description of Artificial Sequence: Synthetic oligonucleotide
  Sense strand starting at position 2278 of SEQ ID NO: 916613
agaucuuuccauugccuga

SEQ ID NO: 1170401 - RNA, 19 nt, Artificial Sequence
  Description of Artificial Sequence: Synthetic oligonucleotide
  Antisense strand to SEQ ID NO: 1170400
ucaggcaauggaaagaucu

SEQ ID NO: 1170402 - RNA, 19 nt, Artificial Sequence
  Description of Artificial Sequence: Synthetic oligonucleotide
  Sense strand starting at position 2355 of SEQ ID NO: 916613
auaggagcucuggguaaau

SEQ ID NO: 1170403 - RNA, 19 nt, Artificial Sequence
  Description of Artificial Sequence: Synthetic oligonucleotide
  Antisense strand to SEQ ID NO: 1170402
auuuacccagagcuccuau

SEQ ID NO: 1170404 - RNA, 19 nt, Artificial Sequence
  Description of Artificial Sequence: Synthetic oligonucleotide
  Sense strand starting at position 2545 of SEQ ID NO: 916613
caggucgaucuaugaccua

SEQ ID NO: 1170405 - RNA, 19 nt, Artificial Sequence
  Description of Artificial Sequence: Synthetic oligonucleotide
  Antisense strand to SEQ ID NO: 1170404
uaggucauagaucgaccug

SEQ ID NO: 1170406 - RNA, 19 nt, Artificial Sequence
  Description of Artificial Sequence: Synthetic oligonucleotide
  Sense strand starting at position 2595 of SEQ ID NO: 916613
guggcaguccaacaaaguu

SEQ ID NO: 1170407 - RNA, 19 nt, Artificial Sequence
  Description of Artificial Sequence: Synthetic oligonucleotide
  Antisense strand to SEQ ID NO: 1170406
aacuuuguuggacugccac

SEQ ID NO: 1170408 - RNA, 19 nt, Artificial Sequence
  Description of Artificial Sequence: Synthetic oligonucleotide
  Sense strand starting at position 2622 of SEQ ID NO: 916613
ugaccuauucagugaggga

SEQ ID NO: 1170409 - RNA, 19 nt, Artificial Sequence
  Description of Artificial Sequence: Synthetic oligonucleotide
  Antisense strand to SEQ ID NO: 1170408
ucccucacugaauagguca

SEQ ID NO: 1170410 - RNA, 19 nt, Artificial Sequence
  Description of Artificial Sequence: Synthetic oligonucleotide
  Sense strand starting at position 2685 of SEQ ID NO: 916613
acagcaauuuauuauagga

SEQ ID NO: 1170411 - RNA, 19 nt, Artificial Sequence
  Description of Artificial Sequence: Synthetic oligonucleotide
  Antisense strand to SEQ ID NO: 1170410
uccuauaauaaauugcugu

SEQ ID NO: 1170412 - RNA, 19 nt, Artificial Sequence
  Description of Artificial Sequence: Synthetic oligonucleotide
  Sense strand starting at position 2698 of SEQ ID NO: 916613
auaggauuccgaggaaagu

SEQ ID NO: 1170413 - RNA, 19 nt, Artificial Sequence
  Description of Artificial Sequence: Synthetic oligonucleotide
  Antisense strand to SEQ ID NO: 1170412
acuuuccucggaauccuau

SEQ ID NO: 1170414 - RNA, 19 nt, Artificial Sequence
  Description of Artificial Sequence: Synthetic oligonucleotide
  Sense strand starting at position 2820 of SEQ ID NO: 916613
gggcccuguuuccuaggaa

SEQ ID NO: 1170415 - RNA, 19 nt, Artificial Sequence
  Description of Artificial Sequence: Synthetic oligonucleotide
  Antisense strand to SEQ ID NO: 1170414
uuccuaggaaacagggccc

SEQ ID NO: 1170416 - RNA, 19 nt, Artificial Sequence
  Description of Artificial Sequence: Synthetic oligonucleotide
  Sense strand starting at position 2823 of SEQ ID NO: 916613
cccuguuuccuaggaagca

SEQ ID NO: 1170417 - RNA, 19 nt, Artificial Sequence
  Description of Artificial Sequence: Synthetic oligonucleotide
  Antisense strand to SEQ ID NO: 1170416
ugcuuccuaggaaacaggg

SEQ ID NO: 1170418 - RNA, 19 nt, Artificial Sequence
  Description of Artificial Sequence: Synthetic oligonucleotide
  Sense strand starting at position 2858 of SEQ ID NO: 916613
ugucaaauguguccagaaa

SEQ ID NO: 1170419 - RNA, 19 nt, Artificial Sequence
  Description of Artificial Sequence: Synthetic oligonucleotide
  Antisense strand to SEQ ID NO: 1170418
uuucuggacacauuugaca

SEQ ID NO: 1170420 - RNA, 19 nt, Artificial Sequence
  Description of Artificial Sequence: Synthetic oligonucleotide
  Sense strand starting at position 2925 of SEQ ID NO: 916613
cugugucaagaugacuuaa

SEQ ID NO: 1170421 - RNA, 19 nt, Artificial Sequence
  Description of Artificial Sequence: Synthetic oligonucleotide
  Antisense strand to SEQ ID NO: 1170420
uuaagucaucuugacacag

SEQ ID NO: 1170422 - RNA, 19 nt, Artificial Sequence
  Description of Artificial Sequence: Synthetic oligonucleotide
  Sense strand starting at position 2927 of SEQ ID NO: 916613
gugucaagaugacuuaaau

SEQ ID NO: 1170423 - RNA, 19 nt, Artificial Sequence
  Description of Artificial Sequence: Synthetic oligonucleotide
  Antisense strand to SEQ ID NO: 1170422
auuuaagucaucuugacac

SEQ ID NO: 1170424 - RNA, 19 nt, Artificial Sequence
  Description of Artificial Sequence: Synthetic oligonucleotide
  Sense strand starting at position 3057 of SEQ ID NO: 916613
aggguuguauuaucacuuu

SEQ ID NO: 1170425 - RNA, 19 nt, Artificial Sequence
  Description of Artificial Sequence: Synthetic oligonucleotide
  Antisense strand to SEQ ID NO: 1170424
aaagugauaauacaacccu

SEQ ID NO: 1170426 - RNA, 19 nt, Artificial Sequence
  Description of Artificial Sequence: Synthetic oligonucleotide
  Sense strand starting at position 3060 of SEQ ID NO: 916613
guuguauuaucacuuuaca

SEQ ID NO: 1170427 - RNA, 19 nt, Artificial Sequence
  Description of Artificial Sequence: Synthetic oligonucleotide
  Antisense strand to SEQ ID NO: 1170426
uguaaagugauaauacaac

SEQ ID NO: 1170428 - RNA, 19 nt, Artificial Sequence
  Description of Artificial Sequence: Synthetic oligonucleotide
  Sense strand starting at position 3063 of SEQ ID NO: 916613
guauuaucacuuuacagcu

SEQ ID NO: 1170429 - RNA, 19 nt, Artificial Sequence
  Description of Artificial Sequence: Synthetic oligonucleotide
  Antisense strand to SEQ ID NO: 1170428
agcuguaaagugauaauac

SEQ ID NO: 1170430 - RNA, 19 nt, Artificial Sequence
  Description of Artificial Sequence: Synthetic oligonucleotide
  Sense strand starting at position 3084 of SEQ ID NO: 916613
agagaauuauuguucccug

SEQ ID NO: 1170431 - RNA, 19 nt, Artificial Sequence
  Description of Artificial Sequence: Synthetic oligonucleotide
  Antisense strand to SEQ ID NO: 1170430
cagggaacaauaauucucu

SEQ ID NO: 1170432 - RNA, 19 nt, Artificial Sequence
  Description of Artificial Sequence: Synthetic oligonucleotide
  Sense strand starting at position 3085 of SEQ ID NO: 916613
gagaauuauuguucccugu

SEQ ID NO: 1170433 - RNA, 19 nt, Artificial Sequence
  Description of Artificial Sequence: Synthetic oligonucleotide
  Antisense strand to SEQ ID NO: 1170432
acagggaacaauaauucuc

SEQ ID NO: 1170434 - RNA, 19 nt, Artificial Sequence
  Description of Artificial Sequence: Synthetic oligonucleotide
  Sense strand starting at position 3098 of SEQ ID NO: 916613
cccuguuaucuuuacagcu

SEQ ID NO: 1170435 - RNA, 19 nt, Artificial Sequence
  Description of Artificial Sequence: Synthetic oligonucleotide
  Antisense strand to SEQ ID NO: 1170434
agcuguaaagauaacaggg

SEQ ID NO: 1170436 - RNA, 19 nt, Artificial Sequence
  Description of Artificial Sequence: Synthetic oligonucleotide
  Sense strand starting at position 3119 of SEQ ID NO: 916613
cuugaucccuuucuguuau

SEQ ID NO: 1170437 - RNA, 19 nt, Artificial Sequence
  Description of Artificial Sequence: Synthetic oligonucleotide
  Antisense strand to SEQ ID NO: 1170436
auaacagaaagggaucaag

SEQ ID NO: 1170438 - RNA, 19 nt, Artificial Sequence
  Description of Artificial Sequence: Synthetic oligonucleotide
  Sense strand starting at position 3177 of SEQ ID NO: 916613
agucuaaacuaauuguacu

SEQ ID NO: 1170439 - RNA, 19 nt, Artificial Sequence
  Description of Artificial Sequence: Synthetic oligonucleotide
  Antisense strand to SEQ ID NO: 1170438
aguacaauuaguuuagacu

SEQ ID NO: 1170440 - RNA, 19 nt, Artificial Sequence
  Description of Artificial Sequence: Synthetic oligonucleotide
  Sense strand starting at position 3440 of SEQ ID NO: 916613
augguuccaucauuaguua

SEQ ID NO: 1170441 - RNA, 19 nt, Artificial Sequence
  Description of Artificial Sequence: Synthetic oligonucleotide
  Antisense strand to SEQ ID NO: 1170440
uaacuaaugauggaaccau

SEQ ID NO: 1170442 - RNA, 19 nt, Artificial Sequence
  Description of Artificial Sequence: Synthetic oligonucleotide
  Sense strand starting at position 3488 of SEQ ID NO: 916613
ccgggaaucugagugauac

SEQ ID NO: 1170443 - RNA, 19 nt, Artificial Sequence
  Description of Artificial Sequence: Synthetic oligonucleotide
  Antisense strand to SEQ ID NO: 1170442
guaucacucagauucccgg

SEQ ID NO: 1170444 - RNA, 19 nt, Artificial Sequence
  Description of Artificial Sequence: Synthetic oligonucleotide
  Sense strand starting at position 3489 of SEQ ID NO: 916613
cgggaaucugagugauacg

SEQ ID NO: 1170445 - RNA, 19 nt, Artificial Sequence
  Description of Artificial Sequence: Synthetic oligonucleotide
  Antisense strand to SEQ ID NO: 1170444
cguaucacucagauucccg

SEQ ID NO: 1170446 - RNA, 19 nt, Artificial Sequence
  Description of Artificial Sequence: Synthetic oligonucleotide
  Sense strand starting at position 3494 of SEQ ID NO: 916613
aucugagugauacggucau

SEQ ID NO: 1170447 - RNA, 19 nt, Artificial Sequence
  Description of Artificial Sequence: Synthetic oligonucleotide
  Antisense strand to SEQ ID NO: 1170446
augaccguaucacucagau

SEQ ID NO: 1170448 - RNA, 19 nt, Artificial Sequence
  Description of Artificial Sequence: Synthetic oligonucleotide
  Sense strand starting at position 3498 of SEQ ID NO: 916613
gagugauacggucaucuuc

SEQ ID NO: 1170449 - RNA, 19 nt, Artificial Sequence
  Description of Artificial Sequence: Synthetic oligonucleotide
  Antisense strand to SEQ ID NO: 1170448
gaagaugaccguaucacuc

SEQ ID NO: 1170450 - RNA, 19 nt, Artificial Sequence
  Description of Artificial Sequence: Synthetic oligonucleotide
  Sense strand starting at position 3527 of SEQ ID NO: 916613
agaggagauucacagguaa

SEQ ID NO: 1170451 - RNA, 19 nt, Artificial Sequence
  Description of Artificial Sequence: Synthetic oligonucleotide
  Antisense strand to SEQ ID NO: 1170450
uuaccugugaaucuccucu

SEQ ID NO: 1170452 - RNA, 19 nt, Artificial Sequence
  Description of Artificial Sequence: Synthetic oligonucleotide
  Sense strand starting at position 3539 of SEQ ID NO: 916613
cagguaaagccugaugcuu

SEQ ID NO: 1170453 - RNA, 19 nt, Artificial Sequence
  Description of Artificial Sequence: Synthetic oligonucleotide
  Antisense strand to SEQ ID NO: 1170452
aagcaucaggcuuuaccug

SEQ ID NO: 1170454 - RNA, 19 nt, Artificial Sequence
  Description of Artificial Sequence: Synthetic oligonucleotide
  Sense strand starting at position 3628 of SEQ ID NO: 916613
ccuggacagcucuguuuau

SEQ ID NO: 1170455 - RNA, 19 nt, Artificial Sequence
  Description of Artificial Sequence: Synthetic oligonucleotide
  Antisense strand to SEQ ID NO: 1170454
auaaacagagcuguccagg

SEQ ID NO: 1170456 - RNA, 19 nt, Artificial Sequence
  Description of Artificial Sequence: Synthetic oligonucleotide
  Sense strand starting at position 3685 of SEQ ID NO: 916613
uagauauggcagugaacag

SEQ ID NO: 1170457 - RNA, 19 nt, Artificial Sequence
  Description of Artificial Sequence: Synthetic oligonucleotide
  Antisense strand to SEQ ID NO: 1170456
cuguucacugccauaucua

SEQ ID NO: 1170458 - RNA, 19 nt, Artificial Sequence
  Description of Artificial Sequence: Synthetic oligonucleotide
  Sense strand starting at position 3834 of SEQ ID NO: 916613
aaacacuacgcuuaaguga

SEQ ID NO: 1170459 - RNA, 19 nt, Artificial Sequence
  Description of Artificial Sequence: Synthetic oligonucleotide
  Antisense strand to SEQ ID NO: 1170458
ucacuuaagcguaguguuu

SEQ ID NO: 1170460 - RNA, 19 nt, Artificial Sequence
  Description of Artificial Sequence: Synthetic oligonucleotide
  Sense strand starting at position 3885 of SEQ ID NO: 916613
cgacuccauuuauaggaaa

SEQ ID NO: 1170461 - RNA, 19 nt, Artificial Sequence
  Description of Artificial Sequence: Synthetic oligonucleotide
  Antisense strand to SEQ ID NO: 1170460
uuuccuauaaauggagucg

SEQ ID NO: 1170462 - RNA, 19 nt, Artificial Sequence
  Description of Artificial Sequence: Synthetic oligonucleotide
  Sense strand starting at position 65 of SEQ ID NO: 916614
gacagaauugcugacucga

SEQ ID NO: 1170463 - RNA, 19 nt, Artificial Sequence
  Description of Artificial Sequence: Synthetic oligonucleotide
  Antisense strand to SEQ ID NO: 1170462
ucgagucagcaauucuguc

SEQ ID NO: 1170464 - RNA, 19 nt, Artificial Sequence
  Description of Artificial Sequence: Synthetic oligonucleotide
  Sense strand starting at position 67 of SEQ ID NO: 916614
cagaauugcugacucgaag

SEQ ID NO: 1170465 - RNA, 19 nt, Artificial Sequence
  Description of Artificial Sequence: Synthetic oligonucleotide
  Antisense strand to SEQ ID NO: 1170464
cuucgagucagcaauucug

SEQ ID NO: 1170466 - RNA, 19 nt, Artificial Sequence
  Description of Artificial Sequence: Synthetic oligonucleotide
  Sense strand starting at position 95 of SEQ ID NO: 916614
uguuaaauguuaccgcauu

SEQ ID NO: 1170467 - RNA, 19 nt, Artificial Sequence
  Description of Artificial Sequence: Synthetic oligonucleotide
  Antisense strand to SEQ ID NO: 1170466
aaugcgguaacauuuaaca

SEQ ID NO: 1170468 - RNA, 19 nt, Artificial Sequence
  Description of Artificial Sequence: Synthetic oligonucleotide
  Sense strand starting at position 108 of SEQ ID NO: 916614
cgcauuccuuucucagaca

SEQ ID NO: 1170469 - RNA, 19 nt, Artificial Sequence
  Description of Artificial Sequence: Synthetic oligonucleotide
  Antisense strand to SEQ ID NO: 1170468
ugucugagaaaggaaugcg

SEQ ID NO: 1170470 - RNA, 19 nt, Artificial Sequence
  Description of Artificial Sequence: Synthetic oligonucleotide
  Sense strand starting at position 129 of SEQ ID NO: 916614
cuaauuagguguuaggaau

SEQ ID NO: 1170471 - RNA, 19 nt, Artificial Sequence
  Description of Artificial Sequence: Synthetic oligonucleotide
  Antisense strand to SEQ ID NO: 1170470
auuccuaacaccuaauuag

SEQ ID NO: 1170472 - RNA, 19 nt, Artificial Sequence
  Description of Artificial Sequence: Synthetic oligonucleotide
  Sense strand starting at position 353 of SEQ ID NO: 916614
uguccacugugauauaaag

SEQ ID NO: 1170473 - RNA, 19 nt, Artificial Sequence
  Description of Artificial Sequence: Synthetic oligonucleotide
  Antisense strand to SEQ ID NO: 1170472
cuuuauaucacaguggaca

SEQ ID NO: 1170474 - RNA, 19 nt, Artificial Sequence
  Description of Artificial Sequence: Synthetic oligonucleotide
  Sense strand starting at position 399 of SEQ ID NO: 916614
uuuggugauucuuugaaag

SEQ ID NO: 1170475 - RNA, 19 nt, Artificial Sequence
  Description of Artificial Sequence: Synthetic oligonucleotide
  Antisense strand to SEQ ID NO: 1170474
cuuucaaagaaucaccaaa

SEQ ID NO: 1170476 - RNA, 19 nt, Artificial Sequence
  Description of Artificial Sequence: Synthetic oligonucleotide
  Sense strand starting at position 516 of SEQ ID NO: 916614
agcaguuuguaucucccua

SEQ ID NO: 1170477 - RNA, 19 nt, Artificial Sequence
  Description of Artificial Sequence: Synthetic oligonucleotide
  Antisense strand to SEQ ID NO: 1170476
uagggagauacaaacugcu

SEQ ID NO: 1170478 - RNA, 19 nt, Artificial Sequence
  Description of Artificial Sequence: Synthetic oligonucleotide
  Sense strand starting at position 520 of SEQ ID NO: 916614
guuuguaucucccuaacug

SEQ ID NO: 1170479 - RNA, 19 nt, Artificial Sequence
  Description of Artificial Sequence: Synthetic oligonucleotide
  Antisense strand to SEQ ID NO: 1170478
caguuagggagauacaaac

SEQ ID NO: 1170480 - RNA, 19 nt, Artificial Sequence
  Description of Artificial Sequence: Synthetic oligonucleotide
  Sense strand starting at position 524 of SEQ ID NO: 916614
guaucucccuaacuggaau

SEQ ID NO: 1170481 - RNA, 19 nt, Artificial Sequence
  Description of Artificial Sequence: Synthetic oligonucleotide
  Antisense strand to SEQ ID NO: 1170480
auuccaguuagggagauac

SEQ ID NO: 1170482 - RNA, 19 nt, Artificial Sequence
  Description of Artificial Sequence: Synthetic oligonucleotide
  Sense strand starting at position 609 of SEQ ID NO: 916614
ugcugagaucgucagagca

SEQ ID NO: 1170483 - RNA, 19 nt, Artificial Sequence
  Description of Artificial Sequence: Synthetic oligonucleotide
  Antisense strand to SEQ ID NO: 1170482
ugcucugacgaucucagca

SEQ ID NO: 1170484 - RNA, 19 nt, Artificial Sequence
  Description of Artificial Sequence: Synthetic oligonucleotide
  Sense strand starting at position 634 of SEQ ID NO: 916614
gaguaaggaugacuuguga

SEQ ID NO: 1170485 - RNA, 19 nt, Artificial Sequence
  Description of Artificial Sequence: Synthetic oligonucleotide
  Antisense strand to SEQ ID NO: 1170484
ucacaagucauccuuacuc

SEQ ID NO: 1170486 - RNA, 19 nt, Artificial Sequence
  Description of Artificial Sequence: Synthetic oligonucleotide
  Sense strand starting at position 697 of SEQ ID NO: 916614
uugccuaguugggauaaga

SEQ ID NO: 1170487 - RNA, 19 nt, Artificial Sequence
  Description of Artificial Sequence: Synthetic oligonucleotide
  Antisense strand to SEQ ID NO: 1170486
ucuuaucccaacuaggcaa

SEQ ID NO: 1170488 - RNA, 19 nt, Artificial Sequence
  Description of Artificial Sequence: Synthetic oligonucleotide
  Sense strand starting at position 737 of SEQ ID NO: 916614
guugucaagucacugagaa

SEQ ID NO: 1170489 - RNA, 19 nt, Artificial Sequence
  Description of Artificial Sequence: Synthetic oligonucleotide
  Antisense strand to SEQ ID NO: 1170488
uucucagugacuugacaac

SEQ ID NO: 1170490 - RNA, 19 nt, Artificial Sequence
  Description of Artificial Sequence: Synthetic oligonucleotide
  Sense strand starting at position 763 of SEQ ID NO: 916614
ugugaaugcuaacuaagac

SEQ ID NO: 1170491 - RNA, 19 nt, Artificial Sequence
  Description of Artificial Sequence: Synthetic oligonucleotide
  Antisense strand to SEQ ID NO: 1170490
gucuuaguuagcauucaca

SEQ ID NO: 1170492 - RNA, 19 nt, Artificial Sequence
  Description of Artificial Sequence: Synthetic oligonucleotide
  Sense strand starting at position 775 of SEQ ID NO: 916614
cuaagacuaucugcacaga

SEQ ID NO: 1170493 - RNA, 19 nt, Artificial Sequence
  Description of Artificial Sequence: Synthetic oligonucleotide
  Antisense strand to SEQ ID NO: 1170492
ucugugcagauagucuuag

SEQ ID NO: 1170494 - RNA, 19 nt, Artificial Sequence
  Description of Artificial Sequence: Synthetic oligonucleotide
  Sense strand starting at position 794 of SEQ ID NO: 916614
uuggaaaggugguaguaau

SEQ ID NO: 1170495 - RNA, 19 nt, Artificial Sequence
  Description of Artificial Sequence: Synthetic oligonucleotide
  Antisense strand to SEQ ID NO: 1170494
auuacuaccaccuuuccaa

SEQ ID NO: 1170496 - RNA, 19 nt, Artificial Sequence
  Description of Artificial Sequence: Synthetic oligonucleotide
  Sense strand starting at position 804 of SEQ ID NO: 916614
gguaguaaugaguaacuuc

SEQ ID NO: 1170497 - RNA, 19 nt, Artificial Sequence
  Description of Artificial Sequence: Synthetic oligonucleotide
  Antisense strand to SEQ ID NO: 1170496
gaaguuacucauuacuacc

SEQ ID NO: 1170498 - RNA, 19 nt, Artificial Sequence
  Description of Artificial Sequence: Synthetic oligonucleotide
  Sense strand starting at position 841 of SEQ ID NO: 916614
cuccaagacuugcauuaga

SEQ ID NO: 1170499 - RNA, 19 nt, Artificial Sequence
  Description of Artificial Sequence: Synthetic oligonucleotide
  Antisense strand to SEQ ID NO: 1170498
ucuaaugcaagucuuggag

SEQ ID NO: 1170500 - RNA, 19 nt, Artificial Sequence
  Description of Artificial Sequence: Synthetic oligonucleotide
  Sense strand starting at position 921 of SEQ ID NO: 916614
caggguaagagcugaagua

SEQ ID NO: 1170501 - RNA, 19 nt, Artificial Sequence
  Description of Artificial Sequence: Synthetic oligonucleotide
  Antisense strand to SEQ ID NO: 1170500
uacuucagcucuuacccug

SEQ ID NO: 1170502 - RNA, 19 nt, Artificial Sequence
  Description of Artificial Sequence: Synthetic oligonucleotide
  Sense strand starting at position 992 of SEQ ID NO: 916614
gcuggugucagggacacua

SEQ ID NO: 1170503 - RNA, 19 nt, Artificial Sequence
  Description of Artificial Sequence: Synthetic oligonucleotide
  Antisense strand to SEQ ID NO: 1170502
uagugucccugacaccagc

SEQ ID NO: 1170504 - RNA, 19 nt, Artificial Sequence
  Description of Artificial Sequence: Synthetic oligonucleotide
  Sense strand starting at position 1106 of SEQ ID NO: 916614
gcacuucugucgccaauag

SEQ ID NO: 1170505 - RNA, 19 nt, Artificial Sequence
  Description of Artificial Sequence: Synthetic oligonucleotide
  Antisense strand to SEQ ID NO: 1170504
cuauuggcgacagaagugc

SEQ ID NO: 1170506 - RNA, 19 nt, Artificial Sequence
  Description of Artificial Sequence: Synthetic oligonucleotide
  Sense strand starting at position 1171 of SEQ ID NO: 916614
ggaagcaauaaucgggaau

SEQ ID NO: 1170507 - RNA, 19 nt, Artificial Sequence
  Description of Artificial Sequence: Synthetic oligonucleotide
  Antisense strand to SEQ ID NO: 1170506
auucccgauuauugcuucc

SEQ ID NO: 1170508 - RNA, 19 nt, Artificial Sequence
  Description of Artificial Sequence: Synthetic oligonucleotide
  Sense strand starting at position 1173 of SEQ ID NO: 916614
aagcaauaaucgggaauga

SEQ ID NO: 1170509 - RNA, 19 nt, Artificial Sequence
  Description of Artificial Sequence: Synthetic oligonucleotide
  Antisense strand to SEQ ID NO: 1170508
ucauucccgauuauugcuu

SEQ ID NO: 1170510 - RNA, 19 nt, Artificial Sequence
  Description of Artificial Sequence: Synthetic oligonucleotide
  Sense strand starting at position 2373 of SEQ ID NO: 916614
guaacaugacuuuauuguu

SEQ ID NO: 1170511 - RNA, 19 nt, Artificial Sequence
  Description of Artificial Sequence: Synthetic oligonucleotide
  Antisense strand to SEQ ID NO: 1170510
aacaauaaagucauguuac

SEQ ID NO: 1170512 - RNA, 19 nt, Artificial Sequence
  Description of Artificial Sequence: Synthetic oligonucleotide
  Sense strand starting at position 2435 of SEQ ID NO: 916614
gaaagacauguuuguugag

SEQ ID NO: 1170513 - RNA, 19 nt, Artificial Sequence
  Description of Artificial Sequence: Synthetic oligonucleotide
  Antisense strand to SEQ ID NO: 1170512
cucaacaaacaugucuuuc

SEQ ID NO: 1170514 - RNA, 19 nt, Artificial Sequence
  Description of Artificial Sequence: Synthetic oligonucleotide
  Sense strand starting at position 2436 of SEQ ID NO: 916614
aaagacauguuuguugaga

SEQ ID NO: 1170515 - RNA, 19 nt, Artificial Sequence
  Description of Artificial Sequence: Synthetic oligonucleotide
  Antisense strand to SEQ ID NO: 1170514
ucucaacaaacaugucuuu

SEQ ID NO: 1170516 - RNA, 19 nt, Artificial Sequence
  Description of Artificial Sequence: Synthetic oligonucleotide
  Sense strand starting at position 2437 of SEQ ID NO: 916614
aagacauguuuguugagag

SEQ ID NO: 1170517 - RNA, 19 nt, Artificial Sequence
  Description of Artificial Sequence: Synthetic oligonucleotide
  Antisense strand to SEQ ID NO: 1170516
cucucaacaaacaugucuu

SEQ ID NO: 1170518 - RNA, 19 nt, Artificial Sequence
  Description of Artificial Sequence: Synthetic oligonucleotide
  Sense strand starting at position 2447 of SEQ ID NO: 916614
uguugagaguucuuaccgu

SEQ ID NO: 1170519 - RNA, 19 nt, Artificial Sequence
  Description of Artificial Sequence: Synthetic oligonucleotide
  Antisense strand to SEQ ID NO: 1170518
acgguaagaacucucaaca

SEQ ID NO: 1170520 - RNA, 19 nt, Artificial Sequence
  Description of Artificial Sequence: Synthetic oligonucleotide
  Sense strand starting at position 2530 of SEQ ID NO: 916614
guguuuggccucugaagga

SEQ ID NO: 1170521 - RNA, 19 nt, Artificial Sequence
  Description of Artificial Sequence: Synthetic oligonucleotide
  Antisense strand to SEQ ID NO: 1170520
uccuucagaggccaaacac

SEQ ID NO: 1170522 - RNA, 19 nt, Artificial Sequence
  Description of Artificial Sequence: Synthetic oligonucleotide
  Sense strand starting at position 2647 of SEQ ID NO: 916614
aggacuaugcgcuaugguu

SEQ ID NO: 1170523 - RNA, 19 nt, Artificial Sequence
  Description of Artificial Sequence: Synthetic oligonucleotide
  Antisense strand to SEQ ID NO: 1170522
aaccauagcgcauaguccu

SEQ ID NO: 1170524 - RNA, 19 nt, Artificial Sequence
  Description of Artificial Sequence: Synthetic oligonucleotide
  Sense strand starting at position 2653 of SEQ ID NO: 916614
augcgcuaugguuguucua

SEQ ID NO: 1170525 - RNA, 19 nt, Artificial Sequence
  Description of Artificial Sequence: Synthetic oligonucleotide
  Antisense strand to SEQ ID NO: 1170524
uagaacaaccauagcgcau

SEQ ID NO: 1170526 - RNA, 19 nt, Artificial Sequence
  Description of Artificial Sequence: Synthetic oligonucleotide
  Sense strand starting at position 2654 of SEQ ID NO: 916614
ugcgcuaugguuguucuaa

SEQ ID NO: 1170527 - RNA, 19 nt, Artificial Sequence
  Description of Artificial Sequence: Synthetic oligonucleotide
  Antisense strand to SEQ ID NO: 1170526
uuagaacaaccauagcgca

SEQ ID NO: 1170528 - RNA, 19 nt, Artificial Sequence
  Description of Artificial Sequence: Synthetic oligonucleotide
  Sense strand starting at position 2655 of SEQ ID NO: 916614
gcgcuaugguuguucuaaa

SEQ ID NO: 1170529 - RNA, 19 nt, Artificial Sequence
  Description of Artificial Sequence: Synthetic oligonucleotide
  Antisense strand to SEQ ID NO: 1170528
uuuagaacaaccauagcgc

SEQ ID NO: 1170530 - RNA, 19 nt, Artificial Sequence
  Description of Artificial Sequence: Synthetic oligonucleotide
  Sense strand starting at position 2656 of SEQ ID NO: 916614
cgcuaugguuguucuaaag

SEQ ID NO: 1170531 - RNA, 19 nt, Artificial Sequence
  Description of Artificial Sequence: Synthetic oligonucleotide
  Antisense strand to SEQ ID NO: 1170530
cuuuagaacaaccauagcg

SEQ ID NO: 1170532 - RNA, 19 nt, Artificial Sequence
  Description of Artificial Sequence: Synthetic oligonucleotide
  Sense strand starting at position 2681 of SEQ ID NO: 916614
aaguaauaguaggacuaga

SEQ ID NO: 1170533 - RNA, 19 nt, Artificial Sequence
  Description of Artificial Sequence: Synthetic oligonucleotide
  Antisense strand to SEQ ID NO: 1170532
ucuaguccuacuauuacuu

SEQ ID NO: 1170534 - RNA, 19 nt, Artificial Sequence
  Description of Artificial Sequence: Synthetic oligonucleotide
  Sense strand starting at position 2698 of SEQ ID NO: 916614
gagaaagcugcaugggaca

SEQ ID NO: 1170535 - RNA, 19 nt, Artificial Sequence
  Description of Artificial Sequence: Synthetic oligonucleotide
  Antisense strand to SEQ ID NO: 1170534
ugucccaugcagcuuucuc

SEQ ID NO: 1170536 - RNA, 19 nt, Artificial Sequence
  Description of Artificial Sequence: Synthetic oligonucleotide
  Sense strand starting at position 2719 of SEQ ID NO: 916614
guagcacugucagaacaca

SEQ ID NO: 1170537 - RNA, 19 nt, Artificial Sequence
  Description of Artificial Sequence: Synthetic oligonucleotide
  Antisense strand to SEQ ID NO: 1170536
uguguucugacagugcuac

SEQ ID NO: 1170538 - RNA, 19 nt, Artificial Sequence
  Description of Artificial Sequence: Synthetic oligonucleotide
  Sense strand starting at position 2743 of SEQ ID NO: 916614
gugaguauccacugcugag

SEQ ID NO: 1170539 - RNA, 19 nt, Artificial Sequence
  Description of Artificial Sequence: Synthetic oligonucleotide
  Antisense strand to SEQ ID NO: 1170538
cucagcaguggauacucac

SEQ ID NO: 1170540 - RNA, 19 nt, Artificial Sequence
  Description of Artificial Sequence: Synthetic oligonucleotide
  Sense strand starting at position 2760 of SEQ ID NO: 916614
aggagcagaucucuuaucu

SEQ ID NO: 1170541 - RNA, 19 nt, Artificial Sequence
  Description of Artificial Sequence: Synthetic oligonucleotide
  Antisense strand to SEQ ID NO: 1170540
agauaagagaucugcuccu

SEQ ID NO: 1170542 - RNA, 19 nt, Artificial Sequence
  Description of Artificial Sequence: Synthetic oligonucleotide
  Sense strand starting at position 50 of SEQ ID NO: 916615
cuuggaucuugacuccaaa

SEQ ID NO: 1170543 - RNA, 19 nt, Artificial Sequence
  Description of Artificial Sequence: Synthetic oligonucleotide
  Antisense strand to SEQ ID NO: 1170542
uuuggagucaagauccaag

SEQ ID NO: 1170544 - RNA, 19 nt, Artificial Sequence
  Description of Artificial Sequence: Synthetic oligonucleotide
  Sense strand starting at position 72 of SEQ ID NO: 916615
acaggugauuccuucuuau

SEQ ID NO: 1170545 - RNA, 19 nt, Artificial Sequence
  Description of Artificial Sequence: Synthetic oligonucleotide
  Antisense strand to SEQ ID NO: 1170544
auaagaaggaaucaccugu

SEQ ID NO: 1170546 - RNA, 19 nt, Artificial Sequence
  Description of Artificial Sequence: Synthetic oligonucleotide
  Sense strand starting at position 75 of SEQ ID NO: 916615
ggugauuccuucuuauaau

SEQ ID NO: 1170547 - RNA, 19 nt, Artificial Sequence
  Description of Artificial Sequence: Synthetic oligonucleotide
  Antisense strand to SEQ ID NO: 1170546
auuauaagaaggaaucacc

SEQ ID NO: 1170548 - RNA, 19 nt, Artificial Sequence
  Description of Artificial Sequence: Synthetic oligonucleotide
  Sense strand starting at position 123 of SEQ ID NO: 916615
ugaaucaaguugucuuaga

SEQ ID NO: 1170549 - RNA, 19 nt, Artificial Sequence
  Description of Artificial Sequence: Synthetic oligonucleotide
  Antisense strand to SEQ ID NO: 1170548
ucuaagacaacuugauuca

SEQ ID NO: 1170550 - RNA, 19 nt, Artificial Sequence
  Description of Artificial Sequence: Synthetic oligonucleotide
  Sense strand starting at position 124 of SEQ ID NO: 916615
gaaucaaguugucuuagaa

SEQ ID NO: 1170551 - RNA, 19 nt, Artificial Sequence
  Description of Artificial Sequence: Synthetic oligonucleotide
  Antisense strand to SEQ ID NO: 1170550
uucuaagacaacuugauuc

SEQ ID NO: 1170552 - RNA, 19 nt, Artificial Sequence
  Description of Artificial Sequence: Synthetic oligonucleotide
  Sense strand starting at position 166 of SEQ ID NO: 916615
ggugauucuuaaccauaga

SEQ ID NO: 1170553 - RNA, 19 nt, Artificial Sequence
  Description of Artificial Sequence: Synthetic oligonucleotide
  Antisense strand to SEQ ID NO: 1170552
ucuaugguuaagaaucacc

SEQ ID NO: 1170554 - RNA, 19 nt, Artificial Sequence
  Description of Artificial Sequence: Synthetic oligonucleotide
  Sense strand starting at position 323 of SEQ ID NO: 916615
uucuaagugcucuauaaag

SEQ ID NO: 1170555 - RNA, 19 nt, Artificial Sequence
  Description of Artificial Sequence: Synthetic oligonucleotide
  Antisense strand to SEQ ID NO: 1170554
cuuuauagagcacuuagaa

SEQ ID NO: 1170556 - RNA, 19 nt, Artificial Sequence
  Description of Artificial Sequence: Synthetic oligonucleotide
  Sense strand starting at position 325 of SEQ ID NO: 916615
cuaagugcucuauaaagaa

SEQ ID NO: 1170557 - RNA, 19 nt, Artificial Sequence
  Description of Artificial Sequence: Synthetic oligonucleotide
  Antisense strand to SEQ ID NO: 1170556
uucuuuauagagcacuuag

SEQ ID NO: 1170558 - RNA, 19 nt, Artificial Sequence
  Description of Artificial Sequence: Synthetic oligonucleotide
  Sense strand starting at position 354 of SEQ ID NO: 916615
cuaugcuuuccugaugaga

SEQ ID NO: 1170559 - RNA, 19 nt, Artificial Sequence
  Description of Artificial Sequence: Synthetic oligonucleotide
  Antisense strand to SEQ ID NO: 1170558
ucucaucaggaaagcauag

SEQ ID NO: 1170560 - RNA, 19 nt, Artificial Sequence
  Description of Artificial Sequence: Synthetic oligonucleotide
  Sense strand starting at position 460 of SEQ ID NO: 916615
cugggaucacucugacucu

SEQ ID NO: 1170561 - RNA, 19 nt, Artificial Sequence
  Description of Artificial Sequence: Synthetic oligonucleotide
  Antisense strand to SEQ ID NO: 1170560
agagucagagugaucccag

SEQ ID NO: 1170562 - RNA, 19 nt, Artificial Sequence
  Description of Artificial Sequence: Synthetic oligonucleotide
  Sense strand starting at position 719 of SEQ ID NO: 916615
gggcuuuaugacugaaucu

SEQ ID NO: 1170563 - RNA, 19 nt, Artificial Sequence
  Description of Artificial Sequence: Synthetic oligonucleotide
  Antisense strand to SEQ ID NO: 1170562
agauucagucauaaagccc

SEQ ID NO: 1170564 - RNA, 19 nt, Artificial Sequence
  Description of Artificial Sequence: Synthetic oligonucleotide
  Sense strand starting at position 754 of SEQ ID NO: 916615
gacuuccucccauggguaa

SEQ ID NO: 1170565 - RNA, 19 nt, Artificial Sequence
  Description of Artificial Sequence: Synthetic oligonucleotide
  Antisense strand to SEQ ID NO: 1170564
uuacccaugggaggaaguc

SEQ ID NO: 1170566 - RNA, 19 nt, Artificial Sequence
  Description of Artificial Sequence: Synthetic oligonucleotide
  Sense strand starting at position 755 of SEQ ID NO: 916615
acuuccucccauggguaaa

SEQ ID NO: 1170567 - RNA, 19 nt, Artificial Sequence
  Description of Artificial Sequence: Synthetic oligonucleotide
  Antisense strand to SEQ ID NO: 1170566
uuuacccaugggaggaagu

SEQ ID NO: 1170568 - RNA, 19 nt, Artificial Sequence
  Description of Artificial Sequence: Synthetic oligonucleotide
  Sense strand starting at position 766 of SEQ ID NO: 916615
uggguaaauauguagguca

SEQ ID NO: 1170569 - RNA, 19 nt, Artificial Sequence
  Description of Artificial Sequence: Synthetic oligonucleotide
  Antisense strand to SEQ ID NO: 1170568
ugaccuacauauuuaccca

SEQ ID NO: 1170570 - RNA, 19 nt, Artificial Sequence
  Description of Artificial Sequence: Synthetic oligonucleotide
  Sense strand starting at position 768 of SEQ ID NO: 916615
gguaaauauguaggucaca

SEQ ID NO: 1170571 - RNA, 19 nt, Artificial Sequence
  Description of Artificial Sequence: Synthetic oligonucleotide
  Antisense strand to SEQ ID NO: 1170570
ugugaccuacauauuuacc

SEQ ID NO: 1170572 - RNA, 19 nt, Artificial Sequence
  Description of Artificial Sequence: Synthetic oligonucleotide
  Sense strand starting at position 845 of SEQ ID NO: 916615
uggaauauaccuugggcau

SEQ ID NO: 1170573 - RNA, 19 nt, Artificial Sequence
  Description of Artificial Sequence: Synthetic oligonucleotide
  Antisense strand to SEQ ID NO: 1170572
augcccaagguauauucca

SEQ ID NO: 1170574 - RNA, 19 nt, Artificial Sequence
  Description of Artificial Sequence: Synthetic oligonucleotide
  Sense strand starting at position 846 of SEQ ID NO: 916615
ggaauauaccuugggcauu

SEQ ID NO: 1170575 - RNA, 19 nt, Artificial Sequence
  Description of Artificial Sequence: Synthetic oligonucleotide
  Antisense strand to SEQ ID NO: 1170574
aaugcccaagguauauucc

SEQ ID NO: 1170576 - RNA, 19 nt, Artificial Sequence
  Description of Artificial Sequence: Synthetic oligonucleotide
  Sense strand starting at position 908 of SEQ ID NO: 916615
ggcuaacucuuggucauuu

SEQ ID NO: 1170577 - RNA, 19 nt, Artificial Sequence
  Description of Artificial Sequence: Synthetic oligonucleotide
  Antisense strand to SEQ ID NO: 1170576
aaaugaccaagaguuagcc

SEQ ID NO: 1170578 - RNA, 19 nt, Artificial Sequence
  Description of Artificial Sequence: Synthetic oligonucleotide
  Sense strand starting at position 1015 of SEQ ID NO: 916615
gaggauaguuacucacaau

SEQ ID NO: 1170579 - RNA, 19 nt, Artificial Sequence
  Description of Artificial Sequence: Synthetic oligonucleotide
  Antisense strand to SEQ ID NO: 1170578
auugugaguaacuauccuc

SEQ ID NO: 1170580 - RNA, 19 nt, Artificial Sequence
  Description of Artificial Sequence: Synthetic oligonucleotide
  Sense strand starting at position 1167 of SEQ ID NO: 916615
gggacaguaacuuguccaa

SEQ ID NO: 1170581 - RNA, 19 nt, Artificial Sequence
  Description of Artificial Sequence: Synthetic oligonucleotide
  Antisense strand to SEQ ID NO: 1170580
uuggacaaguuacuguccc

SEQ ID NO: 1170582 - RNA, 19 nt, Artificial Sequence
  Description of Artificial Sequence: Synthetic oligonucleotide
  Sense strand starting at position 1169 of SEQ ID NO: 916615
gacaguaacuuguccaaag

SEQ ID NO: 1170583 - RNA, 19 nt, Artificial Sequence
  Description of Artificial Sequence: Synthetic oligonucleotide
  Antisense strand to SEQ ID NO: 1170582
cuuuggacaaguuacuguc

SEQ ID NO: 1170584 - RNA, 19 nt, Artificial Sequence
  Description of Artificial Sequence: Synthetic oligonucleotide
  Sense strand starting at position 1170 of SEQ ID NO: 916615
acaguaacuuguccaaaga

SEQ ID NO: 1170585 - RNA, 19 nt, Artificial Sequence
  Description of Artificial Sequence: Synthetic oligonucleotide
  Antisense strand to SEQ ID NO: 1170584
ucuuuggacaaguuacugu

SEQ ID NO: 1170586 - RNA, 19 nt, Artificial Sequence
  Description of Artificial Sequence: Synthetic oligonucleotide
  Sense strand starting at position 1271 of SEQ ID NO: 916615
gaggacagauguucuccua

SEQ ID NO: 1170587 - RNA, 19 nt, Artificial Sequence
  Description of Artificial Sequence: Synthetic oligonucleotide
  Antisense strand to SEQ ID NO: 1170586
uaggagaacaucuguccuc

SEQ ID NO: 1170588 - RNA, 19 nt, Artificial Sequence
  Description of Artificial Sequence: Synthetic oligonucleotide
  Sense strand starting at position 1320 of SEQ ID NO: 916615
guugacuuccuggauauuc

SEQ ID NO: 1170589 - RNA, 19 nt, Artificial Sequence
  Description of Artificial Sequence: Synthetic oligonucleotide
  Antisense strand to SEQ ID NO: 1170588
gaauauccaggaagucaac

SEQ ID NO: 1170590 - RNA, 19 nt, Artificial Sequence
  Description of Artificial Sequence: Synthetic oligonucleotide
  Sense strand starting at position 1365 of SEQ ID NO: 916615
ucuuacugagcuuaugaaa

SEQ ID NO: 1170591 - RNA, 19 nt, Artificial Sequence
  Description of Artificial Sequence: Synthetic oligonucleotide
  Antisense strand to SEQ ID NO: 1170590
uuucauaagcucaguaaga

SEQ ID NO: 1170592 - RNA, 19 nt, Artificial Sequence
  Description of Artificial Sequence: Synthetic oligonucleotide
  Sense strand starting at position 1948 of SEQ ID NO: 916615
gaccgucugguauaacaau

SEQ ID NO: 1170593 - RNA, 19 nt, Artificial Sequence
  Description of Artificial Sequence: Synthetic oligonucleotide
  Antisense strand to SEQ ID NO: 1170592
auuguuauaccagacgguc

SEQ ID NO: 1170594 - RNA, 19 nt, Artificial Sequence
  Description of Artificial Sequence: Synthetic oligonucleotide
  Sense strand starting at position 2455 of SEQ ID NO: 916615
ccauucuggugggcagaaa

SEQ ID NO: 1170595 - RNA, 19 nt, Artificial Sequence
  Description of Artificial Sequence: Synthetic oligonucleotide
  Antisense strand to SEQ ID NO: 1170594
uuucugcccaccagaaugg

SEQ ID NO: 1170596 - RNA, 19 nt, Artificial Sequence
  Description of Artificial Sequence: Synthetic oligonucleotide
  Sense strand starting at position 2555 of SEQ ID NO: 916615
ggauuuggccaguggucuu

SEQ ID NO: 1170597 - RNA, 19 nt, Artificial Sequence
  Description of Artificial Sequence: Synthetic oligonucleotide
  Antisense strand to SEQ ID NO: 1170596
aagaccacuggccaaaucc

SEQ ID NO: 1170598 - RNA, 19 nt, Artificial Sequence
  Description of Artificial Sequence: Synthetic oligonucleotide
  Sense strand starting at position 2629 of SEQ ID NO: 916615
cauuacugaccaggaggua

SEQ ID NO: 1170599 - RNA, 19 nt, Artificial Sequence
  Description of Artificial Sequence: Synthetic oligonucleotide
  Antisense strand to SEQ ID NO: 1170598
uaccuccuggucaguaaug

SEQ ID NO: 1170600 - RNA, 19 nt, Artificial Sequence
  Description of Artificial Sequence: Synthetic oligonucleotide
  Sense strand starting at position 2751 of SEQ ID NO: 916615
gagaaaguaaugggcugua

SEQ ID NO: 1170601 - RNA, 19 nt, Artificial Sequence
  Description of Artificial Sequence: Synthetic oligonucleotide
  Antisense strand to SEQ ID NO: 1170600
uacagcccauuacuuucuc

SEQ ID NO: 1170602 - RNA, 19 nt, Artificial Sequence
  Description of Artificial Sequence: Synthetic oligonucleotide
  Sense strand starting at position 2754 of SEQ ID NO: 916615
aaaguaaugggcuguaaga

SEQ ID NO: 1170603 - RNA, 19 nt, Artificial Sequence
  Description of Artificial Sequence: Synthetic oligonucleotide
  Antisense strand to SEQ ID NO: 1170602
ucuuacagcccauuacuuu

SEQ ID NO: 1170604 - RNA, 19 nt, Artificial Sequence
  Description of Artificial Sequence: Synthetic oligonucleotide
  Sense strand starting at position 3012 of SEQ ID NO: 916615
agggauauuuaggauuccu

SEQ ID NO: 1170605 - RNA, 19 nt, Artificial Sequence
  Description of Artificial Sequence: Synthetic oligonucleotide
  Antisense strand to SEQ ID NO: 1170604
aggaauccuaaauaucccu

SEQ ID NO: 1170606 - RNA, 19 nt, Artificial Sequence
  Description of Artificial Sequence: Synthetic oligonucleotide
  Sense strand starting at position 3022 of SEQ ID NO: 916615
aggauuccuuaagccuuua

SEQ ID NO: 1170607 - RNA, 19 nt, Artificial Sequence
  Description of Artificial Sequence: Synthetic oligonucleotide
  Antisense strand to SEQ ID NO: 1170606
uaaaggcuuaaggaauccu

SEQ ID NO: 1170608 - RNA, 19 nt, Artificial Sequence
  Description of Artificial Sequence: Synthetic oligonucleotide
  Sense strand starting at position 3027 of SEQ ID NO: 916615
uccuuaagccuuuaugaug

SEQ ID NO: 1170609 - RNA, 19 nt, Artificial Sequence
  Description of Artificial Sequence: Synthetic oligonucleotide
  Antisense strand to SEQ ID NO: 1170608
caucauaaaggcuuaagga

SEQ ID NO: 1170610 - RNA, 19 nt, Artificial Sequence
  Description of Artificial Sequence: Synthetic oligonucleotide
  Sense strand starting at position 3062 of SEQ ID NO: 916615
gucugcuaagaauacagau

SEQ ID NO: 1170611 - RNA, 19 nt, Artificial Sequence
  Description of Artificial Sequence: Synthetic oligonucleotide
  Antisense strand to SEQ ID NO: 1170610
aucuguauucuuagcagac

SEQ ID NO: 1170612 - RNA, 19 nt, Artificial Sequence
  Description of Artificial Sequence: Synthetic oligonucleotide
  Sense strand starting at position 3198 of SEQ ID NO: 916615
ucaggagaaucuguauucu

SEQ ID NO: 1170613 - RNA, 19 nt, Artificial Sequence
  Description of Artificial Sequence: Synthetic oligonucleotide
  Antisense strand to SEQ ID NO: 1170612
agaauacagauucuccuga

SEQ ID NO: 1170614 - RNA, 19 nt, Artificial Sequence
  Description of Artificial Sequence: Synthetic oligonucleotide
  Sense strand starting at position 3206 of SEQ ID NO: 916615
aucuguauucuuuaucuga

SEQ ID NO: 1170615 - RNA, 19 nt, Artificial Sequence
  Description of Artificial Sequence: Synthetic oligonucleotide
  Antisense strand to SEQ ID NO: 1170614
ucagauaaagaauacagau

SEQ ID NO: 1170616 - RNA, 19 nt, Artificial Sequence
  Description of Artificial Sequence: Synthetic oligonucleotide
  Sense strand starting at position 3313 of SEQ ID NO: 916615
gcuacuugagggcaaugaa

SEQ ID NO: 1170617 - RNA, 19 nt, Artificial Sequence
  Description of Artificial Sequence: Synthetic oligonucleotide
  Antisense strand to SEQ ID NO: 1170616
uucauugcccucaaguagc

SEQ ID NO: 1170618 - RNA, 19 nt, Artificial Sequence
  Description of Artificial Sequence: Synthetic oligonucleotide
  Sense strand starting at position 3322 of SEQ ID NO: 916615
gggcaaugaaugugacaac

SEQ ID NO: 1170619 - RNA, 19 nt, Artificial Sequence
  Description of Artificial Sequence: Synthetic oligonucleotide
  Antisense strand to SEQ ID NO: 1170618
guugucacauucauugccc

SEQ ID NO: 1170620 - RNA, 19 nt, Artificial Sequence
  Description of Artificial Sequence: Synthetic oligonucleotide
  Sense strand starting at position 3348 of SEQ ID NO: 916615
auauuacaggcaugcaaua

SEQ ID NO: 1170621 - RNA, 19 nt, Artificial Sequence
  Description of Artificial Sequence: Synthetic oligonucleotide
  Antisense strand to SEQ ID NO: 1170620
uauugcaugccuguaauau

SEQ ID NO: 1170622 - RNA, 19 nt, Artificial Sequence
  Description of Artificial Sequence: Synthetic oligonucleotide
  Sense strand starting at position 285 of SEQ ID NO: 916616
aaagucuuugggcaccaua

SEQ ID NO: 1170623 - RNA, 19 nt, Artificial Sequence
  Description of Artificial Sequence: Synthetic oligonucleotide
  Antisense strand to SEQ ID NO: 1170622
uauggugcccaaagacuuu

SEQ ID NO: 1170624 - RNA, 19 nt, Artificial Sequence
  Description of Artificial Sequence: Synthetic oligonucleotide
  Sense strand starting at position 310 of SEQ ID NO: 916616
uggcaauacggguacagau

SEQ ID NO: 1170625 - RNA, 19 nt, Artificial Sequence
  Description of Artificial Sequence: Synthetic oligonucleotide
  Antisense strand to SEQ ID NO: 1170624
aucuguacccguauugcca

SEQ ID NO: 1170626 - RNA, 19 nt, Artificial Sequence
  Description of Artificial Sequence: Synthetic oligonucleotide
  Sense strand starting at position 343 of SEQ ID NO: 916616
auugauaacugcucugaga

SEQ ID NO: 1170627 - RNA, 19 nt, Artificial Sequence
  Description of Artificial Sequence: Synthetic oligonucleotide
  Antisense strand to SEQ ID NO: 1170626
ucucagagcaguuaucaau

SEQ ID NO: 1170628 - RNA, 19 nt, Artificial Sequence
  Description of Artificial Sequence: Synthetic oligonucleotide
  Sense strand starting at position 345 of SEQ ID NO: 916616
ugauaacugcucugagaga

SEQ ID NO: 1170629 - RNA, 19 nt, Artificial Sequence
  Description of Artificial Sequence: Synthetic oligonucleotide
  Antisense strand to SEQ ID NO: 1170628
ucucucagagcaguuauca

SEQ ID NO: 1170630 - RNA, 19 nt, Artificial Sequence
  Description of Artificial Sequence: Synthetic oligonucleotide
  Sense strand starting at position 497 of SEQ ID NO: 916616
agacuaagugauggguaca

SEQ ID NO: 1170631 - RNA, 19 nt, Artificial Sequence
  Description of Artificial Sequence: Synthetic oligonucleotide
  Antisense strand to SEQ ID NO: 1170630
uguacccaucacuuagucu

SEQ ID NO: 1170632 - RNA, 19 nt, Artificial Sequence
  Description of Artificial Sequence: Synthetic oligonucleotide
  Sense strand starting at position 1324 of SEQ ID NO: 916616
gguccagacccucaaaguu

SEQ ID NO: 1170633 - RNA, 19 nt, Artificial Sequence
  Description of Artificial Sequence: Synthetic oligonucleotide
  Antisense strand to SEQ ID NO: 1170632
aacuuugagggucuggacc

SEQ ID NO: 1170634 - RNA, 19 nt, Artificial Sequence
  Description of Artificial Sequence: Synthetic oligonucleotide
  Sense strand starting at position 1395 of SEQ ID NO: 916616
ccuuuagaugccugaccca

SEQ ID NO: 1170635 - RNA, 19 nt, Artificial Sequence
  Description of Artificial Sequence: Synthetic oligonucleotide
  Antisense strand to SEQ ID NO: 1170634
ugggucaggcaucuaaagg

SEQ ID NO: 1170636 - RNA, 19 nt, Artificial Sequence
  Description of Artificial Sequence: Synthetic oligonucleotide
  Sense strand starting at position 1447 of SEQ ID NO: 916616
uggacauccuggccuguaa

SEQ ID NO: 1170637 - RNA, 19 nt, Artificial Sequence
  Description of Artificial Sequence: Synthetic oligonucleotide
  Antisense strand to SEQ ID NO: 1170636
uuacaggccaggaugucca

SEQ ID NO: 1170638 - RNA, 19 nt, Artificial Sequence
  Description of Artificial Sequence: Synthetic oligonucleotide
  Sense strand starting at position 1788 of SEQ ID NO: 916616
ggaguuagguagagggauu

SEQ ID NO: 1170639 - RNA, 19 nt, Artificial Sequence
  Description of Artificial Sequence: Synthetic oligonucleotide
  Antisense strand to SEQ ID NO: 1170638
aaucccucuaccuaacucc

SEQ ID NO: 1170640 - RNA, 19 nt, Artificial Sequence
  Description of Artificial Sequence: Synthetic oligonucleotide
  Sense strand starting at position 1867 of SEQ ID NO: 916616
agaagucaguuuccuagaa

SEQ ID NO: 1170641 - RNA, 19 nt, Artificial Sequence
  Description of Artificial Sequence: Synthetic oligonucleotide
  Antisense strand to SEQ ID NO: 1170640
uucuaggaaacugacuucu

SEQ ID NO: 1170642 - RNA, 19 nt, Artificial Sequence
  Description of Artificial Sequence: Synthetic oligonucleotide
  Sense strand starting at position 1868 of SEQ ID NO: 916616
gaagucaguuuccuagaau

SEQ ID NO: 1170643 - RNA, 19 nt, Artificial Sequence
  Description of Artificial Sequence: Synthetic oligonucleotide
  Antisense strand to SEQ ID NO: 1170642
auucuaggaaacugacuuc

SEQ ID NO: 1170644 - RNA, 19 nt, Artificial Sequence
  Description of Artificial Sequence: Synthetic oligonucleotide
  Sense strand starting at position 1871 of SEQ ID NO: 916616
gucaguuuccuagaauccu

SEQ ID NO: 1170645 - RNA, 19 nt, Artificial Sequence
  Description of Artificial Sequence: Synthetic oligonucleotide
  Antisense strand to SEQ ID NO: 1170644
aggauucuaggaaacugac

SEQ ID NO: 1170646 - RNA, 19 nt, Artificial Sequence
  Description of Artificial Sequence: Synthetic oligonucleotide
  Sense strand starting at position 1977 of SEQ ID NO: 916616
acggcuaguuacccagaau

SEQ ID NO: 1170647 - RNA, 19 nt, Artificial Sequence
  Description of Artificial Sequence: Synthetic oligonucleotide
  Antisense strand to SEQ ID NO: 1170646
auucuggguaacuagccgu

SEQ ID NO: 1170648 - RNA, 19 nt, Artificial Sequence
  Description of Artificial Sequence: Synthetic oligonucleotide
  Sense strand starting at position 1978 of SEQ ID NO: 916616
cggcuaguuacccagaauu

SEQ ID NO: 1170649 - RNA, 19 nt, Artificial Sequence
  Description of Artificial Sequence: Synthetic oligonucleotide
  Antisense strand to SEQ ID NO: 1170648
aauucuggguaacuagccg

SEQ ID NO: 1170650 - RNA, 19 nt, Artificial Sequence
  Description of Artificial Sequence: Synthetic oligonucleotide
  Sense strand starting at position 1980 of SEQ ID NO: 916616
gcuaguuacccagaauucu

SEQ ID NO: 1170651 - RNA, 19 nt, Artificial Sequence
  Description of Artificial Sequence: Synthetic oligonucleotide
  Antisense strand to SEQ ID NO: 1170650
agaauucuggguaacuagc

SEQ ID NO: 1170652 - RNA, 19 nt, Artificial Sequence
  Description of Artificial Sequence: Synthetic oligonucleotide
  Sense strand starting at position 2016 of SEQ ID NO: 916616
aucgguuaucuagaauucu

SEQ ID NO: 1170653 - RNA, 19 nt, Artificial Sequence
  Description of Artificial Sequence: Synthetic oligonucleotide
  Antisense strand to SEQ ID NO: 1170652
agaauucuagauaaccgau

SEQ ID NO: 1170654 - RNA, 19 nt, Artificial Sequence
  Description of Artificial Sequence: Synthetic oligonucleotide
  Sense strand starting at position 2071 of SEQ ID NO: 916616
ucagauguguuccugggau

SEQ ID NO: 1170655 - RNA, 19 nt, Artificial Sequence
  Description of Artificial Sequence: Synthetic oligonucleotide
  Antisense strand to SEQ ID NO: 1170654
aucccaggaacacaucuga

SEQ ID NO: 1170656 - RNA, 19 nt, Artificial Sequence
  Description of Artificial Sequence: Synthetic oligonucleotide
  Sense strand starting at position 2454 of SEQ ID NO: 916616
uuggguggcguuagaaagu

SEQ ID NO: 1170657 - RNA, 19 nt, Artificial Sequence
  Description of Artificial Sequence: Synthetic oligonucleotide
  Antisense strand to SEQ ID NO: 1170656
acuuucuaacgccacccaa

SEQ ID NO: 1170658 - RNA, 19 nt, Artificial Sequence
  Description of Artificial Sequence: Synthetic oligonucleotide
  Sense strand starting at position 2463 of SEQ ID NO: 916616
guuagaaaguaacucuguu

SEQ ID NO: 1170659 - RNA, 19 nt, Artificial Sequence
  Description of Artificial Sequence: Synthetic oligonucleotide
  Antisense strand to SEQ ID NO: 1170658
aacagaguuacuuucuaac

SEQ ID NO: 1170660 - RNA, 19 nt, Artificial Sequence
  Description of Artificial Sequence: Synthetic oligonucleotide
  Sense strand starting at position 2499 of SEQ ID NO: 916616
aaauuacgucuagguuuga

SEQ ID NO: 1170661 - RNA, 19 nt, Artificial Sequence
  Description of Artificial Sequence: Synthetic oligonucleotide
  Antisense strand to SEQ ID NO: 1170660
ucaaaccuagacguaauuu

SEQ ID NO: 1170662 - RNA, 19 nt, Artificial Sequence
  Description of Artificial Sequence: Synthetic oligonucleotide
  Sense strand starting at position 2500 of SEQ ID NO: 916616
aauuacgucuagguuugaa

SEQ ID NO: 1170663 - RNA, 19 nt, Artificial Sequence
  Description of Artificial Sequence: Synthetic oligonucleotide
  Antisense strand to SEQ ID NO: 1170662
uucaaaccuagacguaauu

SEQ ID NO: 1170664 - RNA, 19 nt, Artificial Sequence
  Description of Artificial Sequence: Synthetic oligonucleotide
  Sense strand starting at position 2835 of SEQ ID NO: 916616
gguaacauucccggguaac

SEQ ID NO: 1170665 - RNA, 19 nt, Artificial Sequence
  Description of Artificial Sequence: Synthetic oligonucleotide
  Antisense strand to SEQ ID NO: 1170664
guuacccgggaauguuacc

SEQ ID NO: 1170666 - RNA, 19 nt, Artificial Sequence
  Description of Artificial Sequence: Synthetic oligonucleotide
  Sense strand starting at position 2836 of SEQ ID NO: 916616
guaacauucccggguaaca

SEQ ID NO: 1170667 - RNA, 19 nt, Artificial Sequence
  Description of Artificial Sequence: Synthetic oligonucleotide
  Antisense strand to SEQ ID NO: 1170666
uguuacccgggaauguuac

SEQ ID NO: 1170668 - RNA, 19 nt, Artificial Sequence
  Description of Artificial Sequence: Synthetic oligonucleotide
  Sense strand starting at position 2936 of SEQ ID NO: 916616
ugggacuuguuauucugaa

SEQ ID NO: 1170669 - RNA, 19 nt, Artificial Sequence
  Description of Artificial Sequence: Synthetic oligonucleotide
  Antisense strand to SEQ ID NO: 1170668
uucagaauaacaaguccca

SEQ ID NO: 1170670 - RNA, 19 nt, Artificial Sequence
  Description of Artificial Sequence: Synthetic oligonucleotide
  Sense strand starting at position 2937 of SEQ ID NO: 916616
gggacuuguuauucugaag

SEQ ID NO: 1170671 - RNA, 19 nt, Artificial Sequence
  Description of Artificial Sequence: Synthetic oligonucleotide
  Antisense strand to SEQ ID NO: 1170670
cuucagaauaacaaguccc

SEQ ID NO: 1170672 - RNA, 19 nt, Artificial Sequence
  Description of Artificial Sequence: Synthetic oligonucleotide
  Sense strand starting at position 2944 of SEQ ID NO: 916616
guuauucugaaggauucgu

SEQ ID NO: 1170673 - RNA, 19 nt, Artificial Sequence
  Description of Artificial Sequence: Synthetic oligonucleotide
  Antisense strand to SEQ ID NO: 1170672
acgaauccuucagaauaac

SEQ ID NO: 1170674 - RNA, 19 nt, Artificial Sequence
  Description of Artificial Sequence: Synthetic oligonucleotide
  Sense strand starting at position 2952 of SEQ ID NO: 916616
gaaggauucguggguccug

SEQ ID NO: 1170675 - RNA, 19 nt, Artificial Sequence
  Description of Artificial Sequence: Synthetic oligonucleotide
  Antisense strand to SEQ ID NO: 1170674
caggacccacgaauccuuc

SEQ ID NO: 1170676 - RNA, 19 nt, Artificial Sequence
  Description of Artificial Sequence: Synthetic oligonucleotide
  Sense strand starting at position 2991 of SEQ ID NO: 916616
augggucuagguugugaga

SEQ ID NO: 1170677 - RNA, 19 nt, Artificial Sequence
  Description of Artificial Sequence: Synthetic oligonucleotide
  Antisense strand to SEQ ID NO: 1170676
ucucacaaccuagacccau

SEQ ID NO: 1170678 - RNA, 19 nt, Artificial Sequence
  Description of Artificial Sequence: Synthetic oligonucleotide
  Sense strand starting at position 3008 of SEQ ID NO: 916616
gaugucucagagcacuuua

SEQ ID NO: 1170679 - RNA, 19 nt, Artificial Sequence
  Description of Artificial Sequence: Synthetic oligonucleotide
  Antisense strand to SEQ ID NO: 1170678
uaaagugcucugagacauc

SEQ ID NO: 1170680 - RNA, 19 nt, Artificial Sequence
  Description of Artificial Sequence: Synthetic oligonucleotide
  Sense strand starting at position 3117 of SEQ ID NO: 916616
cucaauaaaggcugguaaa

SEQ ID NO: 1170681 - RNA, 19 nt, Artificial Sequence
  Description of Artificial Sequence: Synthetic oligonucleotide
  Antisense strand to SEQ ID NO: 1170680
uuuaccagccuuuauugag

SEQ ID NO: 1170682 - RNA, 19 nt, Artificial Sequence
  Description of Artificial Sequence: Synthetic oligonucleotide
  Sense strand starting at position 3118 of SEQ ID NO: 916616
ucaauaaaggcugguaaau

SEQ ID NO: 1170683 - RNA, 19 nt, Artificial Sequence
  Description of Artificial Sequence: Synthetic oligonucleotide
  Antisense strand to SEQ ID NO: 1170682
auuuaccagccuuuauuga

SEQ ID NO: 1170684 - RNA, 19 nt, Artificial Sequence
  Description of Artificial Sequence: Synthetic oligonucleotide
  Sense strand starting at position 3274 of SEQ ID NO: 916616
uucgcaggucauuagauau

SEQ ID NO: 1170685 - RNA, 19 nt, Artificial Sequence
  Description of Artificial Sequence: Synthetic oligonucleotide
  Antisense strand to SEQ ID NO: 1170684
auaucuaaugaccugcgaa

SEQ ID NO: 1170686 - RNA, 19 nt, Artificial Sequence
  Description of Artificial Sequence: Synthetic oligonucleotide
  Sense strand starting at position 3383 of SEQ ID NO: 916616
uuaacagacccaugagagu

SEQ ID NO: 1170687 - RNA, 19 nt, Artificial Sequence
  Description of Artificial Sequence: Synthetic oligonucleotide
  Antisense strand to SEQ ID NO: 1170686
acucucaugggucuguuaa

SEQ ID NO: 1170688 - RNA, 19 nt, Artificial Sequence
  Description of Artificial Sequence: Synthetic oligonucleotide
  Sense strand starting at position 3409 of SEQ ID NO: 916616
cccuaauaaccugggcuaa

SEQ ID NO: 1170689 - RNA, 19 nt, Artificial Sequence
  Description of Artificial Sequence: Synthetic oligonucleotide
  Antisense strand to SEQ ID NO: 1170688
uuagcccagguuauuaggg

SEQ ID NO: 1170690 - RNA, 19 nt, Artificial Sequence
  Description of Artificial Sequence: Synthetic oligonucleotide
  Sense strand starting at position 3410 of SEQ ID NO: 916616
ccuaauaaccugggcuaaa

SEQ ID NO: 1170691 - RNA, 19 nt, Artificial Sequence
  Description of Artificial Sequence: Synthetic oligonucleotide
  Antisense strand to SEQ ID NO: 1170690
uuuagcccagguuauuagg

SEQ ID NO: 1170692 - RNA, 19 nt, Artificial Sequence
  Description of Artificial Sequence: Synthetic oligonucleotide
  Sense strand starting at position 3411 of SEQ ID NO: 916616
cuaauaaccugggcuaaau

SEQ ID NO: 1170693 - RNA, 19 nt, Artificial Sequence
  Description of Artificial Sequence: Synthetic oligonucleotide
  Antisense strand to SEQ ID NO: 1170692
auuuagcccagguuauuag

SEQ ID NO: 1170694 - RNA, 19 nt, Artificial Sequence
  Description of Artificial Sequence: Synthetic oligonucleotide
  Sense strand starting at position 3793 of SEQ ID NO: 916616
uuauuuagcucagcuguaa

SEQ ID NO: 1170695 - RNA, 19 nt, Artificial Sequence
  Description of Artificial Sequence: Synthetic oligonucleotide
  Antisense strand to SEQ ID NO: 1170694
uuacagcugagcuaaauaa

SEQ ID NO: 1170696 - RNA, 19 nt, Artificial Sequence
  Description of Artificial Sequence: Synthetic oligonucleotide
  Sense strand starting at position 3828 of SEQ ID NO: 916616
aguaauauuagauggugau

SEQ ID NO: 1170697 - RNA, 19 nt, Artificial Sequence
  Description of Artificial Sequence: Synthetic oligonucleotide
  Antisense strand to SEQ ID NO: 1170696
aucaccaucuaauauuacu

SEQ ID NO: 1170698 - RNA, 19 nt, Artificial Sequence
  Description of Artificial Sequence: Synthetic oligonucleotide
  Sense strand starting at position 3829 of SEQ ID NO: 916616
guaauauuagauggugauc

SEQ ID NO: 1170699 - RNA, 19 nt, Artificial Sequence
  Description of Artificial Sequence: Synthetic oligonucleotide
  Antisense strand to SEQ ID NO: 1170698
gaucaccaucuaauauuac

SEQ ID NO: 1170700 - RNA, 19 nt, Artificial Sequence
  Description of Artificial Sequence: Synthetic oligonucleotide
  Sense strand starting at position 3958 of SEQ ID NO: 916616
gcgcauuggcccucucacu

SEQ ID NO: 1170701 - RNA, 19 nt, Artificial Sequence
  Description of Artificial Sequence: Synthetic oligonucleotide
  Antisense strand to SEQ ID NO: 1170700
agugagagggccaaugcgc

SEQ ID NO: 1170702 - RNA, 19 nt, Artificial Sequence
  Description of Artificial Sequence: Synthetic oligonucleotide
  Sense strand starting at position 6 of SEQ ID NO: 916617
uggcaauacggguacagau

SEQ ID NO: 1170703 - RNA, 19 nt, Artificial Sequence
  Description of Artificial Sequence: Synthetic oligonucleotide
  Antisense strand to SEQ ID NO: 1170702
aucuguacccguauugcca

SEQ ID NO: 1170704 - RNA, 19 nt, Artificial Sequence
  Description of Artificial Sequence: Synthetic oligonucleotide
  Sense strand starting at position 39 of SEQ ID NO: 916617
auugauaacugcucugaga

SEQ ID NO: 1170705 - RNA, 19 nt, Artificial Sequence
  Description of Artificial Sequence: Synthetic oligonucleotide
  Antisense strand to SEQ ID NO: 1170704
ucucagagcaguuaucaau

SEQ ID NO: 1170706 - RNA, 19 nt, Artificial Sequence
  Description of Artificial Sequence: Synthetic oligonucleotide
  Sense strand starting at position 41 of SEQ ID NO: 916617
ugauaacugcucugagaga

SEQ ID NO: 1170707 - RNA, 19 nt, Artificial Sequence
  Description of Artificial Sequence: Synthetic oligonucleotide
  Antisense strand to SEQ ID NO: 1170706
ucucucagagcaguuauca

SEQ ID NO: 1170708 - RNA, 19 nt, Artificial Sequence
  Description of Artificial Sequence: Synthetic oligonucleotide
  Sense strand starting at position 193 of SEQ ID NO: 916617
agacuaagugauggguaca

SEQ ID NO: 1170709 - RNA, 19 nt, Artificial Sequence
  Description of Artificial Sequence: Synthetic oligonucleotide
  Antisense strand to SEQ ID NO: 1170708
uguacccaucacuuagucu

SEQ ID NO: 1170710 - RNA, 19 nt, Artificial Sequence
  Description of Artificial Sequence: Synthetic oligonucleotide
  Sense strand starting at position 1020 of SEQ ID NO: 916617
gguccagacccucaaaguu

SEQ ID NO: 1170711 - RNA, 19 nt, Artificial Sequence
  Description of Artificial Sequence: Synthetic oligonucleotide
  Antisense strand to SEQ ID NO: 1170710
aacuuugagggucuggacc

SEQ ID NO: 1170712 - RNA, 19 nt, Artificial Sequence
  Description of Artificial Sequence: Synthetic oligonucleotide
  Sense strand starting at position 1091 of SEQ ID NO: 916617
ccuuuagaugccugaccca

SEQ ID NO: 1170713 - RNA, 19 nt, Artificial Sequence
  Description of Artificial Sequence: Synthetic oligonucleotide
  Antisense strand to SEQ ID NO: 1170712
ugggucaggcaucuaaagg

SEQ ID NO: 1170714 - RNA, 19 nt, Artificial Sequence
  Description of Artificial Sequence: Synthetic oligonucleotide
  Sense strand starting at position 1143 of SEQ ID NO: 916617
uggacauccuggccuguaa

SEQ ID NO: 1170715 - RNA, 19 nt, Artificial Sequence
  Description of Artificial Sequence: Synthetic oligonucleotide
  Antisense strand to SEQ ID NO: 1170714
uuacaggccaggaugucca

SEQ ID NO: 1170716 - RNA, 19 nt, Artificial Sequence
  Description of Artificial Sequence: Synthetic oligonucleotide
  Sense strand starting at position 1484 of SEQ ID NO: 916617
ggaguuagguagagggauu

SEQ ID NO: 1170717 - RNA, 19 nt, Artificial Sequence
  Description of Artificial Sequence: Synthetic oligonucleotide
  Antisense strand to SEQ ID NO: 1170716
aaucccucuaccuaacucc

SEQ ID NO: 1170718 - RNA, 19 nt, Artificial Sequence
  Description of Artificial Sequence: Synthetic oligonucleotide
  Sense strand starting at position 1563 of SEQ ID NO: 916617
agaagucaguuuccuagaa

SEQ ID NO: 1170719 - RNA, 19 nt, Artificial Sequence
  Description of Artificial Sequence: Synthetic oligonucleotide
  Antisense strand to SEQ ID NO: 1170718
uucuaggaaacugacuucu

SEQ ID NO: 1170720 - RNA, 19 nt, Artificial Sequence
  Description of Artificial Sequence: Synthetic oligonucleotide
  Sense strand starting at position 1564 of SEQ ID NO: 916617
gaagucaguuuccuagaau

SEQ ID NO: 1170721 - RNA, 19 nt, Artificial Sequence
  Description of Artificial Sequence: Synthetic oligonucleotide
  Antisense strand to SEQ ID NO: 1170720
auucuaggaaacugacuuc

SEQ ID NO: 1170722 - RNA, 19 nt, Artificial Sequence
  Description of Artificial Sequence: Synthetic oligonucleotide
  Sense strand starting at position 1567 of SEQ ID NO: 916617
gucaguuuccuagaauccu

SEQ ID NO: 1170723 - RNA, 19 nt, Artificial Sequence
  Description of Artificial Sequence: Synthetic oligonucleotide
  Antisense strand to SEQ ID NO: 1170722
aggauucuaggaaacugac

SEQ ID NO: 1170724 - RNA, 19 nt, Artificial Sequence
  Description of Artificial Sequence: Synthetic oligonucleotide
  Sense strand starting at position 1674 of SEQ ID NO: 916617
cggcuaguuacccagaauu

SEQ ID NO: 1170725 - RNA, 19 nt, Artificial Sequence
  Description of Artificial Sequence: Synthetic oligonucleotide
  Antisense strand to SEQ ID NO: 1170724
aauucuggguaacuagccg

SEQ ID NO: 1170726 - RNA, 19 nt, Artificial Sequence
  Description of Artificial Sequence: Synthetic oligonucleotide
  Sense strand starting at position 1676 of SEQ ID NO: 916617
gcuaguuacccagaauucu

SEQ ID NO: 1170727 - RNA, 19 nt, Artificial Sequence
  Description of Artificial Sequence: Synthetic oligonucleotide
  Antisense strand to SEQ ID NO: 1170726
agaauucuggguaacuagc

SEQ ID NO: 1170728 - RNA, 19 nt, Artificial Sequence
  Description of Artificial Sequence: Synthetic oligonucleotide
  Sense strand starting at position 1712 of SEQ ID NO: 916617
aucgguuaucuagaauucu

SEQ ID NO: 1170729 - RNA, 19 nt, Artificial Sequence
  Description of Artificial Sequence: Synthetic oligonucleotide
  Antisense strand to SEQ ID NO: 1170728
agaauucuagauaaccgau

SEQ ID NO: 1170730 - RNA, 19 nt, Artificial Sequence
  Description of Artificial Sequence: Synthetic oligonucleotide
  Sense strand starting at position 1767 of SEQ ID NO: 916617
ucagauguguuccugggau

SEQ ID NO: 1170731 - RNA, 19 nt, Artificial Sequence
  Description of Artificial Sequence: Synthetic oligonucleotide
  Antisense strand to SEQ ID NO: 1170730
aucccaggaacacaucuga

SEQ ID NO: 1170732 - RNA, 19 nt, Artificial Sequence
  Description of Artificial Sequence: Synthetic oligonucleotide
  Sense strand starting at position 2150 of SEQ ID NO: 916617
uuggguggcguuagaaagu

SEQ ID NO: 1170733 - RNA, 19 nt, Artificial Sequence
  Description of Artificial Sequence: Synthetic oligonucleotide
  Antisense strand to SEQ ID NO: 1170732
acuuucuaacgccacccaa

SEQ ID NO: 1170734 - RNA, 19 nt, Artificial Sequence
  Description of Artificial Sequence: Synthetic oligonucleotide
  Sense strand starting at position 2159 of SEQ ID NO: 916617
guuagaaaguaacucuguu

SEQ ID NO: 1170735 - RNA, 19 nt, Artificial Sequence
  Description of Artificial Sequence: Synthetic oligonucleotide
  Antisense strand to SEQ ID NO: 1170734
aacagaguuacuuucuaac

SEQ ID NO: 1170736 - RNA, 19 nt, Artificial Sequence
  Description of Artificial Sequence: Synthetic oligonucleotide
  Sense strand starting at position 2195 of SEQ ID NO: 916617
aaauuacgucuagguuuga

SEQ ID NO: 1170737 - RNA, 19 nt, Artificial Sequence
  Description of Artificial Sequence: Synthetic oligonucleotide
  Antisense strand to SEQ ID NO: 1170736
ucaaaccuagacguaauuu

SEQ ID NO: 1170738 - RNA, 19 nt, Artificial Sequence
  Description of Artificial Sequence: Synthetic oligonucleotide
  Sense strand starting at position 2196 of SEQ ID NO: 916617
aauuacgucuagguuugaa

SEQ ID NO: 1170739 - RNA, 19 nt, Artificial Sequence
  Description of Artificial Sequence: Synthetic oligonucleotide
  Antisense strand to SEQ ID NO: 1170738
uucaaaccuagacguaauu

SEQ ID NO: 1170740 - RNA, 19 nt, Artificial Sequence
  Description of Artificial Sequence: Synthetic oligonucleotide
  Sense strand starting at position 2531 of SEQ ID NO: 916617
gguaacauucccggguaac

SEQ ID NO: 1170741 - RNA, 19 nt, Artificial Sequence
  Description of Artificial Sequence: Synthetic oligonucleotide
  Antisense strand to SEQ ID NO: 1170740
guuacccgggaauguuacc

SEQ ID NO: 1170742 - RNA, 19 nt, Artificial Sequence
  Description of Artificial Sequence: Synthetic oligonucleotide
  Sense strand starting at position 2532 of SEQ ID NO: 916617
guaacauucccggguaaca

SEQ ID NO: 1170743 - RNA, 19 nt, Artificial Sequence
  Description of Artificial Sequence: Synthetic oligonucleotide
  Antisense strand to SEQ ID NO: 1170742
uguuacccgggaauguuac

SEQ ID NO: 1170744 - RNA, 19 nt, Artificial Sequence
  Description of Artificial Sequence: Synthetic oligonucleotide
  Sense strand starting at position 2632 of SEQ ID NO: 916617
ugggacuuguuauucugaa

SEQ ID NO: 1170745 - RNA, 19 nt, Artificial Sequence
  Description of Artificial Sequence: Synthetic oligonucleotide
  Antisense strand to SEQ ID NO: 1170744
uucagaauaacaaguccca

SEQ ID NO: 1170746 - RNA, 19 nt, Artificial Sequence
  Description of Artificial Sequence: Synthetic oligonucleotide
  Sense strand starting at position 2633 of SEQ ID NO: 916617
gggacuuguuauucugaag

SEQ ID NO: 1170747 - RNA, 19 nt, Artificial Sequence
  Description of Artificial Sequence: Synthetic oligonucleotide
  Antisense strand to SEQ ID NO: 1170746
cuucagaauaacaaguccc

SEQ ID NO: 1170748 - RNA, 19 nt, Artificial Sequence
  Description of Artificial Sequence: Synthetic oligonucleotide
  Sense strand starting at position 2640 of SEQ ID NO: 916617
guuauucugaaggauucgu

SEQ ID NO: 1170749 - RNA, 19 nt, Artificial Sequence
  Description of Artificial Sequence: Synthetic oligonucleotide
  Antisense strand to SEQ ID NO: 1170748
acgaauccuucagaauaac

SEQ ID NO: 1170750 - RNA, 19 nt, Artificial Sequence
  Description of Artificial Sequence: Synthetic oligonucleotide
  Sense strand starting at position 2648 of SEQ ID NO: 916617
gaaggauucguggguccug

SEQ ID NO: 1170751 - RNA, 19 nt, Artificial Sequence
  Description of Artificial Sequence: Synthetic oligonucleotide
  Antisense strand to SEQ ID NO: 1170750
caggacccacgaauccuuc

SEQ ID NO: 1170752 - RNA, 19 nt, Artificial Sequence
  Description of Artificial Sequence: Synthetic oligonucleotide
  Sense strand starting at position 2687 of SEQ ID NO: 916617
augggucuagguugugaga

SEQ ID NO: 1170753 - RNA, 19 nt, Artificial Sequence
  Description of Artificial Sequence: Synthetic oligonucleotide
  Antisense strand to SEQ ID NO: 1170752
ucucacaaccuagacccau

SEQ ID NO: 1170754 - RNA, 19 nt, Artificial Sequence
  Description of Artificial Sequence: Synthetic oligonucleotide
  Sense strand starting at position 2704 of SEQ ID NO: 916617
gaugucucagagcacuuua

SEQ ID NO: 1170755 - RNA, 19 nt, Artificial Sequence
  Description of Artificial Sequence: Synthetic oligonucleotide
  Antisense strand to SEQ ID NO: 1170754
uaaagugcucugagacauc

SEQ ID NO: 1170756 - RNA, 19 nt, Artificial Sequence
  Description of Artificial Sequence: Synthetic oligonucleotide
  Sense strand starting at position 2813 of SEQ ID NO: 916617
cucaauaaaggcugguaaa

SEQ ID NO: 1170757 - RNA, 19 nt, Artificial Sequence
  Description of Artificial Sequence: Synthetic oligonucleotide
  Antisense strand to SEQ ID NO: 1170756
uuuaccagccuuuauugag

SEQ ID NO: 1170758 - RNA, 19 nt, Artificial Sequence
  Description of Artificial Sequence: Synthetic oligonucleotide
  Sense strand starting at position 2814 of SEQ ID NO: 916617
ucaauaaaggcugguaaau

SEQ ID NO: 1170759 - RNA, 19 nt, Artificial Sequence
  Description of Artificial Sequence: Synthetic oligonucleotide
  Antisense strand to SEQ ID NO: 1170758
auuuaccagccuuuauuga

SEQ ID NO: 1170760 - RNA, 19 nt, Artificial Sequence
  Description of Artificial Sequence: Synthetic oligonucleotide
  Sense strand starting at position 2970 of SEQ ID NO: 916617
uucgcaggucauuagauau

SEQ ID NO: 1170761 - RNA, 19 nt, Artificial Sequence
  Description of Artificial Sequence: Synthetic oligonucleotide
  Antisense strand to SEQ ID NO: 1170760
auaucuaaugaccugcgaa

SEQ ID NO: 1170762 - RNA, 19 nt, Artificial Sequence
  Description of Artificial Sequence: Synthetic oligonucleotide
  Sense strand starting at position 3079 of SEQ ID NO: 916617
uuaacagacccaugagagu

SEQ ID NO: 1170763 - RNA, 19 nt, Artificial Sequence
  Description of Artificial Sequence: Synthetic oligonucleotide
  Antisense strand to SEQ ID NO: 1170762
acucucaugggucuguuaa

SEQ ID NO: 1170764 - RNA, 19 nt, Artificial Sequence
  Description of Artificial Sequence: Synthetic oligonucleotide
  Sense strand starting at position 3105 of SEQ ID NO: 916617
cccuaauaaccugggcuaa

SEQ ID NO: 1170765 - RNA, 19 nt, Artificial Sequence
  Description of Artificial Sequence: Synthetic oligonucleotide
  Antisense strand to SEQ ID NO: 1170764
uuagcccagguuauuaggg

SEQ ID NO: 1170766 - RNA, 19 nt, Artificial Sequence
  Description of Artificial Sequence: Synthetic oligonucleotide
  Sense strand starting at position 3106 of SEQ ID NO: 916617
ccuaauaaccugggcuaaa

SEQ ID NO: 1170767 - RNA, 19 nt, Artificial Sequence
  Description of Artificial Sequence: Synthetic oligonucleotide
  Antisense strand to SEQ ID NO: 1170766
uuuagcccagguuauuagg

SEQ ID NO: 1170768 - RNA, 19 nt, Artificial Sequence
  Description of Artificial Sequence: Synthetic oligonucleotide
  Sense strand starting at position 3107 of SEQ ID NO: 916617
cuaauaaccugggcuaaau

SEQ ID NO: 1170769 - RNA, 19 nt, Artificial Sequence
  Description of Artificial Sequence: Synthetic oligonucleotide
  Antisense strand to SEQ ID NO: 1170768
auuuagcccagguuauuag

SEQ ID NO: 1170770 - RNA, 19 nt, Artificial Sequence
  Description of Artificial Sequence: Synthetic oligonucleotide
  Sense strand starting at position 3489 of SEQ ID NO: 916617
uuauuuagcucagcuguaa

SEQ ID NO: 1170771 - RNA, 19 nt, Artificial Sequence
  Description of Artificial Sequence: Synthetic oligonucleotide
  Antisense strand to SEQ ID NO: 1170770
uuacagcugagcuaaauaa

SEQ ID NO: 1170772 - RNA, 19 nt, Artificial Sequence
  Description of Artificial Sequence: Synthetic oligonucleotide
  Sense strand starting at position 3524 of SEQ ID NO: 916617
aguaauauuagauggugau

SEQ ID NO: 1170773 - RNA, 19 nt, Artificial Sequence
  Description of Artificial Sequence: Synthetic oligonucleotide
  Antisense strand to SEQ ID NO: 1170772
aucaccaucuaauauuacu

SEQ ID NO: 1170774 - RNA, 19 nt, Artificial Sequence
  Description of Artificial Sequence: Synthetic oligonucleotide
  Sense strand starting at position 3525 of SEQ ID NO: 916617
guaauauuagauggugauc

SEQ ID NO: 1170775 - RNA, 19 nt, Artificial Sequence
  Description of Artificial Sequence: Synthetic oligonucleotide
  Antisense strand to SEQ ID NO: 1170774
gaucaccaucuaauauuac

SEQ ID NO: 1170776 - RNA, 19 nt, Artificial Sequence
  Description of Artificial Sequence: Synthetic oligonucleotide
  Sense strand starting at position 3654 of SEQ ID NO: 916617
gcgcauuggcccucucacu

SEQ ID NO: 1170777 - RNA, 19 nt, Artificial Sequence
  Description of Artificial Sequence: Synthetic oligonucleotide
  Antisense strand to SEQ ID NO: 1170776
agugagagggccaaugcgc

SEQ ID NO: 1170778 - RNA, 19 nt, Artificial Sequence
  Description of Artificial Sequence: Synthetic oligonucleotide
  Sense strand starting at position 3899 of SEQ ID NO: 916617
uacaguauccaguguaaug

SEQ ID NO: 1170779 - RNA, 19 nt, Artificial Sequence
  Description of Artificial Sequence: Synthetic oligonucleotide
  Antisense strand to SEQ ID NO: 1170778
cauuacacuggauacugua

SEQ ID NO: 1170780 - RNA, 19 nt, Artificial Sequence
  Description of Artificial Sequence: Synthetic oligonucleotide
  Sense strand starting at position 3910 of SEQ ID NO: 916617
guguaaugcagugauuaaa

SEQ ID NO: 1170781 - RNA, 19 nt, Artificial Sequence
  Description of Artificial Sequence: Synthetic oligonucleotide
  Antisense strand to SEQ ID NO: 1170780
uuuaaucacugcauuacac

SEQ ID NO: 1170782 - RNA, 19 nt, Artificial Sequence
  Description of Artificial Sequence: Synthetic oligonucleotide
  Sense strand starting at position 21 of SEQ ID NO: 916618
gguuaagagcaauaggcua

SEQ ID NO: 1170783 - RNA, 19 nt, Artificial Sequence
  Description of Artificial Sequence: Synthetic oligonucleotide
  Antisense strand to SEQ ID NO: 1170782
uagccuauugcucuuaacc

SEQ ID NO: 1170784 - RNA, 19 nt, Artificial Sequence
  Description of Artificial Sequence: Synthetic oligonucleotide
  Sense strand starting at position 184 of SEQ ID NO: 916618
gcugaaaugugauucuacc

SEQ ID NO: 1170785 - RNA, 19 nt, Artificial Sequence
  Description of Artificial Sequence: Synthetic oligonucleotide
  Antisense strand to SEQ ID NO: 1170784
gguagaaucacauuucagc

SEQ ID NO: 1170786 - RNA, 19 nt, Artificial Sequence
  Description of Artificial Sequence: Synthetic oligonucleotide
  Sense strand starting at position 280 of SEQ ID NO: 916618
agaauacucuuggcaaaua

SEQ ID NO: 1170787 - RNA, 19 nt, Artificial Sequence
  Description of Artificial Sequence: Synthetic oligonucleotide
  Antisense strand to SEQ ID NO: 1170786
uauuugccaagaguauucu

SEQ ID NO: 1170788 - RNA, 19 nt, Artificial Sequence
  Description of Artificial Sequence: Synthetic oligonucleotide
  Sense strand starting at position 462 of SEQ ID NO: 916618
ucuuucgucccagaaguga

SEQ ID NO: 1170789 - RNA, 19 nt, Artificial Sequence
  Description of Artificial Sequence: Synthetic oligonucleotide
  Antisense strand to SEQ ID NO: 1170788
ucacuucugggacgaaaga

SEQ ID NO: 1170790 - RNA, 19 nt, Artificial Sequence
  Description of Artificial Sequence: Synthetic oligonucleotide
  Sense strand starting at position 577 of SEQ ID NO: 916618
ccugccauugucuauagga

SEQ ID NO: 1170791 - RNA, 19 nt, Artificial Sequence
  Description of Artificial Sequence: Synthetic oligonucleotide
  Antisense strand to SEQ ID NO: 1170790
uccuauagacaauggcagg

SEQ ID NO: 1170792 - RNA, 19 nt, Artificial Sequence
  Description of Artificial Sequence: Synthetic oligonucleotide
  Sense strand starting at position 579 of SEQ ID NO: 916618
ugccauugucuauaggaac

SEQ ID NO: 1170793 - RNA, 19 nt, Artificial Sequence
  Description of Artificial Sequence: Synthetic oligonucleotide
  Antisense strand to SEQ ID NO: 1170792
guuccuauagacaauggca

SEQ ID NO: 1170794 - RNA, 19 nt, Artificial Sequence
  Description of Artificial Sequence: Synthetic oligonucleotide
  Sense strand starting at position 620 of SEQ ID NO: 916618
ucuaccuugccugauagua

SEQ ID NO: 1170795 - RNA, 19 nt, Artificial Sequence
  Description of Artificial Sequence: Synthetic oligonucleotide
  Antisense strand to SEQ ID NO: 1170794
uacuaucaggcaagguaga

SEQ ID NO: 1170796 - RNA, 19 nt, Artificial Sequence
  Description of Artificial Sequence: Synthetic oligonucleotide
  Sense strand starting at position 769 of SEQ ID NO: 916618
gaguauauccuuuguccag

SEQ ID NO: 1170797 - RNA, 19 nt, Artificial Sequence
  Description of Artificial Sequence: Synthetic oligonucleotide
  Antisense strand to SEQ ID NO: 1170796
cuggacaaaggauauacuc

SEQ ID NO: 1170798 - RNA, 19 nt, Artificial Sequence
  Description of Artificial Sequence: Synthetic oligonucleotide
  Sense strand starting at position 837 of SEQ ID NO: 916618
uagagaucucccuggucuc

SEQ ID NO: 1170799 - RNA, 19 nt, Artificial Sequence
  Description of Artificial Sequence: Synthetic oligonucleotide
  Antisense strand to SEQ ID NO: 1170798
gagaccagggagaucucua

SEQ ID NO: 1170800 - RNA, 19 nt, Artificial Sequence
  Description of Artificial Sequence: Synthetic oligonucleotide
  Sense strand starting at position 938 of SEQ ID NO: 916618
ggcugugauccuuacaaug

SEQ ID NO: 1170801 - RNA, 19 nt, Artificial Sequence
  Description of Artificial Sequence: Synthetic oligonucleotide
  Antisense strand to SEQ ID NO: 1170800
cauuguaaggaucacagcc

SEQ ID NO: 1170802 - RNA, 19 nt, Artificial Sequence
  Description of Artificial Sequence: Synthetic oligonucleotide
  Sense strand starting at position 1096 of SEQ ID NO: 916618
guugaaaugcuccagauca

SEQ ID NO: 1170803 - RNA, 19 nt, Artificial Sequence
  Description of Artificial Sequence: Synthetic oligonucleotide
  Antisense strand to SEQ ID NO: 1170802
ugaucuggagcauuucaac

SEQ ID NO: 1170804 - RNA, 19 nt, Artificial Sequence
  Description of Artificial Sequence: Synthetic oligonucleotide
  Sense strand starting at position 1098 of SEQ ID NO: 916618
ugaaaugcuccagaucacu

SEQ ID NO: 1170805 - RNA, 19 nt, Artificial Sequence
  Description of Artificial Sequence: Synthetic oligonucleotide
  Antisense strand to SEQ ID NO: 1170804
agugaucuggagcauuuca

SEQ ID NO: 1170806 - RNA, 19 nt, Artificial Sequence
  Description of Artificial Sequence: Synthetic oligonucleotide
  Sense strand starting at position 1250 of SEQ ID NO: 916618
uugcuuuagacugguggga

SEQ ID NO: 1170807 - RNA, 19 nt, Artificial Sequence
  Description of Artificial Sequence: Synthetic oligonucleotide
  Antisense strand to SEQ ID NO: 1170806
ucccaccagucuaaagcaa

SEQ ID NO: 1170808 - RNA, 19 nt, Artificial Sequence
  Description of Artificial Sequence: Synthetic oligonucleotide
  Sense strand starting at position 1272 of SEQ ID NO: 916618
gcagguaaaccugaggcaa

SEQ ID NO: 1170809 - RNA, 19 nt, Artificial Sequence
  Description of Artificial Sequence: Synthetic oligonucleotide
  Antisense strand to SEQ ID NO: 1170808
uugccucagguuuaccugc

SEQ ID NO: 1170810 - RNA, 19 nt, Artificial Sequence
  Description of Artificial Sequence: Synthetic oligonucleotide
  Sense strand starting at position 1515 of SEQ ID NO: 916618
cugaaacaucacgggaagu

SEQ ID NO: 1170811 - RNA, 19 nt, Artificial Sequence
  Description of Artificial Sequence: Synthetic oligonucleotide
  Antisense strand to SEQ ID NO: 1170810
acuucccgugauguuucag

SEQ ID NO: 1170812 - RNA, 19 nt, Artificial Sequence
  Description of Artificial Sequence: Synthetic oligonucleotide
  Sense strand starting at position 1516 of SEQ ID NO: 916618
ugaaacaucacgggaagua

SEQ ID NO: 1170813 - RNA, 19 nt, Artificial Sequence
  Description of Artificial Sequence: Synthetic oligonucleotide
  Antisense strand to SEQ ID NO: 1170812
uacuucccgugauguuuca

SEQ ID NO: 1170814 - RNA, 19 nt, Artificial Sequence
  Description of Artificial Sequence: Synthetic oligonucleotide
  Sense strand starting at position 1775 of SEQ ID NO: 916618
cccacauaacggugacaaa

SEQ ID NO: 1170815 - RNA, 19 nt, Artificial Sequence
  Description of Artificial Sequence: Synthetic oligonucleotide
  Antisense strand to SEQ ID NO: 1170814
uuugucaccguuauguggg

SEQ ID NO: 1170816 - RNA, 19 nt, Artificial Sequence
  Description of Artificial Sequence: Synthetic oligonucleotide
  Sense strand starting at position 2194 of SEQ ID NO: 916618
ccguguaacgaccaagagu

SEQ ID NO: 1170817 - RNA, 19 nt, Artificial Sequence
  Description of Artificial Sequence: Synthetic oligonucleotide
  Antisense strand to SEQ ID NO: 1170816
acucuuggucguuacacgg

SEQ ID NO: 1170818 - RNA, 19 nt, Artificial Sequence
  Description of Artificial Sequence: Synthetic oligonucleotide
  Sense strand starting at position 2286 of SEQ ID NO: 916618
guaguaauaucucccuaug

SEQ ID NO: 1170819 - RNA, 19 nt, Artificial Sequence
  Description of Artificial Sequence: Synthetic oligonucleotide
  Antisense strand to SEQ ID NO: 1170818
cauagggagauauuacuac

SEQ ID NO: 1170820 - RNA, 19 nt, Artificial Sequence
  Description of Artificial Sequence: Synthetic oligonucleotide
  Sense strand starting at position 2289 of SEQ ID NO: 916618
guaauaucucccuaugagu

SEQ ID NO: 1170821 - RNA, 19 nt, Artificial Sequence
  Description of Artificial Sequence: Synthetic oligonucleotide
  Antisense strand to SEQ ID NO: 1170820
acucauagggagauauuac

SEQ ID NO: 1170822 - RNA, 19 nt, Artificial Sequence
  Description of Artificial Sequence: Synthetic oligonucleotide
  Sense strand starting at position 2295 of SEQ ID NO: 916618
ucucccuaugagugagauu

SEQ ID NO: 1170823 - RNA, 19 nt, Artificial Sequence
  Description of Artificial Sequence: Synthetic oligonucleotide
  Antisense strand to SEQ ID NO: 1170822
aaucucacucauagggaga

SEQ ID NO: 1170824 - RNA, 19 nt, Artificial Sequence
  Description of Artificial Sequence: Synthetic oligonucleotide
  Sense strand starting at position 2351 of SEQ ID NO: 916618
ucaauaagugacgguuauu

SEQ ID NO: 1170825 - RNA, 19 nt, Artificial Sequence
  Description of Artificial Sequence: Synthetic oligonucleotide
  Antisense strand to SEQ ID NO: 1170824
aauaaccgucacuuauuga

SEQ ID NO: 1170826 - RNA, 19 nt, Artificial Sequence
  Description of Artificial Sequence: Synthetic oligonucleotide
  Sense strand starting at position 2360 of SEQ ID NO: 916618
gacgguuauuugcucacaa

SEQ ID NO: 1170827 - RNA, 19 nt, Artificial Sequence
  Description of Artificial Sequence: Synthetic oligonucleotide
  Antisense strand to SEQ ID NO: 1170826
uugugagcaaauaaccguc

SEQ ID NO: 1170828 - RNA, 19 nt, Artificial Sequence
  Description of Artificial Sequence: Synthetic oligonucleotide
  Sense strand starting at position 2361 of SEQ ID NO: 916618
acgguuauuugcucacaag

SEQ ID NO: 1170829 - RNA, 19 nt, Artificial Sequence
  Description of Artificial Sequence: Synthetic oligonucleotide
  Antisense strand to SEQ ID NO: 1170828
cuugugagcaaauaaccgu

SEQ ID NO: 1170830 - RNA, 19 nt, Artificial Sequence
  Description of Artificial Sequence: Synthetic oligonucleotide
  Sense strand starting at position 2497 of SEQ ID NO: 916618
agugcuaugcgagcauauu

SEQ ID NO: 1170831 - RNA, 19 nt, Artificial Sequence
  Description of Artificial Sequence: Synthetic oligonucleotide
  Antisense strand to SEQ ID NO: 1170830
aauaugcucgcauagcacu

SEQ ID NO: 1170832 - RNA, 19 nt, Artificial Sequence
  Description of Artificial Sequence: Synthetic oligonucleotide
  Sense strand starting at position 2498 of SEQ ID NO: 916618
gugcuaugcgagcauauuu

SEQ ID NO: 1170833 - RNA, 19 nt, Artificial Sequence
  Description of Artificial Sequence: Synthetic oligonucleotide
  Antisense strand to SEQ ID NO: 1170832
aaauaugcucgcauagcac

SEQ ID NO: 1170834 - RNA, 19 nt, Artificial Sequence
  Description of Artificial Sequence: Synthetic oligonucleotide
  Sense strand starting at position 2503 of SEQ ID NO: 916618
augcgagcauauuuaccua

SEQ ID NO: 1170835 - RNA, 19 nt, Artificial Sequence
  Description of Artificial Sequence: Synthetic oligonucleotide
  Antisense strand to SEQ ID NO: 1170834
uagguaaauaugcucgcau

SEQ ID NO: 1170836 - RNA, 19 nt, Artificial Sequence
  Description of Artificial Sequence: Synthetic oligonucleotide
  Sense strand starting at position 2565 of SEQ ID NO: 916618
gaggauguauuccuacuga

SEQ ID NO: 1170837 - RNA, 19 nt, Artificial Sequence
  Description of Artificial Sequence: Synthetic oligonucleotide
  Antisense strand to SEQ ID NO: 1170836
ucaguaggaauacauccuc

SEQ ID NO: 1170838 - RNA, 19 nt, Artificial Sequence
  Description of Artificial Sequence: Synthetic oligonucleotide
  Sense strand starting at position 2592 of SEQ ID NO: 916618
gagcuaacagagugaaaua

SEQ ID NO: 1170839 - RNA, 19 nt, Artificial Sequence
  Description of Artificial Sequence: Synthetic oligonucleotide
  Antisense strand to SEQ ID NO: 1170838
uauuucacucuguuagcuc

SEQ ID NO: 1170840 - RNA, 19 nt, Artificial Sequence
  Description of Artificial Sequence: Synthetic oligonucleotide
  Sense strand starting at position 2759 of SEQ ID NO: 916618
uuuaaagauuauguggcua

SEQ ID NO: 1170841 - RNA, 19 nt, Artificial Sequence
  Description of Artificial Sequence: Synthetic oligonucleotide
  Antisense strand to SEQ ID NO: 1170840
uagccacauaaucuuuaaa

SEQ ID NO: 1170842 - RNA, 19 nt, Artificial Sequence
  Description of Artificial Sequence: Synthetic oligonucleotide
  Sense strand starting at position 2764 of SEQ ID NO: 916618
agauuauguggcuauccuu

SEQ ID NO: 1170843 - RNA, 19 nt, Artificial Sequence
  Description of Artificial Sequence: Synthetic oligonucleotide
  Antisense strand to SEQ ID NO: 1170842
aaggauagccacauaaucu

SEQ ID NO: 1170844 - RNA, 19 nt, Artificial Sequence
  Description of Artificial Sequence: Synthetic oligonucleotide
  Sense strand starting at position 3141 of SEQ ID NO: 916618
auaacuuaugcguauacua

SEQ ID NO: 1170845 - RNA, 19 nt, Artificial Sequence
  Description of Artificial Sequence: Synthetic oligonucleotide
  Antisense strand to SEQ ID NO: 1170844
uaguauacgcauaaguuau

SEQ ID NO: 1170846 - RNA, 19 nt, Artificial Sequence
  Description of Artificial Sequence: Synthetic oligonucleotide
  Sense strand starting at position 3455 of SEQ ID NO: 916618
guauauaucuguuucugaa

SEQ ID NO: 1170847 - RNA, 19 nt, Artificial Sequence
  Description of Artificial Sequence: Synthetic oligonucleotide
  Antisense strand to SEQ ID NO: 1170846
uucagaaacagauauauac

SEQ ID NO: 1170848 - RNA, 19 nt, Artificial Sequence
  Description of Artificial Sequence: Synthetic oligonucleotide
  Sense strand starting at position 3704 of SEQ ID NO: 916618
ucacauagguuugcauaau

SEQ ID NO: 1170849 - RNA, 19 nt, Artificial Sequence
  Description of Artificial Sequence: Synthetic oligonucleotide
  Antisense strand to SEQ ID NO: 1170848
auuaugcaaaccuauguga

SEQ ID NO: 1170850 - RNA, 19 nt, Artificial Sequence
  Description of Artificial Sequence: Synthetic oligonucleotide
  Sense strand starting at position 3713 of SEQ ID NO: 916618
uuugcauaauccuugggaa

SEQ ID NO: 1170851 - RNA, 19 nt, Artificial Sequence
  Description of Artificial Sequence: Synthetic oligonucleotide
  Antisense strand to SEQ ID NO: 1170850
uucccaaggauuaugcaaa

SEQ ID NO: 1170852 - RNA, 19 nt, Artificial Sequence
  Description of Artificial Sequence: Synthetic oligonucleotide
  Sense strand starting at position 3714 of SEQ ID NO: 916618
uugcauaauccuugggaag

SEQ ID NO: 1170853 - RNA, 19 nt, Artificial Sequence
  Description of Artificial Sequence: Synthetic oligonucleotide
  Antisense strand to SEQ ID NO: 1170852
cuucccaaggauuaugcaa

SEQ ID NO: 1170854 - RNA, 19 nt, Artificial Sequence
  Description of Artificial Sequence: Synthetic oligonucleotide
  Sense strand starting at position 3715 of SEQ ID NO: 916618
ugcauaauccuugggaagu

SEQ ID NO: 1170855 - RNA, 19 nt, Artificial Sequence
  Description of Artificial Sequence: Synthetic oligonucleotide
  Antisense strand to SEQ ID NO: 1170854
acuucccaaggauuaugca

SEQ ID NO: 1170856 - RNA, 19 nt, Artificial Sequence
  Description of Artificial Sequence: Synthetic oligonucleotide
  Sense strand starting at position 3726 of SEQ ID NO: 916618
ugggaaguuuguuccuaga

SEQ ID NO: 1170857 - RNA, 19 nt, Artificial Sequence
  Description of Artificial Sequence: Synthetic oligonucleotide
  Antisense strand to SEQ ID NO: 1170856
ucuaggaacaaacuuccca

SEQ ID NO: 1170858 - RNA, 19 nt, Artificial Sequence
  Description of Artificial Sequence: Synthetic oligonucleotide
  Sense strand starting at position 3728 of SEQ ID NO: 916618
ggaaguuuguuccuagaua

SEQ ID NO: 1170859 - RNA, 19 nt, Artificial Sequence
  Description of Artificial Sequence: Synthetic oligonucleotide
  Antisense strand to SEQ ID NO: 1170858
uaucuaggaacaaacuucc

SEQ ID NO: 1170860 - RNA, 19 nt, Artificial Sequence
  Description of Artificial Sequence: Synthetic oligonucleotide
  Sense strand starting at position 3769 of SEQ ID NO: 916618
agauauuucuuauugcugu

SEQ ID NO: 1170861 - RNA, 19 nt, Artificial Sequence
  Description of Artificial Sequence: Synthetic oligonucleotide
  Antisense strand to SEQ ID NO: 1170860
acagcaauaagaaauaucu

SEQ ID NO: 1170862 - RNA, 19 nt, Artificial Sequence
  Description of Artificial Sequence: Synthetic oligonucleotide
  Sense strand starting at position 18 of SEQ ID NO: 916619
guaaauuacuuacugguau

SEQ ID NO: 1170863 - RNA, 19 nt, Artificial Sequence
  Description of Artificial Sequence: Synthetic oligonucleotide
  Antisense strand to SEQ ID NO: 1170862
auaccaguaaguaauuuac

SEQ ID NO: 1170864 - RNA, 19 nt, Artificial Sequence
  Description of Artificial Sequence: Synthetic oligonucleotide
  Sense strand starting at position 46 of SEQ ID NO: 916619
guaguauuaugagauuuga

SEQ ID NO: 1170865 - RNA, 19 nt, Artificial Sequence
  Description of Artificial Sequence: Synthetic oligonucleotide
  Antisense strand to SEQ ID NO: 1170864
ucaaaucucauaauacuac

SEQ ID NO: 1170866 - RNA, 19 nt, Artificial Sequence
  Description of Artificial Sequence: Synthetic oligonucleotide
  Sense strand starting at position 57 of SEQ ID NO: 916619
agauuugauugcuaugaau

SEQ ID NO: 1170867 - RNA, 19 nt, Artificial Sequence
  Description of Artificial Sequence: Synthetic oligonucleotide
  Antisense strand to SEQ ID NO: 1170866
auucauagcaaucaaaucu

SEQ ID NO: 1170868 - RNA, 19 nt, Artificial Sequence
  Description of Artificial Sequence: Synthetic oligonucleotide
  Sense strand starting at position 63 of SEQ ID NO: 916619
gauugcuaugaaugaagac

SEQ ID NO: 1170869 - RNA, 19 nt, Artificial Sequence
  Description of Artificial Sequence: Synthetic oligonucleotide
  Antisense strand to SEQ ID NO: 1170868
gucuucauucauagcaauc

SEQ ID NO: 1170870 - RNA, 19 nt, Artificial Sequence
  Description of Artificial Sequence: Synthetic oligonucleotide
  Sense strand starting at position 133 of SEQ ID NO: 916619
cgagaucuuggccaaguua

SEQ ID NO: 1170871 - RNA, 19 nt, Artificial Sequence
  Description of Artificial Sequence: Synthetic oligonucleotide
  Antisense strand to SEQ ID NO: 1170870
uaacuuggccaagaucucg

SEQ ID NO: 1170872 - RNA, 19 nt, Artificial Sequence
  Description of Artificial Sequence: Synthetic oligonucleotide
  Sense strand starting at position 215 of SEQ ID NO: 916619
augacaagucaacgacaua

SEQ ID NO: 1170873 - RNA, 19 nt, Artificial Sequence
  Description of Artificial Sequence: Synthetic oligonucleotide
  Antisense strand to SEQ ID NO: 1170872
uaugucguugacuugucau

SEQ ID NO: 1170874 - RNA, 19 nt, Artificial Sequence
  Description of Artificial Sequence: Synthetic oligonucleotide
  Sense strand starting at position 288 of SEQ ID NO: 916619
auuaucaugcauuaugagu

SEQ ID NO: 1170875 - RNA, 19 nt, Artificial Sequence
  Description of Artificial Sequence: Synthetic oligonucleotide
  Antisense strand to SEQ ID NO: 1170874
acucauaaugcaugauaau

SEQ ID NO: 1170876 - RNA, 19 nt, Artificial Sequence
  Description of Artificial Sequence: Synthetic oligonucleotide
  Sense strand starting at position 705 of SEQ ID NO: 916619
caguaaauauuugaggcau

SEQ ID NO: 1170877 - RNA, 19 nt, Artificial Sequence
  Description of Artificial Sequence: Synthetic oligonucleotide
  Antisense strand to SEQ ID NO: 1170876
augccucaaauauuuacug

SEQ ID NO: 1170878 - RNA, 19 nt, Artificial Sequence
  Description of Artificial Sequence: Synthetic oligonucleotide
  Sense strand starting at position 792 of SEQ ID NO: 916619
auagcugugcuccaauaaa

SEQ ID NO: 1170879 - RNA, 19 nt, Artificial Sequence
  Description of Artificial Sequence: Synthetic oligonucleotide
  Antisense strand to SEQ ID NO: 1170878
uuuauuggagcacagcuau

SEQ ID NO: 1170880 - RNA, 19 nt, Artificial Sequence
  Description of Artificial Sequence: Synthetic oligonucleotide
  Sense strand starting at position 1095 of SEQ ID NO: 916619
agaagucaaugagacaaua

SEQ ID NO: 1170881 - RNA, 19 nt, Artificial Sequence
  Description of Artificial Sequence: Synthetic oligonucleotide
  Antisense strand to SEQ ID NO: 1170880
uauugucucauugacuucu

SEQ ID NO: 1170882 - RNA, 19 nt, Artificial Sequence
  Description of Artificial Sequence: Synthetic oligonucleotide
  Sense strand starting at position 1208 of SEQ ID NO: 916619
caaguugcucuagagcaaa

SEQ ID NO: 1170883 - RNA, 19 nt, Artificial Sequence
  Description of Artificial Sequence: Synthetic oligonucleotide
  Antisense strand to SEQ ID NO: 1170882
uuugcucuagagcaacuug

SEQ ID NO: 1170884 - RNA, 19 nt, Artificial Sequence
  Description of Artificial Sequence: Synthetic oligonucleotide
  Sense strand starting at position 1261 of SEQ ID NO: 916619
gugugaaaugguugaaaga

SEQ ID NO: 1170885 - RNA, 19 nt, Artificial Sequence
  Description of Artificial Sequence: Synthetic oligonucleotide
  Antisense strand to SEQ ID NO: 1170884
ucuuucaaccauuucacac

SEQ ID NO: 1170886 - RNA, 19 nt, Artificial Sequence
  Description of Artificial Sequence: Synthetic oligonucleotide
  Sense strand starting at position 1328 of SEQ ID NO: 916619
uguaguccuucgguauuua

SEQ ID NO: 1170887 - RNA, 19 nt, Artificial Sequence
  Description of Artificial Sequence: Synthetic oligonucleotide
  Antisense strand to SEQ ID NO: 1170886
uaaauaccgaaggacuaca

SEQ ID NO: 1170888 - RNA, 19 nt, Artificial Sequence
  Description of Artificial Sequence: Synthetic oligonucleotide
  Sense strand starting at position 1349 of SEQ ID NO: 916619
aucucuaaugagcauaagu

SEQ ID NO: 1170889 - RNA, 19 nt, Artificial Sequence
  Description of Artificial Sequence: Synthetic oligonucleotide
  Antisense strand to SEQ ID NO: 1170888
acuuaugcucauuagagau

SEQ ID NO: 1170890 - RNA, 19 nt, Artificial Sequence
  Description of Artificial Sequence: Synthetic oligonucleotide
  Sense strand starting at position 1351 of SEQ ID NO: 916619
cucuaaugagcauaaguuu

SEQ ID NO: 1170891 - RNA, 19 nt, Artificial Sequence
  Description of Artificial Sequence: Synthetic oligonucleotide
  Antisense strand to SEQ ID NO: 1170890
aaacuuaugcucauuagag

SEQ ID NO: 1170892 - RNA, 19 nt, Artificial Sequence
  Description of Artificial Sequence: Synthetic oligonucleotide
  Sense strand starting at position 1391 of SEQ ID NO: 916619
gggaauuccuaccucacag

SEQ ID NO: 1170893 - RNA, 19 nt, Artificial Sequence
  Description of Artificial Sequence: Synthetic oligonucleotide
  Antisense strand to SEQ ID NO: 1170892
cugugagguaggaauuccc

SEQ ID NO: 1170894 - RNA, 19 nt, Artificial Sequence
  Description of Artificial Sequence: Synthetic oligonucleotide
  Sense strand starting at position 1405 of SEQ ID NO: 916619
cacagaaugagacguuagu

SEQ ID NO: 1170895 - RNA, 19 nt, Artificial Sequence
  Description of Artificial Sequence: Synthetic oligonucleotide
  Antisense strand to SEQ ID NO: 1170894
acuaacgucucauucugug

SEQ ID NO: 1170896 - RNA, 19 nt, Artificial Sequence
  Description of Artificial Sequence: Synthetic oligonucleotide
  Sense strand starting at position 1457 of SEQ ID NO: 916619
uuuaguaggugcucaauuu

SEQ ID NO: 1170897 - RNA, 19 nt, Artificial Sequence
  Description of Artificial Sequence: Synthetic oligonucleotide
  Antisense strand to SEQ ID NO: 1170896
aaauugagcaccuacuaaa

SEQ ID NO: 1170898 - RNA, 19 nt, Artificial Sequence
  Description of Artificial Sequence: Synthetic oligonucleotide
  Sense strand starting at position 1537 of SEQ ID NO: 916619
gcuguaacuaaucaggagu

SEQ ID NO: 1170899 - RNA, 19 nt, Artificial Sequence
  Description of Artificial Sequence: Synthetic oligonucleotide
  Antisense strand to SEQ ID NO: 1170898
acuccugauuaguuacagc

SEQ ID NO: 1170900 - RNA, 19 nt, Artificial Sequence
  Description of Artificial Sequence: Synthetic oligonucleotide
  Sense strand starting at position 1574 of SEQ ID NO: 916619
uggaguccguguacauagu

SEQ ID NO: 1170901 - RNA, 19 nt, Artificial Sequence
  Description of Artificial Sequence: Synthetic oligonucleotide
  Antisense strand to SEQ ID NO: 1170900
acuauguacacggacucca

SEQ ID NO: 1170902 - RNA, 19 nt, Artificial Sequence
  Description of Artificial Sequence: Synthetic oligonucleotide
  Sense strand starting at position 1606 of SEQ ID NO: 916619
agguuuccugccuaacuaa

SEQ ID NO: 1170903 - RNA, 19 nt, Artificial Sequence
  Description of Artificial Sequence: Synthetic oligonucleotide
  Antisense strand to SEQ ID NO: 1170902
uuaguuaggcaggaaaccu

SEQ ID NO: 1170904 - RNA, 19 nt, Artificial Sequence
  Description of Artificial Sequence: Synthetic oligonucleotide
  Sense strand starting at position 1793 of SEQ ID NO: 916619
cuacgaccgagguauuaca

SEQ ID NO: 1170905 - RNA, 19 nt, Artificial Sequence
  Description of Artificial Sequence: Synthetic oligonucleotide
  Antisense strand to SEQ ID NO: 1170904
uguaauaccucggucguag

SEQ ID NO: 1170906 - RNA, 19 nt, Artificial Sequence
  Description of Artificial Sequence: Synthetic oligonucleotide
  Sense strand starting at position 2193 of SEQ ID NO: 916619
acucuauucccaggaguuc

SEQ ID NO: 1170907 - RNA, 19 nt, Artificial Sequence
  Description of Artificial Sequence: Synthetic oligonucleotide
  Antisense strand to SEQ ID NO: 1170906
gaacuccugggaauagagu

SEQ ID NO: 1170908 - RNA, 19 nt, Artificial Sequence
  Description of Artificial Sequence: Synthetic oligonucleotide
  Sense strand starting at position 2194 of SEQ ID NO: 916619
cucuauucccaggaguucu

SEQ ID NO: 1170909 - RNA, 19 nt, Artificial Sequence
  Description of Artificial Sequence: Synthetic oligonucleotide
  Antisense strand to SEQ ID NO: 1170908
agaacuccugggaauagag

SEQ ID NO: 1170910 - RNA, 19 nt, Artificial Sequence
  Description of Artificial Sequence: Synthetic oligonucleotide
  Sense strand starting at position 2276 of SEQ ID NO: 916619
agaggugucggcgcucauu

SEQ ID NO: 1170911 - RNA, 19 nt, Artificial Sequence
  Description of Artificial Sequence: Synthetic oligonucleotide
  Antisense strand to SEQ ID NO: 1170910
aaugagcgccgacaccucu

SEQ ID NO: 1170912 - RNA, 19 nt, Artificial Sequence
  Description of Artificial Sequence: Synthetic oligonucleotide
  Sense strand starting at position 2294 of SEQ ID NO: 916619
ugcagagacuuaucuuguu

SEQ ID NO: 1170913 - RNA, 19 nt, Artificial Sequence
  Description of Artificial Sequence: Synthetic oligonucleotide
  Antisense strand to SEQ ID NO: 1170912
aacaagauaagucucugca

SEQ ID NO: 1170914 - RNA, 19 nt, Artificial Sequence
  Description of Artificial Sequence: Synthetic oligonucleotide
  Sense strand starting at position 2458 of SEQ ID NO: 916619
cucugucuccguguccaua

SEQ ID NO: 1170915 - RNA, 19 nt, Artificial Sequence
  Description of Artificial Sequence: Synthetic oligonucleotide
  Antisense strand to SEQ ID NO: 1170914
uauggacacggagacagag

SEQ ID NO: 1170916 - RNA, 19 nt, Artificial Sequence
  Description of Artificial Sequence: Synthetic oligonucleotide
  Sense strand starting at position 2578 of SEQ ID NO: 916619
cucuuaaggugcuugauau

SEQ ID NO: 1170917 - RNA, 19 nt, Artificial Sequence
  Description of Artificial Sequence: Synthetic oligonucleotide
  Antisense strand to SEQ ID NO: 1170916
auaucaagcaccuuaagag

SEQ ID NO: 1170918 - RNA, 19 nt, Artificial Sequence
  Description of Artificial Sequence: Synthetic oligonucleotide
  Sense strand starting at position 2579 of SEQ ID NO: 916619
ucuuaaggugcuugauaug

SEQ ID NO: 1170919 - RNA, 19 nt, Artificial Sequence
  Description of Artificial Sequence: Synthetic oligonucleotide
  Antisense strand to SEQ ID NO: 1170918
cauaucaagcaccuuaaga

SEQ ID NO: 1170920 - RNA, 19 nt, Artificial Sequence
  Description of Artificial Sequence: Synthetic oligonucleotide
  Sense strand starting at position 2590 of SEQ ID NO: 916619
uugauauguuuguuacuga

SEQ ID NO: 1170921 - RNA, 19 nt, Artificial Sequence
  Description of Artificial Sequence: Synthetic oligonucleotide
  Antisense strand to SEQ ID NO: 1170920
ucaguaacaaacauaucaa

SEQ ID NO: 1170922 - RNA, 19 nt, Artificial Sequence
  Description of Artificial Sequence: Synthetic oligonucleotide
  Sense strand starting at position 2685 of SEQ ID NO: 916619
ugggaaugcuacuuccaga

SEQ ID NO: 1170923 - RNA, 19 nt, Artificial Sequence
  Description of Artificial Sequence: Synthetic oligonucleotide
  Antisense strand to SEQ ID NO: 1170922
ucuggaaguagcauuccca

SEQ ID NO: 1170924 - RNA, 19 nt, Artificial Sequence
  Description of Artificial Sequence: Synthetic oligonucleotide
  Sense strand starting at position 2690 of SEQ ID NO: 916619
augcuacuuccagaaugca

SEQ ID NO: 1170925 - RNA, 19 nt, Artificial Sequence
  Description of Artificial Sequence: Synthetic oligonucleotide
  Antisense strand to SEQ ID NO: 1170924
ugcauucuggaaguagcau

SEQ ID NO: 1170926 - RNA, 19 nt, Artificial Sequence
  Description of Artificial Sequence: Synthetic oligonucleotide
  Sense strand starting at position 2708 of SEQ ID NO: 916619
acacuagucccugacaggu

SEQ ID NO: 1170927 - RNA, 19 nt, Artificial Sequence
  Description of Artificial Sequence: Synthetic oligonucleotide
  Antisense strand to SEQ ID NO: 1170926
accugucagggacuagugu

SEQ ID NO: 1170928 - RNA, 19 nt, Artificial Sequence
  Description of Artificial Sequence: Synthetic oligonucleotide
  Sense strand starting at position 3214 of SEQ ID NO: 916619
accagaugugaucauguca

SEQ ID NO: 1170929 - RNA, 19 nt, Artificial Sequence
  Description of Artificial Sequence: Synthetic oligonucleotide
  Antisense strand to SEQ ID NO: 1170928
ugacaugaucacaucuggu

SEQ ID NO: 1170930 - RNA, 19 nt, Artificial Sequence
  Description of Artificial Sequence: Synthetic oligonucleotide
  Sense strand starting at position 3574 of SEQ ID NO: 916619
guaccugugcucuaaucca

SEQ ID NO: 1170931 - RNA, 19 nt, Artificial Sequence
  Description of Artificial Sequence: Synthetic oligonucleotide
  Antisense strand to SEQ ID NO: 1170930
uggauuagagcacagguac

SEQ ID NO: 1170932 - RNA, 19 nt, Artificial Sequence
  Description of Artificial Sequence: Synthetic oligonucleotide
  Sense strand starting at position 3663 of SEQ ID NO: 916619
gaagcaagaugccucaaga

SEQ ID NO: 1170933 - RNA, 19 nt, Artificial Sequence
  Description of Artificial Sequence: Synthetic oligonucleotide
  Antisense strand to SEQ ID NO: 1170932
ucuugaggcaucuugcuuc

SEQ ID NO: 1170934 - RNA, 19 nt, Artificial Sequence
  Description of Artificial Sequence: Synthetic oligonucleotide
  Sense strand starting at position 3778 of SEQ ID NO: 916619
ggcaauaauuaugugguca

SEQ ID NO: 1170935 - RNA, 19 nt, Artificial Sequence
  Description of Artificial Sequence: Synthetic oligonucleotide
  Antisense strand to SEQ ID NO: 1170934
ugaccacauaauuauugcc

SEQ ID NO: 1170936 - RNA, 19 nt, Artificial Sequence
  Description of Artificial Sequence: Synthetic oligonucleotide
  Sense strand starting at position 3835 of SEQ ID NO: 916619
accgaaugacagugaacau

SEQ ID NO: 1170937 - RNA, 19 nt, Artificial Sequence
  Description of Artificial Sequence: Synthetic oligonucleotide
  Antisense strand to SEQ ID NO: 1170936
auguucacugucauucggu

SEQ ID NO: 1170938 - RNA, 19 nt, Artificial Sequence
  Description of Artificial Sequence: Synthetic oligonucleotide
  Sense strand starting at position 3901 of SEQ ID NO: 916619
guauauugaguuugaaugu

SEQ ID NO: 1170939 - RNA, 19 nt, Artificial Sequence
  Description of Artificial Sequence: Synthetic oligonucleotide
  Antisense strand to SEQ ID NO: 1170938
acauucaaacucaauauac

SEQ ID NO: 1170940 - RNA, 19 nt, Artificial Sequence
  Description of Artificial Sequence: Synthetic oligonucleotide
  Sense strand starting at position 3945 of SEQ ID NO: 916619
agagaaagauguucccagu

SEQ ID NO: 1170941 - RNA, 19 nt, Artificial Sequence
  Description of Artificial Sequence: Synthetic oligonucleotide
  Antisense strand to SEQ ID NO: 1170940
acugggaacaucuuucucu

SEQ ID NO: 1170942 - RNA, 19 nt, Artificial Sequence
  Description of Artificial Sequence: Synthetic oligonucleotide
  Sense strand starting at position 63 of SEQ ID NO: 916620
gaucgucuuagcgaacaga

SEQ ID NO: 1170943 - RNA, 19 nt, Artificial Sequence
  Description of Artificial Sequence: Synthetic oligonucleotide
  Antisense strand to SEQ ID NO: 1170942
ucuguucgcuaagacgauc

SEQ ID NO: 1170944 - RNA, 19 nt, Artificial Sequence
  Description of Artificial Sequence: Synthetic oligonucleotide
  Sense strand starting at position 66 of SEQ ID NO: 916620
cgucuuagcgaacagaauu

SEQ ID NO: 1170945 - RNA, 19 nt, Artificial Sequence
  Description of Artificial Sequence: Synthetic oligonucleotide
  Antisense strand to SEQ ID NO: 1170944
aauucuguucgcuaagacg

SEQ ID NO: 1170946 - RNA, 19 nt, Artificial Sequence
  Description of Artificial Sequence: Synthetic oligonucleotide
  Sense strand starting at position 76 of SEQ ID NO: 916620
aacagaauuguggguuacu

SEQ ID NO: 1170947 - RNA, 19 nt, Artificial Sequence
  Description of Artificial Sequence: Synthetic oligonucleotide
  Antisense strand to SEQ ID NO: 1170946
aguaacccacaauucuguu

SEQ ID NO: 1170948 - RNA, 19 nt, Artificial Sequence
  Description of Artificial Sequence: Synthetic oligonucleotide
  Sense strand starting at position 77 of SEQ ID NO: 916620
acagaauuguggguuacua

SEQ ID NO: 1170949 - RNA, 19 nt, Artificial Sequence
  Description of Artificial Sequence: Synthetic oligonucleotide
  Antisense strand to SEQ ID NO: 1170948
uaguaacccacaauucugu

SEQ ID NO: 1170950 - RNA, 19 nt, Artificial Sequence
  Description of Artificial Sequence: Synthetic oligonucleotide
  Sense strand starting at position 139 of SEQ ID NO: 916620
uguuuaggagcacaacuua

SEQ ID NO: 1170951 - RNA, 19 nt, Artificial Sequence
  Description of Artificial Sequence: Synthetic oligonucleotide
  Antisense strand to SEQ ID NO: 1170950
uaaguugugcuccuaaaca

SEQ ID NO: 1170952 - RNA, 19 nt, Artificial Sequence
  Description of Artificial Sequence: Synthetic oligonucleotide
  Sense strand starting at position 199 of SEQ ID NO: 916620
uggauauacucaucuugag

SEQ ID NO: 1170953 - RNA, 19 nt, Artificial Sequence
  Description of Artificial Sequence: Synthetic oligonucleotide
  Antisense strand to SEQ ID NO: 1170952
cucaagaugaguauaucca

SEQ ID NO: 1170954 - RNA, 19 nt, Artificial Sequence
  Description of Artificial Sequence: Synthetic oligonucleotide
  Sense strand starting at position 211 of SEQ ID NO: 916620
ucuugagcucacuguaaga

SEQ ID NO: 1170955 - RNA, 19 nt, Artificial Sequence
  Description of Artificial Sequence: Synthetic oligonucleotide
  Antisense strand to SEQ ID NO: 1170954
ucuuacagugagcucaaga

SEQ ID NO: 1170956 - RNA, 19 nt, Artificial Sequence
  Description of Artificial Sequence: Synthetic oligonucleotide
  Sense strand starting at position 213 of SEQ ID NO: 916620
uugagcucacuguaagaua

SEQ ID NO: 1170957 - RNA, 19 nt, Artificial Sequence
  Description of Artificial Sequence: Synthetic oligonucleotide
  Antisense strand to SEQ ID NO: 1170956
uaucuuacagugagcucaa

SEQ ID NO: 1170958 - RNA, 19 nt, Artificial Sequence
  Description of Artificial Sequence: Synthetic oligonucleotide
  Sense strand starting at position 227 of SEQ ID NO: 916620
agauaaagcugucuuggau

SEQ ID NO: 1170959 - RNA, 19 nt, Artificial Sequence
  Description of Artificial Sequence: Synthetic oligonucleotide
  Antisense strand to SEQ ID NO: 1170958
auccaagacagcuuuaucu

SEQ ID NO: 1170960 - RNA, 19 nt, Artificial Sequence
  Description of Artificial Sequence: Synthetic oligonucleotide
  Sense strand starting at position 230 of SEQ ID NO: 916620
uaaagcugucuuggauauu

SEQ ID NO: 1170961 - RNA, 19 nt, Artificial Sequence
  Description of Artificial Sequence: Synthetic oligonucleotide
  Antisense strand to SEQ ID NO: 1170960
aauauccaagacagcuuua

SEQ ID NO: 1170962 - RNA, 19 nt, Artificial Sequence
  Description of Artificial Sequence: Synthetic oligonucleotide
  Sense strand starting at position 281 of SEQ ID NO: 916620
aaacauugguaagaaagga

SEQ ID NO: 1170963 - RNA, 19 nt, Artificial Sequence
  Description of Artificial Sequence: Synthetic oligonucleotide
  Antisense strand to SEQ ID NO: 1170962
uccuuucuuaccaauguuu

SEQ ID NO: 1170964 - RNA, 19 nt, Artificial Sequence
  Description of Artificial Sequence: Synthetic oligonucleotide
  Sense strand starting at position 338 of SEQ ID NO: 916620
uagagaaugucgucaccau

SEQ ID NO: 1170965 - RNA, 19 nt, Artificial Sequence
  Description of Artificial Sequence: Synthetic oligonucleotide
  Antisense strand to SEQ ID NO: 1170964
auggugacgacauucucua

SEQ ID NO: 1170966 - RNA, 19 nt, Artificial Sequence
  Description of Artificial Sequence: Synthetic oligonucleotide
  Sense strand starting at position 339 of SEQ ID NO: 916620
agagaaugucgucaccauu

SEQ ID NO: 1170967 - RNA, 19 nt, Artificial Sequence
  Description of Artificial Sequence: Synthetic oligonucleotide
  Antisense strand to SEQ ID NO: 1170966
aauggugacgacauucucu

SEQ ID NO: 1170968 - RNA, 19 nt, Artificial Sequence
  Description of Artificial Sequence: Synthetic oligonucleotide
  Sense strand starting at position 342 of SEQ ID NO: 916620
gaaugucgucaccauuaau

SEQ ID NO: 1170969 - RNA, 19 nt, Artificial Sequence
  Description of Artificial Sequence: Synthetic oligonucleotide
  Antisense strand to SEQ ID NO: 1170968
auuaauggugacgacauuc

SEQ ID NO: 1170970 - RNA, 19 nt, Artificial Sequence
  Description of Artificial Sequence: Synthetic oligonucleotide
  Sense strand starting at position 345 of SEQ ID NO: 916620
ugucgucaccauuaaucaa

SEQ ID NO: 1170971 - RNA, 19 nt, Artificial Sequence
  Description of Artificial Sequence: Synthetic oligonucleotide
  Antisense strand to SEQ ID NO: 1170970
uugauuaauggugacgaca

SEQ ID NO: 1170972 - RNA, 19 nt, Artificial Sequence
  Description of Artificial Sequence: Synthetic oligonucleotide
  Sense strand starting at position 426 of SEQ ID NO: 916620
gggcaaguccuggagccau

SEQ ID NO: 1170973 - RNA, 19 nt, Artificial Sequence
  Description of Artificial Sequence: Synthetic oligonucleotide
  Antisense strand to SEQ ID NO: 1170972
auggcuccaggacuugccc

SEQ ID NO: 1170974 - RNA, 19 nt, Artificial Sequence
  Description of Artificial Sequence: Synthetic oligonucleotide
  Sense strand starting at position 2418 of SEQ ID NO: 916620
aguacaagaccguauuauu

SEQ ID NO: 1170975 - RNA, 19 nt, Artificial Sequence
  Description of Artificial Sequence: Synthetic oligonucleotide
  Antisense strand to SEQ ID NO: 1170974
aauaauacggucuuguacu

SEQ ID NO: 1170976 - RNA, 19 nt, Artificial Sequence
  Description of Artificial Sequence: Synthetic oligonucleotide
  Sense strand starting at position 2421 of SEQ ID NO: 916620
acaagaccguauuauuuga

SEQ ID NO: 1170977 - RNA, 19 nt, Artificial Sequence
  Description of Artificial Sequence: Synthetic oligonucleotide
  Antisense strand to SEQ ID NO: 1170976
ucaaauaauacggucuugu

SEQ ID NO: 1170978 - RNA, 19 nt, Artificial Sequence
  Description of Artificial Sequence: Synthetic oligonucleotide
  Sense strand starting at position 2426 of SEQ ID NO: 916620
accguauuauuugagagaa

SEQ ID NO: 1170979 - RNA, 19 nt, Artificial Sequence
  Description of Artificial Sequence: Synthetic oligonucleotide
  Antisense strand to SEQ ID NO: 1170978
uucucucaaauaauacggu

SEQ ID NO: 1170980 - RNA, 19 nt, Artificial Sequence
  Description of Artificial Sequence: Synthetic oligonucleotide
  Sense strand starting at position 2428 of SEQ ID NO: 916620
cguauuauuugagagaaag

SEQ ID NO: 1170981 - RNA, 19 nt, Artificial Sequence
  Description of Artificial Sequence: Synthetic oligonucleotide
  Antisense strand to SEQ ID NO: 1170980
cuuucucucaaauaauacg

SEQ ID NO: 1170982 - RNA, 19 nt, Artificial Sequence
  Description of Artificial Sequence: Synthetic oligonucleotide
  Sense strand starting at position 2439 of SEQ ID NO: 916620
agagaaagucucgaacgcu

SEQ ID NO: 1170983 - RNA, 19 nt, Artificial Sequence
  Description of Artificial Sequence: Synthetic oligonucleotide
  Antisense strand to SEQ ID NO: 1170982
agcguucgagacuuucucu

SEQ ID NO: 1170984 - RNA, 19 nt, Artificial Sequence
  Description of Artificial Sequence: Synthetic oligonucleotide
  Sense strand starting at position 2705 of SEQ ID NO: 916620
aacucaguucgacaguuua

SEQ ID NO: 1170985 - RNA, 19 nt, Artificial Sequence
  Description of Artificial Sequence: Synthetic oligonucleotide
  Antisense strand to SEQ ID NO: 1170984
uaaacugucgaacugaguu

SEQ ID NO: 1170986 - RNA, 19 nt, Artificial Sequence
  Description of Artificial Sequence: Synthetic oligonucleotide
  Sense strand starting at position 2837 of SEQ ID NO: 916620
ugaugcuaauuugagauga

SEQ ID NO: 1170987 - RNA, 19 nt, Artificial Sequence
  Description of Artificial Sequence: Synthetic oligonucleotide
  Antisense strand to SEQ ID NO: 1170986
ucaucucaaauuagcauca

SEQ ID NO: 1170988 - RNA, 19 nt, Artificial Sequence
  Description of Artificial Sequence: Synthetic oligonucleotide
  Sense strand starting at position 2899 of SEQ ID NO: 916620
agaggcuuauccucugaug

SEQ ID NO: 1170989 - RNA, 19 nt, Artificial Sequence
  Description of Artificial Sequence: Synthetic oligonucleotide
  Antisense strand to SEQ ID NO: 1170988
caucagaggauaagccucu

SEQ ID NO: 1170990 - RNA, 19 nt, Artificial Sequence
  Description of Artificial Sequence: Synthetic oligonucleotide
  Sense strand starting at position 2913 of SEQ ID NO: 916620
ugaugcaagucaucugaaa

SEQ ID NO: 1170991 - RNA, 19 nt, Artificial Sequence
  Description of Artificial Sequence: Synthetic oligonucleotide
  Antisense strand to SEQ ID NO: 1170990
uuucagaugacuugcauca

SEQ ID NO: 1170992 - RNA, 19 nt, Artificial Sequence
  Description of Artificial Sequence: Synthetic oligonucleotide
  Sense strand starting at position 2993 of SEQ ID NO: 916620
aaguaaugucagggcacau

SEQ ID NO: 1170993 - RNA, 19 nt, Artificial Sequence
  Description of Artificial Sequence: Synthetic oligonucleotide
  Antisense strand to SEQ ID NO: 1170992
augugcccugacauuacuu

SEQ ID NO: 1170994 - RNA, 19 nt, Artificial Sequence
  Description of Artificial Sequence: Synthetic oligonucleotide
  Sense strand starting at position 3056 of SEQ ID NO: 916620
guaggagagcccuaaguca

SEQ ID NO: 1170995 - RNA, 19 nt, Artificial Sequence
  Description of Artificial Sequence: Synthetic oligonucleotide
  Antisense strand to SEQ ID NO: 1170994
ugacuuagggcucuccuac

SEQ ID NO: 1170996 - RNA, 19 nt, Artificial Sequence
  Description of Artificial Sequence: Synthetic oligonucleotide
  Sense strand starting at position 3132 of SEQ ID NO: 916620
gcacaugaugagugagcaa

SEQ ID NO: 1170997 - RNA, 19 nt, Artificial Sequence
  Description of Artificial Sequence: Synthetic oligonucleotide
  Antisense strand to SEQ ID NO: 1170996
uugcucacucaucaugugc

SEQ ID NO: 1170998 - RNA, 19 nt, Artificial Sequence
  Description of Artificial Sequence: Synthetic oligonucleotide
  Sense strand starting at position 3135 of SEQ ID NO: 916620
caugaugagugagcaauca

SEQ ID NO: 1170999 - RNA, 19 nt, Artificial Sequence
  Description of Artificial Sequence: Synthetic oligonucleotide
  Antisense strand to SEQ ID NO: 1170998
ugauugcucacucaucaug

SEQ ID NO: 1171000 - RNA, 19 nt, Artificial Sequence
  Description of Artificial Sequence: Synthetic oligonucleotide
  Sense strand starting at position 3201 of SEQ ID NO: 916620
cucuauauuucucagggaa

SEQ ID NO: 1171001 - RNA, 19 nt, Artificial Sequence
  Description of Artificial Sequence: Synthetic oligonucleotide
  Antisense strand to SEQ ID NO: 1171000
uucccugagaaauauagag

SEQ ID NO: 1171002 - RNA, 19 nt, Artificial Sequence
  Description of Artificial Sequence: Synthetic oligonucleotide
  Sense strand starting at position 3203 of SEQ ID NO: 916620
cuauauuucucagggaaag

SEQ ID NO: 1171003 - RNA, 19 nt, Artificial Sequence
  Description of Artificial Sequence: Synthetic oligonucleotide
  Antisense strand to SEQ ID NO: 1171002
cuuucccugagaaauauag

SEQ ID NO: 1171004 - RNA, 19 nt, Artificial Sequence
  Description of Artificial Sequence: Synthetic oligonucleotide
  Sense strand starting at position 3538 of SEQ ID NO: 916620
cugagagaucuugggcaug

SEQ ID NO: 1171005 - RNA, 19 nt, Artificial Sequence
  Description of Artificial Sequence: Synthetic oligonucleotide
  Antisense strand to SEQ ID NO: 1171004
caugcccaagaucucucag

SEQ ID NO: 1171006 - RNA, 19 nt, Artificial Sequence
  Description of Artificial Sequence: Synthetic oligonucleotide
  Sense strand starting at position 3540 of SEQ ID NO: 916620
gagagaucuugggcauguu

SEQ ID NO: 1171007 - RNA, 19 nt, Artificial Sequence
  Description of Artificial Sequence: Synthetic oligonucleotide
  Antisense strand to SEQ ID NO: 1171006
aacaugcccaagaucucuc

SEQ ID NO: 1171008 - RNA, 19 nt, Artificial Sequence
  Description of Artificial Sequence: Synthetic oligonucleotide
  Sense strand starting at position 3541 of SEQ ID NO: 916620
agagaucuugggcauguuu

SEQ ID NO: 1171009 - RNA, 19 nt, Artificial Sequence
  Description of Artificial Sequence: Synthetic oligonucleotide
  Antisense strand to SEQ ID NO: 1171008
aaacaugcccaagaucucu

SEQ ID NO: 1171010 - RNA, 19 nt, Artificial Sequence
  Description of Artificial Sequence: Synthetic oligonucleotide
  Sense strand starting at position 3554 of SEQ ID NO: 916620
auguuuacauuaucuggua

SEQ ID NO: 1171011 - RNA, 19 nt, Artificial Sequence
  Description of Artificial Sequence: Synthetic oligonucleotide
  Antisense strand to SEQ ID NO: 1171010
uaccagauaauguaaacau

SEQ ID NO: 1171012 - RNA, 19 nt, Artificial Sequence
  Description of Artificial Sequence: Synthetic oligonucleotide
  Sense strand starting at position 3573 of SEQ ID NO: 916620
cucagcuuucuguacuaua

SEQ ID NO: 1171013 - RNA, 19 nt, Artificial Sequence
  Description of Artificial Sequence: Synthetic oligonucleotide
  Antisense strand to SEQ ID NO: 1171012
uauaguacagaaagcugag

SEQ ID NO: 1171014 - RNA, 19 nt, Artificial Sequence
  Description of Artificial Sequence: Synthetic oligonucleotide
  Sense strand starting at position 3782 of SEQ ID NO: 916620
gcuugauucgaggaaggca

SEQ ID NO: 1171015 - RNA, 19 nt, Artificial Sequence
  Description of Artificial Sequence: Synthetic oligonucleotide
  Antisense strand to SEQ ID NO: 1171014
ugccuuccucgaaucaagc

SEQ ID NO: 1171016 - RNA, 19 nt, Artificial Sequence
  Description of Artificial Sequence: Synthetic oligonucleotide
  Sense strand starting at position 3833 of SEQ ID NO: 916620
aguccuuggucucuaagaa

SEQ ID NO: 1171017 - RNA, 19 nt, Artificial Sequence
  Description of Artificial Sequence: Synthetic oligonucleotide
  Antisense strand to SEQ ID NO: 1171016
uucuuagagaccaaggacu

SEQ ID NO: 1171018 - RNA, 19 nt, Artificial Sequence
  Description of Artificial Sequence: Synthetic oligonucleotide
  Sense strand starting at position 3834 of SEQ ID NO: 916620
guccuuggucucuaagaag

SEQ ID NO: 1171019 - RNA, 19 nt, Artificial Sequence
  Description of Artificial Sequence: Synthetic oligonucleotide
  Antisense strand to SEQ ID NO: 1171018
cuucuuagagaccaaggac

SEQ ID NO: 1171020 - RNA, 19 nt, Artificial Sequence
  Description of Artificial Sequence: Synthetic oligonucleotide
  Sense strand starting at position 3845 of SEQ ID NO: 916620
cuaagaaguguaugggaga

SEQ ID NO: 1171021 - RNA, 19 nt, Artificial Sequence
  Description of Artificial Sequence: Synthetic oligonucleotide
  Antisense strand to SEQ ID NO: 1171020
ucucccauacacuucuuag

SEQ ID NO: 1171022 - RNA, 19 nt, Artificial Sequence
  Description of Artificial Sequence: Synthetic oligonucleotide
  Sense strand starting at position 61 of SEQ ID NO: 916621
acuuguuacucagauuuga

SEQ ID NO: 1171023 - RNA, 19 nt, Artificial Sequence
  Description of Artificial Sequence: Synthetic oligonucleotide
  Antisense strand to SEQ ID NO: 1171022
ucaaaucugaguaacaagu

SEQ ID NO: 1171024 - RNA, 19 nt, Artificial Sequence
  Description of Artificial Sequence: Synthetic oligonucleotide
  Sense strand starting at position 287 of SEQ ID NO: 916621
gcuuuagaguaacuaguua

SEQ ID NO: 1171025 - RNA, 19 nt, Artificial Sequence
  Description of Artificial Sequence: Synthetic oligonucleotide
  Antisense strand to SEQ ID NO: 1171024
uaacuaguuacucuaaagc

SEQ ID NO: 1171026 - RNA, 19 nt, Artificial Sequence
  Description of Artificial Sequence: Synthetic oligonucleotide
  Sense strand starting at position 292 of SEQ ID NO: 916621
agaguaacuaguuaugugu

SEQ ID NO: 1171027 - RNA, 19 nt, Artificial Sequence
  Description of Artificial Sequence: Synthetic oligonucleotide
  Antisense strand to SEQ ID NO: 1171026
acacauaacuaguuacucu

SEQ ID NO: 1171028 - RNA, 19 nt, Artificial Sequence
  Description of Artificial Sequence: Synthetic oligonucleotide
  Sense strand starting at position 295 of SEQ ID NO: 916621
guaacuaguuauguguaga

SEQ ID NO: 1171029 - RNA, 19 nt, Artificial Sequence
  Description of Artificial Sequence: Synthetic oligonucleotide
  Antisense strand to SEQ ID NO: 1171028
ucuacacauaacuaguuac

SEQ ID NO: 1171030 - RNA, 19 nt, Artificial Sequence
  Description of Artificial Sequence: Synthetic oligonucleotide
  Sense strand starting at position 298 of SEQ ID NO: 916621
acuaguuauguguagaaag

SEQ ID NO: 1171031 - RNA, 19 nt, Artificial Sequence
  Description of Artificial Sequence: Synthetic oligonucleotide
  Antisense strand to SEQ ID NO: 1171030
cuuucuacacauaacuagu

SEQ ID NO: 1171032 - RNA, 19 nt, Artificial Sequence
  Description of Artificial Sequence: Synthetic oligonucleotide
  Sense strand starting at position 371 of SEQ ID NO: 916621
ucguaacagcuuuagaaag

SEQ ID NO: 1171033 - RNA, 19 nt, Artificial Sequence
  Description of Artificial Sequence: Synthetic oligonucleotide
  Antisense strand to SEQ ID NO: 1171032
cuuucuaaagcuguuacga

SEQ ID NO: 1171034 - RNA, 19 nt, Artificial Sequence
  Description of Artificial Sequence: Synthetic oligonucleotide
  Sense strand starting at position 508 of SEQ ID NO: 916621
uguguuaacuuuccucuaa

SEQ ID NO: 1171035 - RNA, 19 nt, Artificial Sequence
  Description of Artificial Sequence: Synthetic oligonucleotide
  Antisense strand to SEQ ID NO: 1171034
uuagaggaaaguuaacaca

SEQ ID NO: 1171036 - RNA, 19 nt, Artificial Sequence
  Description of Artificial Sequence: Synthetic oligonucleotide
  Sense strand starting at position 509 of SEQ ID NO: 916621
guguuaacuuuccucuaac

SEQ ID NO: 1171037 - RNA, 19 nt, Artificial Sequence
  Description of Artificial Sequence: Synthetic oligonucleotide
  Antisense strand to SEQ ID NO: 1171036
guuagaggaaaguuaacac

SEQ ID NO: 1171038 - RNA, 19 nt, Artificial Sequence
  Description of Artificial Sequence: Synthetic oligonucleotide
  Sense strand starting at position 602 of SEQ ID NO: 916621
uggcuacuccaagaaugua

SEQ ID NO: 1171039 - RNA, 19 nt, Artificial Sequence
  Description of Artificial Sequence: Synthetic oligonucleotide
  Antisense strand to SEQ ID NO: 1171038
uacauucuuggaguagcca

SEQ ID NO: 1171040 - RNA, 19 nt, Artificial Sequence
  Description of Artificial Sequence: Synthetic oligonucleotide
  Sense strand starting at position 610 of SEQ ID NO: 916621
ccaagaauguaagugauua

SEQ ID NO: 1171041 - RNA, 19 nt, Artificial Sequence
  Description of Artificial Sequence: Synthetic oligonucleotide
  Antisense strand to SEQ ID NO: 1171040
uaaucacuuacauucuugg

SEQ ID NO: 1171042 - RNA, 19 nt, Artificial Sequence
  Description of Artificial Sequence: Synthetic oligonucleotide
  Sense strand starting at position 746 of SEQ ID NO: 916621
aagcguuaggucuguaaga

SEQ ID NO: 1171043 - RNA, 19 nt, Artificial Sequence
  Description of Artificial Sequence: Synthetic oligonucleotide
  Antisense strand to SEQ ID NO: 1171042
ucuuacagaccuaacgcuu

SEQ ID NO: 1171044 - RNA, 19 nt, Artificial Sequence
  Description of Artificial Sequence: Synthetic oligonucleotide
  Sense strand starting at position 747 of SEQ ID NO: 916621
agcguuaggucuguaagaa

SEQ ID NO: 1171045 - RNA, 19 nt, Artificial Sequence
  Description of Artificial Sequence: Synthetic oligonucleotide
  Antisense strand to SEQ ID NO: 1171044
uucuuacagaccuaacgcu

SEQ ID NO: 1171046 - RNA, 19 nt, Artificial Sequence
  Description of Artificial Sequence: Synthetic oligonucleotide
  Sense strand starting at position 748 of SEQ ID NO: 916621
gcguuaggucuguaagaau

SEQ ID NO: 1171047 - RNA, 19 nt, Artificial Sequence
  Description of Artificial Sequence: Synthetic oligonucleotide
  Antisense strand to SEQ ID NO: 1171046
auucuuacagaccuaacgc

SEQ ID NO: 1171048 - RNA, 19 nt, Artificial Sequence
  Description of Artificial Sequence: Synthetic oligonucleotide
  Sense strand starting at position 757 of SEQ ID NO: 916621
cuguaagaaugacuuucuu

SEQ ID NO: 1171049 - RNA, 19 nt, Artificial Sequence
  Description of Artificial Sequence: Synthetic oligonucleotide
  Antisense strand to SEQ ID NO: 1171048
aagaaagucauucuuacag

SEQ ID NO: 1171050 - RNA, 19 nt, Artificial Sequence
  Description of Artificial Sequence: Synthetic oligonucleotide
  Sense strand starting at position 789 of SEQ ID NO: 916621
gugguaaagaccugguagu

SEQ ID NO: 1171051 - RNA, 19 nt, Artificial Sequence
  Description of Artificial Sequence: Synthetic oligonucleotide
  Antisense strand to SEQ ID NO: 1171050
acuaccaggucuuuaccac

SEQ ID NO: 1171052 - RNA, 19 nt, Artificial Sequence
  Description of Artificial Sequence: Synthetic oligonucleotide
  Sense strand starting at position 790 of SEQ ID NO: 916621
ugguaaagaccugguaguu

SEQ ID NO: 1171053 - RNA, 19 nt, Artificial Sequence
  Description of Artificial Sequence: Synthetic oligonucleotide
  Antisense strand to SEQ ID NO: 1171052
aacuaccaggucuuuacca

SEQ ID NO: 1171054 - RNA, 19 nt, Artificial Sequence
  Description of Artificial Sequence: Synthetic oligonucleotide
  Sense strand starting at position 795 of SEQ ID NO: 916621
aagaccugguaguuuaauu

SEQ ID NO: 1171055 - RNA, 19 nt, Artificial Sequence
  Description of Artificial Sequence: Synthetic oligonucleotide
  Antisense strand to SEQ ID NO: 1171054
aauuaaacuaccaggucuu

SEQ ID NO: 1171056 - RNA, 19 nt, Artificial Sequence
  Description of Artificial Sequence: Synthetic oligonucleotide
  Sense strand starting at position 800 of SEQ ID NO: 916621
cugguaguuuaauuccuua

SEQ ID NO: 1171057 - RNA, 19 nt, Artificial Sequence
  Description of Artificial Sequence: Synthetic oligonucleotide
  Antisense strand to SEQ ID NO: 1171056
uaaggaauuaaacuaccag

SEQ ID NO: 1171058 - RNA, 19 nt, Artificial Sequence
  Description of Artificial Sequence: Synthetic oligonucleotide
  Sense strand starting at position 918 of SEQ ID NO: 916621
gccauuucuugagguaaag

SEQ ID NO: 1171059 - RNA, 19 nt, Artificial Sequence
  Description of Artificial Sequence: Synthetic oligonucleotide
  Antisense strand to SEQ ID NO: 1171058
cuuuaccucaagaaauggc

SEQ ID NO: 1171060 - RNA, 19 nt, Artificial Sequence
  Description of Artificial Sequence: Synthetic oligonucleotide
  Sense strand starting at position 982 of SEQ ID NO: 916621
ugucgaauuucccuccuga

SEQ ID NO: 1171061 - RNA, 19 nt, Artificial Sequence
  Description of Artificial Sequence: Synthetic oligonucleotide
  Antisense strand to SEQ ID NO: 1171060
ucaggagggaaauucgaca

SEQ ID NO: 1171062 - RNA, 19 nt, Artificial Sequence
  Description of Artificial Sequence: Synthetic oligonucleotide
  Sense strand starting at position 1072 of SEQ ID NO: 916621
aauagcucggucugggauu

SEQ ID NO: 1171063 - RNA, 19 nt, Artificial Sequence
  Description of Artificial Sequence: Synthetic oligonucleotide
  Antisense strand to SEQ ID NO: 1171062
aaucccagaccgagcuauu

SEQ ID NO: 1171064 - RNA, 19 nt, Artificial Sequence
  Description of Artificial Sequence: Synthetic oligonucleotide
  Sense strand starting at position 1085 of SEQ ID NO: 916621
gggauuacaucggcaggca

SEQ ID NO: 1171065 - RNA, 19 nt, Artificial Sequence
  Description of Artificial Sequence: Synthetic oligonucleotide
  Antisense strand to SEQ ID NO: 1171064
ugccugccgauguaauccc

SEQ ID NO: 1171066 - RNA, 19 nt, Artificial Sequence
  Description of Artificial Sequence: Synthetic oligonucleotide
  Sense strand starting at position 1086 of SEQ ID NO: 916621
ggauuacaucggcaggcau

SEQ ID NO: 1171067 - RNA, 19 nt, Artificial Sequence
  Description of Artificial Sequence: Synthetic oligonucleotide
  Antisense strand to SEQ ID NO: 1171066
augccugccgauguaaucc

SEQ ID NO: 1171068 - RNA, 19 nt, Artificial Sequence
  Description of Artificial Sequence: Synthetic oligonucleotide
  Sense strand starting at position 1140 of SEQ ID NO: 916621
ccugauuaacucggcaacu

SEQ ID NO: 1171069 - RNA, 19 nt, Artificial Sequence
  Description of Artificial Sequence: Synthetic oligonucleotide
  Antisense strand to SEQ ID NO: 1171068
aguugccgaguuaaucagg

SEQ ID NO: 1171070 - RNA, 19 nt, Artificial Sequence
  Description of Artificial Sequence: Synthetic oligonucleotide
  Sense strand starting at position 2194 of SEQ ID NO: 916621
gacgaauugcgauagagag

SEQ ID NO: 1171071 - RNA, 19 nt, Artificial Sequence
  Description of Artificial Sequence: Synthetic oligonucleotide
  Antisense strand to SEQ ID NO: 1171070
cucucuaucgcaauucguc

SEQ ID NO: 1171072 - RNA, 19 nt, Artificial Sequence
  Description of Artificial Sequence: Synthetic oligonucleotide
  Sense strand starting at position 2286 of SEQ ID NO: 916621
gggagcagucgccaugcau

SEQ ID NO: 1171073 - RNA, 19 nt, Artificial Sequence
  Description of Artificial Sequence: Synthetic oligonucleotide
  Antisense strand to SEQ ID NO: 1171072
augcauggcgacugcuccc

SEQ ID NO: 1171074 - RNA, 19 nt, Artificial Sequence
  Description of Artificial Sequence: Synthetic oligonucleotide
  Sense strand starting at position 2348 of SEQ ID NO: 916621
ggaugaagauaguaaucua

SEQ ID NO: 1171075 - RNA, 19 nt, Artificial Sequence
  Description of Artificial Sequence: Synthetic oligonucleotide
  Antisense strand to SEQ ID NO: 1171074
uagauuacuaucuucaucc

SEQ ID NO: 1171076 - RNA, 19 nt, Artificial Sequence
  Description of Artificial Sequence: Synthetic oligonucleotide
  Sense strand starting at position 2358 of SEQ ID NO: 916621
aguaaucuacagggauacu

SEQ ID NO: 1171077 - RNA, 19 nt, Artificial Sequence
  Description of Artificial Sequence: Synthetic oligonucleotide
  Antisense strand to SEQ ID NO: 1171076
aguaucccuguagauuacu

SEQ ID NO: 1171078 - RNA, 19 nt, Artificial Sequence
  Description of Artificial Sequence: Synthetic oligonucleotide
  Sense strand starting at position 2397 of SEQ ID NO: 916621
acuaacuugccacguuaga

SEQ ID NO: 1171079 - RNA, 19 nt, Artificial Sequence
  Description of Artificial Sequence: Synthetic oligonucleotide
  Antisense strand to SEQ ID NO: 1171078
ucuaacguggcaaguuagu

SEQ ID NO: 1171080 - RNA, 19 nt, Artificial Sequence
  Description of Artificial Sequence: Synthetic oligonucleotide
  Sense strand starting at position 2406 of SEQ ID NO: 916621
ccacguuagaggugaccau

SEQ ID NO: 1171081 - RNA, 19 nt, Artificial Sequence
  Description of Artificial Sequence: Synthetic oligonucleotide
  Antisense strand to SEQ ID NO: 1171080
auggucaccucuaacgugg

SEQ ID NO: 1171082 - RNA, 19 nt, Artificial Sequence
  Description of Artificial Sequence: Synthetic oligonucleotide
  Sense strand starting at position 2410 of SEQ ID NO: 916621
guuagaggugaccauugua

SEQ ID NO: 1171083 - RNA, 19 nt, Artificial Sequence
  Description of Artificial Sequence: Synthetic oligonucleotide
  Antisense strand to SEQ ID NO: 1171082
uacaauggucaccucuaac

SEQ ID NO: 1171084 - RNA, 19 nt, Artificial Sequence
  Description of Artificial Sequence: Synthetic oligonucleotide
  Sense strand starting at position 2413 of SEQ ID NO: 916621
agaggugaccauuguauaa

SEQ ID NO: 1171085 - RNA, 19 nt, Artificial Sequence
  Description of Artificial Sequence: Synthetic oligonucleotide
  Antisense strand to SEQ ID NO: 1171084
uuauacaauggucaccucu

SEQ ID NO: 1171086 - RNA, 19 nt, Artificial Sequence
  Description of Artificial Sequence: Synthetic oligonucleotide
  Sense strand starting at position 2500 of SEQ ID NO: 916621
aucuguaauugauaaggga

SEQ ID NO: 1171087 - RNA, 19 nt, Artificial Sequence
  Description of Artificial Sequence: Synthetic oligonucleotide
  Antisense strand to SEQ ID NO: 1171086
ucccuuaucaauuacagau

SEQ ID NO: 1171088 - RNA, 19 nt, Artificial Sequence
  Description of Artificial Sequence: Synthetic oligonucleotide
  Sense strand starting at position 2658 of SEQ ID NO: 916621
gagaaagguuguuagggaa

SEQ ID NO: 1171089 - RNA, 19 nt, Artificial Sequence
  Description of Artificial Sequence: Synthetic oligonucleotide
  Antisense strand to SEQ ID NO: 1171088
uucccuaacaaccuuucuc

SEQ ID NO: 1171090 - RNA, 19 nt, Artificial Sequence
  Description of Artificial Sequence: Synthetic oligonucleotide
  Sense strand starting at position 2665 of SEQ ID NO: 916621
guuguuagggaacgggaua

SEQ ID NO: 1171091 - RNA, 19 nt, Artificial Sequence
  Description of Artificial Sequence: Synthetic oligonucleotide
  Antisense strand to SEQ ID NO: 1171090
uaucccguucccuaacaac

SEQ ID NO: 1171092 - RNA, 19 nt, Artificial Sequence
  Description of Artificial Sequence: Synthetic oligonucleotide
  Sense strand starting at position 2676 of SEQ ID NO: 916621
acgggauacuaucaugaca

SEQ ID NO: 1171093 - RNA, 19 nt, Artificial Sequence
  Description of Artificial Sequence: Synthetic oligonucleotide
  Antisense strand to SEQ ID NO: 1171092
ugucaugauaguaucccgu

SEQ ID NO: 1171094 - RNA, 19 nt, Artificial Sequence
  Description of Artificial Sequence: Synthetic oligonucleotide
  Sense strand starting at position 2982 of SEQ ID NO: 916621
ccuagugguccaggcuaca

SEQ ID NO: 1171095 - RNA, 19 nt, Artificial Sequence
  Description of Artificial Sequence: Synthetic oligonucleotide
  Antisense strand to SEQ ID NO: 1171094
uguagccuggaccacuagg

SEQ ID NO: 1171096 - RNA, 19 nt, Artificial Sequence
  Description of Artificial Sequence: Synthetic oligonucleotide
  Sense strand starting at position 3722 of SEQ ID NO: 916621
cggaguuuacgguaagcca

SEQ ID NO: 1171097 - RNA, 19 nt, Artificial Sequence
  Description of Artificial Sequence: Synthetic oligonucleotide
  Antisense strand to SEQ ID NO: 1171096
uggcuuaccguaaacuccg

SEQ ID NO: 1171098 - RNA, 19 nt, Artificial Sequence
  Description of Artificial Sequence: Synthetic oligonucleotide
  Sense strand starting at position 3949 of SEQ ID NO: 916621
acccaucucuuaguuagua

SEQ ID NO: 1171099 - RNA, 19 nt, Artificial Sequence
  Description of Artificial Sequence: Synthetic oligonucleotide
  Antisense strand to SEQ ID NO: 1171098
uacuaacuaagagaugggu

SEQ ID NO: 1171100 - RNA, 19 nt, Artificial Sequence
  Description of Artificial Sequence: Synthetic oligonucleotide
  Sense strand starting at position 3950 of SEQ ID NO: 916621
cccaucucuuaguuaguaa

SEQ ID NO: 1171101 - RNA, 19 nt, Artificial Sequence
  Description of Artificial Sequence: Synthetic oligonucleotide
  Antisense strand to SEQ ID NO: 1171100
uuacuaacuaagagauggg

SEQ ID NO: 1171102 - RNA, 19 nt, Artificial Sequence
  Description of Artificial Sequence: Synthetic oligonucleotide
  Sense strand starting at position 108 of SEQ ID NO: 916622
ugaaucaaguuguccucau

SEQ ID NO: 1171103 - RNA, 19 nt, Artificial Sequence
  Description of Artificial Sequence: Synthetic oligonucleotide
  Antisense strand to SEQ ID NO: 1171102
augaggacaacuugauuca

SEQ ID NO: 1171104 - RNA, 19 nt, Artificial Sequence
  Description of Artificial Sequence: Synthetic oligonucleotide
  Sense strand starting at position 112 of SEQ ID NO: 916622
ucaaguuguccucaucuga

SEQ ID NO: 1171105 - RNA, 19 nt, Artificial Sequence
  Description of Artificial Sequence: Synthetic oligonucleotide
  Antisense strand to SEQ ID NO: 1171104
ucagaugaggacaacuuga

SEQ ID NO: 1171106 - RNA, 19 nt, Artificial Sequence
  Description of Artificial Sequence: Synthetic oligonucleotide
  Sense strand starting at position 148 of SEQ ID NO: 916622
agugcuagcccggcuuuau

SEQ ID NO: 1171107 - RNA, 19 nt, Artificial Sequence
  Description of Artificial Sequence: Synthetic oligonucleotide
  Antisense strand to SEQ ID NO: 1171106
auaaagccgggcuagcacu

SEQ ID NO: 1171108 - RNA, 19 nt, Artificial Sequence
  Description of Artificial Sequence: Synthetic oligonucleotide
  Sense strand starting at position 149 of SEQ ID NO: 916622
gugcuagcccggcuuuauu

SEQ ID NO: 1171109 - RNA, 19 nt, Artificial Sequence
  Description of Artificial Sequence: Synthetic oligonucleotide
  Antisense strand to SEQ ID NO: 1171108
aauaaagccgggcuagcac

SEQ ID NO: 1171110 - RNA, 19 nt, Artificial Sequence
  Description of Artificial Sequence: Synthetic oligonucleotide
  Sense strand starting at position 186 of SEQ ID NO: 916622
aaauuagguguuggucuaa

SEQ ID NO: 1171111 - RNA, 19 nt, Artificial Sequence
  Description of Artificial Sequence: Synthetic oligonucleotide
  Antisense strand to SEQ ID NO: 1171110
uuagaccaacaccuaauuu

SEQ ID NO: 1171112 - RNA, 19 nt, Artificial Sequence
  Description of Artificial Sequence: Synthetic oligonucleotide
  Sense strand starting at position 450 of SEQ ID NO: 916622
cggauauaauggccaaaug

SEQ ID NO: 1171113 - RNA, 19 nt, Artificial Sequence
  Description of Artificial Sequence: Synthetic oligonucleotide
  Antisense strand to SEQ ID NO: 1171112
cauuuggccauuauauccg

SEQ ID NO: 1171114 - RNA, 19 nt, Artificial Sequence
  Description of Artificial Sequence: Synthetic oligonucleotide
  Sense strand starting at position 469 of SEQ ID NO: 916622
ggcgaucugacucacucaa

SEQ ID NO: 1171115 - RNA, 19 nt, Artificial Sequence
  Description of Artificial Sequence: Synthetic oligonucleotide
  Antisense strand to SEQ ID NO: 1171114
uugagugagucagaucgcc

SEQ ID NO: 1171116 - RNA, 19 nt, Artificial Sequence
  Description of Artificial Sequence: Synthetic oligonucleotide
  Sense strand starting at position 471 of SEQ ID NO: 916622
cgaucugacucacucaaau

SEQ ID NO: 1171117 - RNA, 19 nt, Artificial Sequence
  Description of Artificial Sequence: Synthetic oligonucleotide
  Antisense strand to SEQ ID NO: 1171116
auuugagugagucagaucg

SEQ ID NO: 1171118 - RNA, 19 nt, Artificial Sequence
  Description of Artificial Sequence: Synthetic oligonucleotide
  Sense strand starting at position 844 of SEQ ID NO: 916622
aaaggucugcucugggauu

SEQ ID NO: 1171119 - RNA, 19 nt, Artificial Sequence
  Description of Artificial Sequence: Synthetic oligonucleotide
  Antisense strand to SEQ ID NO: 1171118
aaucccagagcagaccuuu

SEQ ID NO: 1171120 - RNA, 19 nt, Artificial Sequence
  Description of Artificial Sequence: Synthetic oligonucleotide
  Sense strand starting at position 850 of SEQ ID NO: 916622
cugcucugggauuauuauu

SEQ ID NO: 1171121 - RNA, 19 nt, Artificial Sequence
  Description of Artificial Sequence: Synthetic oligonucleotide
  Antisense strand to SEQ ID NO: 1171120
aauaauaaucccagagcag

SEQ ID NO: 1171122 - RNA, 19 nt, Artificial Sequence
  Description of Artificial Sequence: Synthetic oligonucleotide
  Sense strand starting at position 874 of SEQ ID NO: 916622
uuggguuaauacucuuauc

SEQ ID NO: 1171123 - RNA, 19 nt, Artificial Sequence
  Description of Artificial Sequence: Synthetic oligonucleotide
  Antisense strand to SEQ ID NO: 1171122
gauaagaguauuaacccaa

SEQ ID NO: 1171124 - RNA, 19 nt, Artificial Sequence
  Description of Artificial Sequence: Synthetic oligonucleotide
  Sense strand starting at position 997 of SEQ ID NO: 916622
agaacuuucccagggaggu

SEQ ID NO: 1171125 - RNA, 19 nt, Artificial Sequence
  Description of Artificial Sequence: Synthetic oligonucleotide
  Antisense strand to SEQ ID NO: 1171124
accucccugggaaaguucu

SEQ ID NO: 1171126 - RNA, 19 nt, Artificial Sequence
  Description of Artificial Sequence: Synthetic oligonucleotide
  Sense strand starting at position 1030 of SEQ ID NO: 916622
uggcgauuucccgguuacu

SEQ ID NO: 1171127 - RNA, 19 nt, Artificial Sequence
  Description of Artificial Sequence: Synthetic oligonucleotide
  Antisense strand to SEQ ID NO: 1171126
aguaaccgggaaaucgcca

SEQ ID NO: 1171128 - RNA, 19 nt, Artificial Sequence
  Description of Artificial Sequence: Synthetic oligonucleotide
  Sense strand starting at position 1056 of SEQ ID NO: 916622
agcagauaucccuguggag

SEQ ID NO: 1171129 - RNA, 19 nt, Artificial Sequence
  Description of Artificial Sequence: Synthetic oligonucleotide
  Antisense strand to SEQ ID NO: 1171128
cuccacagggauaucugcu

SEQ ID NO: 1171130 - RNA, 19 nt, Artificial Sequence
  Description of Artificial Sequence: Synthetic oligonucleotide
  Sense strand starting at position 1058 of SEQ ID NO: 916622
cagauaucccuguggagag

SEQ ID NO: 1171131 - RNA, 19 nt, Artificial Sequence
  Description of Artificial Sequence: Synthetic oligonucleotide
  Antisense strand to SEQ ID NO: 1171130
cucuccacagggauaucug

SEQ ID NO: 1171132 - RNA, 19 nt, Artificial Sequence
  Description of Artificial Sequence: Synthetic oligonucleotide
  Sense strand starting at position 2168 of SEQ ID NO: 916622
ugcuaaguauuuccguuua

SEQ ID NO: 1171133 - RNA, 19 nt, Artificial Sequence
  Description of Artificial Sequence: Synthetic oligonucleotide
  Antisense strand to SEQ ID NO: 1171132
uaaacggaaauacuuagca

SEQ ID NO: 1171134 - RNA, 19 nt, Artificial Sequence
  Description of Artificial Sequence: Synthetic oligonucleotide
  Sense strand starting at position 2170 of SEQ ID NO: 916622
cuaaguauuuccguuuaau

SEQ ID NO: 1171135 - RNA, 19 nt, Artificial Sequence
  Description of Artificial Sequence: Synthetic oligonucleotide
  Antisense strand to SEQ ID NO: 1171134
auuaaacggaaauacuuag

SEQ ID NO: 1171136 - RNA, 19 nt, Artificial Sequence
  Description of Artificial Sequence: Synthetic oligonucleotide
  Sense strand starting at position 2173 of SEQ ID NO: 916622
aguauuuccguuuaauugu

SEQ ID NO: 1171137 - RNA, 19 nt, Artificial Sequence
  Description of Artificial Sequence: Synthetic oligonucleotide
  Antisense strand to SEQ ID NO: 1171136
acaauuaaacggaaauacu

SEQ ID NO: 1171138 - RNA, 19 nt, Artificial Sequence
  Description of Artificial Sequence: Synthetic oligonucleotide
  Sense strand starting at position 2208 of SEQ ID NO: 916622
cguauaguugugucuguug

SEQ ID NO: 1171139 - RNA, 19 nt, Artificial Sequence
  Description of Artificial Sequence: Synthetic oligonucleotide
  Antisense strand to SEQ ID NO: 1171138
caacagacacaacuauacg

SEQ ID NO: 1171140 - RNA, 19 nt, Artificial Sequence
  Description of Artificial Sequence: Synthetic oligonucleotide
  Sense strand starting at position 2219 of SEQ ID NO: 916622
gucuguuggagggaguuua

SEQ ID NO: 1171141 - RNA, 19 nt, Artificial Sequence
  Description of Artificial Sequence: Synthetic oligonucleotide
  Antisense strand to SEQ ID NO: 1171140
uaaacucccuccaacagac

SEQ ID NO: 1171142 - RNA, 19 nt, Artificial Sequence
  Description of Artificial Sequence: Synthetic oligonucleotide
  Sense strand starting at position 2312 of SEQ ID NO: 916622
guggguuguauggagagaa

SEQ ID NO: 1171143 - RNA, 19 nt, Artificial Sequence
  Description of Artificial Sequence: Synthetic oligonucleotide
  Antisense strand to SEQ ID NO: 1171142
uucucuccauacaacccac

SEQ ID NO: 1171144 - RNA, 19 nt, Artificial Sequence
  Description of Artificial Sequence: Synthetic oligonucleotide
  Sense strand starting at position 2313 of SEQ ID NO: 916622
uggguuguauggagagaau

SEQ ID NO: 1171145 - RNA, 19 nt, Artificial Sequence
  Description of Artificial Sequence: Synthetic oligonucleotide
  Antisense strand to SEQ ID NO: 1171144
auucucuccauacaaccca

SEQ ID NO: 1171146 - RNA, 19 nt, Artificial Sequence
  Description of Artificial Sequence: Synthetic oligonucleotide
  Sense strand starting at position 2324 of SEQ ID NO: 916622
gagagaaugugacuguaca

SEQ ID NO: 1171147 - RNA, 19 nt, Artificial Sequence
  Description of Artificial Sequence: Synthetic oligonucleotide
  Antisense strand to SEQ ID NO: 1171146
uguacagucacauucucuc

SEQ ID NO: 1171148 - RNA, 19 nt, Artificial Sequence
  Description of Artificial Sequence: Synthetic oligonucleotide
  Sense strand starting at position 2325 of SEQ ID NO: 916622
agagaaugugacuguacau

SEQ ID NO: 1171149 - RNA, 19 nt, Artificial Sequence
  Description of Artificial Sequence: Synthetic oligonucleotide
  Antisense strand to SEQ ID NO: 1171148
auguacagucacauucucu

SEQ ID NO: 1171150 - RNA, 19 nt, Artificial Sequence
  Description of Artificial Sequence: Synthetic oligonucleotide
  Sense strand starting at position 2468 of SEQ ID NO: 916622
gcucuuauggguuaacuag

SEQ ID NO: 1171151 - RNA, 19 nt, Artificial Sequence
  Description of Artificial Sequence: Synthetic oligonucleotide
  Antisense strand to SEQ ID NO: 1171150
cuaguuaacccauaagagc

SEQ ID NO: 1171152 - RNA, 19 nt, Artificial Sequence
  Description of Artificial Sequence: Synthetic oligonucleotide
  Sense strand starting at position 2673 of SEQ ID NO: 916622
guguuugcugaugaucaca

SEQ ID NO: 1171153 - RNA, 19 nt, Artificial Sequence
  Description of Artificial Sequence: Synthetic oligonucleotide
  Antisense strand to SEQ ID NO: 1171152
ugugaucaucagcaaacac

SEQ ID NO: 1171154 - RNA, 19 nt, Artificial Sequence
  Description of Artificial Sequence: Synthetic oligonucleotide
  Sense strand starting at position 2681 of SEQ ID NO: 916622
ugaugaucacagugacugu

SEQ ID NO: 1171155 - RNA, 19 nt, Artificial Sequence
  Description of Artificial Sequence: Synthetic oligonucleotide
  Antisense strand to SEQ ID NO: 1171154
acagucacugugaucauca

SEQ ID NO: 1171156 - RNA, 19 nt, Artificial Sequence
  Description of Artificial Sequence: Synthetic oligonucleotide
  Sense strand starting at position 2847 of SEQ ID NO: 916622
ucuggauucugaguggauu

SEQ ID NO: 1171157 - RNA, 19 nt, Artificial Sequence
  Description of Artificial Sequence: Synthetic oligonucleotide
  Antisense strand to SEQ ID NO: 1171156
aauccacucagaauccaga

SEQ ID NO: 1171158 - RNA, 19 nt, Artificial Sequence
  Description of Artificial Sequence: Synthetic oligonucleotide
  Sense strand starting at position 2848 of SEQ ID NO: 916622
cuggauucugaguggauuc

SEQ ID NO: 1171159 - RNA, 19 nt, Artificial Sequence
  Description of Artificial Sequence: Synthetic oligonucleotide
  Antisense strand to SEQ ID NO: 1171158
gaauccacucagaauccag

SEQ ID NO: 1171160 - RNA, 19 nt, Artificial Sequence
  Description of Artificial Sequence: Synthetic oligonucleotide
  Sense strand starting at position 2967 of SEQ ID NO: 916622
ugacuuaucguccaauaag

SEQ ID NO: 1171161 - RNA, 19 nt, Artificial Sequence
  Description of Artificial Sequence: Synthetic oligonucleotide
  Antisense strand to SEQ ID NO: 1171160
cuuauuggacgauaaguca

SEQ ID NO: 1171162 - RNA, 19 nt, Artificial Sequence
  Description of Artificial Sequence: Synthetic oligonucleotide
  Sense strand starting at position 3004 of SEQ ID NO: 916622
gcuguauuccaagaguuga

SEQ ID NO: 1171163 - RNA, 19 nt, Artificial Sequence
  Description of Artificial Sequence: Synthetic oligonucleotide
  Antisense strand to SEQ ID NO: 1171162
ucaacucuuggaauacagc

SEQ ID NO: 1171164 - RNA, 19 nt, Artificial Sequence
  Description of Artificial Sequence: Synthetic oligonucleotide
  Sense strand starting at position 3140 of SEQ ID NO: 916622
uuccgauggauuuguaugu

SEQ ID NO: 1171165 - RNA, 19 nt, Artificial Sequence
  Description of Artificial Sequence: Synthetic oligonucleotide
  Antisense strand to SEQ ID NO: 1171164
acauacaaauccaucggaa

SEQ ID NO: 1171166 - RNA, 19 nt, Artificial Sequence
  Description of Artificial Sequence: Synthetic oligonucleotide
  Sense strand starting at position 3236 of SEQ ID NO: 916622
uaaauuuagugccaggaaa

SEQ ID NO: 1171167 - RNA, 19 nt, Artificial Sequence
  Description of Artificial Sequence: Synthetic oligonucleotide
  Antisense strand to SEQ ID NO: 1171166
uuuccuggcacuaaauuua

SEQ ID NO: 1171168 - RNA, 19 nt, Artificial Sequence
  Description of Artificial Sequence: Synthetic oligonucleotide
  Sense strand starting at position 3285 of SEQ ID NO: 916622
cccauuugucugugacugu

SEQ ID NO: 1171169 - RNA, 19 nt, Artificial Sequence
  Description of Artificial Sequence: Synthetic oligonucleotide
  Antisense strand to SEQ ID NO: 1171168
acagucacagacaaauggg

SEQ ID NO: 1171170 - RNA, 19 nt, Artificial Sequence
  Description of Artificial Sequence: Synthetic oligonucleotide
  Sense strand starting at position 3341 of SEQ ID NO: 916622
acuuuagcucagugaugga

SEQ ID NO: 1171171 - RNA, 19 nt, Artificial Sequence
  Description of Artificial Sequence: Synthetic oligonucleotide
  Antisense strand to SEQ ID NO: 1171170
uccaucacugagcuaaagu

SEQ ID NO: 1171172 - RNA, 19 nt, Artificial Sequence
  Description of Artificial Sequence: Synthetic oligonucleotide
  Sense strand starting at position 3415 of SEQ ID NO: 916622
guacuucugcuccaggaua

SEQ ID NO: 1171173 - RNA, 19 nt, Artificial Sequence
  Description of Artificial Sequence: Synthetic oligonucleotide
  Antisense strand to SEQ ID NO: 1171172
uauccuggagcagaaguac

SEQ ID NO: 1171174 - RNA, 19 nt, Artificial Sequence
  Description of Artificial Sequence: Synthetic oligonucleotide
  Sense strand starting at position 3476 of SEQ ID NO: 916622
gugcgcuuggcuuuauuca

SEQ ID NO: 1171175 - RNA, 19 nt, Artificial Sequence
  Description of Artificial Sequence: Synthetic oligonucleotide
  Antisense strand to SEQ ID NO: 1171174
ugaauaaagccaagcgcac

SEQ ID NO: 1171176 - RNA, 19 nt, Artificial Sequence
  Description of Artificial Sequence: Synthetic oligonucleotide
  Sense strand starting at position 3635 of SEQ ID NO: 916622
auggaagucugguuauaga

SEQ ID NO: 1171177 - RNA, 19 nt, Artificial Sequence
  Description of Artificial Sequence: Synthetic oligonucleotide
  Antisense strand to SEQ ID NO: 1171176
ucuauaaccagacuuccau

SEQ ID NO: 1171178 - RNA, 19 nt, Artificial Sequence
  Description of Artificial Sequence: Synthetic oligonucleotide
  Sense strand starting at position 3687 of SEQ ID NO: 916622
uuguaucgcaaugaauaag

SEQ ID NO: 1171179 - RNA, 19 nt, Artificial Sequence
  Description of Artificial Sequence: Synthetic oligonucleotide
  Antisense strand to SEQ ID NO: 1171178
cuuauucauugcgauacaa

SEQ ID NO: 1171180 - RNA, 19 nt, Artificial Sequence
  Description of Artificial Sequence: Synthetic oligonucleotide
  Sense strand starting at position 3723 of SEQ ID NO: 916622
aacuguggacgucacaaua

SEQ ID NO: 1171181 - RNA, 19 nt, Artificial Sequence
  Description of Artificial Sequence: Synthetic oligonucleotide
  Antisense strand to SEQ ID NO: 1171180
uauugugacguccacaguu

SEQ ID NO: 1171182 - RNA, 19 nt, Artificial Sequence
  Description of Artificial Sequence: Synthetic oligonucleotide
  Sense strand starting at position 16 of SEQ ID NO: 916623
gcaaauuggauuggccaga

SEQ ID NO: 1171183 - RNA, 19 nt, Artificial Sequence
  Description of Artificial Sequence: Synthetic oligonucleotide
  Antisense strand to SEQ ID NO: 1171182
ucuggccaauccaauuugc

SEQ ID NO: 1171184 - RNA, 19 nt, Artificial Sequence
  Description of Artificial Sequence: Synthetic oligonucleotide
  Sense strand starting at position 160 of SEQ ID NO: 916623
ggugucaucuuaucaccau

SEQ ID NO: 1171185 - RNA, 19 nt, Artificial Sequence
  Description of Artificial Sequence: Synthetic oligonucleotide
  Antisense strand to SEQ ID NO: 1171184
auggugauaagaugacacc

SEQ ID NO: 1171186 - RNA, 19 nt, Artificial Sequence
  Description of Artificial Sequence: Synthetic oligonucleotide
  Sense strand starting at position 164 of SEQ ID NO: 916623
ucaucuuaucaccauaggu

SEQ ID NO: 1171187 - RNA, 19 nt, Artificial Sequence
  Description of Artificial Sequence: Synthetic oligonucleotide
  Antisense strand to SEQ ID NO: 1171186
accuauggugauaagauga

SEQ ID NO: 1171188 - RNA, 19 nt, Artificial Sequence
  Description of Artificial Sequence: Synthetic oligonucleotide
  Sense strand starting at position 271 of SEQ ID NO: 916623
cggugcucacuauggagaa

SEQ ID NO: 1171189 - RNA, 19 nt, Artificial Sequence
  Description of Artificial Sequence: Synthetic oligonucleotide
  Antisense strand to SEQ ID NO: 1171188
uucuccauagugagcaccg

SEQ ID NO: 1171190 - RNA, 19 nt, Artificial Sequence
  Description of Artificial Sequence: Synthetic oligonucleotide
  Sense strand starting at position 326 of SEQ ID NO: 916623
guguuuccucucuaaacau

SEQ ID NO: 1171191 - RNA, 19 nt, Artificial Sequence
  Description of Artificial Sequence: Synthetic oligonucleotide
  Antisense strand to SEQ ID NO: 1171190
auguuuagagaggaaacac

SEQ ID NO: 1171192 - RNA, 19 nt, Artificial Sequence
  Description of Artificial Sequence: Synthetic oligonucleotide
  Sense strand starting at position 382 of SEQ ID NO: 916623
uggauucaucucggagaga

SEQ ID NO: 1171193 - RNA, 19 nt, Artificial Sequence
  Description of Artificial Sequence: Synthetic oligonucleotide
  Antisense strand to SEQ ID NO: 1171192
ucucuccgagaugaaucca

SEQ ID NO: 1171194 - RNA, 19 nt, Artificial Sequence
  Description of Artificial Sequence: Synthetic oligonucleotide
  Sense strand starting at position 400 of SEQ ID NO: 916623
agggacaucuucucuuguu

SEQ ID NO: 1171195 - RNA, 19 nt, Artificial Sequence
  Description of Artificial Sequence: Synthetic oligonucleotide
  Antisense strand to SEQ ID NO: 1171194
aacaagagaagaugucccu

SEQ ID NO: 1171196 - RNA, 19 nt, Artificial Sequence
  Description of Artificial Sequence: Synthetic oligonucleotide
  Sense strand starting at position 413 of SEQ ID NO: 916623
cuuguucccugauuaagaa

SEQ ID NO: 1171197 - RNA, 19 nt, Artificial Sequence
  Description of Artificial Sequence: Synthetic oligonucleotide
  Antisense strand to SEQ ID NO: 1171196
uucuuaaucagggaacaag

SEQ ID NO: 1171198 - RNA, 19 nt, Artificial Sequence
  Description of Artificial Sequence: Synthetic oligonucleotide
  Sense strand starting at position 414 of SEQ ID NO: 916623
uuguucccugauuaagaau

SEQ ID NO: 1171199 - RNA, 19 nt, Artificial Sequence
  Description of Artificial Sequence: Synthetic oligonucleotide
  Antisense strand to SEQ ID NO: 1171198
auucuuaaucagggaacaa

SEQ ID NO: 1171200 - RNA, 19 nt, Artificial Sequence
  Description of Artificial Sequence: Synthetic oligonucleotide
  Sense strand starting at position 473 of SEQ ID NO: 916623
ggagauaaacauggugcau

SEQ ID NO: 1171201 - RNA, 19 nt, Artificial Sequence
  Description of Artificial Sequence: Synthetic oligonucleotide
  Antisense strand to SEQ ID NO: 1171200
augcaccauguuuaucucc

SEQ ID NO: 1171202 - RNA, 19 nt, Artificial Sequence
  Description of Artificial Sequence: Synthetic oligonucleotide
  Sense strand starting at position 565 of SEQ ID NO: 916623
aguaucagauaccugaguu

SEQ ID NO: 1171203 - RNA, 19 nt, Artificial Sequence
  Description of Artificial Sequence: Synthetic oligonucleotide
  Antisense strand to SEQ ID NO: 1171202
aacucagguaucugauacu

SEQ ID NO: 1171204 - RNA, 19 nt, Artificial Sequence
  Description of Artificial Sequence: Synthetic oligonucleotide
  Sense strand starting at position 644 of SEQ ID NO: 916623
cccaaaugugcuuggagau

SEQ ID NO: 1171205 - RNA, 19 nt, Artificial Sequence
  Description of Artificial Sequence: Synthetic oligonucleotide
  Antisense strand to SEQ ID NO: 1171204
aucuccaagcacauuuggg

SEQ ID NO: 1171206 - RNA, 19 nt, Artificial Sequence
  Description of Artificial Sequence: Synthetic oligonucleotide
  Sense strand starting at position 645 of SEQ ID NO: 916623
ccaaaugugcuuggagauc

SEQ ID NO: 1171207 - RNA, 19 nt, Artificial Sequence
  Description of Artificial Sequence: Synthetic oligonucleotide
  Antisense strand to SEQ ID NO: 1171206
gaucuccaagcacauuugg

SEQ ID NO: 1171208 - RNA, 19 nt, Artificial Sequence
  Description of Artificial Sequence: Synthetic oligonucleotide
  Sense strand starting at position 813 of SEQ ID NO: 916623
uaauacauagagugaguuu

SEQ ID NO: 1171209 - RNA, 19 nt, Artificial Sequence
  Description of Artificial Sequence: Synthetic oligonucleotide
  Antisense strand to SEQ ID NO: 1171208
aaacucacucuauguauua

SEQ ID NO: 1171210 - RNA, 19 nt, Artificial Sequence
  Description of Artificial Sequence: Synthetic oligonucleotide
  Sense strand starting at position 887 of SEQ ID NO: 916623
gugcaugaggcagaaacua

SEQ ID NO: 1171211 - RNA, 19 nt, Artificial Sequence
  Description of Artificial Sequence: Synthetic oligonucleotide
  Antisense strand to SEQ ID NO: 1171210
uaguuucugccucaugcac

SEQ ID NO: 1171212 - RNA, 19 nt, Artificial Sequence
  Description of Artificial Sequence: Synthetic oligonucleotide
  Sense strand starting at position 1060 of SEQ ID NO: 916623
cauggauaugugugaguca

SEQ ID NO: 1171213 - RNA, 19 nt, Artificial Sequence
  Description of Artificial Sequence: Synthetic oligonucleotide
  Antisense strand to SEQ ID NO: 1171212
ugacucacacauauccaug

SEQ ID NO: 1171214 - RNA, 19 nt, Artificial Sequence
  Description of Artificial Sequence: Synthetic oligonucleotide
  Sense strand starting at position 2027 of SEQ ID NO: 916623
augugagugcguguuuaca

SEQ ID NO: 1171215 - RNA, 19 nt, Artificial Sequence
  Description of Artificial Sequence: Synthetic oligonucleotide
  Antisense strand to SEQ ID NO: 1171214
uguaaacacgcacucacau

SEQ ID NO: 1171216 - RNA, 19 nt, Artificial Sequence
  Description of Artificial Sequence: Synthetic oligonucleotide
  Sense strand starting at position 2167 of SEQ ID NO: 916623
gcgugucccaugucugagu

SEQ ID NO: 1171217 - RNA, 19 nt, Artificial Sequence
  Description of Artificial Sequence: Synthetic oligonucleotide
  Antisense strand to SEQ ID NO: 1171216
acucagacaugggacacgc

SEQ ID NO: 1171218 - RNA, 19 nt, Artificial Sequence
  Description of Artificial Sequence: Synthetic oligonucleotide
  Sense strand starting at position 2394 of SEQ ID NO: 916623
ccgccuagcagauaggaau

SEQ ID NO: 1171219 - RNA, 19 nt, Artificial Sequence
  Description of Artificial Sequence: Synthetic oligonucleotide
  Antisense strand to SEQ ID NO: 1171218
auuccuaucugcuaggcgg

SEQ ID NO: 1171220 - RNA, 19 nt, Artificial Sequence
  Description of Artificial Sequence: Synthetic oligonucleotide
  Sense strand starting at position 2407 of SEQ ID NO: 916623
aggaauuucuuccaaguuc

SEQ ID NO: 1171221 - RNA, 19 nt, Artificial Sequence
  Description of Artificial Sequence: Synthetic oligonucleotide
  Antisense strand to SEQ ID NO: 1171220
gaacuuggaagaaauuccu

SEQ ID NO: 1171222 - RNA, 19 nt, Artificial Sequence
  Description of Artificial Sequence: Synthetic oligonucleotide
  Sense strand starting at position 2764 of SEQ ID NO: 916623
cuucuucuuugacuaggua

SEQ ID NO: 1171223 - RNA, 19 nt, Artificial Sequence
  Description of Artificial Sequence: Synthetic oligonucleotide
  Antisense strand to SEQ ID NO: 1171222
uaccuagucaaagaagaag

SEQ ID NO: 1171224 - RNA, 19 nt, Artificial Sequence
  Description of Artificial Sequence: Synthetic oligonucleotide
  Sense strand starting at position 2765 of SEQ ID NO: 916623
uucuucuuugacuagguaa

SEQ ID NO: 1171225 - RNA, 19 nt, Artificial Sequence
  Description of Artificial Sequence: Synthetic oligonucleotide
  Antisense strand to SEQ ID NO: 1171224
uuaccuagucaaagaagaa

SEQ ID NO: 1171226 - RNA, 19 nt, Artificial Sequence
  Description of Artificial Sequence: Synthetic oligonucleotide
  Sense strand starting at position 2767 of SEQ ID NO: 916623
cuucuuugacuagguaaua

SEQ ID NO: 1171227 - RNA, 19 nt, Artificial Sequence
  Description of Artificial Sequence: Synthetic oligonucleotide
  Antisense strand to SEQ ID NO: 1171226
uauuaccuagucaaagaag

SEQ ID NO: 1171228 - RNA, 19 nt, Artificial Sequence
  Description of Artificial Sequence: Synthetic oligonucleotide
  Sense strand starting at position 2768 of SEQ ID NO: 916623
uucuuugacuagguaauaa

SEQ ID NO: 1171229 - RNA, 19 nt, Artificial Sequence
  Description of Artificial Sequence: Synthetic oligonucleotide
  Antisense strand to SEQ ID NO: 1171228
uuauuaccuagucaaagaa

SEQ ID NO: 1171230 - RNA, 19 nt, Artificial Sequence
  Description of Artificial Sequence: Synthetic oligonucleotide
  Sense strand starting at position 2799 of SEQ ID NO: 916623
aggaaagcauuccugauau

SEQ ID NO: 1171231 - RNA, 19 nt, Artificial Sequence
  Description of Artificial Sequence: Synthetic oligonucleotide
  Antisense strand to SEQ ID NO: 1171230
auaucaggaaugcuuuccu

SEQ ID NO: 1171232 - RNA, 19 nt, Artificial Sequence
  Description of Artificial Sequence: Synthetic oligonucleotide
  Sense strand starting at position 2906 of SEQ ID NO: 916623
agccuagcugguuaauaaa

SEQ ID NO: 1171233 - RNA, 19 nt, Artificial Sequence
  Description of Artificial Sequence: Synthetic oligonucleotide
  Antisense strand to SEQ ID NO: 1171232
uuuauuaaccagcuaggcu

SEQ ID NO: 1171234 - RNA, 19 nt, Artificial Sequence
  Description of Artificial Sequence: Synthetic oligonucleotide
  Sense strand starting at position 2995 of SEQ ID NO: 916623
ccgaguccuaccuaggacu

SEQ ID NO: 1171235 - RNA, 19 nt, Artificial Sequence
  Description of Artificial Sequence: Synthetic oligonucleotide
  Antisense strand to SEQ ID NO: 1171234
aguccuagguaggacucgg

SEQ ID NO: 1171236 - RNA, 19 nt, Artificial Sequence
  Description of Artificial Sequence: Synthetic oligonucleotide
  Sense strand starting at position 3080 of SEQ ID NO: 916623
gggaaacuccuaugucaac

SEQ ID NO: 1171237 - RNA, 19 nt, Artificial Sequence
  Description of Artificial Sequence: Synthetic oligonucleotide
  Antisense strand to SEQ ID NO: 1171236
guugacauaggaguuuccc

SEQ ID NO: 1171238 - RNA, 19 nt, Artificial Sequence
  Description of Artificial Sequence: Synthetic oligonucleotide
  Sense strand starting at position 3081 of SEQ ID NO: 916623
ggaaacuccuaugucaaca

SEQ ID NO: 1171239 - RNA, 19 nt, Artificial Sequence
  Description of Artificial Sequence: Synthetic oligonucleotide
  Antisense strand to SEQ ID NO: 1171238
uguugacauaggaguuucc

SEQ ID NO: 1171240 - RNA, 19 nt, Artificial Sequence
  Description of Artificial Sequence: Synthetic oligonucleotide
  Sense strand starting at position 3378 of SEQ ID NO: 916623
gcagaaguaucagcagaac

SEQ ID NO: 1171241 - RNA, 19 nt, Artificial Sequence
  Description of Artificial Sequence: Synthetic oligonucleotide
  Antisense strand to SEQ ID NO: 1171240
guucugcugauacuucugc

SEQ ID NO: 1171242 - RNA, 19 nt, Artificial Sequence
  Description of Artificial Sequence: Synthetic oligonucleotide
  Sense strand starting at position 3532 of SEQ ID NO: 916623
ccaagaaauggcugcaucu

SEQ ID NO: 1171243 - RNA, 19 nt, Artificial Sequence
  Description of Artificial Sequence: Synthetic oligonucleotide
  Antisense strand to SEQ ID NO: 1171242
agaugcagccauuucuugg

SEQ ID NO: 1171244 - RNA, 19 nt, Artificial Sequence
  Description of Artificial Sequence: Synthetic oligonucleotide
  Sense strand starting at position 3534 of SEQ ID NO: 916623
aagaaauggcugcaucuga

SEQ ID NO: 1171245 - RNA, 19 nt, Artificial Sequence
  Description of Artificial Sequence: Synthetic oligonucleotide
  Antisense strand to SEQ ID NO: 1171244
ucagaugcagccauuucuu

SEQ ID NO: 1171246 - RNA, 19 nt, Artificial Sequence
  Description of Artificial Sequence: Synthetic oligonucleotide
  Sense strand starting at position 3595 of SEQ ID NO: 916623
ggagcaaucuccuccuuau

SEQ ID NO: 1171247 - RNA, 19 nt, Artificial Sequence
  Description of Artificial Sequence: Synthetic oligonucleotide
  Antisense strand to SEQ ID NO: 1171246
auaaggaggagauugcucc

SEQ ID NO: 1171248 - RNA, 19 nt, Artificial Sequence
  Description of Artificial Sequence: Synthetic oligonucleotide
  Sense strand starting at position 3653 of SEQ ID NO: 916623
gcaaauuaggauggugcua

SEQ ID NO: 1171249 - RNA, 19 nt, Artificial Sequence
  Description of Artificial Sequence: Synthetic oligonucleotide
  Antisense strand to SEQ ID NO: 1171248
uagcaccauccuaauuugc

SEQ ID NO: 1171250 - RNA, 19 nt, Artificial Sequence
  Description of Artificial Sequence: Synthetic oligonucleotide
  Sense strand starting at position 3668 of SEQ ID NO: 916623
gcuaaagagcucuaauuag

SEQ ID NO: 1171251 - RNA, 19 nt, Artificial Sequence
  Description of Artificial Sequence: Synthetic oligonucleotide
  Antisense strand to SEQ ID NO: 1171250
cuaauuagagcucuuuagc

SEQ ID NO: 1171252 - RNA, 19 nt, Artificial Sequence
  Description of Artificial Sequence: Synthetic oligonucleotide
  Sense strand starting at position 3720 of SEQ ID NO: 916623
uuaggcaggucuuuaaacu

SEQ ID NO: 1171253 - RNA, 19 nt, Artificial Sequence
  Description of Artificial Sequence: Synthetic oligonucleotide
  Antisense strand to SEQ ID NO: 1171252
aguuuaaagaccugccuaa

SEQ ID NO: 1171254 - RNA, 19 nt, Artificial Sequence
  Description of Artificial Sequence: Synthetic oligonucleotide
  Sense strand starting at position 3721 of SEQ ID NO: 916623
uaggcaggucuuuaaacua

SEQ ID NO: 1171255 - RNA, 19 nt, Artificial Sequence
  Description of Artificial Sequence: Synthetic oligonucleotide
  Antisense strand to SEQ ID NO: 1171254
uaguuuaaagaccugccua

SEQ ID NO: 1171256 - RNA, 19 nt, Artificial Sequence
  Description of Artificial Sequence: Synthetic oligonucleotide
  Sense strand starting at position 3793 of SEQ ID NO: 916623
uuguuaacacagugucaca

SEQ ID NO: 1171257 - RNA, 19 nt, Artificial Sequence
  Description of Artificial Sequence: Synthetic oligonucleotide
  Antisense strand to SEQ ID NO: 1171256
ugugacacuguguuaacaa

SEQ ID NO: 1171258 - RNA, 19 nt, Artificial Sequence
  Description of Artificial Sequence: Synthetic oligonucleotide
  Sense strand starting at position 3898 of SEQ ID NO: 916623
cacacaaaguuauucguga

SEQ ID NO: 1171259 - RNA, 19 nt, Artificial Sequence
  Description of Artificial Sequence: Synthetic oligonucleotide
  Antisense strand to SEQ ID NO: 1171258
ucacgaauaacuuugugug

SEQ ID NO: 1171260 - RNA, 19 nt, Artificial Sequence
  Description of Artificial Sequence: Synthetic oligonucleotide
  Sense strand starting at position 3899 of SEQ ID NO: 916623
acacaaaguuauucgugaa

SEQ ID NO: 1171261 - RNA, 19 nt, Artificial Sequence
  Description of Artificial Sequence: Synthetic oligonucleotide
  Antisense strand to SEQ ID NO: 1171260
uucacgaauaacuuugugu

SEQ ID NO: 1171262 - RNA, 19 nt, Artificial Sequence
  Description of Artificial Sequence: Synthetic oligonucleotide
  Sense strand starting at position 8 of SEQ ID NO: 916624
acuccuuaucagggagguu

SEQ ID NO: 1171263 - RNA, 19 nt, Artificial Sequence
  Description of Artificial Sequence: Synthetic oligonucleotide
  Antisense strand to SEQ ID NO: 1171262
aaccucccugauaaggagu

SEQ ID NO: 1171264 - RNA, 19 nt, Artificial Sequence
  Description of Artificial Sequence: Synthetic oligonucleotide
  Sense strand starting at position 127 of SEQ ID NO: 916624
gcuguuaaggcagaacaaa

SEQ ID NO: 1171265 - RNA, 19 nt, Artificial Sequence
  Description of Artificial Sequence: Synthetic oligonucleotide
  Antisense strand to SEQ ID NO: 1171264
uuuguucugccuuaacagc

SEQ ID NO: 1171266 - RNA, 19 nt, Artificial Sequence
  Description of Artificial Sequence: Synthetic oligonucleotide
  Sense strand starting at position 211 of SEQ ID NO: 916624
ccgguccaaccuuaauuaa

SEQ ID NO: 1171267 - RNA, 19 nt, Artificial Sequence
  Description of Artificial Sequence: Synthetic oligonucleotide
  Antisense strand to SEQ ID NO: 1171266
uuaauuaagguuggaccgg

SEQ ID NO: 1171268 - RNA, 19 nt, Artificial Sequence
  Description of Artificial Sequence: Synthetic oligonucleotide
  Sense strand starting at position 222 of SEQ ID NO: 916624
uuaauuaauucugucgguu

SEQ ID NO: 1171269 - RNA, 19 nt, Artificial Sequence
  Description of Artificial Sequence: Synthetic oligonucleotide
  Antisense strand to SEQ ID NO: 1171268
aaccgacagaauuaauuaa

SEQ ID NO: 1171270 - RNA, 19 nt, Artificial Sequence
  Description of Artificial Sequence: Synthetic oligonucleotide
  Sense strand starting at position 252 of SEQ ID NO: 916624
gacugugagugucuugaug

SEQ ID NO: 1171271 - RNA, 19 nt, Artificial Sequence
  Description of Artificial Sequence: Synthetic oligonucleotide
  Antisense strand to SEQ ID NO: 1171270
caucaagacacucacaguc

SEQ ID NO: 1171272 - RNA, 19 nt, Artificial Sequence
  Description of Artificial Sequence: Synthetic oligonucleotide
  Sense strand starting at position 263 of SEQ ID NO: 916624
ucuugaugacgcugacagu

SEQ ID NO: 1171273 - RNA, 19 nt, Artificial Sequence
  Description of Artificial Sequence: Synthetic oligonucleotide
  Antisense strand to SEQ ID NO: 1171272
acugucagcgucaucaaga

SEQ ID NO: 1171274 - RNA, 19 nt, Artificial Sequence
  Description of Artificial Sequence: Synthetic oligonucleotide
  Sense strand starting at position 274 of SEQ ID NO: 916624
cugacaguggcuuguuuau

SEQ ID NO: 1171275 - RNA, 19 nt, Artificial Sequence
  Description of Artificial Sequence: Synthetic oligonucleotide
  Antisense strand to SEQ ID NO: 1171274
auaaacaagccacugucag

SEQ ID NO: 1171276 - RNA, 19 nt, Artificial Sequence
  Description of Artificial Sequence: Synthetic oligonucleotide
  Sense strand starting at position 276 of SEQ ID NO: 916624
gacaguggcuuguuuaucu

SEQ ID NO: 1171277 - RNA, 19 nt, Artificial Sequence
  Description of Artificial Sequence: Synthetic oligonucleotide
  Antisense strand to SEQ ID NO: 1171276
agauaaacaagccacuguc

SEQ ID NO: 1171278 - RNA, 19 nt, Artificial Sequence
  Description of Artificial Sequence: Synthetic oligonucleotide
  Sense strand starting at position 383 of SEQ ID NO: 916624
ggcuaucucccagagcuca

SEQ ID NO: 1171279 - RNA, 19 nt, Artificial Sequence
  Description of Artificial Sequence: Synthetic oligonucleotide
  Antisense strand to SEQ ID NO: 1171278
ugagcucugggagauagcc

SEQ ID NO: 1171280 - RNA, 19 nt, Artificial Sequence
  Description of Artificial Sequence: Synthetic oligonucleotide
  Sense strand starting at position 394 of SEQ ID NO: 916624
agagcucacaauggagauu

SEQ ID NO: 1171281 - RNA, 19 nt, Artificial Sequence
  Description of Artificial Sequence: Synthetic oligonucleotide
  Antisense strand to SEQ ID NO: 1171280
aaucuccauugugagcucu

SEQ ID NO: 1171282 - RNA, 19 nt, Artificial Sequence
  Description of Artificial Sequence: Synthetic oligonucleotide
  Sense strand starting at position 403 of SEQ ID NO: 916624
aauggagauuucugagcca

SEQ ID NO: 1171283 - RNA, 19 nt, Artificial Sequence
  Description of Artificial Sequence: Synthetic oligonucleotide
  Antisense strand to SEQ ID NO: 1171282
uggcucagaaaucuccauu

SEQ ID NO: 1171284 - RNA, 19 nt, Artificial Sequence
  Description of Artificial Sequence: Synthetic oligonucleotide
  Sense strand starting at position 444 of SEQ ID NO: 916624
gccugagaagaguaagguu

SEQ ID NO: 1171285 - RNA, 19 nt, Artificial Sequence
  Description of Artificial Sequence: Synthetic oligonucleotide
  Antisense strand to SEQ ID NO: 1171284
aaccuuacucuucucaggc

SEQ ID NO: 1171286 - RNA, 19 nt, Artificial Sequence
  Description of Artificial Sequence: Synthetic oligonucleotide
  Sense strand starting at position 537 of SEQ ID NO: 916624
uguauagcuucuguugaaa

SEQ ID NO: 1171287 - RNA, 19 nt, Artificial Sequence
  Description of Artificial Sequence: Synthetic oligonucleotide
  Antisense strand to SEQ ID NO: 1171286
uuucaacagaagcuauaca

SEQ ID NO: 1171288 - RNA, 19 nt, Artificial Sequence
  Description of Artificial Sequence: Synthetic oligonucleotide
  Sense strand starting at position 540 of SEQ ID NO: 916624
auagcuucuguugaaaucu

SEQ ID NO: 1171289 - RNA, 19 nt, Artificial Sequence
  Description of Artificial Sequence: Synthetic oligonucleotide
  Antisense strand to SEQ ID NO: 1171288
agauuucaacagaagcuau

SEQ ID NO: 1171290 - RNA, 19 nt, Artificial Sequence
  Description of Artificial Sequence: Synthetic oligonucleotide
  Sense strand starting at position 772 of SEQ ID NO: 916624
auucuaaaguccuuuagag

SEQ ID NO: 1171291 - RNA, 19 nt, Artificial Sequence
  Description of Artificial Sequence: Synthetic oligonucleotide
  Antisense strand to SEQ ID NO: 1171290
cucuaaaggacuuuagaau

SEQ ID NO: 1171292 - RNA, 19 nt, Artificial Sequence
  Description of Artificial Sequence: Synthetic oligonucleotide
  Sense strand starting at position 774 of SEQ ID NO: 916624
ucuaaaguccuuuagaguu

SEQ ID NO: 1171293 - RNA, 19 nt, Artificial Sequence
  Description of Artificial Sequence: Synthetic oligonucleotide
  Antisense strand to SEQ ID NO: 1171292
aacucuaaaggacuuuaga

SEQ ID NO: 1171294 - RNA, 19 nt, Artificial Sequence
  Description of Artificial Sequence: Synthetic oligonucleotide
  Sense strand starting at position 780 of SEQ ID NO: 916624
guccuuuagaguuaggauc

SEQ ID NO: 1171295 - RNA, 19 nt, Artificial Sequence
  Description of Artificial Sequence: Synthetic oligonucleotide
  Antisense strand to SEQ ID NO: 1171294
gauccuaacucuaaaggac

SEQ ID NO: 1171296 - RNA, 19 nt, Artificial Sequence
  Description of Artificial Sequence: Synthetic oligonucleotide
  Sense strand starting at position 919 of SEQ ID NO: 916624
gguaccuuucccuguagaa

SEQ ID NO: 1171297 - RNA, 19 nt, Artificial Sequence
  Description of Artificial Sequence: Synthetic oligonucleotide
  Antisense strand to SEQ ID NO: 1171296
uucuacagggaaagguacc

SEQ ID NO: 1171298 - RNA, 19 nt, Artificial Sequence
  Description of Artificial Sequence: Synthetic oligonucleotide
  Sense strand starting at position 1446 of SEQ ID NO: 916624
uuuccaguuuggguucuua

SEQ ID NO: 1171299 - RNA, 19 nt, Artificial Sequence
  Description of Artificial Sequence: Synthetic oligonucleotide
  Antisense strand to SEQ ID NO: 1171298
uaagaacccaaacuggaaa

SEQ ID NO: 1171300 - RNA, 19 nt, Artificial Sequence
  Description of Artificial Sequence: Synthetic oligonucleotide
  Sense strand starting at position 1450 of SEQ ID NO: 916624
caguuuggguucuuaagac

SEQ ID NO: 1171301 - RNA, 19 nt, Artificial Sequence
  Description of Artificial Sequence: Synthetic oligonucleotide
  Antisense strand to SEQ ID NO: 1171300
gucuuaagaacccaaacug

SEQ ID NO: 1171302 - RNA, 19 nt, Artificial Sequence
  Description of Artificial Sequence: Synthetic oligonucleotide
  Sense strand starting at position 2118 of SEQ ID NO: 916624
acaagaaucuguucucaga

SEQ ID NO: 1171303 - RNA, 19 nt, Artificial Sequence
  Description of Artificial Sequence: Synthetic oligonucleotide
  Antisense strand to SEQ ID NO: 1171302
ucugagaacagauucuugu

SEQ ID NO: 1171304 - RNA, 19 nt, Artificial Sequence
  Description of Artificial Sequence: Synthetic oligonucleotide
  Sense strand starting at position 2215 of SEQ ID NO: 916624
ggguuagcaagaggcuuaa

SEQ ID NO: 1171305 - RNA, 19 nt, Artificial Sequence
  Description of Artificial Sequence: Synthetic oligonucleotide
  Antisense strand to SEQ ID NO: 1171304
uuaagccucuugcuaaccc

SEQ ID NO: 1171306 - RNA, 19 nt, Artificial Sequence
  Description of Artificial Sequence: Synthetic oligonucleotide
  Sense strand starting at position 2219 of SEQ ID NO: 916624
uagcaagaggcuuaagagu

SEQ ID NO: 1171307 - RNA, 19 nt, Artificial Sequence
  Description of Artificial Sequence: Synthetic oligonucleotide
  Antisense strand to SEQ ID NO: 1171306
acucuuaagccucuugcua

SEQ ID NO: 1171308 - RNA, 19 nt, Artificial Sequence
  Description of Artificial Sequence: Synthetic oligonucleotide
  Sense strand starting at position 2661 of SEQ ID NO: 916624
agaggucaaucggcucaga

SEQ ID NO: 1171309 - RNA, 19 nt, Artificial Sequence
  Description of Artificial Sequence: Synthetic oligonucleotide
  Antisense strand to SEQ ID NO: 1171308
ucugagccgauugaccucu

SEQ ID NO: 1171310 - RNA, 19 nt, Artificial Sequence
  Description of Artificial Sequence: Synthetic oligonucleotide
  Sense strand starting at position 2664 of SEQ ID NO: 916624
ggucaaucggcucagaggu

SEQ ID NO: 1171311 - RNA, 19 nt, Artificial Sequence
  Description of Artificial Sequence: Synthetic oligonucleotide
  Antisense strand to SEQ ID NO: 1171310
accucugagccgauugacc

SEQ ID NO: 1171312 - RNA, 19 nt, Artificial Sequence
  Description of Artificial Sequence: Synthetic oligonucleotide
  Sense strand starting at position 2865 of SEQ ID NO: 916624
gggagaugucgccaccaau

SEQ ID NO: 1171313 - RNA, 19 nt, Artificial Sequence
  Description of Artificial Sequence: Synthetic oligonucleotide
  Antisense strand to SEQ ID NO: 1171312
auugguggcgacaucuccc

SEQ ID NO: 1171314 - RNA, 19 nt, Artificial Sequence
  Description of Artificial Sequence: Synthetic oligonucleotide
  Sense strand starting at position 2868 of SEQ ID NO: 916624
agaugucgccaccaauaca

SEQ ID NO: 1171315 - RNA, 19 nt, Artificial Sequence
  Description of Artificial Sequence: Synthetic oligonucleotide
  Antisense strand to SEQ ID NO: 1171314
uguauugguggcgacaucu

SEQ ID NO: 1171316 - RNA, 19 nt, Artificial Sequence
  Description of Artificial Sequence: Synthetic oligonucleotide
  Sense strand starting at position 2995 of SEQ ID NO: 916624
cucuuagauguaggucuau

SEQ ID NO: 1171317 - RNA, 19 nt, Artificial Sequence
  Description of Artificial Sequence: Synthetic oligonucleotide
  Antisense strand to SEQ ID NO: 1171316
auagaccuacaucuaagag

SEQ ID NO: 1171318 - RNA, 19 nt, Artificial Sequence
  Description of Artificial Sequence: Synthetic oligonucleotide
  Sense strand starting at position 3056 of SEQ ID NO: 916624
uugaguaugucagcagaaa

SEQ ID NO: 1171319 - RNA, 19 nt, Artificial Sequence
  Description of Artificial Sequence: Synthetic oligonucleotide
  Antisense strand to SEQ ID NO: 1171318
uuucugcugacauacucaa

SEQ ID NO: 1171320 - RNA, 19 nt, Artificial Sequence
  Description of Artificial Sequence: Synthetic oligonucleotide
  Sense strand starting at position 3057 of SEQ ID NO: 916624
ugaguaugucagcagaaag

SEQ ID NO: 1171321 - RNA, 19 nt, Artificial Sequence
  Description of Artificial Sequence: Synthetic oligonucleotide
  Antisense strand to SEQ ID NO: 1171320
cuuucugcugacauacuca

SEQ ID NO: 1171322 - RNA, 19 nt, Artificial Sequence
  Description of Artificial Sequence: Synthetic oligonucleotide
  Sense strand starting at position 3166 of SEQ ID NO: 916624
auaccuugucauuaugcca

SEQ ID NO: 1171323 - RNA, 19 nt, Artificial Sequence
  Description of Artificial Sequence: Synthetic oligonucleotide
  Antisense strand to SEQ ID NO: 1171322
uggcauaaugacaagguau

SEQ ID NO: 1171324 - RNA, 19 nt, Artificial Sequence
  Description of Artificial Sequence: Synthetic oligonucleotide
  Sense strand starting at position 3179 of SEQ ID NO: 916624
augccaaagccuugaagaa

SEQ ID NO: 1171325 - RNA, 19 nt, Artificial Sequence
  Description of Artificial Sequence: Synthetic oligonucleotide
  Antisense strand to SEQ ID NO: 1171324
uucuucaaggcuuuggcau

SEQ ID NO: 1171326 - RNA, 19 nt, Artificial Sequence
  Description of Artificial Sequence: Synthetic oligonucleotide
  Sense strand starting at position 3180 of SEQ ID NO: 916624
ugccaaagccuugaagaau

SEQ ID NO: 1171327 - RNA, 19 nt, Artificial Sequence
  Description of Artificial Sequence: Synthetic oligonucleotide
  Antisense strand to SEQ ID NO: 1171326
auucuucaaggcuuuggca

SEQ ID NO: 1171328 - RNA, 19 nt, Artificial Sequence
  Description of Artificial Sequence: Synthetic oligonucleotide
  Sense strand starting at position 3306 of SEQ ID NO: 916624
uaaggcuguucucuaguga

SEQ ID NO: 1171329 - RNA, 19 nt, Artificial Sequence
  Description of Artificial Sequence: Synthetic oligonucleotide
  Antisense strand to SEQ ID NO: 1171328
ucacuagagaacagccuua

SEQ ID NO: 1171330 - RNA, 19 nt, Artificial Sequence
  Description of Artificial Sequence: Synthetic oligonucleotide
  Sense strand starting at position 3307 of SEQ ID NO: 916624
aaggcuguucucuagugaa

SEQ ID NO: 1171331 - RNA, 19 nt, Artificial Sequence
  Description of Artificial Sequence: Synthetic oligonucleotide
  Antisense strand to SEQ ID NO: 1171330
uucacuagagaacagccuu

SEQ ID NO: 1171332 - RNA, 19 nt, Artificial Sequence
  Description of Artificial Sequence: Synthetic oligonucleotide
  Sense strand starting at position 3521 of SEQ ID NO: 916624
uuggcauguucuguggaca

SEQ ID NO: 1171333 - RNA, 19 nt, Artificial Sequence
  Description of Artificial Sequence: Synthetic oligonucleotide
  Antisense strand to SEQ ID NO: 1171332
uguccacagaacaugccaa

SEQ ID NO: 1171334 - RNA, 19 nt, Artificial Sequence
  Description of Artificial Sequence: Synthetic oligonucleotide
  Sense strand starting at position 3522 of SEQ ID NO: 916624
uggcauguucuguggacau

SEQ ID NO: 1171335 - RNA, 19 nt, Artificial Sequence
  Description of Artificial Sequence: Synthetic oligonucleotide
  Antisense strand to SEQ ID NO: 1171334
auguccacagaacaugcca

SEQ ID NO: 1171336 - RNA, 19 nt, Artificial Sequence
  Description of Artificial Sequence: Synthetic oligonucleotide
  Sense strand starting at position 3739 of SEQ ID NO: 916624
gaggauaucuuguccauuc

SEQ ID NO: 1171337 - RNA, 19 nt, Artificial Sequence
  Description of Artificial Sequence: Synthetic oligonucleotide
  Antisense strand to SEQ ID NO: 1171336
gaauggacaagauauccuc

SEQ ID NO: 1171338 - RNA, 19 nt, Artificial Sequence
  Description of Artificial Sequence: Synthetic oligonucleotide
  Sense strand starting at position 3741 of SEQ ID NO: 916624
ggauaucuuguccauuccu

SEQ ID NO: 1171339 - RNA, 19 nt, Artificial Sequence
  Description of Artificial Sequence: Synthetic oligonucleotide
  Antisense strand to SEQ ID NO: 1171338
aggaauggacaagauaucc

SEQ ID NO: 1171340 - RNA, 19 nt, Artificial Sequence
  Description of Artificial Sequence: Synthetic oligonucleotide
  Sense strand starting at position 3846 of SEQ ID NO: 916624
ccuagccuguuauuauuau

SEQ ID NO: 1171341 - RNA, 19 nt, Artificial Sequence
  Description of Artificial Sequence: Synthetic oligonucleotide
  Antisense strand to SEQ ID NO: 1171340
auaauaauaacaggcuagg

SEQ ID NO: 1171342 - RNA, 19 nt, Artificial Sequence
  Description of Artificial Sequence: Synthetic oligonucleotide
  Sense strand starting at position 3 of SEQ ID NO: 916625
cugcuuuaaggacguaaga

SEQ ID NO: 1171343 - RNA, 19 nt, Artificial Sequence
  Description of Artificial Sequence: Synthetic oligonucleotide
  Antisense strand to SEQ ID NO: 1171342
ucuuacguccuuaaagcag

SEQ ID NO: 1171344 - RNA, 19 nt, Artificial Sequence
  Description of Artificial Sequence: Synthetic oligonucleotide
  Sense strand starting at position 5 of SEQ ID NO: 916625
gcuuuaaggacguaagacu

SEQ ID NO: 1171345 - RNA, 19 nt, Artificial Sequence
  Description of Artificial Sequence: Synthetic oligonucleotide
  Antisense strand to SEQ ID NO: 1171344
agucuuacguccuuaaagc

SEQ ID NO: 1171346 - RNA, 19 nt, Artificial Sequence
  Description of Artificial Sequence: Synthetic oligonucleotide
  Sense strand starting at position 13 of SEQ ID NO: 916625
gacguaagacugggaaucu

SEQ ID NO: 1171347 - RNA, 19 nt, Artificial Sequence
  Description of Artificial Sequence: Synthetic oligonucleotide
  Antisense strand to SEQ ID NO: 1171346
agauucccagucuuacguc

SEQ ID NO: 1171348 - RNA, 19 nt, Artificial Sequence
  Description of Artificial Sequence: Synthetic oligonucleotide
  Sense strand starting at position 24 of SEQ ID NO: 916625
gggaaucuauuccugccaa

SEQ ID NO: 1171349 - RNA, 19 nt, Artificial Sequence
  Description of Artificial Sequence: Synthetic oligonucleotide
  Antisense strand to SEQ ID NO: 1171348
uuggcaggaauagauuccc

SEQ ID NO: 1171350 - RNA, 19 nt, Artificial Sequence
  Description of Artificial Sequence: Synthetic oligonucleotide
  Sense strand starting at position 226 of SEQ ID NO: 916625
ggacaucucagcuaaggca

SEQ ID NO: 1171351 - RNA, 19 nt, Artificial Sequence
  Description of Artificial Sequence: Synthetic oligonucleotide
  Antisense strand to SEQ ID NO: 1171350
ugccuuagcugagaugucc

SEQ ID NO: 1171352 - RNA, 19 nt, Artificial Sequence
  Description of Artificial Sequence: Synthetic oligonucleotide
  Sense strand starting at position 301 of SEQ ID NO: 916625
ugggaauccucuucucuca

SEQ ID NO: 1171353 - RNA, 19 nt, Artificial Sequence
  Description of Artificial Sequence: Synthetic oligonucleotide
  Antisense strand to SEQ ID NO: 1171352
ugagagaagaggauuccca

SEQ ID NO: 1171354 - RNA, 19 nt, Artificial Sequence
  Description of Artificial Sequence: Synthetic oligonucleotide
  Sense strand starting at position 379 of SEQ ID NO: 916625
ugguuagaaauguguggga

SEQ ID NO: 1171355 - RNA, 19 nt, Artificial Sequence
  Description of Artificial Sequence: Synthetic oligonucleotide
  Antisense strand to SEQ ID NO: 1171354
ucccacacauuucuaacca

SEQ ID NO: 1171356 - RNA, 19 nt, Artificial Sequence
  Description of Artificial Sequence: Synthetic oligonucleotide
  Sense strand starting at position 381 of SEQ ID NO: 916625
guuagaaaugugugggaga

SEQ ID NO: 1171357 - RNA, 19 nt, Artificial Sequence
  Description of Artificial Sequence: Synthetic oligonucleotide
  Antisense strand to SEQ ID NO: 1171356
ucucccacacauuucuaac

SEQ ID NO: 1171358 - RNA, 19 nt, Artificial Sequence
  Description of Artificial Sequence: Synthetic oligonucleotide
  Sense strand starting at position 432 of SEQ ID NO: 916625
ggcccuguuaccuggaaua

SEQ ID NO: 1171359 - RNA, 19 nt, Artificial Sequence
  Description of Artificial Sequence: Synthetic oligonucleotide
  Antisense strand to SEQ ID NO: 1171358
uauuccagguaacagggcc

SEQ ID NO: 1171360 - RNA, 19 nt, Artificial Sequence
  Description of Artificial Sequence: Synthetic oligonucleotide
  Sense strand starting at position 434 of SEQ ID NO: 916625
cccuguuaccuggaauaca

SEQ ID NO: 1171361 - RNA, 19 nt, Artificial Sequence
  Description of Artificial Sequence: Synthetic oligonucleotide
  Antisense strand to SEQ ID NO: 1171360
uguauuccagguaacaggg

SEQ ID NO: 1171362 - RNA, 19 nt, Artificial Sequence
  Description of Artificial Sequence: Synthetic oligonucleotide
  Sense strand starting at position 486 of SEQ ID NO: 916625
gggagccauccugaauucu

SEQ ID NO: 1171363 - RNA, 19 nt, Artificial Sequence
  Description of Artificial Sequence: Synthetic oligonucleotide
  Antisense strand to SEQ ID NO: 1171362
agaauucaggauggcuccc

SEQ ID NO: 1171364 - RNA, 19 nt, Artificial Sequence
  Description of Artificial Sequence: Synthetic oligonucleotide
  Sense strand starting at position 703 of SEQ ID NO: 916625
gcaaauuggauuggccaga

SEQ ID NO: 1171365 - RNA, 19 nt, Artificial Sequence
  Description of Artificial Sequence: Synthetic oligonucleotide
  Antisense strand to SEQ ID NO: 1171364
ucuggccaauccaauuugc

SEQ ID NO: 1171366 - RNA, 19 nt, Artificial Sequence
  Description of Artificial Sequence: Synthetic oligonucleotide
  Sense strand starting at position 847 of SEQ ID NO: 916625
ggugucaucuuaucaccau

SEQ ID NO: 1171367 - RNA, 19 nt, Artificial Sequence
  Description of Artificial Sequence: Synthetic oligonucleotide
  Antisense strand to SEQ ID NO: 1171366
auggugauaagaugacacc

SEQ ID NO: 1171368 - RNA, 19 nt, Artificial Sequence
  Description of Artificial Sequence: Synthetic oligonucleotide
  Sense strand starting at position 851 of SEQ ID NO: 916625
ucaucuuaucaccauaggu

SEQ ID NO: 1171369 - RNA, 19 nt, Artificial Sequence
  Description of Artificial Sequence: Synthetic oligonucleotide
  Antisense strand to SEQ ID NO: 1171368
accuauggugauaagauga

SEQ ID NO: 1171370 - RNA, 19 nt, Artificial Sequence
  Description of Artificial Sequence: Synthetic oligonucleotide
  Sense strand starting at position 958 of SEQ ID NO: 916625
cggugcucacuauggagaa

SEQ ID NO: 1171371 - RNA, 19 nt, Artificial Sequence
  Description of Artificial Sequence: Synthetic oligonucleotide
  Antisense strand to SEQ ID NO: 1171370
uucuccauagugagcaccg

SEQ ID NO: 1171372 - RNA, 19 nt, Artificial Sequence
  Description of Artificial Sequence: Synthetic oligonucleotide
  Sense strand starting at position 1013 of SEQ ID NO: 916625
guguuuccucucuaaacau

SEQ ID NO: 1171373 - RNA, 19 nt, Artificial Sequence
  Description of Artificial Sequence: Synthetic oligonucleotide
  Antisense strand to SEQ ID NO: 1171372
auguuuagagaggaaacac

SEQ ID NO: 1171374 - RNA, 19 nt, Artificial Sequence
  Description of Artificial Sequence: Synthetic oligonucleotide
  Sense strand starting at position 1069 of SEQ ID NO: 916625
uggauucaucucggagaga

SEQ ID NO: 1171375 - RNA, 19 nt, Artificial Sequence
  Description of Artificial Sequence: Synthetic oligonucleotide
  Antisense strand to SEQ ID NO: 1171374
ucucuccgagaugaaucca

SEQ ID NO: 1171376 - RNA, 19 nt, Artificial Sequence
  Description of Artificial Sequence: Synthetic oligonucleotide
  Sense strand starting at position 1087 of SEQ ID NO: 916625
agggacaucuucucuuguu

SEQ ID NO: 1171377 - RNA, 19 nt, Artificial Sequence
  Description of Artificial Sequence: Synthetic oligonucleotide
  Antisense strand to SEQ ID NO: 1171376
aacaagagaagaugucccu

SEQ ID NO: 1171378 - RNA, 19 nt, Artificial Sequence
  Description of Artificial Sequence: Synthetic oligonucleotide
  Sense strand starting at position 1100 of SEQ ID NO: 916625
cuuguucccugauuaagaa

SEQ ID NO: 1171379 - RNA, 19 nt, Artificial Sequence
  Description of Artificial Sequence: Synthetic oligonucleotide
  Antisense strand to SEQ ID NO: 1171378
uucuuaaucagggaacaag

SEQ ID NO: 1171380 - RNA, 19 nt, Artificial Sequence
  Description of Artificial Sequence: Synthetic oligonucleotide
  Sense strand starting at position 1101 of SEQ ID NO: 916625
uuguucccugauuaagaau

SEQ ID NO: 1171381 - RNA, 19 nt, Artificial Sequence
  Description of Artificial Sequence: Synthetic oligonucleotide
  Antisense strand to SEQ ID NO: 1171380
auucuuaaucagggaacaa

SEQ ID NO: 1171382 - RNA, 19 nt, Artificial Sequence
  Description of Artificial Sequence: Synthetic oligonucleotide
  Sense strand starting at position 1160 of SEQ ID NO: 916625
ggagauaaacauggugcau

SEQ ID NO: 1171383 - RNA, 19 nt, Artificial Sequence
  Description of Artificial Sequence: Synthetic oligonucleotide
  Antisense strand to SEQ ID NO: 1171382
augcaccauguuuaucucc

SEQ ID NO: 1171384 - RNA, 19 nt, Artificial Sequence
  Description of Artificial Sequence: Synthetic oligonucleotide
  Sense strand starting at position 1252 of SEQ ID NO: 916625
aguaucagauaccugaguu

SEQ ID NO: 1171385 - RNA, 19 nt, Artificial Sequence
  Description of Artificial Sequence: Synthetic oligonucleotide
  Antisense strand to SEQ ID NO: 1171384
aacucagguaucugauacu

SEQ ID NO: 1171386 - RNA, 19 nt, Artificial Sequence
  Description of Artificial Sequence: Synthetic oligonucleotide
  Sense strand starting at position 1331 of SEQ ID NO: 916625
cccaaaugugcuuggagau

SEQ ID NO: 1171387 - RNA, 19 nt, Artificial Sequence
  Description of Artificial Sequence: Synthetic oligonucleotide
  Antisense strand to SEQ ID NO: 1171386
aucuccaagcacauuuggg

SEQ ID NO: 1171388 - RNA, 19 nt, Artificial Sequence
  Description of Artificial Sequence: Synthetic oligonucleotide
  Sense strand starting at position 1332 of SEQ ID NO: 916625
ccaaaugugcuuggagauc

SEQ ID NO: 1171389 - RNA, 19 nt, Artificial Sequence
  Description of Artificial Sequence: Synthetic oligonucleotide
  Antisense strand to SEQ ID NO: 1171388
gaucuccaagcacauuugg

SEQ ID NO: 1171390 - RNA, 19 nt, Artificial Sequence
  Description of Artificial Sequence: Synthetic oligonucleotide
  Sense strand starting at position 1500 of SEQ ID NO: 916625
uaauacauagagugaguuu

SEQ ID NO: 1171391 - RNA, 19 nt, Artificial Sequence
  Description of Artificial Sequence: Synthetic oligonucleotide
  Antisense strand to SEQ ID NO: 1171390
aaacucacucuauguauua

SEQ ID NO: 1171392 - RNA, 19 nt, Artificial Sequence
  Description of Artificial Sequence: Synthetic oligonucleotide
  Sense strand starting at position 1574 of SEQ ID NO: 916625
gugcaugaggcagaaacua

SEQ ID NO: 1171393 - RNA, 19 nt, Artificial Sequence
  Description of Artificial Sequence: Synthetic oligonucleotide
  Antisense strand to SEQ ID NO: 1171392
uaguuucugccucaugcac

SEQ ID NO: 1171394 - RNA, 19 nt, Artificial Sequence
  Description of Artificial Sequence: Synthetic oligonucleotide
  Sense strand starting at position 1747 of SEQ ID NO: 916625
cauggauaugugugaguca

SEQ ID NO: 1171395 - RNA, 19 nt, Artificial Sequence
  Description of Artificial Sequence: Synthetic oligonucleotide
  Antisense strand to SEQ ID NO: 1171394
ugacucacacauauccaug

SEQ ID NO: 1171396 - RNA, 19 nt, Artificial Sequence
  Description of Artificial Sequence: Synthetic oligonucleotide
  Sense strand starting at position 2714 of SEQ ID NO: 916625
augugagugcguguuuaca

SEQ ID NO: 1171397 - RNA, 19 nt, Artificial Sequence
  Description of Artificial Sequence: Synthetic oligonucleotide
  Antisense strand to SEQ ID NO: 1171396
uguaaacacgcacucacau

SEQ ID NO: 1171398 - RNA, 19 nt, Artificial Sequence
  Description of Artificial Sequence: Synthetic oligonucleotide
  Sense strand starting at position 2854 of SEQ ID NO: 916625
gcgugucccaugucugagu

SEQ ID NO: 1171399 - RNA, 19 nt, Artificial Sequence
  Description of Artificial Sequence: Synthetic oligonucleotide
  Antisense strand to SEQ ID NO: 1171398
acucagacaugggacacgc

SEQ ID NO: 1171400 - RNA, 19 nt, Artificial Sequence
  Description of Artificial Sequence: Synthetic oligonucleotide
  Sense strand starting at position 3081 of SEQ ID NO: 916625
ccgccuagcagauaggaau

SEQ ID NO: 1171401 - RNA, 19 nt, Artificial Sequence
  Description of Artificial Sequence: Synthetic oligonucleotide
  Antisense strand to SEQ ID NO: 1171400
auuccuaucugcuaggcgg

SEQ ID NO: 1171402 - RNA, 19 nt, Artificial Sequence
  Description of Artificial Sequence: Synthetic oligonucleotide
  Sense strand starting at position 3094 of SEQ ID NO: 916625
aggaauuucuuccaaguuc

SEQ ID NO: 1171403 - RNA, 19 nt, Artificial Sequence
  Description of Artificial Sequence: Synthetic oligonucleotide
  Antisense strand to SEQ ID NO: 1171402
gaacuuggaagaaauuccu

SEQ ID NO: 1171404 - RNA, 19 nt, Artificial Sequence
  Description of Artificial Sequence: Synthetic oligonucleotide
  Sense strand starting at position 3451 of SEQ ID NO: 916625
cuucuucuuugacuaggua

SEQ ID NO: 1171405 - RNA, 19 nt, Artificial Sequence
  Description of Artificial Sequence: Synthetic oligonucleotide
  Antisense strand to SEQ ID NO: 1171404
uaccuagucaaagaagaag

SEQ ID NO: 1171406 - RNA, 19 nt, Artificial Sequence
  Description of Artificial Sequence: Synthetic oligonucleotide
  Sense strand starting at position 3452 of SEQ ID NO: 916625
uucuucuuugacuagguaa

SEQ ID NO: 1171407 - RNA, 19 nt, Artificial Sequence
  Description of Artificial Sequence: Synthetic oligonucleotide
  Antisense strand to SEQ ID NO: 1171406
uuaccuagucaaagaagaa

SEQ ID NO: 1171408 - RNA, 19 nt, Artificial Sequence
  Description of Artificial Sequence: Synthetic oligonucleotide
  Sense strand starting at position 3454 of SEQ ID NO: 916625
cuucuuugacuagguaaua

SEQ ID NO: 1171409 - RNA, 19 nt, Artificial Sequence
  Description of Artificial Sequence: Synthetic oligonucleotide
  Antisense strand to SEQ ID NO: 1171408
uauuaccuagucaaagaag

SEQ ID NO: 1171410 - RNA, 19 nt, Artificial Sequence
  Description of Artificial Sequence: Synthetic oligonucleotide
  Sense strand starting at position 3455 of SEQ ID NO: 916625
uucuuugacuagguaauaa

SEQ ID NO: 1171411 - RNA, 19 nt, Artificial Sequence
  Description of Artificial Sequence: Synthetic oligonucleotide
  Antisense strand to SEQ ID NO: 1171410
uuauuaccuagucaaagaa

SEQ ID NO: 1171412 - RNA, 19 nt, Artificial Sequence
  Description of Artificial Sequence: Synthetic oligonucleotide
  Sense strand starting at position 3486 of SEQ ID NO: 916625
aggaaagcauuccugauau

SEQ ID NO: 1171413 - RNA, 19 nt, Artificial Sequence
  Description of Artificial Sequence: Synthetic oligonucleotide
  Antisense strand to SEQ ID NO: 1171412
auaucaggaaugcuuuccu

SEQ ID NO: 1171414 - RNA, 19 nt, Artificial Sequence
  Description of Artificial Sequence: Synthetic oligonucleotide
  Sense strand starting at position 3593 of SEQ ID NO: 916625
agccuagcugguuaauaaa

SEQ ID NO: 1171415 - RNA, 19 nt, Artificial Sequence
  Description of Artificial Sequence: Synthetic oligonucleotide
  Antisense strand to SEQ ID NO: 1171414
uuuauuaaccagcuaggcu

SEQ ID NO: 1171416 - RNA, 19 nt, Artificial Sequence
  Description of Artificial Sequence: Synthetic oligonucleotide
  Sense strand starting at position 3682 of SEQ ID NO: 916625
ccgaguccuaccuaggacu

SEQ ID NO: 1171417 - RNA, 19 nt, Artificial Sequence
  Description of Artificial Sequence: Synthetic oligonucleotide
  Antisense strand to SEQ ID NO: 1171416
aguccuagguaggacucgg

SEQ ID NO: 1171418 - RNA, 19 nt, Artificial Sequence
  Description of Artificial Sequence: Synthetic oligonucleotide
  Sense strand starting at position 3767 of SEQ ID NO: 916625
gggaaacuccuaugucaac

SEQ ID NO: 1171419 - RNA, 19 nt, Artificial Sequence
  Description of Artificial Sequence: Synthetic oligonucleotide
  Antisense strand to SEQ ID NO: 1171418
guugacauaggaguuuccc

SEQ ID NO: 1171420 - RNA, 19 nt, Artificial Sequence
  Description of Artificial Sequence: Synthetic oligonucleotide
  Sense strand starting at position 3768 of SEQ ID NO: 916625
ggaaacuccuaugucaaca

SEQ ID NO: 1171421 - RNA, 19 nt, Artificial Sequence
  Description of Artificial Sequence: Synthetic oligonucleotide
  Antisense strand to SEQ ID NO: 1171420
uguugacauaggaguuucc

SEQ ID NO: 1171422 - RNA, 19 nt, Artificial Sequence
  Description of Artificial Sequence: Synthetic oligonucleotide
  Sense strand starting at position 334 of SEQ ID NO: 916626
caaguugaaguuugugaua

SEQ ID NO: 1171423 - RNA, 19 nt, Artificial Sequence
  Description of Artificial Sequence: Synthetic oligonucleotide
  Antisense strand to SEQ ID NO: 1171422
uaucacaaacuucaacuug

SEQ ID NO: 1171424 - RNA, 19 nt, Artificial Sequence
  Description of Artificial Sequence: Synthetic oligonucleotide
  Sense strand starting at position 420 of SEQ ID NO: 916626
gcugcagucucuccaaaua

SEQ ID NO: 1171425 - RNA, 19 nt, Artificial Sequence
  Description of Artificial Sequence: Synthetic oligonucleotide
  Antisense strand to SEQ ID NO: 1171424
uauuuggagagacugcagc

SEQ ID NO: 1171426 - RNA, 19 nt, Artificial Sequence
  Description of Artificial Sequence: Synthetic oligonucleotide
  Sense strand starting at position 489 of SEQ ID NO: 916626
cagcuugcuuugcucuaga

SEQ ID NO: 1171427 - RNA, 19 nt, Artificial Sequence
  Description of Artificial Sequence: Synthetic oligonucleotide
  Antisense strand to SEQ ID NO: 1171426
ucuagagcaaagcaagcug

SEQ ID NO: 1171428 - RNA, 19 nt, Artificial Sequence
  Description of Artificial Sequence: Synthetic oligonucleotide
  Sense strand starting at position 492 of SEQ ID NO: 916626
cuugcuuugcucuagaauc

SEQ ID NO: 1171429 - RNA, 19 nt, Artificial Sequence
  Description of Artificial Sequence: Synthetic oligonucleotide
  Antisense strand to SEQ ID NO: 1171428
gauucuagagcaaagcaag

SEQ ID NO: 1171430 - RNA, 19 nt, Artificial Sequence
  Description of Artificial Sequence: Synthetic oligonucleotide
  Sense strand starting at position 494 of SEQ ID NO: 916626
ugcuuugcucuagaaucuu

SEQ ID NO: 1171431 - RNA, 19 nt, Artificial Sequence
  Description of Artificial Sequence: Synthetic oligonucleotide
  Antisense strand to SEQ ID NO: 1171430
aagauucuagagcaaagca

SEQ ID NO: 1171432 - RNA, 19 nt, Artificial Sequence
  Description of Artificial Sequence: Synthetic oligonucleotide
  Sense strand starting at position 697 of SEQ ID NO: 916626
ccagguguagcagaucuaa

SEQ ID NO: 1171433 - RNA, 19 nt, Artificial Sequence
  Description of Artificial Sequence: Synthetic oligonucleotide
  Antisense strand to SEQ ID NO: 1171432
uuagaucugcuacaccugg

SEQ ID NO: 1171434 - RNA, 19 nt, Artificial Sequence
  Description of Artificial Sequence: Synthetic oligonucleotide
  Sense strand starting at position 896 of SEQ ID NO: 916626
aggcuaucuucccuuuagu

SEQ ID NO: 1171435 - RNA, 19 nt, Artificial Sequence
  Description of Artificial Sequence: Synthetic oligonucleotide
  Antisense strand to SEQ ID NO: 1171434
acuaaagggaagauagccu

SEQ ID NO: 1171436 - RNA, 19 nt, Artificial Sequence
  Description of Artificial Sequence: Synthetic oligonucleotide
  Sense strand starting at position 961 of SEQ ID NO: 916626
ucaaguuuccaagagccga

SEQ ID NO: 1171437 - RNA, 19 nt, Artificial Sequence
  Description of Artificial Sequence: Synthetic oligonucleotide
  Antisense strand to SEQ ID NO: 1171436
ucggcucuuggaaacuuga

SEQ ID NO: 1171438 - RNA, 19 nt, Artificial Sequence
  Description of Artificial Sequence: Synthetic oligonucleotide
  Sense strand starting at position 2134 of SEQ ID NO: 916626
cgaauaacuccuggagaau

SEQ ID NO: 1171439 - RNA, 19 nt, Artificial Sequence
  Description of Artificial Sequence: Synthetic oligonucleotide
  Antisense strand to SEQ ID NO: 1171438
auucuccaggaguuauucg

SEQ ID NO: 1171440 - RNA, 19 nt, Artificial Sequence
  Description of Artificial Sequence: Synthetic oligonucleotide
  Sense strand starting at position 2933 of SEQ ID NO: 916626
gcuuucuuucuuuaaggca

SEQ ID NO: 1171441 - RNA, 19 nt, Artificial Sequence
  Description of Artificial Sequence: Synthetic oligonucleotide
  Antisense strand to SEQ ID NO: 1171440
ugccuuaaagaaagaaagc

SEQ ID NO: 1171442 - RNA, 19 nt, Artificial Sequence
  Description of Artificial Sequence: Synthetic oligonucleotide
  Sense strand starting at position 3016 of SEQ ID NO: 916626
gcucgauugcuccuuugcu

SEQ ID NO: 1171443 - RNA, 19 nt, Artificial Sequence
  Description of Artificial Sequence: Synthetic oligonucleotide
  Antisense strand to SEQ ID NO: 1171442
agcaaaggagcaaucgagc

SEQ ID NO: 1171444 - RNA, 19 nt, Artificial Sequence
  Description of Artificial Sequence: Synthetic oligonucleotide
  Sense strand starting at position 3183 of SEQ ID NO: 916626
aagauuguguuugccuacu

SEQ ID NO: 1171445 - RNA, 19 nt, Artificial Sequence
  Description of Artificial Sequence: Synthetic oligonucleotide
  Antisense strand to SEQ ID NO: 1171444
aguaggcaaacacaaucuu

SEQ ID NO: 1171446 - RNA, 19 nt, Artificial Sequence
  Description of Artificial Sequence: Synthetic oligonucleotide
  Sense strand starting at position 3195 of SEQ ID NO: 916626
gccuacuuggcagaugaga

SEQ ID NO: 1171447 - RNA, 19 nt, Artificial Sequence
  Description of Artificial Sequence: Synthetic oligonucleotide
  Antisense strand to SEQ ID NO: 1171446
ucucaucugccaaguaggc

SEQ ID NO: 1171448 - RNA, 19 nt, Artificial Sequence
  Description of Artificial Sequence: Synthetic oligonucleotide
  Sense strand starting at position 3311 of SEQ ID NO: 916626
gugacagugucauccuuug

SEQ ID NO: 1171449 - RNA, 19 nt, Artificial Sequence
  Description of Artificial Sequence: Synthetic oligonucleotide
  Antisense strand to SEQ ID NO: 1171448
caaaggaugacacugucac

SEQ ID NO: 1171450 - RNA, 19 nt, Artificial Sequence
  Description of Artificial Sequence: Synthetic oligonucleotide
  Sense strand starting at position 3339 of SEQ ID NO: 916626
gcuggaaggucugcuuuau

SEQ ID NO: 1171451 - RNA, 19 nt, Artificial Sequence
  Description of Artificial Sequence: Synthetic oligonucleotide
  Antisense strand to SEQ ID NO: 1171450
auaaagcagaccuuccagc

SEQ ID NO: 1171452 - RNA, 19 nt, Artificial Sequence
  Description of Artificial Sequence: Synthetic oligonucleotide
  Sense strand starting at position 3343 of SEQ ID NO: 916626
gaaggucugcuuuaugaga

SEQ ID NO: 1171453 - RNA, 19 nt, Artificial Sequence
  Description of Artificial Sequence: Synthetic oligonucleotide
  Antisense strand to SEQ ID NO: 1171452
ucucauaaagcagaccuuc

SEQ ID NO: 1171454 - RNA, 19 nt, Artificial Sequence
  Description of Artificial Sequence: Synthetic oligonucleotide
  Sense strand starting at position 3458 of SEQ ID NO: 916626
aaauccagugcaugaguau

SEQ ID NO: 1171455 - RNA, 19 nt, Artificial Sequence
  Description of Artificial Sequence: Synthetic oligonucleotide
  Antisense strand to SEQ ID NO: 1171454
auacucaugcacuggauuu

SEQ ID NO: 1171456 - RNA, 19 nt, Artificial Sequence
  Description of Artificial Sequence: Synthetic oligonucleotide
  Sense strand starting at position 3459 of SEQ ID NO: 916626
aauccagugcaugaguauu

SEQ ID NO: 1171457 - RNA, 19 nt, Artificial Sequence
  Description of Artificial Sequence: Synthetic oligonucleotide
  Antisense strand to SEQ ID NO: 1171456
aauacucaugcacuggauu

SEQ ID NO: 1171458 - RNA, 19 nt, Artificial Sequence
  Description of Artificial Sequence: Synthetic oligonucleotide
  Sense strand starting at position 3514 of SEQ ID NO: 916626
uugagauuaagugaccgua

SEQ ID NO: 1171459 - RNA, 19 nt, Artificial Sequence
  Description of Artificial Sequence: Synthetic oligonucleotide
  Antisense strand to SEQ ID NO: 1171458
uacggucacuuaaucucaa

SEQ ID NO: 1171460 - RNA, 19 nt, Artificial Sequence
  Description of Artificial Sequence: Synthetic oligonucleotide
  Sense strand starting at position 3516 of SEQ ID NO: 916626
gagauuaagugaccguauc

SEQ ID NO: 1171461 - RNA, 19 nt, Artificial Sequence
  Description of Artificial Sequence: Synthetic oligonucleotide
  Antisense strand to SEQ ID NO: 1171460
gauacggucacuuaaucuc

SEQ ID NO: 1171462 - RNA, 19 nt, Artificial Sequence
  Description of Artificial Sequence: Synthetic oligonucleotide
  Sense strand starting at position 3522 of SEQ ID NO: 916626
aagugaccguauccucaaa

SEQ ID NO: 1171463 - RNA, 19 nt, Artificial Sequence
  Description of Artificial Sequence: Synthetic oligonucleotide
  Antisense strand to SEQ ID NO: 1171462
uuugaggauacggucacuu

SEQ ID NO: 1171464 - RNA, 19 nt, Artificial Sequence
  Description of Artificial Sequence: Synthetic oligonucleotide
  Sense strand starting at position 3607 of SEQ ID NO: 916626
gugaggauagguggguuaa

SEQ ID NO: 1171465 - RNA, 19 nt, Artificial Sequence
  Description of Artificial Sequence: Synthetic oligonucleotide
  Antisense strand to SEQ ID NO: 1171464
uuaacccaccuauccucac

SEQ ID NO: 1171466 - RNA, 19 nt, Artificial Sequence
  Description of Artificial Sequence: Synthetic oligonucleotide
  Sense strand starting at position 3609 of SEQ ID NO: 916626
gaggauagguggguuaaca

SEQ ID NO: 1171467 - RNA, 19 nt, Artificial Sequence
  Description of Artificial Sequence: Synthetic oligonucleotide
  Antisense strand to SEQ ID NO: 1171466
uguuaacccaccuauccuc

SEQ ID NO: 1171468 - RNA, 19 nt, Artificial Sequence
  Description of Artificial Sequence: Synthetic oligonucleotide
  Sense strand starting at position 3620 of SEQ ID NO: 916626
gguuaacacuaggagagau

SEQ ID NO: 1171469 - RNA, 19 nt, Artificial Sequence
  Description of Artificial Sequence: Synthetic oligonucleotide
  Antisense strand to SEQ ID NO: 1171468
aucucuccuaguguuaacc

SEQ ID NO: 1171470 - RNA, 19 nt, Artificial Sequence
  Description of Artificial Sequence: Synthetic oligonucleotide
  Sense strand starting at position 3637 of SEQ ID NO: 916626
aucuuagaagacugucuau

SEQ ID NO: 1171471 - RNA, 19 nt, Artificial Sequence
  Description of Artificial Sequence: Synthetic oligonucleotide
  Antisense strand to SEQ ID NO: 1171470
auagacagucuucuaagau

SEQ ID NO: 1171472 - RNA, 19 nt, Artificial Sequence
  Description of Artificial Sequence: Synthetic oligonucleotide
  Sense strand starting at position 3646 of SEQ ID NO: 916626
gacugucuauggcugcaaa

SEQ ID NO: 1171473 - RNA, 19 nt, Artificial Sequence
  Description of Artificial Sequence: Synthetic oligonucleotide
  Antisense strand to SEQ ID NO: 1171472
uuugcagccauagacaguc

SEQ ID NO: 1171474 - RNA, 19 nt, Artificial Sequence
  Description of Artificial Sequence: Synthetic oligonucleotide
  Sense strand starting at position 3665 of SEQ ID NO: 916626
auacuacaucuucgagcaa

SEQ ID NO: 1171475 - RNA, 19 nt, Artificial Sequence
  Description of Artificial Sequence: Synthetic oligonucleotide
  Antisense strand to SEQ ID NO: 1171474
uugcucgaagauguaguau

SEQ ID NO: 1171476 - RNA, 19 nt, Artificial Sequence
  Description of Artificial Sequence: Synthetic oligonucleotide
  Sense strand starting at position 3676 of SEQ ID NO: 916626
ucgagcaaagcauaugaaa

SEQ ID NO: 1171477 - RNA, 19 nt, Artificial Sequence
  Description of Artificial Sequence: Synthetic oligonucleotide
  Antisense strand to SEQ ID NO: 1171476
uuucauaugcuuugcucga

SEQ ID NO: 1171478 - RNA, 19 nt, Artificial Sequence
  Description of Artificial Sequence: Synthetic oligonucleotide
  Sense strand starting at position 3699 of SEQ ID NO: 916626
ucaggaccuuaguuauuaa

SEQ ID NO: 1171479 - RNA, 19 nt, Artificial Sequence
  Description of Artificial Sequence: Synthetic oligonucleotide
  Antisense strand to SEQ ID NO: 1171478
uuaauaacuaagguccuga

SEQ ID NO: 1171480 - RNA, 19 nt, Artificial Sequence
  Description of Artificial Sequence: Synthetic oligonucleotide
  Sense strand starting at position 3702 of SEQ ID NO: 916626
ggaccuuaguuauuaauga

SEQ ID NO: 1171481 - RNA, 19 nt, Artificial Sequence
  Description of Artificial Sequence: Synthetic oligonucleotide
  Antisense strand to SEQ ID NO: 1171480
ucauuaauaacuaaggucc

SEQ ID NO: 1171482 - RNA, 19 nt, Artificial Sequence
  Description of Artificial Sequence: Synthetic oligonucleotide
  Sense strand starting at position 3703 of SEQ ID NO: 916626
gaccuuaguuauuaaugag

SEQ ID NO: 1171483 - RNA, 19 nt, Artificial Sequence
  Description of Artificial Sequence: Synthetic oligonucleotide
  Antisense strand to SEQ ID NO: 1171482
cucauuaauaacuaagguc

SEQ ID NO: 1171484 - RNA, 19 nt, Artificial Sequence
  Description of Artificial Sequence: Synthetic oligonucleotide
  Sense strand starting at position 3710 of SEQ ID NO: 916626
guuauuaaugaguaaaggu

SEQ ID NO: 1171485 - RNA, 19 nt, Artificial Sequence
  Description of Artificial Sequence: Synthetic oligonucleotide
  Antisense strand to SEQ ID NO: 1171484
accuuuacucauuaauaac

SEQ ID NO: 1171486 - RNA, 19 nt, Artificial Sequence
  Description of Artificial Sequence: Synthetic oligonucleotide
  Sense strand starting at position 3718 of SEQ ID NO: 916626
ugaguaaagguucguguac

SEQ ID NO: 1171487 - RNA, 19 nt, Artificial Sequence
  Description of Artificial Sequence: Synthetic oligonucleotide
  Antisense strand to SEQ ID NO: 1171486
guacacgaaccuuuacuca

SEQ ID NO: 1171488 - RNA, 19 nt, Artificial Sequence
  Description of Artificial Sequence: Synthetic oligonucleotide
  Sense strand starting at position 3719 of SEQ ID NO: 916626
gaguaaagguucguguacu

SEQ ID NO: 1171489 - RNA, 19 nt, Artificial Sequence
  Description of Artificial Sequence: Synthetic oligonucleotide
  Antisense strand to SEQ ID NO: 1171488
aguacacgaaccuuuacuc

SEQ ID NO: 1171490 - RNA, 19 nt, Artificial Sequence
  Description of Artificial Sequence: Synthetic oligonucleotide
  Sense strand starting at position 3735 of SEQ ID NO: 916626
acugcagcagugugauauu

SEQ ID NO: 1171491 - RNA, 19 nt, Artificial Sequence
  Description of Artificial Sequence: Synthetic oligonucleotide
  Antisense strand to SEQ ID NO: 1171490
aauaucacacugcugcagu

SEQ ID NO: 1171492 - RNA, 19 nt, Artificial Sequence
  Description of Artificial Sequence: Synthetic oligonucleotide
  Sense strand starting at position 3745 of SEQ ID NO: 916626
ugugauauuugagaaacua

SEQ ID NO: 1171493 - RNA, 19 nt, Artificial Sequence
  Description of Artificial Sequence: Synthetic oligonucleotide
  Antisense strand to SEQ ID NO: 1171492
uaguuucucaaauaucaca

SEQ ID NO: 1171494 - RNA, 19 nt, Artificial Sequence
  Description of Artificial Sequence: Synthetic oligonucleotide
  Sense strand starting at position 3841 of SEQ ID NO: 916626
uauugauguucccugggau

SEQ ID NO: 1171495 - RNA, 19 nt, Artificial Sequence
  Description of Artificial Sequence: Synthetic oligonucleotide
  Antisense strand to SEQ ID NO: 1171494
aucccagggaacaucaaua

SEQ ID NO: 1171496 - RNA, 19 nt, Artificial Sequence
  Description of Artificial Sequence: Synthetic oligonucleotide
  Sense strand starting at position 3842 of SEQ ID NO: 916626
auugauguucccugggauc

SEQ ID NO: 1171497 - RNA, 19 nt, Artificial Sequence
  Description of Artificial Sequence: Synthetic oligonucleotide
  Antisense strand to SEQ ID NO: 1171496
gaucccagggaacaucaau

SEQ ID NO: 1171498 - RNA, 19 nt, Artificial Sequence
  Description of Artificial Sequence: Synthetic oligonucleotide
  Sense strand starting at position 3844 of SEQ ID NO: 916626
ugauguucccugggaucua

SEQ ID NO: 1171499 - RNA, 19 nt, Artificial Sequence
  Description of Artificial Sequence: Synthetic oligonucleotide
  Antisense strand to SEQ ID NO: 1171498
uagaucccagggaacauca

SEQ ID NO: 1171500 - RNA, 19 nt, Artificial Sequence
  Description of Artificial Sequence: Synthetic oligonucleotide
  Sense strand starting at position 3964 of SEQ ID NO: 916626
cuugacauuccagguuaaa

SEQ ID NO: 1171501 - RNA, 19 nt, Artificial Sequence
  Description of Artificial Sequence: Synthetic oligonucleotide
  Antisense strand to SEQ ID NO: 1171500
uuuaaccuggaaugucaag

SEQ ID NO: 1171502 - RNA, 19 nt, Artificial Sequence
  Description of Artificial Sequence: Synthetic oligonucleotide
  Sense strand starting at position 5 of SEQ ID NO: 916627
cucgaagauugaccuugua

SEQ ID NO: 1171503 - RNA, 19 nt, Artificial Sequence
  Description of Artificial Sequence: Synthetic oligonucleotide
  Antisense strand to SEQ ID NO: 1171502
uacaaggucaaucuucgag

SEQ ID NO: 1171504 - RNA, 19 nt, Artificial Sequence
  Description of Artificial Sequence: Synthetic oligonucleotide
  Sense strand starting at position 8 of SEQ ID NO: 916627
gaagauugaccuuguaguu

SEQ ID NO: 1171505 - RNA, 19 nt, Artificial Sequence
  Description of Artificial Sequence: Synthetic oligonucleotide
  Antisense strand to SEQ ID NO: 1171504
aacuacaaggucaaucuuc

SEQ ID NO: 1171506 - RNA, 19 nt, Artificial Sequence
  Description of Artificial Sequence: Synthetic oligonucleotide
  Sense strand starting at position 69 of SEQ ID NO: 916627
uagggauuauguuucuaau

SEQ ID NO: 1171507 - RNA, 19 nt, Artificial Sequence
  Description of Artificial Sequence: Synthetic oligonucleotide
  Antisense strand to SEQ ID NO: 1171506
auuagaaacauaaucccua

SEQ ID NO: 1171508 - RNA, 19 nt, Artificial Sequence
  Description of Artificial Sequence: Synthetic oligonucleotide
  Sense strand starting at position 71 of SEQ ID NO: 916627
gggauuauguuucuaauua

SEQ ID NO: 1171509 - RNA, 19 nt, Artificial Sequence
  Description of Artificial Sequence: Synthetic oligonucleotide
  Antisense strand to SEQ ID NO: 1171508
uaauuagaaacauaauccc

SEQ ID NO: 1171510 - RNA, 19 nt, Artificial Sequence
  Description of Artificial Sequence: Synthetic oligonucleotide
  Sense strand starting at position 183 of SEQ ID NO: 916627
augguaaaguguuuggaua

SEQ ID NO: 1171511 - RNA, 19 nt, Artificial Sequence
  Description of Artificial Sequence: Synthetic oligonucleotide
  Antisense strand to SEQ ID NO: 1171510
uauccaaacacuuuaccau

SEQ ID NO: 1171512 - RNA, 19 nt, Artificial Sequence
  Description of Artificial Sequence: Synthetic oligonucleotide
  Sense strand starting at position 301 of SEQ ID NO: 916627
gcguuuguccugcauuuga

SEQ ID NO: 1171513 - RNA, 19 nt, Artificial Sequence
  Description of Artificial Sequence: Synthetic oligonucleotide
  Antisense strand to SEQ ID NO: 1171512
ucaaaugcaggacaaacgc

SEQ ID NO: 1171514 - RNA, 19 nt, Artificial Sequence
  Description of Artificial Sequence: Synthetic oligonucleotide
  Sense strand starting at position 808 of SEQ ID NO: 916627
acacaaguaucaccaguua

SEQ ID NO: 1171515 - RNA, 19 nt, Artificial Sequence
  Description of Artificial Sequence: Synthetic oligonucleotide
  Antisense strand to SEQ ID NO: 1171514
uaacuggugauacuugugu

SEQ ID NO: 1171516 - RNA, 19 nt, Artificial Sequence
  Description of Artificial Sequence: Synthetic oligonucleotide
  Sense strand starting at position 874 of SEQ ID NO: 916627
uguguuuagaaauguagac

SEQ ID NO: 1171517 - RNA, 19 nt, Artificial Sequence
  Description of Artificial Sequence: Synthetic oligonucleotide
  Antisense strand to SEQ ID NO: 1171516
gucuacauuucuaaacaca

SEQ ID NO: 1171518 - RNA, 19 nt, Artificial Sequence
  Description of Artificial Sequence: Synthetic oligonucleotide
  Sense strand starting at position 893 of SEQ ID NO: 916627
uagucauuugacugguagu

SEQ ID NO: 1171519 - RNA, 19 nt, Artificial Sequence
  Description of Artificial Sequence: Synthetic oligonucleotide
  Antisense strand to SEQ ID NO: 1171518
acuaccagucaaaugacua

SEQ ID NO: 1171520 - RNA, 19 nt, Artificial Sequence
  Description of Artificial Sequence: Synthetic oligonucleotide
  Sense strand starting at position 894 of SEQ ID NO: 916627
agucauuugacugguaguu

SEQ ID NO: 1171521 - RNA, 19 nt, Artificial Sequence
  Description of Artificial Sequence: Synthetic oligonucleotide
  Antisense strand to SEQ ID NO: 1171520
aacuaccagucaaaugacu

SEQ ID NO: 1171522 - RNA, 19 nt, Artificial Sequence
  Description of Artificial Sequence: Synthetic oligonucleotide
  Sense strand starting at position 904 of SEQ ID NO: 916627
cugguaguuacugaugaau

SEQ ID NO: 1171523 - RNA, 19 nt, Artificial Sequence
  Description of Artificial Sequence: Synthetic oligonucleotide
  Antisense strand to SEQ ID NO: 1171522
auucaucaguaacuaccag

SEQ ID NO: 1171524 - RNA, 19 nt, Artificial Sequence
  Description of Artificial Sequence: Synthetic oligonucleotide
  Sense strand starting at position 1051 of SEQ ID NO: 916627
gaccguggcagugaauaau

SEQ ID NO: 1171525 - RNA, 19 nt, Artificial Sequence
  Description of Artificial Sequence: Synthetic oligonucleotide
  Antisense strand to SEQ ID NO: 1171524
auuauucacugccacgguc

SEQ ID NO: 1171526 - RNA, 19 nt, Artificial Sequence
  Description of Artificial Sequence: Synthetic oligonucleotide
  Sense strand starting at position 1062 of SEQ ID NO: 916627
ugaauaaucuuguccaaag

SEQ ID NO: 1171527 - RNA, 19 nt, Artificial Sequence
  Description of Artificial Sequence: Synthetic oligonucleotide
  Antisense strand to SEQ ID NO: 1171526
cuuuggacaagauuauuca

SEQ ID NO: 1171528 - RNA, 19 nt, Artificial Sequence
  Description of Artificial Sequence: Synthetic oligonucleotide
  Sense strand starting at position 1137 of SEQ ID NO: 916627
acgaguuauucuuugaaca

SEQ ID NO: 1171529 - RNA, 19 nt, Artificial Sequence
  Description of Artificial Sequence: Synthetic oligonucleotide
  Antisense strand to SEQ ID NO: 1171528
uguucaaagaauaacucgu

SEQ ID NO: 1171530 - RNA, 19 nt, Artificial Sequence
  Description of Artificial Sequence: Synthetic oligonucleotide
  Sense strand starting at position 1138 of SEQ ID NO: 916627
cgaguuauucuuugaacag

SEQ ID NO: 1171531 - RNA, 19 nt, Artificial Sequence
  Description of Artificial Sequence: Synthetic oligonucleotide
  Antisense strand to SEQ ID NO: 1171530
cuguucaaagaauaacucg

SEQ ID NO: 1171532 - RNA, 19 nt, Artificial Sequence
  Description of Artificial Sequence: Synthetic oligonucleotide
  Sense strand starting at position 1142 of SEQ ID NO: 916627
uuauucuuugaacagaugu

SEQ ID NO: 1171533 - RNA, 19 nt, Artificial Sequence
  Description of Artificial Sequence: Synthetic oligonucleotide
  Antisense strand to SEQ ID NO: 1171532
acaucuguucaaagaauaa

SEQ ID NO: 1171534 - RNA, 19 nt, Artificial Sequence
  Description of Artificial Sequence: Synthetic oligonucleotide
  Sense strand starting at position 1149 of SEQ ID NO: 916627
uugaacagauguuuaguau

SEQ ID NO: 1171535 - RNA, 19 nt, Artificial Sequence
  Description of Artificial Sequence: Synthetic oligonucleotide
  Antisense strand to SEQ ID NO: 1171534
auacuaaacaucuguucaa

SEQ ID NO: 1171536 - RNA, 19 nt, Artificial Sequence
  Description of Artificial Sequence: Synthetic oligonucleotide
  Sense strand starting at position 1150 of SEQ ID NO: 916627
ugaacagauguuuaguauu

SEQ ID NO: 1171537 - RNA, 19 nt, Artificial Sequence
  Description of Artificial Sequence: Synthetic oligonucleotide
  Antisense strand to SEQ ID NO: 1171536
aauacuaaacaucuguuca

SEQ ID NO: 1171538 - RNA, 19 nt, Artificial Sequence
  Description of Artificial Sequence: Synthetic oligonucleotide
  Sense strand starting at position 1248 of SEQ ID NO: 916627
gcuacuaauccacgaggaa

SEQ ID NO: 1171539 - RNA, 19 nt, Artificial Sequence
  Description of Artificial Sequence: Synthetic oligonucleotide
  Antisense strand to SEQ ID NO: 1171538
uuccucguggauuaguagc

SEQ ID NO: 1171540 - RNA, 19 nt, Artificial Sequence
  Description of Artificial Sequence: Synthetic oligonucleotide
  Sense strand starting at position 1320 of SEQ ID NO: 916627
uuuggugcuagauaaggau

SEQ ID NO: 1171541 - RNA, 19 nt, Artificial Sequence
  Description of Artificial Sequence: Synthetic oligonucleotide
  Antisense strand to SEQ ID NO: 1171540
auccuuaucuagcaccaaa

SEQ ID NO: 1171542 - RNA, 19 nt, Artificial Sequence
  Description of Artificial Sequence: Synthetic oligonucleotide
  Sense strand starting at position 1399 of SEQ ID NO: 916627
gaguuuagugaacaguucu

SEQ ID NO: 1171543 - RNA, 19 nt, Artificial Sequence
  Description of Artificial Sequence: Synthetic oligonucleotide
  Antisense strand to SEQ ID NO: 1171542
agaacuguucacuaaacuc

SEQ ID NO: 1171544 - RNA, 19 nt, Artificial Sequence
  Description of Artificial Sequence: Synthetic oligonucleotide
  Sense strand starting at position 1569 of SEQ ID NO: 916627
ugagccaguuuaucauaaa

SEQ ID NO: 1171545 - RNA, 19 nt, Artificial Sequence
  Description of Artificial Sequence: Synthetic oligonucleotide
  Antisense strand to SEQ ID NO: 1171544
uuuaugauaaacuggcuca

SEQ ID NO: 1171546 - RNA, 19 nt, Artificial Sequence
  Description of Artificial Sequence: Synthetic oligonucleotide
  Sense strand starting at position 2002 of SEQ ID NO: 916627
gaaguacuacuuggauacu

SEQ ID NO: 1171547 - RNA, 19 nt, Artificial Sequence
  Description of Artificial Sequence: Synthetic oligonucleotide
  Antisense strand to SEQ ID NO: 1171546
aguauccaaguaguacuuc

SEQ ID NO: 1171548 - RNA, 19 nt, Artificial Sequence
  Description of Artificial Sequence: Synthetic oligonucleotide
  Sense strand starting at position 2027 of SEQ ID NO: 916627
uuuagucuagugggaaauu

SEQ ID NO: 1171549 - RNA, 19 nt, Artificial Sequence
  Description of Artificial Sequence: Synthetic oligonucleotide
  Antisense strand to SEQ ID NO: 1171548
aauuucccacuagacuaaa

SEQ ID NO: 1171550 - RNA, 19 nt, Artificial Sequence
  Description of Artificial Sequence: Synthetic oligonucleotide
  Sense strand starting at position 2185 of SEQ ID NO: 916627
ggcccagaggagugaaaua

SEQ ID NO: 1171551 - RNA, 19 nt, Artificial Sequence
  Description of Artificial Sequence: Synthetic oligonucleotide
  Antisense strand to SEQ ID NO: 1171550
uauuucacuccucugggcc

SEQ ID NO: 1171552 - RNA, 19 nt, Artificial Sequence
  Description of Artificial Sequence: Synthetic oligonucleotide
  Sense strand starting at position 2316 of SEQ ID NO: 916627
aguuaaucagaauguagga

SEQ ID NO: 1171553 - RNA, 19 nt, Artificial Sequence
  Description of Artificial Sequence: Synthetic oligonucleotide
  Antisense strand to SEQ ID NO: 1171552
uccuacauucugauuaacu

SEQ ID NO: 1171554 - RNA, 19 nt, Artificial Sequence
  Description of Artificial Sequence: Synthetic oligonucleotide
  Sense strand starting at position 2344 of SEQ ID NO: 916627
aggcuuuggaaguaauucu

SEQ ID NO: 1171555 - RNA, 19 nt, Artificial Sequence
  Description of Artificial Sequence: Synthetic oligonucleotide
  Antisense strand to SEQ ID NO: 1171554
agaauuacuuccaaagccu

SEQ ID NO: 1171556 - RNA, 19 nt, Artificial Sequence
  Description of Artificial Sequence: Synthetic oligonucleotide
  Sense strand starting at position 2372 of SEQ ID NO: 916627
aguagauguaaagggcuua

SEQ ID NO: 1171557 - RNA, 19 nt, Artificial Sequence
  Description of Artificial Sequence: Synthetic oligonucleotide
  Antisense strand to SEQ ID NO: 1171556
uaagcccuuuacaucuacu

SEQ ID NO: 1171558 - RNA, 19 nt, Artificial Sequence
  Description of Artificial Sequence: Synthetic oligonucleotide
  Sense strand starting at position 2373 of SEQ ID NO: 916627
guagauguaaagggcuuaa

SEQ ID NO: 1171559 - RNA, 19 nt, Artificial Sequence
  Description of Artificial Sequence: Synthetic oligonucleotide
  Antisense strand to SEQ ID NO: 1171558
uuaagcccuuuacaucuac

SEQ ID NO: 1171560 - RNA, 19 nt, Artificial Sequence
  Description of Artificial Sequence: Synthetic oligonucleotide
  Sense strand starting at position 2413 of SEQ ID NO: 916627
gaguguugugcgcugcaca

SEQ ID NO: 1171561 - RNA, 19 nt, Artificial Sequence
  Description of Artificial Sequence: Synthetic oligonucleotide
  Antisense strand to SEQ ID NO: 1171560
ugugcagcgcacaacacuc

SEQ ID NO: 1171562 - RNA, 19 nt, Artificial Sequence
  Description of Artificial Sequence: Synthetic oligonucleotide
  Sense strand starting at position 2451 of SEQ ID NO: 916627
ucauguacacuauaaugua

SEQ ID NO: 1171563 - RNA, 19 nt, Artificial Sequence
  Description of Artificial Sequence: Synthetic oligonucleotide
  Antisense strand to SEQ ID NO: 1171562
uacauuauaguguacauga

SEQ ID NO: 1171564 - RNA, 19 nt, Artificial Sequence
  Description of Artificial Sequence: Synthetic oligonucleotide
  Sense strand starting at position 2467 of SEQ ID NO: 916627
guaaauggcucuccuuaga

SEQ ID NO: 1171565 - RNA, 19 nt, Artificial Sequence
  Description of Artificial Sequence: Synthetic oligonucleotide
  Antisense strand to SEQ ID NO: 1171564
ucuaaggagagccauuuac

SEQ ID NO: 1171566 - RNA, 19 nt, Artificial Sequence
  Description of Artificial Sequence: Synthetic oligonucleotide
  Sense strand starting at position 2844 of SEQ ID NO: 916627
ucacaucaccugggaaacu

SEQ ID NO: 1171567 - RNA, 19 nt, Artificial Sequence
  Description of Artificial Sequence: Synthetic oligonucleotide
  Antisense strand to SEQ ID NO: 1171566
aguuucccaggugauguga

SEQ ID NO: 1171568 - RNA, 19 nt, Artificial Sequence
  Description of Artificial Sequence: Synthetic oligonucleotide
  Sense strand starting at position 2948 of SEQ ID NO: 916627
acugcuaguccauaggaau

SEQ ID NO: 1171569 - RNA, 19 nt, Artificial Sequence
  Description of Artificial Sequence: Synthetic oligonucleotide
  Antisense strand to SEQ ID NO: 1171568
auuccuauggacuagcagu

SEQ ID NO: 1171570 - RNA, 19 nt, Artificial Sequence
  Description of Artificial Sequence: Synthetic oligonucleotide
  Sense strand starting at position 2999 of SEQ ID NO: 916627
ugacaauucuagucuguac

SEQ ID NO: 1171571 - RNA, 19 nt, Artificial Sequence
  Description of Artificial Sequence: Synthetic oligonucleotide
  Antisense strand to SEQ ID NO: 1171570
guacagacuagaauuguca

SEQ ID NO: 1171572 - RNA, 19 nt, Artificial Sequence
  Description of Artificial Sequence: Synthetic oligonucleotide
  Sense strand starting at position 3305 of SEQ ID NO: 916627
uuugaauggcuagaaaugu

SEQ ID NO: 1171573 - RNA, 19 nt, Artificial Sequence
  Description of Artificial Sequence: Synthetic oligonucleotide
  Antisense strand to SEQ ID NO: 1171572
acauuucuagccauucaaa

SEQ ID NO: 1171574 - RNA, 19 nt, Artificial Sequence
  Description of Artificial Sequence: Synthetic oligonucleotide
  Sense strand starting at position 3728 of SEQ ID NO: 916627
ccguguugauaacuuaaga

SEQ ID NO: 1171575 - RNA, 19 nt, Artificial Sequence
  Description of Artificial Sequence: Synthetic oligonucleotide
  Antisense strand to SEQ ID NO: 1171574
ucuuaaguuaucaacacgg

SEQ ID NO: 1171576 - RNA, 19 nt, Artificial Sequence
  Description of Artificial Sequence: Synthetic oligonucleotide
  Sense strand starting at position 3817 of SEQ ID NO: 916627
cugggacacuguuucuaga

SEQ ID NO: 1171577 - RNA, 19 nt, Artificial Sequence
  Description of Artificial Sequence: Synthetic oligonucleotide
  Antisense strand to SEQ ID NO: 1171576
ucuagaaacagugucccag

SEQ ID NO: 1171578 - RNA, 19 nt, Artificial Sequence
  Description of Artificial Sequence: Synthetic oligonucleotide
  Sense strand starting at position 3819 of SEQ ID NO: 916627
gggacacuguuucuagaca

SEQ ID NO: 1171579 - RNA, 19 nt, Artificial Sequence
  Description of Artificial Sequence: Synthetic oligonucleotide
  Antisense strand to SEQ ID NO: 1171578
ugucuagaaacaguguccc

SEQ ID NO: 1171580 - RNA, 19 nt, Artificial Sequence
  Description of Artificial Sequence: Synthetic oligonucleotide
  Sense strand starting at position 3971 of SEQ ID NO: 916627
ccauaaauacguuagugaa

SEQ ID NO: 1171581 - RNA, 19 nt, Artificial Sequence
  Description of Artificial Sequence: Synthetic oligonucleotide
  Antisense strand to SEQ ID NO: 1171580
uucacuaacguauuuaugg

SEQ ID NO: 1171582 - RNA, 19 nt, Artificial Sequence
  Description of Artificial Sequence: Synthetic oligonucleotide
  Sense strand starting at position 75 of SEQ ID NO: 916628
auauaaguagagugguaca

SEQ ID NO: 1171583 - RNA, 19 nt, Artificial Sequence
  Description of Artificial Sequence: Synthetic oligonucleotide
  Antisense strand to SEQ ID NO: 1171582
uguaccacucuacuuauau

SEQ ID NO: 1171584 - RNA, 19 nt, Artificial Sequence
  Description of Artificial Sequence: Synthetic oligonucleotide
  Sense strand starting at position 106 of SEQ ID NO: 916628
agggcaaauauaugcuaga

SEQ ID NO: 1171585 - RNA, 19 nt, Artificial Sequence
  Description of Artificial Sequence: Synthetic oligonucleotide
  Antisense strand to SEQ ID NO: 1171584
ucuagcauauauuugcccu

SEQ ID NO: 1171586 - RNA, 19 nt, Artificial Sequence
  Description of Artificial Sequence: Synthetic oligonucleotide
  Sense strand starting at position 153 of SEQ ID NO: 916628
acaaaucugugguuaugac

SEQ ID NO: 1171587 - RNA, 19 nt, Artificial Sequence
  Description of Artificial Sequence: Synthetic oligonucleotide
  Antisense strand to SEQ ID NO: 1171586
gucauaaccacagauuugu

SEQ ID NO: 1171588 - RNA, 19 nt, Artificial Sequence
  Description of Artificial Sequence: Synthetic oligonucleotide
  Sense strand starting at position 154 of SEQ ID NO: 916628
caaaucugugguuaugaca

SEQ ID NO: 1171589 - RNA, 19 nt, Artificial Sequence
  Description of Artificial Sequence: Synthetic oligonucleotide
  Antisense strand to SEQ ID NO: 1171588
ugucauaaccacagauuug

SEQ ID NO: 1171590 - RNA, 19 nt, Artificial Sequence
  Description of Artificial Sequence: Synthetic oligonucleotide
  Sense strand starting at position 332 of SEQ ID NO: 916628
uuaagaagcuuuccuugaa

SEQ ID NO: 1171591 - RNA, 19 nt, Artificial Sequence
  Description of Artificial Sequence: Synthetic oligonucleotide
  Antisense strand to SEQ ID NO: 1171590
uucaaggaaagcuucuuaa

SEQ ID NO: 1171592 - RNA, 19 nt, Artificial Sequence
  Description of Artificial Sequence: Synthetic oligonucleotide
  Sense strand starting at position 335 of SEQ ID NO: 916628
agaagcuuuccuugaauuc

SEQ ID NO: 1171593 - RNA, 19 nt, Artificial Sequence
  Description of Artificial Sequence: Synthetic oligonucleotide
  Antisense strand to SEQ ID NO: 1171592
gaauucaaggaaagcuucu

SEQ ID NO: 1171594 - RNA, 19 nt, Artificial Sequence
  Description of Artificial Sequence: Synthetic oligonucleotide
  Sense strand starting at position 562 of SEQ ID NO: 916628
ccagguuaaucccuugauc

SEQ ID NO: 1171595 - RNA, 19 nt, Artificial Sequence
  Description of Artificial Sequence: Synthetic oligonucleotide
  Antisense strand to SEQ ID NO: 1171594
gaucaagggauuaaccugg

SEQ ID NO: 1171596 - RNA, 19 nt, Artificial Sequence
  Description of Artificial Sequence: Synthetic oligonucleotide
  Sense strand starting at position 565 of SEQ ID NO: 916628
gguuaaucccuugauccua

SEQ ID NO: 1171597 - RNA, 19 nt, Artificial Sequence
  Description of Artificial Sequence: Synthetic oligonucleotide
  Antisense strand to SEQ ID NO: 1171596
uaggaucaagggauuaacc

SEQ ID NO: 1171598 - RNA, 19 nt, Artificial Sequence
  Description of Artificial Sequence: Synthetic oligonucleotide
  Sense strand starting at position 580 of SEQ ID NO: 916628
ccuaauggugcucaggauu

SEQ ID NO: 1171599 - RNA, 19 nt, Artificial Sequence
  Description of Artificial Sequence: Synthetic oligonucleotide
  Antisense strand to SEQ ID NO: 1171598
aauccugagcaccauuagg

SEQ ID NO: 1171600 - RNA, 19 nt, Artificial Sequence
  Description of Artificial Sequence: Synthetic oligonucleotide
  Sense strand starting at position 610 of SEQ ID NO: 916628
accggaacagucgacuaau

SEQ ID NO: 1171601 - RNA, 19 nt, Artificial Sequence
  Description of Artificial Sequence: Synthetic oligonucleotide
  Antisense strand to SEQ ID NO: 1171600
auuagucgacuguuccggu

SEQ ID NO: 1171602 - RNA, 19 nt, Artificial Sequence
  Description of Artificial Sequence: Synthetic oligonucleotide
  Sense strand starting at position 620 of SEQ ID NO: 916628
ucgacuaaucccuaugcag

SEQ ID NO: 1171603 - RNA, 19 nt, Artificial Sequence
  Description of Artificial Sequence: Synthetic oligonucleotide
  Antisense strand to SEQ ID NO: 1171602
cugcauagggauuagucga

SEQ ID NO: 1171604 - RNA, 19 nt, Artificial Sequence
  Description of Artificial Sequence: Synthetic oligonucleotide
  Sense strand starting at position 690 of SEQ ID NO: 916628
guagaacaccucugaccuu

SEQ ID NO: 1171605 - RNA, 19 nt, Artificial Sequence
  Description of Artificial Sequence: Synthetic oligonucleotide
  Antisense strand to SEQ ID NO: 1171604
aaggucagagguguucuac

SEQ ID NO: 1171606 - RNA, 19 nt, Artificial Sequence
  Description of Artificial Sequence: Synthetic oligonucleotide
  Sense strand starting at position 728 of SEQ ID NO: 916628
uccuguuguccauaaacau

SEQ ID NO: 1171607 - RNA, 19 nt, Artificial Sequence
  Description of Artificial Sequence: Synthetic oligonucleotide
  Antisense strand to SEQ ID NO: 1171606
auguuuauggacaacagga

SEQ ID NO: 1171608 - RNA, 19 nt, Artificial Sequence
  Description of Artificial Sequence: Synthetic oligonucleotide
  Sense strand starting at position 802 of SEQ ID NO: 916628
ggagcugaguaaccuuaaa

SEQ ID NO: 1171609 - RNA, 19 nt, Artificial Sequence
  Description of Artificial Sequence: Synthetic oligonucleotide
  Antisense strand to SEQ ID NO: 1171608
uuuaagguuacucagcucc

SEQ ID NO: 1171610 - RNA, 19 nt, Artificial Sequence
  Description of Artificial Sequence: Synthetic oligonucleotide
  Sense strand starting at position 1110 of SEQ ID NO: 916628
gcucuauauagugacagag

SEQ ID NO: 1171611 - RNA, 19 nt, Artificial Sequence
  Description of Artificial Sequence: Synthetic oligonucleotide
  Antisense strand to SEQ ID NO: 1171610
cucugucacuauauagagc

SEQ ID NO: 1171612 - RNA, 19 nt, Artificial Sequence
  Description of Artificial Sequence: Synthetic oligonucleotide
  Sense strand starting at position 1246 of SEQ ID NO: 916628
uccauuguugguggacaaa

SEQ ID NO: 1171613 - RNA, 19 nt, Artificial Sequence
  Description of Artificial Sequence: Synthetic oligonucleotide
  Antisense strand to SEQ ID NO: 1171612
uuuguccaccaacaaugga

SEQ ID NO: 1171614 - RNA, 19 nt, Artificial Sequence
  Description of Artificial Sequence: Synthetic oligonucleotide
  Sense strand starting at position 1562 of SEQ ID NO: 916628
aggcacauccugggaguaa

SEQ ID NO: 1171615 - RNA, 19 nt, Artificial Sequence
  Description of Artificial Sequence: Synthetic oligonucleotide
  Antisense strand to SEQ ID NO: 1171614
uuacucccaggaugugccu

SEQ ID NO: 1171616 - RNA, 19 nt, Artificial Sequence
  Description of Artificial Sequence: Synthetic oligonucleotide
  Sense strand starting at position 1762 of SEQ ID NO: 916628
caagaaggucugcauguau

SEQ ID NO: 1171617 - RNA, 19 nt, Artificial Sequence
  Description of Artificial Sequence: Synthetic oligonucleotide
  Antisense strand to SEQ ID NO: 1171616
auacaugcagaccuucuug

SEQ ID NO: 1171618 - RNA, 19 nt, Artificial Sequence
  Description of Artificial Sequence: Synthetic oligonucleotide
  Sense strand starting at position 2048 of SEQ ID NO: 916628
ccgucauaagcucagaaca

SEQ ID NO: 1171619 - RNA, 19 nt, Artificial Sequence
  Description of Artificial Sequence: Synthetic oligonucleotide
  Antisense strand to SEQ ID NO: 1171618
uguucugagcuuaugacgg

SEQ ID NO: 1171620 - RNA, 19 nt, Artificial Sequence
  Description of Artificial Sequence: Synthetic oligonucleotide
  Sense strand starting at position 2211 of SEQ ID NO: 916628
aguguugauauccaagggu

SEQ ID NO: 1171621 - RNA, 19 nt, Artificial Sequence
  Description of Artificial Sequence: Synthetic oligonucleotide
  Antisense strand to SEQ ID NO: 1171620
acccuuggauaucaacacu

SEQ ID NO: 1171622 - RNA, 19 nt, Artificial Sequence
  Description of Artificial Sequence: Synthetic oligonucleotide
  Sense strand starting at position 2214 of SEQ ID NO: 916628
guugauauccaaggguaaa

SEQ ID NO: 1171623 - RNA, 19 nt, Artificial Sequence
  Description of Artificial Sequence: Synthetic oligonucleotide
  Antisense strand to SEQ ID NO: 1171622
uuuacccuuggauaucaac

SEQ ID NO: 1171624 - RNA, 19 nt, Artificial Sequence
  Description of Artificial Sequence: Synthetic oligonucleotide
  Sense strand starting at position 2486 of SEQ ID NO: 916628
acugguauugugcgaauuu

SEQ ID NO: 1171625 - RNA, 19 nt, Artificial Sequence
  Description of Artificial Sequence: Synthetic oligonucleotide
  Antisense strand to SEQ ID NO: 1171624
aaauucgcacaauaccagu

SEQ ID NO: 1171626 - RNA, 19 nt, Artificial Sequence
  Description of Artificial Sequence: Synthetic oligonucleotide
  Sense strand starting at position 2498 of SEQ ID NO: 916628
cgaauuuccucagagagau

SEQ ID NO: 1171627 - RNA, 19 nt, Artificial Sequence
  Description of Artificial Sequence: Synthetic oligonucleotide
  Antisense strand to SEQ ID NO: 1171626
aucucucugaggaaauucg

SEQ ID NO: 1171628 - RNA, 19 nt, Artificial Sequence
  Description of Artificial Sequence: Synthetic oligonucleotide
  Sense strand starting at position 2587 of SEQ ID NO: 916628
ggacacuuauuugagaauc

SEQ ID NO: 1171629 - RNA, 19 nt, Artificial Sequence
  Description of Artificial Sequence: Synthetic oligonucleotide
  Antisense strand to SEQ ID NO: 1171628
gauucucaaauaagugucc

SEQ ID NO: 1171630 - RNA, 19 nt, Artificial Sequence
  Description of Artificial Sequence: Synthetic oligonucleotide
  Sense strand starting at position 2589 of SEQ ID NO: 916628
acacuuauuugagaaucga

SEQ ID NO: 1171631 - RNA, 19 nt, Artificial Sequence
  Description of Artificial Sequence: Synthetic oligonucleotide
  Antisense strand to SEQ ID NO: 1171630
ucgauucucaaauaagugu

SEQ ID NO: 1171632 - RNA, 19 nt, Artificial Sequence
  Description of Artificial Sequence: Synthetic oligonucleotide
  Sense strand starting at position 2597 of SEQ ID NO: 916628
uugagaaucgauugcugga

SEQ ID NO: 1171633 - RNA, 19 nt, Artificial Sequence
  Description of Artificial Sequence: Synthetic oligonucleotide
  Antisense strand to SEQ ID NO: 1171632
uccagcaaucgauucucaa

SEQ ID NO: 1171634 - RNA, 19 nt, Artificial Sequence
  Description of Artificial Sequence: Synthetic oligonucleotide
  Sense strand starting at position 2611 of SEQ ID NO: 916628
cuggaucuuccguaccuaa

SEQ ID NO: 1171635 - RNA, 19 nt, Artificial Sequence
  Description of Artificial Sequence: Synthetic oligonucleotide
  Antisense strand to SEQ ID NO: 1171634
uuagguacggaagauccag

SEQ ID NO: 1171636 - RNA, 19 nt, Artificial Sequence
  Description of Artificial Sequence: Synthetic oligonucleotide
  Sense strand starting at position 2762 of SEQ ID NO: 916628
cccauaugguaguuaucag

SEQ ID NO: 1171637 - RNA, 19 nt, Artificial Sequence
  Description of Artificial Sequence: Synthetic oligonucleotide
  Antisense strand to SEQ ID NO: 1171636
cugauaacuaccauauggg

SEQ ID NO: 1171638 - RNA, 19 nt, Artificial Sequence
  Description of Artificial Sequence: Synthetic oligonucleotide
  Sense strand starting at position 2763 of SEQ ID NO: 916628
ccauaugguaguuaucagu

SEQ ID NO: 1171639 - RNA, 19 nt, Artificial Sequence
  Description of Artificial Sequence: Synthetic oligonucleotide
  Antisense strand to SEQ ID NO: 1171638
acugauaacuaccauaugg

SEQ ID NO: 1171640 - RNA, 19 nt, Artificial Sequence
  Description of Artificial Sequence: Synthetic oligonucleotide
  Sense strand starting at position 2942 of SEQ ID NO: 916628
gucuguuugcuggucacuu

SEQ ID NO: 1171641 - RNA, 19 nt, Artificial Sequence
  Description of Artificial Sequence: Synthetic oligonucleotide
  Antisense strand to SEQ ID NO: 1171640
aagugaccagcaaacagac

SEQ ID NO: 1171642 - RNA, 19 nt, Artificial Sequence
  Description of Artificial Sequence: Synthetic oligonucleotide
  Sense strand starting at position 2963 of SEQ ID NO: 916628
augccuugccagugaauuu

SEQ ID NO: 1171643 - RNA, 19 nt, Artificial Sequence
  Description of Artificial Sequence: Synthetic oligonucleotide
  Antisense strand to SEQ ID NO: 1171642
aaauucacuggcaaggcau

SEQ ID NO: 1171644 - RNA, 19 nt, Artificial Sequence
  Description of Artificial Sequence: Synthetic oligonucleotide
  Sense strand starting at position 3394 of SEQ ID NO: 916628
cugagugaauguucuagaa

SEQ ID NO: 1171645 - RNA, 19 nt, Artificial Sequence
  Description of Artificial Sequence: Synthetic oligonucleotide
  Antisense strand to SEQ ID NO: 1171644
uucuagaacauucacucag

SEQ ID NO: 1171646 - RNA, 19 nt, Artificial Sequence
  Description of Artificial Sequence: Synthetic oligonucleotide
  Sense strand starting at position 3398 of SEQ ID NO: 916628
gugaauguucuagaauguu

SEQ ID NO: 1171647 - RNA, 19 nt, Artificial Sequence
  Description of Artificial Sequence: Synthetic oligonucleotide
  Antisense strand to SEQ ID NO: 1171646
aacauucuagaacauucac

SEQ ID NO: 1171648 - RNA, 19 nt, Artificial Sequence
  Description of Artificial Sequence: Synthetic oligonucleotide
  Sense strand starting at position 3558 of SEQ ID NO: 916628
aguacuguucuagacccau

SEQ ID NO: 1171649 - RNA, 19 nt, Artificial Sequence
  Description of Artificial Sequence: Synthetic oligonucleotide
  Antisense strand to SEQ ID NO: 1171648
augggucuagaacaguacu

SEQ ID NO: 1171650 - RNA, 19 nt, Artificial Sequence
  Description of Artificial Sequence: Synthetic oligonucleotide
  Sense strand starting at position 3564 of SEQ ID NO: 916628
guucuagacccauaugcaa

SEQ ID NO: 1171651 - RNA, 19 nt, Artificial Sequence
  Description of Artificial Sequence: Synthetic oligonucleotide
  Antisense strand to SEQ ID NO: 1171650
uugcauaugggucuagaac

SEQ ID NO: 1171652 - RNA, 19 nt, Artificial Sequence
  Description of Artificial Sequence: Synthetic oligonucleotide
  Sense strand starting at position 3596 of SEQ ID NO: 916628
acuuaucugcuauauguca

SEQ ID NO: 1171653 - RNA, 19 nt, Artificial Sequence
  Description of Artificial Sequence: Synthetic oligonucleotide
  Antisense strand to SEQ ID NO: 1171652
ugacauauagcagauaagu

SEQ ID NO: 1171654 - RNA, 19 nt, Artificial Sequence
  Description of Artificial Sequence: Synthetic oligonucleotide
  Sense strand starting at position 3764 of SEQ ID NO: 916628
gucuucuuccuccaaagga

SEQ ID NO: 1171655 - RNA, 19 nt, Artificial Sequence
  Description of Artificial Sequence: Synthetic oligonucleotide
  Antisense strand to SEQ ID NO: 1171654
uccuuuggaggaagaagac

SEQ ID NO: 1171656 - RNA, 19 nt, Artificial Sequence
  Description of Artificial Sequence: Synthetic oligonucleotide
  Sense strand starting at position 3819 of SEQ ID NO: 916628
ggagaaagucuagguguau

SEQ ID NO: 1171657 - RNA, 19 nt, Artificial Sequence
  Description of Artificial Sequence: Synthetic oligonucleotide
  Antisense strand to SEQ ID NO: 1171656
auacaccuagacuuucucc

SEQ ID NO: 1171658 - RNA, 19 nt, Artificial Sequence
  Description of Artificial Sequence: Synthetic oligonucleotide
  Sense strand starting at position 3820 of SEQ ID NO: 916628
gagaaagucuagguguaua

SEQ ID NO: 1171659 - RNA, 19 nt, Artificial Sequence
  Description of Artificial Sequence: Synthetic oligonucleotide
  Antisense strand to SEQ ID NO: 1171658
uauacaccuagacuuucuc

SEQ ID NO: 1171660 - RNA, 19 nt, Artificial Sequence
  Description of Artificial Sequence: Synthetic oligonucleotide
  Sense strand starting at position 3823 of SEQ ID NO: 916628
aaagucuagguguauaguu

SEQ ID NO: 1171661 - RNA, 19 nt, Artificial Sequence
  Description of Artificial Sequence: Synthetic oligonucleotide
  Antisense strand to SEQ ID NO: 1171660
aacuauacaccuagacuuu

SEQ ID NO: 1171662 - RNA, 19 nt, Artificial Sequence
  Description of Artificial Sequence: Synthetic oligonucleotide
  Sense strand starting at position 21 of SEQ ID NO: 916629
ugaaaccuggacugguaau

SEQ ID NO: 1171663 - RNA, 19 nt, Artificial Sequence
  Description of Artificial Sequence: Synthetic oligonucleotide
  Antisense strand to SEQ ID NO: 1171662
auuaccaguccagguuuca

SEQ ID NO: 1171664 - RNA, 19 nt, Artificial Sequence
  Description of Artificial Sequence: Synthetic oligonucleotide
  Sense strand starting at position 248 of SEQ ID NO: 916629
aaacucagugccugaguua

SEQ ID NO: 1171665 - RNA, 19 nt, Artificial Sequence
  Description of Artificial Sequence: Synthetic oligonucleotide
  Antisense strand to SEQ ID NO: 1171664
uaacucaggcacugaguuu

SEQ ID NO: 1171666 - RNA, 19 nt, Artificial Sequence
  Description of Artificial Sequence: Synthetic oligonucleotide
  Sense strand starting at position 294 of SEQ ID NO: 916629
augggaaucuuucuggguu

SEQ ID NO: 1171667 - RNA, 19 nt, Artificial Sequence
  Description of Artificial Sequence: Synthetic oligonucleotide
  Antisense strand to SEQ ID NO: 1171666
aacccagaaagauucccau

SEQ ID NO: 1171668 - RNA, 19 nt, Artificial Sequence
  Description of Artificial Sequence: Synthetic oligonucleotide
  Sense strand starting at position 481 of SEQ ID NO: 916629
caaagaggcuuguuuauuc

SEQ ID NO: 1171669 - RNA, 19 nt, Artificial Sequence
  Description of Artificial Sequence: Synthetic oligonucleotide
  Antisense strand to SEQ ID NO: 1171668
gaauaaacaagccucuuug

SEQ ID NO: 1171670 - RNA, 19 nt, Artificial Sequence
  Description of Artificial Sequence: Synthetic oligonucleotide
  Sense strand starting at position 490 of SEQ ID NO: 916629
uuguuuauucgguaugaaa

SEQ ID NO: 1171671 - RNA, 19 nt, Artificial Sequence
  Description of Artificial Sequence: Synthetic oligonucleotide
  Antisense strand to SEQ ID NO: 1171670
uuucauaccgaauaaacaa

SEQ ID NO: 1171672 - RNA, 19 nt, Artificial Sequence
  Description of Artificial Sequence: Synthetic oligonucleotide
  Sense strand starting at position 1109 of SEQ ID NO: 916629
aucgaaucuguuuaacucu

SEQ ID NO: 1171673 - RNA, 19 nt, Artificial Sequence
  Description of Artificial Sequence: Synthetic oligonucleotide
  Antisense strand to SEQ ID NO: 1171672
agaguuaaacagauucgau

SEQ ID NO: 1171674 - RNA, 19 nt, Artificial Sequence
  Description of Artificial Sequence: Synthetic oligonucleotide
  Sense strand starting at position 1174 of SEQ ID NO: 916629
gccaauccauucguaagau

SEQ ID NO: 1171675 - RNA, 19 nt, Artificial Sequence
  Description of Artificial Sequence: Synthetic oligonucleotide
  Antisense strand to SEQ ID NO: 1171674
aucuuacgaauggauuggc

SEQ ID NO: 1171676 - RNA, 19 nt, Artificial Sequence
  Description of Artificial Sequence: Synthetic oligonucleotide
  Sense strand starting at position 1186 of SEQ ID NO: 916629
guaagauaaugacaggaaa

SEQ ID NO: 1171677 - RNA, 19 nt, Artificial Sequence
  Description of Artificial Sequence: Synthetic oligonucleotide
  Antisense strand to SEQ ID NO: 1171676
uuuccugucauuaucuuac

SEQ ID NO: 1171678 - RNA, 19 nt, Artificial Sequence
  Description of Artificial Sequence: Synthetic oligonucleotide
  Sense strand starting at position 1205 of SEQ ID NO: 916629
guaugaucaggguguggau

SEQ ID NO: 1171679 - RNA, 19 nt, Artificial Sequence
  Description of Artificial Sequence: Synthetic oligonucleotide
  Antisense strand to SEQ ID NO: 1171678
auccacacccugaucauac

SEQ ID NO: 1171680 - RNA, 19 nt, Artificial Sequence
  Description of Artificial Sequence: Synthetic oligonucleotide
  Sense strand starting at position 2137 of SEQ ID NO: 916629
uuuguuuggcuugaaguuu

SEQ ID NO: 1171681 - RNA, 19 nt, Artificial Sequence
  Description of Artificial Sequence: Synthetic oligonucleotide
  Antisense strand to SEQ ID NO: 1171680
aaacuucaagccaaacaaa

SEQ ID NO: 1171682 - RNA, 19 nt, Artificial Sequence
  Description of Artificial Sequence: Synthetic oligonucleotide
  Sense strand starting at position 2175 of SEQ ID NO: 916629
ccugauuucgcccguauug

SEQ ID NO: 1171683 - RNA, 19 nt, Artificial Sequence
  Description of Artificial Sequence: Synthetic oligonucleotide
  Antisense strand to SEQ ID NO: 1171682
caauacgggcgaaaucagg

SEQ ID NO: 1171684 - RNA, 19 nt, Artificial Sequence
  Description of Artificial Sequence: Synthetic oligonucleotide
  Sense strand starting at position 2177 of SEQ ID NO: 916629
ugauuucgcccguauugac

SEQ ID NO: 1171685 - RNA, 19 nt, Artificial Sequence
  Description of Artificial Sequence: Synthetic oligonucleotide
  Antisense strand to SEQ ID NO: 1171684
gucaauacgggcgaaauca

SEQ ID NO: 1171686 - RNA, 19 nt, Artificial Sequence
  Description of Artificial Sequence: Synthetic oligonucleotide
  Sense strand starting at position 2184 of SEQ ID NO: 916629
gcccguauugacgcuaaua

SEQ ID NO: 1171687 - RNA, 19 nt, Artificial Sequence
  Description of Artificial Sequence: Synthetic oligonucleotide
  Antisense strand to SEQ ID NO: 1171686
uauuagcgucaauacgggc

SEQ ID NO: 1171688 - RNA, 19 nt, Artificial Sequence
  Description of Artificial Sequence: Synthetic oligonucleotide
  Sense strand starting at position 2186 of SEQ ID NO: 916629
ccguauugacgcuaauaga

SEQ ID NO: 1171689 - RNA, 19 nt, Artificial Sequence
  Description of Artificial Sequence: Synthetic oligonucleotide
  Antisense strand to SEQ ID NO: 1171688
ucuauuagcgucaauacgg

SEQ ID NO: 1171690 - RNA, 19 nt, Artificial Sequence
  Description of Artificial Sequence: Synthetic oligonucleotide
  Sense strand starting at position 2277 of SEQ ID NO: 916629
uuacaaugguccuugggaa

SEQ ID NO: 1171691 - RNA, 19 nt, Artificial Sequence
  Description of Artificial Sequence: Synthetic oligonucleotide
  Antisense strand to SEQ ID NO: 1171690
uucccaaggaccauuguaa

SEQ ID NO: 1171692 - RNA, 19 nt, Artificial Sequence
  Description of Artificial Sequence: Synthetic oligonucleotide
  Sense strand starting at position 2278 of SEQ ID NO: 916629
uacaaugguccuugggaac

SEQ ID NO: 1171693 - RNA, 19 nt, Artificial Sequence
  Description of Artificial Sequence: Synthetic oligonucleotide
  Antisense strand to SEQ ID NO: 1171692
guucccaaggaccauugua

SEQ ID NO: 1171694 - RNA, 19 nt, Artificial Sequence
  Description of Artificial Sequence: Synthetic oligonucleotide
  Sense strand starting at position 2292 of SEQ ID NO: 916629
ggaacacuguguucuccuu

SEQ ID NO: 1171695 - RNA, 19 nt, Artificial Sequence
  Description of Artificial Sequence: Synthetic oligonucleotide
  Antisense strand to SEQ ID NO: 1171694
aaggagaacacaguguucc

SEQ ID NO: 1171696 - RNA, 19 nt, Artificial Sequence
  Description of Artificial Sequence: Synthetic oligonucleotide
  Sense strand starting at position 2410 of SEQ ID NO: 916629
caauguaagcuucgggaga

SEQ ID NO: 1171697 - RNA, 19 nt, Artificial Sequence
  Description of Artificial Sequence: Synthetic oligonucleotide
  Antisense strand to SEQ ID NO: 1171696
ucucccgaagcuuacauug

SEQ ID NO: 1171698 - RNA, 19 nt, Artificial Sequence
  Description of Artificial Sequence: Synthetic oligonucleotide
  Sense strand starting at position 2484 of SEQ ID NO: 916629
ucgagucuaucuccaauau

SEQ ID NO: 1171699 - RNA, 19 nt, Artificial Sequence
  Description of Artificial Sequence: Synthetic oligonucleotide
  Antisense strand to SEQ ID NO: 1171698
auauuggagauagacucga

SEQ ID NO: 1171700 - RNA, 19 nt, Artificial Sequence
  Description of Artificial Sequence: Synthetic oligonucleotide
  Sense strand starting at position 2485 of SEQ ID NO: 916629
cgagucuaucuccaauaug

SEQ ID NO: 1171701 - RNA, 19 nt, Artificial Sequence
  Description of Artificial Sequence: Synthetic oligonucleotide
  Antisense strand to SEQ ID NO: 1171700
cauauuggagauagacucg

SEQ ID NO: 1171702 - RNA, 19 nt, Artificial Sequence
  Description of Artificial Sequence: Synthetic oligonucleotide
  Sense strand starting at position 2622 of SEQ ID NO: 916629
cuucucaaaccgugaucca

SEQ ID NO: 1171703 - RNA, 19 nt, Artificial Sequence
  Description of Artificial Sequence: Synthetic oligonucleotide
  Antisense strand to SEQ ID NO: 1171702
uggaucacgguuugagaag

SEQ ID NO: 1171704 - RNA, 19 nt, Artificial Sequence
  Description of Artificial Sequence: Synthetic oligonucleotide
  Sense strand starting at position 2625 of SEQ ID NO: 916629
cucaaaccgugauccagaa

SEQ ID NO: 1171705 - RNA, 19 nt, Artificial Sequence
  Description of Artificial Sequence: Synthetic oligonucleotide
  Antisense strand to SEQ ID NO: 1171704
uucuggaucacgguuugag

SEQ ID NO: 1171706 - RNA, 19 nt, Artificial Sequence
  Description of Artificial Sequence: Synthetic oligonucleotide
  Sense strand starting at position 2638 of SEQ ID NO: 916629
ccagaaaucaggugaguua

SEQ ID NO: 1171707 - RNA, 19 nt, Artificial Sequence
  Description of Artificial Sequence: Synthetic oligonucleotide
  Antisense strand to SEQ ID NO: 1171706
uaacucaccugauuucugg

SEQ ID NO: 1171708 - RNA, 19 nt, Artificial Sequence
  Description of Artificial Sequence: Synthetic oligonucleotide
  Sense strand starting at position 2767 of SEQ ID NO: 916629
gagugaggaagcugggauu

SEQ ID NO: 1171709 - RNA, 19 nt, Artificial Sequence
  Description of Artificial Sequence: Synthetic oligonucleotide
  Antisense strand to SEQ ID NO: 1171708
aaucccagcuuccucacuc

SEQ ID NO: 1171710 - RNA, 19 nt, Artificial Sequence
  Description of Artificial Sequence: Synthetic oligonucleotide
  Sense strand starting at position 3018 of SEQ ID NO: 916629
ccucaaauuguguagcaug

SEQ ID NO: 1171711 - RNA, 19 nt, Artificial Sequence
  Description of Artificial Sequence: Synthetic oligonucleotide
  Antisense strand to SEQ ID NO: 1171710
caugcuacacaauuugagg

SEQ ID NO: 1171712 - RNA, 19 nt, Artificial Sequence
  Description of Artificial Sequence: Synthetic oligonucleotide
  Sense strand starting at position 3023 of SEQ ID NO: 916629
aauuguguagcaugacaag

SEQ ID NO: 1171713 - RNA, 19 nt, Artificial Sequence
  Description of Artificial Sequence: Synthetic oligonucleotide
  Antisense strand to SEQ ID NO: 1171712
cuugucaugcuacacaauu

SEQ ID NO: 1171714 - RNA, 19 nt, Artificial Sequence
  Description of Artificial Sequence: Synthetic oligonucleotide
  Sense strand starting at position 3254 of SEQ ID NO: 916629
gcuuguaauucucuaugac

SEQ ID NO: 1171715 - RNA, 19 nt, Artificial Sequence
  Description of Artificial Sequence: Synthetic oligonucleotide
  Antisense strand to SEQ ID NO: 1171714
gucauagagaauuacaagc

SEQ ID NO: 1171716 - RNA, 19 nt, Artificial Sequence
  Description of Artificial Sequence: Synthetic oligonucleotide
  Sense strand starting at position 3351 of SEQ ID NO: 916629
agcaaagacuaauaauaga

SEQ ID NO: 1171717 - RNA, 19 nt, Artificial Sequence
  Description of Artificial Sequence: Synthetic oligonucleotide
  Antisense strand to SEQ ID NO: 1171716
ucuauuauuagucuuugcu

SEQ ID NO: 1171718 - RNA, 19 nt, Artificial Sequence
  Description of Artificial Sequence: Synthetic oligonucleotide
  Sense strand starting at position 3389 of SEQ ID NO: 916629
cuucuugcuguuugaaaga

SEQ ID NO: 1171719 - RNA, 19 nt, Artificial Sequence
  Description of Artificial Sequence: Synthetic oligonucleotide
  Antisense strand to SEQ ID NO: 1171718
ucuuucaaacagcaagaag

SEQ ID NO: 1171720 - RNA, 19 nt, Artificial Sequence
  Description of Artificial Sequence: Synthetic oligonucleotide
  Sense strand starting at position 3396 of SEQ ID NO: 916629
cuguuugaaagaugagauu

SEQ ID NO: 1171721 - RNA, 19 nt, Artificial Sequence
  Description of Artificial Sequence: Synthetic oligonucleotide
  Antisense strand to SEQ ID NO: 1171720
aaucucaucuuucaaacag

SEQ ID NO: 1171722 - RNA, 19 nt, Artificial Sequence
  Description of Artificial Sequence: Synthetic oligonucleotide
  Sense strand starting at position 3437 of SEQ ID NO: 916629
ugaugauuggugugcuaga

SEQ ID NO: 1171723 - RNA, 19 nt, Artificial Sequence
  Description of Artificial Sequence: Synthetic oligonucleotide
  Antisense strand to SEQ ID NO: 1171722
ucuagcacaccaaucauca

SEQ ID NO: 1171724 - RNA, 19 nt, Artificial Sequence
  Description of Artificial Sequence: Synthetic oligonucleotide
  Sense strand starting at position 3438 of SEQ ID NO: 916629
gaugauuggugugcuagau

SEQ ID NO: 1171725 - RNA, 19 nt, Artificial Sequence
  Description of Artificial Sequence: Synthetic oligonucleotide
  Antisense strand to SEQ ID NO: 1171724
aucuagcacaccaaucauc

SEQ ID NO: 1171726 - RNA, 19 nt, Artificial Sequence
  Description of Artificial Sequence: Synthetic oligonucleotide
  Sense strand starting at position 3448 of SEQ ID NO: 916629
gugcuagauguuugauaug

SEQ ID NO: 1171727 - RNA, 19 nt, Artificial Sequence
  Description of Artificial Sequence: Synthetic oligonucleotide
  Antisense strand to SEQ ID NO: 1171726
cauaucaaacaucuagcac

SEQ ID NO: 1171728 - RNA, 19 nt, Artificial Sequence
  Description of Artificial Sequence: Synthetic oligonucleotide
  Sense strand starting at position 3576 of SEQ ID NO: 916629
cgaccugucuuucuacaaa

SEQ ID NO: 1171729 - RNA, 19 nt, Artificial Sequence
  Description of Artificial Sequence: Synthetic oligonucleotide
  Antisense strand to SEQ ID NO: 1171728
uuuguagaaagacaggucg

SEQ ID NO: 1171730 - RNA, 19 nt, Artificial Sequence
  Description of Artificial Sequence: Synthetic oligonucleotide
  Sense strand starting at position 3663 of SEQ ID NO: 916629
uugugaauugcauaaacug

SEQ ID NO: 1171731 - RNA, 19 nt, Artificial Sequence
  Description of Artificial Sequence: Synthetic oligonucleotide
  Antisense strand to SEQ ID NO: 1171730
caguuuaugcaauucacaa

SEQ ID NO: 1171732 - RNA, 19 nt, Artificial Sequence
  Description of Artificial Sequence: Synthetic oligonucleotide
  Sense strand starting at position 3710 of SEQ ID NO: 916629
uacuucugggcaggagaaa

SEQ ID NO: 1171733 - RNA, 19 nt, Artificial Sequence
  Description of Artificial Sequence: Synthetic oligonucleotide
  Antisense strand to SEQ ID NO: 1171732
uuucuccugcccagaagua

SEQ ID NO: 1171734 - RNA, 19 nt, Artificial Sequence
  Description of Artificial Sequence: Synthetic oligonucleotide
  Sense strand starting at position 3809 of SEQ ID NO: 916629
auagcuauagcuugacauu

SEQ ID NO: 1171735 - RNA, 19 nt, Artificial Sequence
  Description of Artificial Sequence: Synthetic oligonucleotide
  Antisense strand to SEQ ID NO: 1171734
aaugucaagcuauagcuau

SEQ ID NO: 1171736 - RNA, 19 nt, Artificial Sequence
  Description of Artificial Sequence: Synthetic oligonucleotide
  Sense strand starting at position 3921 of SEQ ID NO: 916629
cuguuaggaccaugagacu

SEQ ID NO: 1171737 - RNA, 19 nt, Artificial Sequence
  Description of Artificial Sequence: Synthetic oligonucleotide
  Antisense strand to SEQ ID NO: 1171736
agucucaugguccuaacag

SEQ ID NO: 1171738 - RNA, 19 nt, Artificial Sequence
  Description of Artificial Sequence: Synthetic oligonucleotide
  Sense strand starting at position 3967 of SEQ ID NO: 916629
auaugauauccuugguaua

SEQ ID NO: 1171739 - RNA, 19 nt, Artificial Sequence
  Description of Artificial Sequence: Synthetic oligonucleotide
  Antisense strand to SEQ ID NO: 1171738
uauaccaaggauaucauau

SEQ ID NO: 1171740 - RNA, 19 nt, Artificial Sequence
  Description of Artificial Sequence: Synthetic oligonucleotide
  Sense strand starting at position 3978 of SEQ ID NO: 916629
uugguauacccaugcaauu

SEQ ID NO: 1171741 - RNA, 19 nt, Artificial Sequence
  Description of Artificial Sequence: Synthetic oligonucleotide
  Antisense strand to SEQ ID NO: 1171740
aauugcauggguauaccaa

SEQ ID NO: 1171742 - RNA, 19 nt, Artificial Sequence
  Description of Artificial Sequence: Synthetic oligonucleotide
  Sense strand starting at position 48 of SEQ ID NO: 916630
gagcauggcuuaucuauuu

SEQ ID NO: 1171743 - RNA, 19 nt, Artificial Sequence
  Description of Artificial Sequence: Synthetic oligonucleotide
  Antisense strand to SEQ ID NO: 1171742
aaauagauaagccaugcuc

SEQ ID NO: 1171744 - RNA, 19 nt, Artificial Sequence
  Description of Artificial Sequence: Synthetic oligonucleotide
  Sense strand starting at position 181 of SEQ ID NO: 916630
ccugcuggauuucuuagua

SEQ ID NO: 1171745 - RNA, 19 nt, Artificial Sequence
  Description of Artificial Sequence: Synthetic oligonucleotide
  Antisense strand to SEQ ID NO: 1171744
uacuaagaaauccagcagg

SEQ ID NO: 1171746 - RNA, 19 nt, Artificial Sequence
  Description of Artificial Sequence: Synthetic oligonucleotide
  Sense strand starting at position 186 of SEQ ID NO: 916630
uggauuucuuaguagaaua

SEQ ID NO: 1171747 - RNA, 19 nt, Artificial Sequence
  Description of Artificial Sequence: Synthetic oligonucleotide
  Antisense strand to SEQ ID NO: 1171746
uauucuacuaagaaaucca

SEQ ID NO: 1171748 - RNA, 19 nt, Artificial Sequence
  Description of Artificial Sequence: Synthetic oligonucleotide
  Sense strand starting at position 210 of SEQ ID NO: 916630
agcuuaaccuaggcauaau

SEQ ID NO: 1171749 - RNA, 19 nt, Artificial Sequence
  Description of Artificial Sequence: Synthetic oligonucleotide
  Antisense strand to SEQ ID NO: 1171748
auuaugccuagguuaagcu

SEQ ID NO: 1171750 - RNA, 19 nt, Artificial Sequence
  Description of Artificial Sequence: Synthetic oligonucleotide
  Sense strand starting at position 429 of SEQ ID NO: 916630
agagcucaucuaggaaaug

SEQ ID NO: 1171751 - RNA, 19 nt, Artificial Sequence
  Description of Artificial Sequence: Synthetic oligonucleotide
  Antisense strand to SEQ ID NO: 1171750
cauuuccuagaugagcucu

SEQ ID NO: 1171752 - RNA, 19 nt, Artificial Sequence
  Description of Artificial Sequence: Synthetic oligonucleotide
  Sense strand starting at position 541 of SEQ ID NO: 916630
ccugucuauggugauaaag

SEQ ID NO: 1171753 - RNA, 19 nt, Artificial Sequence
  Description of Artificial Sequence: Synthetic oligonucleotide
  Antisense strand to SEQ ID NO: 1171752
cuuuaucaccauagacagg

SEQ ID NO: 1171754 - RNA, 19 nt, Artificial Sequence
  Description of Artificial Sequence: Synthetic oligonucleotide
  Sense strand starting at position 611 of SEQ ID NO: 916630
augagccucugaucacauu

SEQ ID NO: 1171755 - RNA, 19 nt, Artificial Sequence
  Description of Artificial Sequence: Synthetic oligonucleotide
  Antisense strand to SEQ ID NO: 1171754
aaugugaucagaggcucau

SEQ ID NO: 1171756 - RNA, 19 nt, Artificial Sequence
  Description of Artificial Sequence: Synthetic oligonucleotide
  Sense strand starting at position 612 of SEQ ID NO: 916630
ugagccucugaucacauua

SEQ ID NO: 1171757 - RNA, 19 nt, Artificial Sequence
  Description of Artificial Sequence: Synthetic oligonucleotide
  Antisense strand to SEQ ID NO: 1171756
uaaugugaucagaggcuca

SEQ ID NO: 1171758 - RNA, 19 nt, Artificial Sequence
  Description of Artificial Sequence: Synthetic oligonucleotide
  Sense strand starting at position 707 of SEQ ID NO: 916630
ugugaaaugaaucacguca

SEQ ID NO: 1171759 - RNA, 19 nt, Artificial Sequence
  Description of Artificial Sequence: Synthetic oligonucleotide
  Antisense strand to SEQ ID NO: 1171758
ugacgugauucauuucaca

SEQ ID NO: 1171760 - RNA, 19 nt, Artificial Sequence
  Description of Artificial Sequence: Synthetic oligonucleotide
  Sense strand starting at position 812 of SEQ ID NO: 916630
ucagcaaucuugucuaaga

SEQ ID NO: 1171761 - RNA, 19 nt, Artificial Sequence
  Description of Artificial Sequence: Synthetic oligonucleotide
  Antisense strand to SEQ ID NO: 1171760
ucuuagacaagauugcuga

SEQ ID NO: 1171762 - RNA, 19 nt, Artificial Sequence
  Description of Artificial Sequence: Synthetic oligonucleotide
  Sense strand starting at position 814 of SEQ ID NO: 916630
agcaaucuugucuaagaac

SEQ ID NO: 1171763 - RNA, 19 nt, Artificial Sequence
  Description of Artificial Sequence: Synthetic oligonucleotide
  Antisense strand to SEQ ID NO: 1171762
guucuuagacaagauugcu

SEQ ID NO: 1171764 - RNA, 19 nt, Artificial Sequence
  Description of Artificial Sequence: Synthetic oligonucleotide
  Sense strand starting at position 1468 of SEQ ID NO: 916630
ccuguuaugugacugacau

SEQ ID NO: 1171765 - RNA, 19 nt, Artificial Sequence
  Description of Artificial Sequence: Synthetic oligonucleotide
  Antisense strand to SEQ ID NO: 1171764
augucagucacauaacagg

SEQ ID NO: 1171766 - RNA, 19 nt, Artificial Sequence
  Description of Artificial Sequence: Synthetic oligonucleotide
  Sense strand starting at position 1469 of SEQ ID NO: 916630
cuguuaugugacugacauc

SEQ ID NO: 1171767 - RNA, 19 nt, Artificial Sequence
  Description of Artificial Sequence: Synthetic oligonucleotide
  Antisense strand to SEQ ID NO: 1171766
gaugucagucacauaacag

SEQ ID NO: 1171768 - RNA, 19 nt, Artificial Sequence
  Description of Artificial Sequence: Synthetic oligonucleotide
  Sense strand starting at position 1478 of SEQ ID NO: 916630
gacugacaucuuggcagua

SEQ ID NO: 1171769 - RNA, 19 nt, Artificial Sequence
  Description of Artificial Sequence: Synthetic oligonucleotide
  Antisense strand to SEQ ID NO: 1171768
uacugccaagaugucaguc

SEQ ID NO: 1171770 - RNA, 19 nt, Artificial Sequence
  Description of Artificial Sequence: Synthetic oligonucleotide
  Sense strand starting at position 2103 of SEQ ID NO: 916630
uuaauagugccucauugau

SEQ ID NO: 1171771 - RNA, 19 nt, Artificial Sequence
  Description of Artificial Sequence: Synthetic oligonucleotide
  Antisense strand to SEQ ID NO: 1171770
aucaaugaggcacuauuaa

SEQ ID NO: 1171772 - RNA, 19 nt, Artificial Sequence
  Description of Artificial Sequence: Synthetic oligonucleotide
  Sense strand starting at position 2109 of SEQ ID NO: 916630
gugccucauugauuauuua

SEQ ID NO: 1171773 - RNA, 19 nt, Artificial Sequence
  Description of Artificial Sequence: Synthetic oligonucleotide
  Antisense strand to SEQ ID NO: 1171772
uaaauaaucaaugaggcac

SEQ ID NO: 1171774 - RNA, 19 nt, Artificial Sequence
  Description of Artificial Sequence: Synthetic oligonucleotide
  Sense strand starting at position 2153 of SEQ ID NO: 916630
gugucauagcugcugcuga

SEQ ID NO: 1171775 - RNA, 19 nt, Artificial Sequence
  Description of Artificial Sequence: Synthetic oligonucleotide
  Antisense strand to SEQ ID NO: 1171774
ucagcagcagcuaugacac

SEQ ID NO: 1171776 - RNA, 19 nt, Artificial Sequence
  Description of Artificial Sequence: Synthetic oligonucleotide
  Sense strand starting at position 2167 of SEQ ID NO: 916630
gcugaugacagaugaauau

SEQ ID NO: 1171777 - RNA, 19 nt, Artificial Sequence
  Description of Artificial Sequence: Synthetic oligonucleotide
  Antisense strand to SEQ ID NO: 1171776
auauucaucugucaucagc

SEQ ID NO: 1171778 - RNA, 19 nt, Artificial Sequence
  Description of Artificial Sequence: Synthetic oligonucleotide
  Sense strand starting at position 2203 of SEQ ID NO: 916630
aauguagugugguuaaaca

SEQ ID NO: 1171779 - RNA, 19 nt, Artificial Sequence
  Description of Artificial Sequence: Synthetic oligonucleotide
  Antisense strand to SEQ ID NO: 1171778
uguuuaaccacacuacauu

SEQ ID NO: 1171780 - RNA, 19 nt, Artificial Sequence
  Description of Artificial Sequence: Synthetic oligonucleotide
  Sense strand starting at position 2644 of SEQ ID NO: 916630
guauuagcagaugauacuu

SEQ ID NO: 1171781 - RNA, 19 nt, Artificial Sequence
  Description of Artificial Sequence: Synthetic oligonucleotide
  Antisense strand to SEQ ID NO: 1171780
aaguaucaucugcuaauac

SEQ ID NO: 1171782 - RNA, 19 nt, Artificial Sequence
  Description of Artificial Sequence: Synthetic oligonucleotide
  Sense strand starting at position 2649 of SEQ ID NO: 916630
agcagaugauacuuguaca

SEQ ID NO: 1171783 - RNA, 19 nt, Artificial Sequence
  Description of Artificial Sequence: Synthetic oligonucleotide
  Antisense strand to SEQ ID NO: 1171782
uguacaaguaucaucugcu

SEQ ID NO: 1171784 - RNA, 19 nt, Artificial Sequence
  Description of Artificial Sequence: Synthetic oligonucleotide
  Sense strand starting at position 2650 of SEQ ID NO: 916630
gcagaugauacuuguacag

SEQ ID NO: 1171785 - RNA, 19 nt, Artificial Sequence
  Description of Artificial Sequence: Synthetic oligonucleotide
  Antisense strand to SEQ ID NO: 1171784
cuguacaaguaucaucugc

SEQ ID NO: 1171786 - RNA, 19 nt, Artificial Sequence
  Description of Artificial Sequence: Synthetic oligonucleotide
  Sense strand starting at position 2699 of SEQ ID NO: 916630
cccaucuauugaguauaua

SEQ ID NO: 1171787 - RNA, 19 nt, Artificial Sequence
  Description of Artificial Sequence: Synthetic oligonucleotide
  Antisense strand to SEQ ID NO: 1171786
uauauacucaauagauggg

SEQ ID NO: 1171788 - RNA, 19 nt, Artificial Sequence
  Description of Artificial Sequence: Synthetic oligonucleotide
  Sense strand starting at position 2850 of SEQ ID NO: 916630
ugauacuggcaauaguuaa

SEQ ID NO: 1171789 - RNA, 19 nt, Artificial Sequence
  Description of Artificial Sequence: Synthetic oligonucleotide
  Antisense strand to SEQ ID NO: 1171788
uuaacuauugccaguauca

SEQ ID NO: 1171790 - RNA, 19 nt, Artificial Sequence
  Description of Artificial Sequence: Synthetic oligonucleotide
  Sense strand starting at position 2864 of SEQ ID NO: 916630
guuaaacuugaauguaaug

SEQ ID NO: 1171791 - RNA, 19 nt, Artificial Sequence
  Description of Artificial Sequence: Synthetic oligonucleotide
  Antisense strand to SEQ ID NO: 1171790
cauuacauucaaguuuaac

SEQ ID NO: 1171792 - RNA, 19 nt, Artificial Sequence
  Description of Artificial Sequence: Synthetic oligonucleotide
  Sense strand starting at position 2954 of SEQ ID NO: 916630
aagcuuagauguuuagaua

SEQ ID NO: 1171793 - RNA, 19 nt, Artificial Sequence
  Description of Artificial Sequence: Synthetic oligonucleotide
  Antisense strand to SEQ ID NO: 1171792
uaucuaaacaucuaagcuu

SEQ ID NO: 1171794 - RNA, 19 nt, Artificial Sequence
  Description of Artificial Sequence: Synthetic oligonucleotide
  Sense strand starting at position 2955 of SEQ ID NO: 916630
agcuuagauguuuagauaa

SEQ ID NO: 1171795 - RNA, 19 nt, Artificial Sequence
  Description of Artificial Sequence: Synthetic oligonucleotide
  Antisense strand to SEQ ID NO: 1171794
uuaucuaaacaucuaagcu

SEQ ID NO: 1171796 - RNA, 19 nt, Artificial Sequence
  Description of Artificial Sequence: Synthetic oligonucleotide
  Sense strand starting at position 3218 of SEQ ID NO: 916630
ugacgacucugguuaggaa

SEQ ID NO: 1171797 - RNA, 19 nt, Artificial Sequence
  Description of Artificial Sequence: Synthetic oligonucleotide
  Antisense strand to SEQ ID NO: 1171796
uuccuaaccagagucguca

SEQ ID NO: 1171798 - RNA, 19 nt, Artificial Sequence
  Description of Artificial Sequence: Synthetic oligonucleotide
  Sense strand starting at position 3219 of SEQ ID NO: 916630
gacgacucugguuaggaau

SEQ ID NO: 1171799 - RNA, 19 nt, Artificial Sequence
  Description of Artificial Sequence: Synthetic oligonucleotide
  Antisense strand to SEQ ID NO: 1171798
auuccuaaccagagucguc

SEQ ID NO: 1171800 - RNA, 19 nt, Artificial Sequence
  Description of Artificial Sequence: Synthetic oligonucleotide
  Sense strand starting at position 3261 of SEQ ID NO: 916630
auugcuuaucacugacgaa

SEQ ID NO: 1171801 - RNA, 19 nt, Artificial Sequence
  Description of Artificial Sequence: Synthetic oligonucleotide
  Antisense strand to SEQ ID NO: 1171800
uucgucagugauaagcaau

SEQ ID NO: 1171802 - RNA, 19 nt, Artificial Sequence
  Description of Artificial Sequence: Synthetic oligonucleotide
  Sense strand starting at position 3315 of SEQ ID NO: 916630
uuugucacauguuuagaau

SEQ ID NO: 1171803 - RNA, 19 nt, Artificial Sequence
  Description of Artificial Sequence: Synthetic oligonucleotide
  Antisense strand to SEQ ID NO: 1171802
auucuaaacaugugacaaa

SEQ ID NO: 1171804 - RNA, 19 nt, Artificial Sequence
  Description of Artificial Sequence: Synthetic oligonucleotide
  Sense strand starting at position 3316 of SEQ ID NO: 916630
uugucacauguuuagaauc

SEQ ID NO: 1171805 - RNA, 19 nt, Artificial Sequence
  Description of Artificial Sequence: Synthetic oligonucleotide
  Antisense strand to SEQ ID NO: 1171804
gauucuaaacaugugacaa

SEQ ID NO: 1171806 - RNA, 19 nt, Artificial Sequence
  Description of Artificial Sequence: Synthetic oligonucleotide
  Sense strand starting at position 3347 of SEQ ID NO: 916630
ugauucuaaugagcacuaa

SEQ ID NO: 1171807 - RNA, 19 nt, Artificial Sequence
  Description of Artificial Sequence: Synthetic oligonucleotide
  Antisense strand to SEQ ID NO: 1171806
uuagugcucauuagaauca

SEQ ID NO: 1171808 - RNA, 19 nt, Artificial Sequence
  Description of Artificial Sequence: Synthetic oligonucleotide
  Sense strand starting at position 3351 of SEQ ID NO: 916630
ucuaaugagcacuaauugu

SEQ ID NO: 1171809 - RNA, 19 nt, Artificial Sequence
  Description of Artificial Sequence: Synthetic oligonucleotide
  Antisense strand to SEQ ID NO: 1171808
acaauuagugcucauuaga

SEQ ID NO: 1171810 - RNA, 19 nt, Artificial Sequence
  Description of Artificial Sequence: Synthetic oligonucleotide
  Sense strand starting at position 3453 of SEQ ID NO: 916630
uuucccuugggauguaaua

SEQ ID NO: 1171811 - RNA, 19 nt, Artificial Sequence
  Description of Artificial Sequence: Synthetic oligonucleotide
  Antisense strand to SEQ ID NO: 1171810
uauuacaucccaagggaaa

SEQ ID NO: 1171812 - RNA, 19 nt, Artificial Sequence
  Description of Artificial Sequence: Synthetic oligonucleotide
  Sense strand starting at position 3541 of SEQ ID NO: 916630
guggcaucauaauugggaa

SEQ ID NO: 1171813 - RNA, 19 nt, Artificial Sequence
  Description of Artificial Sequence: Synthetic oligonucleotide
  Antisense strand to SEQ ID NO: 1171812
uucccaauuaugaugccac

SEQ ID NO: 1171814 - RNA, 19 nt, Artificial Sequence
  Description of Artificial Sequence: Synthetic oligonucleotide
  Sense strand starting at position 3635 of SEQ ID NO: 916630
uugauuccucuauggaaag

SEQ ID NO: 1171815 - RNA, 19 nt, Artificial Sequence
  Description of Artificial Sequence: Synthetic oligonucleotide
  Antisense strand to SEQ ID NO: 1171814
cuuuccauagaggaaucaa

SEQ ID NO: 1171816 - RNA, 19 nt, Artificial Sequence
  Description of Artificial Sequence: Synthetic oligonucleotide
  Sense strand starting at position 3868 of SEQ ID NO: 916630
gauucuaaauugcugaguu

SEQ ID NO: 1171817 - RNA, 19 nt, Artificial Sequence
  Description of Artificial Sequence: Synthetic oligonucleotide
  Antisense strand to SEQ ID NO: 1171816
aacucagcaauuuagaauc

SEQ ID NO: 1171818 - RNA, 19 nt, Artificial Sequence
  Description of Artificial Sequence: Synthetic oligonucleotide
  Sense strand starting at position 3878 of SEQ ID NO: 916630
ugcugaguuguggaagaau

SEQ ID NO: 1171819 - RNA, 19 nt, Artificial Sequence
  Description of Artificial Sequence: Synthetic oligonucleotide
  Antisense strand to SEQ ID NO: 1171818
auucuuccacaacucagca

SEQ ID NO: 1171820 - RNA, 19 nt, Artificial Sequence
  Description of Artificial Sequence: Synthetic oligonucleotide
  Sense strand starting at position 3887 of SEQ ID NO: 916630
guggaagaauuauugauuc

SEQ ID NO: 1171821 - RNA, 19 nt, Artificial Sequence
  Description of Artificial Sequence: Synthetic oligonucleotide
  Antisense strand to SEQ ID NO: 1171820
gaaucaauaauucuuccac

SEQ ID NO: 1171822 - RNA, 19 nt, Artificial Sequence
  Description of Artificial Sequence: Synthetic oligonucleotide
  Sense strand starting at position 15 of SEQ ID NO: 916631
gucuauucuuaaccuguau

SEQ ID NO: 1171823 - RNA, 19 nt, Artificial Sequence
  Description of Artificial Sequence: Synthetic oligonucleotide
  Antisense strand to SEQ ID NO: 1171822
auacagguuaagaauagac

SEQ ID NO: 1171824 - RNA, 19 nt, Artificial Sequence
  Description of Artificial Sequence: Synthetic oligonucleotide
  Sense strand starting at position 453 of SEQ ID NO: 916631
cccuguauugacuguaaga

SEQ ID NO: 1171825 - RNA, 19 nt, Artificial Sequence
  Description of Artificial Sequence: Synthetic oligonucleotide
  Antisense strand to SEQ ID NO: 1171824
ucuuacagucaauacaggg

SEQ ID NO: 1171826 - RNA, 19 nt, Artificial Sequence
  Description of Artificial Sequence: Synthetic oligonucleotide
  Sense strand starting at position 697 of SEQ ID NO: 916631
uugcccaggcuguauauua

SEQ ID NO: 1171827 - RNA, 19 nt, Artificial Sequence
  Description of Artificial Sequence: Synthetic oligonucleotide
  Antisense strand to SEQ ID NO: 1171826
uaauauacagccugggcaa

SEQ ID NO: 1171828 - RNA, 19 nt, Artificial Sequence
  Description of Artificial Sequence: Synthetic oligonucleotide
  Sense strand starting at position 741 of SEQ ID NO: 916631
cuaguaucccagcacacua

SEQ ID NO: 1171829 - RNA, 19 nt, Artificial Sequence
  Description of Artificial Sequence: Synthetic oligonucleotide
  Antisense strand to SEQ ID NO: 1171828
uagugugcugggauacuag

SEQ ID NO: 1171830 - RNA, 19 nt, Artificial Sequence
  Description of Artificial Sequence: Synthetic oligonucleotide
  Sense strand starting at position 824 of SEQ ID NO: 916631
uacauugucuguccggaau

SEQ ID NO: 1171831 - RNA, 19 nt, Artificial Sequence
  Description of Artificial Sequence: Synthetic oligonucleotide
  Antisense strand to SEQ ID NO: 1171830
auuccggacagacaaugua

SEQ ID NO: 1171832 - RNA, 19 nt, Artificial Sequence
  Description of Artificial Sequence: Synthetic oligonucleotide
  Sense strand starting at position 858 of SEQ ID NO: 916631
uuuggugaucaggagguua

SEQ ID NO: 1171833 - RNA, 19 nt, Artificial Sequence
  Description of Artificial Sequence: Synthetic oligonucleotide
  Antisense strand to SEQ ID NO: 1171832
uaaccuccugaucaccaaa

SEQ ID NO: 1171834 - RNA, 19 nt, Artificial Sequence
  Description of Artificial Sequence: Synthetic oligonucleotide
  Sense strand starting at position 894 of SEQ ID NO: 916631
ugaaaucugcauuaacugu

SEQ ID NO: 1171835 - RNA, 19 nt, Artificial Sequence
  Description of Artificial Sequence: Synthetic oligonucleotide
  Antisense strand to SEQ ID NO: 1171834
acaguuaaugcagauuuca

SEQ ID NO: 1171836 - RNA, 19 nt, Artificial Sequence
  Description of Artificial Sequence: Synthetic oligonucleotide
  Sense strand starting at position 900 of SEQ ID NO: 916631
cugcauuaacuguacguuu

SEQ ID NO: 1171837 - RNA, 19 nt, Artificial Sequence
  Description of Artificial Sequence: Synthetic oligonucleotide
  Antisense strand to SEQ ID NO: 1171836
aaacguacaguuaaugcag

SEQ ID NO: 1171838 - RNA, 19 nt, Artificial Sequence
  Description of Artificial Sequence: Synthetic oligonucleotide
  Sense strand starting at position 976 of SEQ ID NO: 916631
aagggaggcuguguuagau

SEQ ID NO: 1171839 - RNA, 19 nt, Artificial Sequence
  Description of Artificial Sequence: Synthetic oligonucleotide
  Antisense strand to SEQ ID NO: 1171838
aucuaacacagccucccuu

SEQ ID NO: 1171840 - RNA, 19 nt, Artificial Sequence
  Description of Artificial Sequence: Synthetic oligonucleotide
  Sense strand starting at position 984 of SEQ ID NO: 916631
cuguguuagaugggcacua

SEQ ID NO: 1171841 - RNA, 19 nt, Artificial Sequence
  Description of Artificial Sequence: Synthetic oligonucleotide
  Antisense strand to SEQ ID NO: 1171840
uagugcccaucuaacacag

SEQ ID NO: 1171842 - RNA, 19 nt, Artificial Sequence
  Description of Artificial Sequence: Synthetic oligonucleotide
  Sense strand starting at position 986 of SEQ ID NO: 916631
guguuagaugggcacuaca

SEQ ID NO: 1171843 - RNA, 19 nt, Artificial Sequence
  Description of Artificial Sequence: Synthetic oligonucleotide
  Antisense strand to SEQ ID NO: 1171842
uguagugcccaucuaacac

SEQ ID NO: 1171844 - RNA, 19 nt, Artificial Sequence
  Description of Artificial Sequence: Synthetic oligonucleotide
  Sense strand starting at position 1111 of SEQ ID NO: 916631
ggcgucugcaaaucuaguu

SEQ ID NO: 1171845 - RNA, 19 nt, Artificial Sequence
  Description of Artificial Sequence: Synthetic oligonucleotide
  Antisense strand to SEQ ID NO: 1171844
aacuagauuugcagacgcc

SEQ ID NO: 1171846 - RNA, 19 nt, Artificial Sequence
  Description of Artificial Sequence: Synthetic oligonucleotide
  Sense strand starting at position 1252 of SEQ ID NO: 916631
cgcucaucgccaguuacau

SEQ ID NO: 1171847 - RNA, 19 nt, Artificial Sequence
  Description of Artificial Sequence: Synthetic oligonucleotide
  Antisense strand to SEQ ID NO: 1171846
auguaacuggcgaugagcg

SEQ ID NO: 1171848 - RNA, 19 nt, Artificial Sequence
  Description of Artificial Sequence: Synthetic oligonucleotide
  Sense strand starting at position 1483 of SEQ ID NO: 916631
gaaugaauuucugccgcag

SEQ ID NO: 1171849 - RNA, 19 nt, Artificial Sequence
  Description of Artificial Sequence: Synthetic oligonucleotide
  Antisense strand to SEQ ID NO: 1171848
cugcggcagaaauucauuc

SEQ ID NO: 1171850 - RNA, 19 nt, Artificial Sequence
  Description of Artificial Sequence: Synthetic oligonucleotide
  Sense strand starting at position 2114 of SEQ ID NO: 916631
ugccgaguucucgggaaca

SEQ ID NO: 1171851 - RNA, 19 nt, Artificial Sequence
  Description of Artificial Sequence: Synthetic oligonucleotide
  Antisense strand to SEQ ID NO: 1171850
uguucccgagaacucggca

SEQ ID NO: 1171852 - RNA, 19 nt, Artificial Sequence
  Description of Artificial Sequence: Synthetic oligonucleotide
  Sense strand starting at position 2116 of SEQ ID NO: 916631
ccgaguucucgggaacagc

SEQ ID NO: 1171853 - RNA, 19 nt, Artificial Sequence
  Description of Artificial Sequence: Synthetic oligonucleotide
  Antisense strand to SEQ ID NO: 1171852
gcuguucccgagaacucgg

SEQ ID NO: 1171854 - RNA, 19 nt, Artificial Sequence
  Description of Artificial Sequence: Synthetic oligonucleotide
  Sense strand starting at position 2184 of SEQ ID NO: 916631
cuggaauagguucgccgaa

SEQ ID NO: 1171855 - RNA, 19 nt, Artificial Sequence
  Description of Artificial Sequence: Synthetic oligonucleotide
  Antisense strand to SEQ ID NO: 1171854
uucggcgaaccuauuccag

SEQ ID NO: 1171856 - RNA, 19 nt, Artificial Sequence
  Description of Artificial Sequence: Synthetic oligonucleotide
  Sense strand starting at position 2186 of SEQ ID NO: 916631
ggaauagguucgccgaaga

SEQ ID NO: 1171857 - RNA, 19 nt, Artificial Sequence
  Description of Artificial Sequence: Synthetic oligonucleotide
  Antisense strand to SEQ ID NO: 1171856
ucuucggcgaaccuauucc

SEQ ID NO: 1171858 - RNA, 19 nt, Artificial Sequence
  Description of Artificial Sequence: Synthetic oligonucleotide
  Sense strand starting at position 2206 of SEQ ID NO: 916631
agagguucgugucucagaa

SEQ ID NO: 1171859 - RNA, 19 nt, Artificial Sequence
  Description of Artificial Sequence: Synthetic oligonucleotide
  Antisense strand to SEQ ID NO: 1171858
uucugagacacgaaccucu

SEQ ID NO: 1171860 - RNA, 19 nt, Artificial Sequence
  Description of Artificial Sequence: Synthetic oligonucleotide
  Sense strand starting at position 2220 of SEQ ID NO: 916631
cagaaagugucgcugggaa

SEQ ID NO: 1171861 - RNA, 19 nt, Artificial Sequence
  Description of Artificial Sequence: Synthetic oligonucleotide
  Antisense strand to SEQ ID NO: 1171860
uucccagcgacacuuucug

SEQ ID NO: 1171862 - RNA, 19 nt, Artificial Sequence
  Description of Artificial Sequence: Synthetic oligonucleotide
  Sense strand starting at position 2292 of SEQ ID NO: 916631
gcaugauucuuugcuccac

SEQ ID NO: 1171863 - RNA, 19 nt, Artificial Sequence
  Description of Artificial Sequence: Synthetic oligonucleotide
  Antisense strand to SEQ ID NO: 1171862
guggagcaaagaaucaugc

SEQ ID NO: 1171864 - RNA, 19 nt, Artificial Sequence
  Description of Artificial Sequence: Synthetic oligonucleotide
  Sense strand starting at position 2827 of SEQ ID NO: 916631
gccgaucacuucuugaauc

SEQ ID NO: 1171865 - RNA, 19 nt, Artificial Sequence
  Description of Artificial Sequence: Synthetic oligonucleotide
  Antisense strand to SEQ ID NO: 1171864
gauucaagaagugaucggc

SEQ ID NO: 1171866 - RNA, 19 nt, Artificial Sequence
  Description of Artificial Sequence: Synthetic oligonucleotide
  Sense strand starting at position 2829 of SEQ ID NO: 916631
cgaucacuucuugaaucua

SEQ ID NO: 1171867 - RNA, 19 nt, Artificial Sequence
  Description of Artificial Sequence: Synthetic oligonucleotide
  Antisense strand to SEQ ID NO: 1171866
uagauucaagaagugaucg

SEQ ID NO: 1171868 - RNA, 19 nt, Artificial Sequence
  Description of Artificial Sequence: Synthetic oligonucleotide
  Sense strand starting at position 3015 of SEQ ID NO: 916631
cgagccagauucucuguau

SEQ ID NO: 1171869 - RNA, 19 nt, Artificial Sequence
  Description of Artificial Sequence: Synthetic oligonucleotide
  Antisense strand to SEQ ID NO: 1171868
auacagagaaucuggcucg

SEQ ID NO: 1171870 - RNA, 19 nt, Artificial Sequence
  Description of Artificial Sequence: Synthetic oligonucleotide
  Sense strand starting at position 3016 of SEQ ID NO: 916631
gagccagauucucuguauu

SEQ ID NO: 1171871 - RNA, 19 nt, Artificial Sequence
  Description of Artificial Sequence: Synthetic oligonucleotide
  Antisense strand to SEQ ID NO: 1171870
aauacagagaaucuggcuc

SEQ ID NO: 1171872 - RNA, 19 nt, Artificial Sequence
  Description of Artificial Sequence: Synthetic oligonucleotide
  Sense strand starting at position 3054 of SEQ ID NO: 916631
cauaguaauugccugguga

SEQ ID NO: 1171873 - RNA, 19 nt, Artificial Sequence
  Description of Artificial Sequence: Synthetic oligonucleotide
  Antisense strand to SEQ ID NO: 1171872
ucaccaggcaauuacuaug

SEQ ID NO: 1171874 - RNA, 19 nt, Artificial Sequence
  Description of Artificial Sequence: Synthetic oligonucleotide
  Sense strand starting at position 3055 of SEQ ID NO: 916631
auaguaauugccuggugag

SEQ ID NO: 1171875 - RNA, 19 nt, Artificial Sequence
  Description of Artificial Sequence: Synthetic oligonucleotide
  Antisense strand to SEQ ID NO: 1171874
cucaccaggcaauuacuau

SEQ ID NO: 1171876 - RNA, 19 nt, Artificial Sequence
  Description of Artificial Sequence: Synthetic oligonucleotide
  Sense strand starting at position 3056 of SEQ ID NO: 916631
uaguaauugccuggugaga

SEQ ID NO: 1171877 - RNA, 19 nt, Artificial Sequence
  Description of Artificial Sequence: Synthetic oligonucleotide
  Antisense strand to SEQ ID NO: 1171876
ucucaccaggcaauuacua

SEQ ID NO: 1171878 - RNA, 19 nt, Artificial Sequence
  Description of Artificial Sequence: Synthetic oligonucleotide
  Sense strand starting at position 3069 of SEQ ID NO: 916631
gugagagcaccugagugaa

SEQ ID NO: 1171879 - RNA, 19 nt, Artificial Sequence
  Description of Artificial Sequence: Synthetic oligonucleotide
  Antisense strand to SEQ ID NO: 1171878
uucacucaggugcucucac

SEQ ID NO: 1171880 - RNA, 19 nt, Artificial Sequence
  Description of Artificial Sequence: Synthetic oligonucleotide
  Sense strand starting at position 3072 of SEQ ID NO: 916631
agagcaccugagugaacuu

SEQ ID NO: 1171881 - RNA, 19 nt, Artificial Sequence
  Description of Artificial Sequence: Synthetic oligonucleotide
  Antisense strand to SEQ ID NO: 1171880
aaguucacucaggugcucu

SEQ ID NO: 1171882 - RNA, 19 nt, Artificial Sequence
  Description of Artificial Sequence: Synthetic oligonucleotide
  Sense strand starting at position 3110 of SEQ ID NO: 916631
gggaaauguauuuguccgu

SEQ ID NO: 1171883 - RNA, 19 nt, Artificial Sequence
  Description of Artificial Sequence: Synthetic oligonucleotide
  Antisense strand to SEQ ID NO: 1171882
acggacaaauacauuuccc

SEQ ID NO: 1171884 - RNA, 19 nt, Artificial Sequence
  Description of Artificial Sequence: Synthetic oligonucleotide
  Sense strand starting at position 3164 of SEQ ID NO: 916631
cugagaaauguuuggguuu

SEQ ID NO: 1171885 - RNA, 19 nt, Artificial Sequence
  Description of Artificial Sequence: Synthetic oligonucleotide
  Antisense strand to SEQ ID NO: 1171884
aaacccaaacauuucucag

SEQ ID NO: 1171886 - RNA, 19 nt, Artificial Sequence
  Description of Artificial Sequence: Synthetic oligonucleotide
  Sense strand starting at position 3279 of SEQ ID NO: 916631
ugaauaugauaagcacuau

SEQ ID NO: 1171887 - RNA, 19 nt, Artificial Sequence
  Description of Artificial Sequence: Synthetic oligonucleotide
  Antisense strand to SEQ ID NO: 1171886
auagugcuuaucauauuca

SEQ ID NO: 1171888 - RNA, 19 nt, Artificial Sequence
  Description of Artificial Sequence: Synthetic oligonucleotide
  Sense strand starting at position 3667 of SEQ ID NO: 916631
guugucucuugauuuacau

SEQ ID NO: 1171889 - RNA, 19 nt, Artificial Sequence
  Description of Artificial Sequence: Synthetic oligonucleotide
  Antisense strand to SEQ ID NO: 1171888
auguaaaucaagagacaac

SEQ ID NO: 1171890 - RNA, 19 nt, Artificial Sequence
  Description of Artificial Sequence: Synthetic oligonucleotide
  Sense strand starting at position 3769 of SEQ ID NO: 916631
cuuuguuauaaacgucagu

SEQ ID NO: 1171891 - RNA, 19 nt, Artificial Sequence
  Description of Artificial Sequence: Synthetic oligonucleotide
  Antisense strand to SEQ ID NO: 1171890
acugacguuuauaacaaag

SEQ ID NO: 1171892 - RNA, 19 nt, Artificial Sequence
  Description of Artificial Sequence: Synthetic oligonucleotide
  Sense strand starting at position 3772 of SEQ ID NO: 916631
uguuauaaacgucaguaau

SEQ ID NO: 1171893 - RNA, 19 nt, Artificial Sequence
  Description of Artificial Sequence: Synthetic oligonucleotide
  Antisense strand to SEQ ID NO: 1171892
auuacugacguuuauaaca

SEQ ID NO: 1171894 - RNA, 19 nt, Artificial Sequence
  Description of Artificial Sequence: Synthetic oligonucleotide
  Sense strand starting at position 3774 of SEQ ID NO: 916631
uuauaaacgucaguaauca

SEQ ID NO: 1171895 - RNA, 19 nt, Artificial Sequence
  Description of Artificial Sequence: Synthetic oligonucleotide
  Antisense strand to SEQ ID NO: 1171894
ugauuacugacguuuauaa

SEQ ID NO: 1171896 - RNA, 19 nt, Artificial Sequence
  Description of Artificial Sequence: Synthetic oligonucleotide
  Sense strand starting at position 3785 of SEQ ID NO: 916631
aguaaucauuuaggguaua

SEQ ID NO: 1171897 - RNA, 19 nt, Artificial Sequence
  Description of Artificial Sequence: Synthetic oligonucleotide
  Antisense strand to SEQ ID NO: 1171896
uauacccuaaaugauuacu

SEQ ID NO: 1171898 - RNA, 19 nt, Artificial Sequence
  Description of Artificial Sequence: Synthetic oligonucleotide
  Sense strand starting at position 3786 of SEQ ID NO: 916631
guaaucauuuaggguauau

SEQ ID NO: 1171899 - RNA, 19 nt, Artificial Sequence
  Description of Artificial Sequence: Synthetic oligonucleotide
  Antisense strand to SEQ ID NO: 1171898
auauacccuaaaugauuac

SEQ ID NO: 1171900 - RNA, 19 nt, Artificial Sequence
  Description of Artificial Sequence: Synthetic oligonucleotide
  Sense strand starting at position 3927 of SEQ ID NO: 916631
ugcugaggccucuaauccu

SEQ ID NO: 1171901 - RNA, 19 nt, Artificial Sequence
  Description of Artificial Sequence: Synthetic oligonucleotide
  Antisense strand to SEQ ID NO: 1171900
aggauuagaggccucagca

SEQ ID NO: 1171902 - RNA, 19 nt, Artificial Sequence
  Description of Artificial Sequence: Synthetic oligonucleotide
  Sense strand starting at position 41 of SEQ ID NO: 916632
gacaaagcuguguaaccuu

SEQ ID NO: 1171903 - RNA, 19 nt, Artificial Sequence
  Description of Artificial Sequence: Synthetic oligonucleotide
  Antisense strand to SEQ ID NO: 1171902
aagguuacacagcuuuguc

SEQ ID NO: 1171904 - RNA, 19 nt, Artificial Sequence
  Description of Artificial Sequence: Synthetic oligonucleotide
  Sense strand starting at position 128 of SEQ ID NO: 916632
uaggguucucauggagagu

SEQ ID NO: 1171905 - RNA, 19 nt, Artificial Sequence
  Description of Artificial Sequence: Synthetic oligonucleotide
  Antisense strand to SEQ ID NO: 1171904
acucuccaugagaacccua

SEQ ID NO: 1171906 - RNA, 19 nt, Artificial Sequence
  Description of Artificial Sequence: Synthetic oligonucleotide
  Sense strand starting at position 179 of SEQ ID NO: 916632
aggccuagaacguaacuau

SEQ ID NO: 1171907 - RNA, 19 nt, Artificial Sequence
  Description of Artificial Sequence: Synthetic oligonucleotide
  Antisense strand to SEQ ID NO: 1171906
auaguuacguucuaggccu

SEQ ID NO: 1171908 - RNA, 19 nt, Artificial Sequence
  Description of Artificial Sequence: Synthetic oligonucleotide
  Sense strand starting at position 224 of SEQ ID NO: 916632
augguauggucuuuaccuu

SEQ ID NO: 1171909 - RNA, 19 nt, Artificial Sequence
  Description of Artificial Sequence: Synthetic oligonucleotide
  Antisense strand to SEQ ID NO: 1171908
aagguaaagaccauaccau

SEQ ID NO: 1171910 - RNA, 19 nt, Artificial Sequence
  Description of Artificial Sequence: Synthetic oligonucleotide
  Sense strand starting at position 331 of SEQ ID NO: 916632
aggugcuguagugaauacu

SEQ ID NO: 1171911 - RNA, 19 nt, Artificial Sequence
  Description of Artificial Sequence: Synthetic oligonucleotide
  Antisense strand to SEQ ID NO: 1171910
aguauucacuacagcaccu

SEQ ID NO: 1171912 - RNA, 19 nt, Artificial Sequence
  Description of Artificial Sequence: Synthetic oligonucleotide
  Sense strand starting at position 495 of SEQ ID NO: 916632
acauuacauuccguuauca

SEQ ID NO: 1171913 - RNA, 19 nt, Artificial Sequence
  Description of Artificial Sequence: Synthetic oligonucleotide
  Antisense strand to SEQ ID NO: 1171912
ugauaacggaauguaaugu

SEQ ID NO: 1171914 - RNA, 19 nt, Artificial Sequence
  Description of Artificial Sequence: Synthetic oligonucleotide
  Sense strand starting at position 504 of SEQ ID NO: 916632
uccguuaucaccuaaggga

SEQ ID NO: 1171915 - RNA, 19 nt, Artificial Sequence
  Description of Artificial Sequence: Synthetic oligonucleotide
  Antisense strand to SEQ ID NO: 1171914
ucccuuaggugauaacgga

SEQ ID NO: 1171916 - RNA, 19 nt, Artificial Sequence
  Description of Artificial Sequence: Synthetic oligonucleotide
  Sense strand starting at position 507 of SEQ ID NO: 916632
guuaucaccuaagggaaau

SEQ ID NO: 1171917 - RNA, 19 nt, Artificial Sequence
  Description of Artificial Sequence: Synthetic oligonucleotide
  Antisense strand to SEQ ID NO: 1171916
auuucccuuaggugauaac

SEQ ID NO: 1171918 - RNA, 19 nt, Artificial Sequence
  Description of Artificial Sequence: Synthetic oligonucleotide
  Sense strand starting at position 549 of SEQ ID NO: 916632
agaaaugagucaugagacc

SEQ ID NO: 1171919 - RNA, 19 nt, Artificial Sequence
  Description of Artificial Sequence: Synthetic oligonucleotide
  Antisense strand to SEQ ID NO: 1171918
ggucucaugacucauuucu

SEQ ID NO: 1171920 - RNA, 19 nt, Artificial Sequence
  Description of Artificial Sequence: Synthetic oligonucleotide
  Sense strand starting at position 610 of SEQ ID NO: 916632
auagaauucugucccauag

SEQ ID NO: 1171921 - RNA, 19 nt, Artificial Sequence
  Description of Artificial Sequence: Synthetic oligonucleotide
  Antisense strand to SEQ ID NO: 1171920
cuaugggacagaauucuau

SEQ ID NO: 1171922 - RNA, 19 nt, Artificial Sequence
  Description of Artificial Sequence: Synthetic oligonucleotide
  Sense strand starting at position 612 of SEQ ID NO: 916632
agaauucugucccauagaa

SEQ ID NO: 1171923 - RNA, 19 nt, Artificial Sequence
  Description of Artificial Sequence: Synthetic oligonucleotide
  Antisense strand to SEQ ID NO: 1171922
uucuaugggacagaauucu

SEQ ID NO: 1171924 - RNA, 19 nt, Artificial Sequence
  Description of Artificial Sequence: Synthetic oligonucleotide
  Sense strand starting at position 1328 of SEQ ID NO: 916632
uucucauucggucaggaaa

SEQ ID NO: 1171925 - RNA, 19 nt, Artificial Sequence
  Description of Artificial Sequence: Synthetic oligonucleotide
  Antisense strand to SEQ ID NO: 1171924
uuuccugaccgaaugagaa

SEQ ID NO: 1171926 - RNA, 19 nt, Artificial Sequence
  Description of Artificial Sequence: Synthetic oligonucleotide
  Sense strand starting at position 1356 of SEQ ID NO: 916632
uugaaauacgggugaacua

SEQ ID NO: 1171927 - RNA, 19 nt, Artificial Sequence
  Description of Artificial Sequence: Synthetic oligonucleotide
  Antisense strand to SEQ ID NO: 1171926
uaguucacccguauuucaa

SEQ ID NO: 1171928 - RNA, 19 nt, Artificial Sequence
  Description of Artificial Sequence: Synthetic oligonucleotide
  Sense strand starting at position 1367 of SEQ ID NO: 916632
gugaacuaaguuuaaaggu

SEQ ID NO: 1171929 - RNA, 19 nt, Artificial Sequence
  Description of Artificial Sequence: Synthetic oligonucleotide
  Antisense strand to SEQ ID NO: 1171928
accuuuaaacuuaguucac

SEQ ID NO: 1171930 - RNA, 19 nt, Artificial Sequence
  Description of Artificial Sequence: Synthetic oligonucleotide
  Sense strand starting at position 1530 of SEQ ID NO: 916632
ugaugaagcccauaggcau

SEQ ID NO: 1171931 - RNA, 19 nt, Artificial Sequence
  Description of Artificial Sequence: Synthetic oligonucleotide
  Antisense strand to SEQ ID NO: 1171930
augccuaugggcuucauca

SEQ ID NO: 1171932 - RNA, 19 nt, Artificial Sequence
  Description of Artificial Sequence: Synthetic oligonucleotide
  Sense strand starting at position 1616 of SEQ ID NO: 916632
uuuauaaacgcucaguaag

SEQ ID NO: 1171933 - RNA, 19 nt, Artificial Sequence
  Description of Artificial Sequence: Synthetic oligonucleotide
  Antisense strand to SEQ ID NO: 1171932
cuuacugagcguuuauaaa

SEQ ID NO: 1171934 - RNA, 19 nt, Artificial Sequence
  Description of Artificial Sequence: Synthetic oligonucleotide
  Sense strand starting at position 1633 of SEQ ID NO: 916632
agugguaacuacuaugauu

SEQ ID NO: 1171935 - RNA, 19 nt, Artificial Sequence
  Description of Artificial Sequence: Synthetic oligonucleotide
  Antisense strand to SEQ ID NO: 1171934
aaucauaguaguuaccacu

SEQ ID NO: 1171936 - RNA, 19 nt, Artificial Sequence
  Description of Artificial Sequence: Synthetic oligonucleotide
  Sense strand starting at position 2015 of SEQ ID NO: 916632
gagguuuggaacugaggua

SEQ ID NO: 1171937 - RNA, 19 nt, Artificial Sequence
  Description of Artificial Sequence: Synthetic oligonucleotide
  Antisense strand to SEQ ID NO: 1171936
uaccucaguuccaaaccuc

SEQ ID NO: 1171938 - RNA, 19 nt, Artificial Sequence
  Description of Artificial Sequence: Synthetic oligonucleotide
  Sense strand starting at position 2060 of SEQ ID NO: 916632
caacucugcccguaucuga

SEQ ID NO: 1171939 - RNA, 19 nt, Artificial Sequence
  Description of Artificial Sequence: Synthetic oligonucleotide
  Antisense strand to SEQ ID NO: 1171938
ucagauacgggcagaguug

SEQ ID NO: 1171940 - RNA, 19 nt, Artificial Sequence
  Description of Artificial Sequence: Synthetic oligonucleotide
  Sense strand starting at position 2798 of SEQ ID NO: 916632
gggaagagccgugagucuu

SEQ ID NO: 1171941 - RNA, 19 nt, Artificial Sequence
  Description of Artificial Sequence: Synthetic oligonucleotide
  Antisense strand to SEQ ID NO: 1171940
aagacucacggcucuuccc

SEQ ID NO: 1171942 - RNA, 19 nt, Artificial Sequence
  Description of Artificial Sequence: Synthetic oligonucleotide
  Sense strand starting at position 3200 of SEQ ID NO: 916632
cacugucuccauggagaca

SEQ ID NO: 1171943 - RNA, 19 nt, Artificial Sequence
  Description of Artificial Sequence: Synthetic oligonucleotide
  Antisense strand to SEQ ID NO: 1171942
ugucuccauggagacagug

SEQ ID NO: 1171944 - RNA, 19 nt, Artificial Sequence
  Description of Artificial Sequence: Synthetic oligonucleotide
  Sense strand starting at position 3270 of SEQ ID NO: 916632
agcacugcaugaugacaaa

SEQ ID NO: 1171945 - RNA, 19 nt, Artificial Sequence
  Description of Artificial Sequence: Synthetic oligonucleotide
  Antisense strand to SEQ ID NO: 1171944
uuugucaucaugcagugcu

SEQ ID NO: 1171946 - RNA, 19 nt, Artificial Sequence
  Description of Artificial Sequence: Synthetic oligonucleotide
  Sense strand starting at position 3369 of SEQ ID NO: 916632
ccuuccuuccgcuaaguca

SEQ ID NO: 1171947 - RNA, 19 nt, Artificial Sequence
  Description of Artificial Sequence: Synthetic oligonucleotide
  Antisense strand to SEQ ID NO: 1171946
ugacuuagcggaaggaagg

SEQ ID NO: 1171948 - RNA, 19 nt, Artificial Sequence
  Description of Artificial Sequence: Synthetic oligonucleotide
  Sense strand starting at position 3385 of SEQ ID NO: 916632
ucaacauaguggccuuauu

SEQ ID NO: 1171949 - RNA, 19 nt, Artificial Sequence
  Description of Artificial Sequence: Synthetic oligonucleotide
  Antisense strand to SEQ ID NO: 1171948
aauaaggccacuauguuga

SEQ ID NO: 1171950 - RNA, 19 nt, Artificial Sequence
  Description of Artificial Sequence: Synthetic oligonucleotide
  Sense strand starting at position 3495 of SEQ ID NO: 916632
gagugugcucugcugucaa

SEQ ID NO: 1171951 - RNA, 19 nt, Artificial Sequence
  Description of Artificial Sequence: Synthetic oligonucleotide
  Antisense strand to SEQ ID NO: 1171950
uugacagcagagcacacuc

SEQ ID NO: 1171952 - RNA, 19 nt, Artificial Sequence
  Description of Artificial Sequence: Synthetic oligonucleotide
  Sense strand starting at position 3607 of SEQ ID NO: 916632
cagggcugccgguaaauga

SEQ ID NO: 1171953 - RNA, 19 nt, Artificial Sequence
  Description of Artificial Sequence: Synthetic oligonucleotide
  Antisense strand to SEQ ID NO: 1171952
ucauuuaccggcagcccug

SEQ ID NO: 1171954 - RNA, 19 nt, Artificial Sequence
  Description of Artificial Sequence: Synthetic oligonucleotide
  Sense strand starting at position 3618 of SEQ ID NO: 916632
guaaaugaccaagggcaau

SEQ ID NO: 1171955 - RNA, 19 nt, Artificial Sequence
  Description of Artificial Sequence: Synthetic oligonucleotide
  Antisense strand to SEQ ID NO: 1171954
auugcccuuggucauuuac

SEQ ID NO: 1171956 - RNA, 19 nt, Artificial Sequence
  Description of Artificial Sequence: Synthetic oligonucleotide
  Sense strand starting at position 3630 of SEQ ID NO: 916632
gggcaauaaugccagacga

SEQ ID NO: 1171957 - RNA, 19 nt, Artificial Sequence
  Description of Artificial Sequence: Synthetic oligonucleotide
  Antisense strand to SEQ ID NO: 1171956
ucgucuggcauuauugccc

SEQ ID NO: 1171958 - RNA, 19 nt, Artificial Sequence
  Description of Artificial Sequence: Synthetic oligonucleotide
  Sense strand starting at position 3632 of SEQ ID NO: 916632
gcaauaaugccagacgaac

SEQ ID NO: 1171959 - RNA, 19 nt, Artificial Sequence
  Description of Artificial Sequence: Synthetic oligonucleotide
  Antisense strand to SEQ ID NO: 1171958
guucgucuggcauuauugc

SEQ ID NO: 1171960 - RNA, 19 nt, Artificial Sequence
  Description of Artificial Sequence: Synthetic oligonucleotide
  Sense strand starting at position 3727 of SEQ ID NO: 916632
ccuggcuguucugcagauu

SEQ ID NO: 1171961 - RNA, 19 nt, Artificial Sequence
  Description of Artificial Sequence: Synthetic oligonucleotide
  Antisense strand to SEQ ID NO: 1171960
aaucugcagaacagccagg

SEQ ID NO: 1171962 - RNA, 19 nt, Artificial Sequence
  Description of Artificial Sequence: Synthetic oligonucleotide
  Sense strand starting at position 3728 of SEQ ID NO: 916632
cuggcuguucugcagauuu

SEQ ID NO: 1171963 - RNA, 19 nt, Artificial Sequence
  Description of Artificial Sequence: Synthetic oligonucleotide
  Antisense strand to SEQ ID NO: 1171962
aaaucugcagaacagccag

SEQ ID NO: 1171964 - RNA, 19 nt, Artificial Sequence
  Description of Artificial Sequence: Synthetic oligonucleotide
  Sense strand starting at position 3772 of SEQ ID NO: 916632
cagggaaugucuguguaaa

SEQ ID NO: 1171965 - RNA, 19 nt, Artificial Sequence
  Description of Artificial Sequence: Synthetic oligonucleotide
  Antisense strand to SEQ ID NO: 1171964
uuuacacagacauucccug

SEQ ID NO: 1171966 - RNA, 19 nt, Artificial Sequence
  Description of Artificial Sequence: Synthetic oligonucleotide
  Sense strand starting at position 3773 of SEQ ID NO: 916632
agggaaugucuguguaaac

SEQ ID NO: 1171967 - RNA, 19 nt, Artificial Sequence
  Description of Artificial Sequence: Synthetic oligonucleotide
  Antisense strand to SEQ ID NO: 1171966
guuuacacagacauucccu

SEQ ID NO: 1171968 - RNA, 19 nt, Artificial Sequence
  Description of Artificial Sequence: Synthetic oligonucleotide
  Sense strand starting at position 3774 of SEQ ID NO: 916632
gggaaugucuguguaaacu

SEQ ID NO: 1171969 - RNA, 19 nt, Artificial Sequence
  Description of Artificial Sequence: Synthetic oligonucleotide
  Antisense strand to SEQ ID NO: 1171968
aguuuacacagacauuccc

SEQ ID NO: 1171970 - RNA, 19 nt, Artificial Sequence
  Description of Artificial Sequence: Synthetic oligonucleotide
  Sense strand starting at position 3786 of SEQ ID NO: 916632
guaaacucaucccugggaa

SEQ ID NO: 1171971 - RNA, 19 nt, Artificial Sequence
  Description of Artificial Sequence: Synthetic oligonucleotide
  Antisense strand to SEQ ID NO: 1171970
uucccagggaugaguuuac

SEQ ID NO: 1171972 - RNA, 19 nt, Artificial Sequence
  Description of Artificial Sequence: Synthetic oligonucleotide
  Sense strand starting at position 3790 of SEQ ID NO: 916632
acucaucccugggaagaca

SEQ ID NO: 1171973 - RNA, 19 nt, Artificial Sequence
  Description of Artificial Sequence: Synthetic oligonucleotide
  Antisense strand to SEQ ID NO: 1171972
ugucuucccagggaugagu

SEQ ID NO: 1171974 - RNA, 19 nt, Artificial Sequence
  Description of Artificial Sequence: Synthetic oligonucleotide
  Sense strand starting at position 3807 of SEQ ID NO: 916632
cagagaagcugcucugaca

SEQ ID NO: 1171975 - RNA, 19 nt, Artificial Sequence
  Description of Artificial Sequence: Synthetic oligonucleotide
  Antisense strand to SEQ ID NO: 1171974
ugucagagcagcuucucug

SEQ ID NO: 1171976 - RNA, 19 nt, Artificial Sequence
  Description of Artificial Sequence: Synthetic oligonucleotide
  Sense strand starting at position 3853 of SEQ ID NO: 916632
agaccauaagacugugcaa

SEQ ID NO: 1171977 - RNA, 19 nt, Artificial Sequence
  Description of Artificial Sequence: Synthetic oligonucleotide
  Antisense strand to SEQ ID NO: 1171976
uugcacagucuuauggucu

SEQ ID NO: 1171978 - RNA, 19 nt, Artificial Sequence
  Description of Artificial Sequence: Synthetic oligonucleotide
  Sense strand starting at position 3855 of SEQ ID NO: 916632
accauaagacugugcaaca

SEQ ID NO: 1171979 - RNA, 19 nt, Artificial Sequence
  Description of Artificial Sequence: Synthetic oligonucleotide
  Antisense strand to SEQ ID NO: 1171978
uguugcacagucuuauggu

SEQ ID NO: 1171980 - RNA, 19 nt, Artificial Sequence
  Description of Artificial Sequence: Synthetic oligonucleotide
  Sense strand starting at position 3980 of SEQ ID NO: 916632
ggcugccaucgugaggaaa

SEQ ID NO: 1171981 - RNA, 19 nt, Artificial Sequence
  Description of Artificial Sequence: Synthetic oligonucleotide
  Antisense strand to SEQ ID NO: 1171980
uuuccucacgauggcagcc

SEQ ID NO: 1171982 - RNA, 19 nt, Artificial Sequence
  Description of Artificial Sequence: Synthetic oligonucleotide
  Sense strand starting at position 652 of SEQ ID NO: 916633
uucucauucggucaggaaa

SEQ ID NO: 1171983 - RNA, 19 nt, Artificial Sequence
  Description of Artificial Sequence: Synthetic oligonucleotide
  Antisense strand to SEQ ID NO: 1171982
uuuccugaccgaaugagaa

SEQ ID NO: 1171984 - RNA, 19 nt, Artificial Sequence
  Description of Artificial Sequence: Synthetic oligonucleotide
  Sense strand starting at position 680 of SEQ ID NO: 916633
uugaaauacgggugaacua

SEQ ID NO: 1171985 - RNA, 19 nt, Artificial Sequence
  Description of Artificial Sequence: Synthetic oligonucleotide
  Antisense strand to SEQ ID NO: 1171984
uaguucacccguauuucaa

SEQ ID NO: 1171986 - RNA, 19 nt, Artificial Sequence
  Description of Artificial Sequence: Synthetic oligonucleotide
  Sense strand starting at position 691 of SEQ ID NO: 916633
gugaacuaaguuuaaaggu

SEQ ID NO: 1171987 - RNA, 19 nt, Artificial Sequence
  Description of Artificial Sequence: Synthetic oligonucleotide
  Antisense strand to SEQ ID NO: 1171986
accuuuaaacuuaguucac

SEQ ID NO: 1171988 - RNA, 19 nt, Artificial Sequence
  Description of Artificial Sequence: Synthetic oligonucleotide
  Sense strand starting at position 854 of SEQ ID NO: 916633
ugaugaagcccauaggcau

SEQ ID NO: 1171989 - RNA, 19 nt, Artificial Sequence
  Description of Artificial Sequence: Synthetic oligonucleotide
  Antisense strand to SEQ ID NO: 1171988
augccuaugggcuucauca

SEQ ID NO: 1171990 - RNA, 19 nt, Artificial Sequence
  Description of Artificial Sequence: Synthetic oligonucleotide
  Sense strand starting at position 940 of SEQ ID NO: 916633
uuuauaaacgcucaguaag

SEQ ID NO: 1171991 - RNA, 19 nt, Artificial Sequence
  Description of Artificial Sequence: Synthetic oligonucleotide
  Antisense strand to SEQ ID NO: 1171990
cuuacugagcguuuauaaa

SEQ ID NO: 1171992 - RNA, 19 nt, Artificial Sequence
  Description of Artificial Sequence: Synthetic oligonucleotide
  Sense strand starting at position 1339 of SEQ ID NO: 916633
gagguuuggaacugaggua

SEQ ID NO: 1171993 - RNA, 19 nt, Artificial Sequence
  Description of Artificial Sequence: Synthetic oligonucleotide
  Antisense strand to SEQ ID NO: 1171992
uaccucaguuccaaaccuc

SEQ ID NO: 1171994 - RNA, 19 nt, Artificial Sequence
  Description of Artificial Sequence: Synthetic oligonucleotide
  Sense strand starting at position 1384 of SEQ ID NO: 916633
caacucugcccguaucuga

SEQ ID NO: 1171995 - RNA, 19 nt, Artificial Sequence
  Description of Artificial Sequence: Synthetic oligonucleotide
  Antisense strand to SEQ ID NO: 1171994
ucagauacgggcagaguug

SEQ ID NO: 1171996 - RNA, 19 nt, Artificial Sequence
  Description of Artificial Sequence: Synthetic oligonucleotide
  Sense strand starting at position 2122 of SEQ ID NO: 916633
gggaagagccgugagucuu

SEQ ID NO: 1171997 - RNA, 19 nt, Artificial Sequence
  Description of Artificial Sequence: Synthetic oligonucleotide
  Antisense strand to SEQ ID NO: 1171996
aagacucacggcucuuccc

SEQ ID NO: 1171998 - RNA, 19 nt, Artificial Sequence
  Description of Artificial Sequence: Synthetic oligonucleotide
  Sense strand starting at position 2524 of SEQ ID NO: 916633
cacugucuccauggagaca

SEQ ID NO: 1171999 - RNA, 19 nt, Artificial Sequence
  Description of Artificial Sequence: Synthetic oligonucleotide
  Antisense strand to SEQ ID NO: 1171998
ugucuccauggagacagug

SEQ ID NO: 1172000 - RNA, 19 nt, Artificial Sequence
  Description of Artificial Sequence: Synthetic oligonucleotide
  Sense strand starting at position 2693 of SEQ ID NO: 916633
ccuuccuuccgcuaaguca

SEQ ID NO: 1172001 - RNA, 19 nt, Artificial Sequence
  Description of Artificial Sequence: Synthetic oligonucleotide
  Antisense strand to SEQ ID NO: 1172000
ugacuuagcggaaggaagg

SEQ ID NO: 1172002 - RNA, 19 nt, Artificial Sequence
  Description of Artificial Sequence: Synthetic oligonucleotide
  Sense strand starting at position 2709 of SEQ ID NO: 916633
ucaacauaguggccuuauu

SEQ ID NO: 1172003 - RNA, 19 nt, Artificial Sequence
  Description of Artificial Sequence: Synthetic oligonucleotide
  Antisense strand to SEQ ID NO: 1172002
aauaaggccacuauguuga

SEQ ID NO: 1172004 - RNA, 19 nt, Artificial Sequence
  Description of Artificial Sequence: Synthetic oligonucleotide
  Sense strand starting at position 2819 of SEQ ID NO: 916633
gagugugcucugcugucaa

SEQ ID NO: 1172005 - RNA, 19 nt, Artificial Sequence
  Description of Artificial Sequence: Synthetic oligonucleotide
  Antisense strand to SEQ ID NO: 1172004
uugacagcagagcacacuc

SEQ ID NO: 1172006 - RNA, 19 nt, Artificial Sequence
  Description of Artificial Sequence: Synthetic oligonucleotide
  Sense strand starting at position 2931 of SEQ ID NO: 916633
cagggcugccgguaaauga

SEQ ID NO: 1172007 - RNA, 19 nt, Artificial Sequence
  Description of Artificial Sequence: Synthetic oligonucleotide
  Antisense strand to SEQ ID NO: 1172006
ucauuuaccggcagcccug

SEQ ID NO: 1172008 - RNA, 19 nt, Artificial Sequence
  Description of Artificial Sequence: Synthetic oligonucleotide
  Sense strand starting at position 2942 of SEQ ID NO: 916633
guaaaugaccaagggcaau

SEQ ID NO: 1172009 - RNA, 19 nt, Artificial Sequence
  Description of Artificial Sequence: Synthetic oligonucleotide
  Antisense strand to SEQ ID NO: 1172008
auugcccuuggucauuuac

SEQ ID NO: 1172010 - RNA, 19 nt, Artificial Sequence
  Description of Artificial Sequence: Synthetic oligonucleotide
  Sense strand starting at position 2956 of SEQ ID NO: 916633
gcaauaaugccagacgaac

SEQ ID NO: 1172011 - RNA, 19 nt, Artificial Sequence
  Description of Artificial Sequence: Synthetic oligonucleotide
  Antisense strand to SEQ ID NO: 1172010
guucgucuggcauuauugc

SEQ ID NO: 1172012 - RNA, 19 nt, Artificial Sequence
  Description of Artificial Sequence: Synthetic oligonucleotide
  Sense strand starting at position 3051 of SEQ ID NO: 916633
ccuggcuguucugcagauu

SEQ ID NO: 1172013 - RNA, 19 nt, Artificial Sequence
  Description of Artificial Sequence: Synthetic oligonucleotide
  Antisense strand to SEQ ID NO: 1172012
aaucugcagaacagccagg

SEQ ID NO: 1172014 - RNA, 19 nt, Artificial Sequence
  Description of Artificial Sequence: Synthetic oligonucleotide
  Sense strand starting at position 3052 of SEQ ID NO: 916633
cuggcuguucugcagauuu

SEQ ID NO: 1172015 - RNA, 19 nt, Artificial Sequence
  Description of Artificial Sequence: Synthetic oligonucleotide
  Antisense strand to SEQ ID NO: 1172014
aaaucugcagaacagccag

SEQ ID NO: 1172016 - RNA, 19 nt, Artificial Sequence
  Description of Artificial Sequence: Synthetic oligonucleotide
  Sense strand starting at position 3096 of SEQ ID NO: 916633
cagggaaugucuguguaaa

SEQ ID NO: 1172017 - RNA, 19 nt, Artificial Sequence
  Description of Artificial Sequence: Synthetic oligonucleotide
  Antisense strand to SEQ ID NO: 1172016
uuuacacagacauucccug

SEQ ID NO: 1172018 - RNA, 19 nt, Artificial Sequence
  Description of Artificial Sequence: Synthetic oligonucleotide
  Sense strand starting at position 3097 of SEQ ID NO: 916633
agggaaugucuguguaaac

SEQ ID NO: 1172019 - RNA, 19 nt, Artificial Sequence
  Description of Artificial Sequence: Synthetic oligonucleotide
  Antisense strand to SEQ ID NO: 1172018
guuuacacagacauucccu

SEQ ID NO: 1172020 - RNA, 19 nt, Artificial Sequence
  Description of Artificial Sequence: Synthetic oligonucleotide
  Sense strand starting at position 3098 of SEQ ID NO: 916633
gggaaugucuguguaaacu

SEQ ID NO: 1172021 - RNA, 19 nt, Artificial Sequence
  Description of Artificial Sequence: Synthetic oligonucleotide
  Antisense strand to SEQ ID NO: 1172020
aguuuacacagacauuccc

SEQ ID NO: 1172022 - RNA, 19 nt, Artificial Sequence
  Description of Artificial Sequence: Synthetic oligonucleotide
  Sense strand starting at position 3110 of SEQ ID NO: 916633
guaaacucaucccugggaa

SEQ ID NO: 1172023 - RNA, 19 nt, Artificial Sequence
  Description of Artificial Sequence: Synthetic oligonucleotide
  Antisense strand to SEQ ID NO: 1172022
uucccagggaugaguuuac

SEQ ID NO: 1172024 - RNA, 19 nt, Artificial Sequence
  Description of Artificial Sequence: Synthetic oligonucleotide
  Sense strand starting at position 3114 of SEQ ID NO: 916633
acucaucccugggaagaca

SEQ ID NO: 1172025 - RNA, 19 nt, Artificial Sequence
  Description of Artificial Sequence: Synthetic oligonucleotide
  Antisense strand to SEQ ID NO: 1172024
ugucuucccagggaugagu

SEQ ID NO: 1172026 - RNA, 19 nt, Artificial Sequence
  Description of Artificial Sequence: Synthetic oligonucleotide
  Sense strand starting at position 3131 of SEQ ID NO: 916633
cagagaagcugcucugaca

SEQ ID NO: 1172027 - RNA, 19 nt, Artificial Sequence
  Description of Artificial Sequence: Synthetic oligonucleotide
  Antisense strand to SEQ ID NO: 1172026
ugucagagcagcuucucug

SEQ ID NO: 1172028 - RNA, 19 nt, Artificial Sequence
  Description of Artificial Sequence: Synthetic oligonucleotide
  Sense strand starting at position 3177 of SEQ ID NO: 916633
agaccauaagacugugcaa

SEQ ID NO: 1172029 - RNA, 19 nt, Artificial Sequence
  Description of Artificial Sequence: Synthetic oligonucleotide
  Antisense strand to SEQ ID NO: 1172028
uugcacagucuuauggucu

SEQ ID NO: 1172030 - RNA, 19 nt, Artificial Sequence
  Description of Artificial Sequence: Synthetic oligonucleotide
  Sense strand starting at position 3179 of SEQ ID NO: 916633
accauaagacugugcaaca

SEQ ID NO: 1172031 - RNA, 19 nt, Artificial Sequence
  Description of Artificial Sequence: Synthetic oligonucleotide
  Antisense strand to SEQ ID NO: 1172030
uguugcacagucuuauggu

SEQ ID NO: 1172032 - RNA, 19 nt, Artificial Sequence
  Description of Artificial Sequence: Synthetic oligonucleotide
  Sense strand starting at position 3304 of SEQ ID NO: 916633
ggcugccaucgugaggaaa

SEQ ID NO: 1172033 - RNA, 19 nt, Artificial Sequence
  Description of Artificial Sequence: Synthetic oligonucleotide
  Antisense strand to SEQ ID NO: 1172032
uuuccucacgauggcagcc

SEQ ID NO: 1172034 - RNA, 19 nt, Artificial Sequence
  Description of Artificial Sequence: Synthetic oligonucleotide
  Sense strand starting at position 3463 of SEQ ID NO: 916633
agaguuucccaguaccacu

SEQ ID NO: 1172035 - RNA, 19 nt, Artificial Sequence
  Description of Artificial Sequence: Synthetic oligonucleotide
  Antisense strand to SEQ ID NO: 1172034
agugguacugggaaacucu

SEQ ID NO: 1172036 - RNA, 19 nt, Artificial Sequence
  Description of Artificial Sequence: Synthetic oligonucleotide
  Sense strand starting at position 3512 of SEQ ID NO: 916633
cugcuaggaguuuaucaac

SEQ ID NO: 1172037 - RNA, 19 nt, Artificial Sequence
  Description of Artificial Sequence: Synthetic oligonucleotide
  Antisense strand to SEQ ID NO: 1172036
guugauaaacuccuagcag

SEQ ID NO: 1172038 - RNA, 19 nt, Artificial Sequence
  Description of Artificial Sequence: Synthetic oligonucleotide
  Sense strand starting at position 3529 of SEQ ID NO: 916633
acugauuagccguaacuca

SEQ ID NO: 1172039 - RNA, 19 nt, Artificial Sequence
  Description of Artificial Sequence: Synthetic oligonucleotide
  Antisense strand to SEQ ID NO: 1172038
ugaguuacggcuaaucagu

SEQ ID NO: 1172040 - RNA, 19 nt, Artificial Sequence
  Description of Artificial Sequence: Synthetic oligonucleotide
  Sense strand starting at position 3537 of SEQ ID NO: 916633
gccguaacucacuuugugu

SEQ ID NO: 1172041 - RNA, 19 nt, Artificial Sequence
  Description of Artificial Sequence: Synthetic oligonucleotide
  Antisense strand to SEQ ID NO: 1172040
acacaaagugaguuacggc

SEQ ID NO: 1172042 - RNA, 19 nt, Artificial Sequence
  Description of Artificial Sequence: Synthetic oligonucleotide
  Sense strand starting at position 3543 of SEQ ID NO: 916633
acucacuuugugugcagau

SEQ ID NO: 1172043 - RNA, 19 nt, Artificial Sequence
  Description of Artificial Sequence: Synthetic oligonucleotide
  Antisense strand to SEQ ID NO: 1172042
aucugcacacaaagugagu

SEQ ID NO: 1172044 - RNA, 19 nt, Artificial Sequence
  Description of Artificial Sequence: Synthetic oligonucleotide
  Sense strand starting at position 3563 of SEQ ID NO: 916633
uuggaagaaugcuaauaau

SEQ ID NO: 1172045 - RNA, 19 nt, Artificial Sequence
  Description of Artificial Sequence: Synthetic oligonucleotide
  Antisense strand to SEQ ID NO: 1172044
auuauuagcauucuuccaa

SEQ ID NO: 1172046 - RNA, 19 nt, Artificial Sequence
  Description of Artificial Sequence: Synthetic oligonucleotide
  Sense strand starting at position 3744 of SEQ ID NO: 916633
gcauaacucuaggcaccua

SEQ ID NO: 1172047 - RNA, 19 nt, Artificial Sequence
  Description of Artificial Sequence: Synthetic oligonucleotide
  Antisense strand to SEQ ID NO: 1172046
uaggugccuagaguuaugc

SEQ ID NO: 1172048 - RNA, 19 nt, Artificial Sequence
  Description of Artificial Sequence: Synthetic oligonucleotide
  Sense strand starting at position 3764 of SEQ ID NO: 916633
uucccagucuuagagaaga

SEQ ID NO: 1172049 - RNA, 19 nt, Artificial Sequence
  Description of Artificial Sequence: Synthetic oligonucleotide
  Antisense strand to SEQ ID NO: 1172048
ucuucucuaagacugggaa

SEQ ID NO: 1172050 - RNA, 19 nt, Artificial Sequence
  Description of Artificial Sequence: Synthetic oligonucleotide
  Sense strand starting at position 3796 of SEQ ID NO: 916633
cauggagaucuuugaucuc

SEQ ID NO: 1172051 - RNA, 19 nt, Artificial Sequence
  Description of Artificial Sequence: Synthetic oligonucleotide
  Antisense strand to SEQ ID NO: 1172050
gagaucaaagaucuccaug

SEQ ID NO: 1172052 - RNA, 19 nt, Artificial Sequence
  Description of Artificial Sequence: Synthetic oligonucleotide
  Sense strand starting at position 3799 of SEQ ID NO: 916633
ggagaucuuugaucuccua

SEQ ID NO: 1172053 - RNA, 19 nt, Artificial Sequence
  Description of Artificial Sequence: Synthetic oligonucleotide
  Antisense strand to SEQ ID NO: 1172052
uaggagaucaaagaucucc

SEQ ID NO: 1172054 - RNA, 19 nt, Artificial Sequence
  Description of Artificial Sequence: Synthetic oligonucleotide
  Sense strand starting at position 3806 of SEQ ID NO: 916633
uuugaucuccuaggccaua

SEQ ID NO: 1172055 - RNA, 19 nt, Artificial Sequence
  Description of Artificial Sequence: Synthetic oligonucleotide
  Antisense strand to SEQ ID NO: 1172054
uauggccuaggagaucaaa

SEQ ID NO: 1172056 - RNA, 19 nt, Artificial Sequence
  Description of Artificial Sequence: Synthetic oligonucleotide
  Sense strand starting at position 3875 of SEQ ID NO: 916633
gggcuaauagagugacuuu

SEQ ID NO: 1172057 - RNA, 19 nt, Artificial Sequence
  Description of Artificial Sequence: Synthetic oligonucleotide
  Antisense strand to SEQ ID NO: 1172056
aaagucacucuauuagccc

SEQ ID NO: 1172058 - RNA, 19 nt, Artificial Sequence
  Description of Artificial Sequence: Synthetic oligonucleotide
  Sense strand starting at position 3887 of SEQ ID NO: 916633
ugacuuugguguuuaauau

SEQ ID NO: 1172059 - RNA, 19 nt, Artificial Sequence
  Description of Artificial Sequence: Synthetic oligonucleotide
  Antisense strand to SEQ ID NO: 1172058
auauuaaacaccaaaguca

SEQ ID NO: 1172060 - RNA, 19 nt, Artificial Sequence
  Description of Artificial Sequence: Synthetic oligonucleotide
  Sense strand starting at position 3888 of SEQ ID NO: 916633
gacuuugguguuuaauauu

SEQ ID NO: 1172061 - RNA, 19 nt, Artificial Sequence
  Description of Artificial Sequence: Synthetic oligonucleotide
  Antisense strand to SEQ ID NO: 1172060
aauauuaaacaccaaaguc

SEQ ID NO: 1172062 - RNA, 19 nt, Artificial Sequence
  Description of Artificial Sequence: Synthetic oligonucleotide
  Sense strand starting at position 129 of SEQ ID NO: 916634
uucucauucggucaggaaa

SEQ ID NO: 1172063 - RNA, 19 nt, Artificial Sequence
  Description of Artificial Sequence: Synthetic oligonucleotide
  Antisense strand to SEQ ID NO: 1172062
uuuccugaccgaaugagaa

SEQ ID NO: 1172064 - RNA, 19 nt, Artificial Sequence
  Description of Artificial Sequence: Synthetic oligonucleotide
  Sense strand starting at position 157 of SEQ ID NO: 916634
uugaaauacgggugaacua

SEQ ID NO: 1172065 - RNA, 19 nt, Artificial Sequence
  Description of Artificial Sequence: Synthetic oligonucleotide
  Antisense strand to SEQ ID NO: 1172064
uaguucacccguauuucaa

SEQ ID NO: 1172066 - RNA, 19 nt, Artificial Sequence
  Description of Artificial Sequence: Synthetic oligonucleotide
  Sense strand starting at position 168 of SEQ ID NO: 916634
gugaacuaaguuuaaaggu

SEQ ID NO: 1172067 - RNA, 19 nt, Artificial Sequence
  Description of Artificial Sequence: Synthetic oligonucleotide
  Antisense strand to SEQ ID NO: 1172066
accuuuaaacuuaguucac

SEQ ID NO: 1172068 - RNA, 19 nt, Artificial Sequence
  Description of Artificial Sequence: Synthetic oligonucleotide
  Sense strand starting at position 331 of SEQ ID NO: 916634
ugaugaagcccauaggcau

SEQ ID NO: 1172069 - RNA, 19 nt, Artificial Sequence
  Description of Artificial Sequence: Synthetic oligonucleotide
  Antisense strand to SEQ ID NO: 1172068
augccuaugggcuucauca

SEQ ID NO: 1172070 - RNA, 19 nt, Artificial Sequence
  Description of Artificial Sequence: Synthetic oligonucleotide
  Sense strand starting at position 417 of SEQ ID NO: 916634
uuuauaaacgcucaguaag

SEQ ID NO: 1172071 - RNA, 19 nt, Artificial Sequence
  Description of Artificial Sequence: Synthetic oligonucleotide
  Antisense strand to SEQ ID NO: 1172070
cuuacugagcguuuauaaa

SEQ ID NO: 1172072 - RNA, 19 nt, Artificial Sequence
  Description of Artificial Sequence: Synthetic oligonucleotide
  Sense strand starting at position 816 of SEQ ID NO: 916634
gagguuuggaacugaggua

SEQ ID NO: 1172073 - RNA, 19 nt, Artificial Sequence
  Description of Artificial Sequence: Synthetic oligonucleotide
  Antisense strand to SEQ ID NO: 1172072
uaccucaguuccaaaccuc

SEQ ID NO: 1172074 - RNA, 19 nt, Artificial Sequence
  Description of Artificial Sequence: Synthetic oligonucleotide
  Sense strand starting at position 861 of SEQ ID NO: 916634
caacucugcccguaucuga

SEQ ID NO: 1172075 - RNA, 19 nt, Artificial Sequence
  Description of Artificial Sequence: Synthetic oligonucleotide
  Antisense strand to SEQ ID NO: 1172074
ucagauacgggcagaguug

SEQ ID NO: 1172076 - RNA, 19 nt, Artificial Sequence
  Description of Artificial Sequence: Synthetic oligonucleotide
  Sense strand starting at position 1599 of SEQ ID NO: 916634
gggaagagccgugagucuu

SEQ ID NO: 1172077 - RNA, 19 nt, Artificial Sequence
  Description of Artificial Sequence: Synthetic oligonucleotide
  Antisense strand to SEQ ID NO: 1172076
aagacucacggcucuuccc

SEQ ID NO: 1172078 - RNA, 19 nt, Artificial Sequence
  Description of Artificial Sequence: Synthetic oligonucleotide
  Sense strand starting at position 2001 of SEQ ID NO: 916634
cacugucuccauggagaca

SEQ ID NO: 1172079 - RNA, 19 nt, Artificial Sequence
  Description of Artificial Sequence: Synthetic oligonucleotide
  Antisense strand to SEQ ID NO: 1172078
ugucuccauggagacagug

SEQ ID NO: 1172080 - RNA, 19 nt, Artificial Sequence
  Description of Artificial Sequence: Synthetic oligonucleotide
  Sense strand starting at position 2186 of SEQ ID NO: 916634
ucaacauaguggccuuauu

SEQ ID NO: 1172081 - RNA, 19 nt, Artificial Sequence
  Description of Artificial Sequence: Synthetic oligonucleotide
  Antisense strand to SEQ ID NO: 1172080
aauaaggccacuauguuga

SEQ ID NO: 1172082 - RNA, 19 nt, Artificial Sequence
  Description of Artificial Sequence: Synthetic oligonucleotide
  Sense strand starting at position 2296 of SEQ ID NO: 916634
gagugugcucugcugucaa

SEQ ID NO: 1172083 - RNA, 19 nt, Artificial Sequence
  Description of Artificial Sequence: Synthetic oligonucleotide
  Antisense strand to SEQ ID NO: 1172082
uugacagcagagcacacuc

SEQ ID NO: 1172084 - RNA, 19 nt, Artificial Sequence
  Description of Artificial Sequence: Synthetic oligonucleotide
  Sense strand starting at position 2408 of SEQ ID NO: 916634
cagggcugccgguaaauga

SEQ ID NO: 1172085 - RNA, 19 nt, Artificial Sequence
  Description of Artificial Sequence: Synthetic oligonucleotide
  Antisense strand to SEQ ID NO: 1172084
ucauuuaccggcagcccug

SEQ ID NO: 1172086 - RNA, 19 nt, Artificial Sequence
  Description of Artificial Sequence: Synthetic oligonucleotide
  Sense strand starting at position 2419 of SEQ ID NO: 916634
guaaaugaccaagggcaau

SEQ ID NO: 1172087 - RNA, 19 nt, Artificial Sequence
  Description of Artificial Sequence: Synthetic oligonucleotide
  Antisense strand to SEQ ID NO: 1172086
auugcccuuggucauuuac

SEQ ID NO: 1172088 - RNA, 19 nt, Artificial Sequence
  Description of Artificial Sequence: Synthetic oligonucleotide
  Sense strand starting at position 2433 of SEQ ID NO: 916634
gcaauaaugccagacgaac

SEQ ID NO: 1172089 - RNA, 19 nt, Artificial Sequence
  Description of Artificial Sequence: Synthetic oligonucleotide
  Antisense strand to SEQ ID NO: 1172088
guucgucuggcauuauugc

SEQ ID NO: 1172090 - RNA, 19 nt, Artificial Sequence
  Description of Artificial Sequence: Synthetic oligonucleotide
  Sense strand starting at position 2529 of SEQ ID NO: 916634
cuggcuguucugcagauuu

SEQ ID NO: 1172091 - RNA, 19 nt, Artificial Sequence
  Description of Artificial Sequence: Synthetic oligonucleotide
  Antisense strand to SEQ ID NO: 1172090
aaaucugcagaacagccag

SEQ ID NO: 1172092 - RNA, 19 nt, Artificial Sequence
  Description of Artificial Sequence: Synthetic oligonucleotide
  Sense strand starting at position 2573 of SEQ ID NO: 916634
cagggaaugucuguguaaa

SEQ ID NO: 1172093 - RNA, 19 nt, Artificial Sequence
  Description of Artificial Sequence: Synthetic oligonucleotide
  Antisense strand to SEQ ID NO: 1172092
uuuacacagacauucccug

SEQ ID NO: 1172094 - RNA, 19 nt, Artificial Sequence
  Description of Artificial Sequence: Synthetic oligonucleotide
  Sense strand starting at position 2574 of SEQ ID NO: 916634
agggaaugucuguguaaac

SEQ ID NO: 1172095 - RNA, 19 nt, Artificial Sequence
  Description of Artificial Sequence: Synthetic oligonucleotide
  Antisense strand to SEQ ID NO: 1172094
guuuacacagacauucccu

SEQ ID NO: 1172096 - RNA, 19 nt, Artificial Sequence
  Description of Artificial Sequence: Synthetic oligonucleotide
  Sense strand starting at position 2575 of SEQ ID NO: 916634
gggaaugucuguguaaacu

SEQ ID NO: 1172097 - RNA, 19 nt, Artificial Sequence
  Description of Artificial Sequence: Synthetic oligonucleotide
  Antisense strand to SEQ ID NO: 1172096
aguuuacacagacauuccc

SEQ ID NO: 1172098 - RNA, 19 nt, Artificial Sequence
  Description of Artificial Sequence: Synthetic oligonucleotide
  Sense strand starting at position 2587 of SEQ ID NO: 916634
guaaacucaucccugggaa

SEQ ID NO: 1172099 - RNA, 19 nt, Artificial Sequence
  Description of Artificial Sequence: Synthetic oligonucleotide
  Antisense strand to SEQ ID NO: 1172098
uucccagggaugaguuuac

SEQ ID NO: 1172100 - RNA, 19 nt, Artificial Sequence
  Description of Artificial Sequence: Synthetic oligonucleotide
  Sense strand starting at position 2608 of SEQ ID NO: 916634
cagagaagcugcucugaca

SEQ ID NO: 1172101 - RNA, 19 nt, Artificial Sequence
  Description of Artificial Sequence: Synthetic oligonucleotide
  Antisense strand to SEQ ID NO: 1172100
ugucagagcagcuucucug

SEQ ID NO: 1172102 - RNA, 19 nt, Artificial Sequence
  Description of Artificial Sequence: Synthetic oligonucleotide
  Sense strand starting at position 2654 of SEQ ID NO: 916634
agaccauaagacugugcaa

SEQ ID NO: 1172103 - RNA, 19 nt, Artificial Sequence
  Description of Artificial Sequence: Synthetic oligonucleotide
  Antisense strand to SEQ ID NO: 1172102
uugcacagucuuauggucu

SEQ ID NO: 1172104 - RNA, 19 nt, Artificial Sequence
  Description of Artificial Sequence: Synthetic oligonucleotide
  Sense strand starting at position 2656 of SEQ ID NO: 916634
accauaagacugugcaaca

SEQ ID NO: 1172105 - RNA, 19 nt, Artificial Sequence
  Description of Artificial Sequence: Synthetic oligonucleotide
  Antisense strand to SEQ ID NO: 1172104
uguugcacagucuuauggu

SEQ ID NO: 1172106 - RNA, 19 nt, Artificial Sequence
  Description of Artificial Sequence: Synthetic oligonucleotide
  Sense strand starting at position 2781 of SEQ ID NO: 916634
ggcugccaucgugaggaaa

SEQ ID NO: 1172107 - RNA, 19 nt, Artificial Sequence
  Description of Artificial Sequence: Synthetic oligonucleotide
  Antisense strand to SEQ ID NO: 1172106
uuuccucacgauggcagcc

SEQ ID NO: 1172108 - RNA, 19 nt, Artificial Sequence
  Description of Artificial Sequence: Synthetic oligonucleotide
  Sense strand starting at position 2940 of SEQ ID NO: 916634
agaguuucccaguaccacu

SEQ ID NO: 1172109 - RNA, 19 nt, Artificial Sequence
  Description of Artificial Sequence: Synthetic oligonucleotide
  Antisense strand to SEQ ID NO: 1172108
agugguacugggaaacucu

SEQ ID NO: 1172110 - RNA, 19 nt, Artificial Sequence
  Description of Artificial Sequence: Synthetic oligonucleotide
  Sense strand starting at position 2989 of SEQ ID NO: 916634
cugcuaggaguuuaucaac

SEQ ID NO: 1172111 - RNA, 19 nt, Artificial Sequence
  Description of Artificial Sequence: Synthetic oligonucleotide
  Antisense strand to SEQ ID NO: 1172110
guugauaaacuccuagcag

SEQ ID NO: 1172112 - RNA, 19 nt, Artificial Sequence
  Description of Artificial Sequence: Synthetic oligonucleotide
  Sense strand starting at position 3006 of SEQ ID NO: 916634
acugauuagccguaacuca

SEQ ID NO: 1172113 - RNA, 19 nt, Artificial Sequence
  Description of Artificial Sequence: Synthetic oligonucleotide
  Antisense strand to SEQ ID NO: 1172112
ugaguuacggcuaaucagu

SEQ ID NO: 1172114 - RNA, 19 nt, Artificial Sequence
  Description of Artificial Sequence: Synthetic oligonucleotide
  Sense strand starting at position 3014 of SEQ ID NO: 916634
gccguaacucacuuugugu

SEQ ID NO: 1172115 - RNA, 19 nt, Artificial Sequence
  Description of Artificial Sequence: Synthetic oligonucleotide
  Antisense strand to SEQ ID NO: 1172114
acacaaagugaguuacggc

SEQ ID NO: 1172116 - RNA, 19 nt, Artificial Sequence
  Description of Artificial Sequence: Synthetic oligonucleotide
  Sense strand starting at position 3221 of SEQ ID NO: 916634
gcauaacucuaggcaccua

SEQ ID NO: 1172117 - RNA, 19 nt, Artificial Sequence
  Description of Artificial Sequence: Synthetic oligonucleotide
  Antisense strand to SEQ ID NO: 1172116
uaggugccuagaguuaugc

SEQ ID NO: 1172118 - RNA, 19 nt, Artificial Sequence
  Description of Artificial Sequence: Synthetic oligonucleotide
  Sense strand starting at position 3273 of SEQ ID NO: 916634
cauggagaucuuugaucuc

SEQ ID NO: 1172119 - RNA, 19 nt, Artificial Sequence
  Description of Artificial Sequence: Synthetic oligonucleotide
  Antisense strand to SEQ ID NO: 1172118
gagaucaaagaucuccaug

SEQ ID NO: 1172120 - RNA, 19 nt, Artificial Sequence
  Description of Artificial Sequence: Synthetic oligonucleotide
  Sense strand starting at position 3276 of SEQ ID NO: 916634
ggagaucuuugaucuccua

SEQ ID NO: 1172121 - RNA, 19 nt, Artificial Sequence
  Description of Artificial Sequence: Synthetic oligonucleotide
  Antisense strand to SEQ ID NO: 1172120
uaggagaucaaagaucucc

SEQ ID NO: 1172122 - RNA, 19 nt, Artificial Sequence
  Description of Artificial Sequence: Synthetic oligonucleotide
  Sense strand starting at position 3283 of SEQ ID NO: 916634
uuugaucuccuaggccaua

SEQ ID NO: 1172123 - RNA, 19 nt, Artificial Sequence
  Description of Artificial Sequence: Synthetic oligonucleotide
  Antisense strand to SEQ ID NO: 1172122
uauggccuaggagaucaaa

SEQ ID NO: 1172124 - RNA, 19 nt, Artificial Sequence
  Description of Artificial Sequence: Synthetic oligonucleotide
  Sense strand starting at position 3352 of SEQ ID NO: 916634
gggcuaauagagugacuuu

SEQ ID NO: 1172125 - RNA, 19 nt, Artificial Sequence
  Description of Artificial Sequence: Synthetic oligonucleotide
  Antisense strand to SEQ ID NO: 1172124
aaagucacucuauuagccc

SEQ ID NO: 1172126 - RNA, 19 nt, Artificial Sequence
  Description of Artificial Sequence: Synthetic oligonucleotide
  Sense strand starting at position 3364 of SEQ ID NO: 916634
ugacuuugguguuuaauau

SEQ ID NO: 1172127 - RNA, 19 nt, Artificial Sequence
  Description of Artificial Sequence: Synthetic oligonucleotide
  Antisense strand to SEQ ID NO: 1172126
auauuaaacaccaaaguca

SEQ ID NO: 1172128 - RNA, 19 nt, Artificial Sequence
  Description of Artificial Sequence: Synthetic oligonucleotide
  Sense strand starting at position 3365 of SEQ ID NO: 916634
gacuuugguguuuaauauu

SEQ ID NO: 1172129 - RNA, 19 nt, Artificial Sequence
  Description of Artificial Sequence: Synthetic oligonucleotide
  Antisense strand to SEQ ID NO: 1172128
aauauuaaacaccaaaguc

SEQ ID NO: 1172130 - RNA, 19 nt, Artificial Sequence
  Description of Artificial Sequence: Synthetic oligonucleotide
  Sense strand starting at position 3501 of SEQ ID NO: 916634
auucuuuaauguuugacga

SEQ ID NO: 1172131 - RNA, 19 nt, Artificial Sequence
  Description of Artificial Sequence: Synthetic oligonucleotide
  Antisense strand to SEQ ID NO: 1172130
ucgucaaacauuaaagaau

SEQ ID NO: 1172132 - RNA, 19 nt, Artificial Sequence
  Description of Artificial Sequence: Synthetic oligonucleotide
  Sense strand starting at position 3502 of SEQ ID NO: 916634
uucuuuaauguuugacgaa

SEQ ID NO: 1172133 - RNA, 19 nt, Artificial Sequence
  Description of Artificial Sequence: Synthetic oligonucleotide
  Antisense strand to SEQ ID NO: 1172132
uucgucaaacauuaaagaa

SEQ ID NO: 1172134 - RNA, 19 nt, Artificial Sequence
  Description of Artificial Sequence: Synthetic oligonucleotide
  Sense strand starting at position 3678 of SEQ ID NO: 916634
aguugagugacuugcacaa

SEQ ID NO: 1172135 - RNA, 19 nt, Artificial Sequence
  Description of Artificial Sequence: Synthetic oligonucleotide
  Antisense strand to SEQ ID NO: 1172134
uugugcaagucacucaacu

SEQ ID NO: 1172136 - RNA, 19 nt, Artificial Sequence
  Description of Artificial Sequence: Synthetic oligonucleotide
  Sense strand starting at position 3752 of SEQ ID NO: 916634
cuguaaagggcucaauggu

SEQ ID NO: 1172137 - RNA, 19 nt, Artificial Sequence
  Description of Artificial Sequence: Synthetic oligonucleotide
  Antisense strand to SEQ ID NO: 1172136
accauugagcccuuuacag

SEQ ID NO: 1172138 - RNA, 19 nt, Artificial Sequence
  Description of Artificial Sequence: Synthetic oligonucleotide
  Sense strand starting at position 3758 of SEQ ID NO: 916634
agggcucaauggucaauau

SEQ ID NO: 1172139 - RNA, 19 nt, Artificial Sequence
  Description of Artificial Sequence: Synthetic oligonucleotide
  Antisense strand to SEQ ID NO: 1172138
auauugaccauugagcccu

SEQ ID NO: 1172140 - RNA, 19 nt, Artificial Sequence
  Description of Artificial Sequence: Synthetic oligonucleotide
  Sense strand starting at position 3759 of SEQ ID NO: 916634
gggcucaauggucaauauu

SEQ ID NO: 1172141 - RNA, 19 nt, Artificial Sequence
  Description of Artificial Sequence: Synthetic oligonucleotide
  Antisense strand to SEQ ID NO: 1172140
aauauugaccauugagccc

SEQ ID NO: 1172142 - RNA, 19 nt, Artificial Sequence
  Description of Artificial Sequence: Synthetic oligonucleotide
  Sense strand starting at position 93 of SEQ ID NO: 916635
auagaauucugucccauag

SEQ ID NO: 1172143 - RNA, 19 nt, Artificial Sequence
  Description of Artificial Sequence: Synthetic oligonucleotide
  Antisense strand to SEQ ID NO: 1172142
cuaugggacagaauucuau

SEQ ID NO: 1172144 - RNA, 19 nt, Artificial Sequence
  Description of Artificial Sequence: Synthetic oligonucleotide
  Sense strand starting at position 95 of SEQ ID NO: 916635
agaauucugucccauagaa

SEQ ID NO: 1172145 - RNA, 19 nt, Artificial Sequence
  Description of Artificial Sequence: Synthetic oligonucleotide
  Antisense strand to SEQ ID NO: 1172144
uucuaugggacagaauucu

SEQ ID NO: 1172146 - RNA, 19 nt, Artificial Sequence
  Description of Artificial Sequence: Synthetic oligonucleotide
  Sense strand starting at position 811 of SEQ ID NO: 916635
uucucauucggucaggaaa

SEQ ID NO: 1172147 - RNA, 19 nt, Artificial Sequence
  Description of Artificial Sequence: Synthetic oligonucleotide
  Antisense strand to SEQ ID NO: 1172146
uuuccugaccgaaugagaa

SEQ ID NO: 1172148 - RNA, 19 nt, Artificial Sequence
  Description of Artificial Sequence: Synthetic oligonucleotide
  Sense strand starting at position 839 of SEQ ID NO: 916635
uugaaauacgggugaacua

SEQ ID NO: 1172149 - RNA, 19 nt, Artificial Sequence
  Description of Artificial Sequence: Synthetic oligonucleotide
  Antisense strand to SEQ ID NO: 1172148
uaguucacccguauuucaa

SEQ ID NO: 1172150 - RNA, 19 nt, Artificial Sequence
  Description of Artificial Sequence: Synthetic oligonucleotide
  Sense strand starting at position 850 of SEQ ID NO: 916635
gugaacuaaguuuaaaggu

SEQ ID NO: 1172151 - RNA, 19 nt, Artificial Sequence
  Description of Artificial Sequence: Synthetic oligonucleotide
  Antisense strand to SEQ ID NO: 1172150
accuuuaaacuuaguucac

SEQ ID NO: 1172152 - RNA, 19 nt, Artificial Sequence
  Description of Artificial Sequence: Synthetic oligonucleotide
  Sense strand starting at position 1013 of SEQ ID NO: 916635
ugaugaagcccauaggcau

SEQ ID NO: 1172153 - RNA, 19 nt, Artificial Sequence
  Description of Artificial Sequence: Synthetic oligonucleotide
  Antisense strand to SEQ ID NO: 1172152
augccuaugggcuucauca

SEQ ID NO: 1172154 - RNA, 19 nt, Artificial Sequence
  Description of Artificial Sequence: Synthetic oligonucleotide
  Sense strand starting at position 1099 of SEQ ID NO: 916635
uuuauaaacgcucaguaag

SEQ ID NO: 1172155 - RNA, 19 nt, Artificial Sequence
  Description of Artificial Sequence: Synthetic oligonucleotide
  Antisense strand to SEQ ID NO: 1172154
cuuacugagcguuuauaaa

SEQ ID NO: 1172156 - RNA, 19 nt, Artificial Sequence
  Description of Artificial Sequence: Synthetic oligonucleotide
  Sense strand starting at position 1498 of SEQ ID NO: 916635
gagguuuggaacugaggua

SEQ ID NO: 1172157 - RNA, 19 nt, Artificial Sequence
  Description of Artificial Sequence: Synthetic oligonucleotide
  Antisense strand to SEQ ID NO: 1172156
uaccucaguuccaaaccuc

SEQ ID NO: 1172158 - RNA, 19 nt, Artificial Sequence
  Description of Artificial Sequence: Synthetic oligonucleotide
  Sense strand starting at position 1543 of SEQ ID NO: 916635
caacucugcccguaucuga

SEQ ID NO: 1172159 - RNA, 19 nt, Artificial Sequence
  Description of Artificial Sequence: Synthetic oligonucleotide
  Antisense strand to SEQ ID NO: 1172158
ucagauacgggcagaguug

SEQ ID NO: 1172160 - RNA, 19 nt, Artificial Sequence
  Description of Artificial Sequence: Synthetic oligonucleotide
  Sense strand starting at position 2281 of SEQ ID NO: 916635
gggaagagccgugagucuu

SEQ ID NO: 1172161 - RNA, 19 nt, Artificial Sequence
  Description of Artificial Sequence: Synthetic oligonucleotide
  Antisense strand to SEQ ID NO: 1172160
aagacucacggcucuuccc

SEQ ID NO: 1172162 - RNA, 19 nt, Artificial Sequence
  Description of Artificial Sequence: Synthetic oligonucleotide
  Sense strand starting at position 2683 of SEQ ID NO: 916635
cacugucuccauggagaca

SEQ ID NO: 1172163 - RNA, 19 nt, Artificial Sequence
  Description of Artificial Sequence: Synthetic oligonucleotide
  Antisense strand to SEQ ID NO: 1172162
ugucuccauggagacagug

SEQ ID NO: 1172164 - RNA, 19 nt, Artificial Sequence
  Description of Artificial Sequence: Synthetic oligonucleotide
  Sense strand starting at position 2852 of SEQ ID NO: 916635
ccuuccuuccgcuaaguca

SEQ ID NO: 1172165 - RNA, 19 nt, Artificial Sequence
  Description of Artificial Sequence: Synthetic oligonucleotide
  Antisense strand to SEQ ID NO: 1172164
ugacuuagcggaaggaagg

SEQ ID NO: 1172166 - RNA, 19 nt, Artificial Sequence
  Description of Artificial Sequence: Synthetic oligonucleotide
  Sense strand starting at position 2868 of SEQ ID NO: 916635
ucaacauaguggccuuauu

SEQ ID NO: 1172167 - RNA, 19 nt, Artificial Sequence
  Description of Artificial Sequence: Synthetic oligonucleotide
  Antisense strand to SEQ ID NO: 1172166
aauaaggccacuauguuga

SEQ ID NO: 1172168 - RNA, 19 nt, Artificial Sequence
  Description of Artificial Sequence: Synthetic oligonucleotide
  Sense strand starting at position 2978 of SEQ ID NO: 916635
gagugugcucugcugucaa

SEQ ID NO: 1172169 - RNA, 19 nt, Artificial Sequence
  Description of Artificial Sequence: Synthetic oligonucleotide
  Antisense strand to SEQ ID NO: 1172168
uugacagcagagcacacuc

SEQ ID NO: 1172170 - RNA, 19 nt, Artificial Sequence
  Description of Artificial Sequence: Synthetic oligonucleotide
  Sense strand starting at position 3090 of SEQ ID NO: 916635
cagggcugccgguaaauga

SEQ ID NO: 1172171 - RNA, 19 nt, Artificial Sequence
  Description of Artificial Sequence: Synthetic oligonucleotide
  Antisense strand to SEQ ID NO: 1172170
ucauuuaccggcagcccug

SEQ ID NO: 1172172 - RNA, 19 nt, Artificial Sequence
  Description of Artificial Sequence: Synthetic oligonucleotide
  Sense strand starting at position 3101 of SEQ ID NO: 916635
guaaaugaccaagggcaau

SEQ ID NO: 1172173 - RNA, 19 nt, Artificial Sequence
  Description of Artificial Sequence: Synthetic oligonucleotide
  Antisense strand to SEQ ID NO: 1172172
auugcccuuggucauuuac

SEQ ID NO: 1172174 - RNA, 19 nt, Artificial Sequence
  Description of Artificial Sequence: Synthetic oligonucleotide
  Sense strand starting at position 3115 of SEQ ID NO: 916635
gcaauaaugccagacgaac

SEQ ID NO: 1172175 - RNA, 19 nt, Artificial Sequence
  Description of Artificial Sequence: Synthetic oligonucleotide
  Antisense strand to SEQ ID NO: 1172174
guucgucuggcauuauugc

SEQ ID NO: 1172176 - RNA, 19 nt, Artificial Sequence
  Description of Artificial Sequence: Synthetic oligonucleotide
  Sense strand starting at position 3210 of SEQ ID NO: 916635
ccuggcuguucugcagauu

SEQ ID NO: 1172177 - RNA, 19 nt, Artificial Sequence
  Description of Artificial Sequence: Synthetic oligonucleotide
  Antisense strand to SEQ ID NO: 1172176
aaucugcagaacagccagg

SEQ ID NO: 1172178 - RNA, 19 nt, Artificial Sequence
  Description of Artificial Sequence: Synthetic oligonucleotide
  Sense strand starting at position 3211 of SEQ ID NO: 916635
cuggcuguucugcagauuu

SEQ ID NO: 1172179 - RNA, 19 nt, Artificial Sequence
  Description of Artificial Sequence: Synthetic oligonucleotide
  Antisense strand to SEQ ID NO: 1172178
aaaucugcagaacagccag

SEQ ID NO: 1172180 - RNA, 19 nt, Artificial Sequence
  Description of Artificial Sequence: Synthetic oligonucleotide
  Sense strand starting at position 3255 of SEQ ID NO: 916635
cagggaaugucuguguaaa

SEQ ID NO: 1172181 - RNA, 19 nt, Artificial Sequence
  Description of Artificial Sequence: Synthetic oligonucleotide
  Antisense strand to SEQ ID NO: 1172180
uuuacacagacauucccug

SEQ ID NO: 1172182 - RNA, 19 nt, Artificial Sequence
  Description of Artificial Sequence: Synthetic oligonucleotide
  Sense strand starting at position 3256 of SEQ ID NO: 916635
agggaaugucuguguaaac

SEQ ID NO: 1172183 - RNA, 19 nt, Artificial Sequence
  Description of Artificial Sequence: Synthetic oligonucleotide
  Antisense strand to SEQ ID NO: 1172182
guuuacacagacauucccu

SEQ ID NO: 1172184 - RNA, 19 nt, Artificial Sequence
  Description of Artificial Sequence: Synthetic oligonucleotide
  Sense strand starting at position 3257 of SEQ ID NO: 916635
gggaaugucuguguaaacu

SEQ ID NO: 1172185 - RNA, 19 nt, Artificial Sequence
  Description of Artificial Sequence: Synthetic oligonucleotide
  Antisense strand to SEQ ID NO: 1172184
aguuuacacagacauuccc

SEQ ID NO: 1172186 - RNA, 19 nt, Artificial Sequence
  Description of Artificial Sequence: Synthetic oligonucleotide
  Sense strand starting at position 3269 of SEQ ID NO: 916635
guaaacucaucccugggaa

SEQ ID NO: 1172187 - RNA, 19 nt, Artificial Sequence
  Description of Artificial Sequence: Synthetic oligonucleotide
  Antisense strand to SEQ ID NO: 1172186
uucccagggaugaguuuac

SEQ ID NO: 1172188 - RNA, 19 nt, Artificial Sequence
  Description of Artificial Sequence: Synthetic oligonucleotide
  Sense strand starting at position 3273 of SEQ ID NO: 916635
acucaucccugggaagaca

SEQ ID NO: 1172189 - RNA, 19 nt, Artificial Sequence
  Description of Artificial Sequence: Synthetic oligonucleotide
  Antisense strand to SEQ ID NO: 1172188
ugucuucccagggaugagu

SEQ ID NO: 1172190 - RNA, 19 nt, Artificial Sequence
  Description of Artificial Sequence: Synthetic oligonucleotide
  Sense strand starting at position 3290 of SEQ ID NO: 916635
cagagaagcugcucugaca

SEQ ID NO: 1172191 - RNA, 19 nt, Artificial Sequence
  Description of Artificial Sequence: Synthetic oligonucleotide
  Antisense strand to SEQ ID NO: 1172190
ugucagagcagcuucucug

SEQ ID NO: 1172192 - RNA, 19 nt, Artificial Sequence
  Description of Artificial Sequence: Synthetic oligonucleotide
  Sense strand starting at position 3336 of SEQ ID NO: 916635
agaccauaagacugugcaa

SEQ ID NO: 1172193 - RNA, 19 nt, Artificial Sequence
  Description of Artificial Sequence: Synthetic oligonucleotide
  Antisense strand to SEQ ID NO: 1172192
uugcacagucuuauggucu

SEQ ID NO: 1172194 - RNA, 19 nt, Artificial Sequence
  Description of Artificial Sequence: Synthetic oligonucleotide
  Sense strand starting at position 3338 of SEQ ID NO: 916635
accauaagacugugcaaca

SEQ ID NO: 1172195 - RNA, 19 nt, Artificial Sequence
  Description of Artificial Sequence: Synthetic oligonucleotide
  Antisense strand to SEQ ID NO: 1172194
uguugcacagucuuauggu

SEQ ID NO: 1172196 - RNA, 19 nt, Artificial Sequence
  Description of Artificial Sequence: Synthetic oligonucleotide
  Sense strand starting at position 3463 of SEQ ID NO: 916635
ggcugccaucgugaggaaa

SEQ ID NO: 1172197 - RNA, 19 nt, Artificial Sequence
  Description of Artificial Sequence: Synthetic oligonucleotide
  Antisense strand to SEQ ID NO: 1172196
uuuccucacgauggcagcc

SEQ ID NO: 1172198 - RNA, 19 nt, Artificial Sequence
  Description of Artificial Sequence: Synthetic oligonucleotide
  Sense strand starting at position 3622 of SEQ ID NO: 916635
agaguuucccaguaccacu

SEQ ID NO: 1172199 - RNA, 19 nt, Artificial Sequence
  Description of Artificial Sequence: Synthetic oligonucleotide
  Antisense strand to SEQ ID NO: 1172198
agugguacugggaaacucu

SEQ ID NO: 1172200 - RNA, 19 nt, Artificial Sequence
  Description of Artificial Sequence: Synthetic oligonucleotide
  Sense strand starting at position 3671 of SEQ ID NO: 916635
cugcuaggaguuuaucaac

SEQ ID NO: 1172201 - RNA, 19 nt, Artificial Sequence
  Description of Artificial Sequence: Synthetic oligonucleotide
  Antisense strand to SEQ ID NO: 1172200
guugauaaacuccuagcag

SEQ ID NO: 1172202 - RNA, 19 nt, Artificial Sequence
  Description of Artificial Sequence: Synthetic oligonucleotide
  Sense strand starting at position 3674 of SEQ ID NO: 916635
cuaggaguuuaucaacuga

SEQ ID NO: 1172203 - RNA, 19 nt, Artificial Sequence
  Description of Artificial Sequence: Synthetic oligonucleotide
  Antisense strand to SEQ ID NO: 1172202
ucaguugauaaacuccuag

SEQ ID NO: 1172204 - RNA, 19 nt, Artificial Sequence
  Description of Artificial Sequence: Synthetic oligonucleotide
  Sense strand starting at position 3688 of SEQ ID NO: 916635
acugauuagccguaacuca

SEQ ID NO: 1172205 - RNA, 19 nt, Artificial Sequence
  Description of Artificial Sequence: Synthetic oligonucleotide
  Antisense strand to SEQ ID NO: 1172204
ugaguuacggcuaaucagu

SEQ ID NO: 1172206 - RNA, 19 nt, Artificial Sequence
  Description of Artificial Sequence: Synthetic oligonucleotide
  Sense strand starting at position 3696 of SEQ ID NO: 916635
gccguaacucacuuugugu

SEQ ID NO: 1172207 - RNA, 19 nt, Artificial Sequence
  Description of Artificial Sequence: Synthetic oligonucleotide
  Antisense strand to SEQ ID NO: 1172206
acacaaagugaguuacggc

SEQ ID NO: 1172208 - RNA, 19 nt, Artificial Sequence
  Description of Artificial Sequence: Synthetic oligonucleotide
  Sense strand starting at position 3702 of SEQ ID NO: 916635
acucacuuugugugcagau

SEQ ID NO: 1172209 - RNA, 19 nt, Artificial Sequence
  Description of Artificial Sequence: Synthetic oligonucleotide
  Antisense strand to SEQ ID NO: 1172208
aucugcacacaaagugagu

SEQ ID NO: 1172210 - RNA, 19 nt, Artificial Sequence
  Description of Artificial Sequence: Synthetic oligonucleotide
  Sense strand starting at position 3722 of SEQ ID NO: 916635
uuggaagaaugcuaauaau

SEQ ID NO: 1172211 - RNA, 19 nt, Artificial Sequence
  Description of Artificial Sequence: Synthetic oligonucleotide
  Antisense strand to SEQ ID NO: 1172210
auuauuagcauucuuccaa

SEQ ID NO: 1172212 - RNA, 19 nt, Artificial Sequence
  Description of Artificial Sequence: Synthetic oligonucleotide
  Sense strand starting at position 3903 of SEQ ID NO: 916635
gcauaacucuaggcaccua

SEQ ID NO: 1172213 - RNA, 19 nt, Artificial Sequence
  Description of Artificial Sequence: Synthetic oligonucleotide
  Antisense strand to SEQ ID NO: 1172212
uaggugccuagaguuaugc

SEQ ID NO: 1172214 - RNA, 19 nt, Artificial Sequence
  Description of Artificial Sequence: Synthetic oligonucleotide
  Sense strand starting at position 3923 of SEQ ID NO: 916635
uucccagucuuagagaaga

SEQ ID NO: 1172215 - RNA, 19 nt, Artificial Sequence
  Description of Artificial Sequence: Synthetic oligonucleotide
  Antisense strand to SEQ ID NO: 1172214
ucuucucuaagacugggaa

SEQ ID NO: 1172216 - RNA, 19 nt, Artificial Sequence
  Description of Artificial Sequence: Synthetic oligonucleotide
  Sense strand starting at position 3955 of SEQ ID NO: 916635
cauggagaucuuugaucuc

SEQ ID NO: 1172217 - RNA, 19 nt, Artificial Sequence
  Description of Artificial Sequence: Synthetic oligonucleotide
  Antisense strand to SEQ ID NO: 1172216
gagaucaaagaucuccaug

SEQ ID NO: 1172218 - RNA, 19 nt, Artificial Sequence
  Description of Artificial Sequence: Synthetic oligonucleotide
  Sense strand starting at position 3958 of SEQ ID NO: 916635
ggagaucuuugaucuccua

SEQ ID NO: 1172219 - RNA, 19 nt, Artificial Sequence
  Description of Artificial Sequence: Synthetic oligonucleotide
  Antisense strand to SEQ ID NO: 1172218
uaggagaucaaagaucucc

SEQ ID NO: 1172220 - RNA, 19 nt, Artificial Sequence
  Description of Artificial Sequence: Synthetic oligonucleotide
  Sense strand starting at position 3965 of SEQ ID NO: 916635
uuugaucuccuaggccaua

SEQ ID NO: 1172221 - RNA, 19 nt, Artificial Sequence
  Description of Artificial Sequence: Synthetic oligonucleotide
  Antisense strand to SEQ ID NO: 1172220
uauggccuaggagaucaaa

SEQ ID NO: 1172222 - RNA, 19 nt, Artificial Sequence
  Description of Artificial Sequence: Synthetic oligonucleotide
  Sense strand starting at position 204 of SEQ ID NO: 916636
ccauguuggccagaccgau

SEQ ID NO: 1172223 - RNA, 19 nt, Artificial Sequence
  Description of Artificial Sequence: Synthetic oligonucleotide
  Antisense strand to SEQ ID NO: 1172222
aucggucuggccaacaugg

SEQ ID NO: 1172224 - RNA, 19 nt, Artificial Sequence
  Description of Artificial Sequence: Synthetic oligonucleotide
  Sense strand starting at position 446 of SEQ ID NO: 916636
aauccagguuucuuaguga

SEQ ID NO: 1172225 - RNA, 19 nt, Artificial Sequence
  Description of Artificial Sequence: Synthetic oligonucleotide
  Antisense strand to SEQ ID NO: 1172224
ucacuaagaaaccuggauu

SEQ ID NO: 1172226 - RNA, 19 nt, Artificial Sequence
  Description of Artificial Sequence: Synthetic oligonucleotide
  Sense strand starting at position 449 of SEQ ID NO: 916636
ccagguuucuuagugacag

SEQ ID NO: 1172227 - RNA, 19 nt, Artificial Sequence
  Description of Artificial Sequence: Synthetic oligonucleotide
  Antisense strand to SEQ ID NO: 1172226
cugucacuaagaaaccugg

SEQ ID NO: 1172228 - RNA, 19 nt, Artificial Sequence
  Description of Artificial Sequence: Synthetic oligonucleotide
  Sense strand starting at position 451 of SEQ ID NO: 916636
agguuucuuagugacaguu

SEQ ID NO: 1172229 - RNA, 19 nt, Artificial Sequence
  Description of Artificial Sequence: Synthetic oligonucleotide
  Antisense strand to SEQ ID NO: 1172228
aacugucacuaagaaaccu

SEQ ID NO: 1172230 - RNA, 19 nt, Artificial Sequence
  Description of Artificial Sequence: Synthetic oligonucleotide
  Sense strand starting at position 551 of SEQ ID NO: 916636
uugccuguaucuucuaaga

SEQ ID NO: 1172231 - RNA, 19 nt, Artificial Sequence
  Description of Artificial Sequence: Synthetic oligonucleotide
  Antisense strand to SEQ ID NO: 1172230
ucuuagaagauacaggcaa

SEQ ID NO: 1172232 - RNA, 19 nt, Artificial Sequence
  Description of Artificial Sequence: Synthetic oligonucleotide
  Sense strand starting at position 627 of SEQ ID NO: 916636
agggaaauauuacaucuca

SEQ ID NO: 1172233 - RNA, 19 nt, Artificial Sequence
  Description of Artificial Sequence: Synthetic oligonucleotide
  Antisense strand to SEQ ID NO: 1172232
ugagauguaauauuucccu

SEQ ID NO: 1172234 - RNA, 19 nt, Artificial Sequence
  Description of Artificial Sequence: Synthetic oligonucleotide
  Sense strand starting at position 649 of SEQ ID NO: 916636
auacauacuccuugguguu

SEQ ID NO: 1172235 - RNA, 19 nt, Artificial Sequence
  Description of Artificial Sequence: Synthetic oligonucleotide
  Antisense strand to SEQ ID NO: 1172234
aacaccaaggaguauguau

SEQ ID NO: 1172236 - RNA, 19 nt, Artificial Sequence
  Description of Artificial Sequence: Synthetic oligonucleotide
  Sense strand starting at position 671 of SEQ ID NO: 916636
aagacauuagcuggauguu

SEQ ID NO: 1172237 - RNA, 19 nt, Artificial Sequence
  Description of Artificial Sequence: Synthetic oligonucleotide
  Antisense strand to SEQ ID NO: 1172236
aacauccagcuaaugucuu

SEQ ID NO: 1172238 - RNA, 19 nt, Artificial Sequence
  Description of Artificial Sequence: Synthetic oligonucleotide
  Sense strand starting at position 710 of SEQ ID NO: 916636
agcuacaaaguguguaaua

SEQ ID NO: 1172239 - RNA, 19 nt, Artificial Sequence
  Description of Artificial Sequence: Synthetic oligonucleotide
  Antisense strand to SEQ ID NO: 1172238
uauuacacacuuuguagcu

SEQ ID NO: 1172240 - RNA, 19 nt, Artificial Sequence
  Description of Artificial Sequence: Synthetic oligonucleotide
  Sense strand starting at position 711 of SEQ ID NO: 916636
gcuacaaaguguguaauaa

SEQ ID NO: 1172241 - RNA, 19 nt, Artificial Sequence
  Description of Artificial Sequence: Synthetic oligonucleotide
  Antisense strand to SEQ ID NO: 1172240
uuauuacacacuuuguagc

SEQ ID NO: 1172242 - RNA, 19 nt, Artificial Sequence
  Description of Artificial Sequence: Synthetic oligonucleotide
  Sense strand starting at position 712 of SEQ ID NO: 916636
cuacaaaguguguaauaag

SEQ ID NO: 1172243 - RNA, 19 nt, Artificial Sequence
  Description of Artificial Sequence: Synthetic oligonucleotide
  Antisense strand to SEQ ID NO: 1172242
cuuauuacacacuuuguag

SEQ ID NO: 1172244 - RNA, 19 nt, Artificial Sequence
  Description of Artificial Sequence: Synthetic oligonucleotide
  Sense strand starting at position 721 of SEQ ID NO: 916636
guguaauaagaguauucuu

SEQ ID NO: 1172245 - RNA, 19 nt, Artificial Sequence
  Description of Artificial Sequence: Synthetic oligonucleotide
  Antisense strand to SEQ ID NO: 1172244
aagaauacucuuauuacac

SEQ ID NO: 1172246 - RNA, 19 nt, Artificial Sequence
  Description of Artificial Sequence: Synthetic oligonucleotide
  Sense strand starting at position 1171 of SEQ ID NO: 916636
ggauacagaacucgucagu

SEQ ID NO: 1172247 - RNA, 19 nt, Artificial Sequence
  Description of Artificial Sequence: Synthetic oligonucleotide
  Antisense strand to SEQ ID NO: 1172246
acugacgaguucuguaucc

SEQ ID NO: 1172248 - RNA, 19 nt, Artificial Sequence
  Description of Artificial Sequence: Synthetic oligonucleotide
  Sense strand starting at position 1193 of SEQ ID NO: 916636
acgaguaauucuuucccug

SEQ ID NO: 1172249 - RNA, 19 nt, Artificial Sequence
  Description of Artificial Sequence: Synthetic oligonucleotide
  Antisense strand to SEQ ID NO: 1172248
cagggaaagaauuacucgu

SEQ ID NO: 1172250 - RNA, 19 nt, Artificial Sequence
  Description of Artificial Sequence: Synthetic oligonucleotide
  Sense strand starting at position 1195 of SEQ ID NO: 916636
gaguaauucuuucccugug

SEQ ID NO: 1172251 - RNA, 19 nt, Artificial Sequence
  Description of Artificial Sequence: Synthetic oligonucleotide
  Antisense strand to SEQ ID NO: 1172250
cacagggaaagaauuacuc

SEQ ID NO: 1172252 - RNA, 19 nt, Artificial Sequence
  Description of Artificial Sequence: Synthetic oligonucleotide
  Sense strand starting at position 1196 of SEQ ID NO: 916636
aguaauucuuucccuguga

SEQ ID NO: 1172253 - RNA, 19 nt, Artificial Sequence
  Description of Artificial Sequence: Synthetic oligonucleotide
  Antisense strand to SEQ ID NO: 1172252
ucacagggaaagaauuacu

SEQ ID NO: 1172254 - RNA, 19 nt, Artificial Sequence
  Description of Artificial Sequence: Synthetic oligonucleotide
  Sense strand starting at position 1197 of SEQ ID NO: 916636
guaauucuuucccugugaa

SEQ ID NO: 1172255 - RNA, 19 nt, Artificial Sequence
  Description of Artificial Sequence: Synthetic oligonucleotide
  Antisense strand to SEQ ID NO: 1172254
uucacagggaaagaauuac

SEQ ID NO: 1172256 - RNA, 19 nt, Artificial Sequence
  Description of Artificial Sequence: Synthetic oligonucleotide
  Sense strand starting at position 1200 of SEQ ID NO: 916636
auucuuucccugugaaagc

SEQ ID NO: 1172257 - RNA, 19 nt, Artificial Sequence
  Description of Artificial Sequence: Synthetic oligonucleotide
  Antisense strand to SEQ ID NO: 1172256
gcuuucacagggaaagaau

SEQ ID NO: 1172258 - RNA, 19 nt, Artificial Sequence
  Description of Artificial Sequence: Synthetic oligonucleotide
  Sense strand starting at position 1255 of SEQ ID NO: 916636
aacguaagacguuaaagag

SEQ ID NO: 1172259 - RNA, 19 nt, Artificial Sequence
  Description of Artificial Sequence: Synthetic oligonucleotide
  Antisense strand to SEQ ID NO: 1172258
cucuuuaacgucuuacguu

SEQ ID NO: 1172260 - RNA, 19 nt, Artificial Sequence
  Description of Artificial Sequence: Synthetic oligonucleotide
  Sense strand starting at position 1384 of SEQ ID NO: 916636
ggguucaugaagcgguaua

SEQ ID NO: 1172261 - RNA, 19 nt, Artificial Sequence
  Description of Artificial Sequence: Synthetic oligonucleotide
  Antisense strand to SEQ ID NO: 1172260
uauaccgcuucaugaaccc

SEQ ID NO: 1172262 - RNA, 19 nt, Artificial Sequence
  Description of Artificial Sequence: Synthetic oligonucleotide
  Sense strand starting at position 1389 of SEQ ID NO: 916636
caugaagcgguauacgaua

SEQ ID NO: 1172263 - RNA, 19 nt, Artificial Sequence
  Description of Artificial Sequence: Synthetic oligonucleotide
  Antisense strand to SEQ ID NO: 1172262
uaucguauaccgcuucaug

SEQ ID NO: 1172264 - RNA, 19 nt, Artificial Sequence
  Description of Artificial Sequence: Synthetic oligonucleotide
  Sense strand starting at position 1394 of SEQ ID NO: 916636
agcgguauacgauauguaa

SEQ ID NO: 1172265 - RNA, 19 nt, Artificial Sequence
  Description of Artificial Sequence: Synthetic oligonucleotide
  Antisense strand to SEQ ID NO: 1172264
uuacauaucguauaccgcu

SEQ ID NO: 1172266 - RNA, 19 nt, Artificial Sequence
  Description of Artificial Sequence: Synthetic oligonucleotide
  Sense strand starting at position 1396 of SEQ ID NO: 916636
cgguauacgauauguaaug

SEQ ID NO: 1172267 - RNA, 19 nt, Artificial Sequence
  Description of Artificial Sequence: Synthetic oligonucleotide
  Antisense strand to SEQ ID NO: 1172266
cauuacauaucguauaccg

SEQ ID NO: 1172268 - RNA, 19 nt, Artificial Sequence
  Description of Artificial Sequence: Synthetic oligonucleotide
  Sense strand starting at position 1398 of SEQ ID NO: 916636
guauacgauauguaaugga

SEQ ID NO: 1172269 - RNA, 19 nt, Artificial Sequence
  Description of Artificial Sequence: Synthetic oligonucleotide
  Antisense strand to SEQ ID NO: 1172268
uccauuacauaucguauac

SEQ ID NO: 1172270 - RNA, 19 nt, Artificial Sequence
  Description of Artificial Sequence: Synthetic oligonucleotide
  Sense strand starting at position 1401 of SEQ ID NO: 916636
uacgauauguaauggauuu

SEQ ID NO: 1172271 - RNA, 19 nt, Artificial Sequence
  Description of Artificial Sequence: Synthetic oligonucleotide
  Antisense strand to SEQ ID NO: 1172270
aaauccauuacauaucgua

SEQ ID NO: 1172272 - RNA, 19 nt, Artificial Sequence
  Description of Artificial Sequence: Synthetic oligonucleotide
  Sense strand starting at position 1701 of SEQ ID NO: 916636
agagguuucgccugggaaa

SEQ ID NO: 1172273 - RNA, 19 nt, Artificial Sequence
  Description of Artificial Sequence: Synthetic oligonucleotide
  Antisense strand to SEQ ID NO: 1172272
uuucccaggcgaaaccucu

SEQ ID NO: 1172274 - RNA, 19 nt, Artificial Sequence
  Description of Artificial Sequence: Synthetic oligonucleotide
  Sense strand starting at position 1702 of SEQ ID NO: 916636
gagguuucgccugggaaag

SEQ ID NO: 1172275 - RNA, 19 nt, Artificial Sequence
  Description of Artificial Sequence: Synthetic oligonucleotide
  Antisense strand to SEQ ID NO: 1172274
cuuucccaggcgaaaccuc

SEQ ID NO: 1172276 - RNA, 19 nt, Artificial Sequence
  Description of Artificial Sequence: Synthetic oligonucleotide
  Sense strand starting at position 2036 of SEQ ID NO: 916636
agagacuguugugugaguu

SEQ ID NO: 1172277 - RNA, 19 nt, Artificial Sequence
  Description of Artificial Sequence: Synthetic oligonucleotide
  Antisense strand to SEQ ID NO: 1172276
aacucacacaacagucucu

SEQ ID NO: 1172278 - RNA, 19 nt, Artificial Sequence
  Description of Artificial Sequence: Synthetic oligonucleotide
  Sense strand starting at position 2037 of SEQ ID NO: 916636
gagacuguugugugaguuc

SEQ ID NO: 1172279 - RNA, 19 nt, Artificial Sequence
  Description of Artificial Sequence: Synthetic oligonucleotide
  Antisense strand to SEQ ID NO: 1172278
gaacucacacaacagucuc

SEQ ID NO: 1172280 - RNA, 19 nt, Artificial Sequence
  Description of Artificial Sequence: Synthetic oligonucleotide
  Sense strand starting at position 2066 of SEQ ID NO: 916636
augucuuaagccuaguauu

SEQ ID NO: 1172281 - RNA, 19 nt, Artificial Sequence
  Description of Artificial Sequence: Synthetic oligonucleotide
  Antisense strand to SEQ ID NO: 1172280
aauacuaggcuuaagacau

SEQ ID NO: 1172282 - RNA, 19 nt, Artificial Sequence
  Description of Artificial Sequence: Synthetic oligonucleotide
  Sense strand starting at position 2424 of SEQ ID NO: 916636
ucugaauuguccuuggaaa

SEQ ID NO: 1172283 - RNA, 19 nt, Artificial Sequence
  Description of Artificial Sequence: Synthetic oligonucleotide
  Antisense strand to SEQ ID NO: 1172282
uuuccaaggacaauucaga

SEQ ID NO: 1172284 - RNA, 19 nt, Artificial Sequence
  Description of Artificial Sequence: Synthetic oligonucleotide
  Sense strand starting at position 2880 of SEQ ID NO: 916636
gagaguugaggcugcagua

SEQ ID NO: 1172285 - RNA, 19 nt, Artificial Sequence
  Description of Artificial Sequence: Synthetic oligonucleotide
  Antisense strand to SEQ ID NO: 1172284
uacugcagccucaacucuc

SEQ ID NO: 1172286 - RNA, 19 nt, Artificial Sequence
  Description of Artificial Sequence: Synthetic oligonucleotide
  Sense strand starting at position 2958 of SEQ ID NO: 916636
uaccaugugcuguauguga

SEQ ID NO: 1172287 - RNA, 19 nt, Artificial Sequence
  Description of Artificial Sequence: Synthetic oligonucleotide
  Antisense strand to SEQ ID NO: 1172286
ucacauacagcacauggua

SEQ ID NO: 1172288 - RNA, 19 nt, Artificial Sequence
  Description of Artificial Sequence: Synthetic oligonucleotide
  Sense strand starting at position 2969 of SEQ ID NO: 916636
guaugugagggauacguga

SEQ ID NO: 1172289 - RNA, 19 nt, Artificial Sequence
  Description of Artificial Sequence: Synthetic oligonucleotide
  Antisense strand to SEQ ID NO: 1172288
ucacguaucccucacauac

SEQ ID NO: 1172290 - RNA, 19 nt, Artificial Sequence
  Description of Artificial Sequence: Synthetic oligonucleotide
  Sense strand starting at position 3014 of SEQ ID NO: 916636
gcuuaacaauuggagagaa

SEQ ID NO: 1172291 - RNA, 19 nt, Artificial Sequence
  Description of Artificial Sequence: Synthetic oligonucleotide
  Antisense strand to SEQ ID NO: 1172290
uucucuccaauuguuaagc

SEQ ID NO: 1172292 - RNA, 19 nt, Artificial Sequence
  Description of Artificial Sequence: Synthetic oligonucleotide
  Sense strand starting at position 3117 of SEQ ID NO: 916636
agcaguagccuuuaacauc

SEQ ID NO: 1172293 - RNA, 19 nt, Artificial Sequence
  Description of Artificial Sequence: Synthetic oligonucleotide
  Antisense strand to SEQ ID NO: 1172292
gauguuaaaggcuacugcu

SEQ ID NO: 1172294 - RNA, 19 nt, Artificial Sequence
  Description of Artificial Sequence: Synthetic oligonucleotide
  Sense strand starting at position 3559 of SEQ ID NO: 916636
ucucaaagggucuaucacu

SEQ ID NO: 1172295 - RNA, 19 nt, Artificial Sequence
  Description of Artificial Sequence: Synthetic oligonucleotide
  Antisense strand to SEQ ID NO: 1172294
agugauagacccuuugaga

SEQ ID NO: 1172296 - RNA, 19 nt, Artificial Sequence
  Description of Artificial Sequence: Synthetic oligonucleotide
  Sense strand starting at position 3764 of SEQ ID NO: 916636
cagucaugccgugucuuua

SEQ ID NO: 1172297 - RNA, 19 nt, Artificial Sequence
  Description of Artificial Sequence: Synthetic oligonucleotide
  Antisense strand to SEQ ID NO: 1172296
uaaagacacggcaugacug

SEQ ID NO: 1172298 - RNA, 19 nt, Artificial Sequence
  Description of Artificial Sequence: Synthetic oligonucleotide
  Sense strand starting at position 3765 of SEQ ID NO: 916636
agucaugccgugucuuuaa

SEQ ID NO: 1172299 - RNA, 19 nt, Artificial Sequence
  Description of Artificial Sequence: Synthetic oligonucleotide
  Antisense strand to SEQ ID NO: 1172298
uuaaagacacggcaugacu

SEQ ID NO: 1172300 - RNA, 19 nt, Artificial Sequence
  Description of Artificial Sequence: Synthetic oligonucleotide
  Sense strand starting at position 3776 of SEQ ID NO: 916636
gucuuuaaauguucucaga

SEQ ID NO: 1172301 - RNA, 19 nt, Artificial Sequence
  Description of Artificial Sequence: Synthetic oligonucleotide
  Antisense strand to SEQ ID NO: 1172300
ucugagaacauuuaaagac

SEQ ID NO: 1172302 - RNA, 19 nt, Artificial Sequence
  Description of Artificial Sequence: Synthetic oligonucleotide
  Sense strand starting at position 122 of SEQ ID NO: 916637
accacauguugucuaaacu

SEQ ID NO: 1172303 - RNA, 19 nt, Artificial Sequence
  Description of Artificial Sequence: Synthetic oligonucleotide
  Antisense strand to SEQ ID NO: 1172302
aguuuagacaacauguggu

SEQ ID NO: 1172304 - RNA, 19 nt, Artificial Sequence
  Description of Artificial Sequence: Synthetic oligonucleotide
  Sense strand starting at position 123 of SEQ ID NO: 916637
ccacauguugucuaaacug

SEQ ID NO: 1172305 - RNA, 19 nt, Artificial Sequence
  Description of Artificial Sequence: Synthetic oligonucleotide
  Antisense strand to SEQ ID NO: 1172304
caguuuagacaacaugugg

SEQ ID NO: 1172306 - RNA, 19 nt, Artificial Sequence
  Description of Artificial Sequence: Synthetic oligonucleotide
  Sense strand starting at position 386 of SEQ ID NO: 916637
uucguacgcacugauaaga

SEQ ID NO: 1172307 - RNA, 19 nt, Artificial Sequence
  Description of Artificial Sequence: Synthetic oligonucleotide
  Antisense strand to SEQ ID NO: 1172306
ucuuaucagugcguacgaa

SEQ ID NO: 1172308 - RNA, 19 nt, Artificial Sequence
  Description of Artificial Sequence: Synthetic oligonucleotide
  Sense strand starting at position 475 of SEQ ID NO: 916637
auggcaguaagcugugaaa

SEQ ID NO: 1172309 - RNA, 19 nt, Artificial Sequence
  Description of Artificial Sequence: Synthetic oligonucleotide
  Antisense strand to SEQ ID NO: 1172308
uuucacagcuuacugccau

SEQ ID NO: 1172310 - RNA, 19 nt, Artificial Sequence
  Description of Artificial Sequence: Synthetic oligonucleotide
  Sense strand starting at position 589 of SEQ ID NO: 916637
acguauuaucauggauguu

SEQ ID NO: 1172311 - RNA, 19 nt, Artificial Sequence
  Description of Artificial Sequence: Synthetic oligonucleotide
  Antisense strand to SEQ ID NO: 1172310
aacauccaugauaauacgu

SEQ ID NO: 1172312 - RNA, 19 nt, Artificial Sequence
  Description of Artificial Sequence: Synthetic oligonucleotide
  Sense strand starting at position 590 of SEQ ID NO: 916637
cguauuaucauggauguuu

SEQ ID NO: 1172313 - RNA, 19 nt, Artificial Sequence
  Description of Artificial Sequence: Synthetic oligonucleotide
  Antisense strand to SEQ ID NO: 1172312
aaacauccaugauaauacg

SEQ ID NO: 1172314 - RNA, 19 nt, Artificial Sequence
  Description of Artificial Sequence: Synthetic oligonucleotide
  Sense strand starting at position 646 of SEQ ID NO: 916637
cucauaagccugcaguuua

SEQ ID NO: 1172315 - RNA, 19 nt, Artificial Sequence
  Description of Artificial Sequence: Synthetic oligonucleotide
  Antisense strand to SEQ ID NO: 1172314
uaaacugcaggcuuaugag

SEQ ID NO: 1172316 - RNA, 19 nt, Artificial Sequence
  Description of Artificial Sequence: Synthetic oligonucleotide
  Sense strand starting at position 863 of SEQ ID NO: 916637
acguuaaugaacugaugaa

SEQ ID NO: 1172317 - RNA, 19 nt, Artificial Sequence
  Description of Artificial Sequence: Synthetic oligonucleotide
  Antisense strand to SEQ ID NO: 1172316
uucaucaguucauuaacgu

SEQ ID NO: 1172318 - RNA, 19 nt, Artificial Sequence
  Description of Artificial Sequence: Synthetic oligonucleotide
  Sense strand starting at position 916 of SEQ ID NO: 916637
ucggcuuagauacagauau

SEQ ID NO: 1172319 - RNA, 19 nt, Artificial Sequence
  Description of Artificial Sequence: Synthetic oligonucleotide
  Antisense strand to SEQ ID NO: 1172318
auaucuguaucuaagccga

SEQ ID NO: 1172320 - RNA, 19 nt, Artificial Sequence
  Description of Artificial Sequence: Synthetic oligonucleotide
  Sense strand starting at position 1060 of SEQ ID NO: 916637
guccaaauuucugcuguuu

SEQ ID NO: 1172321 - RNA, 19 nt, Artificial Sequence
  Description of Artificial Sequence: Synthetic oligonucleotide
  Antisense strand to SEQ ID NO: 1172320
aaacagcagaaauuuggac

SEQ ID NO: 1172322 - RNA, 19 nt, Artificial Sequence
  Description of Artificial Sequence: Synthetic oligonucleotide
  Sense strand starting at position 1271 of SEQ ID NO: 916637
gccauaacaagaggaguuu

SEQ ID NO: 1172323 - RNA, 19 nt, Artificial Sequence
  Description of Artificial Sequence: Synthetic oligonucleotide
  Antisense strand to SEQ ID NO: 1172322
aaacuccucuuguuauggc

SEQ ID NO: 1172324 - RNA, 19 nt, Artificial Sequence
  Description of Artificial Sequence: Synthetic oligonucleotide
  Sense strand starting at position 1283 of SEQ ID NO: 916637
ggaguuuaagagugcugac

SEQ ID NO: 1172325 - RNA, 19 nt, Artificial Sequence
  Description of Artificial Sequence: Synthetic oligonucleotide
  Antisense strand to SEQ ID NO: 1172324
gucagcacucuuaaacucc

SEQ ID NO: 1172326 - RNA, 19 nt, Artificial Sequence
  Description of Artificial Sequence: Synthetic oligonucleotide
  Sense strand starting at position 1459 of SEQ ID NO: 916637
aaaucacgugcguauauaa

SEQ ID NO: 1172327 - RNA, 19 nt, Artificial Sequence
  Description of Artificial Sequence: Synthetic oligonucleotide
  Antisense strand to SEQ ID NO: 1172326
uuauauacgcacgugauuu

SEQ ID NO: 1172328 - RNA, 19 nt, Artificial Sequence
  Description of Artificial Sequence: Synthetic oligonucleotide
  Sense strand starting at position 1506 of SEQ ID NO: 916637
gcaucauaggagcacugau

SEQ ID NO: 1172329 - RNA, 19 nt, Artificial Sequence
  Description of Artificial Sequence: Synthetic oligonucleotide
  Antisense strand to SEQ ID NO: 1172328
aucagugcuccuaugaugc

SEQ ID NO: 1172330 - RNA, 19 nt, Artificial Sequence
  Description of Artificial Sequence: Synthetic oligonucleotide
  Sense strand starting at position 2094 of SEQ ID NO: 916637
ccucauaucuaucucgaga

SEQ ID NO: 1172331 - RNA, 19 nt, Artificial Sequence
  Description of Artificial Sequence: Synthetic oligonucleotide
  Antisense strand to SEQ ID NO: 1172330
ucucgagauagauaugagg

SEQ ID NO: 1172332 - RNA, 19 nt, Artificial Sequence
  Description of Artificial Sequence: Synthetic oligonucleotide
  Sense strand starting at position 2099 of SEQ ID NO: 916637
uaucuaucucgagagccau

SEQ ID NO: 1172333 - RNA, 19 nt, Artificial Sequence
  Description of Artificial Sequence: Synthetic oligonucleotide
  Antisense strand to SEQ ID NO: 1172332
auggcucucgagauagaua

SEQ ID NO: 1172334 - RNA, 19 nt, Artificial Sequence
  Description of Artificial Sequence: Synthetic oligonucleotide
  Sense strand starting at position 2263 of SEQ ID NO: 916637
ucuauccgucuuuaagcaa

SEQ ID NO: 1172335 - RNA, 19 nt, Artificial Sequence
  Description of Artificial Sequence: Synthetic oligonucleotide
  Antisense strand to SEQ ID NO: 1172334
uugcuuaaagacggauaga

SEQ ID NO: 1172336 - RNA, 19 nt, Artificial Sequence
  Description of Artificial Sequence: Synthetic oligonucleotide
  Sense strand starting at position 2280 of SEQ ID NO: 916637
aaacauuucuugggagucu

SEQ ID NO: 1172337 - RNA, 19 nt, Artificial Sequence
  Description of Artificial Sequence: Synthetic oligonucleotide
  Antisense strand to SEQ ID NO: 1172336
agacucccaagaaauguuu

SEQ ID NO: 1172338 - RNA, 19 nt, Artificial Sequence
  Description of Artificial Sequence: Synthetic oligonucleotide
  Sense strand starting at position 2313 of SEQ ID NO: 916637
gcauuaggugccgagaggu

SEQ ID NO: 1172339 - RNA, 19 nt, Artificial Sequence
  Description of Artificial Sequence: Synthetic oligonucleotide
  Antisense strand to SEQ ID NO: 1172338
accucucggcaccuaaugc

SEQ ID NO: 1172340 - RNA, 19 nt, Artificial Sequence
  Description of Artificial Sequence: Synthetic oligonucleotide
  Sense strand starting at position 2353 of SEQ ID NO: 916637
ccugccuuugaggaacauu

SEQ ID NO: 1172341 - RNA, 19 nt, Artificial Sequence
  Description of Artificial Sequence: Synthetic oligonucleotide
  Antisense strand to SEQ ID NO: 1172340
aauguuccucaaaggcagg

SEQ ID NO: 1172342 - RNA, 19 nt, Artificial Sequence
  Description of Artificial Sequence: Synthetic oligonucleotide
  Sense strand starting at position 2452 of SEQ ID NO: 916637
gcuagcuauuuggaaugaa

SEQ ID NO: 1172343 - RNA, 19 nt, Artificial Sequence
  Description of Artificial Sequence: Synthetic oligonucleotide
  Antisense strand to SEQ ID NO: 1172342
uucauuccaaauagcuagc

SEQ ID NO: 1172344 - RNA, 19 nt, Artificial Sequence
  Description of Artificial Sequence: Synthetic oligonucleotide
  Sense strand starting at position 2461 of SEQ ID NO: 916637
uuggaaugaaagugucaag

SEQ ID NO: 1172345 - RNA, 19 nt, Artificial Sequence
  Description of Artificial Sequence: Synthetic oligonucleotide
  Antisense strand to SEQ ID NO: 1172344
cuugacacuuucauuccaa

SEQ ID NO: 1172346 - RNA, 19 nt, Artificial Sequence
  Description of Artificial Sequence: Synthetic oligonucleotide
  Sense strand starting at position 2539 of SEQ ID NO: 916637
ggauucuggcagugaagca

SEQ ID NO: 1172347 - RNA, 19 nt, Artificial Sequence
  Description of Artificial Sequence: Synthetic oligonucleotide
  Antisense strand to SEQ ID NO: 1172346
ugcuucacugccagaaucc

SEQ ID NO: 1172348 - RNA, 19 nt, Artificial Sequence
  Description of Artificial Sequence: Synthetic oligonucleotide
  Sense strand starting at position 2628 of SEQ ID NO: 916637
aggugcauccauuacucaa

SEQ ID NO: 1172349 - RNA, 19 nt, Artificial Sequence
  Description of Artificial Sequence: Synthetic oligonucleotide
  Antisense strand to SEQ ID NO: 1172348
uugaguaauggaugcaccu

SEQ ID NO: 1172350 - RNA, 19 nt, Artificial Sequence
  Description of Artificial Sequence: Synthetic oligonucleotide
  Sense strand starting at position 3005 of SEQ ID NO: 916637
ccucucagucaaggguauu

SEQ ID NO: 1172351 - RNA, 19 nt, Artificial Sequence
  Description of Artificial Sequence: Synthetic oligonucleotide
  Antisense strand to SEQ ID NO: 1172350
aauacccuugacugagagg

SEQ ID NO: 1172352 - RNA, 19 nt, Artificial Sequence
  Description of Artificial Sequence: Synthetic oligonucleotide
  Sense strand starting at position 3044 of SEQ ID NO: 916637
uaguucagacguugaugga

SEQ ID NO: 1172353 - RNA, 19 nt, Artificial Sequence
  Description of Artificial Sequence: Synthetic oligonucleotide
  Antisense strand to SEQ ID NO: 1172352
uccaucaacgucugaacua

SEQ ID NO: 1172354 - RNA, 19 nt, Artificial Sequence
  Description of Artificial Sequence: Synthetic oligonucleotide
  Sense strand starting at position 3045 of SEQ ID NO: 916637
aguucagacguugauggaa

SEQ ID NO: 1172355 - RNA, 19 nt, Artificial Sequence
  Description of Artificial Sequence: Synthetic oligonucleotide
  Antisense strand to SEQ ID NO: 1172354
uuccaucaacgucugaacu

SEQ ID NO: 1172356 - RNA, 19 nt, Artificial Sequence
  Description of Artificial Sequence: Synthetic oligonucleotide
  Sense strand starting at position 3179 of SEQ ID NO: 916637
ggaagcuuuguccaccuga

SEQ ID NO: 1172357 - RNA, 19 nt, Artificial Sequence
  Description of Artificial Sequence: Synthetic oligonucleotide
  Antisense strand to SEQ ID NO: 1172356
ucagguggacaaagcuucc

SEQ ID NO: 1172358 - RNA, 19 nt, Artificial Sequence
  Description of Artificial Sequence: Synthetic oligonucleotide
  Sense strand starting at position 3226 of SEQ ID NO: 916637
ucuauuaagucuuuggaca

SEQ ID NO: 1172359 - RNA, 19 nt, Artificial Sequence
  Description of Artificial Sequence: Synthetic oligonucleotide
  Antisense strand to SEQ ID NO: 1172358
uguccaaagacuuaauaga

SEQ ID NO: 1172360 - RNA, 19 nt, Artificial Sequence
  Description of Artificial Sequence: Synthetic oligonucleotide
  Sense strand starting at position 3227 of SEQ ID NO: 916637
cuauuaagucuuuggacaa

SEQ ID NO: 1172361 - RNA, 19 nt, Artificial Sequence
  Description of Artificial Sequence: Synthetic oligonucleotide
  Antisense strand to SEQ ID NO: 1172360
uuguccaaagacuuaauag

SEQ ID NO: 1172362 - RNA, 19 nt, Artificial Sequence
  Description of Artificial Sequence: Synthetic oligonucleotide
  Sense strand starting at position 3339 of SEQ ID NO: 916637
cccgccuuucuggacuaaa

SEQ ID NO: 1172363 - RNA, 19 nt, Artificial Sequence
  Description of Artificial Sequence: Synthetic oligonucleotide
  Antisense strand to SEQ ID NO: 1172362
uuuaguccagaaaggcggg

SEQ ID NO: 1172364 - RNA, 19 nt, Artificial Sequence
  Description of Artificial Sequence: Synthetic oligonucleotide
  Sense strand starting at position 3342 of SEQ ID NO: 916637
gccuuucuggacuaaauga

SEQ ID NO: 1172365 - RNA, 19 nt, Artificial Sequence
  Description of Artificial Sequence: Synthetic oligonucleotide
  Antisense strand to SEQ ID NO: 1172364
ucauuuaguccagaaaggc

SEQ ID NO: 1172366 - RNA, 19 nt, Artificial Sequence
  Description of Artificial Sequence: Synthetic oligonucleotide
  Sense strand starting at position 3493 of SEQ ID NO: 916637
acucguauuuggcucagga

SEQ ID NO: 1172367 - RNA, 19 nt, Artificial Sequence
  Description of Artificial Sequence: Synthetic oligonucleotide
  Antisense strand to SEQ ID NO: 1172366
uccugagccaaauacgagu

SEQ ID NO: 1172368 - RNA, 19 nt, Artificial Sequence
  Description of Artificial Sequence: Synthetic oligonucleotide
  Sense strand starting at position 3636 of SEQ ID NO: 916637
agaugucaacaucauaugu

SEQ ID NO: 1172369 - RNA, 19 nt, Artificial Sequence
  Description of Artificial Sequence: Synthetic oligonucleotide
  Antisense strand to SEQ ID NO: 1172368
acauaugauguugacaucu

SEQ ID NO: 1172370 - RNA, 19 nt, Artificial Sequence
  Description of Artificial Sequence: Synthetic oligonucleotide
  Sense strand starting at position 3645 of SEQ ID NO: 916637
caucauaugucauuagcga

SEQ ID NO: 1172371 - RNA, 19 nt, Artificial Sequence
  Description of Artificial Sequence: Synthetic oligonucleotide
  Antisense strand to SEQ ID NO: 1172370
ucgcuaaugacauaugaug

SEQ ID NO: 1172372 - RNA, 19 nt, Artificial Sequence
  Description of Artificial Sequence: Synthetic oligonucleotide
  Sense strand starting at position 3646 of SEQ ID NO: 916637
aucauaugucauuagcgaa

SEQ ID NO: 1172373 - RNA, 19 nt, Artificial Sequence
  Description of Artificial Sequence: Synthetic oligonucleotide
  Antisense strand to SEQ ID NO: 1172372
uucgcuaaugacauaugau

SEQ ID NO: 1172374 - RNA, 19 nt, Artificial Sequence
  Description of Artificial Sequence: Synthetic oligonucleotide
  Sense strand starting at position 3739 of SEQ ID NO: 916637
ugcuaaugagaauguggaa

SEQ ID NO: 1172375 - RNA, 19 nt, Artificial Sequence
  Description of Artificial Sequence: Synthetic oligonucleotide
  Antisense strand to SEQ ID NO: 1172374
uuccacauucucauuagca

SEQ ID NO: 1172376 - RNA, 19 nt, Artificial Sequence
  Description of Artificial Sequence: Synthetic oligonucleotide
  Sense strand starting at position 3761 of SEQ ID NO: 916637
cuggaacucucauuaauug

SEQ ID NO: 1172377 - RNA, 19 nt, Artificial Sequence
  Description of Artificial Sequence: Synthetic oligonucleotide
  Antisense strand to SEQ ID NO: 1172376
caauuaaugagaguuccag

SEQ ID NO: 1172378 - RNA, 19 nt, Artificial Sequence
  Description of Artificial Sequence: Synthetic oligonucleotide
  Sense strand starting at position 3847 of SEQ ID NO: 916637
auugucuuaccacaugauc

SEQ ID NO: 1172379 - RNA, 19 nt, Artificial Sequence
  Description of Artificial Sequence: Synthetic oligonucleotide
  Antisense strand to SEQ ID NO: 1172378
gaucaugugguaagacaau

SEQ ID NO: 1172380 - RNA, 19 nt, Artificial Sequence
  Description of Artificial Sequence: Synthetic oligonucleotide
  Sense strand starting at position 3929 of SEQ ID NO: 916637
gcacaugaauguuuauaaa

SEQ ID NO: 1172381 - RNA, 19 nt, Artificial Sequence
  Description of Artificial Sequence: Synthetic oligonucleotide
  Antisense strand to SEQ ID NO: 1172380
uuuauaaacauucaugugc

SEQ ID NO: 1172382 - RNA, 19 nt, Artificial Sequence
  Description of Artificial Sequence: Synthetic oligonucleotide
  Sense strand starting at position 67 of SEQ ID NO: 916638
uggagugucaguuauaaug

SEQ ID NO: 1172383 - RNA, 19 nt, Artificial Sequence
  Description of Artificial Sequence: Synthetic oligonucleotide
  Antisense strand to SEQ ID NO: 1172382
cauuauaacugacacucca

SEQ ID NO: 1172384 - RNA, 19 nt, Artificial Sequence
  Description of Artificial Sequence: Synthetic oligonucleotide
  Sense strand starting at position 110 of SEQ ID NO: 916638
cccagacuggucgaaguaa

SEQ ID NO: 1172385 - RNA, 19 nt, Artificial Sequence
  Description of Artificial Sequence: Synthetic oligonucleotide
  Antisense strand to SEQ ID NO: 1172384
uuacuucgaccagucuggg

SEQ ID NO: 1172386 - RNA, 19 nt, Artificial Sequence
  Description of Artificial Sequence: Synthetic oligonucleotide
  Sense strand starting at position 149 of SEQ ID NO: 916638
ugacaagcucaugggauaa

SEQ ID NO: 1172387 - RNA, 19 nt, Artificial Sequence
  Description of Artificial Sequence: Synthetic oligonucleotide
  Antisense strand to SEQ ID NO: 1172386
uuaucccaugagcuuguca

SEQ ID NO: 1172388 - RNA, 19 nt, Artificial Sequence
  Description of Artificial Sequence: Synthetic oligonucleotide
  Sense strand starting at position 256 of SEQ ID NO: 916638
acgacucagugaucaauau

SEQ ID NO: 1172389 - RNA, 19 nt, Artificial Sequence
  Description of Artificial Sequence: Synthetic oligonucleotide
  Antisense strand to SEQ ID NO: 1172388
auauugaucacugagucgu

SEQ ID NO: 1172390 - RNA, 19 nt, Artificial Sequence
  Description of Artificial Sequence: Synthetic oligonucleotide
  Sense strand starting at position 257 of SEQ ID NO: 916638
cgacucagugaucaauauu

SEQ ID NO: 1172391 - RNA, 19 nt, Artificial Sequence
  Description of Artificial Sequence: Synthetic oligonucleotide
  Antisense strand to SEQ ID NO: 1172390
aauauugaucacugagucg

SEQ ID NO: 1172392 - RNA, 19 nt, Artificial Sequence
  Description of Artificial Sequence: Synthetic oligonucleotide
  Sense strand starting at position 501 of SEQ ID NO: 916638
ggcugccuccuagaaauag

SEQ ID NO: 1172393 - RNA, 19 nt, Artificial Sequence
  Description of Artificial Sequence: Synthetic oligonucleotide
  Antisense strand to SEQ ID NO: 1172392
cuauuucuaggaggcagcc

SEQ ID NO: 1172394 - RNA, 19 nt, Artificial Sequence
  Description of Artificial Sequence: Synthetic oligonucleotide
  Sense strand starting at position 539 of SEQ ID NO: 916638
cgaacagagcugugaaaua

SEQ ID NO: 1172395 - RNA, 19 nt, Artificial Sequence
  Description of Artificial Sequence: Synthetic oligonucleotide
  Antisense strand to SEQ ID NO: 1172394
uauuucacagcucuguucg

SEQ ID NO: 1172396 - RNA, 19 nt, Artificial Sequence
  Description of Artificial Sequence: Synthetic oligonucleotide
  Sense strand starting at position 549 of SEQ ID NO: 916638
ugugaaauaagaugucagu

SEQ ID NO: 1172397 - RNA, 19 nt, Artificial Sequence
  Description of Artificial Sequence: Synthetic oligonucleotide
  Antisense strand to SEQ ID NO: 1172396
acugacaucuuauuucaca

SEQ ID NO: 1172398 - RNA, 19 nt, Artificial Sequence
  Description of Artificial Sequence: Synthetic oligonucleotide
  Sense strand starting at position 555 of SEQ ID NO: 916638
auaagaugucagugacuga

SEQ ID NO: 1172399 - RNA, 19 nt, Artificial Sequence
  Description of Artificial Sequence: Synthetic oligonucleotide
  Antisense strand to SEQ ID NO: 1172398
ucagucacugacaucuuau

SEQ ID NO: 1172400 - RNA, 19 nt, Artificial Sequence
  Description of Artificial Sequence: Synthetic oligonucleotide
  Sense strand starting at position 558 of SEQ ID NO: 916638
agaugucagugacugacau

SEQ ID NO: 1172401 - RNA, 19 nt, Artificial Sequence
  Description of Artificial Sequence: Synthetic oligonucleotide
  Antisense strand to SEQ ID NO: 1172400
augucagucacugacaucu

SEQ ID NO: 1172402 - RNA, 19 nt, Artificial Sequence
  Description of Artificial Sequence: Synthetic oligonucleotide
  Sense strand starting at position 602 of SEQ ID NO: 916638
ggccuuaggacuugacaau

SEQ ID NO: 1172403 - RNA, 19 nt, Artificial Sequence
  Description of Artificial Sequence: Synthetic oligonucleotide
  Antisense strand to SEQ ID NO: 1172402
auugucaaguccuaaggcc

SEQ ID NO: 1172404 - RNA, 19 nt, Artificial Sequence
  Description of Artificial Sequence: Synthetic oligonucleotide
  Sense strand starting at position 705 of SEQ ID NO: 916638
agcugcugagaguaucaga

SEQ ID NO: 1172405 - RNA, 19 nt, Artificial Sequence
  Description of Artificial Sequence: Synthetic oligonucleotide
  Antisense strand to SEQ ID NO: 1172404
ucugauacucucagcagcu

SEQ ID NO: 1172406 - RNA, 19 nt, Artificial Sequence
  Description of Artificial Sequence: Synthetic oligonucleotide
  Sense strand starting at position 786 of SEQ ID NO: 916638
gugaucuggguguaaagga

SEQ ID NO: 1172407 - RNA, 19 nt, Artificial Sequence
  Description of Artificial Sequence: Synthetic oligonucleotide
  Antisense strand to SEQ ID NO: 1172406
uccuuuacacccagaucac

SEQ ID NO: 1172408 - RNA, 19 nt, Artificial Sequence
  Description of Artificial Sequence: Synthetic oligonucleotide
  Sense strand starting at position 952 of SEQ ID NO: 916638
caaugugucccaggaacaa

SEQ ID NO: 1172409 - RNA, 19 nt, Artificial Sequence
  Description of Artificial Sequence: Synthetic oligonucleotide
  Antisense strand to SEQ ID NO: 1172408
uuguuccugggacacauug

SEQ ID NO: 1172410 - RNA, 19 nt, Artificial Sequence
  Description of Artificial Sequence: Synthetic oligonucleotide
  Sense strand starting at position 1088 of SEQ ID NO: 916638
uccagaguucuggaagguu

SEQ ID NO: 1172411 - RNA, 19 nt, Artificial Sequence
  Description of Artificial Sequence: Synthetic oligonucleotide
  Antisense strand to SEQ ID NO: 1172410
aaccuuccagaacucugga

SEQ ID NO: 1172412 - RNA, 19 nt, Artificial Sequence
  Description of Artificial Sequence: Synthetic oligonucleotide
  Sense strand starting at position 1091 of SEQ ID NO: 916638
agaguucuggaagguucua

SEQ ID NO: 1172413 - RNA, 19 nt, Artificial Sequence
  Description of Artificial Sequence: Synthetic oligonucleotide
  Antisense strand to SEQ ID NO: 1172412
uagaaccuuccagaacucu

SEQ ID NO: 1172414 - RNA, 19 nt, Artificial Sequence
  Description of Artificial Sequence: Synthetic oligonucleotide
  Sense strand starting at position 1159 of SEQ ID NO: 916638
guuuguuugcuugcugaau

SEQ ID NO: 1172415 - RNA, 19 nt, Artificial Sequence
  Description of Artificial Sequence: Synthetic oligonucleotide
  Antisense strand to SEQ ID NO: 1172414
auucagcaagcaaacaaac

SEQ ID NO: 1172416 - RNA, 19 nt, Artificial Sequence
  Description of Artificial Sequence: Synthetic oligonucleotide
  Sense strand starting at position 1285 of SEQ ID NO: 916638
uucucugaaccugguaaga

SEQ ID NO: 1172417 - RNA, 19 nt, Artificial Sequence
  Description of Artificial Sequence: Synthetic oligonucleotide
  Antisense strand to SEQ ID NO: 1172416
ucuuaccagguucagagaa

SEQ ID NO: 1172418 - RNA, 19 nt, Artificial Sequence
  Description of Artificial Sequence: Synthetic oligonucleotide
  Sense strand starting at position 1373 of SEQ ID NO: 916638
gagaucgauuuagaucuca

SEQ ID NO: 1172419 - RNA, 19 nt, Artificial Sequence
  Description of Artificial Sequence: Synthetic oligonucleotide
  Antisense strand to SEQ ID NO: 1172418
ugagaucuaaaucgaucuc

SEQ ID NO: 1172420 - RNA, 19 nt, Artificial Sequence
  Description of Artificial Sequence: Synthetic oligonucleotide
  Sense strand starting at position 1562 of SEQ ID NO: 916638
caguauuccgaguacgaga

SEQ ID NO: 1172421 - RNA, 19 nt, Artificial Sequence
  Description of Artificial Sequence: Synthetic oligonucleotide
  Antisense strand to SEQ ID NO: 1172420
ucucguacucggaauacug

SEQ ID NO: 1172422 - RNA, 19 nt, Artificial Sequence
  Description of Artificial Sequence: Synthetic oligonucleotide
  Sense strand starting at position 1613 of SEQ ID NO: 916638
agaaauuacgacuagucuu

SEQ ID NO: 1172423 - RNA, 19 nt, Artificial Sequence
  Description of Artificial Sequence: Synthetic oligonucleotide
  Antisense strand to SEQ ID NO: 1172422
aagacuagucguaauuucu

SEQ ID NO: 1172424 - RNA, 19 nt, Artificial Sequence
  Description of Artificial Sequence: Synthetic oligonucleotide
  Sense strand starting at position 2277 of SEQ ID NO: 916638
uugagacccgagugauauu

SEQ ID NO: 1172425 - RNA, 19 nt, Artificial Sequence
  Description of Artificial Sequence: Synthetic oligonucleotide
  Antisense strand to SEQ ID NO: 1172424
aauaucacucgggucucaa

SEQ ID NO: 1172426 - RNA, 19 nt, Artificial Sequence
  Description of Artificial Sequence: Synthetic oligonucleotide
  Sense strand starting at position 2348 of SEQ ID NO: 916638
ugguaucucccugagaugu

SEQ ID NO: 1172427 - RNA, 19 nt, Artificial Sequence
  Description of Artificial Sequence: Synthetic oligonucleotide
  Antisense strand to SEQ ID NO: 1172426
acaucucagggagauacca

SEQ ID NO: 1172428 - RNA, 19 nt, Artificial Sequence
  Description of Artificial Sequence: Synthetic oligonucleotide
  Sense strand starting at position 2469 of SEQ ID NO: 916638
ccugguaauucccuugaac

SEQ ID NO: 1172429 - RNA, 19 nt, Artificial Sequence
  Description of Artificial Sequence: Synthetic oligonucleotide
  Antisense strand to SEQ ID NO: 1172428
guucaagggaauuaccagg

SEQ ID NO: 1172430 - RNA, 19 nt, Artificial Sequence
  Description of Artificial Sequence: Synthetic oligonucleotide
  Sense strand starting at position 2511 of SEQ ID NO: 916638
acgugaucucuggaucuau

SEQ ID NO: 1172431 - RNA, 19 nt, Artificial Sequence
  Description of Artificial Sequence: Synthetic oligonucleotide
  Antisense strand to SEQ ID NO: 1172430
auagauccagagaucacgu

SEQ ID NO: 1172432 - RNA, 19 nt, Artificial Sequence
  Description of Artificial Sequence: Synthetic oligonucleotide
  Sense strand starting at position 2556 of SEQ ID NO: 916638
gugauuucuguuuaucggu

SEQ ID NO: 1172433 - RNA, 19 nt, Artificial Sequence
  Description of Artificial Sequence: Synthetic oligonucleotide
  Antisense strand to SEQ ID NO: 1172432
accgauaaacagaaaucac

SEQ ID NO: 1172434 - RNA, 19 nt, Artificial Sequence
  Description of Artificial Sequence: Synthetic oligonucleotide
  Sense strand starting at position 2578 of SEQ ID NO: 916638
ugugcaguauuuccacuau

SEQ ID NO: 1172435 - RNA, 19 nt, Artificial Sequence
  Description of Artificial Sequence: Synthetic oligonucleotide
  Antisense strand to SEQ ID NO: 1172434
auaguggaaauacugcaca

SEQ ID NO: 1172436 - RNA, 19 nt, Artificial Sequence
  Description of Artificial Sequence: Synthetic oligonucleotide
  Sense strand starting at position 2758 of SEQ ID NO: 916638
guuauaauugguuauucug

SEQ ID NO: 1172437 - RNA, 19 nt, Artificial Sequence
  Description of Artificial Sequence: Synthetic oligonucleotide
  Antisense strand to SEQ ID NO: 1172436
cagaauaaccaauuauaac

SEQ ID NO: 1172438 - RNA, 19 nt, Artificial Sequence
  Description of Artificial Sequence: Synthetic oligonucleotide
  Sense strand starting at position 2761 of SEQ ID NO: 916638
auaauugguuauucuggau

SEQ ID NO: 1172439 - RNA, 19 nt, Artificial Sequence
  Description of Artificial Sequence: Synthetic oligonucleotide
  Antisense strand to SEQ ID NO: 1172438
auccagaauaaccaauuau

SEQ ID NO: 1172440 - RNA, 19 nt, Artificial Sequence
  Description of Artificial Sequence: Synthetic oligonucleotide
  Sense strand starting at position 2765 of SEQ ID NO: 916638
uugguuauucuggauguau

SEQ ID NO: 1172441 - RNA, 19 nt, Artificial Sequence
  Description of Artificial Sequence: Synthetic oligonucleotide
  Antisense strand to SEQ ID NO: 1172440
auacauccagaauaaccaa

SEQ ID NO: 1172442 - RNA, 19 nt, Artificial Sequence
  Description of Artificial Sequence: Synthetic oligonucleotide
  Sense strand starting at position 2830 of SEQ ID NO: 916638
guguuaaggacucauguug

SEQ ID NO: 1172443 - RNA, 19 nt, Artificial Sequence
  Description of Artificial Sequence: Synthetic oligonucleotide
  Antisense strand to SEQ ID NO: 1172442
caacaugaguccuuaacac

SEQ ID NO: 1172444 - RNA, 19 nt, Artificial Sequence
  Description of Artificial Sequence: Synthetic oligonucleotide
  Sense strand starting at position 3050 of SEQ ID NO: 916638
ucuaaugaguugucuagag

SEQ ID NO: 1172445 - RNA, 19 nt, Artificial Sequence
  Description of Artificial Sequence: Synthetic oligonucleotide
  Antisense strand to SEQ ID NO: 1172444
cucuagacaacucauuaga

SEQ ID NO: 1172446 - RNA, 19 nt, Artificial Sequence
  Description of Artificial Sequence: Synthetic oligonucleotide
  Sense strand starting at position 3097 of SEQ ID NO: 916638
gcuacuucuggcuaaggga

SEQ ID NO: 1172447 - RNA, 19 nt, Artificial Sequence
  Description of Artificial Sequence: Synthetic oligonucleotide
  Antisense strand to SEQ ID NO: 1172446
ucccuuagccagaaguagc

SEQ ID NO: 1172448 - RNA, 19 nt, Artificial Sequence
  Description of Artificial Sequence: Synthetic oligonucleotide
  Sense strand starting at position 3298 of SEQ ID NO: 916638
acaguaaaugaauguguau

SEQ ID NO: 1172449 - RNA, 19 nt, Artificial Sequence
  Description of Artificial Sequence: Synthetic oligonucleotide
  Antisense strand to SEQ ID NO: 1172448
auacacauucauuuacugu

SEQ ID NO: 1172450 - RNA, 19 nt, Artificial Sequence
  Description of Artificial Sequence: Synthetic oligonucleotide
  Sense strand starting at position 3300 of SEQ ID NO: 916638
aguaaaugaauguguauga

SEQ ID NO: 1172451 - RNA, 19 nt, Artificial Sequence
  Description of Artificial Sequence: Synthetic oligonucleotide
  Antisense strand to SEQ ID NO: 1172450
ucauacacauucauuuacu

SEQ ID NO: 1172452 - RNA, 19 nt, Artificial Sequence
  Description of Artificial Sequence: Synthetic oligonucleotide
  Sense strand starting at position 3301 of SEQ ID NO: 916638
guaaaugaauguguaugaa

SEQ ID NO: 1172453 - RNA, 19 nt, Artificial Sequence
  Description of Artificial Sequence: Synthetic oligonucleotide
  Antisense strand to SEQ ID NO: 1172452
uucauacacauucauuuac

SEQ ID NO: 1172454 - RNA, 19 nt, Artificial Sequence
  Description of Artificial Sequence: Synthetic oligonucleotide
  Sense strand starting at position 3336 of SEQ ID NO: 916638
ggguuuacggcguuagagu

SEQ ID NO: 1172455 - RNA, 19 nt, Artificial Sequence
  Description of Artificial Sequence: Synthetic oligonucleotide
  Antisense strand to SEQ ID NO: 1172454
acucuaacgccguaaaccc

SEQ ID NO: 1172456 - RNA, 19 nt, Artificial Sequence
  Description of Artificial Sequence: Synthetic oligonucleotide
  Sense strand starting at position 3353 of SEQ ID NO: 916638
guguuaagguauuuaaggu

SEQ ID NO: 1172457 - RNA, 19 nt, Artificial Sequence
  Description of Artificial Sequence: Synthetic oligonucleotide
  Antisense strand to SEQ ID NO: 1172456
accuuaaauaccuuaacac

SEQ ID NO: 1172458 - RNA, 19 nt, Artificial Sequence
  Description of Artificial Sequence: Synthetic oligonucleotide
  Sense strand starting at position 3370 of SEQ ID NO: 916638
guguuagagugauugggag

SEQ ID NO: 1172459 - RNA, 19 nt, Artificial Sequence
  Description of Artificial Sequence: Synthetic oligonucleotide
  Antisense strand to SEQ ID NO: 1172458
cucccaaucacucuaacac

SEQ ID NO: 1172460 - RNA, 19 nt, Artificial Sequence
  Description of Artificial Sequence: Synthetic oligonucleotide
  Sense strand starting at position 3540 of SEQ ID NO: 916638
caucuugguccuggauaaa

SEQ ID NO: 1172461 - RNA, 19 nt, Artificial Sequence
  Description of Artificial Sequence: Synthetic oligonucleotide
  Antisense strand to SEQ ID NO: 1172460
uuuauccaggaccaagaug

SEQ ID NO: 1172462 - RNA, 19 nt, Artificial Sequence
  Description of Artificial Sequence: Synthetic oligonucleotide
  Sense strand starting at position 52 of SEQ ID NO: 916639
gggucucacugcucaggau

SEQ ID NO: 1172463 - RNA, 19 nt, Artificial Sequence
  Description of Artificial Sequence: Synthetic oligonucleotide
  Antisense strand to SEQ ID NO: 1172462
auccugagcagugagaccc

SEQ ID NO: 1172464 - RNA, 19 nt, Artificial Sequence
  Description of Artificial Sequence: Synthetic oligonucleotide
  Sense strand starting at position 56 of SEQ ID NO: 916639
cucacugcucaggaucaga

SEQ ID NO: 1172465 - RNA, 19 nt, Artificial Sequence
  Description of Artificial Sequence: Synthetic oligonucleotide
  Antisense strand to SEQ ID NO: 1172464
ucugauccugagcagugag

SEQ ID NO: 1172466 - RNA, 19 nt, Artificial Sequence
  Description of Artificial Sequence: Synthetic oligonucleotide
  Sense strand starting at position 107 of SEQ ID NO: 916639
guuaaauccuagucugacc

SEQ ID NO: 1172467 - RNA, 19 nt, Artificial Sequence
  Description of Artificial Sequence: Synthetic oligonucleotide
  Antisense strand to SEQ ID NO: 1172466
ggucagacuaggauuuaac

SEQ ID NO: 1172468 - RNA, 19 nt, Artificial Sequence
  Description of Artificial Sequence: Synthetic oligonucleotide
  Sense strand starting at position 265 of SEQ ID NO: 916639
caggaucaaugcucaagua

SEQ ID NO: 1172469 - RNA, 19 nt, Artificial Sequence
  Description of Artificial Sequence: Synthetic oligonucleotide
  Antisense strand to SEQ ID NO: 1172468
uacuugagcauugauccug

SEQ ID NO: 1172470 - RNA, 19 nt, Artificial Sequence
  Description of Artificial Sequence: Synthetic oligonucleotide
  Sense strand starting at position 311 of SEQ ID NO: 916639
guacucugccagcagagaa

SEQ ID NO: 1172471 - RNA, 19 nt, Artificial Sequence
  Description of Artificial Sequence: Synthetic oligonucleotide
  Antisense strand to SEQ ID NO: 1172470
uucucugcuggcagaguac

SEQ ID NO: 1172472 - RNA, 19 nt, Artificial Sequence
  Description of Artificial Sequence: Synthetic oligonucleotide
  Sense strand starting at position 546 of SEQ ID NO: 916639
caaagauugcgucagacuu

SEQ ID NO: 1172473 - RNA, 19 nt, Artificial Sequence
  Description of Artificial Sequence: Synthetic oligonucleotide
  Antisense strand to SEQ ID NO: 1172472
aagucugacgcaaucuuug

SEQ ID NO: 1172474 - RNA, 19 nt, Artificial Sequence
  Description of Artificial Sequence: Synthetic oligonucleotide
  Sense strand starting at position 569 of SEQ ID NO: 916639
acugauguaucacugguga

SEQ ID NO: 1172475 - RNA, 19 nt, Artificial Sequence
  Description of Artificial Sequence: Synthetic oligonucleotide
  Antisense strand to SEQ ID NO: 1172474
ucaccagugauacaucagu

SEQ ID NO: 1172476 - RNA, 19 nt, Artificial Sequence
  Description of Artificial Sequence: Synthetic oligonucleotide
  Sense strand starting at position 571 of SEQ ID NO: 916639
ugauguaucacuggugaac

SEQ ID NO: 1172477 - RNA, 19 nt, Artificial Sequence
  Description of Artificial Sequence: Synthetic oligonucleotide
  Antisense strand to SEQ ID NO: 1172476
guucaccagugauacauca

SEQ ID NO: 1172478 - RNA, 19 nt, Artificial Sequence
  Description of Artificial Sequence: Synthetic oligonucleotide
  Sense strand starting at position 582 of SEQ ID NO: 916639
uggugaaccucaucaucau

SEQ ID NO: 1172479 - RNA, 19 nt, Artificial Sequence
  Description of Artificial Sequence: Synthetic oligonucleotide
  Antisense strand to SEQ ID NO: 1172478
augaugaugagguucacca

SEQ ID NO: 1172480 - RNA, 19 nt, Artificial Sequence
  Description of Artificial Sequence: Synthetic oligonucleotide
  Sense strand starting at position 658 of SEQ ID NO: 916639
gaguauuuacgaugugccu

SEQ ID NO: 1172481 - RNA, 19 nt, Artificial Sequence
  Description of Artificial Sequence: Synthetic oligonucleotide
  Antisense strand to SEQ ID NO: 1172480
aggcacaucguaaauacuc

SEQ ID NO: 1172482 - RNA, 19 nt, Artificial Sequence
  Description of Artificial Sequence: Synthetic oligonucleotide
  Sense strand starting at position 759 of SEQ ID NO: 916639
ucaaucagaggcuaucauu

SEQ ID NO: 1172483 - RNA, 19 nt, Artificial Sequence
  Description of Artificial Sequence: Synthetic oligonucleotide
  Antisense strand to SEQ ID NO: 1172482
aaugauagccucugauuga

SEQ ID NO: 1172484 - RNA, 19 nt, Artificial Sequence
  Description of Artificial Sequence: Synthetic oligonucleotide
  Sense strand starting at position 825 of SEQ ID NO: 916639
uuauuuaugugccuuaugu

SEQ ID NO: 1172485 - RNA, 19 nt, Artificial Sequence
  Description of Artificial Sequence: Synthetic oligonucleotide
  Antisense strand to SEQ ID NO: 1172484
acauaaggcacauaaauaa

SEQ ID NO: 1172486 - RNA, 19 nt, Artificial Sequence
  Description of Artificial Sequence: Synthetic oligonucleotide
  Sense strand starting at position 1015 of SEQ ID NO: 916639
ucuaauugucuccauguca

SEQ ID NO: 1172487 - RNA, 19 nt, Artificial Sequence
  Description of Artificial Sequence: Synthetic oligonucleotide
  Antisense strand to SEQ ID NO: 1172486
ugacauggagacaauuaga

SEQ ID NO: 1172488 - RNA, 19 nt, Artificial Sequence
  Description of Artificial Sequence: Synthetic oligonucleotide
  Sense strand starting at position 1072 of SEQ ID NO: 916639
aucagaauauaucagaaga

SEQ ID NO: 1172489 - RNA, 19 nt, Artificial Sequence
  Description of Artificial Sequence: Synthetic oligonucleotide
  Antisense strand to SEQ ID NO: 1172488
ucuucugauauauucugau

SEQ ID NO: 1172490 - RNA, 19 nt, Artificial Sequence
  Description of Artificial Sequence: Synthetic oligonucleotide
  Sense strand starting at position 1245 of SEQ ID NO: 916639
cggaucuguauugauuaac

SEQ ID NO: 1172491 - RNA, 19 nt, Artificial Sequence
  Description of Artificial Sequence: Synthetic oligonucleotide
  Antisense strand to SEQ ID NO: 1172490
guuaaucaauacagauccg

SEQ ID NO: 1172492 - RNA, 19 nt, Artificial Sequence
  Description of Artificial Sequence: Synthetic oligonucleotide
  Sense strand starting at position 1596 of SEQ ID NO: 916639
uaugaagauguggguaaau

SEQ ID NO: 1172493 - RNA, 19 nt, Artificial Sequence
  Description of Artificial Sequence: Synthetic oligonucleotide
  Antisense strand to SEQ ID NO: 1172492
auuuacccacaucuucaua

SEQ ID NO: 1172494 - RNA, 19 nt, Artificial Sequence
  Description of Artificial Sequence: Synthetic oligonucleotide
  Sense strand starting at position 1725 of SEQ ID NO: 916639
ggcuaagggagucaguaaa

SEQ ID NO: 1172495 - RNA, 19 nt, Artificial Sequence
  Description of Artificial Sequence: Synthetic oligonucleotide
  Antisense strand to SEQ ID NO: 1172494
uuuacugacucccuuagcc

SEQ ID NO: 1172496 - RNA, 19 nt, Artificial Sequence
  Description of Artificial Sequence: Synthetic oligonucleotide
  Sense strand starting at position 2079 of SEQ ID NO: 916639
uguaaucaagcccaagacu

SEQ ID NO: 1172497 - RNA, 19 nt, Artificial Sequence
  Description of Artificial Sequence: Synthetic oligonucleotide
  Antisense strand to SEQ ID NO: 1172496
agucuugggcuugauuaca

SEQ ID NO: 1172498 - RNA, 19 nt, Artificial Sequence
  Description of Artificial Sequence: Synthetic oligonucleotide
  Sense strand starting at position 2214 of SEQ ID NO: 916639
aaaguugaguuagccucaa

SEQ ID NO: 1172499 - RNA, 19 nt, Artificial Sequence
  Description of Artificial Sequence: Synthetic oligonucleotide
  Antisense strand to SEQ ID NO: 1172498
uugaggcuaacucaacuuu

SEQ ID NO: 1172500 - RNA, 19 nt, Artificial Sequence
  Description of Artificial Sequence: Synthetic oligonucleotide
  Sense strand starting at position 2218 of SEQ ID NO: 916639
uugaguuagccucaacgau

SEQ ID NO: 1172501 - RNA, 19 nt, Artificial Sequence
  Description of Artificial Sequence: Synthetic oligonucleotide
  Antisense strand to SEQ ID NO: 1172500
aucguugaggcuaacucaa

SEQ ID NO: 1172502 - RNA, 19 nt, Artificial Sequence
  Description of Artificial Sequence: Synthetic oligonucleotide
  Sense strand starting at position 2254 of SEQ ID NO: 916639
agggauagguuauugcaga

SEQ ID NO: 1172503 - RNA, 19 nt, Artificial Sequence
  Description of Artificial Sequence: Synthetic oligonucleotide
  Antisense strand to SEQ ID NO: 1172502
ucugcaauaaccuaucccu

SEQ ID NO: 1172504 - RNA, 19 nt, Artificial Sequence
  Description of Artificial Sequence: Synthetic oligonucleotide
  Sense strand starting at position 2275 of SEQ ID NO: 916639
gcuggaaucagaugagguu

SEQ ID NO: 1172505 - RNA, 19 nt, Artificial Sequence
  Description of Artificial Sequence: Synthetic oligonucleotide
  Antisense strand to SEQ ID NO: 1172504
aaccucaucugauuccagc

SEQ ID NO: 1172506 - RNA, 19 nt, Artificial Sequence
  Description of Artificial Sequence: Synthetic oligonucleotide
  Sense strand starting at position 2287 of SEQ ID NO: 916639
ugagguuuagggcacugau

SEQ ID NO: 1172507 - RNA, 19 nt, Artificial Sequence
  Description of Artificial Sequence: Synthetic oligonucleotide
  Antisense strand to SEQ ID NO: 1172506
aucagugcccuaaaccuca

SEQ ID NO: 1172508 - RNA, 19 nt, Artificial Sequence
  Description of Artificial Sequence: Synthetic oligonucleotide
  Sense strand starting at position 2302 of SEQ ID NO: 916639
ugaugacaaucagcaaagu

SEQ ID NO: 1172509 - RNA, 19 nt, Artificial Sequence
  Description of Artificial Sequence: Synthetic oligonucleotide
  Antisense strand to SEQ ID NO: 1172508
acuuugcugauugucauca

SEQ ID NO: 1172510 - RNA, 19 nt, Artificial Sequence
  Description of Artificial Sequence: Synthetic oligonucleotide
  Sense strand starting at position 2405 of SEQ ID NO: 916639
gugauauggaguugaaacu

SEQ ID NO: 1172511 - RNA, 19 nt, Artificial Sequence
  Description of Artificial Sequence: Synthetic oligonucleotide
  Antisense strand to SEQ ID NO: 1172510
aguuucaacuccauaucac

SEQ ID NO: 1172512 - RNA, 19 nt, Artificial Sequence
  Description of Artificial Sequence: Synthetic oligonucleotide
  Sense strand starting at position 2443 of SEQ ID NO: 916639
gcacaucagaguuaggcaa

SEQ ID NO: 1172513 - RNA, 19 nt, Artificial Sequence
  Description of Artificial Sequence: Synthetic oligonucleotide
  Antisense strand to SEQ ID NO: 1172512
uugccuaacucugaugugc

SEQ ID NO: 1172514 - RNA, 19 nt, Artificial Sequence
  Description of Artificial Sequence: Synthetic oligonucleotide
  Sense strand starting at position 2456 of SEQ ID NO: 916639
aggcaaauuaaugguguca

SEQ ID NO: 1172515 - RNA, 19 nt, Artificial Sequence
  Description of Artificial Sequence: Synthetic oligonucleotide
  Antisense strand to SEQ ID NO: 1172514
ugacaccauuaauuugccu

SEQ ID NO: 1172516 - RNA, 19 nt, Artificial Sequence
  Description of Artificial Sequence: Synthetic oligonucleotide
  Sense strand starting at position 2532 of SEQ ID NO: 916639
ugagcaucucuugauccuu

SEQ ID NO: 1172517 - RNA, 19 nt, Artificial Sequence
  Description of Artificial Sequence: Synthetic oligonucleotide
  Antisense strand to SEQ ID NO: 1172516
aaggaucaagagaugcuca

SEQ ID NO: 1172518 - RNA, 19 nt, Artificial Sequence
  Description of Artificial Sequence: Synthetic oligonucleotide
  Sense strand starting at position 2617 of SEQ ID NO: 916639
gccguauauacacagaugu

SEQ ID NO: 1172519 - RNA, 19 nt, Artificial Sequence
  Description of Artificial Sequence: Synthetic oligonucleotide
  Antisense strand to SEQ ID NO: 1172518
acaucuguguauauacggc

SEQ ID NO: 1172520 - RNA, 19 nt, Artificial Sequence
  Description of Artificial Sequence: Synthetic oligonucleotide
  Sense strand starting at position 2619 of SEQ ID NO: 916639
cguauauacacagaugugu

SEQ ID NO: 1172521 - RNA, 19 nt, Artificial Sequence
  Description of Artificial Sequence: Synthetic oligonucleotide
  Antisense strand to SEQ ID NO: 1172520
acacaucuguguauauacg

SEQ ID NO: 1172522 - RNA, 19 nt, Artificial Sequence
  Description of Artificial Sequence: Synthetic oligonucleotide
  Sense strand starting at position 2624 of SEQ ID NO: 916639
auacacagauguguacaua

SEQ ID NO: 1172523 - RNA, 19 nt, Artificial Sequence
  Description of Artificial Sequence: Synthetic oligonucleotide
  Antisense strand to SEQ ID NO: 1172522
uauguacacaucuguguau

SEQ ID NO: 1172524 - RNA, 19 nt, Artificial Sequence
  Description of Artificial Sequence: Synthetic oligonucleotide
  Sense strand starting at position 2627 of SEQ ID NO: 916639
cacagauguguacauacga

SEQ ID NO: 1172525 - RNA, 19 nt, Artificial Sequence
  Description of Artificial Sequence: Synthetic oligonucleotide
  Antisense strand to SEQ ID NO: 1172524
ucguauguacacaucugug

SEQ ID NO: 1172526 - RNA, 19 nt, Artificial Sequence
  Description of Artificial Sequence: Synthetic oligonucleotide
  Sense strand starting at position 2676 of SEQ ID NO: 916639
gggaucaccucucucaaag

SEQ ID NO: 1172527 - RNA, 19 nt, Artificial Sequence
  Description of Artificial Sequence: Synthetic oligonucleotide
  Antisense strand to SEQ ID NO: 1172526
cuuugagagaggugauccc

SEQ ID NO: 1172528 - RNA, 19 nt, Artificial Sequence
  Description of Artificial Sequence: Synthetic oligonucleotide
  Sense strand starting at position 2989 of SEQ ID NO: 916639
gucauaggucccuaggcuu

SEQ ID NO: 1172529 - RNA, 19 nt, Artificial Sequence
  Description of Artificial Sequence: Synthetic oligonucleotide
  Antisense strand to SEQ ID NO: 1172528
aagccuagggaccuaugac

SEQ ID NO: 1172530 - RNA, 19 nt, Artificial Sequence
  Description of Artificial Sequence: Synthetic oligonucleotide
  Sense strand starting at position 3159 of SEQ ID NO: 916639
ugagacauauaugaagaca

SEQ ID NO: 1172531 - RNA, 19 nt, Artificial Sequence
  Description of Artificial Sequence: Synthetic oligonucleotide
  Antisense strand to SEQ ID NO: 1172530
ugucuucauauaugucuca

SEQ ID NO: 1172532 - RNA, 19 nt, Artificial Sequence
  Description of Artificial Sequence: Synthetic oligonucleotide
  Sense strand starting at position 3185 of SEQ ID NO: 916639
acaaacaugcauuguguua

SEQ ID NO: 1172533 - RNA, 19 nt, Artificial Sequence
  Description of Artificial Sequence: Synthetic oligonucleotide
  Antisense strand to SEQ ID NO: 1172532
uaacacaaugcauguuugu

SEQ ID NO: 1172534 - RNA, 19 nt, Artificial Sequence
  Description of Artificial Sequence: Synthetic oligonucleotide
  Sense strand starting at position 3211 of SEQ ID NO: 916639
gagauuaaugaacguacua

SEQ ID NO: 1172535 - RNA, 19 nt, Artificial Sequence
  Description of Artificial Sequence: Synthetic oligonucleotide
  Antisense strand to SEQ ID NO: 1172534
uaguacguucauuaaucuc

SEQ ID NO: 1172536 - RNA, 19 nt, Artificial Sequence
  Description of Artificial Sequence: Synthetic oligonucleotide
  Sense strand starting at position 3539 of SEQ ID NO: 916639
accacauguugucuaaacu

SEQ ID NO: 1172537 - RNA, 19 nt, Artificial Sequence
  Description of Artificial Sequence: Synthetic oligonucleotide
  Antisense strand to SEQ ID NO: 1172536
aguuuagacaacauguggu

SEQ ID NO: 1172538 - RNA, 19 nt, Artificial Sequence
  Description of Artificial Sequence: Synthetic oligonucleotide
  Sense strand starting at position 3540 of SEQ ID NO: 916639
ccacauguugucuaaacug

SEQ ID NO: 1172539 - RNA, 19 nt, Artificial Sequence
  Description of Artificial Sequence: Synthetic oligonucleotide
  Antisense strand to SEQ ID NO: 1172538
caguuuagacaacaugugg

SEQ ID NO: 1172540 - RNA, 19 nt, Artificial Sequence
  Description of Artificial Sequence: Synthetic oligonucleotide
  Sense strand starting at position 3803 of SEQ ID NO: 916639
uucguacgcacugauaaga

SEQ ID NO: 1172541 - RNA, 19 nt, Artificial Sequence
  Description of Artificial Sequence: Synthetic oligonucleotide
  Antisense strand to SEQ ID NO: 1172540
ucuuaucagugcguacgaa

SEQ ID NO: 1172542 - RNA, 19 nt, Artificial Sequence
  Description of Artificial Sequence: Synthetic oligonucleotide
  Sense strand starting at position 407 of SEQ ID NO: 916640
gucucaauugagggaccuu

SEQ ID NO: 1172543 - RNA, 19 nt, Artificial Sequence
  Description of Artificial Sequence: Synthetic oligonucleotide
  Antisense strand to SEQ ID NO: 1172542
aaggucccucaauugagac

SEQ ID NO: 1172544 - RNA, 19 nt, Artificial Sequence
  Description of Artificial Sequence: Synthetic oligonucleotide
  Sense strand starting at position 522 of SEQ ID NO: 916640
gacuacuugucauguggga

SEQ ID NO: 1172545 - RNA, 19 nt, Artificial Sequence
  Description of Artificial Sequence: Synthetic oligonucleotide
  Antisense strand to SEQ ID NO: 1172544
ucccacaugacaaguaguc

SEQ ID NO: 1172546 - RNA, 19 nt, Artificial Sequence
  Description of Artificial Sequence: Synthetic oligonucleotide
  Sense strand starting at position 677 of SEQ ID NO: 916640
caccaugcuuaguguauga

SEQ ID NO: 1172547 - RNA, 19 nt, Artificial Sequence
  Description of Artificial Sequence: Synthetic oligonucleotide
  Antisense strand to SEQ ID NO: 1172546
ucauacacuaagcauggug

SEQ ID NO: 1172548 - RNA, 19 nt, Artificial Sequence
  Description of Artificial Sequence: Synthetic oligonucleotide
  Sense strand starting at position 682 of SEQ ID NO: 916640
ugcuuaguguaugaugcua

SEQ ID NO: 1172549 - RNA, 19 nt, Artificial Sequence
  Description of Artificial Sequence: Synthetic oligonucleotide
  Antisense strand to SEQ ID NO: 1172548
uagcaucauacacuaagca

SEQ ID NO: 1172550 - RNA, 19 nt, Artificial Sequence
  Description of Artificial Sequence: Synthetic oligonucleotide
  Sense strand starting at position 684 of SEQ ID NO: 916640
cuuaguguaugaugcuaau

SEQ ID NO: 1172551 - RNA, 19 nt, Artificial Sequence
  Description of Artificial Sequence: Synthetic oligonucleotide
  Antisense strand to SEQ ID NO: 1172550
auuagcaucauacacuaag

SEQ ID NO: 1172552 - RNA, 19 nt, Artificial Sequence
  Description of Artificial Sequence: Synthetic oligonucleotide
  Sense strand starting at position 687 of SEQ ID NO: 916640
aguguaugaugcuaauaau

SEQ ID NO: 1172553 - RNA, 19 nt, Artificial Sequence
  Description of Artificial Sequence: Synthetic oligonucleotide
  Antisense strand to SEQ ID NO: 1172552
auuauuagcaucauacacu

SEQ ID NO: 1172554 - RNA, 19 nt, Artificial Sequence
  Description of Artificial Sequence: Synthetic oligonucleotide
  Sense strand starting at position 690 of SEQ ID NO: 916640
guaugaugcuaauaauaga

SEQ ID NO: 1172555 - RNA, 19 nt, Artificial Sequence
  Description of Artificial Sequence: Synthetic oligonucleotide
  Antisense strand to SEQ ID NO: 1172554
ucuauuauuagcaucauac

SEQ ID NO: 1172556 - RNA, 19 nt, Artificial Sequence
  Description of Artificial Sequence: Synthetic oligonucleotide
  Sense strand starting at position 787 of SEQ ID NO: 916640
uucucaaaguacugaguau

SEQ ID NO: 1172557 - RNA, 19 nt, Artificial Sequence
  Description of Artificial Sequence: Synthetic oligonucleotide
  Antisense strand to SEQ ID NO: 1172556
auacucaguacuuugagaa

SEQ ID NO: 1172558 - RNA, 19 nt, Artificial Sequence
  Description of Artificial Sequence: Synthetic oligonucleotide
  Sense strand starting at position 799 of SEQ ID NO: 916640
ugaguauaaugaggaguua

SEQ ID NO: 1172559 - RNA, 19 nt, Artificial Sequence
  Description of Artificial Sequence: Synthetic oligonucleotide
  Antisense strand to SEQ ID NO: 1172558
uaacuccucauuauacuca

SEQ ID NO: 1172560 - RNA, 19 nt, Artificial Sequence
  Description of Artificial Sequence: Synthetic oligonucleotide
  Sense strand starting at position 874 of SEQ ID NO: 916640
ccagcaacaugugaaauua

SEQ ID NO: 1172561 - RNA, 19 nt, Artificial Sequence
  Description of Artificial Sequence: Synthetic oligonucleotide
  Antisense strand to SEQ ID NO: 1172560
uaauuucacauguugcugg

SEQ ID NO: 1172562 - RNA, 19 nt, Artificial Sequence
  Description of Artificial Sequence: Synthetic oligonucleotide
  Sense strand starting at position 923 of SEQ ID NO: 916640
acaggugaauuucgaucau

SEQ ID NO: 1172563 - RNA, 19 nt, Artificial Sequence
  Description of Artificial Sequence: Synthetic oligonucleotide
  Antisense strand to SEQ ID NO: 1172562
augaucgaaauucaccugu

SEQ ID NO: 1172564 - RNA, 19 nt, Artificial Sequence
  Description of Artificial Sequence: Synthetic oligonucleotide
  Sense strand starting at position 1301 of SEQ ID NO: 916640
cccugcuugcguuaaguuu

SEQ ID NO: 1172565 - RNA, 19 nt, Artificial Sequence
  Description of Artificial Sequence: Synthetic oligonucleotide
  Antisense strand to SEQ ID NO: 1172564
aaacuuaacgcaagcaggg

SEQ ID NO: 1172566 - RNA, 19 nt, Artificial Sequence
  Description of Artificial Sequence: Synthetic oligonucleotide
  Sense strand starting at position 1305 of SEQ ID NO: 916640
gcuugcguuaaguuuaaau

SEQ ID NO: 1172567 - RNA, 19 nt, Artificial Sequence
  Description of Artificial Sequence: Synthetic oligonucleotide
  Antisense strand to SEQ ID NO: 1172566
auuuaaacuuaacgcaagc

SEQ ID NO: 1172568 - RNA, 19 nt, Artificial Sequence
  Description of Artificial Sequence: Synthetic oligonucleotide
  Sense strand starting at position 1307 of SEQ ID NO: 916640
uugcguuaaguuuaaauug

SEQ ID NO: 1172569 - RNA, 19 nt, Artificial Sequence
  Description of Artificial Sequence: Synthetic oligonucleotide
  Antisense strand to SEQ ID NO: 1172568
caauuuaaacuuaacgcaa

SEQ ID NO: 1172570 - RNA, 19 nt, Artificial Sequence
  Description of Artificial Sequence: Synthetic oligonucleotide
  Sense strand starting at position 1315 of SEQ ID NO: 916640
aguuuaaauugacguaaac

SEQ ID NO: 1172571 - RNA, 19 nt, Artificial Sequence
  Description of Artificial Sequence: Synthetic oligonucleotide
  Antisense strand to SEQ ID NO: 1172570
guuuacgucaauuuaaacu

SEQ ID NO: 1172572 - RNA, 19 nt, Artificial Sequence
  Description of Artificial Sequence: Synthetic oligonucleotide
  Sense strand starting at position 2197 of SEQ ID NO: 916640
cgguacuuuccagaagguu

SEQ ID NO: 1172573 - RNA, 19 nt, Artificial Sequence
  Description of Artificial Sequence: Synthetic oligonucleotide
  Antisense strand to SEQ ID NO: 1172572
aaccuucuggaaaguaccg

SEQ ID NO: 1172574 - RNA, 19 nt, Artificial Sequence
  Description of Artificial Sequence: Synthetic oligonucleotide
  Sense strand starting at position 2307 of SEQ ID NO: 916640
ugccgcagguuuguuuaaa

SEQ ID NO: 1172575 - RNA, 19 nt, Artificial Sequence
  Description of Artificial Sequence: Synthetic oligonucleotide
  Antisense strand to SEQ ID NO: 1172574
uuuaaacaaaccugcggca

SEQ ID NO: 1172576 - RNA, 19 nt, Artificial Sequence
  Description of Artificial Sequence: Synthetic oligonucleotide
  Sense strand starting at position 2308 of SEQ ID NO: 916640
gccgcagguuuguuuaaac

SEQ ID NO: 1172577 - RNA, 19 nt, Artificial Sequence
  Description of Artificial Sequence: Synthetic oligonucleotide
  Antisense strand to SEQ ID NO: 1172576
guuuaaacaaaccugcggc

SEQ ID NO: 1172578 - RNA, 19 nt, Artificial Sequence
  Description of Artificial Sequence: Synthetic oligonucleotide
  Sense strand starting at position 2484 of SEQ ID NO: 916640
gcgggacagucuuucuaug

SEQ ID NO: 1172579 - RNA, 19 nt, Artificial Sequence
  Description of Artificial Sequence: Synthetic oligonucleotide
  Antisense strand to SEQ ID NO: 1172578
cauagaaagacugucccgc

SEQ ID NO: 1172580 - RNA, 19 nt, Artificial Sequence
  Description of Artificial Sequence: Synthetic oligonucleotide
  Sense strand starting at position 2692 of SEQ ID NO: 916640
aacagugcugcgugcagau

SEQ ID NO: 1172581 - RNA, 19 nt, Artificial Sequence
  Description of Artificial Sequence: Synthetic oligonucleotide
  Antisense strand to SEQ ID NO: 1172580
aucugcacgcagcacuguu

SEQ ID NO: 1172582 - RNA, 19 nt, Artificial Sequence
  Description of Artificial Sequence: Synthetic oligonucleotide
  Sense strand starting at position 2748 of SEQ ID NO: 916640
gugggauugcuggaccauc

SEQ ID NO: 1172583 - RNA, 19 nt, Artificial Sequence
  Description of Artificial Sequence: Synthetic oligonucleotide
  Antisense strand to SEQ ID NO: 1172582
gaugguccagcaaucccac

SEQ ID NO: 1172584 - RNA, 19 nt, Artificial Sequence
  Description of Artificial Sequence: Synthetic oligonucleotide
  Sense strand starting at position 3131 of SEQ ID NO: 916640
acugaaugguuccacagaa

SEQ ID NO: 1172585 - RNA, 19 nt, Artificial Sequence
  Description of Artificial Sequence: Synthetic oligonucleotide
  Antisense strand to SEQ ID NO: 1172584
uucuguggaaccauucagu

SEQ ID NO: 1172586 - RNA, 19 nt, Artificial Sequence
  Description of Artificial Sequence: Synthetic oligonucleotide
  Sense strand starting at position 3154 of SEQ ID NO: 916640
ugagacuucugcuuaaaca

SEQ ID NO: 1172587 - RNA, 19 nt, Artificial Sequence
  Description of Artificial Sequence: Synthetic oligonucleotide
  Antisense strand to SEQ ID NO: 1172586
uguuuaagcagaagucuca

SEQ ID NO: 1172588 - RNA, 19 nt, Artificial Sequence
  Description of Artificial Sequence: Synthetic oligonucleotide
  Sense strand starting at position 3211 of SEQ ID NO: 916640
gcuuccaggucauuuacua

SEQ ID NO: 1172589 - RNA, 19 nt, Artificial Sequence
  Description of Artificial Sequence: Synthetic oligonucleotide
  Antisense strand to SEQ ID NO: 1172588
uaguaaaugaccuggaagc

SEQ ID NO: 1172590 - RNA, 19 nt, Artificial Sequence
  Description of Artificial Sequence: Synthetic oligonucleotide
  Sense strand starting at position 3750 of SEQ ID NO: 916640
gagccuaaggccggauaau

SEQ ID NO: 1172591 - RNA, 19 nt, Artificial Sequence
  Description of Artificial Sequence: Synthetic oligonucleotide
  Antisense strand to SEQ ID NO: 1172590
auuauccggccuuaggcuc

SEQ ID NO: 1172592 - RNA, 19 nt, Artificial Sequence
  Description of Artificial Sequence: Synthetic oligonucleotide
  Sense strand starting at position 117 of SEQ ID NO: 916641
uuucgugcuguaccguaau

SEQ ID NO: 1172593 - RNA, 19 nt, Artificial Sequence
  Description of Artificial Sequence: Synthetic oligonucleotide
  Antisense strand to SEQ ID NO: 1172592
auuacgguacagcacgaaa

SEQ ID NO: 1172594 - RNA, 19 nt, Artificial Sequence
  Description of Artificial Sequence: Synthetic oligonucleotide
  Sense strand starting at position 119 of SEQ ID NO: 916641
ucgugcuguaccguaauca

SEQ ID NO: 1172595 - RNA, 19 nt, Artificial Sequence
  Description of Artificial Sequence: Synthetic oligonucleotide
  Antisense strand to SEQ ID NO: 1172594
ugauuacgguacagcacga

SEQ ID NO: 1172596 - RNA, 19 nt, Artificial Sequence
  Description of Artificial Sequence: Synthetic oligonucleotide
  Sense strand starting at position 135 of SEQ ID NO: 916641
ucaugucuccuguaaggac

SEQ ID NO: 1172597 - RNA, 19 nt, Artificial Sequence
  Description of Artificial Sequence: Synthetic oligonucleotide
  Antisense strand to SEQ ID NO: 1172596
guccuuacaggagacauga

SEQ ID NO: 1172598 - RNA, 19 nt, Artificial Sequence
  Description of Artificial Sequence: Synthetic oligonucleotide
  Sense strand starting at position 162 of SEQ ID NO: 916641
caagaauuguguuuaauga

SEQ ID NO: 1172599 - RNA, 19 nt, Artificial Sequence
  Description of Artificial Sequence: Synthetic oligonucleotide
  Antisense strand to SEQ ID NO: 1172598
ucauuaaacacaauucuug

SEQ ID NO: 1172600 - RNA, 19 nt, Artificial Sequence
  Description of Artificial Sequence: Synthetic oligonucleotide
  Sense strand starting at position 255 of SEQ ID NO: 916641
acagguuacaggugagcua

SEQ ID NO: 1172601 - RNA, 19 nt, Artificial Sequence
  Description of Artificial Sequence: Synthetic oligonucleotide
  Antisense strand to SEQ ID NO: 1172600
uagcucaccuguaaccugu

SEQ ID NO: 1172602 - RNA, 19 nt, Artificial Sequence
  Description of Artificial Sequence: Synthetic oligonucleotide
  Sense strand starting at position 346 of SEQ ID NO: 916641
uuauguauggucuagaagg

SEQ ID NO: 1172603 - RNA, 19 nt, Artificial Sequence
  Description of Artificial Sequence: Synthetic oligonucleotide
  Antisense strand to SEQ ID NO: 1172602
ccuucuagaccauacauaa

SEQ ID NO: 1172604 - RNA, 19 nt, Artificial Sequence
  Description of Artificial Sequence: Synthetic oligonucleotide
  Sense strand starting at position 372 of SEQ ID NO: 916641
aggugaacuagucaagcuu

SEQ ID NO: 1172605 - RNA, 19 nt, Artificial Sequence
  Description of Artificial Sequence: Synthetic oligonucleotide
  Antisense strand to SEQ ID NO: 1172604
aagcuugacuaguucaccu

SEQ ID NO: 1172606 - RNA, 19 nt, Artificial Sequence
  Description of Artificial Sequence: Synthetic oligonucleotide
  Sense strand starting at position 414 of SEQ ID NO: 916641
aguguacuaguggauguaa

SEQ ID NO: 1172607 - RNA, 19 nt, Artificial Sequence
  Description of Artificial Sequence: Synthetic oligonucleotide
  Antisense strand to SEQ ID NO: 1172606
uuacauccacuaguacacu

SEQ ID NO: 1172608 - RNA, 19 nt, Artificial Sequence
  Description of Artificial Sequence: Synthetic oligonucleotide
  Sense strand starting at position 422 of SEQ ID NO: 916641
aguggauguaacuguagau

SEQ ID NO: 1172609 - RNA, 19 nt, Artificial Sequence
  Description of Artificial Sequence: Synthetic oligonucleotide
  Antisense strand to SEQ ID NO: 1172608
aucuacaguuacauccacu

SEQ ID NO: 1172610 - RNA, 19 nt, Artificial Sequence
  Description of Artificial Sequence: Synthetic oligonucleotide
  Sense strand starting at position 428 of SEQ ID NO: 916641
uguaacuguagauauagua

SEQ ID NO: 1172611 - RNA, 19 nt, Artificial Sequence
  Description of Artificial Sequence: Synthetic oligonucleotide
  Antisense strand to SEQ ID NO: 1172610
uacuauaucuacaguuaca

SEQ ID NO: 1172612 - RNA, 19 nt, Artificial Sequence
  Description of Artificial Sequence: Synthetic oligonucleotide
  Sense strand starting at position 484 of SEQ ID NO: 916641
cuuugaucuaggcagugaa

SEQ ID NO: 1172613 - RNA, 19 nt, Artificial Sequence
  Description of Artificial Sequence: Synthetic oligonucleotide
  Antisense strand to SEQ ID NO: 1172612
uucacugccuagaucaaag

SEQ ID NO: 1172614 - RNA, 19 nt, Artificial Sequence
  Description of Artificial Sequence: Synthetic oligonucleotide
  Sense strand starting at position 487 of SEQ ID NO: 916641
ugaucuaggcagugaacaa

SEQ ID NO: 1172615 - RNA, 19 nt, Artificial Sequence
  Description of Artificial Sequence: Synthetic oligonucleotide
  Antisense strand to SEQ ID NO: 1172614
uuguucacugccuagauca

SEQ ID NO: 1172616 - RNA, 19 nt, Artificial Sequence
  Description of Artificial Sequence: Synthetic oligonucleotide
  Sense strand starting at position 649 of SEQ ID NO: 916641
gccuaaaggccugacacua

SEQ ID NO: 1172617 - RNA, 19 nt, Artificial Sequence
  Description of Artificial Sequence: Synthetic oligonucleotide
  Antisense strand to SEQ ID NO: 1172616
uagugucaggccuuuaggc

SEQ ID NO: 1172618 - RNA, 19 nt, Artificial Sequence
  Description of Artificial Sequence: Synthetic oligonucleotide
  Sense strand starting at position 844 of SEQ ID NO: 916641
guauuaagaggccacaguu

SEQ ID NO: 1172619 - RNA, 19 nt, Artificial Sequence
  Description of Artificial Sequence: Synthetic oligonucleotide
  Antisense strand to SEQ ID NO: 1172618
aacuguggccucuuaauac

SEQ ID NO: 1172620 - RNA, 19 nt, Artificial Sequence
  Description of Artificial Sequence: Synthetic oligonucleotide
  Sense strand starting at position 1433 of SEQ ID NO: 916641
ccgccauuaccugaaguga

SEQ ID NO: 1172621 - RNA, 19 nt, Artificial Sequence
  Description of Artificial Sequence: Synthetic oligonucleotide
  Antisense strand to SEQ ID NO: 1172620
ucacuucagguaauggcgg

SEQ ID NO: 1172622 - RNA, 19 nt, Artificial Sequence
  Description of Artificial Sequence: Synthetic oligonucleotide
  Sense strand starting at position 1486 of SEQ ID NO: 916641
caccgauccgauugaagaa

SEQ ID NO: 1172623 - RNA, 19 nt, Artificial Sequence
  Description of Artificial Sequence: Synthetic oligonucleotide
  Antisense strand to SEQ ID NO: 1172622
uucuucaaucggaucggug

SEQ ID NO: 1172624 - RNA, 19 nt, Artificial Sequence
  Description of Artificial Sequence: Synthetic oligonucleotide
  Sense strand starting at position 2364 of SEQ ID NO: 916641
guaguaaaucgauagguug

SEQ ID NO: 1172625 - RNA, 19 nt, Artificial Sequence
  Description of Artificial Sequence: Synthetic oligonucleotide
  Antisense strand to SEQ ID NO: 1172624
caaccuaucgauuuacuac

SEQ ID NO: 1172626 - RNA, 19 nt, Artificial Sequence
  Description of Artificial Sequence: Synthetic oligonucleotide
  Sense strand starting at position 2380 of SEQ ID NO: 916641
uugggacuccguggaauga

SEQ ID NO: 1172627 - RNA, 19 nt, Artificial Sequence
  Description of Artificial Sequence: Synthetic oligonucleotide
  Antisense strand to SEQ ID NO: 1172626
ucauuccacggagucccaa

SEQ ID NO: 1172628 - RNA, 19 nt, Artificial Sequence
  Description of Artificial Sequence: Synthetic oligonucleotide
  Sense strand starting at position 2471 of SEQ ID NO: 916641
uggcuuugcguugauuuga

SEQ ID NO: 1172629 - RNA, 19 nt, Artificial Sequence
  Description of Artificial Sequence: Synthetic oligonucleotide
  Antisense strand to SEQ ID NO: 1172628
ucaaaucaacgcaaagcca

SEQ ID NO: 1172630 - RNA, 19 nt, Artificial Sequence
  Description of Artificial Sequence: Synthetic oligonucleotide
  Sense strand starting at position 2883 of SEQ ID NO: 916641
ccaauugguuuaccaggau

SEQ ID NO: 1172631 - RNA, 19 nt, Artificial Sequence
  Description of Artificial Sequence: Synthetic oligonucleotide
  Antisense strand to SEQ ID NO: 1172630
auccugguaaaccaauugg

SEQ ID NO: 1172632 - RNA, 19 nt, Artificial Sequence
  Description of Artificial Sequence: Synthetic oligonucleotide
  Sense strand starting at position 2886 of SEQ ID NO: 916641
auugguuuaccaggauucu

SEQ ID NO: 1172633 - RNA, 19 nt, Artificial Sequence
  Description of Artificial Sequence: Synthetic oligonucleotide
  Antisense strand to SEQ ID NO: 1172632
agaauccugguaaaccaau

SEQ ID NO: 1172634 - RNA, 19 nt, Artificial Sequence
  Description of Artificial Sequence: Synthetic oligonucleotide
  Sense strand starting at position 2899 of SEQ ID NO: 916641
gauucugugguauaguagu

SEQ ID NO: 1172635 - RNA, 19 nt, Artificial Sequence
  Description of Artificial Sequence: Synthetic oligonucleotide
  Antisense strand to SEQ ID NO: 1172634
acuacuauaccacagaauc

SEQ ID NO: 1172636 - RNA, 19 nt, Artificial Sequence
  Description of Artificial Sequence: Synthetic oligonucleotide
  Sense strand starting at position 2907 of SEQ ID NO: 916641
gguauaguagucuaagcag

SEQ ID NO: 1172637 - RNA, 19 nt, Artificial Sequence
  Description of Artificial Sequence: Synthetic oligonucleotide
  Antisense strand to SEQ ID NO: 1172636
cugcuuagacuacuauacc

SEQ ID NO: 1172638 - RNA, 19 nt, Artificial Sequence
  Description of Artificial Sequence: Synthetic oligonucleotide
  Sense strand starting at position 2962 of SEQ ID NO: 916641
agacaaguuacugggcaga

SEQ ID NO: 1172639 - RNA, 19 nt, Artificial Sequence
  Description of Artificial Sequence: Synthetic oligonucleotide
  Antisense strand to SEQ ID NO: 1172638
ucugcccaguaacuugucu

SEQ ID NO: 1172640 - RNA, 19 nt, Artificial Sequence
  Description of Artificial Sequence: Synthetic oligonucleotide
  Sense strand starting at position 2982 of SEQ ID NO: 916641
gagaaacguaguuauguag

SEQ ID NO: 1172641 - RNA, 19 nt, Artificial Sequence
  Description of Artificial Sequence: Synthetic oligonucleotide
  Antisense strand to SEQ ID NO: 1172640
cuacauaacuacguuucuc

SEQ ID NO: 1172642 - RNA, 19 nt, Artificial Sequence
  Description of Artificial Sequence: Synthetic oligonucleotide
  Sense strand starting at position 2988 of SEQ ID NO: 916641
cguaguuauguagccuagu

SEQ ID NO: 1172643 - RNA, 19 nt, Artificial Sequence
  Description of Artificial Sequence: Synthetic oligonucleotide
  Antisense strand to SEQ ID NO: 1172642
acuaggcuacauaacuacg

SEQ ID NO: 1172644 - RNA, 19 nt, Artificial Sequence
  Description of Artificial Sequence: Synthetic oligonucleotide
  Sense strand starting at position 3019 of SEQ ID NO: 916641
uuuguaagggcuucguguu

SEQ ID NO: 1172645 - RNA, 19 nt, Artificial Sequence
  Description of Artificial Sequence: Synthetic oligonucleotide
  Antisense strand to SEQ ID NO: 1172644
aacacgaagcccuuacaaa

SEQ ID NO: 1172646 - RNA, 19 nt, Artificial Sequence
  Description of Artificial Sequence: Synthetic oligonucleotide
  Sense strand starting at position 3093 of SEQ ID NO: 916641
uccagaccugguuauuauu

SEQ ID NO: 1172647 - RNA, 19 nt, Artificial Sequence
  Description of Artificial Sequence: Synthetic oligonucleotide
  Antisense strand to SEQ ID NO: 1172646
aauaauaaccaggucugga

SEQ ID NO: 1172648 - RNA, 19 nt, Artificial Sequence
  Description of Artificial Sequence: Synthetic oligonucleotide
  Sense strand starting at position 3096 of SEQ ID NO: 916641
agaccugguuauuauuuaa

SEQ ID NO: 1172649 - RNA, 19 nt, Artificial Sequence
  Description of Artificial Sequence: Synthetic oligonucleotide
  Antisense strand to SEQ ID NO: 1172648
uuaaauaauaaccaggucu

SEQ ID NO: 1172650 - RNA, 19 nt, Artificial Sequence
  Description of Artificial Sequence: Synthetic oligonucleotide
  Sense strand starting at position 3172 of SEQ ID NO: 916641
ccagcaguucucuaucuua

SEQ ID NO: 1172651 - RNA, 19 nt, Artificial Sequence
  Description of Artificial Sequence: Synthetic oligonucleotide
  Antisense strand to SEQ ID NO: 1172650
uaagauagagaacugcugg

SEQ ID NO: 1172652 - RNA, 19 nt, Artificial Sequence
  Description of Artificial Sequence: Synthetic oligonucleotide
  Sense strand starting at position 3221 of SEQ ID NO: 916641
ucucuuacccguuagaacu

SEQ ID NO: 1172653 - RNA, 19 nt, Artificial Sequence
  Description of Artificial Sequence: Synthetic oligonucleotide
  Antisense strand to SEQ ID NO: 1172652
aguucuaacggguaagaga

SEQ ID NO: 1172654 - RNA, 19 nt, Artificial Sequence
  Description of Artificial Sequence: Synthetic oligonucleotide
  Sense strand starting at position 3256 of SEQ ID NO: 916641
aagaaaucgcauugguuua

SEQ ID NO: 1172655 - RNA, 19 nt, Artificial Sequence
  Description of Artificial Sequence: Synthetic oligonucleotide
  Antisense strand to SEQ ID NO: 1172654
uaaaccaaugcgauuucuu

SEQ ID NO: 1172656 - RNA, 19 nt, Artificial Sequence
  Description of Artificial Sequence: Synthetic oligonucleotide
  Sense strand starting at position 3258 of SEQ ID NO: 916641
gaaaucgcauugguuuaga

SEQ ID NO: 1172657 - RNA, 19 nt, Artificial Sequence
  Description of Artificial Sequence: Synthetic oligonucleotide
  Antisense strand to SEQ ID NO: 1172656
ucuaaaccaaugcgauuuc

SEQ ID NO: 1172658 - RNA, 19 nt, Artificial Sequence
  Description of Artificial Sequence: Synthetic oligonucleotide
  Sense strand starting at position 3336 of SEQ ID NO: 916641
gauggagucucagucucua

SEQ ID NO: 1172659 - RNA, 19 nt, Artificial Sequence
  Description of Artificial Sequence: Synthetic oligonucleotide
  Antisense strand to SEQ ID NO: 1172658
uagagacugagacuccauc

SEQ ID NO: 1172660 - RNA, 19 nt, Artificial Sequence
  Description of Artificial Sequence: Synthetic oligonucleotide
  Sense strand starting at position 3501 of SEQ ID NO: 916641
uccuacuaauggguugaaa

SEQ ID NO: 1172661 - RNA, 19 nt, Artificial Sequence
  Description of Artificial Sequence: Synthetic oligonucleotide
  Antisense strand to SEQ ID NO: 1172660
uuucaacccauuaguagga

SEQ ID NO: 1172662 - RNA, 19 nt, Artificial Sequence
  Description of Artificial Sequence: Synthetic oligonucleotide
  Sense strand starting at position 3503 of SEQ ID NO: 916641
cuacuaauggguugaaacu

SEQ ID NO: 1172663 - RNA, 19 nt, Artificial Sequence
  Description of Artificial Sequence: Synthetic oligonucleotide
  Antisense strand to SEQ ID NO: 1172662
aguuucaacccauuaguag

SEQ ID NO: 1172664 - RNA, 19 nt, Artificial Sequence
  Description of Artificial Sequence: Synthetic oligonucleotide
  Sense strand starting at position 3509 of SEQ ID NO: 916641
auggguugaaacuguauua

SEQ ID NO: 1172665 - RNA, 19 nt, Artificial Sequence
  Description of Artificial Sequence: Synthetic oligonucleotide
  Antisense strand to SEQ ID NO: 1172664
uaauacaguuucaacccau

SEQ ID NO: 1172666 - RNA, 19 nt, Artificial Sequence
  Description of Artificial Sequence: Synthetic oligonucleotide
  Sense strand starting at position 3669 of SEQ ID NO: 916641
ggagccauauaucucaaga

SEQ ID NO: 1172667 - RNA, 19 nt, Artificial Sequence
  Description of Artificial Sequence: Synthetic oligonucleotide
  Antisense strand to SEQ ID NO: 1172666
ucuugagauauauggcucc

SEQ ID NO: 1172668 - RNA, 19 nt, Artificial Sequence
  Description of Artificial Sequence: Synthetic oligonucleotide
  Sense strand starting at position 3682 of SEQ ID NO: 916641
ucaagaauguugcuagaca

SEQ ID NO: 1172669 - RNA, 19 nt, Artificial Sequence
  Description of Artificial Sequence: Synthetic oligonucleotide
  Antisense strand to SEQ ID NO: 1172668
ugucuagcaacauucuuga

SEQ ID NO: 1172670 - RNA, 19 nt, Artificial Sequence
  Description of Artificial Sequence: Synthetic oligonucleotide
  Sense strand starting at position 3894 of SEQ ID NO: 916641
uacagagaguuguuaggau

SEQ ID NO: 1172671 - RNA, 19 nt, Artificial Sequence
  Description of Artificial Sequence: Synthetic oligonucleotide
  Antisense strand to SEQ ID NO: 1172670
auccuaacaacucucugua

SEQ ID NO: 1172672 - RNA, 19 nt, Artificial Sequence
  Description of Artificial Sequence: Synthetic oligonucleotide
  Sense strand starting at position 360 of SEQ ID NO: 916642
gggugaauggacuggucuu

SEQ ID NO: 1172673 - RNA, 19 nt, Artificial Sequence
  Description of Artificial Sequence: Synthetic oligonucleotide
  Antisense strand to SEQ ID NO: 1172672
aagaccaguccauucaccc

SEQ ID NO: 1172674 - RNA, 19 nt, Artificial Sequence
  Description of Artificial Sequence: Synthetic oligonucleotide
  Sense strand starting at position 361 of SEQ ID NO: 916642
ggugaauggacuggucuua

SEQ ID NO: 1172675 - RNA, 19 nt, Artificial Sequence
  Description of Artificial Sequence: Synthetic oligonucleotide
  Antisense strand to SEQ ID NO: 1172674
uaagaccaguccauucacc

SEQ ID NO: 1172676 - RNA, 19 nt, Artificial Sequence
  Description of Artificial Sequence: Synthetic oligonucleotide
  Sense strand starting at position 431 of SEQ ID NO: 916642
uggcaauaaagcugaggau

SEQ ID NO: 1172677 - RNA, 19 nt, Artificial Sequence
  Description of Artificial Sequence: Synthetic oligonucleotide
  Antisense strand to SEQ ID NO: 1172676
auccucagcuuuauugcca

SEQ ID NO: 1172678 - RNA, 19 nt, Artificial Sequence
  Description of Artificial Sequence: Synthetic oligonucleotide
  Sense strand starting at position 526 of SEQ ID NO: 916642
agcaaaugucacugcaaac

SEQ ID NO: 1172679 - RNA, 19 nt, Artificial Sequence
  Description of Artificial Sequence: Synthetic oligonucleotide
  Antisense strand to SEQ ID NO: 1172678
guuugcagugacauuugcu

SEQ ID NO: 1172680 - RNA, 19 nt, Artificial Sequence
  Description of Artificial Sequence: Synthetic oligonucleotide
  Sense strand starting at position 660 of SEQ ID NO: 916642
ccucauuaucagcauguga

SEQ ID NO: 1172681 - RNA, 19 nt, Artificial Sequence
  Description of Artificial Sequence: Synthetic oligonucleotide
  Antisense strand to SEQ ID NO: 1172680
ucacaugcugauaaugagg

SEQ ID NO: 1172682 - RNA, 19 nt, Artificial Sequence
  Description of Artificial Sequence: Synthetic oligonucleotide
  Sense strand starting at position 662 of SEQ ID NO: 916642
ucauuaucagcaugugaag

SEQ ID NO: 1172683 - RNA, 19 nt, Artificial Sequence
  Description of Artificial Sequence: Synthetic oligonucleotide
  Antisense strand to SEQ ID NO: 1172682
cuucacaugcugauaauga

SEQ ID NO: 1172684 - RNA, 19 nt, Artificial Sequence
  Description of Artificial Sequence: Synthetic oligonucleotide
  Sense strand starting at position 768 of SEQ ID NO: 916642
cuuugcuagguauagagaa

SEQ ID NO: 1172685 - RNA, 19 nt, Artificial Sequence
  Description of Artificial Sequence: Synthetic oligonucleotide
  Antisense strand to SEQ ID NO: 1172684
uucucuauaccuagcaaag

SEQ ID NO: 1172686 - RNA, 19 nt, Artificial Sequence
  Description of Artificial Sequence: Synthetic oligonucleotide
  Sense strand starting at position 1048 of SEQ ID NO: 916642
ggcagcaccagguaucaaa

SEQ ID NO: 1172687 - RNA, 19 nt, Artificial Sequence
  Description of Artificial Sequence: Synthetic oligonucleotide
  Antisense strand to SEQ ID NO: 1172686
uuugauaccuggugcugcc

SEQ ID NO: 1172688 - RNA, 19 nt, Artificial Sequence
  Description of Artificial Sequence: Synthetic oligonucleotide
  Sense strand starting at position 1149 of SEQ ID NO: 916642
guagcaugugggcauacau

SEQ ID NO: 1172689 - RNA, 19 nt, Artificial Sequence
  Description of Artificial Sequence: Synthetic oligonucleotide
  Antisense strand to SEQ ID NO: 1172688
auguaugcccacaugcuac

SEQ ID NO: 1172690 - RNA, 19 nt, Artificial Sequence
  Description of Artificial Sequence: Synthetic oligonucleotide
  Sense strand starting at position 1210 of SEQ ID NO: 916642
gggacauugagguggacuu

SEQ ID NO: 1172691 - RNA, 19 nt, Artificial Sequence
  Description of Artificial Sequence: Synthetic oligonucleotide
  Antisense strand to SEQ ID NO: 1172690
aaguccaccucaauguccc

SEQ ID NO: 1172692 - RNA, 19 nt, Artificial Sequence
  Description of Artificial Sequence: Synthetic oligonucleotide
  Sense strand starting at position 1211 of SEQ ID NO: 916642
ggacauugagguggacuua

SEQ ID NO: 1172693 - RNA, 19 nt, Artificial Sequence
  Description of Artificial Sequence: Synthetic oligonucleotide
  Antisense strand to SEQ ID NO: 1172692
uaaguccaccucaaugucc

SEQ ID NO: 1172694 - RNA, 19 nt, Artificial Sequence
  Description of Artificial Sequence: Synthetic oligonucleotide
  Sense strand starting at position 1270 of SEQ ID NO: 916642
acgaaacucuuaucaugca

SEQ ID NO: 1172695 - RNA, 19 nt, Artificial Sequence
  Description of Artificial Sequence: Synthetic oligonucleotide
  Antisense strand to SEQ ID NO: 1172694
ugcaugauaagaguuucgu

SEQ ID NO: 1172696 - RNA, 19 nt, Artificial Sequence
  Description of Artificial Sequence: Synthetic oligonucleotide
  Sense strand starting at position 1333 of SEQ ID NO: 916642
cagggaagacugugccaaa

SEQ ID NO: 1172697 - RNA, 19 nt, Artificial Sequence
  Description of Artificial Sequence: Synthetic oligonucleotide
  Antisense strand to SEQ ID NO: 1172696
uuuggcacagucuucccug

SEQ ID NO: 1172698 - RNA, 19 nt, Artificial Sequence
  Description of Artificial Sequence: Synthetic oligonucleotide
  Sense strand starting at position 1345 of SEQ ID NO: 916642
ugccaaagacacgguaaua

SEQ ID NO: 1172699 - RNA, 19 nt, Artificial Sequence
  Description of Artificial Sequence: Synthetic oligonucleotide
  Antisense strand to SEQ ID NO: 1172698
uauuaccgugucuuuggca

SEQ ID NO: 1172700 - RNA, 19 nt, Artificial Sequence
  Description of Artificial Sequence: Synthetic oligonucleotide
  Sense strand starting at position 1394 of SEQ ID NO: 916642
guccucguucuauauagaa

SEQ ID NO: 1172701 - RNA, 19 nt, Artificial Sequence
  Description of Artificial Sequence: Synthetic oligonucleotide
  Antisense strand to SEQ ID NO: 1172700
uucuauauagaacgaggac

SEQ ID NO: 1172702 - RNA, 19 nt, Artificial Sequence
  Description of Artificial Sequence: Synthetic oligonucleotide
  Sense strand starting at position 2743 of SEQ ID NO: 916642
agagaagguugauuguuua

SEQ ID NO: 1172703 - RNA, 19 nt, Artificial Sequence
  Description of Artificial Sequence: Synthetic oligonucleotide
  Antisense strand to SEQ ID NO: 1172702
uaaacaaucaaccuucucu

SEQ ID NO: 1172704 - RNA, 19 nt, Artificial Sequence
  Description of Artificial Sequence: Synthetic oligonucleotide
  Sense strand starting at position 2746 of SEQ ID NO: 916642
gaagguugauuguuuaauc

SEQ ID NO: 1172705 - RNA, 19 nt, Artificial Sequence
  Description of Artificial Sequence: Synthetic oligonucleotide
  Antisense strand to SEQ ID NO: 1172704
gauuaaacaaucaaccuuc

SEQ ID NO: 1172706 - RNA, 19 nt, Artificial Sequence
  Description of Artificial Sequence: Synthetic oligonucleotide
  Sense strand starting at position 2808 of SEQ ID NO: 916642
cagcuaacccauuaggagu

SEQ ID NO: 1172707 - RNA, 19 nt, Artificial Sequence
  Description of Artificial Sequence: Synthetic oligonucleotide
  Antisense strand to SEQ ID NO: 1172706
acuccuaauggguuagcug

SEQ ID NO: 1172708 - RNA, 19 nt, Artificial Sequence
  Description of Artificial Sequence: Synthetic oligonucleotide
  Sense strand starting at position 2872 of SEQ ID NO: 916642
agcauuuaaguuugucauu

SEQ ID NO: 1172709 - RNA, 19 nt, Artificial Sequence
  Description of Artificial Sequence: Synthetic oligonucleotide
  Antisense strand to SEQ ID NO: 1172708
aaugacaaacuuaaaugcu

SEQ ID NO: 1172710 - RNA, 19 nt, Artificial Sequence
  Description of Artificial Sequence: Synthetic oligonucleotide
  Sense strand starting at position 2919 of SEQ ID NO: 916642
auauguauaugaguucgaa

SEQ ID NO: 1172711 - RNA, 19 nt, Artificial Sequence
  Description of Artificial Sequence: Synthetic oligonucleotide
  Antisense strand to SEQ ID NO: 1172710
uucgaacucauauacauau

SEQ ID NO: 1172712 - RNA, 19 nt, Artificial Sequence
  Description of Artificial Sequence: Synthetic oligonucleotide
  Sense strand starting at position 2922 of SEQ ID NO: 916642
uguauaugaguucgaauga

SEQ ID NO: 1172713 - RNA, 19 nt, Artificial Sequence
  Description of Artificial Sequence: Synthetic oligonucleotide
  Antisense strand to SEQ ID NO: 1172712
ucauucgaacucauauaca

SEQ ID NO: 1172714 - RNA, 19 nt, Artificial Sequence
  Description of Artificial Sequence: Synthetic oligonucleotide
  Sense strand starting at position 2961 of SEQ ID NO: 916642
aguauaacgagauguagaa

SEQ ID NO: 1172715 - RNA, 19 nt, Artificial Sequence
  Description of Artificial Sequence: Synthetic oligonucleotide
  Antisense strand to SEQ ID NO: 1172714
uucuacaucucguuauacu

SEQ ID NO: 1172716 - RNA, 19 nt, Artificial Sequence
  Description of Artificial Sequence: Synthetic oligonucleotide
  Sense strand starting at position 3019 of SEQ ID NO: 916642
ggagccguugucguuguau

SEQ ID NO: 1172717 - RNA, 19 nt, Artificial Sequence
  Description of Artificial Sequence: Synthetic oligonucleotide
  Antisense strand to SEQ ID NO: 1172716
auacaacgacaacggcucc

SEQ ID NO: 1172718 - RNA, 19 nt, Artificial Sequence
  Description of Artificial Sequence: Synthetic oligonucleotide
  Sense strand starting at position 3138 of SEQ ID NO: 916642
auugcaucagugcacgaaa

SEQ ID NO: 1172719 - RNA, 19 nt, Artificial Sequence
  Description of Artificial Sequence: Synthetic oligonucleotide
  Antisense strand to SEQ ID NO: 1172718
uuucgugcacugaugcaau

SEQ ID NO: 1172720 - RNA, 19 nt, Artificial Sequence
  Description of Artificial Sequence: Synthetic oligonucleotide
  Sense strand starting at position 3141 of SEQ ID NO: 916642
gcaucagugcacgaaacaa

SEQ ID NO: 1172721 - RNA, 19 nt, Artificial Sequence
  Description of Artificial Sequence: Synthetic oligonucleotide
  Antisense strand to SEQ ID NO: 1172720
uuguuucgugcacugaugc

SEQ ID NO: 1172722 - RNA, 19 nt, Artificial Sequence
  Description of Artificial Sequence: Synthetic oligonucleotide
  Sense strand starting at position 3401 of SEQ ID NO: 916642
uuugcuuugagagaggagu

SEQ ID NO: 1172723 - RNA, 19 nt, Artificial Sequence
  Description of Artificial Sequence: Synthetic oligonucleotide
  Antisense strand to SEQ ID NO: 1172722
acuccucucucaaagcaaa

SEQ ID NO: 1172724 - RNA, 19 nt, Artificial Sequence
  Description of Artificial Sequence: Synthetic oligonucleotide
  Sense strand starting at position 3403 of SEQ ID NO: 916642
ugcuuugagagaggaguau

SEQ ID NO: 1172725 - RNA, 19 nt, Artificial Sequence
  Description of Artificial Sequence: Synthetic oligonucleotide
  Antisense strand to SEQ ID NO: 1172724
auacuccucucucaaagca

SEQ ID NO: 1172726 - RNA, 19 nt, Artificial Sequence
  Description of Artificial Sequence: Synthetic oligonucleotide
  Sense strand starting at position 3496 of SEQ ID NO: 916642
uagucagacagguauguga

SEQ ID NO: 1172727 - RNA, 19 nt, Artificial Sequence
  Description of Artificial Sequence: Synthetic oligonucleotide
  Antisense strand to SEQ ID NO: 1172726
ucacauaccugucugacua

SEQ ID NO: 1172728 - RNA, 19 nt, Artificial Sequence
  Description of Artificial Sequence: Synthetic oligonucleotide
  Sense strand starting at position 3643 of SEQ ID NO: 916642
gguagaacuaguggugaaa

SEQ ID NO: 1172729 - RNA, 19 nt, Artificial Sequence
  Description of Artificial Sequence: Synthetic oligonucleotide
  Antisense strand to SEQ ID NO: 1172728
uuucaccacuaguucuacc

SEQ ID NO: 1172730 - RNA, 19 nt, Artificial Sequence
  Description of Artificial Sequence: Synthetic oligonucleotide
  Sense strand starting at position 3746 of SEQ ID NO: 916642
auggauaucgauugagccu

SEQ ID NO: 1172731 - RNA, 19 nt, Artificial Sequence
  Description of Artificial Sequence: Synthetic oligonucleotide
  Antisense strand to SEQ ID NO: 1172730
aggcucaaucgauauccau

SEQ ID NO: 1172732 - RNA, 19 nt, Artificial Sequence
  Description of Artificial Sequence: Synthetic oligonucleotide
  Sense strand starting at position 3747 of SEQ ID NO: 916642
uggauaucgauugagccua

SEQ ID NO: 1172733 - RNA, 19 nt, Artificial Sequence
  Description of Artificial Sequence: Synthetic oligonucleotide
  Antisense strand to SEQ ID NO: 1172732
uaggcucaaucgauaucca

SEQ ID NO: 1172734 - RNA, 19 nt, Artificial Sequence
  Description of Artificial Sequence: Synthetic oligonucleotide
  Sense strand starting at position 3862 of SEQ ID NO: 916642
cuuaguuucccugggagaa

SEQ ID NO: 1172735 - RNA, 19 nt, Artificial Sequence
  Description of Artificial Sequence: Synthetic oligonucleotide
  Antisense strand to SEQ ID NO: 1172734
uucucccagggaaacuaag

SEQ ID NO: 1172736 - RNA, 19 nt, Artificial Sequence
  Description of Artificial Sequence: Synthetic oligonucleotide
  Sense strand starting at position 3863 of SEQ ID NO: 916642
uuaguuucccugggagaau

SEQ ID NO: 1172737 - RNA, 19 nt, Artificial Sequence
  Description of Artificial Sequence: Synthetic oligonucleotide
  Antisense strand to SEQ ID NO: 1172736
auucucccagggaaacuaa

SEQ ID NO: 1172738 - RNA, 19 nt, Artificial Sequence
  Description of Artificial Sequence: Synthetic oligonucleotide
  Sense strand starting at position 3872 of SEQ ID NO: 916642
cugggagaauuaucacugu

SEQ ID NO: 1172739 - RNA, 19 nt, Artificial Sequence
  Description of Artificial Sequence: Synthetic oligonucleotide
  Antisense strand to SEQ ID NO: 1172738
acagugauaauucucccag

SEQ ID NO: 1172740 - RNA, 19 nt, Artificial Sequence
  Description of Artificial Sequence: Synthetic oligonucleotide
  Sense strand starting at position 3875 of SEQ ID NO: 916642
ggagaauuaucacuguuaa

SEQ ID NO: 1172741 - RNA, 19 nt, Artificial Sequence
  Description of Artificial Sequence: Synthetic oligonucleotide
  Antisense strand to SEQ ID NO: 1172740
uuaacagugauaauucucc

SEQ ID NO: 1172742 - RNA, 19 nt, Artificial Sequence
  Description of Artificial Sequence: Synthetic oligonucleotide
  Sense strand starting at position 3876 of SEQ ID NO: 916642
gagaauuaucacuguuaag

SEQ ID NO: 1172743 - RNA, 19 nt, Artificial Sequence
  Description of Artificial Sequence: Synthetic oligonucleotide
  Antisense strand to SEQ ID NO: 1172742
cuuaacagugauaauucuc

SEQ ID NO: 1172744 - RNA, 19 nt, Artificial Sequence
  Description of Artificial Sequence: Synthetic oligonucleotide
  Sense strand starting at position 3886 of SEQ ID NO: 916642
acuguuaagugucuaaaga

SEQ ID NO: 1172745 - RNA, 19 nt, Artificial Sequence
  Description of Artificial Sequence: Synthetic oligonucleotide
  Antisense strand to SEQ ID NO: 1172744
ucuuuagacacuuaacagu

SEQ ID NO: 1172746 - RNA, 19 nt, Artificial Sequence
  Description of Artificial Sequence: Synthetic oligonucleotide
  Sense strand starting at position 3887 of SEQ ID NO: 916642
cuguuaagugucuaaagaa

SEQ ID NO: 1172747 - RNA, 19 nt, Artificial Sequence
  Description of Artificial Sequence: Synthetic oligonucleotide
  Antisense strand to SEQ ID NO: 1172746
uucuuuagacacuuaacag

SEQ ID NO: 1172748 - RNA, 19 nt, Artificial Sequence
  Description of Artificial Sequence: Synthetic oligonucleotide
  Sense strand starting at position 3936 of SEQ ID NO: 916642
gcagauaucagaggguaug

SEQ ID NO: 1172749 - RNA, 19 nt, Artificial Sequence
  Description of Artificial Sequence: Synthetic oligonucleotide
  Antisense strand to SEQ ID NO: 1172748
cauacccucugauaucugc

SEQ ID NO: 1172750 - RNA, 19 nt, Artificial Sequence
  Description of Artificial Sequence: Synthetic oligonucleotide
  Sense strand starting at position 3974 of SEQ ID NO: 916642
uauggaacuuguguaccaa

SEQ ID NO: 1172751 - RNA, 19 nt, Artificial Sequence
  Description of Artificial Sequence: Synthetic oligonucleotide
  Antisense strand to SEQ ID NO: 1172750
uugguacacaaguuccaua

SEQ ID NO: 1172752 - RNA, 19 nt, Artificial Sequence
  Description of Artificial Sequence: Synthetic oligonucleotide
  Sense strand starting at position 125 of SEQ ID NO: 916643
aagucuucuugacucgaaa

SEQ ID NO: 1172753 - RNA, 19 nt, Artificial Sequence
  Description of Artificial Sequence: Synthetic oligonucleotide
  Antisense strand to SEQ ID NO: 1172752
uuucgagucaagaagacuu

SEQ ID NO: 1172754 - RNA, 19 nt, Artificial Sequence
  Description of Artificial Sequence: Synthetic oligonucleotide
  Sense strand starting at position 144 of SEQ ID NO: 916643
ucguuuccugcaucgugau

SEQ ID NO: 1172755 - RNA, 19 nt, Artificial Sequence
  Description of Artificial Sequence: Synthetic oligonucleotide
  Antisense strand to SEQ ID NO: 1172754
aucacgaugcaggaaacga

SEQ ID NO: 1172756 - RNA, 19 nt, Artificial Sequence
  Description of Artificial Sequence: Synthetic oligonucleotide
  Sense strand starting at position 326 of SEQ ID NO: 916643
aaugacaccgagugaagua

SEQ ID NO: 1172757 - RNA, 19 nt, Artificial Sequence
  Description of Artificial Sequence: Synthetic oligonucleotide
  Antisense strand to SEQ ID NO: 1172756
uacuucacucggugucauu

SEQ ID NO: 1172758 - RNA, 19 nt, Artificial Sequence
  Description of Artificial Sequence: Synthetic oligonucleotide
  Sense strand starting at position 335 of SEQ ID NO: 916643
gagugaaguagguggcuaa

SEQ ID NO: 1172759 - RNA, 19 nt, Artificial Sequence
  Description of Artificial Sequence: Synthetic oligonucleotide
  Antisense strand to SEQ ID NO: 1172758
uuagccaccuacuucacuc

SEQ ID NO: 1172760 - RNA, 19 nt, Artificial Sequence
  Description of Artificial Sequence: Synthetic oligonucleotide
  Sense strand starting at position 338 of SEQ ID NO: 916643
ugaaguagguggcuaagaa

SEQ ID NO: 1172761 - RNA, 19 nt, Artificial Sequence
  Description of Artificial Sequence: Synthetic oligonucleotide
  Antisense strand to SEQ ID NO: 1172760
uucuuagccaccuacuuca

SEQ ID NO: 1172762 - RNA, 19 nt, Artificial Sequence
  Description of Artificial Sequence: Synthetic oligonucleotide
  Sense strand starting at position 408 of SEQ ID NO: 916643
gaaagacaccgugguguuu

SEQ ID NO: 1172763 - RNA, 19 nt, Artificial Sequence
  Description of Artificial Sequence: Synthetic oligonucleotide
  Antisense strand to SEQ ID NO: 1172762
aaacaccacggugucuuuc

SEQ ID NO: 1172764 - RNA, 19 nt, Artificial Sequence
  Description of Artificial Sequence: Synthetic oligonucleotide
  Sense strand starting at position 611 of SEQ ID NO: 916643
agaaacuugguaugaguuu

SEQ ID NO: 1172765 - RNA, 19 nt, Artificial Sequence
  Description of Artificial Sequence: Synthetic oligonucleotide
  Antisense strand to SEQ ID NO: 1172764
aaacucauaccaaguuucu

SEQ ID NO: 1172766 - RNA, 19 nt, Artificial Sequence
  Description of Artificial Sequence: Synthetic oligonucleotide
  Sense strand starting at position 878 of SEQ ID NO: 916643
ugaggaugagaguguggau

SEQ ID NO: 1172767 - RNA, 19 nt, Artificial Sequence
  Description of Artificial Sequence: Synthetic oligonucleotide
  Antisense strand to SEQ ID NO: 1172766
auccacacucucauccuca

SEQ ID NO: 1172768 - RNA, 19 nt, Artificial Sequence
  Description of Artificial Sequence: Synthetic oligonucleotide
  Sense strand starting at position 1095 of SEQ ID NO: 916643
ccaggauggccugacgauu

SEQ ID NO: 1172769 - RNA, 19 nt, Artificial Sequence
  Description of Artificial Sequence: Synthetic oligonucleotide
  Antisense strand to SEQ ID NO: 1172768
aaucgucaggccauccugg

SEQ ID NO: 1172770 - RNA, 19 nt, Artificial Sequence
  Description of Artificial Sequence: Synthetic oligonucleotide
  Sense strand starting at position 1103 of SEQ ID NO: 916643
gccugacgauucuuguacu

SEQ ID NO: 1172771 - RNA, 19 nt, Artificial Sequence
  Description of Artificial Sequence: Synthetic oligonucleotide
  Antisense strand to SEQ ID NO: 1172770
aguacaagaaucgucaggc

SEQ ID NO: 1172772 - RNA, 19 nt, Artificial Sequence
  Description of Artificial Sequence: Synthetic oligonucleotide
  Sense strand starting at position 1197 of SEQ ID NO: 916643
ccaucaccacagugaagua

SEQ ID NO: 1172773 - RNA, 19 nt, Artificial Sequence
  Description of Artificial Sequence: Synthetic oligonucleotide
  Antisense strand to SEQ ID NO: 1172772
uacuucacuguggugaugg

SEQ ID NO: 1172774 - RNA, 19 nt, Artificial Sequence
  Description of Artificial Sequence: Synthetic oligonucleotide
  Sense strand starting at position 1249 of SEQ ID NO: 916643
ggucuucauguuggagaag

SEQ ID NO: 1172775 - RNA, 19 nt, Artificial Sequence
  Description of Artificial Sequence: Synthetic oligonucleotide
  Antisense strand to SEQ ID NO: 1172774
cuucuccaacaugaagacc

SEQ ID NO: 1172776 - RNA, 19 nt, Artificial Sequence
  Description of Artificial Sequence: Synthetic oligonucleotide
  Sense strand starting at position 1431 of SEQ ID NO: 916643
gcccuuccucggugaggau

SEQ ID NO: 1172777 - RNA, 19 nt, Artificial Sequence
  Description of Artificial Sequence: Synthetic oligonucleotide
  Antisense strand to SEQ ID NO: 1172776
auccucaccgaggaagggc

SEQ ID NO: 1172778 - RNA, 19 nt, Artificial Sequence
  Description of Artificial Sequence: Synthetic oligonucleotide
  Sense strand starting at position 1539 of SEQ ID NO: 916643
gcauccucccagcauaaga

SEQ ID NO: 1172779 - RNA, 19 nt, Artificial Sequence
  Description of Artificial Sequence: Synthetic oligonucleotide
  Antisense strand to SEQ ID NO: 1172778
ucuuaugcugggaggaugc

SEQ ID NO: 1172780 - RNA, 19 nt, Artificial Sequence
  Description of Artificial Sequence: Synthetic oligonucleotide
  Sense strand starting at position 2202 of SEQ ID NO: 916643
gcgggacucucugcuaaca

SEQ ID NO: 1172781 - RNA, 19 nt, Artificial Sequence
  Description of Artificial Sequence: Synthetic oligonucleotide
  Antisense strand to SEQ ID NO: 1172780
uguuagcagagagucccgc

SEQ ID NO: 1172782 - RNA, 19 nt, Artificial Sequence
  Description of Artificial Sequence: Synthetic oligonucleotide
  Sense strand starting at position 2485 of SEQ ID NO: 916643
cuaaguagcucuucuugga

SEQ ID NO: 1172783 - RNA, 19 nt, Artificial Sequence
  Description of Artificial Sequence: Synthetic oligonucleotide
  Antisense strand to SEQ ID NO: 1172782
uccaagaagagcuacuuag

SEQ ID NO: 1172784 - RNA, 19 nt, Artificial Sequence
  Description of Artificial Sequence: Synthetic oligonucleotide
  Sense strand starting at position 2489 of SEQ ID NO: 916643
guagcucuucuuggaaaga

SEQ ID NO: 1172785 - RNA, 19 nt, Artificial Sequence
  Description of Artificial Sequence: Synthetic oligonucleotide
  Antisense strand to SEQ ID NO: 1172784
ucuuuccaagaagagcuac

SEQ ID NO: 1172786 - RNA, 19 nt, Artificial Sequence
  Description of Artificial Sequence: Synthetic oligonucleotide
  Sense strand starting at position 2650 of SEQ ID NO: 916643
cgguuugcaacgucucuua

SEQ ID NO: 1172787 - RNA, 19 nt, Artificial Sequence
  Description of Artificial Sequence: Synthetic oligonucleotide
  Antisense strand to SEQ ID NO: 1172786
uaagagacguugcaaaccg

SEQ ID NO: 1172788 - RNA, 19 nt, Artificial Sequence
  Description of Artificial Sequence: Synthetic oligonucleotide
  Sense strand starting at position 2698 of SEQ ID NO: 916643
gguaauauccggugcugag

SEQ ID NO: 1172789 - RNA, 19 nt, Artificial Sequence
  Description of Artificial Sequence: Synthetic oligonucleotide
  Antisense strand to SEQ ID NO: 1172788
cucagcaccggauauuacc

SEQ ID NO: 1172790 - RNA, 19 nt, Artificial Sequence
  Description of Artificial Sequence: Synthetic oligonucleotide
  Sense strand starting at position 2929 of SEQ ID NO: 916643
ggaaguucauccguuuagu

SEQ ID NO: 1172791 - RNA, 19 nt, Artificial Sequence
  Description of Artificial Sequence: Synthetic oligonucleotide
  Antisense strand to SEQ ID NO: 1172790
acuaaacggaugaacuucc

SEQ ID NO: 1172792 - RNA, 19 nt, Artificial Sequence
  Description of Artificial Sequence: Synthetic oligonucleotide
  Sense strand starting at position 3159 of SEQ ID NO: 916643
gaauccuuugugugucaug

SEQ ID NO: 1172793 - RNA, 19 nt, Artificial Sequence
  Description of Artificial Sequence: Synthetic oligonucleotide
  Antisense strand to SEQ ID NO: 1172792
caugacacacaaaggauuc

SEQ ID NO: 1172794 - RNA, 19 nt, Artificial Sequence
  Description of Artificial Sequence: Synthetic oligonucleotide
  Sense strand starting at position 3176 of SEQ ID NO: 916643
ugguaagaaauucgaacuu

SEQ ID NO: 1172795 - RNA, 19 nt, Artificial Sequence
  Description of Artificial Sequence: Synthetic oligonucleotide
  Antisense strand to SEQ ID NO: 1172794
aaguucgaauuucuuacca

SEQ ID NO: 1172796 - RNA, 19 nt, Artificial Sequence
  Description of Artificial Sequence: Synthetic oligonucleotide
  Sense strand starting at position 3237 of SEQ ID NO: 916643
gggcguccugaauauucau

SEQ ID NO: 1172797 - RNA, 19 nt, Artificial Sequence
  Description of Artificial Sequence: Synthetic oligonucleotide
  Antisense strand to SEQ ID NO: 1172796
augaauauucaggacgccc

SEQ ID NO: 1172798 - RNA, 19 nt, Artificial Sequence
  Description of Artificial Sequence: Synthetic oligonucleotide
  Sense strand starting at position 3268 of SEQ ID NO: 916643
gucugaucaaacgggacaa

SEQ ID NO: 1172799 - RNA, 19 nt, Artificial Sequence
  Description of Artificial Sequence: Synthetic oligonucleotide
  Antisense strand to SEQ ID NO: 1172798
uugucccguuugaucagac

SEQ ID NO: 1172800 - RNA, 19 nt, Artificial Sequence
  Description of Artificial Sequence: Synthetic oligonucleotide
  Sense strand starting at position 3301 of SEQ ID NO: 916643
cugagucccaccggauuau

SEQ ID NO: 1172801 - RNA, 19 nt, Artificial Sequence
  Description of Artificial Sequence: Synthetic oligonucleotide
  Antisense strand to SEQ ID NO: 1172800
auaauccggugggacucag

SEQ ID NO: 1172802 - RNA, 19 nt, Artificial Sequence
  Description of Artificial Sequence: Synthetic oligonucleotide
  Sense strand starting at position 3418 of SEQ ID NO: 916643
cucgaagauuuacaauuau

SEQ ID NO: 1172803 - RNA, 19 nt, Artificial Sequence
  Description of Artificial Sequence: Synthetic oligonucleotide
  Antisense strand to SEQ ID NO: 1172802
auaauuguaaaucuucgag

SEQ ID NO: 1172804 - RNA, 19 nt, Artificial Sequence
  Description of Artificial Sequence: Synthetic oligonucleotide
  Sense strand starting at position 3478 of SEQ ID NO: 916643
gccuuuguaggacaaguga

SEQ ID NO: 1172805 - RNA, 19 nt, Artificial Sequence
  Description of Artificial Sequence: Synthetic oligonucleotide
  Antisense strand to SEQ ID NO: 1172804
ucacuuguccuacaaaggc

SEQ ID NO: 1172806 - RNA, 19 nt, Artificial Sequence
  Description of Artificial Sequence: Synthetic oligonucleotide
  Sense strand starting at position 3493 of SEQ ID NO: 916643
gugagcauuccagagaauu

SEQ ID NO: 1172807 - RNA, 19 nt, Artificial Sequence
  Description of Artificial Sequence: Synthetic oligonucleotide
  Antisense strand to SEQ ID NO: 1172806
aauucucuggaaugcucac

SEQ ID NO: 1172808 - RNA, 19 nt, Artificial Sequence
  Description of Artificial Sequence: Synthetic oligonucleotide
  Sense strand starting at position 3571 of SEQ ID NO: 916643
ggauacuuccuuuaagucu

SEQ ID NO: 1172809 - RNA, 19 nt, Artificial Sequence
  Description of Artificial Sequence: Synthetic oligonucleotide
  Antisense strand to SEQ ID NO: 1172808
agacuuaaaggaaguaucc

SEQ ID NO: 1172810 - RNA, 19 nt, Artificial Sequence
  Description of Artificial Sequence: Synthetic oligonucleotide
  Sense strand starting at position 3578 of SEQ ID NO: 916643
uccuuuaagucuguuauuc

SEQ ID NO: 1172811 - RNA, 19 nt, Artificial Sequence
  Description of Artificial Sequence: Synthetic oligonucleotide
  Antisense strand to SEQ ID NO: 1172810
gaauaacagacuuaaagga

SEQ ID NO: 1172812 - RNA, 19 nt, Artificial Sequence
  Description of Artificial Sequence: Synthetic oligonucleotide
  Sense strand starting at position 3644 of SEQ ID NO: 916643
aaacaaacuugauagggua

SEQ ID NO: 1172813 - RNA, 19 nt, Artificial Sequence
  Description of Artificial Sequence: Synthetic oligonucleotide
  Antisense strand to SEQ ID NO: 1172812
uacccuaucaaguuuguuu

SEQ ID NO: 1172814 - RNA, 19 nt, Artificial Sequence
  Description of Artificial Sequence: Synthetic oligonucleotide
  Sense strand starting at position 3717 of SEQ ID NO: 916643
acucaaauguguuuggugu

SEQ ID NO: 1172815 - RNA, 19 nt, Artificial Sequence
  Description of Artificial Sequence: Synthetic oligonucleotide
  Antisense strand to SEQ ID NO: 1172814
acaccaaacacauuugagu

SEQ ID NO: 1172816 - RNA, 19 nt, Artificial Sequence
  Description of Artificial Sequence: Synthetic oligonucleotide
  Sense strand starting at position 3731 of SEQ ID NO: 916643
gguguuaucuaaccuucug

SEQ ID NO: 1172817 - RNA, 19 nt, Artificial Sequence
  Description of Artificial Sequence: Synthetic oligonucleotide
  Antisense strand to SEQ ID NO: 1172816
cagaagguuagauaacacc

SEQ ID NO: 1172818 - RNA, 19 nt, Artificial Sequence
  Description of Artificial Sequence: Synthetic oligonucleotide
  Sense strand starting at position 3751 of SEQ ID NO: 916643
aguuuaucagucugaaaca

SEQ ID NO: 1172819 - RNA, 19 nt, Artificial Sequence
  Description of Artificial Sequence: Synthetic oligonucleotide
  Antisense strand to SEQ ID NO: 1172818
uguuucagacugauaaacu

SEQ ID NO: 1172820 - RNA, 19 nt, Artificial Sequence
  Description of Artificial Sequence: Synthetic oligonucleotide
  Sense strand starting at position 3912 of SEQ ID NO: 916643
agucuacaaugucugacua

SEQ ID NO: 1172821 - RNA, 19 nt, Artificial Sequence
  Description of Artificial Sequence: Synthetic oligonucleotide
  Antisense strand to SEQ ID NO: 1172820
uagucagacauuguagacu

SEQ ID NO: 1172822 - RNA, 19 nt, Artificial Sequence
  Description of Artificial Sequence: Synthetic oligonucleotide
  Sense strand starting at position 3947 of SEQ ID NO: 916643
auaucaguaguguaaggau

SEQ ID NO: 1172823 - RNA, 19 nt, Artificial Sequence
  Description of Artificial Sequence: Synthetic oligonucleotide
  Antisense strand to SEQ ID NO: 1172822
auccuuacacuacugauau

SEQ ID NO: 1172824 - RNA, 19 nt, Artificial Sequence
  Description of Artificial Sequence: Synthetic oligonucleotide
  Sense strand starting at position 3965 of SEQ ID NO: 916643
ucccguagauuggugauaa

SEQ ID NO: 1172825 - RNA, 19 nt, Artificial Sequence
  Description of Artificial Sequence: Synthetic oligonucleotide
  Antisense strand to SEQ ID NO: 1172824
uuaucaccaaucuacggga

SEQ ID NO: 1172826 - RNA, 19 nt, Artificial Sequence
  Description of Artificial Sequence: Synthetic oligonucleotide
  Sense strand starting at position 3975 of SEQ ID NO: 916643
uggugauaacuuugcucuu

SEQ ID NO: 1172827 - RNA, 19 nt, Artificial Sequence
  Description of Artificial Sequence: Synthetic oligonucleotide
  Antisense strand to SEQ ID NO: 1172826
aagagcaaaguuaucacca

SEQ ID NO: 1172828 - RNA, 19 nt, Artificial Sequence
  Description of Artificial Sequence: Synthetic oligonucleotide
  Sense strand starting at position 3977 of SEQ ID NO: 916643
gugauaacuuugcucuugu

SEQ ID NO: 1172829 - RNA, 19 nt, Artificial Sequence
  Description of Artificial Sequence: Synthetic oligonucleotide
  Antisense strand to SEQ ID NO: 1172828
acaagagcaaaguuaucac

SEQ ID NO: 1172830 - RNA, 19 nt, Artificial Sequence
  Description of Artificial Sequence: Synthetic oligonucleotide
  Sense strand starting at position 3978 of SEQ ID NO: 916643
ugauaacuuugcucuuguu

SEQ ID NO: 1172831 - RNA, 19 nt, Artificial Sequence
  Description of Artificial Sequence: Synthetic oligonucleotide
  Antisense strand to SEQ ID NO: 1172830
aacaagagcaaaguuauca

SEQ ID NO: 1172832 - RNA, 19 nt, Artificial Sequence
  Description of Artificial Sequence: Synthetic oligonucleotide
  Sense strand starting at position 2 of SEQ ID NO: 916644
gagaaaggguguguucuca

SEQ ID NO: 1172833 - RNA, 19 nt, Artificial Sequence
  Description of Artificial Sequence: Synthetic oligonucleotide
  Antisense strand to SEQ ID NO: 1172832
ugagaacacacccuuucuc

SEQ ID NO: 1172834 - RNA, 19 nt, Artificial Sequence
  Description of Artificial Sequence: Synthetic oligonucleotide
  Sense strand starting at position 8 of SEQ ID NO: 916644
ggguguguucucagagcug

SEQ ID NO: 1172835 - RNA, 19 nt, Artificial Sequence
  Description of Artificial Sequence: Synthetic oligonucleotide
  Antisense strand to SEQ ID NO: 1172834
cagcucugagaacacaccc

SEQ ID NO: 1172836 - RNA, 19 nt, Artificial Sequence
  Description of Artificial Sequence: Synthetic oligonucleotide
  Sense strand starting at position 89 of SEQ ID NO: 916644
uguggauucugggucuaaa

SEQ ID NO: 1172837 - RNA, 19 nt, Artificial Sequence
  Description of Artificial Sequence: Synthetic oligonucleotide
  Antisense strand to SEQ ID NO: 1172836
uuuagacccagaauccaca

SEQ ID NO: 1172838 - RNA, 19 nt, Artificial Sequence
  Description of Artificial Sequence: Synthetic oligonucleotide
  Sense strand starting at position 99 of SEQ ID NO: 916644
gggucuaaaucugcccaau

SEQ ID NO: 1172839 - RNA, 19 nt, Artificial Sequence
  Description of Artificial Sequence: Synthetic oligonucleotide
  Antisense strand to SEQ ID NO: 1172838
auugggcagauuuagaccc

SEQ ID NO: 1172840 - RNA, 19 nt, Artificial Sequence
  Description of Artificial Sequence: Synthetic oligonucleotide
  Sense strand starting at position 428 of SEQ ID NO: 916644
auugaaucuucccagagaa

SEQ ID NO: 1172841 - RNA, 19 nt, Artificial Sequence
  Description of Artificial Sequence: Synthetic oligonucleotide
  Antisense strand to SEQ ID NO: 1172840
uucucugggaagauucaau

SEQ ID NO: 1172842 - RNA, 19 nt, Artificial Sequence
  Description of Artificial Sequence: Synthetic oligonucleotide
  Sense strand starting at position 540 of SEQ ID NO: 916644
gcugguuaagagugagaga

SEQ ID NO: 1172843 - RNA, 19 nt, Artificial Sequence
  Description of Artificial Sequence: Synthetic oligonucleotide
  Antisense strand to SEQ ID NO: 1172842
ucucucacucuuaaccagc

SEQ ID NO: 1172844 - RNA, 19 nt, Artificial Sequence
  Description of Artificial Sequence: Synthetic oligonucleotide
  Sense strand starting at position 946 of SEQ ID NO: 916644
gauggaggaguucggaauu

SEQ ID NO: 1172845 - RNA, 19 nt, Artificial Sequence
  Description of Artificial Sequence: Synthetic oligonucleotide
  Antisense strand to SEQ ID NO: 1172844
aauuccgaacuccuccauc

SEQ ID NO: 1172846 - RNA, 19 nt, Artificial Sequence
  Description of Artificial Sequence: Synthetic oligonucleotide
  Sense strand starting at position 1290 of SEQ ID NO: 916644
accuguugugcgcaggaga

SEQ ID NO: 1172847 - RNA, 19 nt, Artificial Sequence
  Description of Artificial Sequence: Synthetic oligonucleotide
  Antisense strand to SEQ ID NO: 1172846
ucuccugcgcacaacaggu

SEQ ID NO: 1172848 - RNA, 19 nt, Artificial Sequence
  Description of Artificial Sequence: Synthetic oligonucleotide
  Sense strand starting at position 2208 of SEQ ID NO: 916644
cucagucaguuucugagau

SEQ ID NO: 1172849 - RNA, 19 nt, Artificial Sequence
  Description of Artificial Sequence: Synthetic oligonucleotide
  Antisense strand to SEQ ID NO: 1172848
aucucagaaacugacugag

SEQ ID NO: 1172850 - RNA, 19 nt, Artificial Sequence
  Description of Artificial Sequence: Synthetic oligonucleotide
  Sense strand starting at position 2220 of SEQ ID NO: 916644
cugagauucugagucacuc

SEQ ID NO: 1172851 - RNA, 19 nt, Artificial Sequence
  Description of Artificial Sequence: Synthetic oligonucleotide
  Antisense strand to SEQ ID NO: 1172850
gagugacucagaaucucag

SEQ ID NO: 1172852 - RNA, 19 nt, Artificial Sequence
  Description of Artificial Sequence: Synthetic oligonucleotide
  Sense strand starting at position 2224 of SEQ ID NO: 916644
gauucugagucacucaaug

SEQ ID NO: 1172853 - RNA, 19 nt, Artificial Sequence
  Description of Artificial Sequence: Synthetic oligonucleotide
  Antisense strand to SEQ ID NO: 1172852
cauugagugacucagaauc

SEQ ID NO: 1172854 - RNA, 19 nt, Artificial Sequence
  Description of Artificial Sequence: Synthetic oligonucleotide
  Sense strand starting at position 2487 of SEQ ID NO: 916644
uugcaccaucuuuggauua

SEQ ID NO: 1172855 - RNA, 19 nt, Artificial Sequence
  Description of Artificial Sequence: Synthetic oligonucleotide
  Antisense strand to SEQ ID NO: 1172854
uaauccaaagauggugcaa

SEQ ID NO: 1172856 - RNA, 19 nt, Artificial Sequence
  Description of Artificial Sequence: Synthetic oligonucleotide
  Sense strand starting at position 2556 of SEQ ID NO: 916644
aguggaucacgucgaaauu

SEQ ID NO: 1172857 - RNA, 19 nt, Artificial Sequence
  Description of Artificial Sequence: Synthetic oligonucleotide
  Antisense strand to SEQ ID NO: 1172856
aauuucgacgugauccacu

SEQ ID NO: 1172858 - RNA, 19 nt, Artificial Sequence
  Description of Artificial Sequence: Synthetic oligonucleotide
  Sense strand starting at position 2557 of SEQ ID NO: 916644
guggaucacgucgaaauuc

SEQ ID NO: 1172859 - RNA, 19 nt, Artificial Sequence
  Description of Artificial Sequence: Synthetic oligonucleotide
  Antisense strand to SEQ ID NO: 1172858
gaauuucgacgugauccac

SEQ ID NO: 1172860 - RNA, 19 nt, Artificial Sequence
  Description of Artificial Sequence: Synthetic oligonucleotide
  Sense strand starting at position 2566 of SEQ ID NO: 916644
gucgaaauuccugggcuuu

SEQ ID NO: 1172861 - RNA, 19 nt, Artificial Sequence
  Description of Artificial Sequence: Synthetic oligonucleotide
  Antisense strand to SEQ ID NO: 1172860
aaagcccaggaauuucgac

SEQ ID NO: 1172862 - RNA, 19 nt, Artificial Sequence
  Description of Artificial Sequence: Synthetic oligonucleotide
  Sense strand starting at position 2609 of SEQ ID NO: 916644
cgugcugugacuuacaaga

SEQ ID NO: 1172863 - RNA, 19 nt, Artificial Sequence
  Description of Artificial Sequence: Synthetic oligonucleotide
  Antisense strand to SEQ ID NO: 1172862
ucuuguaagucacagcacg

SEQ ID NO: 1172864 - RNA, 19 nt, Artificial Sequence
  Description of Artificial Sequence: Synthetic oligonucleotide
  Sense strand starting at position 2658 of SEQ ID NO: 916644
cugauugccuuuccuaaag

SEQ ID NO: 1172865 - RNA, 19 nt, Artificial Sequence
  Description of Artificial Sequence: Synthetic oligonucleotide
  Antisense strand to SEQ ID NO: 1172864
cuuuaggaaaggcaaucag

SEQ ID NO: 1172866 - RNA, 19 nt, Artificial Sequence
  Description of Artificial Sequence: Synthetic oligonucleotide
  Sense strand starting at position 2758 of SEQ ID NO: 916644
gcuguucccucaguaauac

SEQ ID NO: 1172867 - RNA, 19 nt, Artificial Sequence
  Description of Artificial Sequence: Synthetic oligonucleotide
  Antisense strand to SEQ ID NO: 1172866
guauuacugagggaacagc

SEQ ID NO: 1172868 - RNA, 19 nt, Artificial Sequence
  Description of Artificial Sequence: Synthetic oligonucleotide
  Sense strand starting at position 2759 of SEQ ID NO: 916644
cuguucccucaguaauaca

SEQ ID NO: 1172869 - RNA, 19 nt, Artificial Sequence
  Description of Artificial Sequence: Synthetic oligonucleotide
  Antisense strand to SEQ ID NO: 1172868
uguauuacugagggaacag

SEQ ID NO: 1172870 - RNA, 19 nt, Artificial Sequence
  Description of Artificial Sequence: Synthetic oligonucleotide
  Sense strand starting at position 2812 of SEQ ID NO: 916644
auuccagucucacuuagau

SEQ ID NO: 1172871 - RNA, 19 nt, Artificial Sequence
  Description of Artificial Sequence: Synthetic oligonucleotide
  Antisense strand to SEQ ID NO: 1172870
aucuaagugagacuggaau

SEQ ID NO: 1172872 - RNA, 19 nt, Artificial Sequence
  Description of Artificial Sequence: Synthetic oligonucleotide
  Sense strand starting at position 2987 of SEQ ID NO: 916644
cucacugacuguucuuagu

SEQ ID NO: 1172873 - RNA, 19 nt, Artificial Sequence
  Description of Artificial Sequence: Synthetic oligonucleotide
  Antisense strand to SEQ ID NO: 1172872
acuaagaacagucagugag

SEQ ID NO: 1172874 - RNA, 19 nt, Artificial Sequence
  Description of Artificial Sequence: Synthetic oligonucleotide
  Sense strand starting at position 3000 of SEQ ID NO: 916644
cuuagucuuccucggguga

SEQ ID NO: 1172875 - RNA, 19 nt, Artificial Sequence
  Description of Artificial Sequence: Synthetic oligonucleotide
  Antisense strand to SEQ ID NO: 1172874
ucacccgaggaagacuaag

SEQ ID NO: 1172876 - RNA, 19 nt, Artificial Sequence
  Description of Artificial Sequence: Synthetic oligonucleotide
  Sense strand starting at position 3011 of SEQ ID NO: 916644
ucgggugaccucuaaaugu

SEQ ID NO: 1172877 - RNA, 19 nt, Artificial Sequence
  Description of Artificial Sequence: Synthetic oligonucleotide
  Antisense strand to SEQ ID NO: 1172876
acauuuagaggucacccga

SEQ ID NO: 1172878 - RNA, 19 nt, Artificial Sequence
  Description of Artificial Sequence: Synthetic oligonucleotide
  Sense strand starting at position 3042 of SEQ ID NO: 916644
gggcuuaguccuuggccau

SEQ ID NO: 1172879 - RNA, 19 nt, Artificial Sequence
  Description of Artificial Sequence: Synthetic oligonucleotide
  Antisense strand to SEQ ID NO: 1172878
auggccaaggacuaagccc

SEQ ID NO: 1172880 - RNA, 19 nt, Artificial Sequence
  Description of Artificial Sequence: Synthetic oligonucleotide
  Sense strand starting at position 3072 of SEQ ID NO: 916644
acauucucuguccagugau

SEQ ID NO: 1172881 - RNA, 19 nt, Artificial Sequence
  Description of Artificial Sequence: Synthetic oligonucleotide
  Antisense strand to SEQ ID NO: 1172880
aucacuggacagagaaugu

SEQ ID NO: 1172882 - RNA, 19 nt, Artificial Sequence
  Description of Artificial Sequence: Synthetic oligonucleotide
  Sense strand starting at position 3118 of SEQ ID NO: 916644
auguaaaugucagugaguc

SEQ ID NO: 1172883 - RNA, 19 nt, Artificial Sequence
  Description of Artificial Sequence: Synthetic oligonucleotide
  Antisense strand to SEQ ID NO: 1172882
gacucacugacauuuacau

SEQ ID NO: 1172884 - RNA, 19 nt, Artificial Sequence
  Description of Artificial Sequence: Synthetic oligonucleotide
  Sense strand starting at position 3120 of SEQ ID NO: 916644
guaaaugucagugaguccu

SEQ ID NO: 1172885 - RNA, 19 nt, Artificial Sequence
  Description of Artificial Sequence: Synthetic oligonucleotide
  Antisense strand to SEQ ID NO: 1172884
aggacucacugacauuuac

SEQ ID NO: 1172886 - RNA, 19 nt, Artificial Sequence
  Description of Artificial Sequence: Synthetic oligonucleotide
  Sense strand starting at position 3122 of SEQ ID NO: 916644
aaaugucagugaguccuaa

SEQ ID NO: 1172887 - RNA, 19 nt, Artificial Sequence
  Description of Artificial Sequence: Synthetic oligonucleotide
  Antisense strand to SEQ ID NO: 1172886
uuaggacucacugacauuu

SEQ ID NO: 1172888 - RNA, 19 nt, Artificial Sequence
  Description of Artificial Sequence: Synthetic oligonucleotide
  Sense strand starting at position 3126 of SEQ ID NO: 916644
gucagugaguccuaaauuu

SEQ ID NO: 1172889 - RNA, 19 nt, Artificial Sequence
  Description of Artificial Sequence: Synthetic oligonucleotide
  Antisense strand to SEQ ID NO: 1172888
aaauuuaggacucacugac

SEQ ID NO: 1172890 - RNA, 19 nt, Artificial Sequence
  Description of Artificial Sequence: Synthetic oligonucleotide
  Sense strand starting at position 3202 of SEQ ID NO: 916644
gucuaauagccaugcaaag

SEQ ID NO: 1172891 - RNA, 19 nt, Artificial Sequence
  Description of Artificial Sequence: Synthetic oligonucleotide
  Antisense strand to SEQ ID NO: 1172890
cuuugcauggcuauuagac

SEQ ID NO: 1172892 - RNA, 19 nt, Artificial Sequence
  Description of Artificial Sequence: Synthetic oligonucleotide
  Sense strand starting at position 3444 of SEQ ID NO: 916644
ucuuuauugcuauagucuu

SEQ ID NO: 1172893 - RNA, 19 nt, Artificial Sequence
  Description of Artificial Sequence: Synthetic oligonucleotide
  Antisense strand to SEQ ID NO: 1172892
aagacuauagcaauaaaga

SEQ ID NO: 1172894 - RNA, 19 nt, Artificial Sequence
  Description of Artificial Sequence: Synthetic oligonucleotide
  Sense strand starting at position 3451 of SEQ ID NO: 916644
ugcuauagucuuggucuaa

SEQ ID NO: 1172895 - RNA, 19 nt, Artificial Sequence
  Description of Artificial Sequence: Synthetic oligonucleotide
  Antisense strand to SEQ ID NO: 1172894
uuagaccaagacuauagca

SEQ ID NO: 1172896 - RNA, 19 nt, Artificial Sequence
  Description of Artificial Sequence: Synthetic oligonucleotide
  Sense strand starting at position 3452 of SEQ ID NO: 916644
gcuauagucuuggucuaag

SEQ ID NO: 1172897 - RNA, 19 nt, Artificial Sequence
  Description of Artificial Sequence: Synthetic oligonucleotide
  Antisense strand to SEQ ID NO: 1172896
cuuagaccaagacuauagc

SEQ ID NO: 1172898 - RNA, 19 nt, Artificial Sequence
  Description of Artificial Sequence: Synthetic oligonucleotide
  Sense strand starting at position 3463 of SEQ ID NO: 916644
ggucuaagccaucaugucu

SEQ ID NO: 1172899 - RNA, 19 nt, Artificial Sequence
  Description of Artificial Sequence: Synthetic oligonucleotide
  Antisense strand to SEQ ID NO: 1172898
agacaugauggcuuagacc

SEQ ID NO: 1172900 - RNA, 19 nt, Artificial Sequence
  Description of Artificial Sequence: Synthetic oligonucleotide
  Sense strand starting at position 3476 of SEQ ID NO: 916644
augucucauccagauuauc

SEQ ID NO: 1172901 - RNA, 19 nt, Artificial Sequence
  Description of Artificial Sequence: Synthetic oligonucleotide
  Antisense strand to SEQ ID NO: 1172900
gauaaucuggaugagacau

SEQ ID NO: 1172902 - RNA, 19 nt, Artificial Sequence
  Description of Artificial Sequence: Synthetic oligonucleotide
  Sense strand starting at position 3712 of SEQ ID NO: 916644
acuacuugcuguucuguaa

SEQ ID NO: 1172903 - RNA, 19 nt, Artificial Sequence
  Description of Artificial Sequence: Synthetic oligonucleotide
  Antisense strand to SEQ ID NO: 1172902
uuacagaacagcaaguagu

SEQ ID NO: 1172904 - RNA, 19 nt, Artificial Sequence
  Description of Artificial Sequence: Synthetic oligonucleotide
  Sense strand starting at position 3715 of SEQ ID NO: 916644
acuugcuguucuguaacau

SEQ ID NO: 1172905 - RNA, 19 nt, Artificial Sequence
  Description of Artificial Sequence: Synthetic oligonucleotide
  Antisense strand to SEQ ID NO: 1172904
auguuacagaacagcaagu

SEQ ID NO: 1172906 - RNA, 19 nt, Artificial Sequence
  Description of Artificial Sequence: Synthetic oligonucleotide
  Sense strand starting at position 3716 of SEQ ID NO: 916644
cuugcuguucuguaacauc

SEQ ID NO: 1172907 - RNA, 19 nt, Artificial Sequence
  Description of Artificial Sequence: Synthetic oligonucleotide
  Antisense strand to SEQ ID NO: 1172906
gauguuacagaacagcaag

SEQ ID NO: 1172908 - RNA, 19 nt, Artificial Sequence
  Description of Artificial Sequence: Synthetic oligonucleotide
  Sense strand starting at position 3735 of SEQ ID NO: 916644
agaagucauucucuuagca

SEQ ID NO: 1172909 - RNA, 19 nt, Artificial Sequence
  Description of Artificial Sequence: Synthetic oligonucleotide
  Antisense strand to SEQ ID NO: 1172908
ugcuaagagaaugacuucu

SEQ ID NO: 1172910 - RNA, 19 nt, Artificial Sequence
  Description of Artificial Sequence: Synthetic oligonucleotide
  Sense strand starting at position 3953 of SEQ ID NO: 916644
ccacuagugcccugcuaau

SEQ ID NO: 1172911 - RNA, 19 nt, Artificial Sequence
  Description of Artificial Sequence: Synthetic oligonucleotide
  Antisense strand to SEQ ID NO: 1172910
auuagcagggcacuagugg

SEQ ID NO: 1172912 - RNA, 19 nt, Artificial Sequence
  Description of Artificial Sequence: Synthetic oligonucleotide
  Sense strand starting at position 3 of SEQ ID NO: 916645
ccuugugauuccuugagca

SEQ ID NO: 1172913 - RNA, 19 nt, Artificial Sequence
  Description of Artificial Sequence: Synthetic oligonucleotide
  Antisense strand to SEQ ID NO: 1172912
ugcucaaggaaucacaagg

SEQ ID NO: 1172914 - RNA, 19 nt, Artificial Sequence
  Description of Artificial Sequence: Synthetic oligonucleotide
  Sense strand starting at position 7 of SEQ ID NO: 916645
gugauuccuugagcaccua

SEQ ID NO: 1172915 - RNA, 19 nt, Artificial Sequence
  Description of Artificial Sequence: Synthetic oligonucleotide
  Antisense strand to SEQ ID NO: 1172914
uaggugcucaaggaaucac

SEQ ID NO: 1172916 - RNA, 19 nt, Artificial Sequence
  Description of Artificial Sequence: Synthetic oligonucleotide
  Sense strand starting at position 148 of SEQ ID NO: 916645
gugccaggcauuugucuua

SEQ ID NO: 1172917 - RNA, 19 nt, Artificial Sequence
  Description of Artificial Sequence: Synthetic oligonucleotide
  Antisense strand to SEQ ID NO: 1172916
uaagacaaaugccuggcac

SEQ ID NO: 1172918 - RNA, 19 nt, Artificial Sequence
  Description of Artificial Sequence: Synthetic oligonucleotide
  Sense strand starting at position 153 of SEQ ID NO: 916645
aggcauuugucuuaugauu

SEQ ID NO: 1172919 - RNA, 19 nt, Artificial Sequence
  Description of Artificial Sequence: Synthetic oligonucleotide
  Antisense strand to SEQ ID NO: 1172918
aaucauaagacaaaugccu

SEQ ID NO: 1172920 - RNA, 19 nt, Artificial Sequence
  Description of Artificial Sequence: Synthetic oligonucleotide
  Sense strand starting at position 361 of SEQ ID NO: 916645
uguggcucuccuggguaaa

SEQ ID NO: 1172921 - RNA, 19 nt, Artificial Sequence
  Description of Artificial Sequence: Synthetic oligonucleotide
  Antisense strand to SEQ ID NO: 1172920
uuuacccaggagagccaca

SEQ ID NO: 1172922 - RNA, 19 nt, Artificial Sequence
  Description of Artificial Sequence: Synthetic oligonucleotide
  Sense strand starting at position 362 of SEQ ID NO: 916645
guggcucuccuggguaaag

SEQ ID NO: 1172923 - RNA, 19 nt, Artificial Sequence
  Description of Artificial Sequence: Synthetic oligonucleotide
  Antisense strand to SEQ ID NO: 1172922
cuuuacccaggagagccac

SEQ ID NO: 1172924 - RNA, 19 nt, Artificial Sequence
  Description of Artificial Sequence: Synthetic oligonucleotide
  Sense strand starting at position 363 of SEQ ID NO: 916645
uggcucuccuggguaaaga

SEQ ID NO: 1172925 - RNA, 19 nt, Artificial Sequence
  Description of Artificial Sequence: Synthetic oligonucleotide
  Antisense strand to SEQ ID NO: 1172924
ucuuuacccaggagagcca

SEQ ID NO: 1172926 - RNA, 19 nt, Artificial Sequence
  Description of Artificial Sequence: Synthetic oligonucleotide
  Sense strand starting at position 364 of SEQ ID NO: 916645
ggcucuccuggguaaagaa

SEQ ID NO: 1172927 - RNA, 19 nt, Artificial Sequence
  Description of Artificial Sequence: Synthetic oligonucleotide
  Antisense strand to SEQ ID NO: 1172926
uucuuuacccaggagagcc

SEQ ID NO: 1172928 - RNA, 19 nt, Artificial Sequence
  Description of Artificial Sequence: Synthetic oligonucleotide
  Sense strand starting at position 415 of SEQ ID NO: 916645
gagaaaggguguguucuca

SEQ ID NO: 1172929 - RNA, 19 nt, Artificial Sequence
  Description of Artificial Sequence: Synthetic oligonucleotide
  Antisense strand to SEQ ID NO: 1172928
ugagaacacacccuuucuc

SEQ ID NO: 1172930 - RNA, 19 nt, Artificial Sequence
  Description of Artificial Sequence: Synthetic oligonucleotide
  Sense strand starting at position 421 of SEQ ID NO: 916645
ggguguguucucagagcug

SEQ ID NO: 1172931 - RNA, 19 nt, Artificial Sequence
  Description of Artificial Sequence: Synthetic oligonucleotide
  Antisense strand to SEQ ID NO: 1172930
cagcucugagaacacaccc

SEQ ID NO: 1172932 - RNA, 19 nt, Artificial Sequence
  Description of Artificial Sequence: Synthetic oligonucleotide
  Sense strand starting at position 502 of SEQ ID NO: 916645
uguggauucugggucuaaa

SEQ ID NO: 1172933 - RNA, 19 nt, Artificial Sequence
  Description of Artificial Sequence: Synthetic oligonucleotide
  Antisense strand to SEQ ID NO: 1172932
uuuagacccagaauccaca

SEQ ID NO: 1172934 - RNA, 19 nt, Artificial Sequence
  Description of Artificial Sequence: Synthetic oligonucleotide
  Sense strand starting at position 512 of SEQ ID NO: 916645
gggucuaaaucugcccaau

SEQ ID NO: 1172935 - RNA, 19 nt, Artificial Sequence
  Description of Artificial Sequence: Synthetic oligonucleotide
  Antisense strand to SEQ ID NO: 1172934
auugggcagauuuagaccc

SEQ ID NO: 1172936 - RNA, 19 nt, Artificial Sequence
  Description of Artificial Sequence: Synthetic oligonucleotide
  Sense strand starting at position 841 of SEQ ID NO: 916645
auugaaucuucccagagaa

SEQ ID NO: 1172937 - RNA, 19 nt, Artificial Sequence
  Description of Artificial Sequence: Synthetic oligonucleotide
  Antisense strand to SEQ ID NO: 1172936
uucucugggaagauucaau

SEQ ID NO: 1172938 - RNA, 19 nt, Artificial Sequence
  Description of Artificial Sequence: Synthetic oligonucleotide
  Sense strand starting at position 953 of SEQ ID NO: 916645
gcugguuaagagugagaga

SEQ ID NO: 1172939 - RNA, 19 nt, Artificial Sequence
  Description of Artificial Sequence: Synthetic oligonucleotide
  Antisense strand to SEQ ID NO: 1172938
ucucucacucuuaaccagc

SEQ ID NO: 1172940 - RNA, 19 nt, Artificial Sequence
  Description of Artificial Sequence: Synthetic oligonucleotide
  Sense strand starting at position 1359 of SEQ ID NO: 916645
gauggaggaguucggaauu

SEQ ID NO: 1172941 - RNA, 19 nt, Artificial Sequence
  Description of Artificial Sequence: Synthetic oligonucleotide
  Antisense strand to SEQ ID NO: 1172940
aauuccgaacuccuccauc

SEQ ID NO: 1172942 - RNA, 19 nt, Artificial Sequence
  Description of Artificial Sequence: Synthetic oligonucleotide
  Sense strand starting at position 1703 of SEQ ID NO: 916645
accuguugugcgcaggaga

SEQ ID NO: 1172943 - RNA, 19 nt, Artificial Sequence
  Description of Artificial Sequence: Synthetic oligonucleotide
  Antisense strand to SEQ ID NO: 1172942
ucuccugcgcacaacaggu

SEQ ID NO: 1172944 - RNA, 19 nt, Artificial Sequence
  Description of Artificial Sequence: Synthetic oligonucleotide
  Sense strand starting at position 2621 of SEQ ID NO: 916645
cucagucaguuucugagau

SEQ ID NO: 1172945 - RNA, 19 nt, Artificial Sequence
  Description of Artificial Sequence: Synthetic oligonucleotide
  Antisense strand to SEQ ID NO: 1172944
aucucagaaacugacugag

SEQ ID NO: 1172946 - RNA, 19 nt, Artificial Sequence
  Description of Artificial Sequence: Synthetic oligonucleotide
  Sense strand starting at position 2633 of SEQ ID NO: 916645
cugagauucugagucacuc

SEQ ID NO: 1172947 - RNA, 19 nt, Artificial Sequence
  Description of Artificial Sequence: Synthetic oligonucleotide
  Antisense strand to SEQ ID NO: 1172946
gagugacucagaaucucag

SEQ ID NO: 1172948 - RNA, 19 nt, Artificial Sequence
  Description of Artificial Sequence: Synthetic oligonucleotide
  Sense strand starting at position 2637 of SEQ ID NO: 916645
gauucugagucacucaaug

SEQ ID NO: 1172949 - RNA, 19 nt, Artificial Sequence
  Description of Artificial Sequence: Synthetic oligonucleotide
  Antisense strand to SEQ ID NO: 1172948
cauugagugacucagaauc

SEQ ID NO: 1172950 - RNA, 19 nt, Artificial Sequence
  Description of Artificial Sequence: Synthetic oligonucleotide
  Sense strand starting at position 2900 of SEQ ID NO: 916645
uugcaccaucuuuggauua

SEQ ID NO: 1172951 - RNA, 19 nt, Artificial Sequence
  Description of Artificial Sequence: Synthetic oligonucleotide
  Antisense strand to SEQ ID NO: 1172950
uaauccaaagauggugcaa

SEQ ID NO: 1172952 - RNA, 19 nt, Artificial Sequence
  Description of Artificial Sequence: Synthetic oligonucleotide
  Sense strand starting at position 2969 of SEQ ID NO: 916645
aguggaucacgucgaaauu

SEQ ID NO: 1172953 - RNA, 19 nt, Artificial Sequence
  Description of Artificial Sequence: Synthetic oligonucleotide
  Antisense strand to SEQ ID NO: 1172952
aauuucgacgugauccacu

SEQ ID NO: 1172954 - RNA, 19 nt, Artificial Sequence
  Description of Artificial Sequence: Synthetic oligonucleotide
  Sense strand starting at position 2970 of SEQ ID NO: 916645
guggaucacgucgaaauuc

SEQ ID NO: 1172955 - RNA, 19 nt, Artificial Sequence
  Description of Artificial Sequence: Synthetic oligonucleotide
  Antisense strand to SEQ ID NO: 1172954
gaauuucgacgugauccac

SEQ ID NO: 1172956 - RNA, 19 nt, Artificial Sequence
  Description of Artificial Sequence: Synthetic oligonucleotide
  Sense strand starting at position 2979 of SEQ ID NO: 916645
gucgaaauuccugggcuuu

SEQ ID NO: 1172957 - RNA, 19 nt, Artificial Sequence
  Description of Artificial Sequence: Synthetic oligonucleotide
  Antisense strand to SEQ ID NO: 1172956
aaagcccaggaauuucgac

SEQ ID NO: 1172958 - RNA, 19 nt, Artificial Sequence
  Description of Artificial Sequence: Synthetic oligonucleotide
  Sense strand starting at position 3022 of SEQ ID NO: 916645
cgugcugugacuuacaaga

SEQ ID NO: 1172959 - RNA, 19 nt, Artificial Sequence
  Description of Artificial Sequence: Synthetic oligonucleotide
  Antisense strand to SEQ ID NO: 1172958
ucuuguaagucacagcacg

SEQ ID NO: 1172960 - RNA, 19 nt, Artificial Sequence
  Description of Artificial Sequence: Synthetic oligonucleotide
  Sense strand starting at position 3071 of SEQ ID NO: 916645
cugauugccuuuccuaaag

SEQ ID NO: 1172961 - RNA, 19 nt, Artificial Sequence
  Description of Artificial Sequence: Synthetic oligonucleotide
  Antisense strand to SEQ ID NO: 1172960
cuuuaggaaaggcaaucag

SEQ ID NO: 1172962 - RNA, 19 nt, Artificial Sequence
  Description of Artificial Sequence: Synthetic oligonucleotide
  Sense strand starting at position 3172 of SEQ ID NO: 916645
cuguucccucaguaauaca

SEQ ID NO: 1172963 - RNA, 19 nt, Artificial Sequence
  Description of Artificial Sequence: Synthetic oligonucleotide
  Antisense strand to SEQ ID NO: 1172962
uguauuacugagggaacag

SEQ ID NO: 1172964 - RNA, 19 nt, Artificial Sequence
  Description of Artificial Sequence: Synthetic oligonucleotide
  Sense strand starting at position 3225 of SEQ ID NO: 916645
auuccagucucacuuagau

SEQ ID NO: 1172965 - RNA, 19 nt, Artificial Sequence
  Description of Artificial Sequence: Synthetic oligonucleotide
  Antisense strand to SEQ ID NO: 1172964
aucuaagugagacuggaau

SEQ ID NO: 1172966 - RNA, 19 nt, Artificial Sequence
  Description of Artificial Sequence: Synthetic oligonucleotide
  Sense strand starting at position 3400 of SEQ ID NO: 916645
cucacugacuguucuuagu

SEQ ID NO: 1172967 - RNA, 19 nt, Artificial Sequence
  Description of Artificial Sequence: Synthetic oligonucleotide
  Antisense strand to SEQ ID NO: 1172966
acuaagaacagucagugag

SEQ ID NO: 1172968 - RNA, 19 nt, Artificial Sequence
  Description of Artificial Sequence: Synthetic oligonucleotide
  Sense strand starting at position 3424 of SEQ ID NO: 916645
ucgggugaccucuaaaugu

SEQ ID NO: 1172969 - RNA, 19 nt, Artificial Sequence
  Description of Artificial Sequence: Synthetic oligonucleotide
  Antisense strand to SEQ ID NO: 1172968
acauuuagaggucacccga

SEQ ID NO: 1172970 - RNA, 19 nt, Artificial Sequence
  Description of Artificial Sequence: Synthetic oligonucleotide
  Sense strand starting at position 3485 of SEQ ID NO: 916645
acauucucuguccagugau

SEQ ID NO: 1172971 - RNA, 19 nt, Artificial Sequence
  Description of Artificial Sequence: Synthetic oligonucleotide
  Antisense strand to SEQ ID NO: 1172970
aucacuggacagagaaugu

SEQ ID NO: 1172972 - RNA, 19 nt, Artificial Sequence
  Description of Artificial Sequence: Synthetic oligonucleotide
  Sense strand starting at position 3531 of SEQ ID NO: 916645
auguaaaugucagugaguc

SEQ ID NO: 1172973 - RNA, 19 nt, Artificial Sequence
  Description of Artificial Sequence: Synthetic oligonucleotide
  Antisense strand to SEQ ID NO: 1172972
gacucacugacauuuacau

SEQ ID NO: 1172974 - RNA, 19 nt, Artificial Sequence
  Description of Artificial Sequence: Synthetic oligonucleotide
  Sense strand starting at position 3533 of SEQ ID NO: 916645
guaaaugucagugaguccu

SEQ ID NO: 1172975 - RNA, 19 nt, Artificial Sequence
  Description of Artificial Sequence: Synthetic oligonucleotide
  Antisense strand to SEQ ID NO: 1172974
aggacucacugacauuuac

SEQ ID NO: 1172976 - RNA, 19 nt, Artificial Sequence
  Description of Artificial Sequence: Synthetic oligonucleotide
  Sense strand starting at position 3535 of SEQ ID NO: 916645
aaaugucagugaguccuaa

SEQ ID NO: 1172977 - RNA, 19 nt, Artificial Sequence
  Description of Artificial Sequence: Synthetic oligonucleotide
  Antisense strand to SEQ ID NO: 1172976
uuaggacucacugacauuu

SEQ ID NO: 1172978 - RNA, 19 nt, Artificial Sequence
  Description of Artificial Sequence: Synthetic oligonucleotide
  Sense strand starting at position 3539 of SEQ ID NO: 916645
gucagugaguccuaaauuu

SEQ ID NO: 1172979 - RNA, 19 nt, Artificial Sequence
  Description of Artificial Sequence: Synthetic oligonucleotide
  Antisense strand to SEQ ID NO: 1172978
aaauuuaggacucacugac

SEQ ID NO: 1172980 - RNA, 19 nt, Artificial Sequence
  Description of Artificial Sequence: Synthetic oligonucleotide
  Sense strand starting at position 3615 of SEQ ID NO: 916645
gucuaauagccaugcaaag

SEQ ID NO: 1172981 - RNA, 19 nt, Artificial Sequence
  Description of Artificial Sequence: Synthetic oligonucleotide
  Antisense strand to SEQ ID NO: 1172980
cuuugcauggcuauuagac

SEQ ID NO: 1172982 - RNA, 19 nt, Artificial Sequence
  Description of Artificial Sequence: Synthetic oligonucleotide
  Sense strand starting at position 3857 of SEQ ID NO: 916645
ucuuuauugcuauagucuu

SEQ ID NO: 1172983 - RNA, 19 nt, Artificial Sequence
  Description of Artificial Sequence: Synthetic oligonucleotide
  Antisense strand to SEQ ID NO: 1172982
aagacuauagcaauaaaga

SEQ ID NO: 1172984 - RNA, 19 nt, Artificial Sequence
  Description of Artificial Sequence: Synthetic oligonucleotide
  Sense strand starting at position 3864 of SEQ ID NO: 916645
ugcuauagucuuggucuaa

SEQ ID NO: 1172985 - RNA, 19 nt, Artificial Sequence
  Description of Artificial Sequence: Synthetic oligonucleotide
  Antisense strand to SEQ ID NO: 1172984
uuagaccaagacuauagca

SEQ ID NO: 1172986 - RNA, 19 nt, Artificial Sequence
  Description of Artificial Sequence: Synthetic oligonucleotide
  Sense strand starting at position 3865 of SEQ ID NO: 916645
gcuauagucuuggucuaag

SEQ ID NO: 1172987 - RNA, 19 nt, Artificial Sequence
  Description of Artificial Sequence: Synthetic oligonucleotide
  Antisense strand to SEQ ID NO: 1172986
cuuagaccaagacuauagc

SEQ ID NO: 1172988 - RNA, 19 nt, Artificial Sequence
  Description of Artificial Sequence: Synthetic oligonucleotide
  Sense strand starting at position 3876 of SEQ ID NO: 916645
ggucuaagccaucaugucu

SEQ ID NO: 1172989 - RNA, 19 nt, Artificial Sequence
  Description of Artificial Sequence: Synthetic oligonucleotide
  Antisense strand to SEQ ID NO: 1172988
agacaugauggcuuagacc

SEQ ID NO: 1172990 - RNA, 19 nt, Artificial Sequence
  Description of Artificial Sequence: Synthetic oligonucleotide
  Sense strand starting at position 3889 of SEQ ID NO: 916645
augucucauccagauuauc

SEQ ID NO: 1172991 - RNA, 19 nt, Artificial Sequence
  Description of Artificial Sequence: Synthetic oligonucleotide
  Antisense strand to SEQ ID NO: 1172990
gauaaucuggaugagacau

SEQ ID NO: 1172992 - RNA, 19 nt, Artificial Sequence
  Description of Artificial Sequence: Synthetic oligonucleotide
  Sense strand starting at position 62 of SEQ ID NO: 916646
uuuguagagugaucaguca

SEQ ID NO: 1172993 - RNA, 19 nt, Artificial Sequence
  Description of Artificial Sequence: Synthetic oligonucleotide
  Antisense strand to SEQ ID NO: 1172992
ugacugaucacucuacaaa

SEQ ID NO: 1172994 - RNA, 19 nt, Artificial Sequence
  Description of Artificial Sequence: Synthetic oligonucleotide
  Sense strand starting at position 125 of SEQ ID NO: 916646
uacuguauccaguauugga

SEQ ID NO: 1172995 - RNA, 19 nt, Artificial Sequence
  Description of Artificial Sequence: Synthetic oligonucleotide
  Antisense strand to SEQ ID NO: 1172994
uccaauacuggauacagua

SEQ ID NO: 1172996 - RNA, 19 nt, Artificial Sequence
  Description of Artificial Sequence: Synthetic oligonucleotide
  Sense strand starting at position 709 of SEQ ID NO: 916646
cuuccuaagcucugagaga

SEQ ID NO: 1172997 - RNA, 19 nt, Artificial Sequence
  Description of Artificial Sequence: Synthetic oligonucleotide
  Antisense strand to SEQ ID NO: 1172996
ucucucagagcuuaggaag

SEQ ID NO: 1172998 - RNA, 19 nt, Artificial Sequence
  Description of Artificial Sequence: Synthetic oligonucleotide
  Sense strand starting at position 756 of SEQ ID NO: 916646
gggcuuccucacgaccaaa

SEQ ID NO: 1172999 - RNA, 19 nt, Artificial Sequence
  Description of Artificial Sequence: Synthetic oligonucleotide
  Antisense strand to SEQ ID NO: 1172998
uuuggucgugaggaagccc

SEQ ID NO: 1173000 - RNA, 19 nt, Artificial Sequence
  Description of Artificial Sequence: Synthetic oligonucleotide
  Sense strand starting at position 862 of SEQ ID NO: 916646
agugaagacucaccuacua

SEQ ID NO: 1173001 - RNA, 19 nt, Artificial Sequence
  Description of Artificial Sequence: Synthetic oligonucleotide
  Antisense strand to SEQ ID NO: 1173000
uaguaggugagucuucacu

SEQ ID NO: 1173002 - RNA, 19 nt, Artificial Sequence
  Description of Artificial Sequence: Synthetic oligonucleotide
  Sense strand starting at position 896 of SEQ ID NO: 916646
ggagguagaaguugucuuu

SEQ ID NO: 1173003 - RNA, 19 nt, Artificial Sequence
  Description of Artificial Sequence: Synthetic oligonucleotide
  Antisense strand to SEQ ID NO: 1173002
aaagacaacuucuaccucc

SEQ ID NO: 1173004 - RNA, 19 nt, Artificial Sequence
  Description of Artificial Sequence: Synthetic oligonucleotide
  Sense strand starting at position 1017 of SEQ ID NO: 916646
gauagacaugcguggagaa

SEQ ID NO: 1173005 - RNA, 19 nt, Artificial Sequence
  Description of Artificial Sequence: Synthetic oligonucleotide
  Antisense strand to SEQ ID NO: 1173004
uucuccacgcaugucuauc

SEQ ID NO: 1173006 - RNA, 19 nt, Artificial Sequence
  Description of Artificial Sequence: Synthetic oligonucleotide
  Sense strand starting at position 1018 of SEQ ID NO: 916646
auagacaugcguggagaau

SEQ ID NO: 1173007 - RNA, 19 nt, Artificial Sequence
  Description of Artificial Sequence: Synthetic oligonucleotide
  Antisense strand to SEQ ID NO: 1173006
auucuccacgcaugucuau

SEQ ID NO: 1173008 - RNA, 19 nt, Artificial Sequence
  Description of Artificial Sequence: Synthetic oligonucleotide
  Sense strand starting at position 1019 of SEQ ID NO: 916646
uagacaugcguggagaaua

SEQ ID NO: 1173009 - RNA, 19 nt, Artificial Sequence
  Description of Artificial Sequence: Synthetic oligonucleotide
  Antisense strand to SEQ ID NO: 1173008
uauucuccacgcaugucua

SEQ ID NO: 1173010 - RNA, 19 nt, Artificial Sequence
  Description of Artificial Sequence: Synthetic oligonucleotide
  Sense strand starting at position 1057 of SEQ ID NO: 916646
agcccuugaguuggaauaa

SEQ ID NO: 1173011 - RNA, 19 nt, Artificial Sequence
  Description of Artificial Sequence: Synthetic oligonucleotide
  Antisense strand to SEQ ID NO: 1173010
uuauuccaacucaagggcu

SEQ ID NO: 1173012 - RNA, 19 nt, Artificial Sequence
  Description of Artificial Sequence: Synthetic oligonucleotide
  Sense strand starting at position 1153 of SEQ ID NO: 916646
cugagucuguuuccuaaga

SEQ ID NO: 1173013 - RNA, 19 nt, Artificial Sequence
  Description of Artificial Sequence: Synthetic oligonucleotide
  Antisense strand to SEQ ID NO: 1173012
ucuuaggaaacagacucag

SEQ ID NO: 1173014 - RNA, 19 nt, Artificial Sequence
  Description of Artificial Sequence: Synthetic oligonucleotide
  Sense strand starting at position 1253 of SEQ ID NO: 916646
ggguauaucuuaucucuaa

SEQ ID NO: 1173015 - RNA, 19 nt, Artificial Sequence
  Description of Artificial Sequence: Synthetic oligonucleotide
  Antisense strand to SEQ ID NO: 1173014
uuagagauaagauauaccc

SEQ ID NO: 1173016 - RNA, 19 nt, Artificial Sequence
  Description of Artificial Sequence: Synthetic oligonucleotide
  Sense strand starting at position 1358 of SEQ ID NO: 916646
cucagugagcuacgaauaa

SEQ ID NO: 1173017 - RNA, 19 nt, Artificial Sequence
  Description of Artificial Sequence: Synthetic oligonucleotide
  Antisense strand to SEQ ID NO: 1173016
uuauucguagcucacugag

SEQ ID NO: 1173018 - RNA, 19 nt, Artificial Sequence
  Description of Artificial Sequence: Synthetic oligonucleotide
  Sense strand starting at position 1469 of SEQ ID NO: 916646
uggaucccauauguuaaga

SEQ ID NO: 1173019 - RNA, 19 nt, Artificial Sequence
  Description of Artificial Sequence: Synthetic oligonucleotide
  Antisense strand to SEQ ID NO: 1173018
ucuuaacauaugggaucca

SEQ ID NO: 1173020 - RNA, 19 nt, Artificial Sequence
  Description of Artificial Sequence: Synthetic oligonucleotide
  Sense strand starting at position 1625 of SEQ ID NO: 916646
agcucaaggcucugaugaa

SEQ ID NO: 1173021 - RNA, 19 nt, Artificial Sequence
  Description of Artificial Sequence: Synthetic oligonucleotide
  Antisense strand to SEQ ID NO: 1173020
uucaucagagccuugagcu

SEQ ID NO: 1173022 - RNA, 19 nt, Artificial Sequence
  Description of Artificial Sequence: Synthetic oligonucleotide
  Sense strand starting at position 1634 of SEQ ID NO: 916646
cucugaugaaaugguaugu

SEQ ID NO: 1173023 - RNA, 19 nt, Artificial Sequence
  Description of Artificial Sequence: Synthetic oligonucleotide
  Antisense strand to SEQ ID NO: 1173022
acauaccauuucaucagag

SEQ ID NO: 1173024 - RNA, 19 nt, Artificial Sequence
  Description of Artificial Sequence: Synthetic oligonucleotide
  Sense strand starting at position 1638 of SEQ ID NO: 916646
gaugaaaugguauguuauc

SEQ ID NO: 1173025 - RNA, 19 nt, Artificial Sequence
  Description of Artificial Sequence: Synthetic oligonucleotide
  Antisense strand to SEQ ID NO: 1173024
gauaacauaccauuucauc

SEQ ID NO: 1173026 - RNA, 19 nt, Artificial Sequence
  Description of Artificial Sequence: Synthetic oligonucleotide
  Sense strand starting at position 1639 of SEQ ID NO: 916646
augaaaugguauguuauca

SEQ ID NO: 1173027 - RNA, 19 nt, Artificial Sequence
  Description of Artificial Sequence: Synthetic oligonucleotide
  Antisense strand to SEQ ID NO: 1173026
ugauaacauaccauuucau

SEQ ID NO: 1173028 - RNA, 19 nt, Artificial Sequence
  Description of Artificial Sequence: Synthetic oligonucleotide
  Sense strand starting at position 1643 of SEQ ID NO: 916646
aaugguauguuaucaaaug

SEQ ID NO: 1173029 - RNA, 19 nt, Artificial Sequence
  Description of Artificial Sequence: Synthetic oligonucleotide
  Antisense strand to SEQ ID NO: 1173028
cauuugauaacauaccauu

SEQ ID NO: 1173030 - RNA, 19 nt, Artificial Sequence
  Description of Artificial Sequence: Synthetic oligonucleotide
  Sense strand starting at position 1817 of SEQ ID NO: 916646
ggcacaaacucacucugau

SEQ ID NO: 1173031 - RNA, 19 nt, Artificial Sequence
  Description of Artificial Sequence: Synthetic oligonucleotide
  Antisense strand to SEQ ID NO: 1173030
aucagagugaguuugugcc

SEQ ID NO: 1173032 - RNA, 19 nt, Artificial Sequence
  Description of Artificial Sequence: Synthetic oligonucleotide
  Sense strand starting at position 1917 of SEQ ID NO: 916646
augcuauguaguuaaguau

SEQ ID NO: 1173033 - RNA, 19 nt, Artificial Sequence
  Description of Artificial Sequence: Synthetic oligonucleotide
  Antisense strand to SEQ ID NO: 1173032
auacuuaacuacauagcau

SEQ ID NO: 1173034 - RNA, 19 nt, Artificial Sequence
  Description of Artificial Sequence: Synthetic oligonucleotide
  Sense strand starting at position 2015 of SEQ ID NO: 916646
gucaaauacgcucacacaa

SEQ ID NO: 1173035 - RNA, 19 nt, Artificial Sequence
  Description of Artificial Sequence: Synthetic oligonucleotide
  Antisense strand to SEQ ID NO: 1173034
uugugugagcguauuugac

SEQ ID NO: 1173036 - RNA, 19 nt, Artificial Sequence
  Description of Artificial Sequence: Synthetic oligonucleotide
  Sense strand starting at position 2165 of SEQ ID NO: 916646
aaagguuugcauugacaua

SEQ ID NO: 1173037 - RNA, 19 nt, Artificial Sequence
  Description of Artificial Sequence: Synthetic oligonucleotide
  Antisense strand to SEQ ID NO: 1173036
uaugucaaugcaaaccuuu

SEQ ID NO: 1173038 - RNA, 19 nt, Artificial Sequence
  Description of Artificial Sequence: Synthetic oligonucleotide
  Sense strand starting at position 2255 of SEQ ID NO: 916646
agauacugaucagcaauau

SEQ ID NO: 1173039 - RNA, 19 nt, Artificial Sequence
  Description of Artificial Sequence: Synthetic oligonucleotide
  Antisense strand to SEQ ID NO: 1173038
auauugcugaucaguaucu

SEQ ID NO: 1173040 - RNA, 19 nt, Artificial Sequence
  Description of Artificial Sequence: Synthetic oligonucleotide
  Sense strand starting at position 2347 of SEQ ID NO: 916646
ugcauuuaaacguggaggu

SEQ ID NO: 1173041 - RNA, 19 nt, Artificial Sequence
  Description of Artificial Sequence: Synthetic oligonucleotide
  Antisense strand to SEQ ID NO: 1173040
accuccacguuuaaaugca

SEQ ID NO: 1173042 - RNA, 19 nt, Artificial Sequence
  Description of Artificial Sequence: Synthetic oligonucleotide
  Sense strand starting at position 2367 of SEQ ID NO: 916646
guuggauguggugaaacca

SEQ ID NO: 1173043 - RNA, 19 nt, Artificial Sequence
  Description of Artificial Sequence: Synthetic oligonucleotide
  Antisense strand to SEQ ID NO: 1173042
ugguuucaccacauccaac

SEQ ID NO: 1173044 - RNA, 19 nt, Artificial Sequence
  Description of Artificial Sequence: Synthetic oligonucleotide
  Sense strand starting at position 2376 of SEQ ID NO: 916646
ggugaaaccaguggucuca

SEQ ID NO: 1173045 - RNA, 19 nt, Artificial Sequence
  Description of Artificial Sequence: Synthetic oligonucleotide
  Antisense strand to SEQ ID NO: 1173044
ugagaccacugguuucacc

SEQ ID NO: 1173046 - RNA, 19 nt, Artificial Sequence
  Description of Artificial Sequence: Synthetic oligonucleotide
  Sense strand starting at position 2378 of SEQ ID NO: 916646
ugaaaccaguggucucaau

SEQ ID NO: 1173047 - RNA, 19 nt, Artificial Sequence
  Description of Artificial Sequence: Synthetic oligonucleotide
  Antisense strand to SEQ ID NO: 1173046
auugagaccacugguuuca

SEQ ID NO: 1173048 - RNA, 19 nt, Artificial Sequence
  Description of Artificial Sequence: Synthetic oligonucleotide
  Sense strand starting at position 2529 of SEQ ID NO: 916646
uuaguuuagccuuaggaug

SEQ ID NO: 1173049 - RNA, 19 nt, Artificial Sequence
  Description of Artificial Sequence: Synthetic oligonucleotide
  Antisense strand to SEQ ID NO: 1173048
cauccuaaggcuaaacuaa

SEQ ID NO: 1173050 - RNA, 19 nt, Artificial Sequence
  Description of Artificial Sequence: Synthetic oligonucleotide
  Sense strand starting at position 2541 of SEQ ID NO: 916646
uaggaugcauaguaaauuu

SEQ ID NO: 1173051 - RNA, 19 nt, Artificial Sequence
  Description of Artificial Sequence: Synthetic oligonucleotide
  Antisense strand to SEQ ID NO: 1173050
aaauuuacuaugcauccua

SEQ ID NO: 1173052 - RNA, 19 nt, Artificial Sequence
  Description of Artificial Sequence: Synthetic oligonucleotide
  Sense strand starting at position 2754 of SEQ ID NO: 916646
ccugcuuuacugggagaaa

SEQ ID NO: 1173053 - RNA, 19 nt, Artificial Sequence
  Description of Artificial Sequence: Synthetic oligonucleotide
  Antisense strand to SEQ ID NO: 1173052
uuucucccaguaaagcagg

SEQ ID NO: 1173054 - RNA, 19 nt, Artificial Sequence
  Description of Artificial Sequence: Synthetic oligonucleotide
  Sense strand starting at position 2757 of SEQ ID NO: 916646
gcuuuacugggagaaaguu

SEQ ID NO: 1173055 - RNA, 19 nt, Artificial Sequence
  Description of Artificial Sequence: Synthetic oligonucleotide
  Antisense strand to SEQ ID NO: 1173054
aacuuucucccaguaaagc

SEQ ID NO: 1173056 - RNA, 19 nt, Artificial Sequence
  Description of Artificial Sequence: Synthetic oligonucleotide
  Sense strand starting at position 2796 of SEQ ID NO: 916646
ggauuacucuuguuuccaa

SEQ ID NO: 1173057 - RNA, 19 nt, Artificial Sequence
  Description of Artificial Sequence: Synthetic oligonucleotide
  Antisense strand to SEQ ID NO: 1173056
uuggaaacaagaguaaucc

SEQ ID NO: 1173058 - RNA, 19 nt, Artificial Sequence
  Description of Artificial Sequence: Synthetic oligonucleotide
  Sense strand starting at position 3072 of SEQ ID NO: 916646
augggagcuugaccuagaa

SEQ ID NO: 1173059 - RNA, 19 nt, Artificial Sequence
  Description of Artificial Sequence: Synthetic oligonucleotide
  Antisense strand to SEQ ID NO: 1173058
uucuaggucaagcucccau

SEQ ID NO: 1173060 - RNA, 19 nt, Artificial Sequence
  Description of Artificial Sequence: Synthetic oligonucleotide
  Sense strand starting at position 3074 of SEQ ID NO: 916646
gggagcuugaccuagaagu

SEQ ID NO: 1173061 - RNA, 19 nt, Artificial Sequence
  Description of Artificial Sequence: Synthetic oligonucleotide
  Antisense strand to SEQ ID NO: 1173060
acuucuaggucaagcuccc

SEQ ID NO: 1173062 - RNA, 19 nt, Artificial Sequence
  Description of Artificial Sequence: Synthetic oligonucleotide
  Sense strand starting at position 3346 of SEQ ID NO: 916646
acauuaaaguaggcucaua

SEQ ID NO: 1173063 - RNA, 19 nt, Artificial Sequence
  Description of Artificial Sequence: Synthetic oligonucleotide
  Antisense strand to SEQ ID NO: 1173062
uaugagccuacuuuaaugu

SEQ ID NO: 1173064 - RNA, 19 nt, Artificial Sequence
  Description of Artificial Sequence: Synthetic oligonucleotide
  Sense strand starting at position 3443 of SEQ ID NO: 916646
guuagaacaguuugauagu

SEQ ID NO: 1173065 - RNA, 19 nt, Artificial Sequence
  Description of Artificial Sequence: Synthetic oligonucleotide
  Antisense strand to SEQ ID NO: 1173064
acuaucaaacuguucuaac

SEQ ID NO: 1173066 - RNA, 19 nt, Artificial Sequence
  Description of Artificial Sequence: Synthetic oligonucleotide
  Sense strand starting at position 3449 of SEQ ID NO: 916646
acaguuugauagucauuau

SEQ ID NO: 1173067 - RNA, 19 nt, Artificial Sequence
  Description of Artificial Sequence: Synthetic oligonucleotide
  Antisense strand to SEQ ID NO: 1173066
auaaugacuaucaaacugu

SEQ ID NO: 1173068 - RNA, 19 nt, Artificial Sequence
  Description of Artificial Sequence: Synthetic oligonucleotide
  Sense strand starting at position 3786 of SEQ ID NO: 916646
guuuacgugcaaguuuauu

SEQ ID NO: 1173069 - RNA, 19 nt, Artificial Sequence
  Description of Artificial Sequence: Synthetic oligonucleotide
  Antisense strand to SEQ ID NO: 1173068
aauaaacuugcacguaaac

SEQ ID NO: 1173070 - RNA, 19 nt, Artificial Sequence
  Description of Artificial Sequence: Synthetic oligonucleotide
  Sense strand starting at position 3791 of SEQ ID NO: 916646
cgugcaaguuuauuugauu

SEQ ID NO: 1173071 - RNA, 19 nt, Artificial Sequence
  Description of Artificial Sequence: Synthetic oligonucleotide
  Antisense strand to SEQ ID NO: 1173070
aaucaaauaaacuugcacg

SEQ ID NO: 1173072 - RNA, 19 nt, Artificial Sequence
  Description of Artificial Sequence: Synthetic oligonucleotide
  Sense strand starting at position 20 of SEQ ID NO: 916647
ucauucuagucgucugcau

SEQ ID NO: 1173073 - RNA, 19 nt, Artificial Sequence
  Description of Artificial Sequence: Synthetic oligonucleotide
  Antisense strand to SEQ ID NO: 1173072
augcagacgacuagaauga

SEQ ID NO: 1173074 - RNA, 19 nt, Artificial Sequence
  Description of Artificial Sequence: Synthetic oligonucleotide
  Sense strand starting at position 48 of SEQ ID NO: 916647
gucuaacuagcacaauguu

SEQ ID NO: 1173075 - RNA, 19 nt, Artificial Sequence
  Description of Artificial Sequence: Synthetic oligonucleotide
  Antisense strand to SEQ ID NO: 1173074
aacauugugcuaguuagac

SEQ ID NO: 1173076 - RNA, 19 nt, Artificial Sequence
  Description of Artificial Sequence: Synthetic oligonucleotide
  Sense strand starting at position 62 of SEQ ID NO: 916647
auguuuggcacacagugau

SEQ ID NO: 1173077 - RNA, 19 nt, Artificial Sequence
  Description of Artificial Sequence: Synthetic oligonucleotide
  Antisense strand to SEQ ID NO: 1173076
aucacugugugccaaacau

SEQ ID NO: 1173078 - RNA, 19 nt, Artificial Sequence
  Description of Artificial Sequence: Synthetic oligonucleotide
  Sense strand starting at position 72 of SEQ ID NO: 916647
cacagugauccugacaugu

SEQ ID NO: 1173079 - RNA, 19 nt, Artificial Sequence
  Description of Artificial Sequence: Synthetic oligonucleotide
  Antisense strand to SEQ ID NO: 1173078
acaugucaggaucacugug

SEQ ID NO: 1173080 - RNA, 19 nt, Artificial Sequence
  Description of Artificial Sequence: Synthetic oligonucleotide
  Sense strand starting at position 74 of SEQ ID NO: 916647
cagugauccugacaugucu

SEQ ID NO: 1173081 - RNA, 19 nt, Artificial Sequence
  Description of Artificial Sequence: Synthetic oligonucleotide
  Antisense strand to SEQ ID NO: 1173080
agacaugucaggaucacug

SEQ ID NO: 1173082 - RNA, 19 nt, Artificial Sequence
  Description of Artificial Sequence: Synthetic oligonucleotide
  Sense strand starting at position 83 of SEQ ID NO: 916647
ugacaugucuauuaauuga

SEQ ID NO: 1173083 - RNA, 19 nt, Artificial Sequence
  Description of Artificial Sequence: Synthetic oligonucleotide
  Antisense strand to SEQ ID NO: 1173082
ucaauuaauagacauguca

SEQ ID NO: 1173084 - RNA, 19 nt, Artificial Sequence
  Description of Artificial Sequence: Synthetic oligonucleotide
  Sense strand starting at position 331 of SEQ ID NO: 916647
gcugaaucaucacuaagac

SEQ ID NO: 1173085 - RNA, 19 nt, Artificial Sequence
  Description of Artificial Sequence: Synthetic oligonucleotide
  Antisense strand to SEQ ID NO: 1173084
gucuuagugaugauucagc

SEQ ID NO: 1173086 - RNA, 19 nt, Artificial Sequence
  Description of Artificial Sequence: Synthetic oligonucleotide
  Sense strand starting at position 429 of SEQ ID NO: 916647
auauauaccuagugaagcu

SEQ ID NO: 1173087 - RNA, 19 nt, Artificial Sequence
  Description of Artificial Sequence: Synthetic oligonucleotide
  Antisense strand to SEQ ID NO: 1173086
agcuucacuagguauauau

SEQ ID NO: 1173088 - RNA, 19 nt, Artificial Sequence
  Description of Artificial Sequence: Synthetic oligonucleotide
  Sense strand starting at position 447 of SEQ ID NO: 916647
ugagguaggucuuacaugu

SEQ ID NO: 1173089 - RNA, 19 nt, Artificial Sequence
  Description of Artificial Sequence: Synthetic oligonucleotide
  Antisense strand to SEQ ID NO: 1173088
acauguaagaccuaccuca

SEQ ID NO: 1173090 - RNA, 19 nt, Artificial Sequence
  Description of Artificial Sequence: Synthetic oligonucleotide
  Sense strand starting at position 451 of SEQ ID NO: 916647
guaggucuuacauguaacu

SEQ ID NO: 1173091 - RNA, 19 nt, Artificial Sequence
  Description of Artificial Sequence: Synthetic oligonucleotide
  Antisense strand to SEQ ID NO: 1173090
aguuacauguaagaccuac

SEQ ID NO: 1173092 - RNA, 19 nt, Artificial Sequence
  Description of Artificial Sequence: Synthetic oligonucleotide
  Sense strand starting at position 724 of SEQ ID NO: 916647
cgcguauucuuccucacaa

SEQ ID NO: 1173093 - RNA, 19 nt, Artificial Sequence
  Description of Artificial Sequence: Synthetic oligonucleotide
  Antisense strand to SEQ ID NO: 1173092
uugugaggaagaauacgcg

SEQ ID NO: 1173094 - RNA, 19 nt, Artificial Sequence
  Description of Artificial Sequence: Synthetic oligonucleotide
  Sense strand starting at position 725 of SEQ ID NO: 916647
gcguauucuuccucacaac

SEQ ID NO: 1173095 - RNA, 19 nt, Artificial Sequence
  Description of Artificial Sequence: Synthetic oligonucleotide
  Antisense strand to SEQ ID NO: 1173094
guugugaggaagaauacgc

SEQ ID NO: 1173096 - RNA, 19 nt, Artificial Sequence
  Description of Artificial Sequence: Synthetic oligonucleotide
  Sense strand starting at position 881 of SEQ ID NO: 916647
gagguauccucaggaaagg

SEQ ID NO: 1173097 - RNA, 19 nt, Artificial Sequence
  Description of Artificial Sequence: Synthetic oligonucleotide
  Antisense strand to SEQ ID NO: 1173096
ccuuuccugaggauaccuc

SEQ ID NO: 1173098 - RNA, 19 nt, Artificial Sequence
  Description of Artificial Sequence: Synthetic oligonucleotide
  Sense strand starting at position 994 of SEQ ID NO: 916647
gccuucucuuuggucaaca

SEQ ID NO: 1173099 - RNA, 19 nt, Artificial Sequence
  Description of Artificial Sequence: Synthetic oligonucleotide
  Antisense strand to SEQ ID NO: 1173098
uguugaccaaagagaaggc

SEQ ID NO: 1173100 - RNA, 19 nt, Artificial Sequence
  Description of Artificial Sequence: Synthetic oligonucleotide
  Sense strand starting at position 1039 of SEQ ID NO: 916647
ucgcucuagccagcgauaa

SEQ ID NO: 1173101 - RNA, 19 nt, Artificial Sequence
  Description of Artificial Sequence: Synthetic oligonucleotide
  Antisense strand to SEQ ID NO: 1173100
uuaucgcuggcuagagcga

SEQ ID NO: 1173102 - RNA, 19 nt, Artificial Sequence
  Description of Artificial Sequence: Synthetic oligonucleotide
  Sense strand starting at position 1051 of SEQ ID NO: 916647
gcgauaaggaugcaguuaa

SEQ ID NO: 1173103 - RNA, 19 nt, Artificial Sequence
  Description of Artificial Sequence: Synthetic oligonucleotide
  Antisense strand to SEQ ID NO: 1173102
uuaacugcauccuuaucgc

SEQ ID NO: 1173104 - RNA, 19 nt, Artificial Sequence
  Description of Artificial Sequence: Synthetic oligonucleotide
  Sense strand starting at position 1084 of SEQ ID NO: 916647
auacauaaguccugagagu

SEQ ID NO: 1173105 - RNA, 19 nt, Artificial Sequence
  Description of Artificial Sequence: Synthetic oligonucleotide
  Antisense strand to SEQ ID NO: 1173104
acucucaggacuuauguau

SEQ ID NO: 1173106 - RNA, 19 nt, Artificial Sequence
  Description of Artificial Sequence: Synthetic oligonucleotide
  Sense strand starting at position 2092 of SEQ ID NO: 916647
gcgggaucccuguaagcug

SEQ ID NO: 1173107 - RNA, 19 nt, Artificial Sequence
  Description of Artificial Sequence: Synthetic oligonucleotide
  Antisense strand to SEQ ID NO: 1173106
cagcuuacagggaucccgc

SEQ ID NO: 1173108 - RNA, 19 nt, Artificial Sequence
  Description of Artificial Sequence: Synthetic oligonucleotide
  Sense strand starting at position 2199 of SEQ ID NO: 916647
agggcuucuuugcugcaaa

SEQ ID NO: 1173109 - RNA, 19 nt, Artificial Sequence
  Description of Artificial Sequence: Synthetic oligonucleotide
  Antisense strand to SEQ ID NO: 1173108
uuugcagcaaagaagcccu

SEQ ID NO: 1173110 - RNA, 19 nt, Artificial Sequence
  Description of Artificial Sequence: Synthetic oligonucleotide
  Sense strand starting at position 2201 of SEQ ID NO: 916647
ggcuucuuugcugcaaagu

SEQ ID NO: 1173111 - RNA, 19 nt, Artificial Sequence
  Description of Artificial Sequence: Synthetic oligonucleotide
  Antisense strand to SEQ ID NO: 1173110
acuuugcagcaaagaagcc

SEQ ID NO: 1173112 - RNA, 19 nt, Artificial Sequence
  Description of Artificial Sequence: Synthetic oligonucleotide
  Sense strand starting at position 2230 of SEQ ID NO: 916647
cggcuuugcccaguuucua

SEQ ID NO: 1173113 - RNA, 19 nt, Artificial Sequence
  Description of Artificial Sequence: Synthetic oligonucleotide
  Antisense strand to SEQ ID NO: 1173112
uagaaacugggcaaagccg

SEQ ID NO: 1173114 - RNA, 19 nt, Artificial Sequence
  Description of Artificial Sequence: Synthetic oligonucleotide
  Sense strand starting at position 2238 of SEQ ID NO: 916647
cccaguuucuaaugaguaa

SEQ ID NO: 1173115 - RNA, 19 nt, Artificial Sequence
  Description of Artificial Sequence: Synthetic oligonucleotide
  Antisense strand to SEQ ID NO: 1173114
uuacucauuagaaacuggg

SEQ ID NO: 1173116 - RNA, 19 nt, Artificial Sequence
  Description of Artificial Sequence: Synthetic oligonucleotide
  Sense strand starting at position 2250 of SEQ ID NO: 916647
ugaguaaccucggaccuga

SEQ ID NO: 1173117 - RNA, 19 nt, Artificial Sequence
  Description of Artificial Sequence: Synthetic oligonucleotide
  Antisense strand to SEQ ID NO: 1173116
ucagguccgagguuacuca

SEQ ID NO: 1173118 - RNA, 19 nt, Artificial Sequence
  Description of Artificial Sequence: Synthetic oligonucleotide
  Sense strand starting at position 2263 of SEQ ID NO: 916647
accugaugcuaaugcgaaa

SEQ ID NO: 1173119 - RNA, 19 nt, Artificial Sequence
  Description of Artificial Sequence: Synthetic oligonucleotide
  Antisense strand to SEQ ID NO: 1173118
uuucgcauuagcaucaggu

SEQ ID NO: 1173120 - RNA, 19 nt, Artificial Sequence
  Description of Artificial Sequence: Synthetic oligonucleotide
  Sense strand starting at position 2276 of SEQ ID NO: 916647
gcgaaagcauucuuaccga

SEQ ID NO: 1173121 - RNA, 19 nt, Artificial Sequence
  Description of Artificial Sequence: Synthetic oligonucleotide
  Antisense strand to SEQ ID NO: 1173120
ucgguaagaaugcuuucgc

SEQ ID NO: 1173122 - RNA, 19 nt, Artificial Sequence
  Description of Artificial Sequence: Synthetic oligonucleotide
  Sense strand starting at position 2391 of SEQ ID NO: 916647
ugugcacuuaguuguacua

SEQ ID NO: 1173123 - RNA, 19 nt, Artificial Sequence
  Description of Artificial Sequence: Synthetic oligonucleotide
  Antisense strand to SEQ ID NO: 1173122
uaguacaacuaagugcaca

SEQ ID NO: 1173124 - RNA, 19 nt, Artificial Sequence
  Description of Artificial Sequence: Synthetic oligonucleotide
  Sense strand starting at position 2437 of SEQ ID NO: 916647
uuuauugaagcaggguaua

SEQ ID NO: 1173125 - RNA, 19 nt, Artificial Sequence
  Description of Artificial Sequence: Synthetic oligonucleotide
  Antisense strand to SEQ ID NO: 1173124
uauacccugcuucaauaaa

SEQ ID NO: 1173126 - RNA, 19 nt, Artificial Sequence
  Description of Artificial Sequence: Synthetic oligonucleotide
  Sense strand starting at position 2471 of SEQ ID NO: 916647
cgaaguaguugggagucua

SEQ ID NO: 1173127 - RNA, 19 nt, Artificial Sequence
  Description of Artificial Sequence: Synthetic oligonucleotide
  Antisense strand to SEQ ID NO: 1173126
uagacucccaacuacuucg

SEQ ID NO: 1173128 - RNA, 19 nt, Artificial Sequence
  Description of Artificial Sequence: Synthetic oligonucleotide
  Sense strand starting at position 2503 of SEQ ID NO: 916647
gccaauggagaucaaguuu

SEQ ID NO: 1173129 - RNA, 19 nt, Artificial Sequence
  Description of Artificial Sequence: Synthetic oligonucleotide
  Antisense strand to SEQ ID NO: 1173128
aaacuugaucuccauuggc

SEQ ID NO: 1173130 - RNA, 19 nt, Artificial Sequence
  Description of Artificial Sequence: Synthetic oligonucleotide
  Sense strand starting at position 2510 of SEQ ID NO: 916647
gagaucaaguuugcaguau

SEQ ID NO: 1173131 - RNA, 19 nt, Artificial Sequence
  Description of Artificial Sequence: Synthetic oligonucleotide
  Antisense strand to SEQ ID NO: 1173130
auacugcaaacuugaucuc

SEQ ID NO: 1173132 - RNA, 19 nt, Artificial Sequence
  Description of Artificial Sequence: Synthetic oligonucleotide
  Sense strand starting at position 2514 of SEQ ID NO: 916647
ucaaguuugcaguaugcaa

SEQ ID NO: 1173133 - RNA, 19 nt, Artificial Sequence
  Description of Artificial Sequence: Synthetic oligonucleotide
  Antisense strand to SEQ ID NO: 1173132
uugcauacugcaaacuuga

SEQ ID NO: 1173134 - RNA, 19 nt, Artificial Sequence
  Description of Artificial Sequence: Synthetic oligonucleotide
  Sense strand starting at position 2518 of SEQ ID NO: 916647
guuugcaguaugcaaagua

SEQ ID NO: 1173135 - RNA, 19 nt, Artificial Sequence
  Description of Artificial Sequence: Synthetic oligonucleotide
  Antisense strand to SEQ ID NO: 1173134
uacuuugcauacugcaaac

SEQ ID NO: 1173136 - RNA, 19 nt, Artificial Sequence
  Description of Artificial Sequence: Synthetic oligonucleotide
  Sense strand starting at position 2525 of SEQ ID NO: 916647
guaugcaaaguaugagcua

SEQ ID NO: 1173137 - RNA, 19 nt, Artificial Sequence
  Description of Artificial Sequence: Synthetic oligonucleotide
  Antisense strand to SEQ ID NO: 1173136
uagcucauacuuugcauac

SEQ ID NO: 1173138 - RNA, 19 nt, Artificial Sequence
  Description of Artificial Sequence: Synthetic oligonucleotide
  Sense strand starting at position 2537 of SEQ ID NO: 916647
ugagcuauccuagaacugu

SEQ ID NO: 1173139 - RNA, 19 nt, Artificial Sequence
  Description of Artificial Sequence: Synthetic oligonucleotide
  Antisense strand to SEQ ID NO: 1173138
acaguucuaggauagcuca

SEQ ID NO: 1173140 - RNA, 19 nt, Artificial Sequence
  Description of Artificial Sequence: Synthetic oligonucleotide
  Sense strand starting at position 2543 of SEQ ID NO: 916647
auccuagaacuguguauga

SEQ ID NO: 1173141 - RNA, 19 nt, Artificial Sequence
  Description of Artificial Sequence: Synthetic oligonucleotide
  Antisense strand to SEQ ID NO: 1173140
ucauacacaguucuaggau

SEQ ID NO: 1173142 - RNA, 19 nt, Artificial Sequence
  Description of Artificial Sequence: Synthetic oligonucleotide
  Sense strand starting at position 2548 of SEQ ID NO: 916647
agaacuguguaugaagcaa

SEQ ID NO: 1173143 - RNA, 19 nt, Artificial Sequence
  Description of Artificial Sequence: Synthetic oligonucleotide
  Antisense strand to SEQ ID NO: 1173142
uugcuucauacacaguucu

SEQ ID NO: 1173144 - RNA, 19 nt, Artificial Sequence
  Description of Artificial Sequence: Synthetic oligonucleotide
  Sense strand starting at position 2622 of SEQ ID NO: 916647
uagagacuuuacugaguuu

SEQ ID NO: 1173145 - RNA, 19 nt, Artificial Sequence
  Description of Artificial Sequence: Synthetic oligonucleotide
  Antisense strand to SEQ ID NO: 1173144
aaacucaguaaagucucua

SEQ ID NO: 1173146 - RNA, 19 nt, Artificial Sequence
  Description of Artificial Sequence: Synthetic oligonucleotide
  Sense strand starting at position 2625 of SEQ ID NO: 916647
agacuuuacugaguuugga

SEQ ID NO: 1173147 - RNA, 19 nt, Artificial Sequence
  Description of Artificial Sequence: Synthetic oligonucleotide
  Antisense strand to SEQ ID NO: 1173146
uccaaacucaguaaagucu

SEQ ID NO: 1173148 - RNA, 19 nt, Artificial Sequence
  Description of Artificial Sequence: Synthetic oligonucleotide
  Sense strand starting at position 2647 of SEQ ID NO: 916647
guggguggaguucaggaau

SEQ ID NO: 1173149 - RNA, 19 nt, Artificial Sequence
  Description of Artificial Sequence: Synthetic oligonucleotide
  Antisense strand to SEQ ID NO: 1173148
auuccugaacuccacccac

SEQ ID NO: 1173150 - RNA, 19 nt, Artificial Sequence
  Description of Artificial Sequence: Synthetic oligonucleotide
  Sense strand starting at position 3921 of SEQ ID NO: 916647
aucuuagucuuugaucuuu

SEQ ID NO: 1173151 - RNA, 19 nt, Artificial Sequence
  Description of Artificial Sequence: Synthetic oligonucleotide
  Antisense strand to SEQ ID NO: 1173150
aaagaucaaagacuaagau

SEQ ID NO: 1173152 - RNA, 19 nt, Artificial Sequence
  Description of Artificial Sequence: Synthetic oligonucleotide
  Sense strand starting at position 78 of SEQ ID NO: 916648
ggcugaguguuacuaugug

SEQ ID NO: 1173153 - RNA, 19 nt, Artificial Sequence
  Description of Artificial Sequence: Synthetic oligonucleotide
  Antisense strand to SEQ ID NO: 1173152
cacauaguaacacucagcc

SEQ ID NO: 1173154 - RNA, 19 nt, Artificial Sequence
  Description of Artificial Sequence: Synthetic oligonucleotide
  Sense strand starting at position 320 of SEQ ID NO: 916648
cuaucuucccagcaaggau

SEQ ID NO: 1173155 - RNA, 19 nt, Artificial Sequence
  Description of Artificial Sequence: Synthetic oligonucleotide
  Antisense strand to SEQ ID NO: 1173154
auccuugcugggaagauag

SEQ ID NO: 1173156 - RNA, 19 nt, Artificial Sequence
  Description of Artificial Sequence: Synthetic oligonucleotide
  Sense strand starting at position 418 of SEQ ID NO: 916648
cugugagucacaggccaaa

SEQ ID NO: 1173157 - RNA, 19 nt, Artificial Sequence
  Description of Artificial Sequence: Synthetic oligonucleotide
  Antisense strand to SEQ ID NO: 1173156
uuuggccugugacucacag

SEQ ID NO: 1173158 - RNA, 19 nt, Artificial Sequence
  Description of Artificial Sequence: Synthetic oligonucleotide
  Sense strand starting at position 585 of SEQ ID NO: 916648
augguuacugugggacuua

SEQ ID NO: 1173159 - RNA, 19 nt, Artificial Sequence
  Description of Artificial Sequence: Synthetic oligonucleotide
  Antisense strand to SEQ ID NO: 1173158
uaagucccacaguaaccau

SEQ ID NO: 1173160 - RNA, 19 nt, Artificial Sequence
  Description of Artificial Sequence: Synthetic oligonucleotide
  Sense strand starting at position 667 of SEQ ID NO: 916648
gcuagcuucccuugaugga

SEQ ID NO: 1173161 - RNA, 19 nt, Artificial Sequence
  Description of Artificial Sequence: Synthetic oligonucleotide
  Antisense strand to SEQ ID NO: 1173160
uccaucaagggaagcuagc

SEQ ID NO: 1173162 - RNA, 19 nt, Artificial Sequence
  Description of Artificial Sequence: Synthetic oligonucleotide
  Sense strand starting at position 668 of SEQ ID NO: 916648
cuagcuucccuugauggaa

SEQ ID NO: 1173163 - RNA, 19 nt, Artificial Sequence
  Description of Artificial Sequence: Synthetic oligonucleotide
  Antisense strand to SEQ ID NO: 1173162
uuccaucaagggaagcuag

SEQ ID NO: 1173164 - RNA, 19 nt, Artificial Sequence
  Description of Artificial Sequence: Synthetic oligonucleotide
  Sense strand starting at position 713 of SEQ ID NO: 916648
gaaacuagccaaugaguga

SEQ ID NO: 1173165 - RNA, 19 nt, Artificial Sequence
  Description of Artificial Sequence: Synthetic oligonucleotide
  Antisense strand to SEQ ID NO: 1173164
ucacucauuggcuaguuuc

SEQ ID NO: 1173166 - RNA, 19 nt, Artificial Sequence
  Description of Artificial Sequence: Synthetic oligonucleotide
  Sense strand starting at position 835 of SEQ ID NO: 916648
cagggauugugccugagac

SEQ ID NO: 1173167 - RNA, 19 nt, Artificial Sequence
  Description of Artificial Sequence: Synthetic oligonucleotide
  Antisense strand to SEQ ID NO: 1173166
gucucaggcacaaucccug

SEQ ID NO: 1173168 - RNA, 19 nt, Artificial Sequence
  Description of Artificial Sequence: Synthetic oligonucleotide
  Sense strand starting at position 836 of SEQ ID NO: 916648
agggauugugccugagaca

SEQ ID NO: 1173169 - RNA, 19 nt, Artificial Sequence
  Description of Artificial Sequence: Synthetic oligonucleotide
  Antisense strand to SEQ ID NO: 1173168
ugucucaggcacaaucccu

SEQ ID NO: 1173170 - RNA, 19 nt, Artificial Sequence
  Description of Artificial Sequence: Synthetic oligonucleotide
  Sense strand starting at position 839 of SEQ ID NO: 916648
gauugugccugagacaaag

SEQ ID NO: 1173171 - RNA, 19 nt, Artificial Sequence
  Description of Artificial Sequence: Synthetic oligonucleotide
  Antisense strand to SEQ ID NO: 1173170
cuuugucucaggcacaauc

SEQ ID NO: 1173172 - RNA, 19 nt, Artificial Sequence
  Description of Artificial Sequence: Synthetic oligonucleotide
  Sense strand starting at position 1013 of SEQ ID NO: 916648
uuggcuucucacuguacau

SEQ ID NO: 1173173 - RNA, 19 nt, Artificial Sequence
  Description of Artificial Sequence: Synthetic oligonucleotide
  Antisense strand to SEQ ID NO: 1173172
auguacagugagaagccaa

SEQ ID NO: 1173174 - RNA, 19 nt, Artificial Sequence
  Description of Artificial Sequence: Synthetic oligonucleotide
  Sense strand starting at position 1122 of SEQ ID NO: 916648
gccucugcucucugccaaa

SEQ ID NO: 1173175 - RNA, 19 nt, Artificial Sequence
  Description of Artificial Sequence: Synthetic oligonucleotide
  Antisense strand to SEQ ID NO: 1173174
uuuggcagagagcagaggc

SEQ ID NO: 1173176 - RNA, 19 nt, Artificial Sequence
  Description of Artificial Sequence: Synthetic oligonucleotide
  Sense strand starting at position 1203 of SEQ ID NO: 916648
uguccucuuccauguacua

SEQ ID NO: 1173177 - RNA, 19 nt, Artificial Sequence
  Description of Artificial Sequence: Synthetic oligonucleotide
  Antisense strand to SEQ ID NO: 1173176
uaguacauggaagaggaca

SEQ ID NO: 1173178 - RNA, 19 nt, Artificial Sequence
  Description of Artificial Sequence: Synthetic oligonucleotide
  Sense strand starting at position 1372 of SEQ ID NO: 916648
gaacaucggucuuucguau

SEQ ID NO: 1173179 - RNA, 19 nt, Artificial Sequence
  Description of Artificial Sequence: Synthetic oligonucleotide
  Antisense strand to SEQ ID NO: 1173178
auacgaaagaccgauguuc

SEQ ID NO: 1173180 - RNA, 19 nt, Artificial Sequence
  Description of Artificial Sequence: Synthetic oligonucleotide
  Sense strand starting at position 1519 of SEQ ID NO: 916648
agugaaguagugcgaccau

SEQ ID NO: 1173181 - RNA, 19 nt, Artificial Sequence
  Description of Artificial Sequence: Synthetic oligonucleotide
  Antisense strand to SEQ ID NO: 1173180
auggucgcacuacuucacu

SEQ ID NO: 1173182 - RNA, 19 nt, Artificial Sequence
  Description of Artificial Sequence: Synthetic oligonucleotide
  Sense strand starting at position 1670 of SEQ ID NO: 916648
ugccgaggcugucuugaaa

SEQ ID NO: 1173183 - RNA, 19 nt, Artificial Sequence
  Description of Artificial Sequence: Synthetic oligonucleotide
  Antisense strand to SEQ ID NO: 1173182
uuucaagacagccucggca

SEQ ID NO: 1173184 - RNA, 19 nt, Artificial Sequence
  Description of Artificial Sequence: Synthetic oligonucleotide
  Sense strand starting at position 1847 of SEQ ID NO: 916648
gccucagcucugggaagua

SEQ ID NO: 1173185 - RNA, 19 nt, Artificial Sequence
  Description of Artificial Sequence: Synthetic oligonucleotide
  Antisense strand to SEQ ID NO: 1173184
uacuucccagagcugaggc

SEQ ID NO: 1173186 - RNA, 19 nt, Artificial Sequence
  Description of Artificial Sequence: Synthetic oligonucleotide
  Sense strand starting at position 2040 of SEQ ID NO: 916648
ggacucugaucacuccaca

SEQ ID NO: 1173187 - RNA, 19 nt, Artificial Sequence
  Description of Artificial Sequence: Synthetic oligonucleotide
  Antisense strand to SEQ ID NO: 1173186
uguggagugaucagagucc

SEQ ID NO: 1173188 - RNA, 19 nt, Artificial Sequence
  Description of Artificial Sequence: Synthetic oligonucleotide
  Sense strand starting at position 2119 of SEQ ID NO: 916648
gacuaaaggugucuccauu

SEQ ID NO: 1173189 - RNA, 19 nt, Artificial Sequence
  Description of Artificial Sequence: Synthetic oligonucleotide
  Antisense strand to SEQ ID NO: 1173188
aauggagacaccuuuaguc

SEQ ID NO: 1173190 - RNA, 19 nt, Artificial Sequence
  Description of Artificial Sequence: Synthetic oligonucleotide
  Sense strand starting at position 2165 of SEQ ID NO: 916648
ucaggaagcaagugucuaa

SEQ ID NO: 1173191 - RNA, 19 nt, Artificial Sequence
  Description of Artificial Sequence: Synthetic oligonucleotide
  Antisense strand to SEQ ID NO: 1173190
uuagacacuugcuuccuga

SEQ ID NO: 1173192 - RNA, 19 nt, Artificial Sequence
  Description of Artificial Sequence: Synthetic oligonucleotide
  Sense strand starting at position 2169 of SEQ ID NO: 916648
gaagcaagugucuaacuca

SEQ ID NO: 1173193 - RNA, 19 nt, Artificial Sequence
  Description of Artificial Sequence: Synthetic oligonucleotide
  Antisense strand to SEQ ID NO: 1173192
ugaguuagacacuugcuuc

SEQ ID NO: 1173194 - RNA, 19 nt, Artificial Sequence
  Description of Artificial Sequence: Synthetic oligonucleotide
  Sense strand starting at position 2172 of SEQ ID NO: 916648
gcaagugucuaacucagaa

SEQ ID NO: 1173195 - RNA, 19 nt, Artificial Sequence
  Description of Artificial Sequence: Synthetic oligonucleotide
  Antisense strand to SEQ ID NO: 1173194
uucugaguuagacacuugc

SEQ ID NO: 1173196 - RNA, 19 nt, Artificial Sequence
  Description of Artificial Sequence: Synthetic oligonucleotide
  Sense strand starting at position 2186 of SEQ ID NO: 916648
cagaauuggugacagauac

SEQ ID NO: 1173197 - RNA, 19 nt, Artificial Sequence
  Description of Artificial Sequence: Synthetic oligonucleotide
  Antisense strand to SEQ ID NO: 1173196
guaucugucaccaauucug

SEQ ID NO: 1173198 - RNA, 19 nt, Artificial Sequence
  Description of Artificial Sequence: Synthetic oligonucleotide
  Sense strand starting at position 2525 of SEQ ID NO: 916648
ggcagagugugaucugacu

SEQ ID NO: 1173199 - RNA, 19 nt, Artificial Sequence
  Description of Artificial Sequence: Synthetic oligonucleotide
  Antisense strand to SEQ ID NO: 1173198
agucagaucacacucugcc

SEQ ID NO: 1173200 - RNA, 19 nt, Artificial Sequence
  Description of Artificial Sequence: Synthetic oligonucleotide
  Sense strand starting at position 2603 of SEQ ID NO: 916648
caaagagucgcagguccaa

SEQ ID NO: 1173201 - RNA, 19 nt, Artificial Sequence
  Description of Artificial Sequence: Synthetic oligonucleotide
  Antisense strand to SEQ ID NO: 1173200
uuggaccugcgacucuuug

SEQ ID NO: 1173202 - RNA, 19 nt, Artificial Sequence
  Description of Artificial Sequence: Synthetic oligonucleotide
  Sense strand starting at position 2616 of SEQ ID NO: 916648
guccaacagccucagagau

SEQ ID NO: 1173203 - RNA, 19 nt, Artificial Sequence
  Description of Artificial Sequence: Synthetic oligonucleotide
  Antisense strand to SEQ ID NO: 1173202
aucucugaggcuguuggac

SEQ ID NO: 1173204 - RNA, 19 nt, Artificial Sequence
  Description of Artificial Sequence: Synthetic oligonucleotide
  Sense strand starting at position 2849 of SEQ ID NO: 916648
ggaagcugggaguguuuca

SEQ ID NO: 1173205 - RNA, 19 nt, Artificial Sequence
  Description of Artificial Sequence: Synthetic oligonucleotide
  Antisense strand to SEQ ID NO: 1173204
ugaaacacucccagcuucc

SEQ ID NO: 1173206 - RNA, 19 nt, Artificial Sequence
  Description of Artificial Sequence: Synthetic oligonucleotide
  Sense strand starting at position 3068 of SEQ ID NO: 916648
gugugaagauagcuagcaa

SEQ ID NO: 1173207 - RNA, 19 nt, Artificial Sequence
  Description of Artificial Sequence: Synthetic oligonucleotide
  Antisense strand to SEQ ID NO: 1173206
uugcuagcuaucuucacac

SEQ ID NO: 1173208 - RNA, 19 nt, Artificial Sequence
  Description of Artificial Sequence: Synthetic oligonucleotide
  Sense strand starting at position 3069 of SEQ ID NO: 916648
ugugaagauagcuagcaau

SEQ ID NO: 1173209 - RNA, 19 nt, Artificial Sequence
  Description of Artificial Sequence: Synthetic oligonucleotide
  Antisense strand to SEQ ID NO: 1173208
auugcuagcuaucuucaca

SEQ ID NO: 1173210 - RNA, 19 nt, Artificial Sequence
  Description of Artificial Sequence: Synthetic oligonucleotide
  Sense strand starting at position 3415 of SEQ ID NO: 916648
ccauguucgaggugaggaa

SEQ ID NO: 1173211 - RNA, 19 nt, Artificial Sequence
  Description of Artificial Sequence: Synthetic oligonucleotide
  Antisense strand to SEQ ID NO: 1173210
uuccucaccucgaacaugg

SEQ ID NO: 1173212 - RNA, 19 nt, Artificial Sequence
  Description of Artificial Sequence: Synthetic oligonucleotide
  Sense strand starting at position 3416 of SEQ ID NO: 916648
cauguucgaggugaggaaa

SEQ ID NO: 1173213 - RNA, 19 nt, Artificial Sequence
  Description of Artificial Sequence: Synthetic oligonucleotide
  Antisense strand to SEQ ID NO: 1173212
uuuccucaccucgaacaug

SEQ ID NO: 1173214 - RNA, 19 nt, Artificial Sequence
  Description of Artificial Sequence: Synthetic oligonucleotide
  Sense strand starting at position 3450 of SEQ ID NO: 916648
gaggguuugccaugguaac

SEQ ID NO: 1173215 - RNA, 19 nt, Artificial Sequence
  Description of Artificial Sequence: Synthetic oligonucleotide
  Antisense strand to SEQ ID NO: 1173214
guuaccauggcaaacccuc

SEQ ID NO: 1173216 - RNA, 19 nt, Artificial Sequence
  Description of Artificial Sequence: Synthetic oligonucleotide
  Sense strand starting at position 3632 of SEQ ID NO: 916648
agggaauuauguuucugac

SEQ ID NO: 1173217 - RNA, 19 nt, Artificial Sequence
  Description of Artificial Sequence: Synthetic oligonucleotide
  Antisense strand to SEQ ID NO: 1173216
gucagaaacauaauucccu

SEQ ID NO: 1173218 - RNA, 19 nt, Artificial Sequence
  Description of Artificial Sequence: Synthetic oligonucleotide
  Sense strand starting at position 3634 of SEQ ID NO: 916648
ggaauuauguuucugacua

SEQ ID NO: 1173219 - RNA, 19 nt, Artificial Sequence
  Description of Artificial Sequence: Synthetic oligonucleotide
  Antisense strand to SEQ ID NO: 1173218
uagucagaaacauaauucc

SEQ ID NO: 1173220 - RNA, 19 nt, Artificial Sequence
  Description of Artificial Sequence: Synthetic oligonucleotide
  Sense strand starting at position 3822 of SEQ ID NO: 916648
aaugguaaacagugaaucu

SEQ ID NO: 1173221 - RNA, 19 nt, Artificial Sequence
  Description of Artificial Sequence: Synthetic oligonucleotide
  Antisense strand to SEQ ID NO: 1173220
agauucacuguuuaccauu

SEQ ID NO: 1173222 - RNA, 19 nt, Artificial Sequence
  Description of Artificial Sequence: Synthetic oligonucleotide
  Sense strand starting at position 3895 of SEQ ID NO: 916648
ggguuuguugcauguaaug

SEQ ID NO: 1173223 - RNA, 19 nt, Artificial Sequence
  Description of Artificial Sequence: Synthetic oligonucleotide
  Antisense strand to SEQ ID NO: 1173222
cauuacaugcaacaaaccc

SEQ ID NO: 1173224 - RNA, 19 nt, Artificial Sequence
  Description of Artificial Sequence: Synthetic oligonucleotide
  Sense strand starting at position 3897 of SEQ ID NO: 916648
guuuguugcauguaaugua

SEQ ID NO: 1173225 - RNA, 19 nt, Artificial Sequence
  Description of Artificial Sequence: Synthetic oligonucleotide
  Antisense strand to SEQ ID NO: 1173224
uacauuacaugcaacaaac

SEQ ID NO: 1173226 - RNA, 19 nt, Artificial Sequence
  Description of Artificial Sequence: Synthetic oligonucleotide
  Sense strand starting at position 3904 of SEQ ID NO: 916648
gcauguaauguacguucca

SEQ ID NO: 1173227 - RNA, 19 nt, Artificial Sequence
  Description of Artificial Sequence: Synthetic oligonucleotide
  Antisense strand to SEQ ID NO: 1173226
uggaacguacauuacaugc

SEQ ID NO: 1173228 - RNA, 19 nt, Artificial Sequence
  Description of Artificial Sequence: Synthetic oligonucleotide
  Sense strand starting at position 3905 of SEQ ID NO: 916648
cauguaauguacguuccau

SEQ ID NO: 1173229 - RNA, 19 nt, Artificial Sequence
  Description of Artificial Sequence: Synthetic oligonucleotide
  Antisense strand to SEQ ID NO: 1173228
auggaacguacauuacaug

SEQ ID NO: 1173230 - RNA, 19 nt, Artificial Sequence
  Description of Artificial Sequence: Synthetic oligonucleotide
  Sense strand starting at position 3968 of SEQ ID NO: 916648
caaauaauacaucguguug

SEQ ID NO: 1173231 - RNA, 19 nt, Artificial Sequence
  Description of Artificial Sequence: Synthetic oligonucleotide
  Antisense strand to SEQ ID NO: 1173230
caacacgauguauuauuug

SEQ ID NO: 1173232 - RNA, 19 nt, Artificial Sequence
  Description of Artificial Sequence: Synthetic oligonucleotide
  Sense strand starting at position 139 of SEQ ID NO: 916649
ggcugaguguuacuaugug

SEQ ID NO: 1173233 - RNA, 19 nt, Artificial Sequence
  Description of Artificial Sequence: Synthetic oligonucleotide
  Antisense strand to SEQ ID NO: 1173232
cacauaguaacacucagcc

SEQ ID NO: 1173234 - RNA, 19 nt, Artificial Sequence
  Description of Artificial Sequence: Synthetic oligonucleotide
  Sense strand starting at position 381 of SEQ ID NO: 916649
cuaucuucccagcaaggau

SEQ ID NO: 1173235 - RNA, 19 nt, Artificial Sequence
  Description of Artificial Sequence: Synthetic oligonucleotide
  Antisense strand to SEQ ID NO: 1173234
auccuugcugggaagauag

SEQ ID NO: 1173236 - RNA, 19 nt, Artificial Sequence
  Description of Artificial Sequence: Synthetic oligonucleotide
  Sense strand starting at position 479 of SEQ ID NO: 916649
cugugagucacaggccaaa

SEQ ID NO: 1173237 - RNA, 19 nt, Artificial Sequence
  Description of Artificial Sequence: Synthetic oligonucleotide
  Antisense strand to SEQ ID NO: 1173236
uuuggccugugacucacag

SEQ ID NO: 1173238 - RNA, 19 nt, Artificial Sequence
  Description of Artificial Sequence: Synthetic oligonucleotide
  Sense strand starting at position 646 of SEQ ID NO: 916649
augguuacugugggacuua

SEQ ID NO: 1173239 - RNA, 19 nt, Artificial Sequence
  Description of Artificial Sequence: Synthetic oligonucleotide
  Antisense strand to SEQ ID NO: 1173238
uaagucccacaguaaccau

SEQ ID NO: 1173240 - RNA, 19 nt, Artificial Sequence
  Description of Artificial Sequence: Synthetic oligonucleotide
  Sense strand starting at position 728 of SEQ ID NO: 916649
gcuagcuucccuugaugga

SEQ ID NO: 1173241 - RNA, 19 nt, Artificial Sequence
  Description of Artificial Sequence: Synthetic oligonucleotide
  Antisense strand to SEQ ID NO: 1173240
uccaucaagggaagcuagc

SEQ ID NO: 1173242 - RNA, 19 nt, Artificial Sequence
  Description of Artificial Sequence: Synthetic oligonucleotide
  Sense strand starting at position 729 of SEQ ID NO: 916649
cuagcuucccuugauggaa

SEQ ID NO: 1173243 - RNA, 19 nt, Artificial Sequence
  Description of Artificial Sequence: Synthetic oligonucleotide
  Antisense strand to SEQ ID NO: 1173242
uuccaucaagggaagcuag

SEQ ID NO: 1173244 - RNA, 19 nt, Artificial Sequence
  Description of Artificial Sequence: Synthetic oligonucleotide
  Sense strand starting at position 774 of SEQ ID NO: 916649
gaaacuagccaaugaguga

SEQ ID NO: 1173245 - RNA, 19 nt, Artificial Sequence
  Description of Artificial Sequence: Synthetic oligonucleotide
  Antisense strand to SEQ ID NO: 1173244
ucacucauuggcuaguuuc

SEQ ID NO: 1173246 - RNA, 19 nt, Artificial Sequence
  Description of Artificial Sequence: Synthetic oligonucleotide
  Sense strand starting at position 896 of SEQ ID NO: 916649
cagggauugugccugagac

SEQ ID NO: 1173247 - RNA, 19 nt, Artificial Sequence
  Description of Artificial Sequence: Synthetic oligonucleotide
  Antisense strand to SEQ ID NO: 1173246
gucucaggcacaaucccug

SEQ ID NO: 1173248 - RNA, 19 nt, Artificial Sequence
  Description of Artificial Sequence: Synthetic oligonucleotide
  Sense strand starting at position 897 of SEQ ID NO: 916649
agggauugugccugagaca

SEQ ID NO: 1173249 - RNA, 19 nt, Artificial Sequence
  Description of Artificial Sequence: Synthetic oligonucleotide
  Antisense strand to SEQ ID NO: 1173248
ugucucaggcacaaucccu

SEQ ID NO: 1173250 - RNA, 19 nt, Artificial Sequence
  Description of Artificial Sequence: Synthetic oligonucleotide
  Sense strand starting at position 900 of SEQ ID NO: 916649
gauugugccugagacaaag

SEQ ID NO: 1173251 - RNA, 19 nt, Artificial Sequence
  Description of Artificial Sequence: Synthetic oligonucleotide
  Antisense strand to SEQ ID NO: 1173250
cuuugucucaggcacaauc

SEQ ID NO: 1173252 - RNA, 19 nt, Artificial Sequence
  Description of Artificial Sequence: Synthetic oligonucleotide
  Sense strand starting at position 1074 of SEQ ID NO: 916649
uuggcuucucacuguacau

SEQ ID NO: 1173253 - RNA, 19 nt, Artificial Sequence
  Description of Artificial Sequence: Synthetic oligonucleotide
  Antisense strand to SEQ ID NO: 1173252
auguacagugagaagccaa

SEQ ID NO: 1173254 - RNA, 19 nt, Artificial Sequence
  Description of Artificial Sequence: Synthetic oligonucleotide
  Sense strand starting at position 1183 of SEQ ID NO: 916649
gccucugcucucugccaaa

SEQ ID NO: 1173255 - RNA, 19 nt, Artificial Sequence
  Description of Artificial Sequence: Synthetic oligonucleotide
  Antisense strand to SEQ ID NO: 1173254
uuuggcagagagcagaggc

SEQ ID NO: 1173256 - RNA, 19 nt, Artificial Sequence
  Description of Artificial Sequence: Synthetic oligonucleotide
  Sense strand starting at position 1264 of SEQ ID NO: 916649
uguccucuuccauguacua

SEQ ID NO: 1173257 - RNA, 19 nt, Artificial Sequence
  Description of Artificial Sequence: Synthetic oligonucleotide
  Antisense strand to SEQ ID NO: 1173256
uaguacauggaagaggaca

SEQ ID NO: 1173258 - RNA, 19 nt, Artificial Sequence
  Description of Artificial Sequence: Synthetic oligonucleotide
  Sense strand starting at position 1433 of SEQ ID NO: 916649
gaacaucggucuuucguau

SEQ ID NO: 1173259 - RNA, 19 nt, Artificial Sequence
  Description of Artificial Sequence: Synthetic oligonucleotide
  Antisense strand to SEQ ID NO: 1173258
auacgaaagaccgauguuc

SEQ ID NO: 1173260 - RNA, 19 nt, Artificial Sequence
  Description of Artificial Sequence: Synthetic oligonucleotide
  Sense strand starting at position 1580 of SEQ ID NO: 916649
agugaaguagugcgaccau

SEQ ID NO: 1173261 - RNA, 19 nt, Artificial Sequence
  Description of Artificial Sequence: Synthetic oligonucleotide
  Antisense strand to SEQ ID NO: 1173260
auggucgcacuacuucacu

SEQ ID NO: 1173262 - RNA, 19 nt, Artificial Sequence
  Description of Artificial Sequence: Synthetic oligonucleotide
  Sense strand starting at position 1731 of SEQ ID NO: 916649
ugccgaggcugucuugaaa

SEQ ID NO: 1173263 - RNA, 19 nt, Artificial Sequence
  Description of Artificial Sequence: Synthetic oligonucleotide
  Antisense strand to SEQ ID NO: 1173262
uuucaagacagccucggca

SEQ ID NO: 1173264 - RNA, 19 nt, Artificial Sequence
  Description of Artificial Sequence: Synthetic oligonucleotide
  Sense strand starting at position 1908 of SEQ ID NO: 916649
gccucagcucugggaagua

SEQ ID NO: 1173265 - RNA, 19 nt, Artificial Sequence
  Description of Artificial Sequence: Synthetic oligonucleotide
  Antisense strand to SEQ ID NO: 1173264
uacuucccagagcugaggc

SEQ ID NO: 1173266 - RNA, 19 nt, Artificial Sequence
  Description of Artificial Sequence: Synthetic oligonucleotide
  Sense strand starting at position 2101 of SEQ ID NO: 916649
ggacucugaucacuccaca

SEQ ID NO: 1173267 - RNA, 19 nt, Artificial Sequence
  Description of Artificial Sequence: Synthetic oligonucleotide
  Antisense strand to SEQ ID NO: 1173266
uguggagugaucagagucc

SEQ ID NO: 1173268 - RNA, 19 nt, Artificial Sequence
  Description of Artificial Sequence: Synthetic oligonucleotide
  Sense strand starting at position 2180 of SEQ ID NO: 916649
gacuaaaggugucuccauu

SEQ ID NO: 1173269 - RNA, 19 nt, Artificial Sequence
  Description of Artificial Sequence: Synthetic oligonucleotide
  Antisense strand to SEQ ID NO: 1173268
aauggagacaccuuuaguc

SEQ ID NO: 1173270 - RNA, 19 nt, Artificial Sequence
  Description of Artificial Sequence: Synthetic oligonucleotide
  Sense strand starting at position 2226 of SEQ ID NO: 916649
ucaggaagcaagugucuaa

SEQ ID NO: 1173271 - RNA, 19 nt, Artificial Sequence
  Description of Artificial Sequence: Synthetic oligonucleotide
  Antisense strand to SEQ ID NO: 1173270
uuagacacuugcuuccuga

SEQ ID NO: 1173272 - RNA, 19 nt, Artificial Sequence
  Description of Artificial Sequence: Synthetic oligonucleotide
  Sense strand starting at position 2230 of SEQ ID NO: 916649
gaagcaagugucuaacuca

SEQ ID NO: 1173273 - RNA, 19 nt, Artificial Sequence
  Description of Artificial Sequence: Synthetic oligonucleotide
  Antisense strand to SEQ ID NO: 1173272
ugaguuagacacuugcuuc

SEQ ID NO: 1173274 - RNA, 19 nt, Artificial Sequence
  Description of Artificial Sequence: Synthetic oligonucleotide
  Sense strand starting at position 2233 of SEQ ID NO: 916649
gcaagugucuaacucagaa

SEQ ID NO: 1173275 - RNA, 19 nt, Artificial Sequence
  Description of Artificial Sequence: Synthetic oligonucleotide
  Antisense strand to SEQ ID NO: 1173274
uucugaguuagacacuugc

SEQ ID NO: 1173276 - RNA, 19 nt, Artificial Sequence
  Description of Artificial Sequence: Synthetic oligonucleotide
  Sense strand starting at position 2247 of SEQ ID NO: 916649
cagaauuggugacagauac

SEQ ID NO: 1173277 - RNA, 19 nt, Artificial Sequence
  Description of Artificial Sequence: Synthetic oligonucleotide
  Antisense strand to SEQ ID NO: 1173276
guaucugucaccaauucug

SEQ ID NO: 1173278 - RNA, 19 nt, Artificial Sequence
  Description of Artificial Sequence: Synthetic oligonucleotide
  Sense strand starting at position 2586 of SEQ ID NO: 916649
ggcagagugugaucugacu

SEQ ID NO: 1173279 - RNA, 19 nt, Artificial Sequence
  Description of Artificial Sequence: Synthetic oligonucleotide
  Antisense strand to SEQ ID NO: 1173278
agucagaucacacucugcc

SEQ ID NO: 1173280 - RNA, 19 nt, Artificial Sequence
  Description of Artificial Sequence: Synthetic oligonucleotide
  Sense strand starting at position 2664 of SEQ ID NO: 916649
caaagagucgcagguccaa

SEQ ID NO: 1173281 - RNA, 19 nt, Artificial Sequence
  Description of Artificial Sequence: Synthetic oligonucleotide
  Antisense strand to SEQ ID NO: 1173280
uuggaccugcgacucuuug

SEQ ID NO: 1173282 - RNA, 19 nt, Artificial Sequence
  Description of Artificial Sequence: Synthetic oligonucleotide
  Sense strand starting at position 2677 of SEQ ID NO: 916649
guccaacagccucagagau

SEQ ID NO: 1173283 - RNA, 19 nt, Artificial Sequence
  Description of Artificial Sequence: Synthetic oligonucleotide
  Antisense strand to SEQ ID NO: 1173282
aucucugaggcuguuggac

SEQ ID NO: 1173284 - RNA, 19 nt, Artificial Sequence
  Description of Artificial Sequence: Synthetic oligonucleotide
  Sense strand starting at position 2910 of SEQ ID NO: 916649
ggaagcugggaguguuuca

SEQ ID NO: 1173285 - RNA, 19 nt, Artificial Sequence
  Description of Artificial Sequence: Synthetic oligonucleotide
  Antisense strand to SEQ ID NO: 1173284
ugaaacacucccagcuucc

SEQ ID NO: 1173286 - RNA, 19 nt, Artificial Sequence
  Description of Artificial Sequence: Synthetic oligonucleotide
  Sense strand starting at position 2915 of SEQ ID NO: 916649
cugggaguguuucaggaac

SEQ ID NO: 1173287 - RNA, 19 nt, Artificial Sequence
  Description of Artificial Sequence: Synthetic oligonucleotide
  Antisense strand to SEQ ID NO: 1173286
guuccugaaacacucccag

SEQ ID NO: 1173288 - RNA, 19 nt, Artificial Sequence
  Description of Artificial Sequence: Synthetic oligonucleotide
  Sense strand starting at position 3129 of SEQ ID NO: 916649
gugugaagauagcuagcaa

SEQ ID NO: 1173289 - RNA, 19 nt, Artificial Sequence
  Description of Artificial Sequence: Synthetic oligonucleotide
  Antisense strand to SEQ ID NO: 1173288
uugcuagcuaucuucacac

SEQ ID NO: 1173290 - RNA, 19 nt, Artificial Sequence
  Description of Artificial Sequence: Synthetic oligonucleotide
  Sense strand starting at position 3130 of SEQ ID NO: 916649
ugugaagauagcuagcaau

SEQ ID NO: 1173291 - RNA, 19 nt, Artificial Sequence
  Description of Artificial Sequence: Synthetic oligonucleotide
  Antisense strand to SEQ ID NO: 1173290
auugcuagcuaucuucaca

SEQ ID NO: 1173292 - RNA, 19 nt, Artificial Sequence
  Description of Artificial Sequence: Synthetic oligonucleotide
  Sense strand starting at position 3476 of SEQ ID NO: 916649
ccauguucgaggugaggaa

SEQ ID NO: 1173293 - RNA, 19 nt, Artificial Sequence
  Description of Artificial Sequence: Synthetic oligonucleotide
  Antisense strand to SEQ ID NO: 1173292
uuccucaccucgaacaugg

SEQ ID NO: 1173294 - RNA, 19 nt, Artificial Sequence
  Description of Artificial Sequence: Synthetic oligonucleotide
  Sense strand starting at position 3477 of SEQ ID NO: 916649
cauguucgaggugaggaaa

SEQ ID NO: 1173295 - RNA, 19 nt, Artificial Sequence
  Description of Artificial Sequence: Synthetic oligonucleotide
  Antisense strand to SEQ ID NO: 1173294
uuuccucaccucgaacaug

SEQ ID NO: 1173296 - RNA, 19 nt, Artificial Sequence
  Description of Artificial Sequence: Synthetic oligonucleotide
  Sense strand starting at position 3511 of SEQ ID NO: 916649
gaggguuugccaugguaac

SEQ ID NO: 1173297 - RNA, 19 nt, Artificial Sequence
  Description of Artificial Sequence: Synthetic oligonucleotide
  Antisense strand to SEQ ID NO: 1173296
guuaccauggcaaacccuc

SEQ ID NO: 1173298 - RNA, 19 nt, Artificial Sequence
  Description of Artificial Sequence: Synthetic oligonucleotide
  Sense strand starting at position 3693 of SEQ ID NO: 916649
agggaauuauguuucugac

SEQ ID NO: 1173299 - RNA, 19 nt, Artificial Sequence
  Description of Artificial Sequence: Synthetic oligonucleotide
  Antisense strand to SEQ ID NO: 1173298
gucagaaacauaauucccu

SEQ ID NO: 1173300 - RNA, 19 nt, Artificial Sequence
  Description of Artificial Sequence: Synthetic oligonucleotide
  Sense strand starting at position 3695 of SEQ ID NO: 916649
ggaauuauguuucugacua

SEQ ID NO: 1173301 - RNA, 19 nt, Artificial Sequence
  Description of Artificial Sequence: Synthetic oligonucleotide
  Antisense strand to SEQ ID NO: 1173300
uagucagaaacauaauucc

SEQ ID NO: 1173302 - RNA, 19 nt, Artificial Sequence
  Description of Artificial Sequence: Synthetic oligonucleotide
  Sense strand starting at position 3883 of SEQ ID NO: 916649
aaugguaaacagugaaucu

SEQ ID NO: 1173303 - RNA, 19 nt, Artificial Sequence
  Description of Artificial Sequence: Synthetic oligonucleotide
  Antisense strand to SEQ ID NO: 1173302
agauucacuguuuaccauu

SEQ ID NO: 1173304 - RNA, 19 nt, Artificial Sequence
  Description of Artificial Sequence: Synthetic oligonucleotide
  Sense strand starting at position 3956 of SEQ ID NO: 916649
ggguuuguugcauguaaug

SEQ ID NO: 1173305 - RNA, 19 nt, Artificial Sequence
  Description of Artificial Sequence: Synthetic oligonucleotide
  Antisense strand to SEQ ID NO: 1173304
cauuacaugcaacaaaccc

SEQ ID NO: 1173306 - RNA, 19 nt, Artificial Sequence
  Description of Artificial Sequence: Synthetic oligonucleotide
  Sense strand starting at position 3958 of SEQ ID NO: 916649
guuuguugcauguaaugua

SEQ ID NO: 1173307 - RNA, 19 nt, Artificial Sequence
  Description of Artificial Sequence: Synthetic oligonucleotide
  Antisense strand to SEQ ID NO: 1173306
uacauuacaugcaacaaac

SEQ ID NO: 1173308 - RNA, 19 nt, Artificial Sequence
  Description of Artificial Sequence: Synthetic oligonucleotide
  Sense strand starting at position 3965 of SEQ ID NO: 916649
gcauguaauguacguucca

SEQ ID NO: 1173309 - RNA, 19 nt, Artificial Sequence
  Description of Artificial Sequence: Synthetic oligonucleotide
  Antisense strand to SEQ ID NO: 1173308
uggaacguacauuacaugc

SEQ ID NO: 1173310 - RNA, 19 nt, Artificial Sequence
  Description of Artificial Sequence: Synthetic oligonucleotide
  Sense strand starting at position 3966 of SEQ ID NO: 916649
cauguaauguacguuccau

SEQ ID NO: 1173311 - RNA, 19 nt, Artificial Sequence
  Description of Artificial Sequence: Synthetic oligonucleotide
  Antisense strand to SEQ ID NO: 1173310
auggaacguacauuacaug

SEQ ID NO: 1173312 - RNA, 19 nt, Artificial Sequence
  Description of Artificial Sequence: Synthetic oligonucleotide
  Sense strand starting at position 167 of SEQ ID NO: 916650
cgcugugcuggucacuaaa

SEQ ID NO: 1173313 - RNA, 19 nt, Artificial Sequence
  Description of Artificial Sequence: Synthetic oligonucleotide
  Antisense strand to SEQ ID NO: 1173312
uuuagugaccagcacagcg

SEQ ID NO: 1173314 - RNA, 19 nt, Artificial Sequence
  Description of Artificial Sequence: Synthetic oligonucleotide
  Sense strand starting at position 169 of SEQ ID NO: 916650
cugugcuggucacuaaaua

SEQ ID NO: 1173315 - RNA, 19 nt, Artificial Sequence
  Description of Artificial Sequence: Synthetic oligonucleotide
  Antisense strand to SEQ ID NO: 1173314
uauuuagugaccagcacag

SEQ ID NO: 1173316 - RNA, 19 nt, Artificial Sequence
  Description of Artificial Sequence: Synthetic oligonucleotide
  Sense strand starting at position 267 of SEQ ID NO: 916650
ccaccucagucuggauauu

SEQ ID NO: 1173317 - RNA, 19 nt, Artificial Sequence
  Description of Artificial Sequence: Synthetic oligonucleotide
  Antisense strand to SEQ ID NO: 1173316
aauauccagacugaggugg

SEQ ID NO: 1173318 - RNA, 19 nt, Artificial Sequence
  Description of Artificial Sequence: Synthetic oligonucleotide
  Sense strand starting at position 289 of SEQ ID NO: 916650
uucuuaaagucagaaagca

SEQ ID NO: 1173319 - RNA, 19 nt, Artificial Sequence
  Description of Artificial Sequence: Synthetic oligonucleotide
  Antisense strand to SEQ ID NO: 1173318
ugcuuucugacuuuaagaa

SEQ ID NO: 1173320 - RNA, 19 nt, Artificial Sequence
  Description of Artificial Sequence: Synthetic oligonucleotide
  Sense strand starting at position 305 of SEQ ID NO: 916650
gcaagugugugcuuccaau

SEQ ID NO: 1173321 - RNA, 19 nt, Artificial Sequence
  Description of Artificial Sequence: Synthetic oligonucleotide
  Antisense strand to SEQ ID NO: 1173320
auuggaagcacacacuugc

SEQ ID NO: 1173322 - RNA, 19 nt, Artificial Sequence
  Description of Artificial Sequence: Synthetic oligonucleotide
  Sense strand starting at position 462 of SEQ ID NO: 916650
cguugagcgguacauucua

SEQ ID NO: 1173323 - RNA, 19 nt, Artificial Sequence
  Description of Artificial Sequence: Synthetic oligonucleotide
  Antisense strand to SEQ ID NO: 1173322
uagaauguaccgcucaacg

SEQ ID NO: 1173324 - RNA, 19 nt, Artificial Sequence
  Description of Artificial Sequence: Synthetic oligonucleotide
  Sense strand starting at position 2493 of SEQ ID NO: 916650
uggcuugacuccugcaguu

SEQ ID NO: 1173325 - RNA, 19 nt, Artificial Sequence
  Description of Artificial Sequence: Synthetic oligonucleotide
  Antisense strand to SEQ ID NO: 1173324
aacugcaggagucaagcca

SEQ ID NO: 1173326 - RNA, 19 nt, Artificial Sequence
  Description of Artificial Sequence: Synthetic oligonucleotide
  Sense strand starting at position 2559 of SEQ ID NO: 916650
ccuacuagcucguggaacu

SEQ ID NO: 1173327 - RNA, 19 nt, Artificial Sequence
  Description of Artificial Sequence: Synthetic oligonucleotide
  Antisense strand to SEQ ID NO: 1173326
aguuccacgagcuaguagg

SEQ ID NO: 1173328 - RNA, 19 nt, Artificial Sequence
  Description of Artificial Sequence: Synthetic oligonucleotide
  Sense strand starting at position 2595 of SEQ ID NO: 916650
guagacccuccauagacuu

SEQ ID NO: 1173329 - RNA, 19 nt, Artificial Sequence
  Description of Artificial Sequence: Synthetic oligonucleotide
  Antisense strand to SEQ ID NO: 1173328
aagucuauggagggucuac

SEQ ID NO: 1173330 - RNA, 19 nt, Artificial Sequence
  Description of Artificial Sequence: Synthetic oligonucleotide
  Sense strand starting at position 2602 of SEQ ID NO: 916650
cuccauagacuucgaaaug

SEQ ID NO: 1173331 - RNA, 19 nt, Artificial Sequence
  Description of Artificial Sequence: Synthetic oligonucleotide
  Antisense strand to SEQ ID NO: 1173330
cauuucgaagucuauggag

SEQ ID NO: 1173332 - RNA, 19 nt, Artificial Sequence
  Description of Artificial Sequence: Synthetic oligonucleotide
  Sense strand starting at position 2770 of SEQ ID NO: 916650
gaggccguuaccuggaaau

SEQ ID NO: 1173333 - RNA, 19 nt, Artificial Sequence
  Description of Artificial Sequence: Synthetic oligonucleotide
  Antisense strand to SEQ ID NO: 1173332
auuuccagguaacggccuc

SEQ ID NO: 1173334 - RNA, 19 nt, Artificial Sequence
  Description of Artificial Sequence: Synthetic oligonucleotide
  Sense strand starting at position 2988 of SEQ ID NO: 916650
gugcccuccauaggaguua

SEQ ID NO: 1173335 - RNA, 19 nt, Artificial Sequence
  Description of Artificial Sequence: Synthetic oligonucleotide
  Antisense strand to SEQ ID NO: 1173334
uaacuccuauggagggcac

SEQ ID NO: 1173336 - RNA, 19 nt, Artificial Sequence
  Description of Artificial Sequence: Synthetic oligonucleotide
  Sense strand starting at position 3045 of SEQ ID NO: 916650
ccggaaauauuguaagaua

SEQ ID NO: 1173337 - RNA, 19 nt, Artificial Sequence
  Description of Artificial Sequence: Synthetic oligonucleotide
  Antisense strand to SEQ ID NO: 1173336
uaucuuacaauauuuccgg

SEQ ID NO: 1173338 - RNA, 19 nt, Artificial Sequence
  Description of Artificial Sequence: Synthetic oligonucleotide
  Sense strand starting at position 3068 of SEQ ID NO: 916650
agguuuauuugucaaggug

SEQ ID NO: 1173339 - RNA, 19 nt, Artificial Sequence
  Description of Artificial Sequence: Synthetic oligonucleotide
  Antisense strand to SEQ ID NO: 1173338
caccuugacaaauaaaccu

SEQ ID NO: 1173340 - RNA, 19 nt, Artificial Sequence
  Description of Artificial Sequence: Synthetic oligonucleotide
  Sense strand starting at position 3120 of SEQ ID NO: 916650
uguuauguuccauaacuau

SEQ ID NO: 1173341 - RNA, 19 nt, Artificial Sequence
  Description of Artificial Sequence: Synthetic oligonucleotide
  Antisense strand to SEQ ID NO: 1173340
auaguuauggaacauaaca

SEQ ID NO: 1173342 - RNA, 19 nt, Artificial Sequence
  Description of Artificial Sequence: Synthetic oligonucleotide
  Sense strand starting at position 3143 of SEQ ID NO: 916650
augauuguaggagguagua

SEQ ID NO: 1173343 - RNA, 19 nt, Artificial Sequence
  Description of Artificial Sequence: Synthetic oligonucleotide
  Antisense strand to SEQ ID NO: 1173342
uacuaccuccuacaaucau

SEQ ID NO: 1173344 - RNA, 19 nt, Artificial Sequence
  Description of Artificial Sequence: Synthetic oligonucleotide
  Sense strand starting at position 3196 of SEQ ID NO: 916650
cugcauuuauacgguaaac

SEQ ID NO: 1173345 - RNA, 19 nt, Artificial Sequence
  Description of Artificial Sequence: Synthetic oligonucleotide
  Antisense strand to SEQ ID NO: 1173344
guuuaccguauaaaugcag

SEQ ID NO: 1173346 - RNA, 19 nt, Artificial Sequence
  Description of Artificial Sequence: Synthetic oligonucleotide
  Sense strand starting at position 3511 of SEQ ID NO: 916650
gugugugccaccuguagua

SEQ ID NO: 1173347 - RNA, 19 nt, Artificial Sequence
  Description of Artificial Sequence: Synthetic oligonucleotide
  Antisense strand to SEQ ID NO: 1173346
uacuacagguggcacacac

SEQ ID NO: 1173348 - RNA, 19 nt, Artificial Sequence
  Description of Artificial Sequence: Synthetic oligonucleotide
  Sense strand starting at position 3513 of SEQ ID NO: 916650
gugugccaccuguaguaau

SEQ ID NO: 1173349 - RNA, 19 nt, Artificial Sequence
  Description of Artificial Sequence: Synthetic oligonucleotide
  Antisense strand to SEQ ID NO: 1173348
auuacuacagguggcacac

SEQ ID NO: 1173350 - RNA, 19 nt, Artificial Sequence
  Description of Artificial Sequence: Synthetic oligonucleotide
  Sense strand starting at position 3544 of SEQ ID NO: 916650
cuuguagaaauacgagaaa

SEQ ID NO: 1173351 - RNA, 19 nt, Artificial Sequence
  Description of Artificial Sequence: Synthetic oligonucleotide
  Antisense strand to SEQ ID NO: 1173350
uuucucguauuucuacaag

SEQ ID NO: 1173352 - RNA, 19 nt, Artificial Sequence
  Description of Artificial Sequence: Synthetic oligonucleotide
  Sense strand starting at position 3581 of SEQ ID NO: 916650
uuguauuucuuguagaaag

SEQ ID NO: 1173353 - RNA, 19 nt, Artificial Sequence
  Description of Artificial Sequence: Synthetic oligonucleotide
  Antisense strand to SEQ ID NO: 1173352
cuuucuacaagaaauacaa

SEQ ID NO: 1173354 - RNA, 19 nt, Artificial Sequence
  Description of Artificial Sequence: Synthetic oligonucleotide
  Sense strand starting at position 3806 of SEQ ID NO: 916650
cgucucaucugugccauga

SEQ ID NO: 1173355 - RNA, 19 nt, Artificial Sequence
  Description of Artificial Sequence: Synthetic oligonucleotide
  Antisense strand to SEQ ID NO: 1173354
ucauggcacagaugagacg

SEQ ID NO: 1173356 - RNA, 19 nt, Artificial Sequence
  Description of Artificial Sequence: Synthetic oligonucleotide
  Sense strand starting at position 3808 of SEQ ID NO: 916650
ucucaucugugccaugaaa

SEQ ID NO: 1173357 - RNA, 19 nt, Artificial Sequence
  Description of Artificial Sequence: Synthetic oligonucleotide
  Antisense strand to SEQ ID NO: 1173356
uuucauggcacagaugaga

SEQ ID NO: 1173358 - RNA, 19 nt, Artificial Sequence
  Description of Artificial Sequence: Synthetic oligonucleotide
  Sense strand starting at position 3810 of SEQ ID NO: 916650
ucaucugugccaugaaagg

SEQ ID NO: 1173359 - RNA, 19 nt, Artificial Sequence
  Description of Artificial Sequence: Synthetic oligonucleotide
  Antisense strand to SEQ ID NO: 1173358
ccuuucauggcacagauga

SEQ ID NO: 1173360 - RNA, 19 nt, Artificial Sequence
  Description of Artificial Sequence: Synthetic oligonucleotide
  Sense strand starting at position 3830 of SEQ ID NO: 916650
gcagguuagaugucagcgu

SEQ ID NO: 1173361 - RNA, 19 nt, Artificial Sequence
  Description of Artificial Sequence: Synthetic oligonucleotide
  Antisense strand to SEQ ID NO: 1173360
acgcugacaucuaaccugc

SEQ ID NO: 1173362 - RNA, 19 nt, Artificial Sequence
  Description of Artificial Sequence: Synthetic oligonucleotide
  Sense strand starting at position 3831 of SEQ ID NO: 916650
cagguuagaugucagcguu

SEQ ID NO: 1173363 - RNA, 19 nt, Artificial Sequence
  Description of Artificial Sequence: Synthetic oligonucleotide
  Antisense strand to SEQ ID NO: 1173362
aacgcugacaucuaaccug

SEQ ID NO: 1173364 - RNA, 19 nt, Artificial Sequence
  Description of Artificial Sequence: Synthetic oligonucleotide
  Sense strand starting at position 3841 of SEQ ID NO: 916650
gucagcguuucccacacua

SEQ ID NO: 1173365 - RNA, 19 nt, Artificial Sequence
  Description of Artificial Sequence: Synthetic oligonucleotide
  Antisense strand to SEQ ID NO: 1173364
uagugugggaaacgcugac

SEQ ID NO: 1173366 - RNA, 19 nt, Artificial Sequence
  Description of Artificial Sequence: Synthetic oligonucleotide
  Sense strand starting at position 3868 of SEQ ID NO: 916650
guaagcauccacugaggga

SEQ ID NO: 1173367 - RNA, 19 nt, Artificial Sequence
  Description of Artificial Sequence: Synthetic oligonucleotide
  Antisense strand to SEQ ID NO: 1173366
ucccucaguggaugcuuac

SEQ ID NO: 1173368 - RNA, 19 nt, Artificial Sequence
  Description of Artificial Sequence: Synthetic oligonucleotide
  Sense strand starting at position 3916 of SEQ ID NO: 916650
cgcugauuccaggaggucu

SEQ ID NO: 1173369 - RNA, 19 nt, Artificial Sequence
  Description of Artificial Sequence: Synthetic oligonucleotide
  Antisense strand to SEQ ID NO: 1173368
agaccuccuggaaucagcg

SEQ ID NO: 1173370 - RNA, 19 nt, Artificial Sequence
  Description of Artificial Sequence: Synthetic oligonucleotide
  Sense strand starting at position 3970 of SEQ ID NO: 916650
aguuauucuuaugcucaga

SEQ ID NO: 1173371 - RNA, 19 nt, Artificial Sequence
  Description of Artificial Sequence: Synthetic oligonucleotide
  Antisense strand to SEQ ID NO: 1173370
ucugagcauaagaauaacu

SEQ ID NO: 1173372 - RNA, 19 nt, Artificial Sequence
  Description of Artificial Sequence: Synthetic oligonucleotide
  Sense strand starting at position 3972 of SEQ ID NO: 916650
uuauucuuaugcucagaga

SEQ ID NO: 1173373 - RNA, 19 nt, Artificial Sequence
  Description of Artificial Sequence: Synthetic oligonucleotide
  Antisense strand to SEQ ID NO: 1173372
ucucugagcauaagaauaa

SEQ ID NO: 1173374 - RNA, 19 nt, Artificial Sequence
  Description of Artificial Sequence: Synthetic oligonucleotide
  Sense strand starting at position 3975 of SEQ ID NO: 916650
uucuuaugcucagagaagg

SEQ ID NO: 1173375 - RNA, 19 nt, Artificial Sequence
  Description of Artificial Sequence: Synthetic oligonucleotide
  Antisense strand to SEQ ID NO: 1173374
ccuucucugagcauaagaa

SEQ ID NO: 1173376 - RNA, 19 nt, Artificial Sequence
  Description of Artificial Sequence: Synthetic oligonucleotide
  Sense strand starting at position 37 of SEQ ID NO: 916651
ggucuuucccuccauguau

SEQ ID NO: 1173377 - RNA, 19 nt, Artificial Sequence
  Description of Artificial Sequence: Synthetic oligonucleotide
  Antisense strand to SEQ ID NO: 1173376
auacauggagggaaagacc

SEQ ID NO: 1173378 - RNA, 19 nt, Artificial Sequence
  Description of Artificial Sequence: Synthetic oligonucleotide
  Sense strand starting at position 465 of SEQ ID NO: 916651
guuaauauugacuacguca

SEQ ID NO: 1173379 - RNA, 19 nt, Artificial Sequence
  Description of Artificial Sequence: Synthetic oligonucleotide
  Antisense strand to SEQ ID NO: 1173378
ugacguagucaauauuaac

SEQ ID NO: 1173380 - RNA, 19 nt, Artificial Sequence
  Description of Artificial Sequence: Synthetic oligonucleotide
  Sense strand starting at position 477 of SEQ ID NO: 916651
uacgucauccuuuaggauu

SEQ ID NO: 1173381 - RNA, 19 nt, Artificial Sequence
  Description of Artificial Sequence: Synthetic oligonucleotide
  Antisense strand to SEQ ID NO: 1173380
aauccuaaaggaugacgua

SEQ ID NO: 1173382 - RNA, 19 nt, Artificial Sequence
  Description of Artificial Sequence: Synthetic oligonucleotide
  Sense strand starting at position 522 of SEQ ID NO: 916651
agacucugcuguuugaaau

SEQ ID NO: 1173383 - RNA, 19 nt, Artificial Sequence
  Description of Artificial Sequence: Synthetic oligonucleotide
  Antisense strand to SEQ ID NO: 1173382
auuucaaacagcagagucu

SEQ ID NO: 1173384 - RNA, 19 nt, Artificial Sequence
  Description of Artificial Sequence: Synthetic oligonucleotide
  Sense strand starting at position 532 of SEQ ID NO: 916651
guuugaaaucucuggucug

SEQ ID NO: 1173385 - RNA, 19 nt, Artificial Sequence
  Description of Artificial Sequence: Synthetic oligonucleotide
  Antisense strand to SEQ ID NO: 1173384
cagaccagagauuucaaac

SEQ ID NO: 1173386 - RNA, 19 nt, Artificial Sequence
  Description of Artificial Sequence: Synthetic oligonucleotide
  Sense strand starting at position 584 of SEQ ID NO: 916651
acuagaauggguuagccua

SEQ ID NO: 1173387 - RNA, 19 nt, Artificial Sequence
  Description of Artificial Sequence: Synthetic oligonucleotide
  Antisense strand to SEQ ID NO: 1173386
uaggcuaacccauucuagu

SEQ ID NO: 1173388 - RNA, 19 nt, Artificial Sequence
  Description of Artificial Sequence: Synthetic oligonucleotide
  Sense strand starting at position 947 of SEQ ID NO: 916651
agggaucagacuugcauca

SEQ ID NO: 1173389 - RNA, 19 nt, Artificial Sequence
  Description of Artificial Sequence: Synthetic oligonucleotide
  Antisense strand to SEQ ID NO: 1173388
ugaugcaagucugaucccu

SEQ ID NO: 1173390 - RNA, 19 nt, Artificial Sequence
  Description of Artificial Sequence: Synthetic oligonucleotide
  Sense strand starting at position 1053 of SEQ ID NO: 916651
guuuguucccuggaccaaa

SEQ ID NO: 1173391 - RNA, 19 nt, Artificial Sequence
  Description of Artificial Sequence: Synthetic oligonucleotide
  Antisense strand to SEQ ID NO: 1173390
uuugguccagggaacaaac

SEQ ID NO: 1173392 - RNA, 19 nt, Artificial Sequence
  Description of Artificial Sequence: Synthetic oligonucleotide
  Sense strand starting at position 1313 of SEQ ID NO: 916651
aucucaagguguuuauaga

SEQ ID NO: 1173393 - RNA, 19 nt, Artificial Sequence
  Description of Artificial Sequence: Synthetic oligonucleotide
  Antisense strand to SEQ ID NO: 1173392
ucuauaaacaccuugagau

SEQ ID NO: 1173394 - RNA, 19 nt, Artificial Sequence
  Description of Artificial Sequence: Synthetic oligonucleotide
  Sense strand starting at position 1346 of SEQ ID NO: 916651
aaauuaaguccgcaccagu

SEQ ID NO: 1173395 - RNA, 19 nt, Artificial Sequence
  Description of Artificial Sequence: Synthetic oligonucleotide
  Antisense strand to SEQ ID NO: 1173394
acuggugcggacuuaauuu

SEQ ID NO: 1173396 - RNA, 19 nt, Artificial Sequence
  Description of Artificial Sequence: Synthetic oligonucleotide
  Sense strand starting at position 1408 of SEQ ID NO: 916651
cuugaagugaguuaguuaa

SEQ ID NO: 1173397 - RNA, 19 nt, Artificial Sequence
  Description of Artificial Sequence: Synthetic oligonucleotide
  Antisense strand to SEQ ID NO: 1173396
uuaacuaacucacuucaag

SEQ ID NO: 1173398 - RNA, 19 nt, Artificial Sequence
  Description of Artificial Sequence: Synthetic oligonucleotide
  Sense strand starting at position 1418 of SEQ ID NO: 916651
guuaguuaacauugauaga

SEQ ID NO: 1173399 - RNA, 19 nt, Artificial Sequence
  Description of Artificial Sequence: Synthetic oligonucleotide
  Antisense strand to SEQ ID NO: 1173398
ucuaucaauguuaacuaac

SEQ ID NO: 1173400 - RNA, 19 nt, Artificial Sequence
  Description of Artificial Sequence: Synthetic oligonucleotide
  Sense strand starting at position 1471 of SEQ ID NO: 916651
ugacaaagcugaguaauag

SEQ ID NO: 1173401 - RNA, 19 nt, Artificial Sequence
  Description of Artificial Sequence: Synthetic oligonucleotide
  Antisense strand to SEQ ID NO: 1173400
cuauuacucagcuuuguca

SEQ ID NO: 1173402 - RNA, 19 nt, Artificial Sequence
  Description of Artificial Sequence: Synthetic oligonucleotide
  Sense strand starting at position 1477 of SEQ ID NO: 916651
agcugaguaauagguuaug

SEQ ID NO: 1173403 - RNA, 19 nt, Artificial Sequence
  Description of Artificial Sequence: Synthetic oligonucleotide
  Antisense strand to SEQ ID NO: 1173402
cauaaccuauuacucagcu

SEQ ID NO: 1173404 - RNA, 19 nt, Artificial Sequence
  Description of Artificial Sequence: Synthetic oligonucleotide
  Sense strand starting at position 1501 of SEQ ID NO: 916651
gagugcuuuccacaagcaa

SEQ ID NO: 1173405 - RNA, 19 nt, Artificial Sequence
  Description of Artificial Sequence: Synthetic oligonucleotide
  Antisense strand to SEQ ID NO: 1173404
uugcuuguggaaagcacuc

SEQ ID NO: 1173406 - RNA, 19 nt, Artificial Sequence
  Description of Artificial Sequence: Synthetic oligonucleotide
  Sense strand starting at position 2305 of SEQ ID NO: 916651
uggauuuccgcucgaugca

SEQ ID NO: 1173407 - RNA, 19 nt, Artificial Sequence
  Description of Artificial Sequence: Synthetic oligonucleotide
  Antisense strand to SEQ ID NO: 1173406
ugcaucgagcggaaaucca

SEQ ID NO: 1173408 - RNA, 19 nt, Artificial Sequence
  Description of Artificial Sequence: Synthetic oligonucleotide
  Sense strand starting at position 2405 of SEQ ID NO: 916651
gcgaguaguaugucugguu

SEQ ID NO: 1173409 - RNA, 19 nt, Artificial Sequence
  Description of Artificial Sequence: Synthetic oligonucleotide
  Antisense strand to SEQ ID NO: 1173408
aaccagacauacuacucgc

SEQ ID NO: 1173410 - RNA, 19 nt, Artificial Sequence
  Description of Artificial Sequence: Synthetic oligonucleotide
  Sense strand starting at position 2533 of SEQ ID NO: 916651
gaagauaacgugugaaaua

SEQ ID NO: 1173411 - RNA, 19 nt, Artificial Sequence
  Description of Artificial Sequence: Synthetic oligonucleotide
  Antisense strand to SEQ ID NO: 1173410
uauuucacacguuaucuuc

SEQ ID NO: 1173412 - RNA, 19 nt, Artificial Sequence
  Description of Artificial Sequence: Synthetic oligonucleotide
  Sense strand starting at position 2617 of SEQ ID NO: 916651
gaugcagucccagaaacau

SEQ ID NO: 1173413 - RNA, 19 nt, Artificial Sequence
  Description of Artificial Sequence: Synthetic oligonucleotide
  Antisense strand to SEQ ID NO: 1173412
auguuucugggacugcauc

SEQ ID NO: 1173414 - RNA, 19 nt, Artificial Sequence
  Description of Artificial Sequence: Synthetic oligonucleotide
  Sense strand starting at position 2634 of SEQ ID NO: 916651
auauguucuuccucauuga

SEQ ID NO: 1173415 - RNA, 19 nt, Artificial Sequence
  Description of Artificial Sequence: Synthetic oligonucleotide
  Antisense strand to SEQ ID NO: 1173414
ucaaugaggaagaacauau

SEQ ID NO: 1173416 - RNA, 19 nt, Artificial Sequence
  Description of Artificial Sequence: Synthetic oligonucleotide
  Sense strand starting at position 2637 of SEQ ID NO: 916651
uguucuuccucauugagag

SEQ ID NO: 1173417 - RNA, 19 nt, Artificial Sequence
  Description of Artificial Sequence: Synthetic oligonucleotide
  Antisense strand to SEQ ID NO: 1173416
cucucaaugaggaagaaca

SEQ ID NO: 1173418 - RNA, 19 nt, Artificial Sequence
  Description of Artificial Sequence: Synthetic oligonucleotide
  Sense strand starting at position 2827 of SEQ ID NO: 916651
auuacaggcucuuuguaga

SEQ ID NO: 1173419 - RNA, 19 nt, Artificial Sequence
  Description of Artificial Sequence: Synthetic oligonucleotide
  Antisense strand to SEQ ID NO: 1173418
ucuacaaagagccuguaau

SEQ ID NO: 1173420 - RNA, 19 nt, Artificial Sequence
  Description of Artificial Sequence: Synthetic oligonucleotide
  Sense strand starting at position 2832 of SEQ ID NO: 916651
aggcucuuuguagagagau

SEQ ID NO: 1173421 - RNA, 19 nt, Artificial Sequence
  Description of Artificial Sequence: Synthetic oligonucleotide
  Antisense strand to SEQ ID NO: 1173420
aucucucuacaaagagccu

SEQ ID NO: 1173422 - RNA, 19 nt, Artificial Sequence
  Description of Artificial Sequence: Synthetic oligonucleotide
  Sense strand starting at position 3046 of SEQ ID NO: 916651
acauguaucccugguauua

SEQ ID NO: 1173423 - RNA, 19 nt, Artificial Sequence
  Description of Artificial Sequence: Synthetic oligonucleotide
  Antisense strand to SEQ ID NO: 1173422
uaauaccagggauacaugu

SEQ ID NO: 1173424 - RNA, 19 nt, Artificial Sequence
  Description of Artificial Sequence: Synthetic oligonucleotide
  Sense strand starting at position 3149 of SEQ ID NO: 916651
gucugaaguguuuggagaa

SEQ ID NO: 1173425 - RNA, 19 nt, Artificial Sequence
  Description of Artificial Sequence: Synthetic oligonucleotide
  Antisense strand to SEQ ID NO: 1173424
uucuccaaacacuucagac

SEQ ID NO: 1173426 - RNA, 19 nt, Artificial Sequence
  Description of Artificial Sequence: Synthetic oligonucleotide
  Sense strand starting at position 3376 of SEQ ID NO: 916651
gagccauauggaugugagu

SEQ ID NO: 1173427 - RNA, 19 nt, Artificial Sequence
  Description of Artificial Sequence: Synthetic oligonucleotide
  Antisense strand to SEQ ID NO: 1173426
acucacauccauauggcuc

SEQ ID NO: 1173428 - RNA, 19 nt, Artificial Sequence
  Description of Artificial Sequence: Synthetic oligonucleotide
  Sense strand starting at position 3387 of SEQ ID NO: 916651
augugaguccuggaagcaa

SEQ ID NO: 1173429 - RNA, 19 nt, Artificial Sequence
  Description of Artificial Sequence: Synthetic oligonucleotide
  Antisense strand to SEQ ID NO: 1173428
uugcuuccaggacucacau

SEQ ID NO: 1173430 - RNA, 19 nt, Artificial Sequence
  Description of Artificial Sequence: Synthetic oligonucleotide
  Sense strand starting at position 3525 of SEQ ID NO: 916651
gggugaacugaagguaagu

SEQ ID NO: 1173431 - RNA, 19 nt, Artificial Sequence
  Description of Artificial Sequence: Synthetic oligonucleotide
  Antisense strand to SEQ ID NO: 1173430
acuuaccuucaguucaccc

SEQ ID NO: 1173432 - RNA, 19 nt, Artificial Sequence
  Description of Artificial Sequence: Synthetic oligonucleotide
  Sense strand starting at position 3531 of SEQ ID NO: 916651
acugaagguaagugaugau

SEQ ID NO: 1173433 - RNA, 19 nt, Artificial Sequence
  Description of Artificial Sequence: Synthetic oligonucleotide
  Antisense strand to SEQ ID NO: 1173432
aucaucacuuaccuucagu

SEQ ID NO: 1173434 - RNA, 19 nt, Artificial Sequence
  Description of Artificial Sequence: Synthetic oligonucleotide
  Sense strand starting at position 3550 of SEQ ID NO: 916651
agaaacguccagcaacauu

SEQ ID NO: 1173435 - RNA, 19 nt, Artificial Sequence
  Description of Artificial Sequence: Synthetic oligonucleotide
  Antisense strand to SEQ ID NO: 1173434
aauguugcuggacguuucu

SEQ ID NO: 1173436 - RNA, 19 nt, Artificial Sequence
  Description of Artificial Sequence: Synthetic oligonucleotide
  Sense strand starting at position 3624 of SEQ ID NO: 916651
agaaucugcugcuuugaga

SEQ ID NO: 1173437 - RNA, 19 nt, Artificial Sequence
  Description of Artificial Sequence: Synthetic oligonucleotide
  Antisense strand to SEQ ID NO: 1173436
ucucaaagcagcagauucu

SEQ ID NO: 1173438 - RNA, 19 nt, Artificial Sequence
  Description of Artificial Sequence: Synthetic oligonucleotide
  Sense strand starting at position 3631 of SEQ ID NO: 916651
gcugcuuugagagacaauu

SEQ ID NO: 1173439 - RNA, 19 nt, Artificial Sequence
  Description of Artificial Sequence: Synthetic oligonucleotide
  Antisense strand to SEQ ID NO: 1173438
aauugucucucaaagcagc

SEQ ID NO: 1173440 - RNA, 19 nt, Artificial Sequence
  Description of Artificial Sequence: Synthetic oligonucleotide
  Sense strand starting at position 3700 of SEQ ID NO: 916651
ccugaagagccaugacuua

SEQ ID NO: 1173441 - RNA, 19 nt, Artificial Sequence
  Description of Artificial Sequence: Synthetic oligonucleotide
  Antisense strand to SEQ ID NO: 1173440
uaagucauggcucuucagg

SEQ ID NO: 1173442 - RNA, 19 nt, Artificial Sequence
  Description of Artificial Sequence: Synthetic oligonucleotide
  Sense strand starting at position 3743 of SEQ ID NO: 916651
gauuccucaccaggagacu

SEQ ID NO: 1173443 - RNA, 19 nt, Artificial Sequence
  Description of Artificial Sequence: Synthetic oligonucleotide
  Antisense strand to SEQ ID NO: 1173442
agucuccuggugaggaauc

SEQ ID NO: 1173444 - RNA, 19 nt, Artificial Sequence
  Description of Artificial Sequence: Synthetic oligonucleotide
  Sense strand starting at position 3841 of SEQ ID NO: 916651
uguuguuggaauugauuau

SEQ ID NO: 1173445 - RNA, 19 nt, Artificial Sequence
  Description of Artificial Sequence: Synthetic oligonucleotide
  Antisense strand to SEQ ID NO: 1173444
auaaucaauuccaacaaca

SEQ ID NO: 1173446 - RNA, 19 nt, Artificial Sequence
  Description of Artificial Sequence: Synthetic oligonucleotide
  Sense strand starting at position 3847 of SEQ ID NO: 916651
uggaauugauuauccuguu

SEQ ID NO: 1173447 - RNA, 19 nt, Artificial Sequence
  Description of Artificial Sequence: Synthetic oligonucleotide
  Antisense strand to SEQ ID NO: 1173446
aacaggauaaucaauucca

SEQ ID NO: 1173448 - RNA, 19 nt, Artificial Sequence
  Description of Artificial Sequence: Synthetic oligonucleotide
  Sense strand starting at position 3874 of SEQ ID NO: 916651
accaauaauugggcacaua

SEQ ID NO: 1173449 - RNA, 19 nt, Artificial Sequence
  Description of Artificial Sequence: Synthetic oligonucleotide
  Antisense strand to SEQ ID NO: 1173448
uaugugcccaauuauuggu

SEQ ID NO: 1173450 - RNA, 19 nt, Artificial Sequence
  Description of Artificial Sequence: Synthetic oligonucleotide
  Sense strand starting at position 3893 of SEQ ID NO: 916651
gaaaucuuguuguuggauu

SEQ ID NO: 1173451 - RNA, 19 nt, Artificial Sequence
  Description of Artificial Sequence: Synthetic oligonucleotide
  Antisense strand to SEQ ID NO: 1173450
aauccaacaacaagauuuc

SEQ ID NO: 1173452 - RNA, 19 nt, Artificial Sequence
  Description of Artificial Sequence: Synthetic oligonucleotide
  Sense strand starting at position 3949 of SEQ ID NO: 916651
acagcuugugagugaggaa

SEQ ID NO: 1173453 - RNA, 19 nt, Artificial Sequence
  Description of Artificial Sequence: Synthetic oligonucleotide
  Antisense strand to SEQ ID NO: 1173452
uuccucacucacaagcugu

SEQ ID NO: 1173454 - RNA, 19 nt, Artificial Sequence
  Description of Artificial Sequence: Synthetic oligonucleotide
  Sense strand starting at position 3950 of SEQ ID NO: 916651
cagcuugugagugaggaaa

SEQ ID NO: 1173455 - RNA, 19 nt, Artificial Sequence
  Description of Artificial Sequence: Synthetic oligonucleotide
  Antisense strand to SEQ ID NO: 1173454
uuuccucacucacaagcug

SEQ ID NO: 1173456 - RNA, 19 nt, Artificial Sequence
  Description of Artificial Sequence: Synthetic oligonucleotide
  Sense strand starting at position 160 of SEQ ID NO: 916652
ggaucacgcacuugaucau

SEQ ID NO: 1173457 - RNA, 19 nt, Artificial Sequence
  Description of Artificial Sequence: Synthetic oligonucleotide
  Antisense strand to SEQ ID NO: 1173456
augaucaagugcgugaucc

SEQ ID NO: 1173458 - RNA, 19 nt, Artificial Sequence
  Description of Artificial Sequence: Synthetic oligonucleotide
  Sense strand starting at position 539 of SEQ ID NO: 916652
ccagcuaggccugauaguu

SEQ ID NO: 1173459 - RNA, 19 nt, Artificial Sequence
  Description of Artificial Sequence: Synthetic oligonucleotide
  Antisense strand to SEQ ID NO: 1173458
aacuaucaggccuagcugg

SEQ ID NO: 1173460 - RNA, 19 nt, Artificial Sequence
  Description of Artificial Sequence: Synthetic oligonucleotide
  Sense strand starting at position 703 of SEQ ID NO: 916652
ugcacuguuuauccaguga

SEQ ID NO: 1173461 - RNA, 19 nt, Artificial Sequence
  Description of Artificial Sequence: Synthetic oligonucleotide
  Antisense strand to SEQ ID NO: 1173460
ucacuggauaaacagugca

SEQ ID NO: 1173462 - RNA, 19 nt, Artificial Sequence
  Description of Artificial Sequence: Synthetic oligonucleotide
  Sense strand starting at position 707 of SEQ ID NO: 916652
cuguuuauccagugaauau

SEQ ID NO: 1173463 - RNA, 19 nt, Artificial Sequence
  Description of Artificial Sequence: Synthetic oligonucleotide
  Antisense strand to SEQ ID NO: 1173462
auauucacuggauaaacag

SEQ ID NO: 1173464 - RNA, 19 nt, Artificial Sequence
  Description of Artificial Sequence: Synthetic oligonucleotide
  Sense strand starting at position 750 of SEQ ID NO: 916652
ggcucuguccuaggagcua

SEQ ID NO: 1173465 - RNA, 19 nt, Artificial Sequence
  Description of Artificial Sequence: Synthetic oligonucleotide
  Antisense strand to SEQ ID NO: 1173464
uagcuccuaggacagagcc

SEQ ID NO: 1173466 - RNA, 19 nt, Artificial Sequence
  Description of Artificial Sequence: Synthetic oligonucleotide
  Sense strand starting at position 755 of SEQ ID NO: 916652
uguccuaggagcuagagau

SEQ ID NO: 1173467 - RNA, 19 nt, Artificial Sequence
  Description of Artificial Sequence: Synthetic oligonucleotide
  Antisense strand to SEQ ID NO: 1173466
aucucuagcuccuaggaca

SEQ ID NO: 1173468 - RNA, 19 nt, Artificial Sequence
  Description of Artificial Sequence: Synthetic oligonucleotide
  Sense strand starting at position 1556 of SEQ ID NO: 916652
augggagauuggccuaacu

SEQ ID NO: 1173469 - RNA, 19 nt, Artificial Sequence
  Description of Artificial Sequence: Synthetic oligonucleotide
  Antisense strand to SEQ ID NO: 1173468
aguuaggccaaucucccau

SEQ ID NO: 1173470 - RNA, 19 nt, Artificial Sequence
  Description of Artificial Sequence: Synthetic oligonucleotide
  Sense strand starting at position 1569 of SEQ ID NO: 916652
cuaacuacuuaguugagua

SEQ ID NO: 1173471 - RNA, 19 nt, Artificial Sequence
  Description of Artificial Sequence: Synthetic oligonucleotide
  Antisense strand to SEQ ID NO: 1173470
uacucaacuaaguaguuag

SEQ ID NO: 1173472 - RNA, 19 nt, Artificial Sequence
  Description of Artificial Sequence: Synthetic oligonucleotide
  Sense strand starting at position 1573 of SEQ ID NO: 916652
cuacuuaguugaguaaggu

SEQ ID NO: 1173473 - RNA, 19 nt, Artificial Sequence
  Description of Artificial Sequence: Synthetic oligonucleotide
  Antisense strand to SEQ ID NO: 1173472
accuuacucaacuaaguag

SEQ ID NO: 1173474 - RNA, 19 nt, Artificial Sequence
  Description of Artificial Sequence: Synthetic oligonucleotide
  Sense strand starting at position 1707 of SEQ ID NO: 916652
gcuuucuuagcucaggcaa

SEQ ID NO: 1173475 - RNA, 19 nt, Artificial Sequence
  Description of Artificial Sequence: Synthetic oligonucleotide
  Antisense strand to SEQ ID NO: 1173474
uugccugagcuaagaaagc

SEQ ID NO: 1173476 - RNA, 19 nt, Artificial Sequence
  Description of Artificial Sequence: Synthetic oligonucleotide
  Sense strand starting at position 1802 of SEQ ID NO: 916652
ggaaccucgaauugagacu

SEQ ID NO: 1173477 - RNA, 19 nt, Artificial Sequence
  Description of Artificial Sequence: Synthetic oligonucleotide
  Antisense strand to SEQ ID NO: 1173476
agucucaauucgagguucc

SEQ ID NO: 1173478 - RNA, 19 nt, Artificial Sequence
  Description of Artificial Sequence: Synthetic oligonucleotide
  Sense strand starting at position 1873 of SEQ ID NO: 916652
gugagaucuuagcucacuu

SEQ ID NO: 1173479 - RNA, 19 nt, Artificial Sequence
  Description of Artificial Sequence: Synthetic oligonucleotide
  Antisense strand to SEQ ID NO: 1173478
aagugagcuaagaucucac

SEQ ID NO: 1173480 - RNA, 19 nt, Artificial Sequence
  Description of Artificial Sequence: Synthetic oligonucleotide
  Sense strand starting at position 1877 of SEQ ID NO: 916652
gaucuuagcucacuuggga

SEQ ID NO: 1173481 - RNA, 19 nt, Artificial Sequence
  Description of Artificial Sequence: Synthetic oligonucleotide
  Antisense strand to SEQ ID NO: 1173480
ucccaagugagcuaagauc

SEQ ID NO: 1173482 - RNA, 19 nt, Artificial Sequence
  Description of Artificial Sequence: Synthetic oligonucleotide
  Sense strand starting at position 1916 of SEQ ID NO: 916652
gggagacuugccuaccugu

SEQ ID NO: 1173483 - RNA, 19 nt, Artificial Sequence
  Description of Artificial Sequence: Synthetic oligonucleotide
  Antisense strand to SEQ ID NO: 1173482
acagguaggcaagucuccc

SEQ ID NO: 1173484 - RNA, 19 nt, Artificial Sequence
  Description of Artificial Sequence: Synthetic oligonucleotide
  Sense strand starting at position 1964 of SEQ ID NO: 916652
ucuugcagucaaggugaga

SEQ ID NO: 1173485 - RNA, 19 nt, Artificial Sequence
  Description of Artificial Sequence: Synthetic oligonucleotide
  Antisense strand to SEQ ID NO: 1173484
ucucaccuugacugcaaga

SEQ ID NO: 1173486 - RNA, 19 nt, Artificial Sequence
  Description of Artificial Sequence: Synthetic oligonucleotide
  Sense strand starting at position 2013 of SEQ ID NO: 916652
gucuuauagucagucucca

SEQ ID NO: 1173487 - RNA, 19 nt, Artificial Sequence
  Description of Artificial Sequence: Synthetic oligonucleotide
  Antisense strand to SEQ ID NO: 1173486
uggagacugacuauaagac

SEQ ID NO: 1173488 - RNA, 19 nt, Artificial Sequence
  Description of Artificial Sequence: Synthetic oligonucleotide
  Sense strand starting at position 2091 of SEQ ID NO: 916652
ggccuugaaucugucuguu

SEQ ID NO: 1173489 - RNA, 19 nt, Artificial Sequence
  Description of Artificial Sequence: Synthetic oligonucleotide
  Antisense strand to SEQ ID NO: 1173488
aacagacagauucaaggcc

SEQ ID NO: 1173490 - RNA, 19 nt, Artificial Sequence
  Description of Artificial Sequence: Synthetic oligonucleotide
  Sense strand starting at position 2094 of SEQ ID NO: 916652
cuugaaucugucuguugca

SEQ ID NO: 1173491 - RNA, 19 nt, Artificial Sequence
  Description of Artificial Sequence: Synthetic oligonucleotide
  Antisense strand to SEQ ID NO: 1173490
ugcaacagacagauucaag

SEQ ID NO: 1173492 - RNA, 19 nt, Artificial Sequence
  Description of Artificial Sequence: Synthetic oligonucleotide
  Sense strand starting at position 2101 of SEQ ID NO: 916652
cugucuguugcaggaauga

SEQ ID NO: 1173493 - RNA, 19 nt, Artificial Sequence
  Description of Artificial Sequence: Synthetic oligonucleotide
  Antisense strand to SEQ ID NO: 1173492
ucauuccugcaacagacag

SEQ ID NO: 1173494 - RNA, 19 nt, Artificial Sequence
  Description of Artificial Sequence: Synthetic oligonucleotide
  Sense strand starting at position 2114 of SEQ ID NO: 916652
gaaugacccugacgauuug

SEQ ID NO: 1173495 - RNA, 19 nt, Artificial Sequence
  Description of Artificial Sequence: Synthetic oligonucleotide
  Antisense strand to SEQ ID NO: 1173494
caaaucgucagggucauuc

SEQ ID NO: 1173496 - RNA, 19 nt, Artificial Sequence
  Description of Artificial Sequence: Synthetic oligonucleotide
  Sense strand starting at position 2157 of SEQ ID NO: 916652
uguuaugcauuuguccuua

SEQ ID NO: 1173497 - RNA, 19 nt, Artificial Sequence
  Description of Artificial Sequence: Synthetic oligonucleotide
  Antisense strand to SEQ ID NO: 1173496
uaaggacaaaugcauaaca

SEQ ID NO: 1173498 - RNA, 19 nt, Artificial Sequence
  Description of Artificial Sequence: Synthetic oligonucleotide
  Sense strand starting at position 2161 of SEQ ID NO: 916652
augcauuuguccuuagcaa

SEQ ID NO: 1173499 - RNA, 19 nt, Artificial Sequence
  Description of Artificial Sequence: Synthetic oligonucleotide
  Antisense strand to SEQ ID NO: 1173498
uugcuaaggacaaaugcau

SEQ ID NO: 1173500 - RNA, 19 nt, Artificial Sequence
  Description of Artificial Sequence: Synthetic oligonucleotide
  Sense strand starting at position 2162 of SEQ ID NO: 916652
ugcauuuguccuuagcaac

SEQ ID NO: 1173501 - RNA, 19 nt, Artificial Sequence
  Description of Artificial Sequence: Synthetic oligonucleotide
  Antisense strand to SEQ ID NO: 1173500
guugcuaaggacaaaugca

SEQ ID NO: 1173502 - RNA, 19 nt, Artificial Sequence
  Description of Artificial Sequence: Synthetic oligonucleotide
  Sense strand starting at position 2190 of SEQ ID NO: 916652
aagggaugguuucuggagu

SEQ ID NO: 1173503 - RNA, 19 nt, Artificial Sequence
  Description of Artificial Sequence: Synthetic oligonucleotide
  Antisense strand to SEQ ID NO: 1173502
acuccagaaaccaucccuu

SEQ ID NO: 1173504 - RNA, 19 nt, Artificial Sequence
  Description of Artificial Sequence: Synthetic oligonucleotide
  Sense strand starting at position 2398 of SEQ ID NO: 916652
guggauugcaccugugauc

SEQ ID NO: 1173505 - RNA, 19 nt, Artificial Sequence
  Description of Artificial Sequence: Synthetic oligonucleotide
  Antisense strand to SEQ ID NO: 1173504
gaucacaggugcaauccac

SEQ ID NO: 1173506 - RNA, 19 nt, Artificial Sequence
  Description of Artificial Sequence: Synthetic oligonucleotide
  Sense strand starting at position 2472 of SEQ ID NO: 916652
ugcaaugaacagugauuga

SEQ ID NO: 1173507 - RNA, 19 nt, Artificial Sequence
  Description of Artificial Sequence: Synthetic oligonucleotide
  Antisense strand to SEQ ID NO: 1173506
ucaaucacuguucauugca

SEQ ID NO: 1173508 - RNA, 19 nt, Artificial Sequence
  Description of Artificial Sequence: Synthetic oligonucleotide
  Sense strand starting at position 2570 of SEQ ID NO: 916652
cucaaugucuuaucaagug

SEQ ID NO: 1173509 - RNA, 19 nt, Artificial Sequence
  Description of Artificial Sequence: Synthetic oligonucleotide
  Antisense strand to SEQ ID NO: 1173508
cacuugauaagacauugag

SEQ ID NO: 1173510 - RNA, 19 nt, Artificial Sequence
  Description of Artificial Sequence: Synthetic oligonucleotide
  Sense strand starting at position 2579 of SEQ ID NO: 916652
uuaucaagugccugaaucu

SEQ ID NO: 1173511 - RNA, 19 nt, Artificial Sequence
  Description of Artificial Sequence: Synthetic oligonucleotide
  Antisense strand to SEQ ID NO: 1173510
agauucaggcacuugauaa

SEQ ID NO: 1173512 - RNA, 19 nt, Artificial Sequence
  Description of Artificial Sequence: Synthetic oligonucleotide
  Sense strand starting at position 2603 of SEQ ID NO: 916652
cugggucugguugaauagu

SEQ ID NO: 1173513 - RNA, 19 nt, Artificial Sequence
  Description of Artificial Sequence: Synthetic oligonucleotide
  Antisense strand to SEQ ID NO: 1173512
acuauucaaccagacccag

SEQ ID NO: 1173514 - RNA, 19 nt, Artificial Sequence
  Description of Artificial Sequence: Synthetic oligonucleotide
  Sense strand starting at position 2656 of SEQ ID NO: 916652
gguucagagaguugcggua

SEQ ID NO: 1173515 - RNA, 19 nt, Artificial Sequence
  Description of Artificial Sequence: Synthetic oligonucleotide
  Antisense strand to SEQ ID NO: 1173514
uaccgcaacucucugaacc

SEQ ID NO: 1173516 - RNA, 19 nt, Artificial Sequence
  Description of Artificial Sequence: Synthetic oligonucleotide
  Sense strand starting at position 2719 of SEQ ID NO: 916652
caguuuagaucugucugau

SEQ ID NO: 1173517 - RNA, 19 nt, Artificial Sequence
  Description of Artificial Sequence: Synthetic oligonucleotide
  Antisense strand to SEQ ID NO: 1173516
aucagacagaucuaaacug

SEQ ID NO: 1173518 - RNA, 19 nt, Artificial Sequence
  Description of Artificial Sequence: Synthetic oligonucleotide
  Sense strand starting at position 2725 of SEQ ID NO: 916652
agaucugucugauuccaag

SEQ ID NO: 1173519 - RNA, 19 nt, Artificial Sequence
  Description of Artificial Sequence: Synthetic oligonucleotide
  Antisense strand to SEQ ID NO: 1173518
cuuggaaucagacagaucu

SEQ ID NO: 1173520 - RNA, 19 nt, Artificial Sequence
  Description of Artificial Sequence: Synthetic oligonucleotide
  Sense strand starting at position 2731 of SEQ ID NO: 916652
gucugauuccaaggcagag

SEQ ID NO: 1173521 - RNA, 19 nt, Artificial Sequence
  Description of Artificial Sequence: Synthetic oligonucleotide
  Antisense strand to SEQ ID NO: 1173520
cucugccuuggaaucagac

SEQ ID NO: 1173522 - RNA, 19 nt, Artificial Sequence
  Description of Artificial Sequence: Synthetic oligonucleotide
  Sense strand starting at position 2778 of SEQ ID NO: 916652
gcaguguggguuugugaga

SEQ ID NO: 1173523 - RNA, 19 nt, Artificial Sequence
  Description of Artificial Sequence: Synthetic oligonucleotide
  Antisense strand to SEQ ID NO: 1173522
ucucacaaacccacacugc

SEQ ID NO: 1173524 - RNA, 19 nt, Artificial Sequence
  Description of Artificial Sequence: Synthetic oligonucleotide
  Sense strand starting at position 2779 of SEQ ID NO: 916652
caguguggguuugugagaa

SEQ ID NO: 1173525 - RNA, 19 nt, Artificial Sequence
  Description of Artificial Sequence: Synthetic oligonucleotide
  Antisense strand to SEQ ID NO: 1173524
uucucacaaacccacacug

SEQ ID NO: 1173526 - RNA, 19 nt, Artificial Sequence
  Description of Artificial Sequence: Synthetic oligonucleotide
  Sense strand starting at position 2819 of SEQ ID NO: 916652
aaggccugagucugaauua

SEQ ID NO: 1173527 - RNA, 19 nt, Artificial Sequence
  Description of Artificial Sequence: Synthetic oligonucleotide
  Antisense strand to SEQ ID NO: 1173526
uaauucagacucaggccuu

SEQ ID NO: 1173528 - RNA, 19 nt, Artificial Sequence
  Description of Artificial Sequence: Synthetic oligonucleotide
  Sense strand starting at position 2826 of SEQ ID NO: 916652
gagucugaauuauagaaua

SEQ ID NO: 1173529 - RNA, 19 nt, Artificial Sequence
  Description of Artificial Sequence: Synthetic oligonucleotide
  Antisense strand to SEQ ID NO: 1173528
uauucuauaauucagacuc

SEQ ID NO: 1173530 - RNA, 19 nt, Artificial Sequence
  Description of Artificial Sequence: Synthetic oligonucleotide
  Sense strand starting at position 2850 of SEQ ID NO: 916652
gggcauuagaacugucaua

SEQ ID NO: 1173531 - RNA, 19 nt, Artificial Sequence
  Description of Artificial Sequence: Synthetic oligonucleotide
  Antisense strand to SEQ ID NO: 1173530
uaugacaguucuaaugccc

SEQ ID NO: 1173532 - RNA, 19 nt, Artificial Sequence
  Description of Artificial Sequence: Synthetic oligonucleotide
  Sense strand starting at position 3485 of SEQ ID NO: 916652
ccggccaaauaucuacaua

SEQ ID NO: 1173533 - RNA, 19 nt, Artificial Sequence
  Description of Artificial Sequence: Synthetic oligonucleotide
  Antisense strand to SEQ ID NO: 1173532
uauguagauauuuggccgg

SEQ ID NO: 1173534 - RNA, 19 nt, Artificial Sequence
  Description of Artificial Sequence: Synthetic oligonucleotide
  Sense strand starting at position 3824 of SEQ ID NO: 916652
ucucguguagcugggaauu

SEQ ID NO: 1173535 - RNA, 19 nt, Artificial Sequence
  Description of Artificial Sequence: Synthetic oligonucleotide
  Antisense strand to SEQ ID NO: 1173534
aauucccagcuacacgaga

SEQ ID NO: 1173536 - RNA, 19 nt, Artificial Sequence
  Description of Artificial Sequence: Synthetic oligonucleotide
  Sense strand starting at position 106 of SEQ ID NO: 916653
aguuucuuacaagguggua

SEQ ID NO: 1173537 - RNA, 19 nt, Artificial Sequence
  Description of Artificial Sequence: Synthetic oligonucleotide
  Antisense strand to SEQ ID NO: 1173536
uaccaccuuguaagaaacu

SEQ ID NO: 1173538 - RNA, 19 nt, Artificial Sequence
  Description of Artificial Sequence: Synthetic oligonucleotide
  Sense strand starting at position 118 of SEQ ID NO: 916653
ggugguaccuucuugaaua

SEQ ID NO: 1173539 - RNA, 19 nt, Artificial Sequence
  Description of Artificial Sequence: Synthetic oligonucleotide
  Antisense strand to SEQ ID NO: 1173538
uauucaagaagguaccacc

SEQ ID NO: 1173540 - RNA, 19 nt, Artificial Sequence
  Description of Artificial Sequence: Synthetic oligonucleotide
  Sense strand starting at position 325 of SEQ ID NO: 916653
ugagcugucucccuagacu

SEQ ID NO: 1173541 - RNA, 19 nt, Artificial Sequence
  Description of Artificial Sequence: Synthetic oligonucleotide
  Antisense strand to SEQ ID NO: 1173540
agucuagggagacagcuca

SEQ ID NO: 1173542 - RNA, 19 nt, Artificial Sequence
  Description of Artificial Sequence: Synthetic oligonucleotide
  Sense strand starting at position 328 of SEQ ID NO: 916653
gcugucucccuagacuaga

SEQ ID NO: 1173543 - RNA, 19 nt, Artificial Sequence
  Description of Artificial Sequence: Synthetic oligonucleotide
  Antisense strand to SEQ ID NO: 1173542
ucuagucuagggagacagc

SEQ ID NO: 1173544 - RNA, 19 nt, Artificial Sequence
  Description of Artificial Sequence: Synthetic oligonucleotide
  Sense strand starting at position 358 of SEQ ID NO: 916653
aggccaccuccauaguuua

SEQ ID NO: 1173545 - RNA, 19 nt, Artificial Sequence
  Description of Artificial Sequence: Synthetic oligonucleotide
  Antisense strand to SEQ ID NO: 1173544
uaaacuauggagguggccu

SEQ ID NO: 1173546 - RNA, 19 nt, Artificial Sequence
  Description of Artificial Sequence: Synthetic oligonucleotide
  Sense strand starting at position 366 of SEQ ID NO: 916653
uccauaguuuaggcaaaga

SEQ ID NO: 1173547 - RNA, 19 nt, Artificial Sequence
  Description of Artificial Sequence: Synthetic oligonucleotide
  Antisense strand to SEQ ID NO: 1173546
ucuuugccuaaacuaugga

SEQ ID NO: 1173548 - RNA, 19 nt, Artificial Sequence
  Description of Artificial Sequence: Synthetic oligonucleotide
  Sense strand starting at position 414 of SEQ ID NO: 916653
ggguacaucugaucccaca

SEQ ID NO: 1173549 - RNA, 19 nt, Artificial Sequence
  Description of Artificial Sequence: Synthetic oligonucleotide
  Antisense strand to SEQ ID NO: 1173548
ugugggaucagauguaccc

SEQ ID NO: 1173550 - RNA, 19 nt, Artificial Sequence
  Description of Artificial Sequence: Synthetic oligonucleotide
  Sense strand starting at position 450 of SEQ ID NO: 916653
auugaagagugauaacuaa

SEQ ID NO: 1173551 - RNA, 19 nt, Artificial Sequence
  Description of Artificial Sequence: Synthetic oligonucleotide
  Antisense strand to SEQ ID NO: 1173550
uuaguuaucacucuucaau

SEQ ID NO: 1173552 - RNA, 19 nt, Artificial Sequence
  Description of Artificial Sequence: Synthetic oligonucleotide
  Sense strand starting at position 746 of SEQ ID NO: 916653
gauguagauuugcaugaau

SEQ ID NO: 1173553 - RNA, 19 nt, Artificial Sequence
  Description of Artificial Sequence: Synthetic oligonucleotide
  Antisense strand to SEQ ID NO: 1173552
auucaugcaaaucuacauc

SEQ ID NO: 1173554 - RNA, 19 nt, Artificial Sequence
  Description of Artificial Sequence: Synthetic oligonucleotide
  Sense strand starting at position 839 of SEQ ID NO: 916653
ucuuauuugcuguguuauc

SEQ ID NO: 1173555 - RNA, 19 nt, Artificial Sequence
  Description of Artificial Sequence: Synthetic oligonucleotide
  Antisense strand to SEQ ID NO: 1173554
gauaacacagcaaauaaga

SEQ ID NO: 1173556 - RNA, 19 nt, Artificial Sequence
  Description of Artificial Sequence: Synthetic oligonucleotide
  Sense strand starting at position 848 of SEQ ID NO: 916653
cuguguuaucuuuaugcga

SEQ ID NO: 1173557 - RNA, 19 nt, Artificial Sequence
  Description of Artificial Sequence: Synthetic oligonucleotide
  Antisense strand to SEQ ID NO: 1173556
ucgcauaaagauaacacag

SEQ ID NO: 1173558 - RNA, 19 nt, Artificial Sequence
  Description of Artificial Sequence: Synthetic oligonucleotide
  Sense strand starting at position 908 of SEQ ID NO: 916653
ggaauauaauccuauuuag

SEQ ID NO: 1173559 - RNA, 19 nt, Artificial Sequence
  Description of Artificial Sequence: Synthetic oligonucleotide
  Antisense strand to SEQ ID NO: 1173558
cuaaauaggauuauauucc

SEQ ID NO: 1173560 - RNA, 19 nt, Artificial Sequence
  Description of Artificial Sequence: Synthetic oligonucleotide
  Sense strand starting at position 1021 of SEQ ID NO: 916653
ccgagucaggcguucgaga

SEQ ID NO: 1173561 - RNA, 19 nt, Artificial Sequence
  Description of Artificial Sequence: Synthetic oligonucleotide
  Antisense strand to SEQ ID NO: 1173560
ucucgaacgccugacucgg

SEQ ID NO: 1173562 - RNA, 19 nt, Artificial Sequence
  Description of Artificial Sequence: Synthetic oligonucleotide
  Sense strand starting at position 1223 of SEQ ID NO: 916653
gagcgacucugucucaaca

SEQ ID NO: 1173563 - RNA, 19 nt, Artificial Sequence
  Description of Artificial Sequence: Synthetic oligonucleotide
  Antisense strand to SEQ ID NO: 1173562
uguugagacagagucgcuc

SEQ ID NO: 1173564 - RNA, 19 nt, Artificial Sequence
  Description of Artificial Sequence: Synthetic oligonucleotide
  Sense strand starting at position 1274 of SEQ ID NO: 916653
cugccaggcacguaucaaa

SEQ ID NO: 1173565 - RNA, 19 nt, Artificial Sequence
  Description of Artificial Sequence: Synthetic oligonucleotide
  Antisense strand to SEQ ID NO: 1173564
uuugauacgugccuggcag

SEQ ID NO: 1173566 - RNA, 19 nt, Artificial Sequence
  Description of Artificial Sequence: Synthetic oligonucleotide
  Sense strand starting at position 1293 of SEQ ID NO: 916653
cugacaaucgugcaaucgu

SEQ ID NO: 1173567 - RNA, 19 nt, Artificial Sequence
  Description of Artificial Sequence: Synthetic oligonucleotide
  Antisense strand to SEQ ID NO: 1173566
acgauugcacgauugucag

SEQ ID NO: 1173568 - RNA, 19 nt, Artificial Sequence
  Description of Artificial Sequence: Synthetic oligonucleotide
  Sense strand starting at position 1439 of SEQ ID NO: 916653
ggcucugugggccaagaau

SEQ ID NO: 1173569 - RNA, 19 nt, Artificial Sequence
  Description of Artificial Sequence: Synthetic oligonucleotide
  Antisense strand to SEQ ID NO: 1173568
auucuuggcccacagagcc

SEQ ID NO: 1173570 - RNA, 19 nt, Artificial Sequence
  Description of Artificial Sequence: Synthetic oligonucleotide
  Sense strand starting at position 2114 of SEQ ID NO: 916653
gcugcacuucugggaaaug

SEQ ID NO: 1173571 - RNA, 19 nt, Artificial Sequence
  Description of Artificial Sequence: Synthetic oligonucleotide
  Antisense strand to SEQ ID NO: 1173570
cauuucccagaagugcagc

SEQ ID NO: 1173572 - RNA, 19 nt, Artificial Sequence
  Description of Artificial Sequence: Synthetic oligonucleotide
  Sense strand starting at position 2394 of SEQ ID NO: 916653
augcgcuguagcucagauu

SEQ ID NO: 1173573 - RNA, 19 nt, Artificial Sequence
  Description of Artificial Sequence: Synthetic oligonucleotide
  Antisense strand to SEQ ID NO: 1173572
aaucugagcuacagcgcau

SEQ ID NO: 1173574 - RNA, 19 nt, Artificial Sequence
  Description of Artificial Sequence: Synthetic oligonucleotide
  Sense strand starting at position 2395 of SEQ ID NO: 916653
ugcgcuguagcucagauuu

SEQ ID NO: 1173575 - RNA, 19 nt, Artificial Sequence
  Description of Artificial Sequence: Synthetic oligonucleotide
  Antisense strand to SEQ ID NO: 1173574
aaaucugagcuacagcgca

SEQ ID NO: 1173576 - RNA, 19 nt, Artificial Sequence
  Description of Artificial Sequence: Synthetic oligonucleotide
  Sense strand starting at position 2559 of SEQ ID NO: 916653
aaaguuaugccuuggguga

SEQ ID NO: 1173577 - RNA, 19 nt, Artificial Sequence
  Description of Artificial Sequence: Synthetic oligonucleotide
  Antisense strand to SEQ ID NO: 1173576
ucacccaaggcauaacuuu

SEQ ID NO: 1173578 - RNA, 19 nt, Artificial Sequence
  Description of Artificial Sequence: Synthetic oligonucleotide
  Sense strand starting at position 2560 of SEQ ID NO: 916653
aaguuaugccuugggugau

SEQ ID NO: 1173579 - RNA, 19 nt, Artificial Sequence
  Description of Artificial Sequence: Synthetic oligonucleotide
  Antisense strand to SEQ ID NO: 1173578
aucacccaaggcauaacuu

SEQ ID NO: 1173580 - RNA, 19 nt, Artificial Sequence
  Description of Artificial Sequence: Synthetic oligonucleotide
  Sense strand starting at position 2563 of SEQ ID NO: 916653
uuaugccuugggugauauu

SEQ ID NO: 1173581 - RNA, 19 nt, Artificial Sequence
  Description of Artificial Sequence: Synthetic oligonucleotide
  Antisense strand to SEQ ID NO: 1173580
aauaucacccaaggcauaa

SEQ ID NO: 1173582 - RNA, 19 nt, Artificial Sequence
  Description of Artificial Sequence: Synthetic oligonucleotide
  Sense strand starting at position 2675 of SEQ ID NO: 916653
uccagauaccagugauaua

SEQ ID NO: 1173583 - RNA, 19 nt, Artificial Sequence
  Description of Artificial Sequence: Synthetic oligonucleotide
  Antisense strand to SEQ ID NO: 1173582
uauaucacugguaucugga

SEQ ID NO: 1173584 - RNA, 19 nt, Artificial Sequence
  Description of Artificial Sequence: Synthetic oligonucleotide
  Sense strand starting at position 2678 of SEQ ID NO: 916653
agauaccagugauauaaag

SEQ ID NO: 1173585 - RNA, 19 nt, Artificial Sequence
  Description of Artificial Sequence: Synthetic oligonucleotide
  Antisense strand to SEQ ID NO: 1173584
cuuuauaucacugguaucu

SEQ ID NO: 1173586 - RNA, 19 nt, Artificial Sequence
  Description of Artificial Sequence: Synthetic oligonucleotide
  Sense strand starting at position 3099 of SEQ ID NO: 916653
gccauucuacuguguuaga

SEQ ID NO: 1173587 - RNA, 19 nt, Artificial Sequence
  Description of Artificial Sequence: Synthetic oligonucleotide
  Antisense strand to SEQ ID NO: 1173586
ucuaacacaguagaauggc

SEQ ID NO: 1173588 - RNA, 19 nt, Artificial Sequence
  Description of Artificial Sequence: Synthetic oligonucleotide
  Sense strand starting at position 3108 of SEQ ID NO: 916653
cuguguuagagcuauguuu

SEQ ID NO: 1173589 - RNA, 19 nt, Artificial Sequence
  Description of Artificial Sequence: Synthetic oligonucleotide
  Antisense strand to SEQ ID NO: 1173588
aaacauagcucuaacacag

SEQ ID NO: 1173590 - RNA, 19 nt, Artificial Sequence
  Description of Artificial Sequence: Synthetic oligonucleotide
  Sense strand starting at position 3110 of SEQ ID NO: 916653
guguuagagcuauguuuaa

SEQ ID NO: 1173591 - RNA, 19 nt, Artificial Sequence
  Description of Artificial Sequence: Synthetic oligonucleotide
  Antisense strand to SEQ ID NO: 1173590
uuaaacauagcucuaacac

SEQ ID NO: 1173592 - RNA, 19 nt, Artificial Sequence
  Description of Artificial Sequence: Synthetic oligonucleotide
  Sense strand starting at position 3217 of SEQ ID NO: 916653
agcuuaaccuaggugucaa

SEQ ID NO: 1173593 - RNA, 19 nt, Artificial Sequence
  Description of Artificial Sequence: Synthetic oligonucleotide
  Antisense strand to SEQ ID NO: 1173592
uugacaccuagguuaagcu

SEQ ID NO: 1173594 - RNA, 19 nt, Artificial Sequence
  Description of Artificial Sequence: Synthetic oligonucleotide
  Sense strand starting at position 3218 of SEQ ID NO: 916653
gcuuaaccuaggugucaag

SEQ ID NO: 1173595 - RNA, 19 nt, Artificial Sequence
  Description of Artificial Sequence: Synthetic oligonucleotide
  Antisense strand to SEQ ID NO: 1173594
cuugacaccuagguuaagc

SEQ ID NO: 1173596 - RNA, 19 nt, Artificial Sequence
  Description of Artificial Sequence: Synthetic oligonucleotide
  Sense strand starting at position 3251 of SEQ ID NO: 916653
gagaauaagcaguaccuuu

SEQ ID NO: 1173597 - RNA, 19 nt, Artificial Sequence
  Description of Artificial Sequence: Synthetic oligonucleotide
  Antisense strand to SEQ ID NO: 1173596
aaagguacugcuuauucuc

SEQ ID NO: 1173598 - RNA, 19 nt, Artificial Sequence
  Description of Artificial Sequence: Synthetic oligonucleotide
  Sense strand starting at position 3610 of SEQ ID NO: 916653
cgaagacaucgaggacauu

SEQ ID NO: 1173599 - RNA, 19 nt, Artificial Sequence
  Description of Artificial Sequence: Synthetic oligonucleotide
  Antisense strand to SEQ ID NO: 1173598
aauguccucgaugucuucg

SEQ ID NO: 1173600 - RNA, 19 nt, Artificial Sequence
  Description of Artificial Sequence: Synthetic oligonucleotide
  Sense strand starting at position 3765 of SEQ ID NO: 916653
uuguguuaugaugggaaga

SEQ ID NO: 1173601 - RNA, 19 nt, Artificial Sequence
  Description of Artificial Sequence: Synthetic oligonucleotide
  Antisense strand to SEQ ID NO: 1173600
ucuucccaucauaacacaa

SEQ ID NO: 1173602 - RNA, 19 nt, Artificial Sequence
  Description of Artificial Sequence: Synthetic oligonucleotide
  Sense strand starting at position 3766 of SEQ ID NO: 916653
uguguuaugaugggaagag

SEQ ID NO: 1173603 - RNA, 19 nt, Artificial Sequence
  Description of Artificial Sequence: Synthetic oligonucleotide
  Antisense strand to SEQ ID NO: 1173602
cucuucccaucauaacaca

SEQ ID NO: 1173604 - RNA, 19 nt, Artificial Sequence
  Description of Artificial Sequence: Synthetic oligonucleotide
  Sense strand starting at position 3829 of SEQ ID NO: 916653
ugagucauauugcccuaua

SEQ ID NO: 1173605 - RNA, 19 nt, Artificial Sequence
  Description of Artificial Sequence: Synthetic oligonucleotide
  Antisense strand to SEQ ID NO: 1173604
uauagggcaauaugacuca

SEQ ID NO: 1173606 - RNA, 19 nt, Artificial Sequence
  Description of Artificial Sequence: Synthetic oligonucleotide
  Sense strand starting at position 3832 of SEQ ID NO: 916653
gucauauugcccuauacca

SEQ ID NO: 1173607 - RNA, 19 nt, Artificial Sequence
  Description of Artificial Sequence: Synthetic oligonucleotide
  Antisense strand to SEQ ID NO: 1173606
ugguauagggcaauaugac

SEQ ID NO: 1173608 - RNA, 19 nt, Artificial Sequence
  Description of Artificial Sequence: Synthetic oligonucleotide
  Sense strand starting at position 3890 of SEQ ID NO: 916653
aaguguucugaugaaguaa

SEQ ID NO: 1173609 - RNA, 19 nt, Artificial Sequence
  Description of Artificial Sequence: Synthetic oligonucleotide
  Antisense strand to SEQ ID NO: 1173608
uuacuucaucagaacacuu

SEQ ID NO: 1173610 - RNA, 19 nt, Artificial Sequence
  Description of Artificial Sequence: Synthetic oligonucleotide
  Sense strand starting at position 3912 of SEQ ID NO: 916653
gcauauaaaugccuaaugu

SEQ ID NO: 1173611 - RNA, 19 nt, Artificial Sequence
  Description of Artificial Sequence: Synthetic oligonucleotide
  Antisense strand to SEQ ID NO: 1173610
acauuaggcauuuauaugc

SEQ ID NO: 1173612 - RNA, 19 nt, Artificial Sequence
  Description of Artificial Sequence: Synthetic oligonucleotide
  Sense strand starting at position 3925 of SEQ ID NO: 916653
uaaugugaaccuugaggca

SEQ ID NO: 1173613 - RNA, 19 nt, Artificial Sequence
  Description of Artificial Sequence: Synthetic oligonucleotide
  Antisense strand to SEQ ID NO: 1173612
ugccucaagguucacauua

SEQ ID NO: 1173614 - RNA, 19 nt, Artificial Sequence
  Description of Artificial Sequence: Synthetic oligonucleotide
  Sense strand starting at position 3965 of SEQ ID NO: 916653
aucaaauauucguugacuc

SEQ ID NO: 1173615 - RNA, 19 nt, Artificial Sequence
  Description of Artificial Sequence: Synthetic oligonucleotide
  Antisense strand to SEQ ID NO: 1173614
gagucaacgaauauuugau

SEQ ID NO: 1173616 - RNA, 19 nt, Artificial Sequence
  Description of Artificial Sequence: Synthetic oligonucleotide
  Sense strand starting at position 45 of SEQ ID NO: 916654
ggaagaacuuuccauccag

SEQ ID NO: 1173617 - RNA, 19 nt, Artificial Sequence
  Description of Artificial Sequence: Synthetic oligonucleotide
  Antisense strand to SEQ ID NO: 1173616
cuggauggaaaguucuucc

SEQ ID NO: 1173618 - RNA, 19 nt, Artificial Sequence
  Description of Artificial Sequence: Synthetic oligonucleotide
  Sense strand starting at position 89 of SEQ ID NO: 916654
cuuccauguuuaccauagu

SEQ ID NO: 1173619 - RNA, 19 nt, Artificial Sequence
  Description of Artificial Sequence: Synthetic oligonucleotide
  Antisense strand to SEQ ID NO: 1173618
acuaugguaaacauggaag

SEQ ID NO: 1173620 - RNA, 19 nt, Artificial Sequence
  Description of Artificial Sequence: Synthetic oligonucleotide
  Sense strand starting at position 92 of SEQ ID NO: 916654
ccauguuuaccauagucaa

SEQ ID NO: 1173621 - RNA, 19 nt, Artificial Sequence
  Description of Artificial Sequence: Synthetic oligonucleotide
  Antisense strand to SEQ ID NO: 1173620
uugacuaugguaaacaugg

SEQ ID NO: 1173622 - RNA, 19 nt, Artificial Sequence
  Description of Artificial Sequence: Synthetic oligonucleotide
  Sense strand starting at position 188 of SEQ ID NO: 916654
ccugaacaguucugucaug

SEQ ID NO: 1173623 - RNA, 19 nt, Artificial Sequence
  Description of Artificial Sequence: Synthetic oligonucleotide
  Antisense strand to SEQ ID NO: 1173622
caugacagaacuguucagg

SEQ ID NO: 1173624 - RNA, 19 nt, Artificial Sequence
  Description of Artificial Sequence: Synthetic oligonucleotide
  Sense strand starting at position 198 of SEQ ID NO: 916654
ucugucauguccucuugau

SEQ ID NO: 1173625 - RNA, 19 nt, Artificial Sequence
  Description of Artificial Sequence: Synthetic oligonucleotide
  Antisense strand to SEQ ID NO: 1173624
aucaagaggacaugacaga

SEQ ID NO: 1173626 - RNA, 19 nt, Artificial Sequence
  Description of Artificial Sequence: Synthetic oligonucleotide
  Sense strand starting at position 210 of SEQ ID NO: 916654
ucuugauucugcuaugcag

SEQ ID NO: 1173627 - RNA, 19 nt, Artificial Sequence
  Description of Artificial Sequence: Synthetic oligonucleotide
  Antisense strand to SEQ ID NO: 1173626
cugcauagcagaaucaaga

SEQ ID NO: 1173628 - RNA, 19 nt, Artificial Sequence
  Description of Artificial Sequence: Synthetic oligonucleotide
  Sense strand starting at position 237 of SEQ ID NO: 916654
acaugagugagucagcaaa

SEQ ID NO: 1173629 - RNA, 19 nt, Artificial Sequence
  Description of Artificial Sequence: Synthetic oligonucleotide
  Antisense strand to SEQ ID NO: 1173628
uuugcugacucacucaugu

SEQ ID NO: 1173630 - RNA, 19 nt, Artificial Sequence
  Description of Artificial Sequence: Synthetic oligonucleotide
  Sense strand starting at position 239 of SEQ ID NO: 916654
augagugagucagcaaaga

SEQ ID NO: 1173631 - RNA, 19 nt, Artificial Sequence
  Description of Artificial Sequence: Synthetic oligonucleotide
  Antisense strand to SEQ ID NO: 1173630
ucuuugcugacucacucau

SEQ ID NO: 1173632 - RNA, 19 nt, Artificial Sequence
  Description of Artificial Sequence: Synthetic oligonucleotide
  Sense strand starting at position 356 of SEQ ID NO: 916654
cugggagccuucccagauu

SEQ ID NO: 1173633 - RNA, 19 nt, Artificial Sequence
  Description of Artificial Sequence: Synthetic oligonucleotide
  Antisense strand to SEQ ID NO: 1173632
aaucugggaaggcucccag

SEQ ID NO: 1173634 - RNA, 19 nt, Artificial Sequence
  Description of Artificial Sequence: Synthetic oligonucleotide
  Sense strand starting at position 390 of SEQ ID NO: 916654
cccugugucugugcaaaua

SEQ ID NO: 1173635 - RNA, 19 nt, Artificial Sequence
  Description of Artificial Sequence: Synthetic oligonucleotide
  Antisense strand to SEQ ID NO: 1173634
uauuugcacagacacaggg

SEQ ID NO: 1173636 - RNA, 19 nt, Artificial Sequence
  Description of Artificial Sequence: Synthetic oligonucleotide
  Sense strand starting at position 504 of SEQ ID NO: 916654
gccaauggaugccaguaaa

SEQ ID NO: 1173637 - RNA, 19 nt, Artificial Sequence
  Description of Artificial Sequence: Synthetic oligonucleotide
  Antisense strand to SEQ ID NO: 1173636
uuuacuggcauccauuggc

SEQ ID NO: 1173638 - RNA, 19 nt, Artificial Sequence
  Description of Artificial Sequence: Synthetic oligonucleotide
  Sense strand starting at position 623 of SEQ ID NO: 916654
cuagcaucaucuggacacu

SEQ ID NO: 1173639 - RNA, 19 nt, Artificial Sequence
  Description of Artificial Sequence: Synthetic oligonucleotide
  Antisense strand to SEQ ID NO: 1173638
aguguccagaugaugcuag

SEQ ID NO: 1173640 - RNA, 19 nt, Artificial Sequence
  Description of Artificial Sequence: Synthetic oligonucleotide
  Sense strand starting at position 777 of SEQ ID NO: 916654
uguguuucccacugaguag

SEQ ID NO: 1173641 - RNA, 19 nt, Artificial Sequence
  Description of Artificial Sequence: Synthetic oligonucleotide
  Antisense strand to SEQ ID NO: 1173640
cuacucagugggaaacaca

SEQ ID NO: 1173642 - RNA, 19 nt, Artificial Sequence
  Description of Artificial Sequence: Synthetic oligonucleotide
  Sense strand starting at position 778 of SEQ ID NO: 916654
guguuucccacugaguaga

SEQ ID NO: 1173643 - RNA, 19 nt, Artificial Sequence
  Description of Artificial Sequence: Synthetic oligonucleotide
  Antisense strand to SEQ ID NO: 1173642
ucuacucagugggaaacac

SEQ ID NO: 1173644 - RNA, 19 nt, Artificial Sequence
  Description of Artificial Sequence: Synthetic oligonucleotide
  Sense strand starting at position 822 of SEQ ID NO: 916654
ggccaaccaucaggguaau

SEQ ID NO: 1173645 - RNA, 19 nt, Artificial Sequence
  Description of Artificial Sequence: Synthetic oligonucleotide
  Antisense strand to SEQ ID NO: 1173644
auuacccugaugguuggcc

SEQ ID NO: 1173646 - RNA, 19 nt, Artificial Sequence
  Description of Artificial Sequence: Synthetic oligonucleotide
  Sense strand starting at position 828 of SEQ ID NO: 916654
ccaucaggguaaugaauaa

SEQ ID NO: 1173647 - RNA, 19 nt, Artificial Sequence
  Description of Artificial Sequence: Synthetic oligonucleotide
  Antisense strand to SEQ ID NO: 1173646
uuauucauuacccugaugg

SEQ ID NO: 1173648 - RNA, 19 nt, Artificial Sequence
  Description of Artificial Sequence: Synthetic oligonucleotide
  Sense strand starting at position 954 of SEQ ID NO: 916654
ggaggaguuaggugagacu

SEQ ID NO: 1173649 - RNA, 19 nt, Artificial Sequence
  Description of Artificial Sequence: Synthetic oligonucleotide
  Antisense strand to SEQ ID NO: 1173648
agucucaccuaacuccucc

SEQ ID NO: 1173650 - RNA, 19 nt, Artificial Sequence
  Description of Artificial Sequence: Synthetic oligonucleotide
  Sense strand starting at position 963 of SEQ ID NO: 916654
aggugagacucacacauca

SEQ ID NO: 1173651 - RNA, 19 nt, Artificial Sequence
  Description of Artificial Sequence: Synthetic oligonucleotide
  Antisense strand to SEQ ID NO: 1173650
ugaugugugagucucaccu

SEQ ID NO: 1173652 - RNA, 19 nt, Artificial Sequence
  Description of Artificial Sequence: Synthetic oligonucleotide
  Sense strand starting at position 1003 of SEQ ID NO: 916654
caauaaagauggugagcau

SEQ ID NO: 1173653 - RNA, 19 nt, Artificial Sequence
  Description of Artificial Sequence: Synthetic oligonucleotide
  Antisense strand to SEQ ID NO: 1173652
augcucaccaucuuuauug

SEQ ID NO: 1173654 - RNA, 19 nt, Artificial Sequence
  Description of Artificial Sequence: Synthetic oligonucleotide
  Sense strand starting at position 1093 of SEQ ID NO: 916654
gcccuagcaggauacuaaa

SEQ ID NO: 1173655 - RNA, 19 nt, Artificial Sequence
  Description of Artificial Sequence: Synthetic oligonucleotide
  Antisense strand to SEQ ID NO: 1173654
uuuaguauccugcuagggc

SEQ ID NO: 1173656 - RNA, 19 nt, Artificial Sequence
  Description of Artificial Sequence: Synthetic oligonucleotide
  Sense strand starting at position 1102 of SEQ ID NO: 916654
ggauacuaaaugggucuau

SEQ ID NO: 1173657 - RNA, 19 nt, Artificial Sequence
  Description of Artificial Sequence: Synthetic oligonucleotide
  Antisense strand to SEQ ID NO: 1173656
auagacccauuuaguaucc

SEQ ID NO: 1173658 - RNA, 19 nt, Artificial Sequence
  Description of Artificial Sequence: Synthetic oligonucleotide
  Sense strand starting at position 1111 of SEQ ID NO: 916654
augggucuaugugacuuua

SEQ ID NO: 1173659 - RNA, 19 nt, Artificial Sequence
  Description of Artificial Sequence: Synthetic oligonucleotide
  Antisense strand to SEQ ID NO: 1173658
uaaagucacauagacccau

SEQ ID NO: 1173660 - RNA, 19 nt, Artificial Sequence
  Description of Artificial Sequence: Synthetic oligonucleotide
  Sense strand starting at position 1242 of SEQ ID NO: 916654
gaauuagucuccugcugag

SEQ ID NO: 1173661 - RNA, 19 nt, Artificial Sequence
  Description of Artificial Sequence: Synthetic oligonucleotide
  Antisense strand to SEQ ID NO: 1173660
cucagcaggagacuaauuc

SEQ ID NO: 1173662 - RNA, 19 nt, Artificial Sequence
  Description of Artificial Sequence: Synthetic oligonucleotide
  Sense strand starting at position 2053 of SEQ ID NO: 916654
ggcugagccuuuccgggau

SEQ ID NO: 1173663 - RNA, 19 nt, Artificial Sequence
  Description of Artificial Sequence: Synthetic oligonucleotide
  Antisense strand to SEQ ID NO: 1173662
aucccggaaaggcucagcc

SEQ ID NO: 1173664 - RNA, 19 nt, Artificial Sequence
  Description of Artificial Sequence: Synthetic oligonucleotide
  Sense strand starting at position 2057 of SEQ ID NO: 916654
gagccuuuccgggauggga

SEQ ID NO: 1173665 - RNA, 19 nt, Artificial Sequence
  Description of Artificial Sequence: Synthetic oligonucleotide
  Antisense strand to SEQ ID NO: 1173664
ucccaucccggaaaggcuc

SEQ ID NO: 1173666 - RNA, 19 nt, Artificial Sequence
  Description of Artificial Sequence: Synthetic oligonucleotide
  Sense strand starting at position 2342 of SEQ ID NO: 916654
ccagcugauuuauguaauu

SEQ ID NO: 1173667 - RNA, 19 nt, Artificial Sequence
  Description of Artificial Sequence: Synthetic oligonucleotide
  Antisense strand to SEQ ID NO: 1173666
aauuacauaaaucagcugg

SEQ ID NO: 1173668 - RNA, 19 nt, Artificial Sequence
  Description of Artificial Sequence: Synthetic oligonucleotide
  Sense strand starting at position 2517 of SEQ ID NO: 916654
acaguuaucuaaugcaguc

SEQ ID NO: 1173669 - RNA, 19 nt, Artificial Sequence
  Description of Artificial Sequence: Synthetic oligonucleotide
  Antisense strand to SEQ ID NO: 1173668
gacugcauuagauaacugu

SEQ ID NO: 1173670 - RNA, 19 nt, Artificial Sequence
  Description of Artificial Sequence: Synthetic oligonucleotide
  Sense strand starting at position 3297 of SEQ ID NO: 916654
aguccuguugugggaaacu

SEQ ID NO: 1173671 - RNA, 19 nt, Artificial Sequence
  Description of Artificial Sequence: Synthetic oligonucleotide
  Antisense strand to SEQ ID NO: 1173670
aguuucccacaacaggacu

SEQ ID NO: 1173672 - RNA, 19 nt, Artificial Sequence
  Description of Artificial Sequence: Synthetic oligonucleotide
  Sense strand starting at position 3327 of SEQ ID NO: 916654
agaccaauaugagagaaca

SEQ ID NO: 1173673 - RNA, 19 nt, Artificial Sequence
  Description of Artificial Sequence: Synthetic oligonucleotide
  Antisense strand to SEQ ID NO: 1173672
uguucucucauauuggucu

SEQ ID NO: 1173674 - RNA, 19 nt, Artificial Sequence
  Description of Artificial Sequence: Synthetic oligonucleotide
  Sense strand starting at position 3461 of SEQ ID NO: 916654
aguaguuaaucauauagug

SEQ ID NO: 1173675 - RNA, 19 nt, Artificial Sequence
  Description of Artificial Sequence: Synthetic oligonucleotide
  Antisense strand to SEQ ID NO: 1173674
cacuauaugauuaacuacu

SEQ ID NO: 1173676 - RNA, 19 nt, Artificial Sequence
  Description of Artificial Sequence: Synthetic oligonucleotide
  Sense strand starting at position 3543 of SEQ ID NO: 916654
gcuaaauagagagguuugu

SEQ ID NO: 1173677 - RNA, 19 nt, Artificial Sequence
  Description of Artificial Sequence: Synthetic oligonucleotide
  Antisense strand to SEQ ID NO: 1173676
acaaaccucucuauuuagc

SEQ ID NO: 1173678 - RNA, 19 nt, Artificial Sequence
  Description of Artificial Sequence: Synthetic oligonucleotide
  Sense strand starting at position 3708 of SEQ ID NO: 916654
uucggacagcguuaucuua

SEQ ID NO: 1173679 - RNA, 19 nt, Artificial Sequence
  Description of Artificial Sequence: Synthetic oligonucleotide
  Antisense strand to SEQ ID NO: 1173678
uaagauaacgcuguccgaa

SEQ ID NO: 1173680 - RNA, 19 nt, Artificial Sequence
  Description of Artificial Sequence: Synthetic oligonucleotide
  Sense strand starting at position 3710 of SEQ ID NO: 916654
cggacagcguuaucuuaua

SEQ ID NO: 1173681 - RNA, 19 nt, Artificial Sequence
  Description of Artificial Sequence: Synthetic oligonucleotide
  Antisense strand to SEQ ID NO: 1173680
uauaagauaacgcuguccg

SEQ ID NO: 1173682 - RNA, 19 nt, Artificial Sequence
  Description of Artificial Sequence: Synthetic oligonucleotide
  Sense strand starting at position 3816 of SEQ ID NO: 916654
cuuacuucucuuggaguga

SEQ ID NO: 1173683 - RNA, 19 nt, Artificial Sequence
  Description of Artificial Sequence: Synthetic oligonucleotide
  Antisense strand to SEQ ID NO: 1173682
ucacuccaagagaaguaag

SEQ ID NO: 1173684 - RNA, 19 nt, Artificial Sequence
  Description of Artificial Sequence: Synthetic oligonucleotide
  Sense strand starting at position 3817 of SEQ ID NO: 916654
uuacuucucuuggagugaa

SEQ ID NO: 1173685 - RNA, 19 nt, Artificial Sequence
  Description of Artificial Sequence: Synthetic oligonucleotide
  Antisense strand to SEQ ID NO: 1173684
uucacuccaagagaaguaa

SEQ ID NO: 1173686 - RNA, 19 nt, Artificial Sequence
  Description of Artificial Sequence: Synthetic oligonucleotide
  Sense strand starting at position 3820 of SEQ ID NO: 916654
cuucucuuggagugaauau

SEQ ID NO: 1173687 - RNA, 19 nt, Artificial Sequence
  Description of Artificial Sequence: Synthetic oligonucleotide
  Antisense strand to SEQ ID NO: 1173686
auauucacuccaagagaag

SEQ ID NO: 1173688 - RNA, 19 nt, Artificial Sequence
  Description of Artificial Sequence: Synthetic oligonucleotide
  Sense strand starting at position 3829 of SEQ ID NO: 916654
gagugaauauauguaguac

SEQ ID NO: 1173689 - RNA, 19 nt, Artificial Sequence
  Description of Artificial Sequence: Synthetic oligonucleotide
  Antisense strand to SEQ ID NO: 1173688
guacuacauauauucacuc

SEQ ID NO: 1173690 - RNA, 19 nt, Artificial Sequence
  Description of Artificial Sequence: Synthetic oligonucleotide
  Sense strand starting at position 3830 of SEQ ID NO: 916654
agugaauauauguaguacu

SEQ ID NO: 1173691 - RNA, 19 nt, Artificial Sequence
  Description of Artificial Sequence: Synthetic oligonucleotide
  Antisense strand to SEQ ID NO: 1173690
aguacuacauauauucacu

SEQ ID NO: 1173692 - RNA, 19 nt, Artificial Sequence
  Description of Artificial Sequence: Synthetic oligonucleotide
  Sense strand starting at position 3935 of SEQ ID NO: 916654
gcuacagugaguugcacua

SEQ ID NO: 1173693 - RNA, 19 nt, Artificial Sequence
  Description of Artificial Sequence: Synthetic oligonucleotide
  Antisense strand to SEQ ID NO: 1173692
uagugcaacucacuguagc

SEQ ID NO: 1173694 - RNA, 19 nt, Artificial Sequence
  Description of Artificial Sequence: Synthetic oligonucleotide
  Sense strand starting at position 3967 of SEQ ID NO: 916654
agagcaagaaguugucaaa

SEQ ID NO: 1173695 - RNA, 19 nt, Artificial Sequence
  Description of Artificial Sequence: Synthetic oligonucleotide
  Antisense strand to SEQ ID NO: 1173694
uuugacaacuucuugcucu

SEQ ID NO: 1173696 - RNA, 19 nt, Artificial Sequence
  Description of Artificial Sequence: Synthetic oligonucleotide
  Sense strand starting at position 23 of SEQ ID NO: 916655
gcucuccaucuugauugua

SEQ ID NO: 1173697 - RNA, 19 nt, Artificial Sequence
  Description of Artificial Sequence: Synthetic oligonucleotide
  Antisense strand to SEQ ID NO: 1173696
uacaaucaagauggagagc

SEQ ID NO: 1173698 - RNA, 19 nt, Artificial Sequence
  Description of Artificial Sequence: Synthetic oligonucleotide
  Sense strand starting at position 181 of SEQ ID NO: 916655
ugaauauaacugcaccgaa

SEQ ID NO: 1173699 - RNA, 19 nt, Artificial Sequence
  Description of Artificial Sequence: Synthetic oligonucleotide
  Antisense strand to SEQ ID NO: 1173698
uucggugcaguuauauuca

SEQ ID NO: 1173700 - RNA, 19 nt, Artificial Sequence
  Description of Artificial Sequence: Synthetic oligonucleotide
  Sense strand starting at position 184 of SEQ ID NO: 916655
auauaacugcaccgaauau

SEQ ID NO: 1173701 - RNA, 19 nt, Artificial Sequence
  Description of Artificial Sequence: Synthetic oligonucleotide
  Antisense strand to SEQ ID NO: 1173700
auauucggugcaguuauau

SEQ ID NO: 1173702 - RNA, 19 nt, Artificial Sequence
  Description of Artificial Sequence: Synthetic oligonucleotide
  Sense strand starting at position 211 of SEQ ID NO: 916655
ucaaguaaccucugaguuu

SEQ ID NO: 1173703 - RNA, 19 nt, Artificial Sequence
  Description of Artificial Sequence: Synthetic oligonucleotide
  Antisense strand to SEQ ID NO: 1173702
aaacucagagguuacuuga

SEQ ID NO: 1173704 - RNA, 19 nt, Artificial Sequence
  Description of Artificial Sequence: Synthetic oligonucleotide
  Sense strand starting at position 254 of SEQ ID NO: 916655
ugaagucauccugaaucuu

SEQ ID NO: 1173705 - RNA, 19 nt, Artificial Sequence
  Description of Artificial Sequence: Synthetic oligonucleotide
  Antisense strand to SEQ ID NO: 1173704
aagauucaggaugacuuca

SEQ ID NO: 1173706 - RNA, 19 nt, Artificial Sequence
  Description of Artificial Sequence: Synthetic oligonucleotide
  Sense strand starting at position 306 of SEQ ID NO: 916655
aggaaauucucacagaaag

SEQ ID NO: 1173707 - RNA, 19 nt, Artificial Sequence
  Description of Artificial Sequence: Synthetic oligonucleotide
  Antisense strand to SEQ ID NO: 1173706
cuuucugugagaauuuccu

SEQ ID NO: 1173708 - RNA, 19 nt, Artificial Sequence
  Description of Artificial Sequence: Synthetic oligonucleotide
  Sense strand starting at position 454 of SEQ ID NO: 916655
guuacuaugcuaugguaaa

SEQ ID NO: 1173709 - RNA, 19 nt, Artificial Sequence
  Description of Artificial Sequence: Synthetic oligonucleotide
  Antisense strand to SEQ ID NO: 1173708
uuuaccauagcauaguaac

SEQ ID NO: 1173710 - RNA, 19 nt, Artificial Sequence
  Description of Artificial Sequence: Synthetic oligonucleotide
  Sense strand starting at position 536 of SEQ ID NO: 916655
ugaagucauuacuuagaac

SEQ ID NO: 1173711 - RNA, 19 nt, Artificial Sequence
  Description of Artificial Sequence: Synthetic oligonucleotide
  Antisense strand to SEQ ID NO: 1173710
guucuaaguaaugacuuca

SEQ ID NO: 1173712 - RNA, 19 nt, Artificial Sequence
  Description of Artificial Sequence: Synthetic oligonucleotide
  Sense strand starting at position 652 of SEQ ID NO: 916655
uucucucuuccagaaaggu

SEQ ID NO: 1173713 - RNA, 19 nt, Artificial Sequence
  Description of Artificial Sequence: Synthetic oligonucleotide
  Antisense strand to SEQ ID NO: 1173712
accuuucuggaagagagaa

SEQ ID NO: 1173714 - RNA, 19 nt, Artificial Sequence
  Description of Artificial Sequence: Synthetic oligonucleotide
  Sense strand starting at position 661 of SEQ ID NO: 916655
ccagaaaggugagcaaauu

SEQ ID NO: 1173715 - RNA, 19 nt, Artificial Sequence
  Description of Artificial Sequence: Synthetic oligonucleotide
  Antisense strand to SEQ ID NO: 1173714
aauuugcucaccuuucugg

SEQ ID NO: 1173716 - RNA, 19 nt, Artificial Sequence
  Description of Artificial Sequence: Synthetic oligonucleotide
  Sense strand starting at position 855 of SEQ ID NO: 916655
cagaaauaccauggugagu

SEQ ID NO: 1173717 - RNA, 19 nt, Artificial Sequence
  Description of Artificial Sequence: Synthetic oligonucleotide
  Antisense strand to SEQ ID NO: 1173716
acucaccaugguauuucug

SEQ ID NO: 1173718 - RNA, 19 nt, Artificial Sequence
  Description of Artificial Sequence: Synthetic oligonucleotide
  Sense strand starting at position 860 of SEQ ID NO: 916655
auaccauggugaguguaua

SEQ ID NO: 1173719 - RNA, 19 nt, Artificial Sequence
  Description of Artificial Sequence: Synthetic oligonucleotide
  Antisense strand to SEQ ID NO: 1173718
uauacacucaccaugguau

SEQ ID NO: 1173720 - RNA, 19 nt, Artificial Sequence
  Description of Artificial Sequence: Synthetic oligonucleotide
  Sense strand starting at position 861 of SEQ ID NO: 916655
uaccauggugaguguauau

SEQ ID NO: 1173721 - RNA, 19 nt, Artificial Sequence
  Description of Artificial Sequence: Synthetic oligonucleotide
  Antisense strand to SEQ ID NO: 1173720
auauacacucaccauggua

SEQ ID NO: 1173722 - RNA, 19 nt, Artificial Sequence
  Description of Artificial Sequence: Synthetic oligonucleotide
  Sense strand starting at position 868 of SEQ ID NO: 916655
gugaguguauauuugguau

SEQ ID NO: 1173723 - RNA, 19 nt, Artificial Sequence
  Description of Artificial Sequence: Synthetic oligonucleotide
  Antisense strand to SEQ ID NO: 1173722
auaccaaauauacacucac

SEQ ID NO: 1173724 - RNA, 19 nt, Artificial Sequence
  Description of Artificial Sequence: Synthetic oligonucleotide
  Sense strand starting at position 940 of SEQ ID NO: 916655
cuaggacacuuccauuuga

SEQ ID NO: 1173725 - RNA, 19 nt, Artificial Sequence
  Description of Artificial Sequence: Synthetic oligonucleotide
  Antisense strand to SEQ ID NO: 1173724
ucaaauggaaguguccuag

SEQ ID NO: 1173726 - RNA, 19 nt, Artificial Sequence
  Description of Artificial Sequence: Synthetic oligonucleotide
  Sense strand starting at position 1133 of SEQ ID NO: 916655
accagaaugcagggaaagu

SEQ ID NO: 1173727 - RNA, 19 nt, Artificial Sequence
  Description of Artificial Sequence: Synthetic oligonucleotide
  Antisense strand to SEQ ID NO: 1173726
acuuucccugcauucuggu

SEQ ID NO: 1173728 - RNA, 19 nt, Artificial Sequence
  Description of Artificial Sequence: Synthetic oligonucleotide
  Sense strand starting at position 1283 of SEQ ID NO: 916655
agaagcucucaauggauau

SEQ ID NO: 1173729 - RNA, 19 nt, Artificial Sequence
  Description of Artificial Sequence: Synthetic oligonucleotide
  Antisense strand to SEQ ID NO: 1173728
auauccauugagagcuucu

SEQ ID NO: 1173730 - RNA, 19 nt, Artificial Sequence
  Description of Artificial Sequence: Synthetic oligonucleotide
  Sense strand starting at position 1287 of SEQ ID NO: 916655
gcucucaauggauaucuca

SEQ ID NO: 1173731 - RNA, 19 nt, Artificial Sequence
  Description of Artificial Sequence: Synthetic oligonucleotide
  Antisense strand to SEQ ID NO: 1173730
ugagauauccauugagagc

SEQ ID NO: 1173732 - RNA, 19 nt, Artificial Sequence
  Description of Artificial Sequence: Synthetic oligonucleotide
  Sense strand starting at position 1424 of SEQ ID NO: 916655
ugauacucaucagcuguua

SEQ ID NO: 1173733 - RNA, 19 nt, Artificial Sequence
  Description of Artificial Sequence: Synthetic oligonucleotide
  Antisense strand to SEQ ID NO: 1173732
uaacagcugaugaguauca

SEQ ID NO: 1173734 - RNA, 19 nt, Artificial Sequence
  Description of Artificial Sequence: Synthetic oligonucleotide
  Sense strand starting at position 1538 of SEQ ID NO: 916655
agaugugguaccugcacua

SEQ ID NO: 1173735 - RNA, 19 nt, Artificial Sequence
  Description of Artificial Sequence: Synthetic oligonucleotide
  Antisense strand to SEQ ID NO: 1173734
uagugcagguaccacaucu

SEQ ID NO: 1173736 - RNA, 19 nt, Artificial Sequence
  Description of Artificial Sequence: Synthetic oligonucleotide
  Sense strand starting at position 1567 of SEQ ID NO: 916655
gaaacuguuuggcuucuua

SEQ ID NO: 1173737 - RNA, 19 nt, Artificial Sequence
  Description of Artificial Sequence: Synthetic oligonucleotide
  Antisense strand to SEQ ID NO: 1173736
uaagaagccaaacaguuuc

SEQ ID NO: 1173738 - RNA, 19 nt, Artificial Sequence
  Description of Artificial Sequence: Synthetic oligonucleotide
  Sense strand starting at position 1623 of SEQ ID NO: 916655
acagcuuucccugaugucu

SEQ ID NO: 1173739 - RNA, 19 nt, Artificial Sequence
  Description of Artificial Sequence: Synthetic oligonucleotide
  Antisense strand to SEQ ID NO: 1173738
agacaucagggaaagcugu

SEQ ID NO: 1173740 - RNA, 19 nt, Artificial Sequence
  Description of Artificial Sequence: Synthetic oligonucleotide
  Sense strand starting at position 1749 of SEQ ID NO: 916655
cucugagagccugaguaua

SEQ ID NO: 1173741 - RNA, 19 nt, Artificial Sequence
  Description of Artificial Sequence: Synthetic oligonucleotide
  Antisense strand to SEQ ID NO: 1173740
uauacucaggcucucagag

SEQ ID NO: 1173742 - RNA, 19 nt, Artificial Sequence
  Description of Artificial Sequence: Synthetic oligonucleotide
  Sense strand starting at position 1751 of SEQ ID NO: 916655
cugagagccugaguauaaa

SEQ ID NO: 1173743 - RNA, 19 nt, Artificial Sequence
  Description of Artificial Sequence: Synthetic oligonucleotide
  Antisense strand to SEQ ID NO: 1173742
uuuauacucaggcucucag

SEQ ID NO: 1173744 - RNA, 19 nt, Artificial Sequence
  Description of Artificial Sequence: Synthetic oligonucleotide
  Sense strand starting at position 1773 of SEQ ID NO: 916655
acaccauugugauuccuga

SEQ ID NO: 1173745 - RNA, 19 nt, Artificial Sequence
  Description of Artificial Sequence: Synthetic oligonucleotide
  Antisense strand to SEQ ID NO: 1173744
ucaggaaucacaauggugu

SEQ ID NO: 1173746 - RNA, 19 nt, Artificial Sequence
  Description of Artificial Sequence: Synthetic oligonucleotide
  Sense strand starting at position 1803 of SEQ ID NO: 916655
gcugucacucuugaaacuu

SEQ ID NO: 1173747 - RNA, 19 nt, Artificial Sequence
  Description of Artificial Sequence: Synthetic oligonucleotide
  Antisense strand to SEQ ID NO: 1173746
aaguuucaagagugacagc

SEQ ID NO: 1173748 - RNA, 19 nt, Artificial Sequence
  Description of Artificial Sequence: Synthetic oligonucleotide
  Sense strand starting at position 1830 of SEQ ID NO: 916655
uucucuagaucguugacaa

SEQ ID NO: 1173749 - RNA, 19 nt, Artificial Sequence
  Description of Artificial Sequence: Synthetic oligonucleotide
  Antisense strand to SEQ ID NO: 1173748
uugucaacgaucuagagaa

SEQ ID NO: 1173750 - RNA, 19 nt, Artificial Sequence
  Description of Artificial Sequence: Synthetic oligonucleotide
  Sense strand starting at position 1831 of SEQ ID NO: 916655
ucucuagaucguugacaac

SEQ ID NO: 1173751 - RNA, 19 nt, Artificial Sequence
  Description of Artificial Sequence: Synthetic oligonucleotide
  Antisense strand to SEQ ID NO: 1173750
guugucaacgaucuagaga

SEQ ID NO: 1173752 - RNA, 19 nt, Artificial Sequence
  Description of Artificial Sequence: Synthetic oligonucleotide
  Sense strand starting at position 1892 of SEQ ID NO: 916655
ucaggaggcuaaguucuua

SEQ ID NO: 1173753 - RNA, 19 nt, Artificial Sequence
  Description of Artificial Sequence: Synthetic oligonucleotide
  Antisense strand to SEQ ID NO: 1173752
uaagaacuuagccuccuga

SEQ ID NO: 1173754 - RNA, 19 nt, Artificial Sequence
  Description of Artificial Sequence: Synthetic oligonucleotide
  Sense strand starting at position 1984 of SEQ ID NO: 916655
cugaauucccauugugaua

SEQ ID NO: 1173755 - RNA, 19 nt, Artificial Sequence
  Description of Artificial Sequence: Synthetic oligonucleotide
  Antisense strand to SEQ ID NO: 1173754
uaucacaaugggaauucag

SEQ ID NO: 1173756 - RNA, 19 nt, Artificial Sequence
  Description of Artificial Sequence: Synthetic oligonucleotide
  Sense strand starting at position 1995 of SEQ ID NO: 916655
uugugauaucaucagaggu

SEQ ID NO: 1173757 - RNA, 19 nt, Artificial Sequence
  Description of Artificial Sequence: Synthetic oligonucleotide
  Antisense strand to SEQ ID NO: 1173756
accucugaugauaucacaa

SEQ ID NO: 1173758 - RNA, 19 nt, Artificial Sequence
  Description of Artificial Sequence: Synthetic oligonucleotide
  Sense strand starting at position 3119 of SEQ ID NO: 916655
ccugguaacuaucuugauu

SEQ ID NO: 1173759 - RNA, 19 nt, Artificial Sequence
  Description of Artificial Sequence: Synthetic oligonucleotide
  Antisense strand to SEQ ID NO: 1173758
aaucaagauaguuaccagg

SEQ ID NO: 1173760 - RNA, 19 nt, Artificial Sequence
  Description of Artificial Sequence: Synthetic oligonucleotide
  Sense strand starting at position 3133 of SEQ ID NO: 916655
ugauuugacuuguuugugu

SEQ ID NO: 1173761 - RNA, 19 nt, Artificial Sequence
  Description of Artificial Sequence: Synthetic oligonucleotide
  Antisense strand to SEQ ID NO: 1173760
acacaaacaagucaaauca

SEQ ID NO: 1173762 - RNA, 19 nt, Artificial Sequence
  Description of Artificial Sequence: Synthetic oligonucleotide
  Sense strand starting at position 3135 of SEQ ID NO: 916655
auuugacuuguuuguguuu

SEQ ID NO: 1173763 - RNA, 19 nt, Artificial Sequence
  Description of Artificial Sequence: Synthetic oligonucleotide
  Antisense strand to SEQ ID NO: 1173762
aaacacaaacaagucaaau

SEQ ID NO: 1173764 - RNA, 19 nt, Artificial Sequence
  Description of Artificial Sequence: Synthetic oligonucleotide
  Sense strand starting at position 3150 of SEQ ID NO: 916655
guuucuugggaaugguuau

SEQ ID NO: 1173765 - RNA, 19 nt, Artificial Sequence
  Description of Artificial Sequence: Synthetic oligonucleotide
  Antisense strand to SEQ ID NO: 1173764
auaaccauucccaagaaac

SEQ ID NO: 1173766 - RNA, 19 nt, Artificial Sequence
  Description of Artificial Sequence: Synthetic oligonucleotide
  Sense strand starting at position 3151 of SEQ ID NO: 916655
uuucuugggaaugguuauu

SEQ ID NO: 1173767 - RNA, 19 nt, Artificial Sequence
  Description of Artificial Sequence: Synthetic oligonucleotide
  Antisense strand to SEQ ID NO: 1173766
aauaaccauucccaagaaa

SEQ ID NO: 1173768 - RNA, 19 nt, Artificial Sequence
  Description of Artificial Sequence: Synthetic oligonucleotide
  Sense strand starting at position 3179 of SEQ ID NO: 916655
uugagcaaucuguagagau

SEQ ID NO: 1173769 - RNA, 19 nt, Artificial Sequence
  Description of Artificial Sequence: Synthetic oligonucleotide
  Antisense strand to SEQ ID NO: 1173768
aucucuacagauugcucaa

SEQ ID NO: 1173770 - RNA, 19 nt, Artificial Sequence
  Description of Artificial Sequence: Synthetic oligonucleotide
  Sense strand starting at position 3183 of SEQ ID NO: 916655
gcaaucuguagagaugucu

SEQ ID NO: 1173771 - RNA, 19 nt, Artificial Sequence
  Description of Artificial Sequence: Synthetic oligonucleotide
  Antisense strand to SEQ ID NO: 1173770
agacaucucuacagauugc

SEQ ID NO: 1173772 - RNA, 19 nt, Artificial Sequence
  Description of Artificial Sequence: Synthetic oligonucleotide
  Sense strand starting at position 3303 of SEQ ID NO: 916655
caugguggugaccaucaua

SEQ ID NO: 1173773 - RNA, 19 nt, Artificial Sequence
  Description of Artificial Sequence: Synthetic oligonucleotide
  Antisense strand to SEQ ID NO: 1173772
uaugauggucaccaccaug

SEQ ID NO: 1173774 - RNA, 19 nt, Artificial Sequence
  Description of Artificial Sequence: Synthetic oligonucleotide
  Sense strand starting at position 3329 of SEQ ID NO: 916655
agacauuuguuagaaacua

SEQ ID NO: 1173775 - RNA, 19 nt, Artificial Sequence
  Description of Artificial Sequence: Synthetic oligonucleotide
  Antisense strand to SEQ ID NO: 1173774
uaguuucuaacaaaugucu

SEQ ID NO: 1173776 - RNA, 19 nt, Artificial Sequence
  Description of Artificial Sequence: Synthetic oligonucleotide
  Sense strand starting at position 54 of SEQ ID NO: 916656
gcgugaauguuaccaaauc

SEQ ID NO: 1173777 - RNA, 19 nt, Artificial Sequence
  Description of Artificial Sequence: Synthetic oligonucleotide
  Antisense strand to SEQ ID NO: 1173776
gauuugguaacauucacgc

SEQ ID NO: 1173778 - RNA, 19 nt, Artificial Sequence
  Description of Artificial Sequence: Synthetic oligonucleotide
  Sense strand starting at position 137 of SEQ ID NO: 916656
auuuaaaugucauaucguc

SEQ ID NO: 1173779 - RNA, 19 nt, Artificial Sequence
  Description of Artificial Sequence: Synthetic oligonucleotide
  Antisense strand to SEQ ID NO: 1173778
gacgauaugacauuuaaau

SEQ ID NO: 1173780 - RNA, 19 nt, Artificial Sequence
  Description of Artificial Sequence: Synthetic oligonucleotide
  Sense strand starting at position 196 of SEQ ID NO: 916656
ggccaucaaaguuggaaua

SEQ ID NO: 1173781 - RNA, 19 nt, Artificial Sequence
  Description of Artificial Sequence: Synthetic oligonucleotide
  Antisense strand to SEQ ID NO: 1173780
uauuccaacuuugauggcc

SEQ ID NO: 1173782 - RNA, 19 nt, Artificial Sequence
  Description of Artificial Sequence: Synthetic oligonucleotide
  Sense strand starting at position 197 of SEQ ID NO: 916656
gccaucaaaguuggaauau

SEQ ID NO: 1173783 - RNA, 19 nt, Artificial Sequence
  Description of Artificial Sequence: Synthetic oligonucleotide
  Antisense strand to SEQ ID NO: 1173782
auauuccaacuuugauggc

SEQ ID NO: 1173784 - RNA, 19 nt, Artificial Sequence
  Description of Artificial Sequence: Synthetic oligonucleotide
  Sense strand starting at position 206 of SEQ ID NO: 916656
guuggaauaugcguguaaa

SEQ ID NO: 1173785 - RNA, 19 nt, Artificial Sequence
  Description of Artificial Sequence: Synthetic oligonucleotide
  Antisense strand to SEQ ID NO: 1173784
uuuacacgcauauuccaac

SEQ ID NO: 1173786 - RNA, 19 nt, Artificial Sequence
  Description of Artificial Sequence: Synthetic oligonucleotide
  Sense strand starting at position 268 of SEQ ID NO: 916656
ugagaaacaugauagugua

SEQ ID NO: 1173787 - RNA, 19 nt, Artificial Sequence
  Description of Artificial Sequence: Synthetic oligonucleotide
  Antisense strand to SEQ ID NO: 1173786
uacacuaucauguuucuca

SEQ ID NO: 1173788 - RNA, 19 nt, Artificial Sequence
  Description of Artificial Sequence: Synthetic oligonucleotide
  Sense strand starting at position 278 of SEQ ID NO: 916656
gauaguguauuagucagaa

SEQ ID NO: 1173789 - RNA, 19 nt, Artificial Sequence
  Description of Artificial Sequence: Synthetic oligonucleotide
  Antisense strand to SEQ ID NO: 1173788
uucugacuaauacacuauc

SEQ ID NO: 1173790 - RNA, 19 nt, Artificial Sequence
  Description of Artificial Sequence: Synthetic oligonucleotide
  Sense strand starting at position 308 of SEQ ID NO: 916656
auguaagcucaucaugcuu

SEQ ID NO: 1173791 - RNA, 19 nt, Artificial Sequence
  Description of Artificial Sequence: Synthetic oligonucleotide
  Antisense strand to SEQ ID NO: 1173790
aagcaugaugagcuuacau

SEQ ID NO: 1173792 - RNA, 19 nt, Artificial Sequence
  Description of Artificial Sequence: Synthetic oligonucleotide
  Sense strand starting at position 360 of SEQ ID NO: 916656
uuugcaaauuuggagacau

SEQ ID NO: 1173793 - RNA, 19 nt, Artificial Sequence
  Description of Artificial Sequence: Synthetic oligonucleotide
  Antisense strand to SEQ ID NO: 1173792
augucuccaaauuugcaaa

SEQ ID NO: 1173794 - RNA, 19 nt, Artificial Sequence
  Description of Artificial Sequence: Synthetic oligonucleotide
  Sense strand starting at position 447 of SEQ ID NO: 916656
agauucacggaaugucaga

SEQ ID NO: 1173795 - RNA, 19 nt, Artificial Sequence
  Description of Artificial Sequence: Synthetic oligonucleotide
  Antisense strand to SEQ ID NO: 1173794
ucugacauuccgugaaucu

SEQ ID NO: 1173796 - RNA, 19 nt, Artificial Sequence
  Description of Artificial Sequence: Synthetic oligonucleotide
  Sense strand starting at position 460 of SEQ ID NO: 916656
gucagaguccgagagaaug

SEQ ID NO: 1173797 - RNA, 19 nt, Artificial Sequence
  Description of Artificial Sequence: Synthetic oligonucleotide
  Antisense strand to SEQ ID NO: 1173796
cauucucucggacucugac

SEQ ID NO: 1173798 - RNA, 19 nt, Artificial Sequence
  Description of Artificial Sequence: Synthetic oligonucleotide
  Sense strand starting at position 462 of SEQ ID NO: 916656
cagaguccgagagaaugua

SEQ ID NO: 1173799 - RNA, 19 nt, Artificial Sequence
  Description of Artificial Sequence: Synthetic oligonucleotide
  Antisense strand to SEQ ID NO: 1173798
uacauucucucggacucug

SEQ ID NO: 1173800 - RNA, 19 nt, Artificial Sequence
  Description of Artificial Sequence: Synthetic oligonucleotide
  Sense strand starting at position 606 of SEQ ID NO: 916656
caaacaagucacgaaugua

SEQ ID NO: 1173801 - RNA, 19 nt, Artificial Sequence
  Description of Artificial Sequence: Synthetic oligonucleotide
  Antisense strand to SEQ ID NO: 1173800
uacauucgugacuuguuug

SEQ ID NO: 1173802 - RNA, 19 nt, Artificial Sequence
  Description of Artificial Sequence: Synthetic oligonucleotide
  Sense strand starting at position 609 of SEQ ID NO: 916656
acaagucacgaauguaaac

SEQ ID NO: 1173803 - RNA, 19 nt, Artificial Sequence
  Description of Artificial Sequence: Synthetic oligonucleotide
  Antisense strand to SEQ ID NO: 1173802
guuuacauucgugacuugu

SEQ ID NO: 1173804 - RNA, 19 nt, Artificial Sequence
  Description of Artificial Sequence: Synthetic oligonucleotide
  Sense strand starting at position 1086 of SEQ ID NO: 916656
gggaggaugugguuacguu

SEQ ID NO: 1173805 - RNA, 19 nt, Artificial Sequence
  Description of Artificial Sequence: Synthetic oligonucleotide
  Antisense strand to SEQ ID NO: 1173804
aacguaaccacauccuccc

SEQ ID NO: 1173806 - RNA, 19 nt, Artificial Sequence
  Description of Artificial Sequence: Synthetic oligonucleotide
  Sense strand starting at position 1087 of SEQ ID NO: 916656
ggaggaugugguuacguua

SEQ ID NO: 1173807 - RNA, 19 nt, Artificial Sequence
  Description of Artificial Sequence: Synthetic oligonucleotide
  Antisense strand to SEQ ID NO: 1173806
uaacguaaccacauccucc

SEQ ID NO: 1173808 - RNA, 19 nt, Artificial Sequence
  Description of Artificial Sequence: Synthetic oligonucleotide
  Sense strand starting at position 1332 of SEQ ID NO: 916656
ucuccaagugcugaugaaa

SEQ ID NO: 1173809 - RNA, 19 nt, Artificial Sequence
  Description of Artificial Sequence: Synthetic oligonucleotide
  Antisense strand to SEQ ID NO: 1173808
uuucaucagcacuuggaga

SEQ ID NO: 1173810 - RNA, 19 nt, Artificial Sequence
  Description of Artificial Sequence: Synthetic oligonucleotide
  Sense strand starting at position 1794 of SEQ ID NO: 916656
cggcucuuuacuugaugaa

SEQ ID NO: 1173811 - RNA, 19 nt, Artificial Sequence
  Description of Artificial Sequence: Synthetic oligonucleotide
  Antisense strand to SEQ ID NO: 1173810
uucaucaaguaaagagccg

SEQ ID NO: 1173812 - RNA, 19 nt, Artificial Sequence
  Description of Artificial Sequence: Synthetic oligonucleotide
  Sense strand starting at position 1795 of SEQ ID NO: 916656
ggcucuuuacuugaugaag

SEQ ID NO: 1173813 - RNA, 19 nt, Artificial Sequence
  Description of Artificial Sequence: Synthetic oligonucleotide
  Antisense strand to SEQ ID NO: 1173812
cuucaucaaguaaagagcc

SEQ ID NO: 1173814 - RNA, 19 nt, Artificial Sequence
  Description of Artificial Sequence: Synthetic oligonucleotide
  Sense strand starting at position 2205 of SEQ ID NO: 916656
cgaagguuccgggaucgau

SEQ ID NO: 1173815 - RNA, 19 nt, Artificial Sequence
  Description of Artificial Sequence: Synthetic oligonucleotide
  Antisense strand to SEQ ID NO: 1173814
aucgaucccggaaccuucg

SEQ ID NO: 1173816 - RNA, 19 nt, Artificial Sequence
  Description of Artificial Sequence: Synthetic oligonucleotide
  Sense strand starting at position 2208 of SEQ ID NO: 916656
agguuccgggaucgauuaa

SEQ ID NO: 1173817 - RNA, 19 nt, Artificial Sequence
  Description of Artificial Sequence: Synthetic oligonucleotide
  Antisense strand to SEQ ID NO: 1173816
uuaaucgaucccggaaccu

SEQ ID NO: 1173818 - RNA, 19 nt, Artificial Sequence
  Description of Artificial Sequence: Synthetic oligonucleotide
  Sense strand starting at position 2209 of SEQ ID NO: 916656
gguuccgggaucgauuaaa

SEQ ID NO: 1173819 - RNA, 19 nt, Artificial Sequence
  Description of Artificial Sequence: Synthetic oligonucleotide
  Antisense strand to SEQ ID NO: 1173818
uuuaaucgaucccggaacc

SEQ ID NO: 1173820 - RNA, 19 nt, Artificial Sequence
  Description of Artificial Sequence: Synthetic oligonucleotide
  Sense strand starting at position 2362 of SEQ ID NO: 916656
cagcgucugagcuuuguuu

SEQ ID NO: 1173821 - RNA, 19 nt, Artificial Sequence
  Description of Artificial Sequence: Synthetic oligonucleotide
  Antisense strand to SEQ ID NO: 1173820
aaacaaagcucagacgcug

SEQ ID NO: 1173822 - RNA, 19 nt, Artificial Sequence
  Description of Artificial Sequence: Synthetic oligonucleotide
  Sense strand starting at position 2484 of SEQ ID NO: 916656
uguugugugccagauauca

SEQ ID NO: 1173823 - RNA, 19 nt, Artificial Sequence
  Description of Artificial Sequence: Synthetic oligonucleotide
  Antisense strand to SEQ ID NO: 1173822
ugauaucuggcacacaaca

SEQ ID NO: 1173824 - RNA, 19 nt, Artificial Sequence
  Description of Artificial Sequence: Synthetic oligonucleotide
  Sense strand starting at position 2645 of SEQ ID NO: 916656
acuuaacaucaguguggau

SEQ ID NO: 1173825 - RNA, 19 nt, Artificial Sequence
  Description of Artificial Sequence: Synthetic oligonucleotide
  Antisense strand to SEQ ID NO: 1173824
auccacacugauguuaagu

SEQ ID NO: 1173826 - RNA, 19 nt, Artificial Sequence
  Description of Artificial Sequence: Synthetic oligonucleotide
  Sense strand starting at position 2670 of SEQ ID NO: 916656
uugcccugucuccaauaga

SEQ ID NO: 1173827 - RNA, 19 nt, Artificial Sequence
  Description of Artificial Sequence: Synthetic oligonucleotide
  Antisense strand to SEQ ID NO: 1173826
ucuauuggagacagggcaa

SEQ ID NO: 1173828 - RNA, 19 nt, Artificial Sequence
  Description of Artificial Sequence: Synthetic oligonucleotide
  Sense strand starting at position 2870 of SEQ ID NO: 916656
acaguaguuugcccaguca

SEQ ID NO: 1173829 - RNA, 19 nt, Artificial Sequence
  Description of Artificial Sequence: Synthetic oligonucleotide
  Antisense strand to SEQ ID NO: 1173828
ugacugggcaaacuacugu

SEQ ID NO: 1173830 - RNA, 19 nt, Artificial Sequence
  Description of Artificial Sequence: Synthetic oligonucleotide
  Sense strand starting at position 2914 of SEQ ID NO: 916656
ucaaacuggcuguaggauu

SEQ ID NO: 1173831 - RNA, 19 nt, Artificial Sequence
  Description of Artificial Sequence: Synthetic oligonucleotide
  Antisense strand to SEQ ID NO: 1173830
aauccuacagccaguuuga

SEQ ID NO: 1173832 - RNA, 19 nt, Artificial Sequence
  Description of Artificial Sequence: Synthetic oligonucleotide
  Sense strand starting at position 2947 of SEQ ID NO: 916656
guauaaccuccuugcugua

SEQ ID NO: 1173833 - RNA, 19 nt, Artificial Sequence
  Description of Artificial Sequence: Synthetic oligonucleotide
  Antisense strand to SEQ ID NO: 1173832
uacagcaaggagguuauac

SEQ ID NO: 1173834 - RNA, 19 nt, Artificial Sequence
  Description of Artificial Sequence: Synthetic oligonucleotide
  Sense strand starting at position 3085 of SEQ ID NO: 916656
gcauuugcucacuacaugu

SEQ ID NO: 1173835 - RNA, 19 nt, Artificial Sequence
  Description of Artificial Sequence: Synthetic oligonucleotide
  Antisense strand to SEQ ID NO: 1173834
acauguagugagcaaaugc

SEQ ID NO: 1173836 - RNA, 19 nt, Artificial Sequence
  Description of Artificial Sequence: Synthetic oligonucleotide
  Sense strand starting at position 3148 of SEQ ID NO: 916656
ucauuauuguaccuguuau

SEQ ID NO: 1173837 - RNA, 19 nt, Artificial Sequence
  Description of Artificial Sequence: Synthetic oligonucleotide
  Antisense strand to SEQ ID NO: 1173836
auaacagguacaauaauga

SEQ ID NO: 1173838 - RNA, 19 nt, Artificial Sequence
  Description of Artificial Sequence: Synthetic oligonucleotide
  Sense strand starting at position 3191 of SEQ ID NO: 916656
gauguuacuguugaaauug

SEQ ID NO: 1173839 - RNA, 19 nt, Artificial Sequence
  Description of Artificial Sequence: Synthetic oligonucleotide
  Antisense strand to SEQ ID NO: 1173838
caauuucaacaguaacauc

SEQ ID NO: 1173840 - RNA, 19 nt, Artificial Sequence
  Description of Artificial Sequence: Synthetic oligonucleotide
  Sense strand starting at position 3247 of SEQ ID NO: 916656
ggacuuaauaaaugugugu

SEQ ID NO: 1173841 - RNA, 19 nt, Artificial Sequence
  Description of Artificial Sequence: Synthetic oligonucleotide
  Antisense strand to SEQ ID NO: 1173840
acacacauuuauuaagucc

SEQ ID NO: 1173842 - RNA, 19 nt, Artificial Sequence
  Description of Artificial Sequence: Synthetic oligonucleotide
  Sense strand starting at position 3409 of SEQ ID NO: 916656
ccuuuaagugaccaaguga

SEQ ID NO: 1173843 - RNA, 19 nt, Artificial Sequence
  Description of Artificial Sequence: Synthetic oligonucleotide
  Antisense strand to SEQ ID NO: 1173842
ucacuuggucacuuaaagg

SEQ ID NO: 1173844 - RNA, 19 nt, Artificial Sequence
  Description of Artificial Sequence: Synthetic oligonucleotide
  Sense strand starting at position 3464 of SEQ ID NO: 916656
gcuagaaacgauuaagcuc

SEQ ID NO: 1173845 - RNA, 19 nt, Artificial Sequence
  Description of Artificial Sequence: Synthetic oligonucleotide
  Antisense strand to SEQ ID NO: 1173844
gagcuuaaucguuucuagc

SEQ ID NO: 1173846 - RNA, 19 nt, Artificial Sequence
  Description of Artificial Sequence: Synthetic oligonucleotide
  Sense strand starting at position 3470 of SEQ ID NO: 916656
aacgauuaagcucagaugu

SEQ ID NO: 1173847 - RNA, 19 nt, Artificial Sequence
  Description of Artificial Sequence: Synthetic oligonucleotide
  Antisense strand to SEQ ID NO: 1173846
acaucugagcuuaaucguu

SEQ ID NO: 1173848 - RNA, 19 nt, Artificial Sequence
  Description of Artificial Sequence: Synthetic oligonucleotide
  Sense strand starting at position 3522 of SEQ ID NO: 916656
ugugucaaauaauuagaca

SEQ ID NO: 1173849 - RNA, 19 nt, Artificial Sequence
  Description of Artificial Sequence: Synthetic oligonucleotide
  Antisense strand to SEQ ID NO: 1173848
ugucuaauuauuugacaca

SEQ ID NO: 1173850 - RNA, 19 nt, Artificial Sequence
  Description of Artificial Sequence: Synthetic oligonucleotide
  Sense strand starting at position 3525 of SEQ ID NO: 916656
gucaaauaauuagacaagu

SEQ ID NO: 1173851 - RNA, 19 nt, Artificial Sequence
  Description of Artificial Sequence: Synthetic oligonucleotide
  Antisense strand to SEQ ID NO: 1173850
acuugucuaauuauuugac

SEQ ID NO: 1173852 - RNA, 19 nt, Artificial Sequence
  Description of Artificial Sequence: Synthetic oligonucleotide
  Sense strand starting at position 3745 of SEQ ID NO: 916656
gguugagagagcugaggaa

SEQ ID NO: 1173853 - RNA, 19 nt, Artificial Sequence
  Description of Artificial Sequence: Synthetic oligonucleotide
  Antisense strand to SEQ ID NO: 1173852
uuccucagcucucucaacc

SEQ ID NO: 1173854 - RNA, 19 nt, Artificial Sequence
  Description of Artificial Sequence: Synthetic oligonucleotide
  Sense strand starting at position 3885 of SEQ ID NO: 916656
agucaagaucauugaaggu

SEQ ID NO: 1173855 - RNA, 19 nt, Artificial Sequence
  Description of Artificial Sequence: Synthetic oligonucleotide
  Antisense strand to SEQ ID NO: 1173854
accuucaaugaucuugacu

SEQ ID NO: 1173856 - RNA, 19 nt, Artificial Sequence
  Description of Artificial Sequence: Synthetic oligonucleotide
  Sense strand starting at position 44 of SEQ ID NO: 916657
auuagagguaucugggacu

SEQ ID NO: 1173857 - RNA, 19 nt, Artificial Sequence
  Description of Artificial Sequence: Synthetic oligonucleotide
  Antisense strand to SEQ ID NO: 1173856
agucccagauaccucuaau

SEQ ID NO: 1173858 - RNA, 19 nt, Artificial Sequence
  Description of Artificial Sequence: Synthetic oligonucleotide
  Sense strand starting at position 131 of SEQ ID NO: 916657
ucaaguuuacagugaauau

SEQ ID NO: 1173859 - RNA, 19 nt, Artificial Sequence
  Description of Artificial Sequence: Synthetic oligonucleotide
  Antisense strand to SEQ ID NO: 1173858
auauucacuguaaacuuga

SEQ ID NO: 1173860 - RNA, 19 nt, Artificial Sequence
  Description of Artificial Sequence: Synthetic oligonucleotide
  Sense strand starting at position 354 of SEQ ID NO: 916657
ucaugaaucuuugucacag

SEQ ID NO: 1173861 - RNA, 19 nt, Artificial Sequence
  Description of Artificial Sequence: Synthetic oligonucleotide
  Antisense strand to SEQ ID NO: 1173860
cugugacaaagauucauga

SEQ ID NO: 1173862 - RNA, 19 nt, Artificial Sequence
  Description of Artificial Sequence: Synthetic oligonucleotide
  Sense strand starting at position 415 of SEQ ID NO: 916657
acuuuauugccaugguaaa

SEQ ID NO: 1173863 - RNA, 19 nt, Artificial Sequence
  Description of Artificial Sequence: Synthetic oligonucleotide
  Antisense strand to SEQ ID NO: 1173862
uuuaccauggcaauaaagu

SEQ ID NO: 1173864 - RNA, 19 nt, Artificial Sequence
  Description of Artificial Sequence: Synthetic oligonucleotide
  Sense strand starting at position 472 of SEQ ID NO: 916657
caucaugugcaaggucaaa

SEQ ID NO: 1173865 - RNA, 19 nt, Artificial Sequence
  Description of Artificial Sequence: Synthetic oligonucleotide
  Antisense strand to SEQ ID NO: 1173864
uuugaccuugcacaugaug

SEQ ID NO: 1173866 - RNA, 19 nt, Artificial Sequence
  Description of Artificial Sequence: Synthetic oligonucleotide
  Sense strand starting at position 483 of SEQ ID NO: 916657
aggucaaacaagugaguca

SEQ ID NO: 1173867 - RNA, 19 nt, Artificial Sequence
  Description of Artificial Sequence: Synthetic oligonucleotide
  Antisense strand to SEQ ID NO: 1173866
ugacucacuuguuugaccu

SEQ ID NO: 1173868 - RNA, 19 nt, Artificial Sequence
  Description of Artificial Sequence: Synthetic oligonucleotide
  Sense strand starting at position 490 of SEQ ID NO: 916657
acaagugagucaguauaaa

SEQ ID NO: 1173869 - RNA, 19 nt, Artificial Sequence
  Description of Artificial Sequence: Synthetic oligonucleotide
  Antisense strand to SEQ ID NO: 1173868
uuuauacugacucacuugu

SEQ ID NO: 1173870 - RNA, 19 nt, Artificial Sequence
  Description of Artificial Sequence: Synthetic oligonucleotide
  Sense strand starting at position 684 of SEQ ID NO: 916657
acauaauugccuggcauuu

SEQ ID NO: 1173871 - RNA, 19 nt, Artificial Sequence
  Description of Artificial Sequence: Synthetic oligonucleotide
  Antisense strand to SEQ ID NO: 1173870
aaaugccaggcaauuaugu

SEQ ID NO: 1173872 - RNA, 19 nt, Artificial Sequence
  Description of Artificial Sequence: Synthetic oligonucleotide
  Sense strand starting at position 894 of SEQ ID NO: 916657
augguuuaucucuagcaga

SEQ ID NO: 1173873 - RNA, 19 nt, Artificial Sequence
  Description of Artificial Sequence: Synthetic oligonucleotide
  Antisense strand to SEQ ID NO: 1173872
ucugcuagagauaaaccau

SEQ ID NO: 1173874 - RNA, 19 nt, Artificial Sequence
  Description of Artificial Sequence: Synthetic oligonucleotide
  Sense strand starting at position 899 of SEQ ID NO: 916657
uuaucucuagcagaguaau

SEQ ID NO: 1173875 - RNA, 19 nt, Artificial Sequence
  Description of Artificial Sequence: Synthetic oligonucleotide
  Antisense strand to SEQ ID NO: 1173874
auuacucugcuagagauaa

SEQ ID NO: 1173876 - RNA, 19 nt, Artificial Sequence
  Description of Artificial Sequence: Synthetic oligonucleotide
  Sense strand starting at position 947 of SEQ ID NO: 916657
aauauuugguugccaaguu

SEQ ID NO: 1173877 - RNA, 19 nt, Artificial Sequence
  Description of Artificial Sequence: Synthetic oligonucleotide
  Antisense strand to SEQ ID NO: 1173876
aacuuggcaaccaaauauu

SEQ ID NO: 1173878 - RNA, 19 nt, Artificial Sequence
  Description of Artificial Sequence: Synthetic oligonucleotide
  Sense strand starting at position 1105 of SEQ ID NO: 916657
augaacacuuuggauuuaa

SEQ ID NO: 1173879 - RNA, 19 nt, Artificial Sequence
  Description of Artificial Sequence: Synthetic oligonucleotide
  Antisense strand to SEQ ID NO: 1173878
uuaaauccaaaguguucau

SEQ ID NO: 1173880 - RNA, 19 nt, Artificial Sequence
  Description of Artificial Sequence: Synthetic oligonucleotide
  Sense strand starting at position 1169 of SEQ ID NO: 916657
accauaauaugagcucaga

SEQ ID NO: 1173881 - RNA, 19 nt, Artificial Sequence
  Description of Artificial Sequence: Synthetic oligonucleotide
  Antisense strand to SEQ ID NO: 1173880
ucugagcucauauuauggu

SEQ ID NO: 1173882 - RNA, 19 nt, Artificial Sequence
  Description of Artificial Sequence: Synthetic oligonucleotide
  Sense strand starting at position 1234 of SEQ ID NO: 916657
uguagcuaaucaguaaaua

SEQ ID NO: 1173883 - RNA, 19 nt, Artificial Sequence
  Description of Artificial Sequence: Synthetic oligonucleotide
  Antisense strand to SEQ ID NO: 1173882
uauuuacugauuagcuaca

SEQ ID NO: 1173884 - RNA, 19 nt, Artificial Sequence
  Description of Artificial Sequence: Synthetic oligonucleotide
  Sense strand starting at position 1235 of SEQ ID NO: 916657
guagcuaaucaguaaauaa

SEQ ID NO: 1173885 - RNA, 19 nt, Artificial Sequence
  Description of Artificial Sequence: Synthetic oligonucleotide
  Antisense strand to SEQ ID NO: 1173884
uuauuuacugauuagcuac

SEQ ID NO: 1173886 - RNA, 19 nt, Artificial Sequence
  Description of Artificial Sequence: Synthetic oligonucleotide
  Sense strand starting at position 1474 of SEQ ID NO: 916657
ccuauuacuuugguagaua

SEQ ID NO: 1173887 - RNA, 19 nt, Artificial Sequence
  Description of Artificial Sequence: Synthetic oligonucleotide
  Antisense strand to SEQ ID NO: 1173886
uaucuaccaaaguaauagg

SEQ ID NO: 1173888 - RNA, 19 nt, Artificial Sequence
  Description of Artificial Sequence: Synthetic oligonucleotide
  Sense strand starting at position 1577 of SEQ ID NO: 916657
gaaguaucucggcacauaa

SEQ ID NO: 1173889 - RNA, 19 nt, Artificial Sequence
  Description of Artificial Sequence: Synthetic oligonucleotide
  Antisense strand to SEQ ID NO: 1173888
uuaugugccgagauacuuc

SEQ ID NO: 1173890 - RNA, 19 nt, Artificial Sequence
  Description of Artificial Sequence: Synthetic oligonucleotide
  Sense strand starting at position 1579 of SEQ ID NO: 916657
aguaucucggcacauaauu

SEQ ID NO: 1173891 - RNA, 19 nt, Artificial Sequence
  Description of Artificial Sequence: Synthetic oligonucleotide
  Antisense strand to SEQ ID NO: 1173890
aauuaugugccgagauacu

SEQ ID NO: 1173892 - RNA, 19 nt, Artificial Sequence
  Description of Artificial Sequence: Synthetic oligonucleotide
  Sense strand starting at position 1647 of SEQ ID NO: 916657
gagaaaguaucaucauagc

SEQ ID NO: 1173893 - RNA, 19 nt, Artificial Sequence
  Description of Artificial Sequence: Synthetic oligonucleotide
  Antisense strand to SEQ ID NO: 1173892
gcuaugaugauacuuucuc

SEQ ID NO: 1173894 - RNA, 19 nt, Artificial Sequence
  Description of Artificial Sequence: Synthetic oligonucleotide
  Sense strand starting at position 1671 of SEQ ID NO: 916657
augaacuugucaccucaga

SEQ ID NO: 1173895 - RNA, 19 nt, Artificial Sequence
  Description of Artificial Sequence: Synthetic oligonucleotide
  Antisense strand to SEQ ID NO: 1173894
ucugaggugacaaguucau

SEQ ID NO: 1173896 - RNA, 19 nt, Artificial Sequence
  Description of Artificial Sequence: Synthetic oligonucleotide
  Sense strand starting at position 2036 of SEQ ID NO: 916657
cgcagucuccaagaguaag

SEQ ID NO: 1173897 - RNA, 19 nt, Artificial Sequence
  Description of Artificial Sequence: Synthetic oligonucleotide
  Antisense strand to SEQ ID NO: 1173896
cuuacucuuggagacugcg

SEQ ID NO: 1173898 - RNA, 19 nt, Artificial Sequence
  Description of Artificial Sequence: Synthetic oligonucleotide
  Sense strand starting at position 2065 of SEQ ID NO: 916657
gagcaugcucaguaucuaa

SEQ ID NO: 1173899 - RNA, 19 nt, Artificial Sequence
  Description of Artificial Sequence: Synthetic oligonucleotide
  Antisense strand to SEQ ID NO: 1173898
uuagauacugagcaugcuc

SEQ ID NO: 1173900 - RNA, 19 nt, Artificial Sequence
  Description of Artificial Sequence: Synthetic oligonucleotide
  Sense strand starting at position 2109 of SEQ ID NO: 916657
agcauaugaugaccuacau

SEQ ID NO: 1173901 - RNA, 19 nt, Artificial Sequence
  Description of Artificial Sequence: Synthetic oligonucleotide
  Antisense strand to SEQ ID NO: 1173900
auguaggucaucauaugcu

SEQ ID NO: 1173902 - RNA, 19 nt, Artificial Sequence
  Description of Artificial Sequence: Synthetic oligonucleotide
  Sense strand starting at position 2278 of SEQ ID NO: 916657
auaacaaguccuuagguuu

SEQ ID NO: 1173903 - RNA, 19 nt, Artificial Sequence
  Description of Artificial Sequence: Synthetic oligonucleotide
  Antisense strand to SEQ ID NO: 1173902
aaaccuaaggacuuguuau

SEQ ID NO: 1173904 - RNA, 19 nt, Artificial Sequence
  Description of Artificial Sequence: Synthetic oligonucleotide
  Sense strand starting at position 2337 of SEQ ID NO: 916657
gcuagaaugaauuggaagu

SEQ ID NO: 1173905 - RNA, 19 nt, Artificial Sequence
  Description of Artificial Sequence: Synthetic oligonucleotide
  Antisense strand to SEQ ID NO: 1173904
acuuccaauucauucuagc

SEQ ID NO: 1173906 - RNA, 19 nt, Artificial Sequence
  Description of Artificial Sequence: Synthetic oligonucleotide
  Sense strand starting at position 2822 of SEQ ID NO: 916657
gccauuagucugggaugau

SEQ ID NO: 1173907 - RNA, 19 nt, Artificial Sequence
  Description of Artificial Sequence: Synthetic oligonucleotide
  Antisense strand to SEQ ID NO: 1173906
aucaucccagacuaauggc

SEQ ID NO: 1173908 - RNA, 19 nt, Artificial Sequence
  Description of Artificial Sequence: Synthetic oligonucleotide
  Sense strand starting at position 3022 of SEQ ID NO: 916657
acagcaagucacugacaga

SEQ ID NO: 1173909 - RNA, 19 nt, Artificial Sequence
  Description of Artificial Sequence: Synthetic oligonucleotide
  Antisense strand to SEQ ID NO: 1173908
ucugucagugacuugcugu

SEQ ID NO: 1173910 - RNA, 19 nt, Artificial Sequence
  Description of Artificial Sequence: Synthetic oligonucleotide
  Sense strand starting at position 3046 of SEQ ID NO: 916657
gcugacccaucuuuaaaug

SEQ ID NO: 1173911 - RNA, 19 nt, Artificial Sequence
  Description of Artificial Sequence: Synthetic oligonucleotide
  Antisense strand to SEQ ID NO: 1173910
cauuuaaagaugggucagc

SEQ ID NO: 1173912 - RNA, 19 nt, Artificial Sequence
  Description of Artificial Sequence: Synthetic oligonucleotide
  Sense strand starting at position 3108 of SEQ ID NO: 916657
ccuggucaccucuauuacu

SEQ ID NO: 1173913 - RNA, 19 nt, Artificial Sequence
  Description of Artificial Sequence: Synthetic oligonucleotide
  Antisense strand to SEQ ID NO: 1173912
aguaauagaggugaccagg

SEQ ID NO: 1173914 - RNA, 19 nt, Artificial Sequence
  Description of Artificial Sequence: Synthetic oligonucleotide
  Sense strand starting at position 3347 of SEQ ID NO: 916657
cucuaaguacuguauguau

SEQ ID NO: 1173915 - RNA, 19 nt, Artificial Sequence
  Description of Artificial Sequence: Synthetic oligonucleotide
  Antisense strand to SEQ ID NO: 1173914
auacauacaguacuuagag

SEQ ID NO: 1173916 - RNA, 19 nt, Artificial Sequence
  Description of Artificial Sequence: Synthetic oligonucleotide
  Sense strand starting at position 3374 of SEQ ID NO: 916657
gguaguucuguagaaagag

SEQ ID NO: 1173917 - RNA, 19 nt, Artificial Sequence
  Description of Artificial Sequence: Synthetic oligonucleotide
  Antisense strand to SEQ ID NO: 1173916
cucuuucuacagaacuacc

SEQ ID NO: 1173918 - RNA, 19 nt, Artificial Sequence
  Description of Artificial Sequence: Synthetic oligonucleotide
  Sense strand starting at position 3389 of SEQ ID NO: 916657
agaguaaguuaccuacagu

SEQ ID NO: 1173919 - RNA, 19 nt, Artificial Sequence
  Description of Artificial Sequence: Synthetic oligonucleotide
  Antisense strand to SEQ ID NO: 1173918
acuguagguaacuuacucu

SEQ ID NO: 1173920 - RNA, 19 nt, Artificial Sequence
  Description of Artificial Sequence: Synthetic oligonucleotide
  Sense strand starting at position 3392 of SEQ ID NO: 916657
guaaguuaccuacaguacu

SEQ ID NO: 1173921 - RNA, 19 nt, Artificial Sequence
  Description of Artificial Sequence: Synthetic oligonucleotide
  Antisense strand to SEQ ID NO: 1173920
aguacuguagguaacuuac

SEQ ID NO: 1173922 - RNA, 19 nt, Artificial Sequence
  Description of Artificial Sequence: Synthetic oligonucleotide
  Sense strand starting at position 3419 of SEQ ID NO: 916657
gcucuaugauuccuaaaug

SEQ ID NO: 1173923 - RNA, 19 nt, Artificial Sequence
  Description of Artificial Sequence: Synthetic oligonucleotide
  Antisense strand to SEQ ID NO: 1173922
cauuuaggaaucauagagc

SEQ ID NO: 1173924 - RNA, 19 nt, Artificial Sequence
  Description of Artificial Sequence: Synthetic oligonucleotide
  Sense strand starting at position 3485 of SEQ ID NO: 916657
ugugaucucuaaguauuau

SEQ ID NO: 1173925 - RNA, 19 nt, Artificial Sequence
  Description of Artificial Sequence: Synthetic oligonucleotide
  Antisense strand to SEQ ID NO: 1173924
auaauacuuagagaucaca

SEQ ID NO: 1173926 - RNA, 19 nt, Artificial Sequence
  Description of Artificial Sequence: Synthetic oligonucleotide
  Sense strand starting at position 3515 of SEQ ID NO: 916657
uuauauaugagucacggua

SEQ ID NO: 1173927 - RNA, 19 nt, Artificial Sequence
  Description of Artificial Sequence: Synthetic oligonucleotide
  Antisense strand to SEQ ID NO: 1173926
uaccgugacucauauauaa

SEQ ID NO: 1173928 - RNA, 19 nt, Artificial Sequence
  Description of Artificial Sequence: Synthetic oligonucleotide
  Sense strand starting at position 3667 of SEQ ID NO: 916657
uuuaguguucuugagaguu

SEQ ID NO: 1173929 - RNA, 19 nt, Artificial Sequence
  Description of Artificial Sequence: Synthetic oligonucleotide
  Antisense strand to SEQ ID NO: 1173928
aacucucaagaacacuaaa

SEQ ID NO: 1173930 - RNA, 19 nt, Artificial Sequence
  Description of Artificial Sequence: Synthetic oligonucleotide
  Sense strand starting at position 3749 of SEQ ID NO: 916657
uucugaaaugcccagguga

SEQ ID NO: 1173931 - RNA, 19 nt, Artificial Sequence
  Description of Artificial Sequence: Synthetic oligonucleotide
  Antisense strand to SEQ ID NO: 1173930
ucaccugggcauuucagaa

SEQ ID NO: 1173932 - RNA, 19 nt, Artificial Sequence
  Description of Artificial Sequence: Synthetic oligonucleotide
  Sense strand starting at position 3751 of SEQ ID NO: 916657
cugaaaugcccaggugaau

SEQ ID NO: 1173933 - RNA, 19 nt, Artificial Sequence
  Description of Artificial Sequence: Synthetic oligonucleotide
  Antisense strand to SEQ ID NO: 1173932
auucaccugggcauuucag

SEQ ID NO: 1173934 - RNA, 19 nt, Artificial Sequence
  Description of Artificial Sequence: Synthetic oligonucleotide
  Sense strand starting at position 3815 of SEQ ID NO: 916657
ccaggucaaggcugagaua

SEQ ID NO: 1173935 - RNA, 19 nt, Artificial Sequence
  Description of Artificial Sequence: Synthetic oligonucleotide
  Antisense strand to SEQ ID NO: 1173934
uaucucagccuugaccugg

SEQ ID NO: 1173936 - RNA, 19 nt, Artificial Sequence
  Description of Artificial Sequence: Synthetic oligonucleotide
  Sense strand starting at position 387 of SEQ ID NO: 916658
ugugauaucccuggagccu

SEQ ID NO: 1173937 - RNA, 19 nt, Artificial Sequence
  Description of Artificial Sequence: Synthetic oligonucleotide
  Antisense strand to SEQ ID NO: 1173936
aggcuccagggauaucaca

SEQ ID NO: 1173938 - RNA, 19 nt, Artificial Sequence
  Description of Artificial Sequence: Synthetic oligonucleotide
  Sense strand starting at position 921 of SEQ ID NO: 916658
auggcugccucaucuauga

SEQ ID NO: 1173939 - RNA, 19 nt, Artificial Sequence
  Description of Artificial Sequence: Synthetic oligonucleotide
  Antisense strand to SEQ ID NO: 1173938
ucauagaugaggcagccau

SEQ ID NO: 1173940 - RNA, 19 nt, Artificial Sequence
  Description of Artificial Sequence: Synthetic oligonucleotide
  Sense strand starting at position 931 of SEQ ID NO: 916658
caucuaugacuugguggga

SEQ ID NO: 1173941 - RNA, 19 nt, Artificial Sequence
  Description of Artificial Sequence: Synthetic oligonucleotide
  Antisense strand to SEQ ID NO: 1173940
ucccaccaagucauagaug

SEQ ID NO: 1173942 - RNA, 19 nt, Artificial Sequence
  Description of Artificial Sequence: Synthetic oligonucleotide
  Sense strand starting at position 934 of SEQ ID NO: 916658
cuaugacuuggugggagua

SEQ ID NO: 1173943 - RNA, 19 nt, Artificial Sequence
  Description of Artificial Sequence: Synthetic oligonucleotide
  Antisense strand to SEQ ID NO: 1173942
uacucccaccaagucauag

SEQ ID NO: 1173944 - RNA, 19 nt, Artificial Sequence
  Description of Artificial Sequence: Synthetic oligonucleotide
  Sense strand starting at position 952 of SEQ ID NO: 916658
aggguagguccagguacau

SEQ ID NO: 1173945 - RNA, 19 nt, Artificial Sequence
  Description of Artificial Sequence: Synthetic oligonucleotide
  Antisense strand to SEQ ID NO: 1173944
auguaccuggaccuacccu

SEQ ID NO: 1173946 - RNA, 19 nt, Artificial Sequence
  Description of Artificial Sequence: Synthetic oligonucleotide
  Sense strand starting at position 964 of SEQ ID NO: 916658
gguacauauuggguaggaa

SEQ ID NO: 1173947 - RNA, 19 nt, Artificial Sequence
  Description of Artificial Sequence: Synthetic oligonucleotide
  Antisense strand to SEQ ID NO: 1173946
uuccuacccaauauguacc

SEQ ID NO: 1173948 - RNA, 19 nt, Artificial Sequence
  Description of Artificial Sequence: Synthetic oligonucleotide
  Sense strand starting at position 992 of SEQ ID NO: 916658
agauguaccuccucucuca

SEQ ID NO: 1173949 - RNA, 19 nt, Artificial Sequence
  Description of Artificial Sequence: Synthetic oligonucleotide
  Antisense strand to SEQ ID NO: 1173948
ugagagaggagguacaucu

SEQ ID NO: 1173950 - RNA, 19 nt, Artificial Sequence
  Description of Artificial Sequence: Synthetic oligonucleotide
  Sense strand starting at position 1107 of SEQ ID NO: 916658
gaggguucuccuugcaccu

SEQ ID NO: 1173951 - RNA, 19 nt, Artificial Sequence
  Description of Artificial Sequence: Synthetic oligonucleotide
  Antisense strand to SEQ ID NO: 1173950
aggugcaaggagaacccuc

SEQ ID NO: 1173952 - RNA, 19 nt, Artificial Sequence
  Description of Artificial Sequence: Synthetic oligonucleotide
  Sense strand starting at position 1148 of SEQ ID NO: 916658
ccauauaaagcuugggaaa

SEQ ID NO: 1173953 - RNA, 19 nt, Artificial Sequence
  Description of Artificial Sequence: Synthetic oligonucleotide
  Antisense strand to SEQ ID NO: 1173952
uuucccaagcuuuauaugg

SEQ ID NO: 1173954 - RNA, 19 nt, Artificial Sequence
  Description of Artificial Sequence: Synthetic oligonucleotide
  Sense strand starting at position 1395 of SEQ ID NO: 916658
uucugcuggucuccuaaua

SEQ ID NO: 1173955 - RNA, 19 nt, Artificial Sequence
  Description of Artificial Sequence: Synthetic oligonucleotide
  Antisense strand to SEQ ID NO: 1173954
uauuaggagaccagcagaa

SEQ ID NO: 1173956 - RNA, 19 nt, Artificial Sequence
  Description of Artificial Sequence: Synthetic oligonucleotide
  Sense strand starting at position 1458 of SEQ ID NO: 916658
cgaagucucuaaucuuuac

SEQ ID NO: 1173957 - RNA, 19 nt, Artificial Sequence
  Description of Artificial Sequence: Synthetic oligonucleotide
  Antisense strand to SEQ ID NO: 1173956
guaaagauuagagacuucg

SEQ ID NO: 1173958 - RNA, 19 nt, Artificial Sequence
  Description of Artificial Sequence: Synthetic oligonucleotide
  Sense strand starting at position 1476 of SEQ ID NO: 916658
cugucuggccuuuacugaa

SEQ ID NO: 1173959 - RNA, 19 nt, Artificial Sequence
  Description of Artificial Sequence: Synthetic oligonucleotide
  Antisense strand to SEQ ID NO: 1173958
uucaguaaaggccagacag

SEQ ID NO: 1173960 - RNA, 19 nt, Artificial Sequence
  Description of Artificial Sequence: Synthetic oligonucleotide
  Sense strand starting at position 1591 of SEQ ID NO: 916658
gaauuagaguuucuccagu

SEQ ID NO: 1173961 - RNA, 19 nt, Artificial Sequence
  Description of Artificial Sequence: Synthetic oligonucleotide
  Antisense strand to SEQ ID NO: 1173960
acuggagaaacucuaauuc

SEQ ID NO: 1173962 - RNA, 19 nt, Artificial Sequence
  Description of Artificial Sequence: Synthetic oligonucleotide
  Sense strand starting at position 1593 of SEQ ID NO: 916658
auuagaguuucuccaguuu

SEQ ID NO: 1173963 - RNA, 19 nt, Artificial Sequence
  Description of Artificial Sequence: Synthetic oligonucleotide
  Antisense strand to SEQ ID NO: 1173962
aaacuggagaaacucuaau

SEQ ID NO: 1173964 - RNA, 19 nt, Artificial Sequence
  Description of Artificial Sequence: Synthetic oligonucleotide
  Sense strand starting at position 1605 of SEQ ID NO: 916658
ccaguuucgggcuauauau

SEQ ID NO: 1173965 - RNA, 19 nt, Artificial Sequence
  Description of Artificial Sequence: Synthetic oligonucleotide
  Antisense strand to SEQ ID NO: 1173964
auauauagcccgaaacugg

SEQ ID NO: 1173966 - RNA, 19 nt, Artificial Sequence
  Description of Artificial Sequence: Synthetic oligonucleotide
  Sense strand starting at position 2501 of SEQ ID NO: 916658
aguaaugagggcugaguaa

SEQ ID NO: 1173967 - RNA, 19 nt, Artificial Sequence
  Description of Artificial Sequence: Synthetic oligonucleotide
  Antisense strand to SEQ ID NO: 1173966
uuacucagcccucauuacu

SEQ ID NO: 1173968 - RNA, 19 nt, Artificial Sequence
  Description of Artificial Sequence: Synthetic oligonucleotide
  Sense strand starting at position 2702 of SEQ ID NO: 916658
uccaaagugugagccuuau

SEQ ID NO: 1173969 - RNA, 19 nt, Artificial Sequence
  Description of Artificial Sequence: Synthetic oligonucleotide
  Antisense strand to SEQ ID NO: 1173968
auaaggcucacacuuugga

SEQ ID NO: 1173970 - RNA, 19 nt, Artificial Sequence
  Description of Artificial Sequence: Synthetic oligonucleotide
  Sense strand starting at position 2706 of SEQ ID NO: 916658
aagugugagccuuaucucu

SEQ ID NO: 1173971 - RNA, 19 nt, Artificial Sequence
  Description of Artificial Sequence: Synthetic oligonucleotide
  Antisense strand to SEQ ID NO: 1173970
agagauaaggcucacacuu

SEQ ID NO: 1173972 - RNA, 19 nt, Artificial Sequence
  Description of Artificial Sequence: Synthetic oligonucleotide
  Sense strand starting at position 2764 of SEQ ID NO: 916658
gaaggcuauccuggacuuu

SEQ ID NO: 1173973 - RNA, 19 nt, Artificial Sequence
  Description of Artificial Sequence: Synthetic oligonucleotide
  Antisense strand to SEQ ID NO: 1173972
aaaguccaggauagccuuc

SEQ ID NO: 1173974 - RNA, 19 nt, Artificial Sequence
  Description of Artificial Sequence: Synthetic oligonucleotide
  Sense strand starting at position 2781 of SEQ ID NO: 916658
uugccuuugcuccagggau

SEQ ID NO: 1173975 - RNA, 19 nt, Artificial Sequence
  Description of Artificial Sequence: Synthetic oligonucleotide
  Antisense strand to SEQ ID NO: 1173974
aucccuggagcaaaggcaa

SEQ ID NO: 1173976 - RNA, 19 nt, Artificial Sequence
  Description of Artificial Sequence: Synthetic oligonucleotide
  Sense strand starting at position 2783 of SEQ ID NO: 916658
gccuuugcuccagggauag

SEQ ID NO: 1173977 - RNA, 19 nt, Artificial Sequence
  Description of Artificial Sequence: Synthetic oligonucleotide
  Antisense strand to SEQ ID NO: 1173976
cuaucccuggagcaaaggc

SEQ ID NO: 1173978 - RNA, 19 nt, Artificial Sequence
  Description of Artificial Sequence: Synthetic oligonucleotide
  Sense strand starting at position 3287 of SEQ ID NO: 916658
ugggcauugcaugaaagga

SEQ ID NO: 1173979 - RNA, 19 nt, Artificial Sequence
  Description of Artificial Sequence: Synthetic oligonucleotide
  Antisense strand to SEQ ID NO: 1173978
uccuuucaugcaaugccca

SEQ ID NO: 1173980 - RNA, 19 nt, Artificial Sequence
  Description of Artificial Sequence: Synthetic oligonucleotide
  Sense strand starting at position 3493 of SEQ ID NO: 916658
agaaguguccuguggaugu

SEQ ID NO: 1173981 - RNA, 19 nt, Artificial Sequence
  Description of Artificial Sequence: Synthetic oligonucleotide
  Antisense strand to SEQ ID NO: 1173980
acauccacaggacacuucu

SEQ ID NO: 1173982 - RNA, 19 nt, Artificial Sequence
  Description of Artificial Sequence: Synthetic oligonucleotide
  Sense strand starting at position 3504 of SEQ ID NO: 916658
guggauguguggucauuau

SEQ ID NO: 1173983 - RNA, 19 nt, Artificial Sequence
  Description of Artificial Sequence: Synthetic oligonucleotide
  Antisense strand to SEQ ID NO: 1173982
auaaugaccacacauccac

SEQ ID NO: 1173984 - RNA, 19 nt, Artificial Sequence
  Description of Artificial Sequence: Synthetic oligonucleotide
  Sense strand starting at position 3508 of SEQ ID NO: 916658
auguguggucauuauaauc

SEQ ID NO: 1173985 - RNA, 19 nt, Artificial Sequence
  Description of Artificial Sequence: Synthetic oligonucleotide
  Antisense strand to SEQ ID NO: 1173984
gauuauaaugaccacacau

SEQ ID NO: 1173986 - RNA, 19 nt, Artificial Sequence
  Description of Artificial Sequence: Synthetic oligonucleotide
  Sense strand starting at position 3592 of SEQ ID NO: 916658
cccugacuguggucuauuu

SEQ ID NO: 1173987 - RNA, 19 nt, Artificial Sequence
  Description of Artificial Sequence: Synthetic oligonucleotide
  Antisense strand to SEQ ID NO: 1173986
aaauagaccacagucaggg

SEQ ID NO: 1173988 - RNA, 19 nt, Artificial Sequence
  Description of Artificial Sequence: Synthetic oligonucleotide
  Sense strand starting at position 3600 of SEQ ID NO: 916658
guggucuauuuccugccaa

SEQ ID NO: 1173989 - RNA, 19 nt, Artificial Sequence
  Description of Artificial Sequence: Synthetic oligonucleotide
  Antisense strand to SEQ ID NO: 1173988
uuggcaggaaauagaccac

SEQ ID NO: 1173990 - RNA, 19 nt, Artificial Sequence
  Description of Artificial Sequence: Synthetic oligonucleotide
  Sense strand starting at position 3619 of SEQ ID NO: 916658
ugaacucaacagugauuga

SEQ ID NO: 1173991 - RNA, 19 nt, Artificial Sequence
  Description of Artificial Sequence: Synthetic oligonucleotide
  Antisense strand to SEQ ID NO: 1173990
ucaaucacuguugaguuca

SEQ ID NO: 1173992 - RNA, 19 nt, Artificial Sequence
  Description of Artificial Sequence: Synthetic oligonucleotide
  Sense strand starting at position 3690 of SEQ ID NO: 916658
agcagaaucuccuugaguu

SEQ ID NO: 1173993 - RNA, 19 nt, Artificial Sequence
  Description of Artificial Sequence: Synthetic oligonucleotide
  Antisense strand to SEQ ID NO: 1173992
aacucaaggagauucugcu

SEQ ID NO: 1173994 - RNA, 19 nt, Artificial Sequence
  Description of Artificial Sequence: Synthetic oligonucleotide
  Sense strand starting at position 3691 of SEQ ID NO: 916658
gcagaaucuccuugaguug

SEQ ID NO: 1173995 - RNA, 19 nt, Artificial Sequence
  Description of Artificial Sequence: Synthetic oligonucleotide
  Antisense strand to SEQ ID NO: 1173994
caacucaaggagauucugc

SEQ ID NO: 1173996 - RNA, 19 nt, Artificial Sequence
  Description of Artificial Sequence: Synthetic oligonucleotide
  Sense strand starting at position 3737 of SEQ ID NO: 916658
ucccaucuaggcuaugaaa

SEQ ID NO: 1173997 - RNA, 19 nt, Artificial Sequence
  Description of Artificial Sequence: Synthetic oligonucleotide
  Antisense strand to SEQ ID NO: 1173996
uuucauagccuagauggga

SEQ ID NO: 1173998 - RNA, 19 nt, Artificial Sequence
  Description of Artificial Sequence: Synthetic oligonucleotide
  Sense strand starting at position 3746 of SEQ ID NO: 916658
ggcuaugaaacgcauacau

SEQ ID NO: 1173999 - RNA, 19 nt, Artificial Sequence
  Description of Artificial Sequence: Synthetic oligonucleotide
  Antisense strand to SEQ ID NO: 1173998
auguaugcguuucauagcc

SEQ ID NO: 1174000 - RNA, 19 nt, Artificial Sequence
  Description of Artificial Sequence: Synthetic oligonucleotide
  Sense strand starting at position 3748 of SEQ ID NO: 916658
cuaugaaacgcauacauga

SEQ ID NO: 1174001 - RNA, 19 nt, Artificial Sequence
  Description of Artificial Sequence: Synthetic oligonucleotide
  Antisense strand to SEQ ID NO: 1174000
ucauguaugcguuucauag

SEQ ID NO: 1174002 - RNA, 19 nt, Artificial Sequence
  Description of Artificial Sequence: Synthetic oligonucleotide
  Sense strand starting at position 3755 of SEQ ID NO: 916658
acgcauacaugaucagagu

SEQ ID NO: 1174003 - RNA, 19 nt, Artificial Sequence
  Description of Artificial Sequence: Synthetic oligonucleotide
  Antisense strand to SEQ ID NO: 1174002
acucugaucauguaugcgu

SEQ ID NO: 1174004 - RNA, 19 nt, Artificial Sequence
  Description of Artificial Sequence: Synthetic oligonucleotide
  Sense strand starting at position 3761 of SEQ ID NO: 916658
acaugaucagaguguucua

SEQ ID NO: 1174005 - RNA, 19 nt, Artificial Sequence
  Description of Artificial Sequence: Synthetic oligonucleotide
  Antisense strand to SEQ ID NO: 1174004
uagaacacucugaucaugu

SEQ ID NO: 1174006 - RNA, 19 nt, Artificial Sequence
  Description of Artificial Sequence: Synthetic oligonucleotide
  Sense strand starting at position 3764 of SEQ ID NO: 916658
ugaucagaguguucuaguc

SEQ ID NO: 1174007 - RNA, 19 nt, Artificial Sequence
  Description of Artificial Sequence: Synthetic oligonucleotide
  Antisense strand to SEQ ID NO: 1174006
gacuagaacacucugauca

SEQ ID NO: 1174008 - RNA, 19 nt, Artificial Sequence
  Description of Artificial Sequence: Synthetic oligonucleotide
  Sense strand starting at position 3790 of SEQ ID NO: 916658
ggacucuggugacucuauu

SEQ ID NO: 1174009 - RNA, 19 nt, Artificial Sequence
  Description of Artificial Sequence: Synthetic oligonucleotide
  Antisense strand to SEQ ID NO: 1174008
aauagagucaccagagucc

SEQ ID NO: 1174010 - RNA, 19 nt, Artificial Sequence
  Description of Artificial Sequence: Synthetic oligonucleotide
  Sense strand starting at position 3860 of SEQ ID NO: 916658
cuguguccauccucaaauc

SEQ ID NO: 1174011 - RNA, 19 nt, Artificial Sequence
  Description of Artificial Sequence: Synthetic oligonucleotide
  Antisense strand to SEQ ID NO: 1174010
gauuugaggauggacacag

SEQ ID NO: 1174012 - RNA, 19 nt, Artificial Sequence
  Description of Artificial Sequence: Synthetic oligonucleotide
  Sense strand starting at position 3903 of SEQ ID NO: 916658
gagcuugcuguugugugau

SEQ ID NO: 1174013 - RNA, 19 nt, Artificial Sequence
  Description of Artificial Sequence: Synthetic oligonucleotide
  Antisense strand to SEQ ID NO: 1174012
aucacacaacagcaagcuc

SEQ ID NO: 1174014 - RNA, 19 nt, Artificial Sequence
  Description of Artificial Sequence: Synthetic oligonucleotide
  Sense strand starting at position 3934 of SEQ ID NO: 916658
ucagaaguguccucuguuc

SEQ ID NO: 1174015 - RNA, 19 nt, Artificial Sequence
  Description of Artificial Sequence: Synthetic oligonucleotide
  Antisense strand to SEQ ID NO: 1174014
gaacagaggacacuucuga

SEQ ID NO: 1174016 - RNA, 19 nt, Artificial Sequence
  Description of Artificial Sequence: Synthetic oligonucleotide
  Sense strand starting at position 435 of SEQ ID NO: 916659
uuuacagguuucuuuggua

SEQ ID NO: 1174017 - RNA, 19 nt, Artificial Sequence
  Description of Artificial Sequence: Synthetic oligonucleotide
  Antisense strand to SEQ ID NO: 1174016
uaccaaagaaaccuguaaa

SEQ ID NO: 1174018 - RNA, 19 nt, Artificial Sequence
  Description of Artificial Sequence: Synthetic oligonucleotide
  Sense strand starting at position 438 of SEQ ID NO: 916659
acagguuucuuugguacca

SEQ ID NO: 1174019 - RNA, 19 nt, Artificial Sequence
  Description of Artificial Sequence: Synthetic oligonucleotide
  Antisense strand to SEQ ID NO: 1174018
ugguaccaaagaaaccugu

SEQ ID NO: 1174020 - RNA, 19 nt, Artificial Sequence
  Description of Artificial Sequence: Synthetic oligonucleotide
  Sense strand starting at position 439 of SEQ ID NO: 916659
cagguuucuuugguaccaa

SEQ ID NO: 1174021 - RNA, 19 nt, Artificial Sequence
  Description of Artificial Sequence: Synthetic oligonucleotide
  Antisense strand to SEQ ID NO: 1174020
uugguaccaaagaaaccug

SEQ ID NO: 1174022 - RNA, 19 nt, Artificial Sequence
  Description of Artificial Sequence: Synthetic oligonucleotide
  Sense strand starting at position 443 of SEQ ID NO: 916659
uuucuuugguaccaagaau

SEQ ID NO: 1174023 - RNA, 19 nt, Artificial Sequence
  Description of Artificial Sequence: Synthetic oligonucleotide
  Antisense strand to SEQ ID NO: 1174022
auucuugguaccaaagaaa

SEQ ID NO: 1174024 - RNA, 19 nt, Artificial Sequence
  Description of Artificial Sequence: Synthetic oligonucleotide
  Sense strand starting at position 451 of SEQ ID NO: 916659
guaccaagaaugugagcaa

SEQ ID NO: 1174025 - RNA, 19 nt, Artificial Sequence
  Description of Artificial Sequence: Synthetic oligonucleotide
  Antisense strand to SEQ ID NO: 1174024
uugcucacauucuugguac

SEQ ID NO: 1174026 - RNA, 19 nt, Artificial Sequence
  Description of Artificial Sequence: Synthetic oligonucleotide
  Sense strand starting at position 454 of SEQ ID NO: 916659
ccaagaaugugagcaauag

SEQ ID NO: 1174027 - RNA, 19 nt, Artificial Sequence
  Description of Artificial Sequence: Synthetic oligonucleotide
  Antisense strand to SEQ ID NO: 1174026
cuauugcucacauucuugg

SEQ ID NO: 1174028 - RNA, 19 nt, Artificial Sequence
  Description of Artificial Sequence: Synthetic oligonucleotide
  Sense strand starting at position 548 of SEQ ID NO: 916659
ugauguggcacugaggaua

SEQ ID NO: 1174029 - RNA, 19 nt, Artificial Sequence
  Description of Artificial Sequence: Synthetic oligonucleotide
  Antisense strand to SEQ ID NO: 1174028
uauccucagugccacauca

SEQ ID NO: 1174030 - RNA, 19 nt, Artificial Sequence
  Description of Artificial Sequence: Synthetic oligonucleotide
  Sense strand starting at position 597 of SEQ ID NO: 916659
guaauuugacuugguaguu

SEQ ID NO: 1174031 - RNA, 19 nt, Artificial Sequence
  Description of Artificial Sequence: Synthetic oligonucleotide
  Antisense strand to SEQ ID NO: 1174030
aacuaccaagucaaauuac

SEQ ID NO: 1174032 - RNA, 19 nt, Artificial Sequence
  Description of Artificial Sequence: Synthetic oligonucleotide
  Sense strand starting at position 659 of SEQ ID NO: 916659
aucaaagugucucaaguca

SEQ ID NO: 1174033 - RNA, 19 nt, Artificial Sequence
  Description of Artificial Sequence: Synthetic oligonucleotide
  Antisense strand to SEQ ID NO: 1174032
ugacuugagacacuuugau

SEQ ID NO: 1174034 - RNA, 19 nt, Artificial Sequence
  Description of Artificial Sequence: Synthetic oligonucleotide
  Sense strand starting at position 1096 of SEQ ID NO: 916659
caggcuuggcucuagaugu

SEQ ID NO: 1174035 - RNA, 19 nt, Artificial Sequence
  Description of Artificial Sequence: Synthetic oligonucleotide
  Antisense strand to SEQ ID NO: 1174034
acaucuagagccaagccug

SEQ ID NO: 1174036 - RNA, 19 nt, Artificial Sequence
  Description of Artificial Sequence: Synthetic oligonucleotide
  Sense strand starting at position 1395 of SEQ ID NO: 916659
gcauucuggucucucguaa

SEQ ID NO: 1174037 - RNA, 19 nt, Artificial Sequence
  Description of Artificial Sequence: Synthetic oligonucleotide
  Antisense strand to SEQ ID NO: 1174036
uuacgagagaccagaaugc

SEQ ID NO: 1174038 - RNA, 19 nt, Artificial Sequence
  Description of Artificial Sequence: Synthetic oligonucleotide
  Sense strand starting at position 1408 of SEQ ID NO: 916659
ucguaacucuccuugucua

SEQ ID NO: 1174039 - RNA, 19 nt, Artificial Sequence
  Description of Artificial Sequence: Synthetic oligonucleotide
  Antisense strand to SEQ ID NO: 1174038
uagacaaggagaguuacga

SEQ ID NO: 1174040 - RNA, 19 nt, Artificial Sequence
  Description of Artificial Sequence: Synthetic oligonucleotide
  Sense strand starting at position 1409 of SEQ ID NO: 916659
cguaacucuccuugucuau

SEQ ID NO: 1174041 - RNA, 19 nt, Artificial Sequence
  Description of Artificial Sequence: Synthetic oligonucleotide
  Antisense strand to SEQ ID NO: 1174040
auagacaaggagaguuacg

SEQ ID NO: 1174042 - RNA, 19 nt, Artificial Sequence
  Description of Artificial Sequence: Synthetic oligonucleotide
  Sense strand starting at position 2011 of SEQ ID NO: 916659
cgcagcucuuugucugaga

SEQ ID NO: 1174043 - RNA, 19 nt, Artificial Sequence
  Description of Artificial Sequence: Synthetic oligonucleotide
  Antisense strand to SEQ ID NO: 1174042
ucucagacaaagagcugcg

SEQ ID NO: 1174044 - RNA, 19 nt, Artificial Sequence
  Description of Artificial Sequence: Synthetic oligonucleotide
  Sense strand starting at position 2014 of SEQ ID NO: 916659
agcucuuugucugagaccu

SEQ ID NO: 1174045 - RNA, 19 nt, Artificial Sequence
  Description of Artificial Sequence: Synthetic oligonucleotide
  Antisense strand to SEQ ID NO: 1174044
aggucucagacaaagagcu

SEQ ID NO: 1174046 - RNA, 19 nt, Artificial Sequence
  Description of Artificial Sequence: Synthetic oligonucleotide
  Sense strand starting at position 2105 of SEQ ID NO: 916659
ugugauaucccuggagccu

SEQ ID NO: 1174047 - RNA, 19 nt, Artificial Sequence
  Description of Artificial Sequence: Synthetic oligonucleotide
  Antisense strand to SEQ ID NO: 1174046
aggcuccagggauaucaca

SEQ ID NO: 1174048 - RNA, 19 nt, Artificial Sequence
  Description of Artificial Sequence: Synthetic oligonucleotide
  Sense strand starting at position 2639 of SEQ ID NO: 916659
auggcugccucaucuauga

SEQ ID NO: 1174049 - RNA, 19 nt, Artificial Sequence
  Description of Artificial Sequence: Synthetic oligonucleotide
  Antisense strand to SEQ ID NO: 1174048
ucauagaugaggcagccau

SEQ ID NO: 1174050 - RNA, 19 nt, Artificial Sequence
  Description of Artificial Sequence: Synthetic oligonucleotide
  Sense strand starting at position 2649 of SEQ ID NO: 916659
caucuaugacuugguggga

SEQ ID NO: 1174051 - RNA, 19 nt, Artificial Sequence
  Description of Artificial Sequence: Synthetic oligonucleotide
  Antisense strand to SEQ ID NO: 1174050
ucccaccaagucauagaug

SEQ ID NO: 1174052 - RNA, 19 nt, Artificial Sequence
  Description of Artificial Sequence: Synthetic oligonucleotide
  Sense strand starting at position 2652 of SEQ ID NO: 916659
cuaugacuuggugggagua

SEQ ID NO: 1174053 - RNA, 19 nt, Artificial Sequence
  Description of Artificial Sequence: Synthetic oligonucleotide
  Antisense strand to SEQ ID NO: 1174052
uacucccaccaagucauag

SEQ ID NO: 1174054 - RNA, 19 nt, Artificial Sequence
  Description of Artificial Sequence: Synthetic oligonucleotide
  Sense strand starting at position 2670 of SEQ ID NO: 916659
aggguagguccagguacau

SEQ ID NO: 1174055 - RNA, 19 nt, Artificial Sequence
  Description of Artificial Sequence: Synthetic oligonucleotide
  Antisense strand to SEQ ID NO: 1174054
auguaccuggaccuacccu

SEQ ID NO: 1174056 - RNA, 19 nt, Artificial Sequence
  Description of Artificial Sequence: Synthetic oligonucleotide
  Sense strand starting at position 2682 of SEQ ID NO: 916659
gguacauauuggguaggaa

SEQ ID NO: 1174057 - RNA, 19 nt, Artificial Sequence
  Description of Artificial Sequence: Synthetic oligonucleotide
  Antisense strand to SEQ ID NO: 1174056
uuccuacccaauauguacc

SEQ ID NO: 1174058 - RNA, 19 nt, Artificial Sequence
  Description of Artificial Sequence: Synthetic oligonucleotide
  Sense strand starting at position 2710 of SEQ ID NO: 916659
agauguaccuccucucuca

SEQ ID NO: 1174059 - RNA, 19 nt, Artificial Sequence
  Description of Artificial Sequence: Synthetic oligonucleotide
  Antisense strand to SEQ ID NO: 1174058
ugagagaggagguacaucu

SEQ ID NO: 1174060 - RNA, 19 nt, Artificial Sequence
  Description of Artificial Sequence: Synthetic oligonucleotide
  Sense strand starting at position 2723 of SEQ ID NO: 916659
cucucacaugugugcauau

SEQ ID NO: 1174061 - RNA, 19 nt, Artificial Sequence
  Description of Artificial Sequence: Synthetic oligonucleotide
  Antisense strand to SEQ ID NO: 1174060
auaugcacacaugugagag

SEQ ID NO: 1174062 - RNA, 19 nt, Artificial Sequence
  Description of Artificial Sequence: Synthetic oligonucleotide
  Sense strand starting at position 2724 of SEQ ID NO: 916659
ucucacaugugugcauauu

SEQ ID NO: 1174063 - RNA, 19 nt, Artificial Sequence
  Description of Artificial Sequence: Synthetic oligonucleotide
  Antisense strand to SEQ ID NO: 1174062
aauaugcacacaugugaga

SEQ ID NO: 1174064 - RNA, 19 nt, Artificial Sequence
  Description of Artificial Sequence: Synthetic oligonucleotide
  Sense strand starting at position 2825 of SEQ ID NO: 916659
gaggguucuccuugcaccu

SEQ ID NO: 1174065 - RNA, 19 nt, Artificial Sequence
  Description of Artificial Sequence: Synthetic oligonucleotide
  Antisense strand to SEQ ID NO: 1174064
aggugcaaggagaacccuc

SEQ ID NO: 1174066 - RNA, 19 nt, Artificial Sequence
  Description of Artificial Sequence: Synthetic oligonucleotide
  Sense strand starting at position 2866 of SEQ ID NO: 916659
ccauauaaagcuugggaaa

SEQ ID NO: 1174067 - RNA, 19 nt, Artificial Sequence
  Description of Artificial Sequence: Synthetic oligonucleotide
  Antisense strand to SEQ ID NO: 1174066
uuucccaagcuuuauaugg

SEQ ID NO: 1174068 - RNA, 19 nt, Artificial Sequence
  Description of Artificial Sequence: Synthetic oligonucleotide
  Sense strand starting at position 3113 of SEQ ID NO: 916659
uucugcuggucuccuaaua

SEQ ID NO: 1174069 - RNA, 19 nt, Artificial Sequence
  Description of Artificial Sequence: Synthetic oligonucleotide
  Antisense strand to SEQ ID NO: 1174068
uauuaggagaccagcagaa

SEQ ID NO: 1174070 - RNA, 19 nt, Artificial Sequence
  Description of Artificial Sequence: Synthetic oligonucleotide
  Sense strand starting at position 3136 of SEQ ID NO: 916659
gugacugcuucuugcuagu

SEQ ID NO: 1174071 - RNA, 19 nt, Artificial Sequence
  Description of Artificial Sequence: Synthetic oligonucleotide
  Antisense strand to SEQ ID NO: 1174070
acuagcaagaagcagucac

SEQ ID NO: 1174072 - RNA, 19 nt, Artificial Sequence
  Description of Artificial Sequence: Synthetic oligonucleotide
  Sense strand starting at position 3173 of SEQ ID NO: 916659
ccgcgaagucucuaaucuu

SEQ ID NO: 1174073 - RNA, 19 nt, Artificial Sequence
  Description of Artificial Sequence: Synthetic oligonucleotide
  Antisense strand to SEQ ID NO: 1174072
aagauuagagacuucgcgg

SEQ ID NO: 1174074 - RNA, 19 nt, Artificial Sequence
  Description of Artificial Sequence: Synthetic oligonucleotide
  Sense strand starting at position 3176 of SEQ ID NO: 916659
cgaagucucuaaucuuuac

SEQ ID NO: 1174075 - RNA, 19 nt, Artificial Sequence
  Description of Artificial Sequence: Synthetic oligonucleotide
  Antisense strand to SEQ ID NO: 1174074
guaaagauuagagacuucg

SEQ ID NO: 1174076 - RNA, 19 nt, Artificial Sequence
  Description of Artificial Sequence: Synthetic oligonucleotide
  Sense strand starting at position 3194 of SEQ ID NO: 916659
cugucuggccuuuacugaa

SEQ ID NO: 1174077 - RNA, 19 nt, Artificial Sequence
  Description of Artificial Sequence: Synthetic oligonucleotide
  Antisense strand to SEQ ID NO: 1174076
uucaguaaaggccagacag

SEQ ID NO: 1174078 - RNA, 19 nt, Artificial Sequence
  Description of Artificial Sequence: Synthetic oligonucleotide
  Sense strand starting at position 3309 of SEQ ID NO: 916659
gaauuagaguuucuccagu

SEQ ID NO: 1174079 - RNA, 19 nt, Artificial Sequence
  Description of Artificial Sequence: Synthetic oligonucleotide
  Antisense strand to SEQ ID NO: 1174078
acuggagaaacucuaauuc

SEQ ID NO: 1174080 - RNA, 19 nt, Artificial Sequence
  Description of Artificial Sequence: Synthetic oligonucleotide
  Sense strand starting at position 3311 of SEQ ID NO: 916659
auuagaguuucuccaguuu

SEQ ID NO: 1174081 - RNA, 19 nt, Artificial Sequence
  Description of Artificial Sequence: Synthetic oligonucleotide
  Antisense strand to SEQ ID NO: 1174080
aaacuggagaaacucuaau

SEQ ID NO: 1174082 - RNA, 19 nt, Artificial Sequence
  Description of Artificial Sequence: Synthetic oligonucleotide
  Sense strand starting at position 3320 of SEQ ID NO: 916659
ucuccaguuucgggcuaua

SEQ ID NO: 1174083 - RNA, 19 nt, Artificial Sequence
  Description of Artificial Sequence: Synthetic oligonucleotide
  Antisense strand to SEQ ID NO: 1174082
uauagcccgaaacuggaga

SEQ ID NO: 1174084 - RNA, 19 nt, Artificial Sequence
  Description of Artificial Sequence: Synthetic oligonucleotide
  Sense strand starting at position 3323 of SEQ ID NO: 916659
ccaguuucgggcuauauau

SEQ ID NO: 1174085 - RNA, 19 nt, Artificial Sequence
  Description of Artificial Sequence: Synthetic oligonucleotide
  Antisense strand to SEQ ID NO: 1174084
auauauagcccgaaacugg

SEQ ID NO: 1174086 - RNA, 19 nt, Artificial Sequence
  Description of Artificial Sequence: Synthetic oligonucleotide
  Sense strand starting at position 424 of SEQ ID NO: 916660
auggcugccucaucuauga

SEQ ID NO: 1174087 - RNA, 19 nt, Artificial Sequence
  Description of Artificial Sequence: Synthetic oligonucleotide
  Antisense strand to SEQ ID NO: 1174086
ucauagaugaggcagccau

SEQ ID NO: 1174088 - RNA, 19 nt, Artificial Sequence
  Description of Artificial Sequence: Synthetic oligonucleotide
  Sense strand starting at position 434 of SEQ ID NO: 916660
caucuaugacuugguggga

SEQ ID NO: 1174089 - RNA, 19 nt, Artificial Sequence
  Description of Artificial Sequence: Synthetic oligonucleotide
  Antisense strand to SEQ ID NO: 1174088
ucccaccaagucauagaug

SEQ ID NO: 1174090 - RNA, 19 nt, Artificial Sequence
  Description of Artificial Sequence: Synthetic oligonucleotide
  Sense strand starting at position 437 of SEQ ID NO: 916660
cuaugacuuggugggagua

SEQ ID NO: 1174091 - RNA, 19 nt, Artificial Sequence
  Description of Artificial Sequence: Synthetic oligonucleotide
  Antisense strand to SEQ ID NO: 1174090
uacucccaccaagucauag

SEQ ID NO: 1174092 - RNA, 19 nt, Artificial Sequence
  Description of Artificial Sequence: Synthetic oligonucleotide
  Sense strand starting at position 455 of SEQ ID NO: 916660
aggguagguccagguacau

SEQ ID NO: 1174093 - RNA, 19 nt, Artificial Sequence
  Description of Artificial Sequence: Synthetic oligonucleotide
  Antisense strand to SEQ ID NO: 1174092
auguaccuggaccuacccu

SEQ ID NO: 1174094 - RNA, 19 nt, Artificial Sequence
  Description of Artificial Sequence: Synthetic oligonucleotide
  Sense strand starting at position 467 of SEQ ID NO: 916660
gguacauauuggguaggaa

SEQ ID NO: 1174095 - RNA, 19 nt, Artificial Sequence
  Description of Artificial Sequence: Synthetic oligonucleotide
  Antisense strand to SEQ ID NO: 1174094
uuccuacccaauauguacc

SEQ ID NO: 1174096 - RNA, 19 nt, Artificial Sequence
  Description of Artificial Sequence: Synthetic oligonucleotide
  Sense strand starting at position 495 of SEQ ID NO: 916660
agauguaccuccucucuca

SEQ ID NO: 1174097 - RNA, 19 nt, Artificial Sequence
  Description of Artificial Sequence: Synthetic oligonucleotide
  Antisense strand to SEQ ID NO: 1174096
ugagagaggagguacaucu

SEQ ID NO: 1174098 - RNA, 19 nt, Artificial Sequence
  Description of Artificial Sequence: Synthetic oligonucleotide
  Sense strand starting at position 610 of SEQ ID NO: 916660
gaggguucuccuugcaccu

SEQ ID NO: 1174099 - RNA, 19 nt, Artificial Sequence
  Description of Artificial Sequence: Synthetic oligonucleotide
  Antisense strand to SEQ ID NO: 1174098
aggugcaaggagaacccuc

SEQ ID NO: 1174100 - RNA, 19 nt, Artificial Sequence
  Description of Artificial Sequence: Synthetic oligonucleotide
  Sense strand starting at position 651 of SEQ ID NO: 916660
ccauauaaagcuugggaaa

SEQ ID NO: 1174101 - RNA, 19 nt, Artificial Sequence
  Description of Artificial Sequence: Synthetic oligonucleotide
  Antisense strand to SEQ ID NO: 1174100
uuucccaagcuuuauaugg

SEQ ID NO: 1174102 - RNA, 19 nt, Artificial Sequence
  Description of Artificial Sequence: Synthetic oligonucleotide
  Sense strand starting at position 961 of SEQ ID NO: 916660
cgaagucucuaaucuuuac

SEQ ID NO: 1174103 - RNA, 19 nt, Artificial Sequence
  Description of Artificial Sequence: Synthetic oligonucleotide
  Antisense strand to SEQ ID NO: 1174102
guaaagauuagagacuucg

SEQ ID NO: 1174104 - RNA, 19 nt, Artificial Sequence
  Description of Artificial Sequence: Synthetic oligonucleotide
  Sense strand starting at position 979 of SEQ ID NO: 916660
cugucuggccuuuacugaa

SEQ ID NO: 1174105 - RNA, 19 nt, Artificial Sequence
  Description of Artificial Sequence: Synthetic oligonucleotide
  Antisense strand to SEQ ID NO: 1174104
uucaguaaaggccagacag

SEQ ID NO: 1174106 - RNA, 19 nt, Artificial Sequence
  Description of Artificial Sequence: Synthetic oligonucleotide
  Sense strand starting at position 1094 of SEQ ID NO: 916660
gaauuagaguuucuccagu

SEQ ID NO: 1174107 - RNA, 19 nt, Artificial Sequence
  Description of Artificial Sequence: Synthetic oligonucleotide
  Antisense strand to SEQ ID NO: 1174106
acuggagaaacucuaauuc

SEQ ID NO: 1174108 - RNA, 19 nt, Artificial Sequence
  Description of Artificial Sequence: Synthetic oligonucleotide
  Sense strand starting at position 1096 of SEQ ID NO: 916660
auuagaguuucuccaguuu

SEQ ID NO: 1174109 - RNA, 19 nt, Artificial Sequence
  Description of Artificial Sequence: Synthetic oligonucleotide
  Antisense strand to SEQ ID NO: 1174108
aaacuggagaaacucuaau

SEQ ID NO: 1174110 - RNA, 19 nt, Artificial Sequence
  Description of Artificial Sequence: Synthetic oligonucleotide
  Sense strand starting at position 1108 of SEQ ID NO: 916660
ccaguuucgggcuauauau

SEQ ID NO: 1174111 - RNA, 19 nt, Artificial Sequence
  Description of Artificial Sequence: Synthetic oligonucleotide
  Antisense strand to SEQ ID NO: 1174110
auauauagcccgaaacugg

SEQ ID NO: 1174112 - RNA, 19 nt, Artificial Sequence
  Description of Artificial Sequence: Synthetic oligonucleotide
  Sense strand starting at position 2004 of SEQ ID NO: 916660
aguaaugagggcugaguaa

SEQ ID NO: 1174113 - RNA, 19 nt, Artificial Sequence
  Description of Artificial Sequence: Synthetic oligonucleotide
  Antisense strand to SEQ ID NO: 1174112
uuacucagcccucauuacu

SEQ ID NO: 1174114 - RNA, 19 nt, Artificial Sequence
  Description of Artificial Sequence: Synthetic oligonucleotide
  Sense strand starting at position 2205 of SEQ ID NO: 916660
uccaaagugugagccuuau

SEQ ID NO: 1174115 - RNA, 19 nt, Artificial Sequence
  Description of Artificial Sequence: Synthetic oligonucleotide
  Antisense strand to SEQ ID NO: 1174114
auaaggcucacacuuugga

SEQ ID NO: 1174116 - RNA, 19 nt, Artificial Sequence
  Description of Artificial Sequence: Synthetic oligonucleotide
  Sense strand starting at position 2209 of SEQ ID NO: 916660
aagugugagccuuaucucu

SEQ ID NO: 1174117 - RNA, 19 nt, Artificial Sequence
  Description of Artificial Sequence: Synthetic oligonucleotide
  Antisense strand to SEQ ID NO: 1174116
agagauaaggcucacacuu

SEQ ID NO: 1174118 - RNA, 19 nt, Artificial Sequence
  Description of Artificial Sequence: Synthetic oligonucleotide
  Sense strand starting at position 2267 of SEQ ID NO: 916660
gaaggcuauccuggacuuu

SEQ ID NO: 1174119 - RNA, 19 nt, Artificial Sequence
  Description of Artificial Sequence: Synthetic oligonucleotide
  Antisense strand to SEQ ID NO: 1174118
aaaguccaggauagccuuc

SEQ ID NO: 1174120 - RNA, 19 nt, Artificial Sequence
  Description of Artificial Sequence: Synthetic oligonucleotide
  Sense strand starting at position 2284 of SEQ ID NO: 916660
uugccuuugcuccagggau

SEQ ID NO: 1174121 - RNA, 19 nt, Artificial Sequence
  Description of Artificial Sequence: Synthetic oligonucleotide
  Antisense strand to SEQ ID NO: 1174120
aucccuggagcaaaggcaa

SEQ ID NO: 1174122 - RNA, 19 nt, Artificial Sequence
  Description of Artificial Sequence: Synthetic oligonucleotide
  Sense strand starting at position 2286 of SEQ ID NO: 916660
gccuuugcuccagggauag

SEQ ID NO: 1174123 - RNA, 19 nt, Artificial Sequence
  Description of Artificial Sequence: Synthetic oligonucleotide
  Antisense strand to SEQ ID NO: 1174122
cuaucccuggagcaaaggc

SEQ ID NO: 1174124 - RNA, 19 nt, Artificial Sequence
  Description of Artificial Sequence: Synthetic oligonucleotide
  Sense strand starting at position 2790 of SEQ ID NO: 916660
ugggcauugcaugaaagga

SEQ ID NO: 1174125 - RNA, 19 nt, Artificial Sequence
  Description of Artificial Sequence: Synthetic oligonucleotide
  Antisense strand to SEQ ID NO: 1174124
uccuuucaugcaaugccca

SEQ ID NO: 1174126 - RNA, 19 nt, Artificial Sequence
  Description of Artificial Sequence: Synthetic oligonucleotide
  Sense strand starting at position 2996 of SEQ ID NO: 916660
agaaguguccuguggaugu

SEQ ID NO: 1174127 - RNA, 19 nt, Artificial Sequence
  Description of Artificial Sequence: Synthetic oligonucleotide
  Antisense strand to SEQ ID NO: 1174126
acauccacaggacacuucu

SEQ ID NO: 1174128 - RNA, 19 nt, Artificial Sequence
  Description of Artificial Sequence: Synthetic oligonucleotide
  Sense strand starting at position 3011 of SEQ ID NO: 916660
auguguggucauuauaauc

SEQ ID NO: 1174129 - RNA, 19 nt, Artificial Sequence
  Description of Artificial Sequence: Synthetic oligonucleotide
  Antisense strand to SEQ ID NO: 1174128
gauuauaaugaccacacau

SEQ ID NO: 1174130 - RNA, 19 nt, Artificial Sequence
  Description of Artificial Sequence: Synthetic oligonucleotide
  Sense strand starting at position 3095 of SEQ ID NO: 916660
cccugacuguggucuauuu

SEQ ID NO: 1174131 - RNA, 19 nt, Artificial Sequence
  Description of Artificial Sequence: Synthetic oligonucleotide
  Antisense strand to SEQ ID NO: 1174130
aaauagaccacagucaggg

SEQ ID NO: 1174132 - RNA, 19 nt, Artificial Sequence
  Description of Artificial Sequence: Synthetic oligonucleotide
  Sense strand starting at position 3103 of SEQ ID NO: 916660
guggucuauuuccugccaa

SEQ ID NO: 1174133 - RNA, 19 nt, Artificial Sequence
  Description of Artificial Sequence: Synthetic oligonucleotide
  Antisense strand to SEQ ID NO: 1174132
uuggcaggaaauagaccac

SEQ ID NO: 1174134 - RNA, 19 nt, Artificial Sequence
  Description of Artificial Sequence: Synthetic oligonucleotide
  Sense strand starting at position 3122 of SEQ ID NO: 916660
ugaacucaacagugauuga

SEQ ID NO: 1174135 - RNA, 19 nt, Artificial Sequence
  Description of Artificial Sequence: Synthetic oligonucleotide
  Antisense strand to SEQ ID NO: 1174134
ucaaucacuguugaguuca

SEQ ID NO: 1174136 - RNA, 19 nt, Artificial Sequence
  Description of Artificial Sequence: Synthetic oligonucleotide
  Sense strand starting at position 3193 of SEQ ID NO: 916660
agcagaaucuccuugaguu

SEQ ID NO: 1174137 - RNA, 19 nt, Artificial Sequence
  Description of Artificial Sequence: Synthetic oligonucleotide
  Antisense strand to SEQ ID NO: 1174136
aacucaaggagauucugcu

SEQ ID NO: 1174138 - RNA, 19 nt, Artificial Sequence
  Description of Artificial Sequence: Synthetic oligonucleotide
  Sense strand starting at position 3194 of SEQ ID NO: 916660
gcagaaucuccuugaguug

SEQ ID NO: 1174139 - RNA, 19 nt, Artificial Sequence
  Description of Artificial Sequence: Synthetic oligonucleotide
  Antisense strand to SEQ ID NO: 1174138
caacucaaggagauucugc

SEQ ID NO: 1174140 - RNA, 19 nt, Artificial Sequence
  Description of Artificial Sequence: Synthetic oligonucleotide
  Sense strand starting at position 3240 of SEQ ID NO: 916660
ucccaucuaggcuaugaaa

SEQ ID NO: 1174141 - RNA, 19 nt, Artificial Sequence
  Description of Artificial Sequence: Synthetic oligonucleotide
  Antisense strand to SEQ ID NO: 1174140
uuucauagccuagauggga

SEQ ID NO: 1174142 - RNA, 19 nt, Artificial Sequence
  Description of Artificial Sequence: Synthetic oligonucleotide
  Sense strand starting at position 3249 of SEQ ID NO: 916660
ggcuaugaaacgcauacau

SEQ ID NO: 1174143 - RNA, 19 nt, Artificial Sequence
  Description of Artificial Sequence: Synthetic oligonucleotide
  Antisense strand to SEQ ID NO: 1174142
auguaugcguuucauagcc

SEQ ID NO: 1174144 - RNA, 19 nt, Artificial Sequence
  Description of Artificial Sequence: Synthetic oligonucleotide
  Sense strand starting at position 3251 of SEQ ID NO: 916660
cuaugaaacgcauacauga

SEQ ID NO: 1174145 - RNA, 19 nt, Artificial Sequence
  Description of Artificial Sequence: Synthetic oligonucleotide
  Antisense strand to SEQ ID NO: 1174144
ucauguaugcguuucauag

SEQ ID NO: 1174146 - RNA, 19 nt, Artificial Sequence
  Description of Artificial Sequence: Synthetic oligonucleotide
  Sense strand starting at position 3258 of SEQ ID NO: 916660
acgcauacaugaucagagu

SEQ ID NO: 1174147 - RNA, 19 nt, Artificial Sequence
  Description of Artificial Sequence: Synthetic oligonucleotide
  Antisense strand to SEQ ID NO: 1174146
acucugaucauguaugcgu

SEQ ID NO: 1174148 - RNA, 19 nt, Artificial Sequence
  Description of Artificial Sequence: Synthetic oligonucleotide
  Sense strand starting at position 3264 of SEQ ID NO: 916660
acaugaucagaguguucua

SEQ ID NO: 1174149 - RNA, 19 nt, Artificial Sequence
  Description of Artificial Sequence: Synthetic oligonucleotide
  Antisense strand to SEQ ID NO: 1174148
uagaacacucugaucaugu

SEQ ID NO: 1174150 - RNA, 19 nt, Artificial Sequence
  Description of Artificial Sequence: Synthetic oligonucleotide
  Sense strand starting at position 3267 of SEQ ID NO: 916660
ugaucagaguguucuaguc

SEQ ID NO: 1174151 - RNA, 19 nt, Artificial Sequence
  Description of Artificial Sequence: Synthetic oligonucleotide
  Antisense strand to SEQ ID NO: 1174150
gacuagaacacucugauca

SEQ ID NO: 1174152 - RNA, 19 nt, Artificial Sequence
  Description of Artificial Sequence: Synthetic oligonucleotide
  Sense strand starting at position 3293 of SEQ ID NO: 916660
ggacucuggugacucuauu

SEQ ID NO: 1174153 - RNA, 19 nt, Artificial Sequence
  Description of Artificial Sequence: Synthetic oligonucleotide
  Antisense strand to SEQ ID NO: 1174152
aauagagucaccagagucc

SEQ ID NO: 1174154 - RNA, 19 nt, Artificial Sequence
  Description of Artificial Sequence: Synthetic oligonucleotide
  Sense strand starting at position 3363 of SEQ ID NO: 916660
cuguguccauccucaaauc

SEQ ID NO: 1174155 - RNA, 19 nt, Artificial Sequence
  Description of Artificial Sequence: Synthetic oligonucleotide
  Antisense strand to SEQ ID NO: 1174154
gauuugaggauggacacag

SEQ ID NO: 1174156 - RNA, 19 nt, Artificial Sequence
  Description of Artificial Sequence: Synthetic oligonucleotide
  Sense strand starting at position 3406 of SEQ ID NO: 916660
gagcuugcuguugugugau

SEQ ID NO: 1174157 - RNA, 19 nt, Artificial Sequence
  Description of Artificial Sequence: Synthetic oligonucleotide
  Antisense strand to SEQ ID NO: 1174156
aucacacaacagcaagcuc

SEQ ID NO: 1174158 - RNA, 19 nt, Artificial Sequence
  Description of Artificial Sequence: Synthetic oligonucleotide
  Sense strand starting at position 3522 of SEQ ID NO: 916660
ggugaagucaggugggaaa

SEQ ID NO: 1174159 - RNA, 19 nt, Artificial Sequence
  Description of Artificial Sequence: Synthetic oligonucleotide
  Antisense strand to SEQ ID NO: 1174158
uuucccaccugacuucacc

SEQ ID NO: 1174160 - RNA, 19 nt, Artificial Sequence
  Description of Artificial Sequence: Synthetic oligonucleotide
  Sense strand starting at position 3653 of SEQ ID NO: 916660
guguguggugagagcuaga

SEQ ID NO: 1174161 - RNA, 19 nt, Artificial Sequence
  Description of Artificial Sequence: Synthetic oligonucleotide
  Antisense strand to SEQ ID NO: 1174160
ucuagcucucaccacacac

SEQ ID NO: 1174162 - RNA, 19 nt, Artificial Sequence
  Description of Artificial Sequence: Synthetic oligonucleotide
  Sense strand starting at position 3745 of SEQ ID NO: 916660
ggugauuacggacaguauu

SEQ ID NO: 1174163 - RNA, 19 nt, Artificial Sequence
  Description of Artificial Sequence: Synthetic oligonucleotide
  Antisense strand to SEQ ID NO: 1174162
aauacuguccguaaucacc

SEQ ID NO: 1174164 - RNA, 19 nt, Artificial Sequence
  Description of Artificial Sequence: Synthetic oligonucleotide
  Sense strand starting at position 3855 of SEQ ID NO: 916660
agaugaaauugagagagca

SEQ ID NO: 1174165 - RNA, 19 nt, Artificial Sequence
  Description of Artificial Sequence: Synthetic oligonucleotide
  Antisense strand to SEQ ID NO: 1174164
ugcucucucaauuucaucu

SEQ ID NO: 1174166 - RNA, 19 nt, Artificial Sequence
  Description of Artificial Sequence: Synthetic oligonucleotide
  Sense strand starting at position 6 of SEQ ID NO: 916661
ugguuuaggguaugaagga

SEQ ID NO: 1174167 - RNA, 19 nt, Artificial Sequence
  Description of Artificial Sequence: Synthetic oligonucleotide
  Antisense strand to SEQ ID NO: 1174166
uccuucauacccuaaacca

SEQ ID NO: 1174168 - RNA, 19 nt, Artificial Sequence
  Description of Artificial Sequence: Synthetic oligonucleotide
  Sense strand starting at position 110 of SEQ ID NO: 916661
guaagacagucaccaggau

SEQ ID NO: 1174169 - RNA, 19 nt, Artificial Sequence
  Description of Artificial Sequence: Synthetic oligonucleotide
  Antisense strand to SEQ ID NO: 1174168
auccuggugacugucuuac

SEQ ID NO: 1174170 - RNA, 19 nt, Artificial Sequence
  Description of Artificial Sequence: Synthetic oligonucleotide
  Sense strand starting at position 289 of SEQ ID NO: 916661
gggugcuauuuacaugaaa

SEQ ID NO: 1174171 - RNA, 19 nt, Artificial Sequence
  Description of Artificial Sequence: Synthetic oligonucleotide
  Antisense strand to SEQ ID NO: 1174170
uuucauguaaauagcaccc

SEQ ID NO: 1174172 - RNA, 19 nt, Artificial Sequence
  Description of Artificial Sequence: Synthetic oligonucleotide
  Sense strand starting at position 429 of SEQ ID NO: 916661
gagcaagagcuccgagaga

SEQ ID NO: 1174173 - RNA, 19 nt, Artificial Sequence
  Description of Artificial Sequence: Synthetic oligonucleotide
  Antisense strand to SEQ ID NO: 1174172
ucucucggagcucuugcuc

SEQ ID NO: 1174174 - RNA, 19 nt, Artificial Sequence
  Description of Artificial Sequence: Synthetic oligonucleotide
  Sense strand starting at position 510 of SEQ ID NO: 916661
gugcaaacuggugagacaa

SEQ ID NO: 1174175 - RNA, 19 nt, Artificial Sequence
  Description of Artificial Sequence: Synthetic oligonucleotide
  Antisense strand to SEQ ID NO: 1174174
uugucucaccaguuugcac

SEQ ID NO: 1174176 - RNA, 19 nt, Artificial Sequence
  Description of Artificial Sequence: Synthetic oligonucleotide
  Sense strand starting at position 614 of SEQ ID NO: 916661
aguagaguaauagguaaac

SEQ ID NO: 1174177 - RNA, 19 nt, Artificial Sequence
  Description of Artificial Sequence: Synthetic oligonucleotide
  Antisense strand to SEQ ID NO: 1174176
guuuaccuauuacucuacu

SEQ ID NO: 1174178 - RNA, 19 nt, Artificial Sequence
  Description of Artificial Sequence: Synthetic oligonucleotide
  Sense strand starting at position 1104 of SEQ ID NO: 916661
ggucuuauccuguacauga

SEQ ID NO: 1174179 - RNA, 19 nt, Artificial Sequence
  Description of Artificial Sequence: Synthetic oligonucleotide
  Antisense strand to SEQ ID NO: 1174178
ucauguacaggauaagacc

SEQ ID NO: 1174180 - RNA, 19 nt, Artificial Sequence
  Description of Artificial Sequence: Synthetic oligonucleotide
  Sense strand starting at position 1323 of SEQ ID NO: 916661
ccuaauaugcagcaugaaa

SEQ ID NO: 1174181 - RNA, 19 nt, Artificial Sequence
  Description of Artificial Sequence: Synthetic oligonucleotide
  Antisense strand to SEQ ID NO: 1174180
uuucaugcugcauauuagg

SEQ ID NO: 1174182 - RNA, 19 nt, Artificial Sequence
  Description of Artificial Sequence: Synthetic oligonucleotide
  Sense strand starting at position 1349 of SEQ ID NO: 916661
ugugcauuauuucuaguuu

SEQ ID NO: 1174183 - RNA, 19 nt, Artificial Sequence
  Description of Artificial Sequence: Synthetic oligonucleotide
  Antisense strand to SEQ ID NO: 1174182
aaacuagaaauaaugcaca

SEQ ID NO: 1174184 - RNA, 19 nt, Artificial Sequence
  Description of Artificial Sequence: Synthetic oligonucleotide
  Sense strand starting at position 1540 of SEQ ID NO: 916661
aagugagagcuuuagagug

SEQ ID NO: 1174185 - RNA, 19 nt, Artificial Sequence
  Description of Artificial Sequence: Synthetic oligonucleotide
  Antisense strand to SEQ ID NO: 1174184
cacucuaaagcucucacuu

SEQ ID NO: 1174186 - RNA, 19 nt, Artificial Sequence
  Description of Artificial Sequence: Synthetic oligonucleotide
  Sense strand starting at position 1545 of SEQ ID NO: 916661
agagcuuuagagugcaaag

SEQ ID NO: 1174187 - RNA, 19 nt, Artificial Sequence
  Description of Artificial Sequence: Synthetic oligonucleotide
  Antisense strand to SEQ ID NO: 1174186
cuuugcacucuaaagcucu

SEQ ID NO: 1174188 - RNA, 19 nt, Artificial Sequence
  Description of Artificial Sequence: Synthetic oligonucleotide
  Sense strand starting at position 1891 of SEQ ID NO: 916661
uaguuaacaguuugaaaga

SEQ ID NO: 1174189 - RNA, 19 nt, Artificial Sequence
  Description of Artificial Sequence: Synthetic oligonucleotide
  Antisense strand to SEQ ID NO: 1174188
ucuuucaaacuguuaacua

SEQ ID NO: 1174190 - RNA, 19 nt, Artificial Sequence
  Description of Artificial Sequence: Synthetic oligonucleotide
  Sense strand starting at position 1909 of SEQ ID NO: 916661
auaccuuaagaccguagaa

SEQ ID NO: 1174191 - RNA, 19 nt, Artificial Sequence
  Description of Artificial Sequence: Synthetic oligonucleotide
  Antisense strand to SEQ ID NO: 1174190
uucuacggucuuaagguau

SEQ ID NO: 1174192 - RNA, 19 nt, Artificial Sequence
  Description of Artificial Sequence: Synthetic oligonucleotide
  Sense strand starting at position 1999 of SEQ ID NO: 916661
ugucuuugcccugcucgaa

SEQ ID NO: 1174193 - RNA, 19 nt, Artificial Sequence
  Description of Artificial Sequence: Synthetic oligonucleotide
  Antisense strand to SEQ ID NO: 1174192
uucgagcagggcaaagaca

SEQ ID NO: 1174194 - RNA, 19 nt, Artificial Sequence
  Description of Artificial Sequence: Synthetic oligonucleotide
  Sense strand starting at position 2011 of SEQ ID NO: 916661
gcucgaagaugguuagaaa

SEQ ID NO: 1174195 - RNA, 19 nt, Artificial Sequence
  Description of Artificial Sequence: Synthetic oligonucleotide
  Antisense strand to SEQ ID NO: 1174194
uuucuaaccaucuucgagc

SEQ ID NO: 1174196 - RNA, 19 nt, Artificial Sequence
  Description of Artificial Sequence: Synthetic oligonucleotide
  Sense strand starting at position 2059 of SEQ ID NO: 916661
acaugacuucgguagccuu

SEQ ID NO: 1174197 - RNA, 19 nt, Artificial Sequence
  Description of Artificial Sequence: Synthetic oligonucleotide
  Antisense strand to SEQ ID NO: 1174196
aaggcuaccgaagucaugu

SEQ ID NO: 1174198 - RNA, 19 nt, Artificial Sequence
  Description of Artificial Sequence: Synthetic oligonucleotide
  Sense strand starting at position 2219 of SEQ ID NO: 916661
gugagacuaccuuguccaa

SEQ ID NO: 1174199 - RNA, 19 nt, Artificial Sequence
  Description of Artificial Sequence: Synthetic oligonucleotide
  Antisense strand to SEQ ID NO: 1174198
uuggacaagguagucucac

SEQ ID NO: 1174200 - RNA, 19 nt, Artificial Sequence
  Description of Artificial Sequence: Synthetic oligonucleotide
  Sense strand starting at position 2275 of SEQ ID NO: 916661
ggcacagaauggucauaua

SEQ ID NO: 1174201 - RNA, 19 nt, Artificial Sequence
  Description of Artificial Sequence: Synthetic oligonucleotide
  Antisense strand to SEQ ID NO: 1174200
uauaugaccauucugugcc

SEQ ID NO: 1174202 - RNA, 19 nt, Artificial Sequence
  Description of Artificial Sequence: Synthetic oligonucleotide
  Sense strand starting at position 2360 of SEQ ID NO: 916661
ucuggacccuaagauuuau

SEQ ID NO: 1174203 - RNA, 19 nt, Artificial Sequence
  Description of Artificial Sequence: Synthetic oligonucleotide
  Antisense strand to SEQ ID NO: 1174202
auaaaucuuaggguccaga

SEQ ID NO: 1174204 - RNA, 19 nt, Artificial Sequence
  Description of Artificial Sequence: Synthetic oligonucleotide
  Sense strand starting at position 2414 of SEQ ID NO: 916661
cccuuaauuuagcagauga

SEQ ID NO: 1174205 - RNA, 19 nt, Artificial Sequence
  Description of Artificial Sequence: Synthetic oligonucleotide
  Antisense strand to SEQ ID NO: 1174204
ucaucugcuaaauuaaggg

SEQ ID NO: 1174206 - RNA, 19 nt, Artificial Sequence
  Description of Artificial Sequence: Synthetic oligonucleotide
  Sense strand starting at position 2493 of SEQ ID NO: 916661
ccagaauaugcuggaaacu

SEQ ID NO: 1174207 - RNA, 19 nt, Artificial Sequence
  Description of Artificial Sequence: Synthetic oligonucleotide
  Antisense strand to SEQ ID NO: 1174206
aguuuccagcauauucugg

SEQ ID NO: 1174208 - RNA, 19 nt, Artificial Sequence
  Description of Artificial Sequence: Synthetic oligonucleotide
  Sense strand starting at position 2682 of SEQ ID NO: 916661
gaaauaugguauucugauc

SEQ ID NO: 1174209 - RNA, 19 nt, Artificial Sequence
  Description of Artificial Sequence: Synthetic oligonucleotide
  Antisense strand to SEQ ID NO: 1174208
gaucagaauaccauauuuc

SEQ ID NO: 1174210 - RNA, 19 nt, Artificial Sequence
  Description of Artificial Sequence: Synthetic oligonucleotide
  Sense strand starting at position 2687 of SEQ ID NO: 916661
augguauucugaucauauu

SEQ ID NO: 1174211 - RNA, 19 nt, Artificial Sequence
  Description of Artificial Sequence: Synthetic oligonucleotide
  Antisense strand to SEQ ID NO: 1174210
aauaugaucagaauaccau

SEQ ID NO: 1174212 - RNA, 19 nt, Artificial Sequence
  Description of Artificial Sequence: Synthetic oligonucleotide
  Sense strand starting at position 2688 of SEQ ID NO: 916661
ugguauucugaucauauuc

SEQ ID NO: 1174213 - RNA, 19 nt, Artificial Sequence
  Description of Artificial Sequence: Synthetic oligonucleotide
  Antisense strand to SEQ ID NO: 1174212
gaauaugaucagaauacca

SEQ ID NO: 1174214 - RNA, 19 nt, Artificial Sequence
  Description of Artificial Sequence: Synthetic oligonucleotide
  Sense strand starting at position 2809 of SEQ ID NO: 916661
auucuauugcgacaucaug

SEQ ID NO: 1174215 - RNA, 19 nt, Artificial Sequence
  Description of Artificial Sequence: Synthetic oligonucleotide
  Antisense strand to SEQ ID NO: 1174214
caugaugucgcaauagaau

SEQ ID NO: 1174216 - RNA, 19 nt, Artificial Sequence
  Description of Artificial Sequence: Synthetic oligonucleotide
  Sense strand starting at position 2956 of SEQ ID NO: 916661
guucuauugccucagagug

SEQ ID NO: 1174217 - RNA, 19 nt, Artificial Sequence
  Description of Artificial Sequence: Synthetic oligonucleotide
  Antisense strand to SEQ ID NO: 1174216
cacucugaggcaauagaac

SEQ ID NO: 1174218 - RNA, 19 nt, Artificial Sequence
  Description of Artificial Sequence: Synthetic oligonucleotide
  Sense strand starting at position 2976 of SEQ ID NO: 916661
acgauauuggcauggaucu

SEQ ID NO: 1174219 - RNA, 19 nt, Artificial Sequence
  Description of Artificial Sequence: Synthetic oligonucleotide
  Antisense strand to SEQ ID NO: 1174218
agauccaugccaauaucgu

SEQ ID NO: 1174220 - RNA, 19 nt, Artificial Sequence
  Description of Artificial Sequence: Synthetic oligonucleotide
  Sense strand starting at position 2977 of SEQ ID NO: 916661
cgauauuggcauggaucua

SEQ ID NO: 1174221 - RNA, 19 nt, Artificial Sequence
  Description of Artificial Sequence: Synthetic oligonucleotide
  Antisense strand to SEQ ID NO: 1174220
uagauccaugccaauaucg

SEQ ID NO: 1174222 - RNA, 19 nt, Artificial Sequence
  Description of Artificial Sequence: Synthetic oligonucleotide
  Sense strand starting at position 3004 of SEQ ID NO: 916661
ugugaaaguuaaucaaugu

SEQ ID NO: 1174223 - RNA, 19 nt, Artificial Sequence
  Description of Artificial Sequence: Synthetic oligonucleotide
  Antisense strand to SEQ ID NO: 1174222
acauugauuaacuuucaca

SEQ ID NO: 1174224 - RNA, 19 nt, Artificial Sequence
  Description of Artificial Sequence: Synthetic oligonucleotide
  Sense strand starting at position 3149 of SEQ ID NO: 916661
ggguuauggcacugaaaga

SEQ ID NO: 1174225 - RNA, 19 nt, Artificial Sequence
  Description of Artificial Sequence: Synthetic oligonucleotide
  Antisense strand to SEQ ID NO: 1174224
ucuuucagugccauaaccc

SEQ ID NO: 1174226 - RNA, 19 nt, Artificial Sequence
  Description of Artificial Sequence: Synthetic oligonucleotide
  Sense strand starting at position 3285 of SEQ ID NO: 916661
cugcauguuguggaaauaa

SEQ ID NO: 1174227 - RNA, 19 nt, Artificial Sequence
  Description of Artificial Sequence: Synthetic oligonucleotide
  Antisense strand to SEQ ID NO: 1174226
uuauuuccacaacaugcag

SEQ ID NO: 1174228 - RNA, 19 nt, Artificial Sequence
  Description of Artificial Sequence: Synthetic oligonucleotide
  Sense strand starting at position 3350 of SEQ ID NO: 916661
cagcauuggaguuguggga

SEQ ID NO: 1174229 - RNA, 19 nt, Artificial Sequence
  Description of Artificial Sequence: Synthetic oligonucleotide
  Antisense strand to SEQ ID NO: 1174228
ucccacaacuccaaugcug

SEQ ID NO: 1174230 - RNA, 19 nt, Artificial Sequence
  Description of Artificial Sequence: Synthetic oligonucleotide
  Sense strand starting at position 3354 of SEQ ID NO: 916661
auuggaguugugggaaagu

SEQ ID NO: 1174231 - RNA, 19 nt, Artificial Sequence
  Description of Artificial Sequence: Synthetic oligonucleotide
  Antisense strand to SEQ ID NO: 1174230
acuuucccacaacuccaau

SEQ ID NO: 1174232 - RNA, 19 nt, Artificial Sequence
  Description of Artificial Sequence: Synthetic oligonucleotide
  Sense strand starting at position 3483 of SEQ ID NO: 916661
ucucccaguggucacauua

SEQ ID NO: 1174233 - RNA, 19 nt, Artificial Sequence
  Description of Artificial Sequence: Synthetic oligonucleotide
  Antisense strand to SEQ ID NO: 1174232
uaaugugaccacugggaga

SEQ ID NO: 1174234 - RNA, 19 nt, Artificial Sequence
  Description of Artificial Sequence: Synthetic oligonucleotide
  Sense strand starting at position 3620 of SEQ ID NO: 916661
ucgagaagccaagguuaau

SEQ ID NO: 1174235 - RNA, 19 nt, Artificial Sequence
  Description of Artificial Sequence: Synthetic oligonucleotide
  Antisense strand to SEQ ID NO: 1174234
auuaaccuuggcuucucga

SEQ ID NO: 1174236 - RNA, 19 nt, Artificial Sequence
  Description of Artificial Sequence: Synthetic oligonucleotide
  Sense strand starting at position 3645 of SEQ ID NO: 916661
gucucaaacuuaguaacua

SEQ ID NO: 1174237 - RNA, 19 nt, Artificial Sequence
  Description of Artificial Sequence: Synthetic oligonucleotide
  Antisense strand to SEQ ID NO: 1174236
uaguuacuaaguuugagac

SEQ ID NO: 1174238 - RNA, 19 nt, Artificial Sequence
  Description of Artificial Sequence: Synthetic oligonucleotide
  Sense strand starting at position 3679 of SEQ ID NO: 916661
gaagauguacaguagucau

SEQ ID NO: 1174239 - RNA, 19 nt, Artificial Sequence
  Description of Artificial Sequence: Synthetic oligonucleotide
  Antisense strand to SEQ ID NO: 1174238
augacuacuguacaucuuc

SEQ ID NO: 1174240 - RNA, 19 nt, Artificial Sequence
  Description of Artificial Sequence: Synthetic oligonucleotide
  Sense strand starting at position 3687 of SEQ ID NO: 916661
acaguagucauuggugaca

SEQ ID NO: 1174241 - RNA, 19 nt, Artificial Sequence
  Description of Artificial Sequence: Synthetic oligonucleotide
  Antisense strand to SEQ ID NO: 1174240
ugucaccaaugacuacugu

SEQ ID NO: 1174242 - RNA, 19 nt, Artificial Sequence
  Description of Artificial Sequence: Synthetic oligonucleotide
  Sense strand starting at position 3750 of SEQ ID NO: 916661
uuuggagugguugacaaau

SEQ ID NO: 1174243 - RNA, 19 nt, Artificial Sequence
  Description of Artificial Sequence: Synthetic oligonucleotide
  Antisense strand to SEQ ID NO: 1174242
auuugucaaccacuccaaa

SEQ ID NO: 1174244 - RNA, 19 nt, Artificial Sequence
  Description of Artificial Sequence: Synthetic oligonucleotide
  Sense strand starting at position 3781 of SEQ ID NO: 916661
gcaagaucuauggagagcu

SEQ ID NO: 1174245 - RNA, 19 nt, Artificial Sequence
  Description of Artificial Sequence: Synthetic oligonucleotide
  Antisense strand to SEQ ID NO: 1174244
agcucuccauagaucuugc

SEQ ID NO: 1174246 - RNA, 19 nt, Artificial Sequence
  Description of Artificial Sequence: Synthetic oligonucleotide
  Sense strand starting at position 419 of SEQ ID NO: 916662
ggaugcagccacuagaguu

SEQ ID NO: 1174247 - RNA, 19 nt, Artificial Sequence
  Description of Artificial Sequence: Synthetic oligonucleotide
  Antisense strand to SEQ ID NO: 1174246
aacucuaguggcugcaucc

SEQ ID NO: 1174248 - RNA, 19 nt, Artificial Sequence
  Description of Artificial Sequence: Synthetic oligonucleotide
  Sense strand starting at position 2002 of SEQ ID NO: 916662
ccuccuucgccggagaguu

SEQ ID NO: 1174249 - RNA, 19 nt, Artificial Sequence
  Description of Artificial Sequence: Synthetic oligonucleotide
  Antisense strand to SEQ ID NO: 1174248
aacucuccggcgaaggagg

SEQ ID NO: 1174250 - RNA, 19 nt, Artificial Sequence
  Description of Artificial Sequence: Synthetic oligonucleotide
  Sense strand starting at position 2120 of SEQ ID NO: 916662
gcgcuugugcguuucacuu

SEQ ID NO: 1174251 - RNA, 19 nt, Artificial Sequence
  Description of Artificial Sequence: Synthetic oligonucleotide
  Antisense strand to SEQ ID NO: 1174250
aagugaaacgcacaagcgc

SEQ ID NO: 1174252 - RNA, 19 nt, Artificial Sequence
  Description of Artificial Sequence: Synthetic oligonucleotide
  Sense strand starting at position 2250 of SEQ ID NO: 916662
ccucuugauucggugagau

SEQ ID NO: 1174253 - RNA, 19 nt, Artificial Sequence
  Description of Artificial Sequence: Synthetic oligonucleotide
  Antisense strand to SEQ ID NO: 1174252
aucucaccgaaucaagagg

SEQ ID NO: 1174254 - RNA, 19 nt, Artificial Sequence
  Description of Artificial Sequence: Synthetic oligonucleotide
  Sense strand starting at position 2252 of SEQ ID NO: 916662
ucuugauucggugagauag

SEQ ID NO: 1174255 - RNA, 19 nt, Artificial Sequence
  Description of Artificial Sequence: Synthetic oligonucleotide
  Antisense strand to SEQ ID NO: 1174254
cuaucucaccgaaucaaga

SEQ ID NO: 1174256 - RNA, 19 nt, Artificial Sequence
  Description of Artificial Sequence: Synthetic oligonucleotide
  Sense strand starting at position 2281 of SEQ ID NO: 916662
ggucucguaauuuggguua

SEQ ID NO: 1174257 - RNA, 19 nt, Artificial Sequence
  Description of Artificial Sequence: Synthetic oligonucleotide
  Antisense strand to SEQ ID NO: 1174256
uaacccaaauuacgagacc

SEQ ID NO: 1174258 - RNA, 19 nt, Artificial Sequence
  Description of Artificial Sequence: Synthetic oligonucleotide
  Sense strand starting at position 2706 of SEQ ID NO: 916662
ggaugagugagguggcaga

SEQ ID NO: 1174259 - RNA, 19 nt, Artificial Sequence
  Description of Artificial Sequence: Synthetic oligonucleotide
  Antisense strand to SEQ ID NO: 1174258
ucugccaccucacucaucc

SEQ ID NO: 1174260 - RNA, 19 nt, Artificial Sequence
  Description of Artificial Sequence: Synthetic oligonucleotide
  Sense strand starting at position 2780 of SEQ ID NO: 916662
uugcaaagguucucuaauc

SEQ ID NO: 1174261 - RNA, 19 nt, Artificial Sequence
  Description of Artificial Sequence: Synthetic oligonucleotide
  Antisense strand to SEQ ID NO: 1174260
gauuagagaaccuuugcaa

SEQ ID NO: 1174262 - RNA, 19 nt, Artificial Sequence
  Description of Artificial Sequence: Synthetic oligonucleotide
  Sense strand starting at position 2781 of SEQ ID NO: 916662
ugcaaagguucucuaaucu

SEQ ID NO: 1174263 - RNA, 19 nt, Artificial Sequence
  Description of Artificial Sequence: Synthetic oligonucleotide
  Antisense strand to SEQ ID NO: 1174262
agauuagagaaccuuugca

SEQ ID NO: 1174264 - RNA, 19 nt, Artificial Sequence
  Description of Artificial Sequence: Synthetic oligonucleotide
  Sense strand starting at position 2970 of SEQ ID NO: 916662
uagugacuguuauugucau

SEQ ID NO: 1174265 - RNA, 19 nt, Artificial Sequence
  Description of Artificial Sequence: Synthetic oligonucleotide
  Antisense strand to SEQ ID NO: 1174264
augacaauaacagucacua

SEQ ID NO: 1174266 - RNA, 19 nt, Artificial Sequence
  Description of Artificial Sequence: Synthetic oligonucleotide
  Sense strand starting at position 2976 of SEQ ID NO: 916662
cuguuauugucaucccuac

SEQ ID NO: 1174267 - RNA, 19 nt, Artificial Sequence
  Description of Artificial Sequence: Synthetic oligonucleotide
  Antisense strand to SEQ ID NO: 1174266
guagggaugacaauaacag

SEQ ID NO: 1174268 - RNA, 19 nt, Artificial Sequence
  Description of Artificial Sequence: Synthetic oligonucleotide
  Sense strand starting at position 2994 of SEQ ID NO: 916662
cuuaguaguccaggagaau

SEQ ID NO: 1174269 - RNA, 19 nt, Artificial Sequence
  Description of Artificial Sequence: Synthetic oligonucleotide
  Antisense strand to SEQ ID NO: 1174268
auucuccuggacuacuaag

SEQ ID NO: 1174270 - RNA, 19 nt, Artificial Sequence
  Description of Artificial Sequence: Synthetic oligonucleotide
  Sense strand starting at position 3000 of SEQ ID NO: 916662
aguccaggagaaugguuau

SEQ ID NO: 1174271 - RNA, 19 nt, Artificial Sequence
  Description of Artificial Sequence: Synthetic oligonucleotide
  Antisense strand to SEQ ID NO: 1174270
auaaccauucuccuggacu

SEQ ID NO: 1174272 - RNA, 19 nt, Artificial Sequence
  Description of Artificial Sequence: Synthetic oligonucleotide
  Sense strand starting at position 3006 of SEQ ID NO: 916662
ggagaaugguuauagaaag

SEQ ID NO: 1174273 - RNA, 19 nt, Artificial Sequence
  Description of Artificial Sequence: Synthetic oligonucleotide
  Antisense strand to SEQ ID NO: 1174272
cuuucuauaaccauucucc

SEQ ID NO: 1174274 - RNA, 19 nt, Artificial Sequence
  Description of Artificial Sequence: Synthetic oligonucleotide
  Sense strand starting at position 3042 of SEQ ID NO: 916662
cauucuacugcugguagau

SEQ ID NO: 1174275 - RNA, 19 nt, Artificial Sequence
  Description of Artificial Sequence: Synthetic oligonucleotide
  Antisense strand to SEQ ID NO: 1174274
aucuaccagcaguagaaug

SEQ ID NO: 1174276 - RNA, 19 nt, Artificial Sequence
  Description of Artificial Sequence: Synthetic oligonucleotide
  Sense strand starting at position 3048 of SEQ ID NO: 916662
acugcugguagauaucaga

SEQ ID NO: 1174277 - RNA, 19 nt, Artificial Sequence
  Description of Artificial Sequence: Synthetic oligonucleotide
  Antisense strand to SEQ ID NO: 1174276
ucugauaucuaccagcagu

SEQ ID NO: 1174278 - RNA, 19 nt, Artificial Sequence
  Description of Artificial Sequence: Synthetic oligonucleotide
  Sense strand starting at position 3057 of SEQ ID NO: 916662
agauaucagagccgagauu

SEQ ID NO: 1174279 - RNA, 19 nt, Artificial Sequence
  Description of Artificial Sequence: Synthetic oligonucleotide
  Antisense strand to SEQ ID NO: 1174278
aaucucggcucugauaucu

SEQ ID NO: 1174280 - RNA, 19 nt, Artificial Sequence
  Description of Artificial Sequence: Synthetic oligonucleotide
  Sense strand starting at position 3155 of SEQ ID NO: 916662
cagagaucauucucuguag

SEQ ID NO: 1174281 - RNA, 19 nt, Artificial Sequence
  Description of Artificial Sequence: Synthetic oligonucleotide
  Antisense strand to SEQ ID NO: 1174280
cuacagagaaugaucucug

SEQ ID NO: 1174282 - RNA, 19 nt, Artificial Sequence
  Description of Artificial Sequence: Synthetic oligonucleotide
  Sense strand starting at position 3156 of SEQ ID NO: 916662
agagaucauucucuguagu

SEQ ID NO: 1174283 - RNA, 19 nt, Artificial Sequence
  Description of Artificial Sequence: Synthetic oligonucleotide
  Antisense strand to SEQ ID NO: 1174282
acuacagagaaugaucucu

SEQ ID NO: 1174284 - RNA, 19 nt, Artificial Sequence
  Description of Artificial Sequence: Synthetic oligonucleotide
  Sense strand starting at position 3157 of SEQ ID NO: 916662
gagaucauucucuguagug

SEQ ID NO: 1174285 - RNA, 19 nt, Artificial Sequence
  Description of Artificial Sequence: Synthetic oligonucleotide
  Antisense strand to SEQ ID NO: 1174284
cacuacagagaaugaucuc

SEQ ID NO: 1174286 - RNA, 19 nt, Artificial Sequence
  Description of Artificial Sequence: Synthetic oligonucleotide
  Sense strand starting at position 3158 of SEQ ID NO: 916662
agaucauucucuguaguga

SEQ ID NO: 1174287 - RNA, 19 nt, Artificial Sequence
  Description of Artificial Sequence: Synthetic oligonucleotide
  Antisense strand to SEQ ID NO: 1174286
ucacuacagagaaugaucu

SEQ ID NO: 1174288 - RNA, 19 nt, Artificial Sequence
  Description of Artificial Sequence: Synthetic oligonucleotide
  Sense strand starting at position 3159 of SEQ ID NO: 916662
gaucauucucuguagugag

SEQ ID NO: 1174289 - RNA, 19 nt, Artificial Sequence
  Description of Artificial Sequence: Synthetic oligonucleotide
  Antisense strand to SEQ ID NO: 1174288
cucacuacagagaaugauc

SEQ ID NO: 1174290 - RNA, 19 nt, Artificial Sequence
  Description of Artificial Sequence: Synthetic oligonucleotide
  Sense strand starting at position 3368 of SEQ ID NO: 916662
ccaagaauuucugaagcac

SEQ ID NO: 1174291 - RNA, 19 nt, Artificial Sequence
  Description of Artificial Sequence: Synthetic oligonucleotide
  Antisense strand to SEQ ID NO: 1174290
gugcuucagaaauucuugg

SEQ ID NO: 1174292 - RNA, 19 nt, Artificial Sequence
  Description of Artificial Sequence: Synthetic oligonucleotide
  Sense strand starting at position 3555 of SEQ ID NO: 916662
cucuauggaucguugggaa

SEQ ID NO: 1174293 - RNA, 19 nt, Artificial Sequence
  Description of Artificial Sequence: Synthetic oligonucleotide
  Antisense strand to SEQ ID NO: 1174292
uucccaacgauccauagag

SEQ ID NO: 1174294 - RNA, 19 nt, Artificial Sequence
  Description of Artificial Sequence: Synthetic oligonucleotide
  Sense strand starting at position 3559 of SEQ ID NO: 916662
auggaucguugggaaauga

SEQ ID NO: 1174295 - RNA, 19 nt, Artificial Sequence
  Description of Artificial Sequence: Synthetic oligonucleotide
  Antisense strand to SEQ ID NO: 1174294
ucauuucccaacgauccau

SEQ ID NO: 1174296 - RNA, 19 nt, Artificial Sequence
  Description of Artificial Sequence: Synthetic oligonucleotide
  Sense strand starting at position 3570 of SEQ ID NO: 916662
ggaaaugaucucuguuccu

SEQ ID NO: 1174297 - RNA, 19 nt, Artificial Sequence
  Description of Artificial Sequence: Synthetic oligonucleotide
  Antisense strand to SEQ ID NO: 1174296
aggaacagagaucauuucc

SEQ ID NO: 1174298 - RNA, 19 nt, Artificial Sequence
  Description of Artificial Sequence: Synthetic oligonucleotide
  Sense strand starting at position 3695 of SEQ ID NO: 916662
aaaggaaugagguggcuuu

SEQ ID NO: 1174299 - RNA, 19 nt, Artificial Sequence
  Description of Artificial Sequence: Synthetic oligonucleotide
  Antisense strand to SEQ ID NO: 1174298
aaagccaccucauuccuuu

SEQ ID NO: 1174300 - RNA, 19 nt, Artificial Sequence
  Description of Artificial Sequence: Synthetic oligonucleotide
  Sense strand starting at position 3723 of SEQ ID NO: 916662
cugaguccugccgaagguu

SEQ ID NO: 1174301 - RNA, 19 nt, Artificial Sequence
  Description of Artificial Sequence: Synthetic oligonucleotide
  Antisense strand to SEQ ID NO: 1174300
aaccuucggcaggacucag

SEQ ID NO: 1174302 - RNA, 19 nt, Artificial Sequence
  Description of Artificial Sequence: Synthetic oligonucleotide
  Sense strand starting at position 3791 of SEQ ID NO: 916662
gggauauggcaggaguucu

SEQ ID NO: 1174303 - RNA, 19 nt, Artificial Sequence
  Description of Artificial Sequence: Synthetic oligonucleotide
  Antisense strand to SEQ ID NO: 1174302
agaacuccugccauauccc

SEQ ID NO: 1174304 - RNA, 19 nt, Artificial Sequence
  Description of Artificial Sequence: Synthetic oligonucleotide
  Sense strand starting at position 3799 of SEQ ID NO: 916662
gcaggaguucuggaaggcu

SEQ ID NO: 1174305 - RNA, 19 nt, Artificial Sequence
  Description of Artificial Sequence: Synthetic oligonucleotide
  Antisense strand to SEQ ID NO: 1174304
agccuuccagaacuccugc

SEQ ID NO: 1174306 - RNA, 19 nt, Artificial Sequence
  Description of Artificial Sequence: Synthetic oligonucleotide
  Sense strand starting at position 3802 of SEQ ID NO: 916662
ggaguucuggaaggcuuaa

SEQ ID NO: 1174307 - RNA, 19 nt, Artificial Sequence
  Description of Artificial Sequence: Synthetic oligonucleotide
  Antisense strand to SEQ ID NO: 1174306
uuaagccuuccagaacucc

SEQ ID NO: 1174308 - RNA, 19 nt, Artificial Sequence
  Description of Artificial Sequence: Synthetic oligonucleotide
  Sense strand starting at position 3845 of SEQ ID NO: 916662
gaagaagagaagugugagu

SEQ ID NO: 1174309 - RNA, 19 nt, Artificial Sequence
  Description of Artificial Sequence: Synthetic oligonucleotide
  Antisense strand to SEQ ID NO: 1174308
acucacacuucucuucuuc

SEQ ID NO: 1174310 - RNA, 19 nt, Artificial Sequence
  Description of Artificial Sequence: Synthetic oligonucleotide
  Sense strand starting at position 3847 of SEQ ID NO: 916662
agaagagaagugugaguuu

SEQ ID NO: 1174311 - RNA, 19 nt, Artificial Sequence
  Description of Artificial Sequence: Synthetic oligonucleotide
  Antisense strand to SEQ ID NO: 1174310
aaacucacacuucucuucu

SEQ ID NO: 1174312 - RNA, 19 nt, Artificial Sequence
  Description of Artificial Sequence: Synthetic oligonucleotide
  Sense strand starting at position 3858 of SEQ ID NO: 916662
gugaguuucugcucuagau

SEQ ID NO: 1174313 - RNA, 19 nt, Artificial Sequence
  Description of Artificial Sequence: Synthetic oligonucleotide
  Antisense strand to SEQ ID NO: 1174312
aucuagagcagaaacucac

SEQ ID NO: 1174314 - RNA, 19 nt, Artificial Sequence
  Description of Artificial Sequence: Synthetic oligonucleotide
  Sense strand starting at position 3860 of SEQ ID NO: 916662
gaguuucugcucuagaugu

SEQ ID NO: 1174315 - RNA, 19 nt, Artificial Sequence
  Description of Artificial Sequence: Synthetic oligonucleotide
  Antisense strand to SEQ ID NO: 1174314
acaucuagagcagaaacuc

SEQ ID NO: 1174316 - RNA, 19 nt, Artificial Sequence
  Description of Artificial Sequence: Synthetic oligonucleotide
  Sense strand starting at position 3862 of SEQ ID NO: 916662
guuucugcucuagauguga

SEQ ID NO: 1174317 - RNA, 19 nt, Artificial Sequence
  Description of Artificial Sequence: Synthetic oligonucleotide
  Antisense strand to SEQ ID NO: 1174316
ucacaucuagagcagaaac

SEQ ID NO: 1174318 - RNA, 19 nt, Artificial Sequence
  Description of Artificial Sequence: Synthetic oligonucleotide
  Sense strand starting at position 3866 of SEQ ID NO: 916662
cugcucuagaugugaaguu

SEQ ID NO: 1174319 - RNA, 19 nt, Artificial Sequence
  Description of Artificial Sequence: Synthetic oligonucleotide
  Antisense strand to SEQ ID NO: 1174318
aacuucacaucuagagcag

SEQ ID NO: 1174320 - RNA, 19 nt, Artificial Sequence
  Description of Artificial Sequence: Synthetic oligonucleotide
  Sense strand starting at position 3924 of SEQ ID NO: 916662
aagucagaguggucaucuu

SEQ ID NO: 1174321 - RNA, 19 nt, Artificial Sequence
  Description of Artificial Sequence: Synthetic oligonucleotide
  Antisense strand to SEQ ID NO: 1174320
aagaugaccacucugacuu

SEQ ID NO: 1174322 - RNA, 19 nt, Artificial Sequence
  Description of Artificial Sequence: Synthetic oligonucleotide
  Sense strand starting at position 3962 of SEQ ID NO: 916662
uuugcaauuggauaacauu

SEQ ID NO: 1174323 - RNA, 19 nt, Artificial Sequence
  Description of Artificial Sequence: Synthetic oligonucleotide
  Antisense strand to SEQ ID NO: 1174322
aauguuauccaauugcaaa

SEQ ID NO: 1174324 - RNA, 19 nt, Artificial Sequence
  Description of Artificial Sequence: Synthetic oligonucleotide
  Sense strand starting at position 3979 of SEQ ID NO: 916662
uuaucuuugccuggcagga

SEQ ID NO: 1174325 - RNA, 19 nt, Artificial Sequence
  Description of Artificial Sequence: Synthetic oligonucleotide
  Antisense strand to SEQ ID NO: 1174324
uccugccaggcaaagauaa

SEQ ID NO: 1174326 - RNA, 19 nt, Artificial Sequence
  Description of Artificial Sequence: Synthetic oligonucleotide
  Sense strand starting at position 13 of SEQ ID NO: 916663
uugaauauucguuagccau

SEQ ID NO: 1174327 - RNA, 19 nt, Artificial Sequence
  Description of Artificial Sequence: Synthetic oligonucleotide
  Antisense strand to SEQ ID NO: 1174326
auggcuaacgaauauucaa

SEQ ID NO: 1174328 - RNA, 19 nt, Artificial Sequence
  Description of Artificial Sequence: Synthetic oligonucleotide
  Sense strand starting at position 15 of SEQ ID NO: 916663
gaauauucguuagccauuu

SEQ ID NO: 1174329 - RNA, 19 nt, Artificial Sequence
  Description of Artificial Sequence: Synthetic oligonucleotide
  Antisense strand to SEQ ID NO: 1174328
aaauggcuaacgaauauuc

SEQ ID NO: 1174330 - RNA, 19 nt, Artificial Sequence
  Description of Artificial Sequence: Synthetic oligonucleotide
  Sense strand starting at position 43 of SEQ ID NO: 916663
auuguaaaguucucguaaa

SEQ ID NO: 1174331 - RNA, 19 nt, Artificial Sequence
  Description of Artificial Sequence: Synthetic oligonucleotide
  Antisense strand to SEQ ID NO: 1174330
uuuacgagaacuuuacaau

SEQ ID NO: 1174332 - RNA, 19 nt, Artificial Sequence
  Description of Artificial Sequence: Synthetic oligonucleotide
  Sense strand starting at position 107 of SEQ ID NO: 916663
cauaacagaggguguaaau

SEQ ID NO: 1174333 - RNA, 19 nt, Artificial Sequence
  Description of Artificial Sequence: Synthetic oligonucleotide
  Antisense strand to SEQ ID NO: 1174332
auuuacacccucuguuaug

SEQ ID NO: 1174334 - RNA, 19 nt, Artificial Sequence
  Description of Artificial Sequence: Synthetic oligonucleotide
  Sense strand starting at position 1931 of SEQ ID NO: 916663
ccauucuuaguuugauguu

SEQ ID NO: 1174335 - RNA, 19 nt, Artificial Sequence
  Description of Artificial Sequence: Synthetic oligonucleotide
  Antisense strand to SEQ ID NO: 1174334
aacaucaaacuaagaaugg

SEQ ID NO: 1174336 - RNA, 19 nt, Artificial Sequence
  Description of Artificial Sequence: Synthetic oligonucleotide
  Sense strand starting at position 2003 of SEQ ID NO: 916663
guaaacgauucuguaucuu

SEQ ID NO: 1174337 - RNA, 19 nt, Artificial Sequence
  Description of Artificial Sequence: Synthetic oligonucleotide
  Antisense strand to SEQ ID NO: 1174336
aagauacagaaucguuuac

SEQ ID NO: 1174338 - RNA, 19 nt, Artificial Sequence
  Description of Artificial Sequence: Synthetic oligonucleotide
  Sense strand starting at position 2007 of SEQ ID NO: 916663
acgauucuguaucuuuaua

SEQ ID NO: 1174339 - RNA, 19 nt, Artificial Sequence
  Description of Artificial Sequence: Synthetic oligonucleotide
  Antisense strand to SEQ ID NO: 1174338
uauaaagauacagaaucgu

SEQ ID NO: 1174340 - RNA, 19 nt, Artificial Sequence
  Description of Artificial Sequence: Synthetic oligonucleotide
  Sense strand starting at position 2086 of SEQ ID NO: 916663
gacucauuagauugaggcu

SEQ ID NO: 1174341 - RNA, 19 nt, Artificial Sequence
  Description of Artificial Sequence: Synthetic oligonucleotide
  Antisense strand to SEQ ID NO: 1174340
agccucaaucuaaugaguc

SEQ ID NO: 1174342 - RNA, 19 nt, Artificial Sequence
  Description of Artificial Sequence: Synthetic oligonucleotide
  Sense strand starting at position 2188 of SEQ ID NO: 916663
ugacuaagauccuugguag

SEQ ID NO: 1174343 - RNA, 19 nt, Artificial Sequence
  Description of Artificial Sequence: Synthetic oligonucleotide
  Antisense strand to SEQ ID NO: 1174342
cuaccaaggaucuuaguca

SEQ ID NO: 1174344 - RNA, 19 nt, Artificial Sequence
  Description of Artificial Sequence: Synthetic oligonucleotide
  Sense strand starting at position 2189 of SEQ ID NO: 916663
gacuaagauccuugguaga

SEQ ID NO: 1174345 - RNA, 19 nt, Artificial Sequence
  Description of Artificial Sequence: Synthetic oligonucleotide
  Antisense strand to SEQ ID NO: 1174344
ucuaccaaggaucuuaguc

SEQ ID NO: 1174346 - RNA, 19 nt, Artificial Sequence
  Description of Artificial Sequence: Synthetic oligonucleotide
  Sense strand starting at position 2191 of SEQ ID NO: 916663
cuaagauccuugguagaau

SEQ ID NO: 1174347 - RNA, 19 nt, Artificial Sequence
  Description of Artificial Sequence: Synthetic oligonucleotide
  Antisense strand to SEQ ID NO: 1174346
auucuaccaaggaucuuag

SEQ ID NO: 1174348 - RNA, 19 nt, Artificial Sequence
  Description of Artificial Sequence: Synthetic oligonucleotide
  Sense strand starting at position 2203 of SEQ ID NO: 916663
guagaaugcuuucuguuga

SEQ ID NO: 1174349 - RNA, 19 nt, Artificial Sequence
  Description of Artificial Sequence: Synthetic oligonucleotide
  Antisense strand to SEQ ID NO: 1174348
ucaacagaaagcauucuac

SEQ ID NO: 1174350 - RNA, 19 nt, Artificial Sequence
  Description of Artificial Sequence: Synthetic oligonucleotide
  Sense strand starting at position 2208 of SEQ ID NO: 916663
augcuuucuguugaguaga

SEQ ID NO: 1174351 - RNA, 19 nt, Artificial Sequence
  Description of Artificial Sequence: Synthetic oligonucleotide
  Antisense strand to SEQ ID NO: 1174350
ucuacucaacagaaagcau

SEQ ID NO: 1174352 - RNA, 19 nt, Artificial Sequence
  Description of Artificial Sequence: Synthetic oligonucleotide
  Sense strand starting at position 2211 of SEQ ID NO: 916663
cuuucuguugaguagauua

SEQ ID NO: 1174353 - RNA, 19 nt, Artificial Sequence
  Description of Artificial Sequence: Synthetic oligonucleotide
  Antisense strand to SEQ ID NO: 1174352
uaaucuacucaacagaaag

SEQ ID NO: 1174354 - RNA, 19 nt, Artificial Sequence
  Description of Artificial Sequence: Synthetic oligonucleotide
  Sense strand starting at position 2213 of SEQ ID NO: 916663
uucuguugaguagauuaua

SEQ ID NO: 1174355 - RNA, 19 nt, Artificial Sequence
  Description of Artificial Sequence: Synthetic oligonucleotide
  Antisense strand to SEQ ID NO: 1174354
uauaaucuacucaacagaa

SEQ ID NO: 1174356 - RNA, 19 nt, Artificial Sequence
  Description of Artificial Sequence: Synthetic oligonucleotide
  Sense strand starting at position 2224 of SEQ ID NO: 916663
agauuauagucucuugaaa

SEQ ID NO: 1174357 - RNA, 19 nt, Artificial Sequence
  Description of Artificial Sequence: Synthetic oligonucleotide
  Antisense strand to SEQ ID NO: 1174356
uuucaagagacuauaaucu

SEQ ID NO: 1174358 - RNA, 19 nt, Artificial Sequence
  Description of Artificial Sequence: Synthetic oligonucleotide
  Sense strand starting at position 2353 of SEQ ID NO: 916663
caaggaugauaaggauaaa

SEQ ID NO: 1174359 - RNA, 19 nt, Artificial Sequence
  Description of Artificial Sequence: Synthetic oligonucleotide
  Antisense strand to SEQ ID NO: 1174358
uuuauccuuaucauccuug

SEQ ID NO: 1174360 - RNA, 19 nt, Artificial Sequence
  Description of Artificial Sequence: Synthetic oligonucleotide
  Sense strand starting at position 2515 of SEQ ID NO: 916663
ugaccugucagguguauuu

SEQ ID NO: 1174361 - RNA, 19 nt, Artificial Sequence
  Description of Artificial Sequence: Synthetic oligonucleotide
  Antisense strand to SEQ ID NO: 1174360
aaauacaccugacagguca

SEQ ID NO: 1174362 - RNA, 19 nt, Artificial Sequence
  Description of Artificial Sequence: Synthetic oligonucleotide
  Sense strand starting at position 2644 of SEQ ID NO: 916663
ggaugaugaguuuauguug

SEQ ID NO: 1174363 - RNA, 19 nt, Artificial Sequence
  Description of Artificial Sequence: Synthetic oligonucleotide
  Antisense strand to SEQ ID NO: 1174362
caacauaaacucaucaucc

SEQ ID NO: 1174364 - RNA, 19 nt, Artificial Sequence
  Description of Artificial Sequence: Synthetic oligonucleotide
  Sense strand starting at position 2647 of SEQ ID NO: 916663
ugaugaguuuauguuguau

SEQ ID NO: 1174365 - RNA, 19 nt, Artificial Sequence
  Description of Artificial Sequence: Synthetic oligonucleotide
  Antisense strand to SEQ ID NO: 1174364
auacaacauaaacucauca

SEQ ID NO: 1174366 - RNA, 19 nt, Artificial Sequence
  Description of Artificial Sequence: Synthetic oligonucleotide
  Sense strand starting at position 2739 of SEQ ID NO: 916663
ugucuucugguacauauau

SEQ ID NO: 1174367 - RNA, 19 nt, Artificial Sequence
  Description of Artificial Sequence: Synthetic oligonucleotide
  Antisense strand to SEQ ID NO: 1174366
auauauguaccagaagaca

SEQ ID NO: 1174368 - RNA, 19 nt, Artificial Sequence
  Description of Artificial Sequence: Synthetic oligonucleotide
  Sense strand starting at position 2746 of SEQ ID NO: 916663
ugguacauauauguaagaa

SEQ ID NO: 1174369 - RNA, 19 nt, Artificial Sequence
  Description of Artificial Sequence: Synthetic oligonucleotide
  Antisense strand to SEQ ID NO: 1174368
uucuuacauauauguacca

SEQ ID NO: 1174370 - RNA, 19 nt, Artificial Sequence
  Description of Artificial Sequence: Synthetic oligonucleotide
  Sense strand starting at position 2773 of SEQ ID NO: 916663
gaguauauuucucaguaug

SEQ ID NO: 1174371 - RNA, 19 nt, Artificial Sequence
  Description of Artificial Sequence: Synthetic oligonucleotide
  Antisense strand to SEQ ID NO: 1174370
cauacugagaaauauacuc

SEQ ID NO: 1174372 - RNA, 19 nt, Artificial Sequence
  Description of Artificial Sequence: Synthetic oligonucleotide
  Sense strand starting at position 2779 of SEQ ID NO: 916663
auuucucaguauggaauua

SEQ ID NO: 1174373 - RNA, 19 nt, Artificial Sequence
  Description of Artificial Sequence: Synthetic oligonucleotide
  Antisense strand to SEQ ID NO: 1174372
uaauuccauacugagaaau

SEQ ID NO: 1174374 - RNA, 19 nt, Artificial Sequence
  Description of Artificial Sequence: Synthetic oligonucleotide
  Sense strand starting at position 2799 of SEQ ID NO: 916663
uggaucauggaguauguau

SEQ ID NO: 1174375 - RNA, 19 nt, Artificial Sequence
  Description of Artificial Sequence: Synthetic oligonucleotide
  Antisense strand to SEQ ID NO: 1174374
auacauacuccaugaucca

SEQ ID NO: 1174376 - RNA, 19 nt, Artificial Sequence
  Description of Artificial Sequence: Synthetic oligonucleotide
  Sense strand starting at position 2801 of SEQ ID NO: 916663
gaucauggaguauguauau

SEQ ID NO: 1174377 - RNA, 19 nt, Artificial Sequence
  Description of Artificial Sequence: Synthetic oligonucleotide
  Antisense strand to SEQ ID NO: 1174376
auauacauacuccaugauc

SEQ ID NO: 1174378 - RNA, 19 nt, Artificial Sequence
  Description of Artificial Sequence: Synthetic oligonucleotide
  Sense strand starting at position 2854 of SEQ ID NO: 916663
auaguuguaagcgauuugu

SEQ ID NO: 1174379 - RNA, 19 nt, Artificial Sequence
  Description of Artificial Sequence: Synthetic oligonucleotide
  Antisense strand to SEQ ID NO: 1174378
acaaaucgcuuacaacuau

SEQ ID NO: 1174380 - RNA, 19 nt, Artificial Sequence
  Description of Artificial Sequence: Synthetic oligonucleotide
  Sense strand starting at position 2863 of SEQ ID NO: 916663
agcgauuugugcccucgau

SEQ ID NO: 1174381 - RNA, 19 nt, Artificial Sequence
  Description of Artificial Sequence: Synthetic oligonucleotide
  Antisense strand to SEQ ID NO: 1174380
aucgagggcacaaaucgcu

SEQ ID NO: 1174382 - RNA, 19 nt, Artificial Sequence
  Description of Artificial Sequence: Synthetic oligonucleotide
  Sense strand starting at position 2972 of SEQ ID NO: 916663
gagguuaagugucuuccca

SEQ ID NO: 1174383 - RNA, 19 nt, Artificial Sequence
  Description of Artificial Sequence: Synthetic oligonucleotide
  Antisense strand to SEQ ID NO: 1174382
ugggaagacacuuaaccuc

SEQ ID NO: 1174384 - RNA, 19 nt, Artificial Sequence
  Description of Artificial Sequence: Synthetic oligonucleotide
  Sense strand starting at position 2974 of SEQ ID NO: 916663
gguuaagugucuucccaua

SEQ ID NO: 1174385 - RNA, 19 nt, Artificial Sequence
  Description of Artificial Sequence: Synthetic oligonucleotide
  Antisense strand to SEQ ID NO: 1174384
uaugggaagacacuuaacc

SEQ ID NO: 1174386 - RNA, 19 nt, Artificial Sequence
  Description of Artificial Sequence: Synthetic oligonucleotide
  Sense strand starting at position 2976 of SEQ ID NO: 916663
uuaagugucuucccauaug

SEQ ID NO: 1174387 - RNA, 19 nt, Artificial Sequence
  Description of Artificial Sequence: Synthetic oligonucleotide
  Antisense strand to SEQ ID NO: 1174386
cauaugggaagacacuuaa

SEQ ID NO: 1174388 - RNA, 19 nt, Artificial Sequence
  Description of Artificial Sequence: Synthetic oligonucleotide
  Sense strand starting at position 2979 of SEQ ID NO: 916663
agugucuucccauauguuu

SEQ ID NO: 1174389 - RNA, 19 nt, Artificial Sequence
  Description of Artificial Sequence: Synthetic oligonucleotide
  Antisense strand to SEQ ID NO: 1174388
aaacauaugggaagacacu

SEQ ID NO: 1174390 - RNA, 19 nt, Artificial Sequence
  Description of Artificial Sequence: Synthetic oligonucleotide
  Sense strand starting at position 3086 of SEQ ID NO: 916663
cuaauuuauuuaugggagu

SEQ ID NO: 1174391 - RNA, 19 nt, Artificial Sequence
  Description of Artificial Sequence: Synthetic oligonucleotide
  Antisense strand to SEQ ID NO: 1174390
acucccauaaauaaauuag

SEQ ID NO: 1174392 - RNA, 19 nt, Artificial Sequence
  Description of Artificial Sequence: Synthetic oligonucleotide
  Sense strand starting at position 3481 of SEQ ID NO: 916663
gugccaucucuacaguaua

SEQ ID NO: 1174393 - RNA, 19 nt, Artificial Sequence
  Description of Artificial Sequence: Synthetic oligonucleotide
  Antisense strand to SEQ ID NO: 1174392
uauacuguagagauggcac

SEQ ID NO: 1174394 - RNA, 19 nt, Artificial Sequence
  Description of Artificial Sequence: Synthetic oligonucleotide
  Sense strand starting at position 3489 of SEQ ID NO: 916663
ucuacaguauaucagauuu

SEQ ID NO: 1174395 - RNA, 19 nt, Artificial Sequence
  Description of Artificial Sequence: Synthetic oligonucleotide
  Antisense strand to SEQ ID NO: 1174394
aaaucugauauacuguaga

SEQ ID NO: 1174396 - RNA, 19 nt, Artificial Sequence
  Description of Artificial Sequence: Synthetic oligonucleotide
  Sense strand starting at position 3535 of SEQ ID NO: 916663
cguucuauuccacagccaa

SEQ ID NO: 1174397 - RNA, 19 nt, Artificial Sequence
  Description of Artificial Sequence: Synthetic oligonucleotide
  Antisense strand to SEQ ID NO: 1174396
uuggcuguggaauagaacg

SEQ ID NO: 1174398 - RNA, 19 nt, Artificial Sequence
  Description of Artificial Sequence: Synthetic oligonucleotide
  Sense strand starting at position 3640 of SEQ ID NO: 916663
acagcaguuccuuagcuau

SEQ ID NO: 1174399 - RNA, 19 nt, Artificial Sequence
  Description of Artificial Sequence: Synthetic oligonucleotide
  Antisense strand to SEQ ID NO: 1174398
auagcuaaggaacugcugu

SEQ ID NO: 1174400 - RNA, 19 nt, Artificial Sequence
  Description of Artificial Sequence: Synthetic oligonucleotide
  Sense strand starting at position 3739 of SEQ ID NO: 916663
cuaguuagguaucccuuau

SEQ ID NO: 1174401 - RNA, 19 nt, Artificial Sequence
  Description of Artificial Sequence: Synthetic oligonucleotide
  Antisense strand to SEQ ID NO: 1174400
auaagggauaccuaacuag

SEQ ID NO: 1174402 - RNA, 19 nt, Artificial Sequence
  Description of Artificial Sequence: Synthetic oligonucleotide
  Sense strand starting at position 3822 of SEQ ID NO: 916663
ugcauuauaucaguuaagu

SEQ ID NO: 1174403 - RNA, 19 nt, Artificial Sequence
  Description of Artificial Sequence: Synthetic oligonucleotide
  Antisense strand to SEQ ID NO: 1174402
acuuaacugauauaaugca

SEQ ID NO: 1174404 - RNA, 19 nt, Artificial Sequence
  Description of Artificial Sequence: Synthetic oligonucleotide
  Sense strand starting at position 3893 of SEQ ID NO: 916663
auuguuaaugcuuaacaag

SEQ ID NO: 1174405 - RNA, 19 nt, Artificial Sequence
  Description of Artificial Sequence: Synthetic oligonucleotide
  Antisense strand to SEQ ID NO: 1174404
cuuguuaagcauuaacaau

SEQ ID NO: 1174406 - RNA, 19 nt, Artificial Sequence
  Description of Artificial Sequence: Synthetic oligonucleotide
  Sense strand starting at position 416 of SEQ ID NO: 916664
uuacguuucguagagacaa

SEQ ID NO: 1174407 - RNA, 19 nt, Artificial Sequence
  Description of Artificial Sequence: Synthetic oligonucleotide
  Antisense strand to SEQ ID NO: 1174406
uugucucuacgaaacguaa

SEQ ID NO: 1174408 - RNA, 19 nt, Artificial Sequence
  Description of Artificial Sequence: Synthetic oligonucleotide
  Sense strand starting at position 1172 of SEQ ID NO: 916664
cuuucuaaugugugcugua

SEQ ID NO: 1174409 - RNA, 19 nt, Artificial Sequence
  Description of Artificial Sequence: Synthetic oligonucleotide
  Antisense strand to SEQ ID NO: 1174408
uacagcacacauuagaaag

SEQ ID NO: 1174410 - RNA, 19 nt, Artificial Sequence
  Description of Artificial Sequence: Synthetic oligonucleotide
  Sense strand starting at position 1173 of SEQ ID NO: 916664
uuucuaaugugugcuguaa

SEQ ID NO: 1174411 - RNA, 19 nt, Artificial Sequence
  Description of Artificial Sequence: Synthetic oligonucleotide
  Antisense strand to SEQ ID NO: 1174410
uuacagcacacauuagaaa

SEQ ID NO: 1174412 - RNA, 19 nt, Artificial Sequence
  Description of Artificial Sequence: Synthetic oligonucleotide
  Sense strand starting at position 1389 of SEQ ID NO: 916664
ucaugugaugcucagcuga

SEQ ID NO: 1174413 - RNA, 19 nt, Artificial Sequence
  Description of Artificial Sequence: Synthetic oligonucleotide
  Antisense strand to SEQ ID NO: 1174412
ucagcugagcaucacauga

SEQ ID NO: 1174414 - RNA, 19 nt, Artificial Sequence
  Description of Artificial Sequence: Synthetic oligonucleotide
  Sense strand starting at position 1481 of SEQ ID NO: 916664
agaggauuguaucuccuua

SEQ ID NO: 1174415 - RNA, 19 nt, Artificial Sequence
  Description of Artificial Sequence: Synthetic oligonucleotide
  Antisense strand to SEQ ID NO: 1174414
uaaggagauacaauccucu

SEQ ID NO: 1174416 - RNA, 19 nt, Artificial Sequence
  Description of Artificial Sequence: Synthetic oligonucleotide
  Sense strand starting at position 1483 of SEQ ID NO: 916664
aggauuguaucuccuuagu

SEQ ID NO: 1174417 - RNA, 19 nt, Artificial Sequence
  Description of Artificial Sequence: Synthetic oligonucleotide
  Antisense strand to SEQ ID NO: 1174416
acuaaggagauacaauccu

SEQ ID NO: 1174418 - RNA, 19 nt, Artificial Sequence
  Description of Artificial Sequence: Synthetic oligonucleotide
  Sense strand starting at position 1485 of SEQ ID NO: 916664
gauuguaucuccuuagugu

SEQ ID NO: 1174419 - RNA, 19 nt, Artificial Sequence
  Description of Artificial Sequence: Synthetic oligonucleotide
  Antisense strand to SEQ ID NO: 1174418
acacuaaggagauacaauc

SEQ ID NO: 1174420 - RNA, 19 nt, Artificial Sequence
  Description of Artificial Sequence: Synthetic oligonucleotide
  Sense strand starting at position 1486 of SEQ ID NO: 916664
auuguaucuccuuaguguu

SEQ ID NO: 1174421 - RNA, 19 nt, Artificial Sequence
  Description of Artificial Sequence: Synthetic oligonucleotide
  Antisense strand to SEQ ID NO: 1174420
aacacuaaggagauacaau

SEQ ID NO: 1174422 - RNA, 19 nt, Artificial Sequence
  Description of Artificial Sequence: Synthetic oligonucleotide
  Sense strand starting at position 1494 of SEQ ID NO: 916664
uccuuaguguucuuaccca

SEQ ID NO: 1174423 - RNA, 19 nt, Artificial Sequence
  Description of Artificial Sequence: Synthetic oligonucleotide
  Antisense strand to SEQ ID NO: 1174422
uggguaagaacacuaagga

SEQ ID NO: 1174424 - RNA, 19 nt, Artificial Sequence
  Description of Artificial Sequence: Synthetic oligonucleotide
  Sense strand starting at position 1671 of SEQ ID NO: 916664
cuccaagcauaugagauua

SEQ ID NO: 1174425 - RNA, 19 nt, Artificial Sequence
  Description of Artificial Sequence: Synthetic oligonucleotide
  Antisense strand to SEQ ID NO: 1174424
uaaucucauaugcuuggag

SEQ ID NO: 1174426 - RNA, 19 nt, Artificial Sequence
  Description of Artificial Sequence: Synthetic oligonucleotide
  Sense strand starting at position 1673 of SEQ ID NO: 916664
ccaagcauaugagauuauu

SEQ ID NO: 1174427 - RNA, 19 nt, Artificial Sequence
  Description of Artificial Sequence: Synthetic oligonucleotide
  Antisense strand to SEQ ID NO: 1174426
aauaaucucauaugcuugg

SEQ ID NO: 1174428 - RNA, 19 nt, Artificial Sequence
  Description of Artificial Sequence: Synthetic oligonucleotide
  Sense strand starting at position 1762 of SEQ ID NO: 916664
gugggagacgccugaaaua

SEQ ID NO: 1174429 - RNA, 19 nt, Artificial Sequence
  Description of Artificial Sequence: Synthetic oligonucleotide
  Antisense strand to SEQ ID NO: 1174428
uauuucaggcgucucccac

SEQ ID NO: 1174430 - RNA, 19 nt, Artificial Sequence
  Description of Artificial Sequence: Synthetic oligonucleotide
  Sense strand starting at position 1772 of SEQ ID NO: 916664
ccugaaauauugccgcuau

SEQ ID NO: 1174431 - RNA, 19 nt, Artificial Sequence
  Description of Artificial Sequence: Synthetic oligonucleotide
  Antisense strand to SEQ ID NO: 1174430
auagcggcaauauuucagg

SEQ ID NO: 1174432 - RNA, 19 nt, Artificial Sequence
  Description of Artificial Sequence: Synthetic oligonucleotide
  Sense strand starting at position 2102 of SEQ ID NO: 916664
ggauccuggucccuagaca

SEQ ID NO: 1174433 - RNA, 19 nt, Artificial Sequence
  Description of Artificial Sequence: Synthetic oligonucleotide
  Antisense strand to SEQ ID NO: 1174432
ugucuagggaccaggaucc

SEQ ID NO: 1174434 - RNA, 19 nt, Artificial Sequence
  Description of Artificial Sequence: Synthetic oligonucleotide
  Sense strand starting at position 2103 of SEQ ID NO: 916664
gauccuggucccuagacau

SEQ ID NO: 1174435 - RNA, 19 nt, Artificial Sequence
  Description of Artificial Sequence: Synthetic oligonucleotide
  Antisense strand to SEQ ID NO: 1174434
augucuagggaccaggauc

SEQ ID NO: 1174436 - RNA, 19 nt, Artificial Sequence
  Description of Artificial Sequence: Synthetic oligonucleotide
  Sense strand starting at position 2133 of SEQ ID NO: 916664
ccugcuacucaaugacagu

SEQ ID NO: 1174437 - RNA, 19 nt, Artificial Sequence
  Description of Artificial Sequence: Synthetic oligonucleotide
  Antisense strand to SEQ ID NO: 1174436
acugucauugaguagcagg

SEQ ID NO: 1174438 - RNA, 19 nt, Artificial Sequence
  Description of Artificial Sequence: Synthetic oligonucleotide
  Sense strand starting at position 2165 of SEQ ID NO: 916664
gggucacucucaucuugau

SEQ ID NO: 1174439 - RNA, 19 nt, Artificial Sequence
  Description of Artificial Sequence: Synthetic oligonucleotide
  Antisense strand to SEQ ID NO: 1174438
aucaagaugagagugaccc

SEQ ID NO: 1174440 - RNA, 19 nt, Artificial Sequence
  Description of Artificial Sequence: Synthetic oligonucleotide
  Sense strand starting at position 2236 of SEQ ID NO: 916664
acaacaguuuaucauggga

SEQ ID NO: 1174441 - RNA, 19 nt, Artificial Sequence
  Description of Artificial Sequence: Synthetic oligonucleotide
  Antisense strand to SEQ ID NO: 1174440
ucccaugauaaacuguugu

SEQ ID NO: 1174442 - RNA, 19 nt, Artificial Sequence
  Description of Artificial Sequence: Synthetic oligonucleotide
  Sense strand starting at position 2240 of SEQ ID NO: 916664
caguuuaucaugggagagu

SEQ ID NO: 1174443 - RNA, 19 nt, Artificial Sequence
  Description of Artificial Sequence: Synthetic oligonucleotide
  Antisense strand to SEQ ID NO: 1174442
acucucccaugauaaacug

SEQ ID NO: 1174444 - RNA, 19 nt, Artificial Sequence
  Description of Artificial Sequence: Synthetic oligonucleotide
  Sense strand starting at position 2241 of SEQ ID NO: 916664
aguuuaucaugggagagug

SEQ ID NO: 1174445 - RNA, 19 nt, Artificial Sequence
  Description of Artificial Sequence: Synthetic oligonucleotide
  Antisense strand to SEQ ID NO: 1174444
cacucucccaugauaaacu

SEQ ID NO: 1174446 - RNA, 19 nt, Artificial Sequence
  Description of Artificial Sequence: Synthetic oligonucleotide
  Sense strand starting at position 2367 of SEQ ID NO: 916664
caggauuccuuugcaacga

SEQ ID NO: 1174447 - RNA, 19 nt, Artificial Sequence
  Description of Artificial Sequence: Synthetic oligonucleotide
  Antisense strand to SEQ ID NO: 1174446
ucguugcaaaggaauccug

SEQ ID NO: 1174448 - RNA, 19 nt, Artificial Sequence
  Description of Artificial Sequence: Synthetic oligonucleotide
  Sense strand starting at position 2371 of SEQ ID NO: 916664
auuccuuugcaacgagauu

SEQ ID NO: 1174449 - RNA, 19 nt, Artificial Sequence
  Description of Artificial Sequence: Synthetic oligonucleotide
  Antisense strand to SEQ ID NO: 1174448
aaucucguugcaaaggaau

SEQ ID NO: 1174450 - RNA, 19 nt, Artificial Sequence
  Description of Artificial Sequence: Synthetic oligonucleotide
  Sense strand starting at position 2391 of SEQ ID NO: 916664
ccggcuuccugguuuccaa

SEQ ID NO: 1174451 - RNA, 19 nt, Artificial Sequence
  Description of Artificial Sequence: Synthetic oligonucleotide
  Antisense strand to SEQ ID NO: 1174450
uuggaaaccaggaagccgg

SEQ ID NO: 1174452 - RNA, 19 nt, Artificial Sequence
  Description of Artificial Sequence: Synthetic oligonucleotide
  Sense strand starting at position 2432 of SEQ ID NO: 916664
aauuuaaccuuaggucgau

SEQ ID NO: 1174453 - RNA, 19 nt, Artificial Sequence
  Description of Artificial Sequence: Synthetic oligonucleotide
  Antisense strand to SEQ ID NO: 1174452
aucgaccuaagguuaaauu

SEQ ID NO: 1174454 - RNA, 19 nt, Artificial Sequence
  Description of Artificial Sequence: Synthetic oligonucleotide
  Sense strand starting at position 2436 of SEQ ID NO: 916664
uaaccuuaggucgauacau

SEQ ID NO: 1174455 - RNA, 19 nt, Artificial Sequence
  Description of Artificial Sequence: Synthetic oligonucleotide
  Antisense strand to SEQ ID NO: 1174454
auguaucgaccuaagguua

SEQ ID NO: 1174456 - RNA, 19 nt, Artificial Sequence
  Description of Artificial Sequence: Synthetic oligonucleotide
  Sense strand starting at position 2438 of SEQ ID NO: 916664
accuuaggucgauacauau

SEQ ID NO: 1174457 - RNA, 19 nt, Artificial Sequence
  Description of Artificial Sequence: Synthetic oligonucleotide
  Antisense strand to SEQ ID NO: 1174456
auauguaucgaccuaaggu

SEQ ID NO: 1174458 - RNA, 19 nt, Artificial Sequence
  Description of Artificial Sequence: Synthetic oligonucleotide
  Sense strand starting at position 2476 of SEQ ID NO: 916664
aauagugaguuagaaauca

SEQ ID NO: 1174459 - RNA, 19 nt, Artificial Sequence
  Description of Artificial Sequence: Synthetic oligonucleotide
  Antisense strand to SEQ ID NO: 1174458
ugauuucuaacucacuauu

SEQ ID NO: 1174460 - RNA, 19 nt, Artificial Sequence
  Description of Artificial Sequence: Synthetic oligonucleotide
  Sense strand starting at position 2661 of SEQ ID NO: 916664
ggcucugacguugaccaau

SEQ ID NO: 1174461 - RNA, 19 nt, Artificial Sequence
  Description of Artificial Sequence: Synthetic oligonucleotide
  Antisense strand to SEQ ID NO: 1174460
auuggucaacgucagagcc

SEQ ID NO: 1174462 - RNA, 19 nt, Artificial Sequence
  Description of Artificial Sequence: Synthetic oligonucleotide
  Sense strand starting at position 3214 of SEQ ID NO: 916664
ugaagaguauacuuauacu

SEQ ID NO: 1174463 - RNA, 19 nt, Artificial Sequence
  Description of Artificial Sequence: Synthetic oligonucleotide
  Antisense strand to SEQ ID NO: 1174462
aguauaaguauacucuuca

SEQ ID NO: 1174464 - RNA, 19 nt, Artificial Sequence
  Description of Artificial Sequence: Synthetic oligonucleotide
  Sense strand starting at position 3373 of SEQ ID NO: 916664
aguggaguuaugugggaac

SEQ ID NO: 1174465 - RNA, 19 nt, Artificial Sequence
  Description of Artificial Sequence: Synthetic oligonucleotide
  Antisense strand to SEQ ID NO: 1174464
guucccacauaacuccacu

SEQ ID NO: 1174466 - RNA, 19 nt, Artificial Sequence
  Description of Artificial Sequence: Synthetic oligonucleotide
  Sense strand starting at position 3402 of SEQ ID NO: 916664
cgccuuucugaaugaagag

SEQ ID NO: 1174467 - RNA, 19 nt, Artificial Sequence
  Description of Artificial Sequence: Synthetic oligonucleotide
  Antisense strand to SEQ ID NO: 1174466
cucuucauucagaaaggcg

SEQ ID NO: 1174468 - RNA, 19 nt, Artificial Sequence
  Description of Artificial Sequence: Synthetic oligonucleotide
  Sense strand starting at position 3598 of SEQ ID NO: 916664
aggagauaauggccuuaau

SEQ ID NO: 1174469 - RNA, 19 nt, Artificial Sequence
  Description of Artificial Sequence: Synthetic oligonucleotide
  Antisense strand to SEQ ID NO: 1174468
auuaaggccauuaucuccu

SEQ ID NO: 1174470 - RNA, 19 nt, Artificial Sequence
  Description of Artificial Sequence: Synthetic oligonucleotide
  Sense strand starting at position 3857 of SEQ ID NO: 916664
auccuaauauugucaagua

SEQ ID NO: 1174471 - RNA, 19 nt, Artificial Sequence
  Description of Artificial Sequence: Synthetic oligonucleotide
  Antisense strand to SEQ ID NO: 1174470
uacuugacaauauuaggau

SEQ ID NO: 1174472 - RNA, 19 nt, Artificial Sequence
  Description of Artificial Sequence: Synthetic oligonucleotide
  Sense strand starting at position 3870 of SEQ ID NO: 916664
caaguaaguaugcgucuga

SEQ ID NO: 1174473 - RNA, 19 nt, Artificial Sequence
  Description of Artificial Sequence: Synthetic oligonucleotide
  Antisense strand to SEQ ID NO: 1174472
ucagacgcauacuuacuug

SEQ ID NO: 1174474 - RNA, 19 nt, Artificial Sequence
  Description of Artificial Sequence: Synthetic oligonucleotide
  Sense strand starting at position 3874 of SEQ ID NO: 916664
uaaguaugcgucugagagg

SEQ ID NO: 1174475 - RNA, 19 nt, Artificial Sequence
  Description of Artificial Sequence: Synthetic oligonucleotide
  Antisense strand to SEQ ID NO: 1174474
ccucucagacgcauacuua

SEQ ID NO: 1174476 - RNA, 19 nt, Artificial Sequence
  Description of Artificial Sequence: Synthetic oligonucleotide
  Sense strand starting at position 3881 of SEQ ID NO: 916664
gcgucugagaggugaucca

SEQ ID NO: 1174477 - RNA, 19 nt, Artificial Sequence
  Description of Artificial Sequence: Synthetic oligonucleotide
  Antisense strand to SEQ ID NO: 1174476
uggaucaccucucagacgc

SEQ ID NO: 1174478 - RNA, 19 nt, Artificial Sequence
  Description of Artificial Sequence: Synthetic oligonucleotide
  Sense strand starting at position 3890 of SEQ ID NO: 916664
aggugauccagcuggaaag

SEQ ID NO: 1174479 - RNA, 19 nt, Artificial Sequence
  Description of Artificial Sequence: Synthetic oligonucleotide
  Antisense strand to SEQ ID NO: 1174478
cuuuccagcuggaucaccu

SEQ ID NO: 1174480 - RNA, 19 nt, Artificial Sequence
  Description of Artificial Sequence: Synthetic oligonucleotide
  Sense strand starting at position 3910 of SEQ ID NO: 916664
aggauaaguucugucugua

SEQ ID NO: 1174481 - RNA, 19 nt, Artificial Sequence
  Description of Artificial Sequence: Synthetic oligonucleotide
  Antisense strand to SEQ ID NO: 1174480
uacagacagaacuuauccu

SEQ ID NO: 1174482 - RNA, 19 nt, Artificial Sequence
  Description of Artificial Sequence: Synthetic oligonucleotide
  Sense strand starting at position 3913 of SEQ ID NO: 916664
auaaguucugucuguacag

SEQ ID NO: 1174483 - RNA, 19 nt, Artificial Sequence
  Description of Artificial Sequence: Synthetic oligonucleotide
  Antisense strand to SEQ ID NO: 1174482
cuguacagacagaacuuau

SEQ ID NO: 1174484 - RNA, 19 nt, Artificial Sequence
  Description of Artificial Sequence: Synthetic oligonucleotide
  Sense strand starting at position 3914 of SEQ ID NO: 916664
uaaguucugucuguacagu

SEQ ID NO: 1174485 - RNA, 19 nt, Artificial Sequence
  Description of Artificial Sequence: Synthetic oligonucleotide
  Antisense strand to SEQ ID NO: 1174484
acuguacagacagaacuua

SEQ ID NO: 1174486 - RNA, 19 nt, Artificial Sequence
  Description of Artificial Sequence: Synthetic oligonucleotide
  Sense strand starting at position 739 of SEQ ID NO: 916665
ucaugugaugcucagcuga

SEQ ID NO: 1174487 - RNA, 19 nt, Artificial Sequence
  Description of Artificial Sequence: Synthetic oligonucleotide
  Antisense strand to SEQ ID NO: 1174486
ucagcugagcaucacauga

SEQ ID NO: 1174488 - RNA, 19 nt, Artificial Sequence
  Description of Artificial Sequence: Synthetic oligonucleotide
  Sense strand starting at position 831 of SEQ ID NO: 916665
agaggauuguaucuccuua

SEQ ID NO: 1174489 - RNA, 19 nt, Artificial Sequence
  Description of Artificial Sequence: Synthetic oligonucleotide
  Antisense strand to SEQ ID NO: 1174488
uaaggagauacaauccucu

SEQ ID NO: 1174490 - RNA, 19 nt, Artificial Sequence
  Description of Artificial Sequence: Synthetic oligonucleotide
  Sense strand starting at position 833 of SEQ ID NO: 916665
aggauuguaucuccuuagu

SEQ ID NO: 1174491 - RNA, 19 nt, Artificial Sequence
  Description of Artificial Sequence: Synthetic oligonucleotide
  Antisense strand to SEQ ID NO: 1174490
acuaaggagauacaauccu

SEQ ID NO: 1174492 - RNA, 19 nt, Artificial Sequence
  Description of Artificial Sequence: Synthetic oligonucleotide
  Sense strand starting at position 835 of SEQ ID NO: 916665
gauuguaucuccuuagugu

SEQ ID NO: 1174493 - RNA, 19 nt, Artificial Sequence
  Description of Artificial Sequence: Synthetic oligonucleotide
  Antisense strand to SEQ ID NO: 1174492
acacuaaggagauacaauc

SEQ ID NO: 1174494 - RNA, 19 nt, Artificial Sequence
  Description of Artificial Sequence: Synthetic oligonucleotide
  Sense strand starting at position 836 of SEQ ID NO: 916665
auuguaucuccuuaguguu

SEQ ID NO: 1174495 - RNA, 19 nt, Artificial Sequence
  Description of Artificial Sequence: Synthetic oligonucleotide
  Antisense strand to SEQ ID NO: 1174494
aacacuaaggagauacaau

SEQ ID NO: 1174496 - RNA, 19 nt, Artificial Sequence
  Description of Artificial Sequence: Synthetic oligonucleotide
  Sense strand starting at position 844 of SEQ ID NO: 916665
uccuuaguguucuuaccca

SEQ ID NO: 1174497 - RNA, 19 nt, Artificial Sequence
  Description of Artificial Sequence: Synthetic oligonucleotide
  Antisense strand to SEQ ID NO: 1174496
uggguaagaacacuaagga

SEQ ID NO: 1174498 - RNA, 19 nt, Artificial Sequence
  Description of Artificial Sequence: Synthetic oligonucleotide
  Sense strand starting at position 1112 of SEQ ID NO: 916665
gugggagacgccugaaaua

SEQ ID NO: 1174499 - RNA, 19 nt, Artificial Sequence
  Description of Artificial Sequence: Synthetic oligonucleotide
  Antisense strand to SEQ ID NO: 1174498
uauuucaggcgucucccac

SEQ ID NO: 1174500 - RNA, 19 nt, Artificial Sequence
  Description of Artificial Sequence: Synthetic oligonucleotide
  Sense strand starting at position 1122 of SEQ ID NO: 916665
ccugaaauauugccgcuau

SEQ ID NO: 1174501 - RNA, 19 nt, Artificial Sequence
  Description of Artificial Sequence: Synthetic oligonucleotide
  Antisense strand to SEQ ID NO: 1174500
auagcggcaauauuucagg

SEQ ID NO: 1174502 - RNA, 19 nt, Artificial Sequence
  Description of Artificial Sequence: Synthetic oligonucleotide
  Sense strand starting at position 1452 of SEQ ID NO: 916665
ggauccuggucccuagaca

SEQ ID NO: 1174503 - RNA, 19 nt, Artificial Sequence
  Description of Artificial Sequence: Synthetic oligonucleotide
  Antisense strand to SEQ ID NO: 1174502
ugucuagggaccaggaucc

SEQ ID NO: 1174504 - RNA, 19 nt, Artificial Sequence
  Description of Artificial Sequence: Synthetic oligonucleotide
  Sense strand starting at position 1453 of SEQ ID NO: 916665
gauccuggucccuagacau

SEQ ID NO: 1174505 - RNA, 19 nt, Artificial Sequence
  Description of Artificial Sequence: Synthetic oligonucleotide
  Antisense strand to SEQ ID NO: 1174504
augucuagggaccaggauc

SEQ ID NO: 1174506 - RNA, 19 nt, Artificial Sequence
  Description of Artificial Sequence: Synthetic oligonucleotide
  Sense strand starting at position 1483 of SEQ ID NO: 916665
ccugcuacucaaugacagu

SEQ ID NO: 1174507 - RNA, 19 nt, Artificial Sequence
  Description of Artificial Sequence: Synthetic oligonucleotide
  Antisense strand to SEQ ID NO: 1174506
acugucauugaguagcagg

SEQ ID NO: 1174508 - RNA, 19 nt, Artificial Sequence
  Description of Artificial Sequence: Synthetic oligonucleotide
  Sense strand starting at position 1515 of SEQ ID NO: 916665
gggucacucucaucuugau

SEQ ID NO: 1174509 - RNA, 19 nt, Artificial Sequence
  Description of Artificial Sequence: Synthetic oligonucleotide
  Antisense strand to SEQ ID NO: 1174508
aucaagaugagagugaccc

SEQ ID NO: 1174510 - RNA, 19 nt, Artificial Sequence
  Description of Artificial Sequence: Synthetic oligonucleotide
  Sense strand starting at position 1590 of SEQ ID NO: 916665
caguuuaucaugggagagu

SEQ ID NO: 1174511 - RNA, 19 nt, Artificial Sequence
  Description of Artificial Sequence: Synthetic oligonucleotide
  Antisense strand to SEQ ID NO: 1174510
acucucccaugauaaacug

SEQ ID NO: 1174512 - RNA, 19 nt, Artificial Sequence
  Description of Artificial Sequence: Synthetic oligonucleotide
  Sense strand starting at position 1717 of SEQ ID NO: 916665
caggauuccuuugcaacga

SEQ ID NO: 1174513 - RNA, 19 nt, Artificial Sequence
  Description of Artificial Sequence: Synthetic oligonucleotide
  Antisense strand to SEQ ID NO: 1174512
ucguugcaaaggaauccug

SEQ ID NO: 1174514 - RNA, 19 nt, Artificial Sequence
  Description of Artificial Sequence: Synthetic oligonucleotide
  Sense strand starting at position 1721 of SEQ ID NO: 916665
auuccuuugcaacgagauu

SEQ ID NO: 1174515 - RNA, 19 nt, Artificial Sequence
  Description of Artificial Sequence: Synthetic oligonucleotide
  Antisense strand to SEQ ID NO: 1174514
aaucucguugcaaaggaau

SEQ ID NO: 1174516 - RNA, 19 nt, Artificial Sequence
  Description of Artificial Sequence: Synthetic oligonucleotide
  Sense strand starting at position 1782 of SEQ ID NO: 916665
aauuuaaccuuaggucgau

SEQ ID NO: 1174517 - RNA, 19 nt, Artificial Sequence
  Description of Artificial Sequence: Synthetic oligonucleotide
  Antisense strand to SEQ ID NO: 1174516
aucgaccuaagguuaaauu

SEQ ID NO: 1174518 - RNA, 19 nt, Artificial Sequence
  Description of Artificial Sequence: Synthetic oligonucleotide
  Sense strand starting at position 1786 of SEQ ID NO: 916665
uaaccuuaggucgauacau

SEQ ID NO: 1174519 - RNA, 19 nt, Artificial Sequence
  Description of Artificial Sequence: Synthetic oligonucleotide
  Antisense strand to SEQ ID NO: 1174518
auguaucgaccuaagguua

SEQ ID NO: 1174520 - RNA, 19 nt, Artificial Sequence
  Description of Artificial Sequence: Synthetic oligonucleotide
  Sense strand starting at position 1788 of SEQ ID NO: 916665
accuuaggucgauacauau

SEQ ID NO: 1174521 - RNA, 19 nt, Artificial Sequence
  Description of Artificial Sequence: Synthetic oligonucleotide
  Antisense strand to SEQ ID NO: 1174520
auauguaucgaccuaaggu

SEQ ID NO: 1174522 - RNA, 19 nt, Artificial Sequence
  Description of Artificial Sequence: Synthetic oligonucleotide
  Sense strand starting at position 2011 of SEQ ID NO: 916665
ggcucugacguugaccaau

SEQ ID NO: 1174523 - RNA, 19 nt, Artificial Sequence
  Description of Artificial Sequence: Synthetic oligonucleotide
  Antisense strand to SEQ ID NO: 1174522
auuggucaacgucagagcc

SEQ ID NO: 1174524 - RNA, 19 nt, Artificial Sequence
  Description of Artificial Sequence: Synthetic oligonucleotide
  Sense strand starting at position 2564 of SEQ ID NO: 916665
ugaagaguauacuuauacu

SEQ ID NO: 1174525 - RNA, 19 nt, Artificial Sequence
  Description of Artificial Sequence: Synthetic oligonucleotide
  Antisense strand to SEQ ID NO: 1174524
aguauaaguauacucuuca

SEQ ID NO: 1174526 - RNA, 19 nt, Artificial Sequence
  Description of Artificial Sequence: Synthetic oligonucleotide
  Sense strand starting at position 2723 of SEQ ID NO: 916665
aguggaguuaugugggaac

SEQ ID NO: 1174527 - RNA, 19 nt, Artificial Sequence
  Description of Artificial Sequence: Synthetic oligonucleotide
  Antisense strand to SEQ ID NO: 1174526
guucccacauaacuccacu

SEQ ID NO: 1174528 - RNA, 19 nt, Artificial Sequence
  Description of Artificial Sequence: Synthetic oligonucleotide
  Sense strand starting at position 2752 of SEQ ID NO: 916665
cgccuuucugaaugaagag

SEQ ID NO: 1174529 - RNA, 19 nt, Artificial Sequence
  Description of Artificial Sequence: Synthetic oligonucleotide
  Antisense strand to SEQ ID NO: 1174528
cucuucauucagaaaggcg

SEQ ID NO: 1174530 - RNA, 19 nt, Artificial Sequence
  Description of Artificial Sequence: Synthetic oligonucleotide
  Sense strand starting at position 2948 of SEQ ID NO: 916665
aggagauaauggccuuaau

SEQ ID NO: 1174531 - RNA, 19 nt, Artificial Sequence
  Description of Artificial Sequence: Synthetic oligonucleotide
  Antisense strand to SEQ ID NO: 1174530
auuaaggccauuaucuccu

SEQ ID NO: 1174532 - RNA, 19 nt, Artificial Sequence
  Description of Artificial Sequence: Synthetic oligonucleotide
  Sense strand starting at position 3207 of SEQ ID NO: 916665
auccuaauauugucaagua

SEQ ID NO: 1174533 - RNA, 19 nt, Artificial Sequence
  Description of Artificial Sequence: Synthetic oligonucleotide
  Antisense strand to SEQ ID NO: 1174532
uacuugacaauauuaggau

SEQ ID NO: 1174534 - RNA, 19 nt, Artificial Sequence
  Description of Artificial Sequence: Synthetic oligonucleotide
  Sense strand starting at position 3224 of SEQ ID NO: 916665
uaaguaugcgucugagagg

SEQ ID NO: 1174535 - RNA, 19 nt, Artificial Sequence
  Description of Artificial Sequence: Synthetic oligonucleotide
  Antisense strand to SEQ ID NO: 1174534
ccucucagacgcauacuua

SEQ ID NO: 1174536 - RNA, 19 nt, Artificial Sequence
  Description of Artificial Sequence: Synthetic oligonucleotide
  Sense strand starting at position 3231 of SEQ ID NO: 916665
gcgucugagaggugaucca

SEQ ID NO: 1174537 - RNA, 19 nt, Artificial Sequence
  Description of Artificial Sequence: Synthetic oligonucleotide
  Antisense strand to SEQ ID NO: 1174536
uggaucaccucucagacgc

SEQ ID NO: 1174538 - RNA, 19 nt, Artificial Sequence
  Description of Artificial Sequence: Synthetic oligonucleotide
  Sense strand starting at position 3240 of SEQ ID NO: 916665
aggugauccagcuggaaag

SEQ ID NO: 1174539 - RNA, 19 nt, Artificial Sequence
  Description of Artificial Sequence: Synthetic oligonucleotide
  Antisense strand to SEQ ID NO: 1174538
cuuuccagcuggaucaccu

SEQ ID NO: 1174540 - RNA, 19 nt, Artificial Sequence
  Description of Artificial Sequence: Synthetic oligonucleotide
  Sense strand starting at position 3260 of SEQ ID NO: 916665
aggauaaguucugucugua

SEQ ID NO: 1174541 - RNA, 19 nt, Artificial Sequence
  Description of Artificial Sequence: Synthetic oligonucleotide
  Antisense strand to SEQ ID NO: 1174540
uacagacagaacuuauccu

SEQ ID NO: 1174542 - RNA, 19 nt, Artificial Sequence
  Description of Artificial Sequence: Synthetic oligonucleotide
  Sense strand starting at position 3263 of SEQ ID NO: 916665
auaaguucugucuguacag

SEQ ID NO: 1174543 - RNA, 19 nt, Artificial Sequence
  Description of Artificial Sequence: Synthetic oligonucleotide
  Antisense strand to SEQ ID NO: 1174542
cuguacagacagaacuuau

SEQ ID NO: 1174544 - RNA, 19 nt, Artificial Sequence
  Description of Artificial Sequence: Synthetic oligonucleotide
  Sense strand starting at position 3264 of SEQ ID NO: 916665
uaaguucugucuguacagu

SEQ ID NO: 1174545 - RNA, 19 nt, Artificial Sequence
  Description of Artificial Sequence: Synthetic oligonucleotide
  Antisense strand to SEQ ID NO: 1174544
acuguacagacagaacuua

SEQ ID NO: 1174546 - RNA, 19 nt, Artificial Sequence
  Description of Artificial Sequence: Synthetic oligonucleotide
  Sense strand starting at position 3456 of SEQ ID NO: 916665
agguaaugcuucucaucag

SEQ ID NO: 1174547 - RNA, 19 nt, Artificial Sequence
  Description of Artificial Sequence: Synthetic oligonucleotide
  Antisense strand to SEQ ID NO: 1174546
cugaugagaagcauuaccu

SEQ ID NO: 1174548 - RNA, 19 nt, Artificial Sequence
  Description of Artificial Sequence: Synthetic oligonucleotide
  Sense strand starting at position 3514 of SEQ ID NO: 916665
ggcaauucagggugauauu

SEQ ID NO: 1174549 - RNA, 19 nt, Artificial Sequence
  Description of Artificial Sequence: Synthetic oligonucleotide
  Antisense strand to SEQ ID NO: 1174548
aauaucacccugaauugcc

SEQ ID NO: 1174550 - RNA, 19 nt, Artificial Sequence
  Description of Artificial Sequence: Synthetic oligonucleotide
  Sense strand starting at position 3685 of SEQ ID NO: 916665
ggugggaggucagaugaaa

SEQ ID NO: 1174551 - RNA, 19 nt, Artificial Sequence
  Description of Artificial Sequence: Synthetic oligonucleotide
  Antisense strand to SEQ ID NO: 1174550
uuucaucugaccucccacc

SEQ ID NO: 1174552 - RNA, 19 nt, Artificial Sequence
  Description of Artificial Sequence: Synthetic oligonucleotide
  Sense strand starting at position 3696 of SEQ ID NO: 916665
agaugaaacucagauaaac

SEQ ID NO: 1174553 - RNA, 19 nt, Artificial Sequence
  Description of Artificial Sequence: Synthetic oligonucleotide
  Antisense strand to SEQ ID NO: 1174552
guuuaucugaguuucaucu

SEQ ID NO: 1174554 - RNA, 19 nt, Artificial Sequence
  Description of Artificial Sequence: Synthetic oligonucleotide
  Sense strand starting at position 3720 of SEQ ID NO: 916665
uugagagcacuugguaaau

SEQ ID NO: 1174555 - RNA, 19 nt, Artificial Sequence
  Description of Artificial Sequence: Synthetic oligonucleotide
  Antisense strand to SEQ ID NO: 1174554
auuuaccaagugcucucaa

SEQ ID NO: 1174556 - RNA, 19 nt, Artificial Sequence
  Description of Artificial Sequence: Synthetic oligonucleotide
  Sense strand starting at position 3752 of SEQ ID NO: 916665
ccuuccauuugguggaaga

SEQ ID NO: 1174557 - RNA, 19 nt, Artificial Sequence
  Description of Artificial Sequence: Synthetic oligonucleotide
  Antisense strand to SEQ ID NO: 1174556
ucuuccaccaaauggaagg

SEQ ID NO: 1174558 - RNA, 19 nt, Artificial Sequence
  Description of Artificial Sequence: Synthetic oligonucleotide
  Sense strand starting at position 3920 of SEQ ID NO: 916665
cugacaguccauugggaga

SEQ ID NO: 1174559 - RNA, 19 nt, Artificial Sequence
  Description of Artificial Sequence: Synthetic oligonucleotide
  Antisense strand to SEQ ID NO: 1174558
ucucccaauggacugucag

SEQ ID NO: 1174560 - RNA, 19 nt, Artificial Sequence
  Description of Artificial Sequence: Synthetic oligonucleotide
  Sense strand starting at position 3923 of SEQ ID NO: 916665
acaguccauugggagaaau

SEQ ID NO: 1174561 - RNA, 19 nt, Artificial Sequence
  Description of Artificial Sequence: Synthetic oligonucleotide
  Antisense strand to SEQ ID NO: 1174560
auuucucccaauggacugu

SEQ ID NO: 1174562 - RNA, 19 nt, Artificial Sequence
  Description of Artificial Sequence: Synthetic oligonucleotide
  Sense strand starting at position 3934 of SEQ ID NO: 916665
ggagaaauagcuuguaaau

SEQ ID NO: 1174563 - RNA, 19 nt, Artificial Sequence
  Description of Artificial Sequence: Synthetic oligonucleotide
  Antisense strand to SEQ ID NO: 1174562
auuuacaagcuauuucucc

SEQ ID NO: 1174564 - RNA, 19 nt, Artificial Sequence
  Description of Artificial Sequence: Synthetic oligonucleotide
  Sense strand starting at position 3943 of SEQ ID NO: 916665
gcuuguaaauauguaacua

SEQ ID NO: 1174565 - RNA, 19 nt, Artificial Sequence
  Description of Artificial Sequence: Synthetic oligonucleotide
  Antisense strand to SEQ ID NO: 1174564
uaguuacauauuuacaagc

SEQ ID NO: 1174566 - RNA, 19 nt, Artificial Sequence
  Description of Artificial Sequence: Synthetic oligonucleotide
  Sense strand starting at position 132 of SEQ ID NO: 916666
aauguuaaacgccagucaa

SEQ ID NO: 1174567 - RNA, 19 nt, Artificial Sequence
  Description of Artificial Sequence: Synthetic oligonucleotide
  Antisense strand to SEQ ID NO: 1174566
uugacuggcguuuaacauu

SEQ ID NO: 1174568 - RNA, 19 nt, Artificial Sequence
  Description of Artificial Sequence: Synthetic oligonucleotide
  Sense strand starting at position 203 of SEQ ID NO: 916666
aucaauugugucuauaaca

SEQ ID NO: 1174569 - RNA, 19 nt, Artificial Sequence
  Description of Artificial Sequence: Synthetic oligonucleotide
  Antisense strand to SEQ ID NO: 1174568
uguuauagacacaauugau

SEQ ID NO: 1174570 - RNA, 19 nt, Artificial Sequence
  Description of Artificial Sequence: Synthetic oligonucleotide
  Sense strand starting at position 295 of SEQ ID NO: 916666
agugacaauccaggaaagu

SEQ ID NO: 1174571 - RNA, 19 nt, Artificial Sequence
  Description of Artificial Sequence: Synthetic oligonucleotide
  Antisense strand to SEQ ID NO: 1174570
acuuuccuggauugucacu

SEQ ID NO: 1174572 - RNA, 19 nt, Artificial Sequence
  Description of Artificial Sequence: Synthetic oligonucleotide
  Sense strand starting at position 394 of SEQ ID NO: 916666
guacucuaucaagauugcu

SEQ ID NO: 1174573 - RNA, 19 nt, Artificial Sequence
  Description of Artificial Sequence: Synthetic oligonucleotide
  Antisense strand to SEQ ID NO: 1174572
agcaaucuugauagaguac

SEQ ID NO: 1174574 - RNA, 19 nt, Artificial Sequence
  Description of Artificial Sequence: Synthetic oligonucleotide
  Sense strand starting at position 397 of SEQ ID NO: 916666
cucuaucaagauugcugau

SEQ ID NO: 1174575 - RNA, 19 nt, Artificial Sequence
  Description of Artificial Sequence: Synthetic oligonucleotide
  Antisense strand to SEQ ID NO: 1174574
aucagcaaucuugauagag

SEQ ID NO: 1174576 - RNA, 19 nt, Artificial Sequence
  Description of Artificial Sequence: Synthetic oligonucleotide
  Sense strand starting at position 515 of SEQ ID NO: 916666
gugaaugguacggagcaaa

SEQ ID NO: 1174577 - RNA, 19 nt, Artificial Sequence
  Description of Artificial Sequence: Synthetic oligonucleotide
  Antisense strand to SEQ ID NO: 1174576
uuugcuccguaccauucac

SEQ ID NO: 1174578 - RNA, 19 nt, Artificial Sequence
  Description of Artificial Sequence: Synthetic oligonucleotide
  Sense strand starting at position 547 of SEQ ID NO: 916666
cguuauagaaagcaaugau

SEQ ID NO: 1174579 - RNA, 19 nt, Artificial Sequence
  Description of Artificial Sequence: Synthetic oligonucleotide
  Antisense strand to SEQ ID NO: 1174578
aucauugcuuucuauaacg

SEQ ID NO: 1174580 - RNA, 19 nt, Artificial Sequence
  Description of Artificial Sequence: Synthetic oligonucleotide
  Sense strand starting at position 579 of SEQ ID NO: 916666
ggaaguguccuauaguuga

SEQ ID NO: 1174581 - RNA, 19 nt, Artificial Sequence
  Description of Artificial Sequence: Synthetic oligonucleotide
  Antisense strand to SEQ ID NO: 1174580
ucaacuauaggacacuucc

SEQ ID NO: 1174582 - RNA, 19 nt, Artificial Sequence
  Description of Artificial Sequence: Synthetic oligonucleotide
  Sense strand starting at position 593 of SEQ ID NO: 916666
guugaacuucugggacuua

SEQ ID NO: 1174583 - RNA, 19 nt, Artificial Sequence
  Description of Artificial Sequence: Synthetic oligonucleotide
  Antisense strand to SEQ ID NO: 1174582
uaagucccagaaguucaac

SEQ ID NO: 1174584 - RNA, 19 nt, Artificial Sequence
  Description of Artificial Sequence: Synthetic oligonucleotide
  Sense strand starting at position 652 of SEQ ID NO: 916666
aaauccugucacugaggua

SEQ ID NO: 1174585 - RNA, 19 nt, Artificial Sequence
  Description of Artificial Sequence: Synthetic oligonucleotide
  Antisense strand to SEQ ID NO: 1174584
uaccucagugacaggauuu

SEQ ID NO: 1174586 - RNA, 19 nt, Artificial Sequence
  Description of Artificial Sequence: Synthetic oligonucleotide
  Sense strand starting at position 792 of SEQ ID NO: 916666
uaaagcggucgagacaaau

SEQ ID NO: 1174587 - RNA, 19 nt, Artificial Sequence
  Description of Artificial Sequence: Synthetic oligonucleotide
  Antisense strand to SEQ ID NO: 1174586
auuugucucgaccgcuuua

SEQ ID NO: 1174588 - RNA, 19 nt, Artificial Sequence
  Description of Artificial Sequence: Synthetic oligonucleotide
  Sense strand starting at position 898 of SEQ ID NO: 916666
ccaagagcuccacgaagau

SEQ ID NO: 1174589 - RNA, 19 nt, Artificial Sequence
  Description of Artificial Sequence: Synthetic oligonucleotide
  Antisense strand to SEQ ID NO: 1174588
aucuucguggagcucuugg

SEQ ID NO: 1174590 - RNA, 19 nt, Artificial Sequence
  Description of Artificial Sequence: Synthetic oligonucleotide
  Sense strand starting at position 914 of SEQ ID NO: 916666
gauauaggccacuguuaaa

SEQ ID NO: 1174591 - RNA, 19 nt, Artificial Sequence
  Description of Artificial Sequence: Synthetic oligonucleotide
  Antisense strand to SEQ ID NO: 1174590
uuuaacaguggccuauauc

SEQ ID NO: 1174592 - RNA, 19 nt, Artificial Sequence
  Description of Artificial Sequence: Synthetic oligonucleotide
  Sense strand starting at position 1299 of SEQ ID NO: 916666
guuaguuugcgaaagucgu

SEQ ID NO: 1174593 - RNA, 19 nt, Artificial Sequence
  Description of Artificial Sequence: Synthetic oligonucleotide
  Antisense strand to SEQ ID NO: 1174592
acgacuuucgcaaacuaac

SEQ ID NO: 1174594 - RNA, 19 nt, Artificial Sequence
  Description of Artificial Sequence: Synthetic oligonucleotide
  Sense strand starting at position 1451 of SEQ ID NO: 916666
gcccuuagccguucuccua

SEQ ID NO: 1174595 - RNA, 19 nt, Artificial Sequence
  Description of Artificial Sequence: Synthetic oligonucleotide
  Antisense strand to SEQ ID NO: 1174594
uaggagaacggcuaagggc

SEQ ID NO: 1174596 - RNA, 19 nt, Artificial Sequence
  Description of Artificial Sequence: Synthetic oligonucleotide
  Sense strand starting at position 1511 of SEQ ID NO: 916666
aguuuagucucauuacaaa

SEQ ID NO: 1174597 - RNA, 19 nt, Artificial Sequence
  Description of Artificial Sequence: Synthetic oligonucleotide
  Antisense strand to SEQ ID NO: 1174596
uuuguaaugagacuaaacu

SEQ ID NO: 1174598 - RNA, 19 nt, Artificial Sequence
  Description of Artificial Sequence: Synthetic oligonucleotide
  Sense strand starting at position 1642 of SEQ ID NO: 916666
aaaggaaaguugucaaguu

SEQ ID NO: 1174599 - RNA, 19 nt, Artificial Sequence
  Description of Artificial Sequence: Synthetic oligonucleotide
  Antisense strand to SEQ ID NO: 1174598
aacuugacaacuuuccuuu

SEQ ID NO: 1174600 - RNA, 19 nt, Artificial Sequence
  Description of Artificial Sequence: Synthetic oligonucleotide
  Sense strand starting at position 2032 of SEQ ID NO: 916666
acggaaacccuccgagaau

SEQ ID NO: 1174601 - RNA, 19 nt, Artificial Sequence
  Description of Artificial Sequence: Synthetic oligonucleotide
  Antisense strand to SEQ ID NO: 1174600
auucucggaggguuuccgu

SEQ ID NO: 1174602 - RNA, 19 nt, Artificial Sequence
  Description of Artificial Sequence: Synthetic oligonucleotide
  Sense strand starting at position 2603 of SEQ ID NO: 916666
gcguucucccugguuugau

SEQ ID NO: 1174603 - RNA, 19 nt, Artificial Sequence
  Description of Artificial Sequence: Synthetic oligonucleotide
  Antisense strand to SEQ ID NO: 1174602
aucaaaccagggagaacgc

SEQ ID NO: 1174604 - RNA, 19 nt, Artificial Sequence
  Description of Artificial Sequence: Synthetic oligonucleotide
  Sense strand starting at position 2648 of SEQ ID NO: 916666
cuggaauaagagcgaugaa

SEQ ID NO: 1174605 - RNA, 19 nt, Artificial Sequence
  Description of Artificial Sequence: Synthetic oligonucleotide
  Antisense strand to SEQ ID NO: 1174604
uucaucgcucuuauuccag

SEQ ID NO: 1174606 - RNA, 19 nt, Artificial Sequence
  Description of Artificial Sequence: Synthetic oligonucleotide
  Sense strand starting at position 2673 of SEQ ID NO: 916666
ggcguugugagccugugau

SEQ ID NO: 1174607 - RNA, 19 nt, Artificial Sequence
  Description of Artificial Sequence: Synthetic oligonucleotide
  Antisense strand to SEQ ID NO: 1174606
aucacaggcucacaacgcc

SEQ ID NO: 1174608 - RNA, 19 nt, Artificial Sequence
  Description of Artificial Sequence: Synthetic oligonucleotide
  Sense strand starting at position 3001 of SEQ ID NO: 916666
ugcuuauuugcguauaccu

SEQ ID NO: 1174609 - RNA, 19 nt, Artificial Sequence
  Description of Artificial Sequence: Synthetic oligonucleotide
  Antisense strand to SEQ ID NO: 1174608
agguauacgcaaauaagca

SEQ ID NO: 1174610 - RNA, 19 nt, Artificial Sequence
  Description of Artificial Sequence: Synthetic oligonucleotide
  Sense strand starting at position 3003 of SEQ ID NO: 916666
cuuauuugcguauaccuua

SEQ ID NO: 1174611 - RNA, 19 nt, Artificial Sequence
  Description of Artificial Sequence: Synthetic oligonucleotide
  Antisense strand to SEQ ID NO: 1174610
uaagguauacgcaaauaag

SEQ ID NO: 1174612 - RNA, 19 nt, Artificial Sequence
  Description of Artificial Sequence: Synthetic oligonucleotide
  Sense strand starting at position 3037 of SEQ ID NO: 916666
acagcuggauacuuaaagu

SEQ ID NO: 1174613 - RNA, 19 nt, Artificial Sequence
  Description of Artificial Sequence: Synthetic oligonucleotide
  Antisense strand to SEQ ID NO: 1174612
acuuuaaguauccagcugu

SEQ ID NO: 1174614 - RNA, 19 nt, Artificial Sequence
  Description of Artificial Sequence: Synthetic oligonucleotide
  Sense strand starting at position 3218 of SEQ ID NO: 916666
ccuagauauuggucuuaga

SEQ ID NO: 1174615 - RNA, 19 nt, Artificial Sequence
  Description of Artificial Sequence: Synthetic oligonucleotide
  Antisense strand to SEQ ID NO: 1174614
ucuaagaccaauaucuagg

SEQ ID NO: 1174616 - RNA, 19 nt, Artificial Sequence
  Description of Artificial Sequence: Synthetic oligonucleotide
  Sense strand starting at position 3225 of SEQ ID NO: 916666
auuggucuuagaggucaca

SEQ ID NO: 1174617 - RNA, 19 nt, Artificial Sequence
  Description of Artificial Sequence: Synthetic oligonucleotide
  Antisense strand to SEQ ID NO: 1174616
ugugaccucuaagaccaau

SEQ ID NO: 1174618 - RNA, 19 nt, Artificial Sequence
  Description of Artificial Sequence: Synthetic oligonucleotide
  Sense strand starting at position 3337 of SEQ ID NO: 916666
uguaaagauccuuagcaac

SEQ ID NO: 1174619 - RNA, 19 nt, Artificial Sequence
  Description of Artificial Sequence: Synthetic oligonucleotide
  Antisense strand to SEQ ID NO: 1174618
guugcuaaggaucuuuaca

SEQ ID NO: 1174620 - RNA, 19 nt, Artificial Sequence
  Description of Artificial Sequence: Synthetic oligonucleotide
  Sense strand starting at position 3401 of SEQ ID NO: 916666
gcaaaugaaagguaugcua

SEQ ID NO: 1174621 - RNA, 19 nt, Artificial Sequence
  Description of Artificial Sequence: Synthetic oligonucleotide
  Antisense strand to SEQ ID NO: 1174620
uagcauaccuuucauuugc

SEQ ID NO: 1174622 - RNA, 19 nt, Artificial Sequence
  Description of Artificial Sequence: Synthetic oligonucleotide
  Sense strand starting at position 3403 of SEQ ID NO: 916666
aaaugaaagguaugcuaca

SEQ ID NO: 1174623 - RNA, 19 nt, Artificial Sequence
  Description of Artificial Sequence: Synthetic oligonucleotide
  Antisense strand to SEQ ID NO: 1174622
uguagcauaccuuucauuu

SEQ ID NO: 1174624 - RNA, 19 nt, Artificial Sequence
  Description of Artificial Sequence: Synthetic oligonucleotide
  Sense strand starting at position 3446 of SEQ ID NO: 916666
ugucuagugauugaguuua

SEQ ID NO: 1174625 - RNA, 19 nt, Artificial Sequence
  Description of Artificial Sequence: Synthetic oligonucleotide
  Antisense strand to SEQ ID NO: 1174624
uaaacucaaucacuagaca

SEQ ID NO: 1174626 - RNA, 19 nt, Artificial Sequence
  Description of Artificial Sequence: Synthetic oligonucleotide
  Sense strand starting at position 3448 of SEQ ID NO: 916666
ucuagugauugaguuuaau

SEQ ID NO: 1174627 - RNA, 19 nt, Artificial Sequence
  Description of Artificial Sequence: Synthetic oligonucleotide
  Antisense strand to SEQ ID NO: 1174626
auuaaacucaaucacuaga

SEQ ID NO: 1174628 - RNA, 19 nt, Artificial Sequence
  Description of Artificial Sequence: Synthetic oligonucleotide
  Sense strand starting at position 3495 of SEQ ID NO: 916666
acagguaggcuuuagauua

SEQ ID NO: 1174629 - RNA, 19 nt, Artificial Sequence
  Description of Artificial Sequence: Synthetic oligonucleotide
  Antisense strand to SEQ ID NO: 1174628
uaaucuaaagccuaccugu

SEQ ID NO: 1174630 - RNA, 19 nt, Artificial Sequence
  Description of Artificial Sequence: Synthetic oligonucleotide
  Sense strand starting at position 3500 of SEQ ID NO: 916666
uaggcuuuagauuacagua

SEQ ID NO: 1174631 - RNA, 19 nt, Artificial Sequence
  Description of Artificial Sequence: Synthetic oligonucleotide
  Antisense strand to SEQ ID NO: 1174630
uacuguaaucuaaagccua

SEQ ID NO: 1174632 - RNA, 19 nt, Artificial Sequence
  Description of Artificial Sequence: Synthetic oligonucleotide
  Sense strand starting at position 3643 of SEQ ID NO: 916666
gcuuuagcauuuguaaugu

SEQ ID NO: 1174633 - RNA, 19 nt, Artificial Sequence
  Description of Artificial Sequence: Synthetic oligonucleotide
  Antisense strand to SEQ ID NO: 1174632
acauuacaaaugcuaaagc

SEQ ID NO: 1174634 - RNA, 19 nt, Artificial Sequence
  Description of Artificial Sequence: Synthetic oligonucleotide
  Sense strand starting at position 3731 of SEQ ID NO: 916666
uguaacaagcuccauagau

SEQ ID NO: 1174635 - RNA, 19 nt, Artificial Sequence
  Description of Artificial Sequence: Synthetic oligonucleotide
  Antisense strand to SEQ ID NO: 1174634
aucuauggagcuuguuaca

SEQ ID NO: 1174636 - RNA, 19 nt, Artificial Sequence
  Description of Artificial Sequence: Synthetic oligonucleotide
  Sense strand starting at position 3748 of SEQ ID NO: 916666
augauuacuaugggagucu

SEQ ID NO: 1174637 - RNA, 19 nt, Artificial Sequence
  Description of Artificial Sequence: Synthetic oligonucleotide
  Antisense strand to SEQ ID NO: 1174636
agacucccauaguaaucau

SEQ ID NO: 1174638 - RNA, 19 nt, Artificial Sequence
  Description of Artificial Sequence: Synthetic oligonucleotide
  Sense strand starting at position 3769 of SEQ ID NO: 916666
gcugucuauguugagaaac

SEQ ID NO: 1174639 - RNA, 19 nt, Artificial Sequence
  Description of Artificial Sequence: Synthetic oligonucleotide
  Antisense strand to SEQ ID NO: 1174638
guuucucaacauagacagc

SEQ ID NO: 1174640 - RNA, 19 nt, Artificial Sequence
  Description of Artificial Sequence: Synthetic oligonucleotide
  Sense strand starting at position 3788 of SEQ ID NO: 916666
acugcauuagucuaggaga

SEQ ID NO: 1174641 - RNA, 19 nt, Artificial Sequence
  Description of Artificial Sequence: Synthetic oligonucleotide
  Antisense strand to SEQ ID NO: 1174640
ucuccuagacuaaugcagu

SEQ ID NO: 1174642 - RNA, 19 nt, Artificial Sequence
  Description of Artificial Sequence: Synthetic oligonucleotide
  Sense strand starting at position 3790 of SEQ ID NO: 916666
ugcauuagucuaggagaug

SEQ ID NO: 1174643 - RNA, 19 nt, Artificial Sequence
  Description of Artificial Sequence: Synthetic oligonucleotide
  Antisense strand to SEQ ID NO: 1174642
caucuccuagacuaaugca

SEQ ID NO: 1174644 - RNA, 19 nt, Artificial Sequence
  Description of Artificial Sequence: Synthetic oligonucleotide
  Sense strand starting at position 3821 of SEQ ID NO: 916666
uguugauaucagcaacuug

SEQ ID NO: 1174645 - RNA, 19 nt, Artificial Sequence
  Description of Artificial Sequence: Synthetic oligonucleotide
  Antisense strand to SEQ ID NO: 1174644
caaguugcugauaucaaca

SEQ ID NO: 1174646 - RNA, 19 nt, Artificial Sequence
  Description of Artificial Sequence: Synthetic oligonucleotide
  Sense strand starting at position 97 of SEQ ID NO: 916667
uaaagcggucgagacaaau

SEQ ID NO: 1174647 - RNA, 19 nt, Artificial Sequence
  Description of Artificial Sequence: Synthetic oligonucleotide
  Antisense strand to SEQ ID NO: 1174646
auuugucucgaccgcuuua

SEQ ID NO: 1174648 - RNA, 19 nt, Artificial Sequence
  Description of Artificial Sequence: Synthetic oligonucleotide
  Sense strand starting at position 203 of SEQ ID NO: 916667
ccaagagcuccacgaagau

SEQ ID NO: 1174649 - RNA, 19 nt, Artificial Sequence
  Description of Artificial Sequence: Synthetic oligonucleotide
  Antisense strand to SEQ ID NO: 1174648
aucuucguggagcucuugg

SEQ ID NO: 1174650 - RNA, 19 nt, Artificial Sequence
  Description of Artificial Sequence: Synthetic oligonucleotide
  Sense strand starting at position 219 of SEQ ID NO: 916667
gauauaggccacuguuaaa

SEQ ID NO: 1174651 - RNA, 19 nt, Artificial Sequence
  Description of Artificial Sequence: Synthetic oligonucleotide
  Antisense strand to SEQ ID NO: 1174650
uuuaacaguggccuauauc

SEQ ID NO: 1174652 - RNA, 19 nt, Artificial Sequence
  Description of Artificial Sequence: Synthetic oligonucleotide
  Sense strand starting at position 604 of SEQ ID NO: 916667
guuaguuugcgaaagucgu

SEQ ID NO: 1174653 - RNA, 19 nt, Artificial Sequence
  Description of Artificial Sequence: Synthetic oligonucleotide
  Antisense strand to SEQ ID NO: 1174652
acgacuuucgcaaacuaac

SEQ ID NO: 1174654 - RNA, 19 nt, Artificial Sequence
  Description of Artificial Sequence: Synthetic oligonucleotide
  Sense strand starting at position 756 of SEQ ID NO: 916667
gcccuuagccguucuccua

SEQ ID NO: 1174655 - RNA, 19 nt, Artificial Sequence
  Description of Artificial Sequence: Synthetic oligonucleotide
  Antisense strand to SEQ ID NO: 1174654
uaggagaacggcuaagggc

SEQ ID NO: 1174656 - RNA, 19 nt, Artificial Sequence
  Description of Artificial Sequence: Synthetic oligonucleotide
  Sense strand starting at position 816 of SEQ ID NO: 916667
aguuuagucucauuacaaa

SEQ ID NO: 1174657 - RNA, 19 nt, Artificial Sequence
  Description of Artificial Sequence: Synthetic oligonucleotide
  Antisense strand to SEQ ID NO: 1174656
uuuguaaugagacuaaacu

SEQ ID NO: 1174658 - RNA, 19 nt, Artificial Sequence
  Description of Artificial Sequence: Synthetic oligonucleotide
  Sense strand starting at position 947 of SEQ ID NO: 916667
aaaggaaaguugucaaguu

SEQ ID NO: 1174659 - RNA, 19 nt, Artificial Sequence
  Description of Artificial Sequence: Synthetic oligonucleotide
  Antisense strand to SEQ ID NO: 1174658
aacuugacaacuuuccuuu

SEQ ID NO: 1174660 - RNA, 19 nt, Artificial Sequence
  Description of Artificial Sequence: Synthetic oligonucleotide
  Sense strand starting at position 1337 of SEQ ID NO: 916667
acggaaacccuccgagaau

SEQ ID NO: 1174661 - RNA, 19 nt, Artificial Sequence
  Description of Artificial Sequence: Synthetic oligonucleotide
  Antisense strand to SEQ ID NO: 1174660
auucucggaggguuuccgu

SEQ ID NO: 1174662 - RNA, 19 nt, Artificial Sequence
  Description of Artificial Sequence: Synthetic oligonucleotide
  Sense strand starting at position 1908 of SEQ ID NO: 916667
gcguucucccugguuugau

SEQ ID NO: 1174663 - RNA, 19 nt, Artificial Sequence
  Description of Artificial Sequence: Synthetic oligonucleotide
  Antisense strand to SEQ ID NO: 1174662
aucaaaccagggagaacgc

SEQ ID NO: 1174664 - RNA, 19 nt, Artificial Sequence
  Description of Artificial Sequence: Synthetic oligonucleotide
  Sense strand starting at position 1953 of SEQ ID NO: 916667
cuggaauaagagcgaugaa

SEQ ID NO: 1174665 - RNA, 19 nt, Artificial Sequence
  Description of Artificial Sequence: Synthetic oligonucleotide
  Antisense strand to SEQ ID NO: 1174664
uucaucgcucuuauuccag

SEQ ID NO: 1174666 - RNA, 19 nt, Artificial Sequence
  Description of Artificial Sequence: Synthetic oligonucleotide
  Sense strand starting at position 1978 of SEQ ID NO: 916667
ggcguugugagccugugau

SEQ ID NO: 1174667 - RNA, 19 nt, Artificial Sequence
  Description of Artificial Sequence: Synthetic oligonucleotide
  Antisense strand to SEQ ID NO: 1174666
aucacaggcucacaacgcc

SEQ ID NO: 1174668 - RNA, 19 nt, Artificial Sequence
  Description of Artificial Sequence: Synthetic oligonucleotide
  Sense strand starting at position 2306 of SEQ ID NO: 916667
ugcuuauuugcguauaccu

SEQ ID NO: 1174669 - RNA, 19 nt, Artificial Sequence
  Description of Artificial Sequence: Synthetic oligonucleotide
  Antisense strand to SEQ ID NO: 1174668
agguauacgcaaauaagca

SEQ ID NO: 1174670 - RNA, 19 nt, Artificial Sequence
  Description of Artificial Sequence: Synthetic oligonucleotide
  Sense strand starting at position 2308 of SEQ ID NO: 916667
cuuauuugcguauaccuua

SEQ ID NO: 1174671 - RNA, 19 nt, Artificial Sequence
  Description of Artificial Sequence: Synthetic oligonucleotide
  Antisense strand to SEQ ID NO: 1174670
uaagguauacgcaaauaag

SEQ ID NO: 1174672 - RNA, 19 nt, Artificial Sequence
  Description of Artificial Sequence: Synthetic oligonucleotide
  Sense strand starting at position 2342 of SEQ ID NO: 916667
acagcuggauacuuaaagu

SEQ ID NO: 1174673 - RNA, 19 nt, Artificial Sequence
  Description of Artificial Sequence: Synthetic oligonucleotide
  Antisense strand to SEQ ID NO: 1174672
acuuuaaguauccagcugu

SEQ ID NO: 1174674 - RNA, 19 nt, Artificial Sequence
  Description of Artificial Sequence: Synthetic oligonucleotide
  Sense strand starting at position 2523 of SEQ ID NO: 916667
ccuagauauuggucuuaga

SEQ ID NO: 1174675 - RNA, 19 nt, Artificial Sequence
  Description of Artificial Sequence: Synthetic oligonucleotide
  Antisense strand to SEQ ID NO: 1174674
ucuaagaccaauaucuagg

SEQ ID NO: 1174676 - RNA, 19 nt, Artificial Sequence
  Description of Artificial Sequence: Synthetic oligonucleotide
  Sense strand starting at position 2530 of SEQ ID NO: 916667
auuggucuuagaggucaca

SEQ ID NO: 1174677 - RNA, 19 nt, Artificial Sequence
  Description of Artificial Sequence: Synthetic oligonucleotide
  Antisense strand to SEQ ID NO: 1174676
ugugaccucuaagaccaau

SEQ ID NO: 1174678 - RNA, 19 nt, Artificial Sequence
  Description of Artificial Sequence: Synthetic oligonucleotide
  Sense strand starting at position 2642 of SEQ ID NO: 916667
uguaaagauccuuagcaac

SEQ ID NO: 1174679 - RNA, 19 nt, Artificial Sequence
  Description of Artificial Sequence: Synthetic oligonucleotide
  Antisense strand to SEQ ID NO: 1174678
guugcuaaggaucuuuaca

SEQ ID NO: 1174680 - RNA, 19 nt, Artificial Sequence
  Description of Artificial Sequence: Synthetic oligonucleotide
  Sense strand starting at position 2706 of SEQ ID NO: 916667
gcaaaugaaagguaugcua

SEQ ID NO: 1174681 - RNA, 19 nt, Artificial Sequence
  Description of Artificial Sequence: Synthetic oligonucleotide
  Antisense strand to SEQ ID NO: 1174680
uagcauaccuuucauuugc

SEQ ID NO: 1174682 - RNA, 19 nt, Artificial Sequence
  Description of Artificial Sequence: Synthetic oligonucleotide
  Sense strand starting at position 2708 of SEQ ID NO: 916667
aaaugaaagguaugcuaca

SEQ ID NO: 1174683 - RNA, 19 nt, Artificial Sequence
  Description of Artificial Sequence: Synthetic oligonucleotide
  Antisense strand to SEQ ID NO: 1174682
uguagcauaccuuucauuu

SEQ ID NO: 1174684 - RNA, 19 nt, Artificial Sequence
  Description of Artificial Sequence: Synthetic oligonucleotide
  Sense strand starting at position 2751 of SEQ ID NO: 916667
ugucuagugauugaguuua

SEQ ID NO: 1174685 - RNA, 19 nt, Artificial Sequence
  Description of Artificial Sequence: Synthetic oligonucleotide
  Antisense strand to SEQ ID NO: 1174684
uaaacucaaucacuagaca

SEQ ID NO: 1174686 - RNA, 19 nt, Artificial Sequence
  Description of Artificial Sequence: Synthetic oligonucleotide
  Sense strand starting at position 2753 of SEQ ID NO: 916667
ucuagugauugaguuuaau

SEQ ID NO: 1174687 - RNA, 19 nt, Artificial Sequence
  Description of Artificial Sequence: Synthetic oligonucleotide
  Antisense strand to SEQ ID NO: 1174686
auuaaacucaaucacuaga

SEQ ID NO: 1174688 - RNA, 19 nt, Artificial Sequence
  Description of Artificial Sequence: Synthetic oligonucleotide
  Sense strand starting at position 2800 of SEQ ID NO: 916667
acagguaggcuuuagauua

SEQ ID NO: 1174689 - RNA, 19 nt, Artificial Sequence
  Description of Artificial Sequence: Synthetic oligonucleotide
  Antisense strand to SEQ ID NO: 1174688
uaaucuaaagccuaccugu

SEQ ID NO: 1174690 - RNA, 19 nt, Artificial Sequence
  Description of Artificial Sequence: Synthetic oligonucleotide
  Sense strand starting at position 2805 of SEQ ID NO: 916667
uaggcuuuagauuacagua

SEQ ID NO: 1174691 - RNA, 19 nt, Artificial Sequence
  Description of Artificial Sequence: Synthetic oligonucleotide
  Antisense strand to SEQ ID NO: 1174690
uacuguaaucuaaagccua

SEQ ID NO: 1174692 - RNA, 19 nt, Artificial Sequence
  Description of Artificial Sequence: Synthetic oligonucleotide
  Sense strand starting at position 2948 of SEQ ID NO: 916667
gcuuuagcauuuguaaugu

SEQ ID NO: 1174693 - RNA, 19 nt, Artificial Sequence
  Description of Artificial Sequence: Synthetic oligonucleotide
  Antisense strand to SEQ ID NO: 1174692
acauuacaaaugcuaaagc

SEQ ID NO: 1174694 - RNA, 19 nt, Artificial Sequence
  Description of Artificial Sequence: Synthetic oligonucleotide
  Sense strand starting at position 3036 of SEQ ID NO: 916667
uguaacaagcuccauagau

SEQ ID NO: 1174695 - RNA, 19 nt, Artificial Sequence
  Description of Artificial Sequence: Synthetic oligonucleotide
  Antisense strand to SEQ ID NO: 1174694
aucuauggagcuuguuaca

SEQ ID NO: 1174696 - RNA, 19 nt, Artificial Sequence
  Description of Artificial Sequence: Synthetic oligonucleotide
  Sense strand starting at position 3053 of SEQ ID NO: 916667
augauuacuaugggagucu

SEQ ID NO: 1174697 - RNA, 19 nt, Artificial Sequence
  Description of Artificial Sequence: Synthetic oligonucleotide
  Antisense strand to SEQ ID NO: 1174696
agacucccauaguaaucau

SEQ ID NO: 1174698 - RNA, 19 nt, Artificial Sequence
  Description of Artificial Sequence: Synthetic oligonucleotide
  Sense strand starting at position 3074 of SEQ ID NO: 916667
gcugucuauguugagaaac

SEQ ID NO: 1174699 - RNA, 19 nt, Artificial Sequence
  Description of Artificial Sequence: Synthetic oligonucleotide
  Antisense strand to SEQ ID NO: 1174698
guuucucaacauagacagc

SEQ ID NO: 1174700 - RNA, 19 nt, Artificial Sequence
  Description of Artificial Sequence: Synthetic oligonucleotide
  Sense strand starting at position 3093 of SEQ ID NO: 916667
acugcauuagucuaggaga

SEQ ID NO: 1174701 - RNA, 19 nt, Artificial Sequence
  Description of Artificial Sequence: Synthetic oligonucleotide
  Antisense strand to SEQ ID NO: 1174700
ucuccuagacuaaugcagu

SEQ ID NO: 1174702 - RNA, 19 nt, Artificial Sequence
  Description of Artificial Sequence: Synthetic oligonucleotide
  Sense strand starting at position 3095 of SEQ ID NO: 916667
ugcauuagucuaggagaug

SEQ ID NO: 1174703 - RNA, 19 nt, Artificial Sequence
  Description of Artificial Sequence: Synthetic oligonucleotide
  Antisense strand to SEQ ID NO: 1174702
caucuccuagacuaaugca

SEQ ID NO: 1174704 - RNA, 19 nt, Artificial Sequence
  Description of Artificial Sequence: Synthetic oligonucleotide
  Sense strand starting at position 3114 of SEQ ID NO: 916667
auauguuaagaguguugau

SEQ ID NO: 1174705 - RNA, 19 nt, Artificial Sequence
  Description of Artificial Sequence: Synthetic oligonucleotide
  Antisense strand to SEQ ID NO: 1174704
aucaacacucuuaacauau

SEQ ID NO: 1174706 - RNA, 19 nt, Artificial Sequence
  Description of Artificial Sequence: Synthetic oligonucleotide
  Sense strand starting at position 3126 of SEQ ID NO: 916667
uguugauaucagcaacuug

SEQ ID NO: 1174707 - RNA, 19 nt, Artificial Sequence
  Description of Artificial Sequence: Synthetic oligonucleotide
  Antisense strand to SEQ ID NO: 1174706
caaguugcugauaucaaca

SEQ ID NO: 1174708 - RNA, 19 nt, Artificial Sequence
  Description of Artificial Sequence: Synthetic oligonucleotide
  Sense strand starting at position 3137 of SEQ ID NO: 916667
gcaacuugucagcaaacug

SEQ ID NO: 1174709 - RNA, 19 nt, Artificial Sequence
  Description of Artificial Sequence: Synthetic oligonucleotide
  Antisense strand to SEQ ID NO: 1174708
caguuugcugacaaguugc

SEQ ID NO: 1174710 - RNA, 19 nt, Artificial Sequence
  Description of Artificial Sequence: Synthetic oligonucleotide
  Sense strand starting at position 3341 of SEQ ID NO: 916667
agguauaucccauaaguau

SEQ ID NO: 1174711 - RNA, 19 nt, Artificial Sequence
  Description of Artificial Sequence: Synthetic oligonucleotide
  Antisense strand to SEQ ID NO: 1174710
auacuuaugggauauaccu

SEQ ID NO: 1174712 - RNA, 19 nt, Artificial Sequence
  Description of Artificial Sequence: Synthetic oligonucleotide
  Sense strand starting at position 3488 of SEQ ID NO: 916667
aggaaauauuauccugcca

SEQ ID NO: 1174713 - RNA, 19 nt, Artificial Sequence
  Description of Artificial Sequence: Synthetic oligonucleotide
  Antisense strand to SEQ ID NO: 1174712
uggcaggauaauauuuccu

SEQ ID NO: 1174714 - RNA, 19 nt, Artificial Sequence
  Description of Artificial Sequence: Synthetic oligonucleotide
  Sense strand starting at position 3623 of SEQ ID NO: 916667
guaccuagaauaggugaau

SEQ ID NO: 1174715 - RNA, 19 nt, Artificial Sequence
  Description of Artificial Sequence: Synthetic oligonucleotide
  Antisense strand to SEQ ID NO: 1174714
auucaccuauucuagguac

SEQ ID NO: 1174716 - RNA, 19 nt, Artificial Sequence
  Description of Artificial Sequence: Synthetic oligonucleotide
  Sense strand starting at position 3624 of SEQ ID NO: 916667
uaccuagaauaggugaauu

SEQ ID NO: 1174717 - RNA, 19 nt, Artificial Sequence
  Description of Artificial Sequence: Synthetic oligonucleotide
  Antisense strand to SEQ ID NO: 1174716
aauucaccuauucuaggua

SEQ ID NO: 1174718 - RNA, 19 nt, Artificial Sequence
  Description of Artificial Sequence: Synthetic oligonucleotide
  Sense strand starting at position 3753 of SEQ ID NO: 916667
auagauaguggugauguuu

SEQ ID NO: 1174719 - RNA, 19 nt, Artificial Sequence
  Description of Artificial Sequence: Synthetic oligonucleotide
  Antisense strand to SEQ ID NO: 1174718
aaacaucaccacuaucuau

SEQ ID NO: 1174720 - RNA, 19 nt, Artificial Sequence
  Description of Artificial Sequence: Synthetic oligonucleotide
  Sense strand starting at position 3908 of SEQ ID NO: 916667
ggauuacucauagguaugu

SEQ ID NO: 1174721 - RNA, 19 nt, Artificial Sequence
  Description of Artificial Sequence: Synthetic oligonucleotide
  Antisense strand to SEQ ID NO: 1174720
acauaccuaugaguaaucc

SEQ ID NO: 1174722 - RNA, 19 nt, Artificial Sequence
  Description of Artificial Sequence: Synthetic oligonucleotide
  Sense strand starting at position 3909 of SEQ ID NO: 916667
gauuacucauagguauguu

SEQ ID NO: 1174723 - RNA, 19 nt, Artificial Sequence
  Description of Artificial Sequence: Synthetic oligonucleotide
  Antisense strand to SEQ ID NO: 1174722
aacauaccuaugaguaauc

SEQ ID NO: 1174724 - RNA, 19 nt, Artificial Sequence
  Description of Artificial Sequence: Synthetic oligonucleotide
  Sense strand starting at position 3969 of SEQ ID NO: 916667
guuggagauuuagaaacua

SEQ ID NO: 1174725 - RNA, 19 nt, Artificial Sequence
  Description of Artificial Sequence: Synthetic oligonucleotide
  Antisense strand to SEQ ID NO: 1174724
uaguuucuaaaucuccaac

SEQ ID NO: 1174726 - RNA, 19 nt, Artificial Sequence
  Description of Artificial Sequence: Synthetic oligonucleotide
  Sense strand starting at position 97 of SEQ ID NO: 916668
uaaagcggucgagacaaau

SEQ ID NO: 1174727 - RNA, 19 nt, Artificial Sequence
  Description of Artificial Sequence: Synthetic oligonucleotide
  Antisense strand to SEQ ID NO: 1174726
auuugucucgaccgcuuua

SEQ ID NO: 1174728 - RNA, 19 nt, Artificial Sequence
  Description of Artificial Sequence: Synthetic oligonucleotide
  Sense strand starting at position 203 of SEQ ID NO: 916668
ccaagagcuccacgaagau

SEQ ID NO: 1174729 - RNA, 19 nt, Artificial Sequence
  Description of Artificial Sequence: Synthetic oligonucleotide
  Antisense strand to SEQ ID NO: 1174728
aucuucguggagcucuugg

SEQ ID NO: 1174730 - RNA, 19 nt, Artificial Sequence
  Description of Artificial Sequence: Synthetic oligonucleotide
  Sense strand starting at position 219 of SEQ ID NO: 916668
gauauaggccacuguuaaa

SEQ ID NO: 1174731 - RNA, 19 nt, Artificial Sequence
  Description of Artificial Sequence: Synthetic oligonucleotide
  Antisense strand to SEQ ID NO: 1174730
uuuaacaguggccuauauc

SEQ ID NO: 1174732 - RNA, 19 nt, Artificial Sequence
  Description of Artificial Sequence: Synthetic oligonucleotide
  Sense strand starting at position 604 of SEQ ID NO: 916668
guuaguuugcgaaagucgu

SEQ ID NO: 1174733 - RNA, 19 nt, Artificial Sequence
  Description of Artificial Sequence: Synthetic oligonucleotide
  Antisense strand to SEQ ID NO: 1174732
acgacuuucgcaaacuaac

SEQ ID NO: 1174734 - RNA, 19 nt, Artificial Sequence
  Description of Artificial Sequence: Synthetic oligonucleotide
  Sense strand starting at position 756 of SEQ ID NO: 916668
gcccuuagccguucuccua

SEQ ID NO: 1174735 - RNA, 19 nt, Artificial Sequence
  Description of Artificial Sequence: Synthetic oligonucleotide
  Antisense strand to SEQ ID NO: 1174734
uaggagaacggcuaagggc

SEQ ID NO: 1174736 - RNA, 19 nt, Artificial Sequence
  Description of Artificial Sequence: Synthetic oligonucleotide
  Sense strand starting at position 816 of SEQ ID NO: 916668
aguuuagucucauuacaaa

SEQ ID NO: 1174737 - RNA, 19 nt, Artificial Sequence
  Description of Artificial Sequence: Synthetic oligonucleotide
  Antisense strand to SEQ ID NO: 1174736
uuuguaaugagacuaaacu

SEQ ID NO: 1174738 - RNA, 19 nt, Artificial Sequence
  Description of Artificial Sequence: Synthetic oligonucleotide
  Sense strand starting at position 947 of SEQ ID NO: 916668
aaaggaaaguugucaaguu

SEQ ID NO: 1174739 - RNA, 19 nt, Artificial Sequence
  Description of Artificial Sequence: Synthetic oligonucleotide
  Antisense strand to SEQ ID NO: 1174738
aacuugacaacuuuccuuu

SEQ ID NO: 1174740 - RNA, 19 nt, Artificial Sequence
  Description of Artificial Sequence: Synthetic oligonucleotide
  Sense strand starting at position 1337 of SEQ ID NO: 916668
acggaaacccuccgagaau

SEQ ID NO: 1174741 - RNA, 19 nt, Artificial Sequence
  Description of Artificial Sequence: Synthetic oligonucleotide
  Antisense strand to SEQ ID NO: 1174740
auucucggaggguuuccgu

SEQ ID NO: 1174742 - RNA, 19 nt, Artificial Sequence
  Description of Artificial Sequence: Synthetic oligonucleotide
  Sense strand starting at position 1908 of SEQ ID NO: 916668
gcguucucccugguuugau

SEQ ID NO: 1174743 - RNA, 19 nt, Artificial Sequence
  Description of Artificial Sequence: Synthetic oligonucleotide
  Antisense strand to SEQ ID NO: 1174742
aucaaaccagggagaacgc

SEQ ID NO: 1174744 - RNA, 19 nt, Artificial Sequence
  Description of Artificial Sequence: Synthetic oligonucleotide
  Sense strand starting at position 1953 of SEQ ID NO: 916668
cuggaauaagagcgaugaa

SEQ ID NO: 1174745 - RNA, 19 nt, Artificial Sequence
  Description of Artificial Sequence: Synthetic oligonucleotide
  Antisense strand to SEQ ID NO: 1174744
uucaucgcucuuauuccag

SEQ ID NO: 1174746 - RNA, 19 nt, Artificial Sequence
  Description of Artificial Sequence: Synthetic oligonucleotide
  Sense strand starting at position 1978 of SEQ ID NO: 916668
ggcguugugagccugugau

SEQ ID NO: 1174747 - RNA, 19 nt, Artificial Sequence
  Description of Artificial Sequence: Synthetic oligonucleotide
  Antisense strand to SEQ ID NO: 1174746
aucacaggcucacaacgcc

SEQ ID NO: 1174748 - RNA, 19 nt, Artificial Sequence
  Description of Artificial Sequence: Synthetic oligonucleotide
  Sense strand starting at position 2306 of SEQ ID NO: 916668
ugcuuauuugcguauaccu

SEQ ID NO: 1174749 - RNA, 19 nt, Artificial Sequence
  Description of Artificial Sequence: Synthetic oligonucleotide
  Antisense strand to SEQ ID NO: 1174748
agguauacgcaaauaagca

SEQ ID NO: 1174750 - RNA, 19 nt, Artificial Sequence
  Description of Artificial Sequence: Synthetic oligonucleotide
  Sense strand starting at position 2308 of SEQ ID NO: 916668
cuuauuugcguauaccuua

SEQ ID NO: 1174751 - RNA, 19 nt, Artificial Sequence
  Description of Artificial Sequence: Synthetic oligonucleotide
  Antisense strand to SEQ ID NO: 1174750
uaagguauacgcaaauaag

SEQ ID NO: 1174752 - RNA, 19 nt, Artificial Sequence
  Description of Artificial Sequence: Synthetic oligonucleotide
  Sense strand starting at position 2342 of SEQ ID NO: 916668
acagcuggauacuuaaagu

SEQ ID NO: 1174753 - RNA, 19 nt, Artificial Sequence
  Description of Artificial Sequence: Synthetic oligonucleotide
  Antisense strand to SEQ ID NO: 1174752
acuuuaaguauccagcugu

SEQ ID NO: 1174754 - RNA, 19 nt, Artificial Sequence
  Description of Artificial Sequence: Synthetic oligonucleotide
  Sense strand starting at position 2523 of SEQ ID NO: 916668
ccuagauauuggucuuaga

SEQ ID NO: 1174755 - RNA, 19 nt, Artificial Sequence
  Description of Artificial Sequence: Synthetic oligonucleotide
  Antisense strand to SEQ ID NO: 1174754
ucuaagaccaauaucuagg

SEQ ID NO: 1174756 - RNA, 19 nt, Artificial Sequence
  Description of Artificial Sequence: Synthetic oligonucleotide
  Sense strand starting at position 2530 of SEQ ID NO: 916668
auuggucuuagaggucaca

SEQ ID NO: 1174757 - RNA, 19 nt, Artificial Sequence
  Description of Artificial Sequence: Synthetic oligonucleotide
  Antisense strand to SEQ ID NO: 1174756
ugugaccucuaagaccaau

SEQ ID NO: 1174758 - RNA, 19 nt, Artificial Sequence
  Description of Artificial Sequence: Synthetic oligonucleotide
  Sense strand starting at position 2642 of SEQ ID NO: 916668
uguaaagauccuuagcaac

SEQ ID NO: 1174759 - RNA, 19 nt, Artificial Sequence
  Description of Artificial Sequence: Synthetic oligonucleotide
  Antisense strand to SEQ ID NO: 1174758
guugcuaaggaucuuuaca

SEQ ID NO: 1174760 - RNA, 19 nt, Artificial Sequence
  Description of Artificial Sequence: Synthetic oligonucleotide
  Sense strand starting at position 2706 of SEQ ID NO: 916668
gcaaaugaaagguaugcua

SEQ ID NO: 1174761 - RNA, 19 nt, Artificial Sequence
  Description of Artificial Sequence: Synthetic oligonucleotide
  Antisense strand to SEQ ID NO: 1174760
uagcauaccuuucauuugc

SEQ ID NO: 1174762 - RNA, 19 nt, Artificial Sequence
  Description of Artificial Sequence: Synthetic oligonucleotide
  Sense strand starting at position 2708 of SEQ ID NO: 916668
aaaugaaagguaugcuaca

SEQ ID NO: 1174763 - RNA, 19 nt, Artificial Sequence
  Description of Artificial Sequence: Synthetic oligonucleotide
  Antisense strand to SEQ ID NO: 1174762
uguagcauaccuuucauuu

SEQ ID NO: 1174764 - RNA, 19 nt, Artificial Sequence
  Description of Artificial Sequence: Synthetic oligonucleotide
  Sense strand starting at position 2751 of SEQ ID NO: 916668
ugucuagugauugaguuua

SEQ ID NO: 1174765 - RNA, 19 nt, Artificial Sequence
  Description of Artificial Sequence: Synthetic oligonucleotide
  Antisense strand to SEQ ID NO: 1174764
uaaacucaaucacuagaca

SEQ ID NO: 1174766 - RNA, 19 nt, Artificial Sequence
  Description of Artificial Sequence: Synthetic oligonucleotide
  Sense strand starting at position 2753 of SEQ ID NO: 916668
ucuagugauugaguuuaau

SEQ ID NO: 1174767 - RNA, 19 nt, Artificial Sequence
  Description of Artificial Sequence: Synthetic oligonucleotide
  Antisense strand to SEQ ID NO: 1174766
auuaaacucaaucacuaga

SEQ ID NO: 1174768 - RNA, 19 nt, Artificial Sequence
  Description of Artificial Sequence: Synthetic oligonucleotide
  Sense strand starting at position 2800 of SEQ ID NO: 916668
acagguaggcuuuagauua

SEQ ID NO: 1174769 - RNA, 19 nt, Artificial Sequence
  Description of Artificial Sequence: Synthetic oligonucleotide
  Antisense strand to SEQ ID NO: 1174768
uaaucuaaagccuaccugu

SEQ ID NO: 1174770 - RNA, 19 nt, Artificial Sequence
  Description of Artificial Sequence: Synthetic oligonucleotide
  Sense strand starting at position 2805 of SEQ ID NO: 916668
uaggcuuuagauuacagua

SEQ ID NO: 1174771 - RNA, 19 nt, Artificial Sequence
  Description of Artificial Sequence: Synthetic oligonucleotide
  Antisense strand to SEQ ID NO: 1174770
uacuguaaucuaaagccua

SEQ ID NO: 1174772 - RNA, 19 nt, Artificial Sequence
  Description of Artificial Sequence: Synthetic oligonucleotide
  Sense strand starting at position 2948 of SEQ ID NO: 916668
gcuuuagcauuuguaaugu

SEQ ID NO: 1174773 - RNA, 19 nt, Artificial Sequence
  Description of Artificial Sequence: Synthetic oligonucleotide
  Antisense strand to SEQ ID NO: 1174772
acauuacaaaugcuaaagc

SEQ ID NO: 1174774 - RNA, 19 nt, Artificial Sequence
  Description of Artificial Sequence: Synthetic oligonucleotide
  Sense strand starting at position 3036 of SEQ ID NO: 916668
uguaacaagcuccauagau

SEQ ID NO: 1174775 - RNA, 19 nt, Artificial Sequence
  Description of Artificial Sequence: Synthetic oligonucleotide
  Antisense strand to SEQ ID NO: 1174774
aucuauggagcuuguuaca

SEQ ID NO: 1174776 - RNA, 19 nt, Artificial Sequence
  Description of Artificial Sequence: Synthetic oligonucleotide
  Sense strand starting at position 3053 of SEQ ID NO: 916668
augauuacuaugggagucu

SEQ ID NO: 1174777 - RNA, 19 nt, Artificial Sequence
  Description of Artificial Sequence: Synthetic oligonucleotide
  Antisense strand to SEQ ID NO: 1174776
agacucccauaguaaucau

SEQ ID NO: 1174778 - RNA, 19 nt, Artificial Sequence
  Description of Artificial Sequence: Synthetic oligonucleotide
  Sense strand starting at position 3074 of SEQ ID NO: 916668
gcugucuauguugagaaac

SEQ ID NO: 1174779 - RNA, 19 nt, Artificial Sequence
  Description of Artificial Sequence: Synthetic oligonucleotide
  Antisense strand to SEQ ID NO: 1174778
guuucucaacauagacagc

SEQ ID NO: 1174780 - RNA, 19 nt, Artificial Sequence
  Description of Artificial Sequence: Synthetic oligonucleotide
  Sense strand starting at position 3093 of SEQ ID NO: 916668
acugcauuagucuaggaga

SEQ ID NO: 1174781 - RNA, 19 nt, Artificial Sequence
  Description of Artificial Sequence: Synthetic oligonucleotide
  Antisense strand to SEQ ID NO: 1174780
ucuccuagacuaaugcagu

SEQ ID NO: 1174782 - RNA, 19 nt, Artificial Sequence
  Description of Artificial Sequence: Synthetic oligonucleotide
  Sense strand starting at position 3095 of SEQ ID NO: 916668
ugcauuagucuaggagaug

SEQ ID NO: 1174783 - RNA, 19 nt, Artificial Sequence
  Description of Artificial Sequence: Synthetic oligonucleotide
  Antisense strand to SEQ ID NO: 1174782
caucuccuagacuaaugca

SEQ ID NO: 1174784 - RNA, 19 nt, Artificial Sequence
  Description of Artificial Sequence: Synthetic oligonucleotide
  Sense strand starting at position 3114 of SEQ ID NO: 916668
auauguuaagaguguugau

SEQ ID NO: 1174785 - RNA, 19 nt, Artificial Sequence
  Description of Artificial Sequence: Synthetic oligonucleotide
  Antisense strand to SEQ ID NO: 1174784
aucaacacucuuaacauau

SEQ ID NO: 1174786 - RNA, 19 nt, Artificial Sequence
  Description of Artificial Sequence: Synthetic oligonucleotide
  Sense strand starting at position 3126 of SEQ ID NO: 916668
uguugauaucagcaacuug

SEQ ID NO: 1174787 - RNA, 19 nt, Artificial Sequence
  Description of Artificial Sequence: Synthetic oligonucleotide
  Antisense strand to SEQ ID NO: 1174786
caaguugcugauaucaaca

SEQ ID NO: 1174788 - RNA, 19 nt, Artificial Sequence
  Description of Artificial Sequence: Synthetic oligonucleotide
  Sense strand starting at position 3137 of SEQ ID NO: 916668
gcaacuugucagcaaacug

SEQ ID NO: 1174789 - RNA, 19 nt, Artificial Sequence
  Description of Artificial Sequence: Synthetic oligonucleotide
  Antisense strand to SEQ ID NO: 1174788
caguuugcugacaaguugc

SEQ ID NO: 1174790 - RNA, 19 nt, Artificial Sequence
  Description of Artificial Sequence: Synthetic oligonucleotide
  Sense strand starting at position 3341 of SEQ ID NO: 916668
agguauaucccauaaguau

SEQ ID NO: 1174791 - RNA, 19 nt, Artificial Sequence
  Description of Artificial Sequence: Synthetic oligonucleotide
  Antisense strand to SEQ ID NO: 1174790
auacuuaugggauauaccu

SEQ ID NO: 1174792 - RNA, 19 nt, Artificial Sequence
  Description of Artificial Sequence: Synthetic oligonucleotide
  Sense strand starting at position 3488 of SEQ ID NO: 916668
aggaaauauuauccugcca

SEQ ID NO: 1174793 - RNA, 19 nt, Artificial Sequence
  Description of Artificial Sequence: Synthetic oligonucleotide
  Antisense strand to SEQ ID NO: 1174792
uggcaggauaauauuuccu

SEQ ID NO: 1174794 - RNA, 19 nt, Artificial Sequence
  Description of Artificial Sequence: Synthetic oligonucleotide
  Sense strand starting at position 3623 of SEQ ID NO: 916668
guaccuagaauaggugaau

SEQ ID NO: 1174795 - RNA, 19 nt, Artificial Sequence
  Description of Artificial Sequence: Synthetic oligonucleotide
  Antisense strand to SEQ ID NO: 1174794
auucaccuauucuagguac

SEQ ID NO: 1174796 - RNA, 19 nt, Artificial Sequence
  Description of Artificial Sequence: Synthetic oligonucleotide
  Sense strand starting at position 3624 of SEQ ID NO: 916668
uaccuagaauaggugaauu

SEQ ID NO: 1174797 - RNA, 19 nt, Artificial Sequence
  Description of Artificial Sequence: Synthetic oligonucleotide
  Antisense strand to SEQ ID NO: 1174796
aauucaccuauucuaggua

SEQ ID NO: 1174798 - RNA, 19 nt, Artificial Sequence
  Description of Artificial Sequence: Synthetic oligonucleotide
  Sense strand starting at position 3753 of SEQ ID NO: 916668
auagauaguggugauguuu

SEQ ID NO: 1174799 - RNA, 19 nt, Artificial Sequence
  Description of Artificial Sequence: Synthetic oligonucleotide
  Antisense strand to SEQ ID NO: 1174798
aaacaucaccacuaucuau

SEQ ID NO: 1174800 - RNA, 19 nt, Artificial Sequence
  Description of Artificial Sequence: Synthetic oligonucleotide
  Sense strand starting at position 3908 of SEQ ID NO: 916668
ggauuacucauagguaugu

SEQ ID NO: 1174801 - RNA, 19 nt, Artificial Sequence
  Description of Artificial Sequence: Synthetic oligonucleotide
  Antisense strand to SEQ ID NO: 1174800
acauaccuaugaguaaucc

SEQ ID NO: 1174802 - RNA, 19 nt, Artificial Sequence
  Description of Artificial Sequence: Synthetic oligonucleotide
  Sense strand starting at position 3909 of SEQ ID NO: 916668
gauuacucauagguauguu

SEQ ID NO: 1174803 - RNA, 19 nt, Artificial Sequence
  Description of Artificial Sequence: Synthetic oligonucleotide
  Antisense strand to SEQ ID NO: 1174802
aacauaccuaugaguaauc

SEQ ID NO: 1174804 - RNA, 19 nt, Artificial Sequence
  Description of Artificial Sequence: Synthetic oligonucleotide
  Sense strand starting at position 3969 of SEQ ID NO: 916668
guuggagauuuagaaacua

SEQ ID NO: 1174805 - RNA, 19 nt, Artificial Sequence
  Description of Artificial Sequence: Synthetic oligonucleotide
  Antisense strand to SEQ ID NO: 1174804
uaguuucuaaaucuccaac

SEQ ID NO: 1174806 - RNA, 19 nt, Artificial Sequence
  Description of Artificial Sequence: Synthetic oligonucleotide
  Sense strand starting at position 31 of SEQ ID NO: 916669
agccaucacuuguacuuau

SEQ ID NO: 1174807 - RNA, 19 nt, Artificial Sequence
  Description of Artificial Sequence: Synthetic oligonucleotide
  Antisense strand to SEQ ID NO: 1174806
auaaguacaagugauggcu

SEQ ID NO: 1174808 - RNA, 19 nt, Artificial Sequence
  Description of Artificial Sequence: Synthetic oligonucleotide
  Sense strand starting at position 127 of SEQ ID NO: 916669
aguccuguguccugaagca

SEQ ID NO: 1174809 - RNA, 19 nt, Artificial Sequence
  Description of Artificial Sequence: Synthetic oligonucleotide
  Antisense strand to SEQ ID NO: 1174808
ugcuucaggacacaggacu

SEQ ID NO: 1174810 - RNA, 19 nt, Artificial Sequence
  Description of Artificial Sequence: Synthetic oligonucleotide
  Sense strand starting at position 219 of SEQ ID NO: 916669
gggcuugccugauauggac

SEQ ID NO: 1174811 - RNA, 19 nt, Artificial Sequence
  Description of Artificial Sequence: Synthetic oligonucleotide
  Antisense strand to SEQ ID NO: 1174810
guccauaucaggcaagccc

SEQ ID NO: 1174812 - RNA, 19 nt, Artificial Sequence
  Description of Artificial Sequence: Synthetic oligonucleotide
  Sense strand starting at position 278 of SEQ ID NO: 916669
cuugguuucuccucuggga

SEQ ID NO: 1174813 - RNA, 19 nt, Artificial Sequence
  Description of Artificial Sequence: Synthetic oligonucleotide
  Antisense strand to SEQ ID NO: 1174812
ucccagaggagaaaccaag

SEQ ID NO: 1174814 - RNA, 19 nt, Artificial Sequence
  Description of Artificial Sequence: Synthetic oligonucleotide
  Sense strand starting at position 280 of SEQ ID NO: 916669
ugguuucuccucugggaag

SEQ ID NO: 1174815 - RNA, 19 nt, Artificial Sequence
  Description of Artificial Sequence: Synthetic oligonucleotide
  Antisense strand to SEQ ID NO: 1174814
cuucccagaggagaaacca

SEQ ID NO: 1174816 - RNA, 19 nt, Artificial Sequence
  Description of Artificial Sequence: Synthetic oligonucleotide
  Sense strand starting at position 281 of SEQ ID NO: 916669
gguuucuccucugggaaga

SEQ ID NO: 1174817 - RNA, 19 nt, Artificial Sequence
  Description of Artificial Sequence: Synthetic oligonucleotide
  Antisense strand to SEQ ID NO: 1174816
ucuucccagaggagaaacc

SEQ ID NO: 1174818 - RNA, 19 nt, Artificial Sequence
  Description of Artificial Sequence: Synthetic oligonucleotide
  Sense strand starting at position 282 of SEQ ID NO: 916669
guuucuccucugggaagaa

SEQ ID NO: 1174819 - RNA, 19 nt, Artificial Sequence
  Description of Artificial Sequence: Synthetic oligonucleotide
  Antisense strand to SEQ ID NO: 1174818
uucuucccagaggagaaac

SEQ ID NO: 1174820 - RNA, 19 nt, Artificial Sequence
  Description of Artificial Sequence: Synthetic oligonucleotide
  Sense strand starting at position 283 of SEQ ID NO: 916669
uuucuccucugggaagaau

SEQ ID NO: 1174821 - RNA, 19 nt, Artificial Sequence
  Description of Artificial Sequence: Synthetic oligonucleotide
  Antisense strand to SEQ ID NO: 1174820
auucuucccagaggagaaa

SEQ ID NO: 1174822 - RNA, 19 nt, Artificial Sequence
  Description of Artificial Sequence: Synthetic oligonucleotide
  Sense strand starting at position 307 of SEQ ID NO: 916669
ucagcuaagugucuguaaa

SEQ ID NO: 1174823 - RNA, 19 nt, Artificial Sequence
  Description of Artificial Sequence: Synthetic oligonucleotide
  Antisense strand to SEQ ID NO: 1174822
uuuacagacacuuagcuga

SEQ ID NO: 1174824 - RNA, 19 nt, Artificial Sequence
  Description of Artificial Sequence: Synthetic oligonucleotide
  Sense strand starting at position 725 of SEQ ID NO: 916669
gcgucuuauccuugcucua

SEQ ID NO: 1174825 - RNA, 19 nt, Artificial Sequence
  Description of Artificial Sequence: Synthetic oligonucleotide
  Antisense strand to SEQ ID NO: 1174824
uagagcaaggauaagacgc

SEQ ID NO: 1174826 - RNA, 19 nt, Artificial Sequence
  Description of Artificial Sequence: Synthetic oligonucleotide
  Sense strand starting at position 727 of SEQ ID NO: 916669
gucuuauccuugcucuauu

SEQ ID NO: 1174827 - RNA, 19 nt, Artificial Sequence
  Description of Artificial Sequence: Synthetic oligonucleotide
  Antisense strand to SEQ ID NO: 1174826
aauagagcaaggauaagac

SEQ ID NO: 1174828 - RNA, 19 nt, Artificial Sequence
  Description of Artificial Sequence: Synthetic oligonucleotide
  Sense strand starting at position 845 of SEQ ID NO: 916669
ggcucggauucgggaguau

SEQ ID NO: 1174829 - RNA, 19 nt, Artificial Sequence
  Description of Artificial Sequence: Synthetic oligonucleotide
  Antisense strand to SEQ ID NO: 1174828
auacucccgaauccgagcc

SEQ ID NO: 1174830 - RNA, 19 nt, Artificial Sequence
  Description of Artificial Sequence: Synthetic oligonucleotide
  Sense strand starting at position 849 of SEQ ID NO: 916669
cggauucgggaguauuaau

SEQ ID NO: 1174831 - RNA, 19 nt, Artificial Sequence
  Description of Artificial Sequence: Synthetic oligonucleotide
  Antisense strand to SEQ ID NO: 1174830
auuaauacucccgaauccg

SEQ ID NO: 1174832 - RNA, 19 nt, Artificial Sequence
  Description of Artificial Sequence: Synthetic oligonucleotide
  Sense strand starting at position 860 of SEQ ID NO: 916669
guauuaauagcugggaccu

SEQ ID NO: 1174833 - RNA, 19 nt, Artificial Sequence
  Description of Artificial Sequence: Synthetic oligonucleotide
  Antisense strand to SEQ ID NO: 1174832
aggucccagcuauuaauac

SEQ ID NO: 1174834 - RNA, 19 nt, Artificial Sequence
  Description of Artificial Sequence: Synthetic oligonucleotide
  Sense strand starting at position 1773 of SEQ ID NO: 916669
cgccgcuccucagagacau

SEQ ID NO: 1174835 - RNA, 19 nt, Artificial Sequence
  Description of Artificial Sequence: Synthetic oligonucleotide
  Antisense strand to SEQ ID NO: 1174834
augucucugaggagcggcg

SEQ ID NO: 1174836 - RNA, 19 nt, Artificial Sequence
  Description of Artificial Sequence: Synthetic oligonucleotide
  Sense strand starting at position 3826 of SEQ ID NO: 916669
cauugaacaggcuguguaa

SEQ ID NO: 1174837 - RNA, 19 nt, Artificial Sequence
  Description of Artificial Sequence: Synthetic oligonucleotide
  Antisense strand to SEQ ID NO: 1174836
uuacacagccuguucaaug

SEQ ID NO: 1174838 - RNA, 19 nt, Artificial Sequence
  Description of Artificial Sequence: Synthetic oligonucleotide
  Sense strand starting at position 3884 of SEQ ID NO: 916669
gggcaaaggucucuguuag

SEQ ID NO: 1174839 - RNA, 19 nt, Artificial Sequence
  Description of Artificial Sequence: Synthetic oligonucleotide
  Antisense strand to SEQ ID NO: 1174838
cuaacagagaccuuugccc

SEQ ID NO: 1174840 - RNA, 19 nt, Artificial Sequence
  Description of Artificial Sequence: Synthetic oligonucleotide
  Sense strand starting at position 3888 of SEQ ID NO: 916669
aaaggucucuguuagguuu

SEQ ID NO: 1174841 - RNA, 19 nt, Artificial Sequence
  Description of Artificial Sequence: Synthetic oligonucleotide
  Antisense strand to SEQ ID NO: 1174840
aaaccuaacagagaccuuu

SEQ ID NO: 1174842 - RNA, 19 nt, Artificial Sequence
  Description of Artificial Sequence: Synthetic oligonucleotide
  Sense strand starting at position 85 of SEQ ID NO: 916670
caaucagaaggcuggaauu

SEQ ID NO: 1174843 - RNA, 19 nt, Artificial Sequence
  Description of Artificial Sequence: Synthetic oligonucleotide
  Antisense strand to SEQ ID NO: 1174842
aauuccagccuucugauug

SEQ ID NO: 1174844 - RNA, 19 nt, Artificial Sequence
  Description of Artificial Sequence: Synthetic oligonucleotide
  Sense strand starting at position 148 of SEQ ID NO: 916670
agaaaucucccaggcuuau

SEQ ID NO: 1174845 - RNA, 19 nt, Artificial Sequence
  Description of Artificial Sequence: Synthetic oligonucleotide
  Antisense strand to SEQ ID NO: 1174844
auaagccugggagauuucu

SEQ ID NO: 1174846 - RNA, 19 nt, Artificial Sequence
  Description of Artificial Sequence: Synthetic oligonucleotide
  Sense strand starting at position 191 of SEQ ID NO: 916670
uccgauagcaguuagggau

SEQ ID NO: 1174847 - RNA, 19 nt, Artificial Sequence
  Description of Artificial Sequence: Synthetic oligonucleotide
  Antisense strand to SEQ ID NO: 1174846
aucccuaacugcuaucgga

SEQ ID NO: 1174848 - RNA, 19 nt, Artificial Sequence
  Description of Artificial Sequence: Synthetic oligonucleotide
  Sense strand starting at position 264 of SEQ ID NO: 916670
cuucuaaugcaaggcuauu

SEQ ID NO: 1174849 - RNA, 19 nt, Artificial Sequence
  Description of Artificial Sequence: Synthetic oligonucleotide
  Antisense strand to SEQ ID NO: 1174848
aauagccuugcauuagaag

SEQ ID NO: 1174850 - RNA, 19 nt, Artificial Sequence
  Description of Artificial Sequence: Synthetic oligonucleotide
  Sense strand starting at position 359 of SEQ ID NO: 916670
gcauguuaugguuaaacag

SEQ ID NO: 1174851 - RNA, 19 nt, Artificial Sequence
  Description of Artificial Sequence: Synthetic oligonucleotide
  Antisense strand to SEQ ID NO: 1174850
cuguuuaaccauaacaugc

SEQ ID NO: 1174852 - RNA, 19 nt, Artificial Sequence
  Description of Artificial Sequence: Synthetic oligonucleotide
  Sense strand starting at position 389 of SEQ ID NO: 916670
uuagcaagugcucagugaa

SEQ ID NO: 1174853 - RNA, 19 nt, Artificial Sequence
  Description of Artificial Sequence: Synthetic oligonucleotide
  Antisense strand to SEQ ID NO: 1174852
uucacugagcacuugcuaa

SEQ ID NO: 1174854 - RNA, 19 nt, Artificial Sequence
  Description of Artificial Sequence: Synthetic oligonucleotide
  Sense strand starting at position 785 of SEQ ID NO: 916670
gcacuuauagacugaaucu

SEQ ID NO: 1174855 - RNA, 19 nt, Artificial Sequence
  Description of Artificial Sequence: Synthetic oligonucleotide
  Antisense strand to SEQ ID NO: 1174854
agauucagucuauaagugc

SEQ ID NO: 1174856 - RNA, 19 nt, Artificial Sequence
  Description of Artificial Sequence: Synthetic oligonucleotide
  Sense strand starting at position 792 of SEQ ID NO: 916670
uagacugaaucuguuggaa

SEQ ID NO: 1174857 - RNA, 19 nt, Artificial Sequence
  Description of Artificial Sequence: Synthetic oligonucleotide
  Antisense strand to SEQ ID NO: 1174856
uuccaacagauucagucua

SEQ ID NO: 1174858 - RNA, 19 nt, Artificial Sequence
  Description of Artificial Sequence: Synthetic oligonucleotide
  Sense strand starting at position 1146 of SEQ ID NO: 916670
agguucuuauaauccgaua

SEQ ID NO: 1174859 - RNA, 19 nt, Artificial Sequence
  Description of Artificial Sequence: Synthetic oligonucleotide
  Antisense strand to SEQ ID NO: 1174858
uaucggauuauaagaaccu

SEQ ID NO: 1174860 - RNA, 19 nt, Artificial Sequence
  Description of Artificial Sequence: Synthetic oligonucleotide
  Sense strand starting at position 1159 of SEQ ID NO: 916670
ccgauagacuuacugauca

SEQ ID NO: 1174861 - RNA, 19 nt, Artificial Sequence
  Description of Artificial Sequence: Synthetic oligonucleotide
  Antisense strand to SEQ ID NO: 1174860
ugaucaguaagucuaucgg

SEQ ID NO: 1174862 - RNA, 19 nt, Artificial Sequence
  Description of Artificial Sequence: Synthetic oligonucleotide
  Sense strand starting at position 1223 of SEQ ID NO: 916670
aaguccaagcucugucaga

SEQ ID NO: 1174863 - RNA, 19 nt, Artificial Sequence
  Description of Artificial Sequence: Synthetic oligonucleotide
  Antisense strand to SEQ ID NO: 1174862
ucugacagagcuuggacuu

SEQ ID NO: 1174864 - RNA, 19 nt, Artificial Sequence
  Description of Artificial Sequence: Synthetic oligonucleotide
  Sense strand starting at position 1233 of SEQ ID NO: 916670
ucugucagauguuuauuga

SEQ ID NO: 1174865 - RNA, 19 nt, Artificial Sequence
  Description of Artificial Sequence: Synthetic oligonucleotide
  Antisense strand to SEQ ID NO: 1174864
ucaauaaacaucugacaga

SEQ ID NO: 1174866 - RNA, 19 nt, Artificial Sequence
  Description of Artificial Sequence: Synthetic oligonucleotide
  Sense strand starting at position 1234 of SEQ ID NO: 916670
cugucagauguuuauugaa

SEQ ID NO: 1174867 - RNA, 19 nt, Artificial Sequence
  Description of Artificial Sequence: Synthetic oligonucleotide
  Antisense strand to SEQ ID NO: 1174866
uucaauaaacaucugacag

SEQ ID NO: 1174868 - RNA, 19 nt, Artificial Sequence
  Description of Artificial Sequence: Synthetic oligonucleotide
  Sense strand starting at position 1236 of SEQ ID NO: 916670
gucagauguuuauugaaac

SEQ ID NO: 1174869 - RNA, 19 nt, Artificial Sequence
  Description of Artificial Sequence: Synthetic oligonucleotide
  Antisense strand to SEQ ID NO: 1174868
guuucaauaaacaucugac

SEQ ID NO: 1174870 - RNA, 19 nt, Artificial Sequence
  Description of Artificial Sequence: Synthetic oligonucleotide
  Sense strand starting at position 1618 of SEQ ID NO: 916670
acaggcaaauucuuuagua

SEQ ID NO: 1174871 - RNA, 19 nt, Artificial Sequence
  Description of Artificial Sequence: Synthetic oligonucleotide
  Antisense strand to SEQ ID NO: 1174870
uacuaaagaauuugccugu

SEQ ID NO: 1174872 - RNA, 19 nt, Artificial Sequence
  Description of Artificial Sequence: Synthetic oligonucleotide
  Sense strand starting at position 1620 of SEQ ID NO: 916670
aggcaaauucuuuaguaaa

SEQ ID NO: 1174873 - RNA, 19 nt, Artificial Sequence
  Description of Artificial Sequence: Synthetic oligonucleotide
  Antisense strand to SEQ ID NO: 1174872
uuuacuaaagaauuugccu

SEQ ID NO: 1174874 - RNA, 19 nt, Artificial Sequence
  Description of Artificial Sequence: Synthetic oligonucleotide
  Sense strand starting at position 1636 of SEQ ID NO: 916670
aaauauugagggcguuuaa

SEQ ID NO: 1174875 - RNA, 19 nt, Artificial Sequence
  Description of Artificial Sequence: Synthetic oligonucleotide
  Antisense strand to SEQ ID NO: 1174874
uuaaacgcccucaauauuu

SEQ ID NO: 1174876 - RNA, 19 nt, Artificial Sequence
  Description of Artificial Sequence: Synthetic oligonucleotide
  Sense strand starting at position 1792 of SEQ ID NO: 916670
ucuguaagacugcaaacau

SEQ ID NO: 1174877 - RNA, 19 nt, Artificial Sequence
  Description of Artificial Sequence: Synthetic oligonucleotide
  Antisense strand to SEQ ID NO: 1174876
auguuugcagucuuacaga

SEQ ID NO: 1174878 - RNA, 19 nt, Artificial Sequence
  Description of Artificial Sequence: Synthetic oligonucleotide
  Sense strand starting at position 2476 of SEQ ID NO: 916670
cuugccaauucucugguaa

SEQ ID NO: 1174879 - RNA, 19 nt, Artificial Sequence
  Description of Artificial Sequence: Synthetic oligonucleotide
  Antisense strand to SEQ ID NO: 1174878
uuaccagagaauuggcaag

SEQ ID NO: 1174880 - RNA, 19 nt, Artificial Sequence
  Description of Artificial Sequence: Synthetic oligonucleotide
  Sense strand starting at position 2507 of SEQ ID NO: 916670
aaacauagugguugucauu

SEQ ID NO: 1174881 - RNA, 19 nt, Artificial Sequence
  Description of Artificial Sequence: Synthetic oligonucleotide
  Antisense strand to SEQ ID NO: 1174880
aaugacaaccacuauguuu

SEQ ID NO: 1174882 - RNA, 19 nt, Artificial Sequence
  Description of Artificial Sequence: Synthetic oligonucleotide
  Sense strand starting at position 2554 of SEQ ID NO: 916670
cgcauaauuuacgcaacuu

SEQ ID NO: 1174883 - RNA, 19 nt, Artificial Sequence
  Description of Artificial Sequence: Synthetic oligonucleotide
  Antisense strand to SEQ ID NO: 1174882
aaguugcguaaauuaugcg

SEQ ID NO: 1174884 - RNA, 19 nt, Artificial Sequence
  Description of Artificial Sequence: Synthetic oligonucleotide
  Sense strand starting at position 2616 of SEQ ID NO: 916670
augcauuguuuaguaugga

SEQ ID NO: 1174885 - RNA, 19 nt, Artificial Sequence
  Description of Artificial Sequence: Synthetic oligonucleotide
  Antisense strand to SEQ ID NO: 1174884
uccauacuaaacaaugcau

SEQ ID NO: 1174886 - RNA, 19 nt, Artificial Sequence
  Description of Artificial Sequence: Synthetic oligonucleotide
  Sense strand starting at position 2619 of SEQ ID NO: 916670
cauuguuuaguauggaaga

SEQ ID NO: 1174887 - RNA, 19 nt, Artificial Sequence
  Description of Artificial Sequence: Synthetic oligonucleotide
  Antisense strand to SEQ ID NO: 1174886
ucuuccauacuaaacaaug

SEQ ID NO: 1174888 - RNA, 19 nt, Artificial Sequence
  Description of Artificial Sequence: Synthetic oligonucleotide
  Sense strand starting at position 2689 of SEQ ID NO: 916670
gguacaugcguguaaugga

SEQ ID NO: 1174889 - RNA, 19 nt, Artificial Sequence
  Description of Artificial Sequence: Synthetic oligonucleotide
  Antisense strand to SEQ ID NO: 1174888
uccauuacacgcauguacc

SEQ ID NO: 1174890 - RNA, 19 nt, Artificial Sequence
  Description of Artificial Sequence: Synthetic oligonucleotide
  Sense strand starting at position 2694 of SEQ ID NO: 916670
augcguguaauggaagagu

SEQ ID NO: 1174891 - RNA, 19 nt, Artificial Sequence
  Description of Artificial Sequence: Synthetic oligonucleotide
  Antisense strand to SEQ ID NO: 1174890
acucuuccauuacacgcau

SEQ ID NO: 1174892 - RNA, 19 nt, Artificial Sequence
  Description of Artificial Sequence: Synthetic oligonucleotide
  Sense strand starting at position 2696 of SEQ ID NO: 916670
gcguguaauggaagagugu

SEQ ID NO: 1174893 - RNA, 19 nt, Artificial Sequence
  Description of Artificial Sequence: Synthetic oligonucleotide
  Antisense strand to SEQ ID NO: 1174892
acacucuuccauuacacgc

SEQ ID NO: 1174894 - RNA, 19 nt, Artificial Sequence
  Description of Artificial Sequence: Synthetic oligonucleotide
  Sense strand starting at position 2697 of SEQ ID NO: 916670
cguguaauggaagaguguu

SEQ ID NO: 1174895 - RNA, 19 nt, Artificial Sequence
  Description of Artificial Sequence: Synthetic oligonucleotide
  Antisense strand to SEQ ID NO: 1174894
aacacucuuccauuacacg

SEQ ID NO: 1174896 - RNA, 19 nt, Artificial Sequence
  Description of Artificial Sequence: Synthetic oligonucleotide
  Sense strand starting at position 2817 of SEQ ID NO: 916670
uggccuguccaguaaauaa

SEQ ID NO: 1174897 - RNA, 19 nt, Artificial Sequence
  Description of Artificial Sequence: Synthetic oligonucleotide
  Antisense strand to SEQ ID NO: 1174896
uuauuuacuggacaggcca

SEQ ID NO: 1174898 - RNA, 19 nt, Artificial Sequence
  Description of Artificial Sequence: Synthetic oligonucleotide
  Sense strand starting at position 3117 of SEQ ID NO: 916670
aagggcuggucucucuaau

SEQ ID NO: 1174899 - RNA, 19 nt, Artificial Sequence
  Description of Artificial Sequence: Synthetic oligonucleotide
  Antisense strand to SEQ ID NO: 1174898
auuagagagaccagcccuu

SEQ ID NO: 1174900 - RNA, 19 nt, Artificial Sequence
  Description of Artificial Sequence: Synthetic oligonucleotide
  Sense strand starting at position 3246 of SEQ ID NO: 916670
aguucuguaaauggagaau

SEQ ID NO: 1174901 - RNA, 19 nt, Artificial Sequence
  Description of Artificial Sequence: Synthetic oligonucleotide
  Antisense strand to SEQ ID NO: 1174900
auucuccauuuacagaacu

SEQ ID NO: 1174902 - RNA, 19 nt, Artificial Sequence
  Description of Artificial Sequence: Synthetic oligonucleotide
  Sense strand starting at position 3302 of SEQ ID NO: 916670
ugcugaccuguacaucauu

SEQ ID NO: 1174903 - RNA, 19 nt, Artificial Sequence
  Description of Artificial Sequence: Synthetic oligonucleotide
  Antisense strand to SEQ ID NO: 1174902
aaugauguacaggucagca

SEQ ID NO: 1174904 - RNA, 19 nt, Artificial Sequence
  Description of Artificial Sequence: Synthetic oligonucleotide
  Sense strand starting at position 3429 of SEQ ID NO: 916670
acccuugcaccagguuaau

SEQ ID NO: 1174905 - RNA, 19 nt, Artificial Sequence
  Description of Artificial Sequence: Synthetic oligonucleotide
  Antisense strand to SEQ ID NO: 1174904
auuaaccuggugcaagggu

SEQ ID NO: 1174906 - RNA, 19 nt, Artificial Sequence
  Description of Artificial Sequence: Synthetic oligonucleotide
  Sense strand starting at position 3691 of SEQ ID NO: 916670
uugcacugauaucugaaau

SEQ ID NO: 1174907 - RNA, 19 nt, Artificial Sequence
  Description of Artificial Sequence: Synthetic oligonucleotide
  Antisense strand to SEQ ID NO: 1174906
auuucagauaucagugcaa

SEQ ID NO: 1174908 - RNA, 19 nt, Artificial Sequence
  Description of Artificial Sequence: Synthetic oligonucleotide
  Sense strand starting at position 3807 of SEQ ID NO: 916670
aucauugugcauuaccaga

SEQ ID NO: 1174909 - RNA, 19 nt, Artificial Sequence
  Description of Artificial Sequence: Synthetic oligonucleotide
  Antisense strand to SEQ ID NO: 1174908
ucugguaaugcacaaugau

SEQ ID NO: 1174910 - RNA, 19 nt, Artificial Sequence
  Description of Artificial Sequence: Synthetic oligonucleotide
  Sense strand starting at position 3812 of SEQ ID NO: 916670
ugugcauuaccagauugca

SEQ ID NO: 1174911 - RNA, 19 nt, Artificial Sequence
  Description of Artificial Sequence: Synthetic oligonucleotide
  Antisense strand to SEQ ID NO: 1174910
ugcaaucugguaaugcaca

SEQ ID NO: 1174912 - RNA, 19 nt, Artificial Sequence
  Description of Artificial Sequence: Synthetic oligonucleotide
  Sense strand starting at position 3836 of SEQ ID NO: 916670
uuuagcaucuagccuagaa

SEQ ID NO: 1174913 - RNA, 19 nt, Artificial Sequence
  Description of Artificial Sequence: Synthetic oligonucleotide
  Antisense strand to SEQ ID NO: 1174912
uucuaggcuagaugcuaaa

SEQ ID NO: 1174914 - RNA, 19 nt, Artificial Sequence
  Description of Artificial Sequence: Synthetic oligonucleotide
  Sense strand starting at position 3941 of SEQ ID NO: 916670
uuccauuaucaaggugauu

SEQ ID NO: 1174915 - RNA, 19 nt, Artificial Sequence
  Description of Artificial Sequence: Synthetic oligonucleotide
  Antisense strand to SEQ ID NO: 1174914
aaucaccuugauaauggaa

SEQ ID NO: 1174916 - RNA, 19 nt, Artificial Sequence
  Description of Artificial Sequence: Synthetic oligonucleotide
  Sense strand starting at position 3950 of SEQ ID NO: 916670
caaggugauucuccgacuu

SEQ ID NO: 1174917 - RNA, 19 nt, Artificial Sequence
  Description of Artificial Sequence: Synthetic oligonucleotide
  Antisense strand to SEQ ID NO: 1174916
aagucggagaaucaccuug

SEQ ID NO: 1174918 - RNA, 19 nt, Artificial Sequence
  Description of Artificial Sequence: Synthetic oligonucleotide
  Sense strand starting at position 3962 of SEQ ID NO: 916670
ccgacuuuaggguguauca

SEQ ID NO: 1174919 - RNA, 19 nt, Artificial Sequence
  Description of Artificial Sequence: Synthetic oligonucleotide
  Antisense strand to SEQ ID NO: 1174918
ugauacacccuaaagucgg

SEQ ID NO: 1174920 - RNA, 19 nt, Artificial Sequence
  Description of Artificial Sequence: Synthetic oligonucleotide
  Sense strand starting at position 3964 of SEQ ID NO: 916670
gacuuuaggguguaucaga

SEQ ID NO: 1174921 - RNA, 19 nt, Artificial Sequence
  Description of Artificial Sequence: Synthetic oligonucleotide
  Antisense strand to SEQ ID NO: 1174920
ucugauacacccuaaaguc

SEQ ID NO: 1174922 - RNA, 19 nt, Artificial Sequence
  Description of Artificial Sequence: Synthetic oligonucleotide
  Sense strand starting at position 361 of SEQ ID NO: 916671
gcacuuauagacugaaucu

SEQ ID NO: 1174923 - RNA, 19 nt, Artificial Sequence
  Description of Artificial Sequence: Synthetic oligonucleotide
  Antisense strand to SEQ ID NO: 1174922
agauucagucuauaagugc

SEQ ID NO: 1174924 - RNA, 19 nt, Artificial Sequence
  Description of Artificial Sequence: Synthetic oligonucleotide
  Sense strand starting at position 368 of SEQ ID NO: 916671
uagacugaaucuguuggaa

SEQ ID NO: 1174925 - RNA, 19 nt, Artificial Sequence
  Description of Artificial Sequence: Synthetic oligonucleotide
  Antisense strand to SEQ ID NO: 1174924
uuccaacagauucagucua

SEQ ID NO: 1174926 - RNA, 19 nt, Artificial Sequence
  Description of Artificial Sequence: Synthetic oligonucleotide
  Sense strand starting at position 722 of SEQ ID NO: 916671
agguucuuauaauccgaua

SEQ ID NO: 1174927 - RNA, 19 nt, Artificial Sequence
  Description of Artificial Sequence: Synthetic oligonucleotide
  Antisense strand to SEQ ID NO: 1174926
uaucggauuauaagaaccu

SEQ ID NO: 1174928 - RNA, 19 nt, Artificial Sequence
  Description of Artificial Sequence: Synthetic oligonucleotide
  Sense strand starting at position 735 of SEQ ID NO: 916671
ccgauagacuuacugauca

SEQ ID NO: 1174929 - RNA, 19 nt, Artificial Sequence
  Description of Artificial Sequence: Synthetic oligonucleotide
  Antisense strand to SEQ ID NO: 1174928
ugaucaguaagucuaucgg

SEQ ID NO: 1174930 - RNA, 19 nt, Artificial Sequence
  Description of Artificial Sequence: Synthetic oligonucleotide
  Sense strand starting at position 799 of SEQ ID NO: 916671
aaguccaagcucugucaga

SEQ ID NO: 1174931 - RNA, 19 nt, Artificial Sequence
  Description of Artificial Sequence: Synthetic oligonucleotide
  Antisense strand to SEQ ID NO: 1174930
ucugacagagcuuggacuu

SEQ ID NO: 1174932 - RNA, 19 nt, Artificial Sequence
  Description of Artificial Sequence: Synthetic oligonucleotide
  Sense strand starting at position 800 of SEQ ID NO: 916671
aguccaagcucugucagau

SEQ ID NO: 1174933 - RNA, 19 nt, Artificial Sequence
  Description of Artificial Sequence: Synthetic oligonucleotide
  Antisense strand to SEQ ID NO: 1174932
aucugacagagcuuggacu

SEQ ID NO: 1174934 - RNA, 19 nt, Artificial Sequence
  Description of Artificial Sequence: Synthetic oligonucleotide
  Sense strand starting at position 809 of SEQ ID NO: 916671
ucugucagauguuuauuga

SEQ ID NO: 1174935 - RNA, 19 nt, Artificial Sequence
  Description of Artificial Sequence: Synthetic oligonucleotide
  Antisense strand to SEQ ID NO: 1174934
ucaauaaacaucugacaga

SEQ ID NO: 1174936 - RNA, 19 nt, Artificial Sequence
  Description of Artificial Sequence: Synthetic oligonucleotide
  Sense strand starting at position 810 of SEQ ID NO: 916671
cugucagauguuuauugaa

SEQ ID NO: 1174937 - RNA, 19 nt, Artificial Sequence
  Description of Artificial Sequence: Synthetic oligonucleotide
  Antisense strand to SEQ ID NO: 1174936
uucaauaaacaucugacag

SEQ ID NO: 1174938 - RNA, 19 nt, Artificial Sequence
  Description of Artificial Sequence: Synthetic oligonucleotide
  Sense strand starting at position 812 of SEQ ID NO: 916671
gucagauguuuauugaaac

SEQ ID NO: 1174939 - RNA, 19 nt, Artificial Sequence
  Description of Artificial Sequence: Synthetic oligonucleotide
  Antisense strand to SEQ ID NO: 1174938
guuucaauaaacaucugac

SEQ ID NO: 1174940 - RNA, 19 nt, Artificial Sequence
  Description of Artificial Sequence: Synthetic oligonucleotide
  Sense strand starting at position 1194 of SEQ ID NO: 916671
acaggcaaauucuuuagua

SEQ ID NO: 1174941 - RNA, 19 nt, Artificial Sequence
  Description of Artificial Sequence: Synthetic oligonucleotide
  Antisense strand to SEQ ID NO: 1174940
uacuaaagaauuugccugu

SEQ ID NO: 1174942 - RNA, 19 nt, Artificial Sequence
  Description of Artificial Sequence: Synthetic oligonucleotide
  Sense strand starting at position 1196 of SEQ ID NO: 916671
aggcaaauucuuuaguaaa

SEQ ID NO: 1174943 - RNA, 19 nt, Artificial Sequence
  Description of Artificial Sequence: Synthetic oligonucleotide
  Antisense strand to SEQ ID NO: 1174942
uuuacuaaagaauuugccu

SEQ ID NO: 1174944 - RNA, 19 nt, Artificial Sequence
  Description of Artificial Sequence: Synthetic oligonucleotide
  Sense strand starting at position 1212 of SEQ ID NO: 916671
aaauauugagggcguuuaa

SEQ ID NO: 1174945 - RNA, 19 nt, Artificial Sequence
  Description of Artificial Sequence: Synthetic oligonucleotide
  Antisense strand to SEQ ID NO: 1174944
uuaaacgcccucaauauuu

SEQ ID NO: 1174946 - RNA, 19 nt, Artificial Sequence
  Description of Artificial Sequence: Synthetic oligonucleotide
  Sense strand starting at position 1368 of SEQ ID NO: 916671
ucuguaagacugcaaacau

SEQ ID NO: 1174947 - RNA, 19 nt, Artificial Sequence
  Description of Artificial Sequence: Synthetic oligonucleotide
  Antisense strand to SEQ ID NO: 1174946
auguuugcagucuuacaga

SEQ ID NO: 1174948 - RNA, 19 nt, Artificial Sequence
  Description of Artificial Sequence: Synthetic oligonucleotide
  Sense strand starting at position 2052 of SEQ ID NO: 916671
cuugccaauucucugguaa

SEQ ID NO: 1174949 - RNA, 19 nt, Artificial Sequence
  Description of Artificial Sequence: Synthetic oligonucleotide
  Antisense strand to SEQ ID NO: 1174948
uuaccagagaauuggcaag

SEQ ID NO: 1174950 - RNA, 19 nt, Artificial Sequence
  Description of Artificial Sequence: Synthetic oligonucleotide
  Sense strand starting at position 2053 of SEQ ID NO: 916671
uugccaauucucugguaau

SEQ ID NO: 1174951 - RNA, 19 nt, Artificial Sequence
  Description of Artificial Sequence: Synthetic oligonucleotide
  Antisense strand to SEQ ID NO: 1174950
auuaccagagaauuggcaa

SEQ ID NO: 1174952 - RNA, 19 nt, Artificial Sequence
  Description of Artificial Sequence: Synthetic oligonucleotide
  Sense strand starting at position 2083 of SEQ ID NO: 916671
aaacauagugguugucauu

SEQ ID NO: 1174953 - RNA, 19 nt, Artificial Sequence
  Description of Artificial Sequence: Synthetic oligonucleotide
  Antisense strand to SEQ ID NO: 1174952
aaugacaaccacuauguuu

SEQ ID NO: 1174954 - RNA, 19 nt, Artificial Sequence
  Description of Artificial Sequence: Synthetic oligonucleotide
  Sense strand starting at position 2130 of SEQ ID NO: 916671
cgcauaauuuacgcaacuu

SEQ ID NO: 1174955 - RNA, 19 nt, Artificial Sequence
  Description of Artificial Sequence: Synthetic oligonucleotide
  Antisense strand to SEQ ID NO: 1174954
aaguugcguaaauuaugcg

SEQ ID NO: 1174956 - RNA, 19 nt, Artificial Sequence
  Description of Artificial Sequence: Synthetic oligonucleotide
  Sense strand starting at position 2192 of SEQ ID NO: 916671
augcauuguuuaguaugga

SEQ ID NO: 1174957 - RNA, 19 nt, Artificial Sequence
  Description of Artificial Sequence: Synthetic oligonucleotide
  Antisense strand to SEQ ID NO: 1174956
uccauacuaaacaaugcau

SEQ ID NO: 1174958 - RNA, 19 nt, Artificial Sequence
  Description of Artificial Sequence: Synthetic oligonucleotide
  Sense strand starting at position 2195 of SEQ ID NO: 916671
cauuguuuaguauggaaga

SEQ ID NO: 1174959 - RNA, 19 nt, Artificial Sequence
  Description of Artificial Sequence: Synthetic oligonucleotide
  Antisense strand to SEQ ID NO: 1174958
ucuuccauacuaaacaaug

SEQ ID NO: 1174960 - RNA, 19 nt, Artificial Sequence
  Description of Artificial Sequence: Synthetic oligonucleotide
  Sense strand starting at position 2265 of SEQ ID NO: 916671
gguacaugcguguaaugga

SEQ ID NO: 1174961 - RNA, 19 nt, Artificial Sequence
  Description of Artificial Sequence: Synthetic oligonucleotide
  Antisense strand to SEQ ID NO: 1174960
uccauuacacgcauguacc

SEQ ID NO: 1174962 - RNA, 19 nt, Artificial Sequence
  Description of Artificial Sequence: Synthetic oligonucleotide
  Sense strand starting at position 2270 of SEQ ID NO: 916671
augcguguaauggaagagu

SEQ ID NO: 1174963 - RNA, 19 nt, Artificial Sequence
  Description of Artificial Sequence: Synthetic oligonucleotide
  Antisense strand to SEQ ID NO: 1174962
acucuuccauuacacgcau

SEQ ID NO: 1174964 - RNA, 19 nt, Artificial Sequence
  Description of Artificial Sequence: Synthetic oligonucleotide
  Sense strand starting at position 2272 of SEQ ID NO: 916671
gcguguaauggaagagugu

SEQ ID NO: 1174965 - RNA, 19 nt, Artificial Sequence
  Description of Artificial Sequence: Synthetic oligonucleotide
  Antisense strand to SEQ ID NO: 1174964
acacucuuccauuacacgc

SEQ ID NO: 1174966 - RNA, 19 nt, Artificial Sequence
  Description of Artificial Sequence: Synthetic oligonucleotide
  Sense strand starting at position 2273 of SEQ ID NO: 916671
cguguaauggaagaguguu

SEQ ID NO: 1174967 - RNA, 19 nt, Artificial Sequence
  Description of Artificial Sequence: Synthetic oligonucleotide
  Antisense strand to SEQ ID NO: 1174966
aacacucuuccauuacacg

SEQ ID NO: 1174968 - RNA, 19 nt, Artificial Sequence
  Description of Artificial Sequence: Synthetic oligonucleotide
  Sense strand starting at position 2393 of SEQ ID NO: 916671
uggccuguccaguaaauaa

SEQ ID NO: 1174969 - RNA, 19 nt, Artificial Sequence
  Description of Artificial Sequence: Synthetic oligonucleotide
  Antisense strand to SEQ ID NO: 1174968
uuauuuacuggacaggcca

SEQ ID NO: 1174970 - RNA, 19 nt, Artificial Sequence
  Description of Artificial Sequence: Synthetic oligonucleotide
  Sense strand starting at position 2561 of SEQ ID NO: 916671
acagucaaaucauaaagga

SEQ ID NO: 1174971 - RNA, 19 nt, Artificial Sequence
  Description of Artificial Sequence: Synthetic oligonucleotide
  Antisense strand to SEQ ID NO: 1174970
uccuuuaugauuugacugu

SEQ ID NO: 1174972 - RNA, 19 nt, Artificial Sequence
  Description of Artificial Sequence: Synthetic oligonucleotide
  Sense strand starting at position 2693 of SEQ ID NO: 916671
aagggcuggucucucuaau

SEQ ID NO: 1174973 - RNA, 19 nt, Artificial Sequence
  Description of Artificial Sequence: Synthetic oligonucleotide
  Antisense strand to SEQ ID NO: 1174972
auuagagagaccagcccuu

SEQ ID NO: 1174974 - RNA, 19 nt, Artificial Sequence
  Description of Artificial Sequence: Synthetic oligonucleotide
  Sense strand starting at position 2822 of SEQ ID NO: 916671
aguucuguaaauggagaau

SEQ ID NO: 1174975 - RNA, 19 nt, Artificial Sequence
  Description of Artificial Sequence: Synthetic oligonucleotide
  Antisense strand to SEQ ID NO: 1174974
auucuccauuuacagaacu

SEQ ID NO: 1174976 - RNA, 19 nt, Artificial Sequence
  Description of Artificial Sequence: Synthetic oligonucleotide
  Sense strand starting at position 2878 of SEQ ID NO: 916671
ugcugaccuguacaucauu

SEQ ID NO: 1174977 - RNA, 19 nt, Artificial Sequence
  Description of Artificial Sequence: Synthetic oligonucleotide
  Antisense strand to SEQ ID NO: 1174976
aaugauguacaggucagca

SEQ ID NO: 1174978 - RNA, 19 nt, Artificial Sequence
  Description of Artificial Sequence: Synthetic oligonucleotide
  Sense strand starting at position 3005 of SEQ ID NO: 916671
acccuugcaccagguuaau

SEQ ID NO: 1174979 - RNA, 19 nt, Artificial Sequence
  Description of Artificial Sequence: Synthetic oligonucleotide
  Antisense strand to SEQ ID NO: 1174978
auuaaccuggugcaagggu

SEQ ID NO: 1174980 - RNA, 19 nt, Artificial Sequence
  Description of Artificial Sequence: Synthetic oligonucleotide
  Sense strand starting at position 3267 of SEQ ID NO: 916671
uugcacugauaucugaaau

SEQ ID NO: 1174981 - RNA, 19 nt, Artificial Sequence
  Description of Artificial Sequence: Synthetic oligonucleotide
  Antisense strand to SEQ ID NO: 1174980
auuucagauaucagugcaa

SEQ ID NO: 1174982 - RNA, 19 nt, Artificial Sequence
  Description of Artificial Sequence: Synthetic oligonucleotide
  Sense strand starting at position 3383 of SEQ ID NO: 916671
aucauugugcauuaccaga

SEQ ID NO: 1174983 - RNA, 19 nt, Artificial Sequence
  Description of Artificial Sequence: Synthetic oligonucleotide
  Antisense strand to SEQ ID NO: 1174982
ucugguaaugcacaaugau

SEQ ID NO: 1174984 - RNA, 19 nt, Artificial Sequence
  Description of Artificial Sequence: Synthetic oligonucleotide
  Sense strand starting at position 3388 of SEQ ID NO: 916671
ugugcauuaccagauugca

SEQ ID NO: 1174985 - RNA, 19 nt, Artificial Sequence
  Description of Artificial Sequence: Synthetic oligonucleotide
  Antisense strand to SEQ ID NO: 1174984
ugcaaucugguaaugcaca

SEQ ID NO: 1174986 - RNA, 19 nt, Artificial Sequence
  Description of Artificial Sequence: Synthetic oligonucleotide
  Sense strand starting at position 3412 of SEQ ID NO: 916671
uuuagcaucuagccuagaa

SEQ ID NO: 1174987 - RNA, 19 nt, Artificial Sequence
  Description of Artificial Sequence: Synthetic oligonucleotide
  Antisense strand to SEQ ID NO: 1174986
uucuaggcuagaugcuaaa

SEQ ID NO: 1174988 - RNA, 19 nt, Artificial Sequence
  Description of Artificial Sequence: Synthetic oligonucleotide
  Sense strand starting at position 3517 of SEQ ID NO: 916671
uuccauuaucaaggugauu

SEQ ID NO: 1174989 - RNA, 19 nt, Artificial Sequence
  Description of Artificial Sequence: Synthetic oligonucleotide
  Antisense strand to SEQ ID NO: 1174988
aaucaccuugauaauggaa

SEQ ID NO: 1174990 - RNA, 19 nt, Artificial Sequence
  Description of Artificial Sequence: Synthetic oligonucleotide
  Sense strand starting at position 3526 of SEQ ID NO: 916671
caaggugauucuccgacuu

SEQ ID NO: 1174991 - RNA, 19 nt, Artificial Sequence
  Description of Artificial Sequence: Synthetic oligonucleotide
  Antisense strand to SEQ ID NO: 1174990
aagucggagaaucaccuug

SEQ ID NO: 1174992 - RNA, 19 nt, Artificial Sequence
  Description of Artificial Sequence: Synthetic oligonucleotide
  Sense strand starting at position 3538 of SEQ ID NO: 916671
ccgacuuuaggguguauca

SEQ ID NO: 1174993 - RNA, 19 nt, Artificial Sequence
  Description of Artificial Sequence: Synthetic oligonucleotide
  Antisense strand to SEQ ID NO: 1174992
ugauacacccuaaagucgg

SEQ ID NO: 1174994 - RNA, 19 nt, Artificial Sequence
  Description of Artificial Sequence: Synthetic oligonucleotide
  Sense strand starting at position 3540 of SEQ ID NO: 916671
gacuuuaggguguaucaga

SEQ ID NO: 1174995 - RNA, 19 nt, Artificial Sequence
  Description of Artificial Sequence: Synthetic oligonucleotide
  Antisense strand to SEQ ID NO: 1174994
ucugauacacccuaaaguc

SEQ ID NO: 1174996 - RNA, 19 nt, Artificial Sequence
  Description of Artificial Sequence: Synthetic oligonucleotide
  Sense strand starting at position 3587 of SEQ ID NO: 916671
ucagcuuucugauugguaa

SEQ ID NO: 1174997 - RNA, 19 nt, Artificial Sequence
  Description of Artificial Sequence: Synthetic oligonucleotide
  Antisense strand to SEQ ID NO: 1174996
uuaccaaucagaaagcuga

SEQ ID NO: 1174998 - RNA, 19 nt, Artificial Sequence
  Description of Artificial Sequence: Synthetic oligonucleotide
  Sense strand starting at position 3588 of SEQ ID NO: 916671
cagcuuucugauugguaaa

SEQ ID NO: 1174999 - RNA, 19 nt, Artificial Sequence
  Description of Artificial Sequence: Synthetic oligonucleotide
  Antisense strand to SEQ ID NO: 1174998
uuuaccaaucagaaagcug

SEQ ID NO: 1175000 - RNA, 19 nt, Artificial Sequence
  Description of Artificial Sequence: Synthetic oligonucleotide
  Sense strand starting at position 3590 of SEQ ID NO: 916671
gcuuucugauugguaaauu

SEQ ID NO: 1175001 - RNA, 19 nt, Artificial Sequence
  Description of Artificial Sequence: Synthetic oligonucleotide
  Antisense strand to SEQ ID NO: 1175000
aauuuaccaaucagaaagc

SEQ ID NO: 1175002 - RNA, 19 nt, Artificial Sequence
  Description of Artificial Sequence: Synthetic oligonucleotide
  Sense strand starting at position 213 of SEQ ID NO: 916672
gaguuacuguggucaacag

SEQ ID NO: 1175003 - RNA, 19 nt, Artificial Sequence
  Description of Artificial Sequence: Synthetic oligonucleotide
  Antisense strand to SEQ ID NO: 1175002
cuguugaccacaguaacuc

SEQ ID NO: 1175004 - RNA, 19 nt, Artificial Sequence
  Description of Artificial Sequence: Synthetic oligonucleotide
  Sense strand starting at position 222 of SEQ ID NO: 916672
uggucaacagcuugugaaa

SEQ ID NO: 1175005 - RNA, 19 nt, Artificial Sequence
  Description of Artificial Sequence: Synthetic oligonucleotide
  Antisense strand to SEQ ID NO: 1175004
uuucacaagcuguugacca

SEQ ID NO: 1175006 - RNA, 19 nt, Artificial Sequence
  Description of Artificial Sequence: Synthetic oligonucleotide
  Sense strand starting at position 235 of SEQ ID NO: 916672
gugaaagaucucgaccuua

SEQ ID NO: 1175007 - RNA, 19 nt, Artificial Sequence
  Description of Artificial Sequence: Synthetic oligonucleotide
  Antisense strand to SEQ ID NO: 1175006
uaaggucgagaucuuucac

SEQ ID NO: 1175008 - RNA, 19 nt, Artificial Sequence
  Description of Artificial Sequence: Synthetic oligonucleotide
  Sense strand starting at position 420 of SEQ ID NO: 916672
uccuuuguucuccaaguau

SEQ ID NO: 1175009 - RNA, 19 nt, Artificial Sequence
  Description of Artificial Sequence: Synthetic oligonucleotide
  Antisense strand to SEQ ID NO: 1175008
auacuuggagaacaaagga

SEQ ID NO: 1175010 - RNA, 19 nt, Artificial Sequence
  Description of Artificial Sequence: Synthetic oligonucleotide
  Sense strand starting at position 424 of SEQ ID NO: 916672
uuguucuccaaguauguga

SEQ ID NO: 1175011 - RNA, 19 nt, Artificial Sequence
  Description of Artificial Sequence: Synthetic oligonucleotide
  Antisense strand to SEQ ID NO: 1175010
ucacauacuuggagaacaa

SEQ ID NO: 1175012 - RNA, 19 nt, Artificial Sequence
  Description of Artificial Sequence: Synthetic oligonucleotide
  Sense strand starting at position 497 of SEQ ID NO: 916672
gcacuauuccaguauaggc

SEQ ID NO: 1175013 - RNA, 19 nt, Artificial Sequence
  Description of Artificial Sequence: Synthetic oligonucleotide
  Antisense strand to SEQ ID NO: 1175012
gccuauacuggaauagugc

SEQ ID NO: 1175014 - RNA, 19 nt, Artificial Sequence
  Description of Artificial Sequence: Synthetic oligonucleotide
  Sense strand starting at position 506 of SEQ ID NO: 916672
caguauaggcauugagaua

SEQ ID NO: 1175015 - RNA, 19 nt, Artificial Sequence
  Description of Artificial Sequence: Synthetic oligonucleotide
  Antisense strand to SEQ ID NO: 1175014
uaucucaaugccuauacug

SEQ ID NO: 1175016 - RNA, 19 nt, Artificial Sequence
  Description of Artificial Sequence: Synthetic oligonucleotide
  Sense strand starting at position 832 of SEQ ID NO: 916672
cagccagacugucucgaaa

SEQ ID NO: 1175017 - RNA, 19 nt, Artificial Sequence
  Description of Artificial Sequence: Synthetic oligonucleotide
  Antisense strand to SEQ ID NO: 1175016
uuucgagacagucuggcug

SEQ ID NO: 1175018 - RNA, 19 nt, Artificial Sequence
  Description of Artificial Sequence: Synthetic oligonucleotide
  Sense strand starting at position 916 of SEQ ID NO: 916672
uagaucuaucagcgaguaa

SEQ ID NO: 1175019 - RNA, 19 nt, Artificial Sequence
  Description of Artificial Sequence: Synthetic oligonucleotide
  Antisense strand to SEQ ID NO: 1175018
uuacucgcugauagaucua

SEQ ID NO: 1175020 - RNA, 19 nt, Artificial Sequence
  Description of Artificial Sequence: Synthetic oligonucleotide
  Sense strand starting at position 917 of SEQ ID NO: 916672
agaucuaucagcgaguaaa

SEQ ID NO: 1175021 - RNA, 19 nt, Artificial Sequence
  Description of Artificial Sequence: Synthetic oligonucleotide
  Antisense strand to SEQ ID NO: 1175020
uuuacucgcugauagaucu

SEQ ID NO: 1175022 - RNA, 19 nt, Artificial Sequence
  Description of Artificial Sequence: Synthetic oligonucleotide
  Sense strand starting at position 1117 of SEQ ID NO: 916672
gcauuugggcuccguaauu

SEQ ID NO: 1175023 - RNA, 19 nt, Artificial Sequence
  Description of Artificial Sequence: Synthetic oligonucleotide
  Antisense strand to SEQ ID NO: 1175022
aauuacggagcccaaaugc

SEQ ID NO: 1175024 - RNA, 19 nt, Artificial Sequence
  Description of Artificial Sequence: Synthetic oligonucleotide
  Sense strand starting at position 1139 of SEQ ID NO: 916672
guagcagucagcucucagu

SEQ ID NO: 1175025 - RNA, 19 nt, Artificial Sequence
  Description of Artificial Sequence: Synthetic oligonucleotide
  Antisense strand to SEQ ID NO: 1175024
acugagagcugacugcuac

SEQ ID NO: 1175026 - RNA, 19 nt, Artificial Sequence
  Description of Artificial Sequence: Synthetic oligonucleotide
  Sense strand starting at position 1304 of SEQ ID NO: 916672
ucauguguucuguacuuua

SEQ ID NO: 1175027 - RNA, 19 nt, Artificial Sequence
  Description of Artificial Sequence: Synthetic oligonucleotide
  Antisense strand to SEQ ID NO: 1175026
uaaaguacagaacacauga

SEQ ID NO: 1175028 - RNA, 19 nt, Artificial Sequence
  Description of Artificial Sequence: Synthetic oligonucleotide
  Sense strand starting at position 1334 of SEQ ID NO: 916672
agggcuuucccggaguacu

SEQ ID NO: 1175029 - RNA, 19 nt, Artificial Sequence
  Description of Artificial Sequence: Synthetic oligonucleotide
  Antisense strand to SEQ ID NO: 1175028
aguacuccgggaaagcccu

SEQ ID NO: 1175030 - RNA, 19 nt, Artificial Sequence
  Description of Artificial Sequence: Synthetic oligonucleotide
  Sense strand starting at position 1380 of SEQ ID NO: 916672
aauguaaucggucauauaa

SEQ ID NO: 1175031 - RNA, 19 nt, Artificial Sequence
  Description of Artificial Sequence: Synthetic oligonucleotide
  Antisense strand to SEQ ID NO: 1175030
uuauaugaccgauuacauu

SEQ ID NO: 1175032 - RNA, 19 nt, Artificial Sequence
  Description of Artificial Sequence: Synthetic oligonucleotide
  Sense strand starting at position 1399 of SEQ ID NO: 916672
uagcucuuacuaggaagua

SEQ ID NO: 1175033 - RNA, 19 nt, Artificial Sequence
  Description of Artificial Sequence: Synthetic oligonucleotide
  Antisense strand to SEQ ID NO: 1175032
uacuuccuaguaagagcua

SEQ ID NO: 1175034 - RNA, 19 nt, Artificial Sequence
  Description of Artificial Sequence: Synthetic oligonucleotide
  Sense strand starting at position 2077 of SEQ ID NO: 916672
ggauauuagggcggagcua

SEQ ID NO: 1175035 - RNA, 19 nt, Artificial Sequence
  Description of Artificial Sequence: Synthetic oligonucleotide
  Antisense strand to SEQ ID NO: 1175034
uagcuccgcccuaauaucc

SEQ ID NO: 1175036 - RNA, 19 nt, Artificial Sequence
  Description of Artificial Sequence: Synthetic oligonucleotide
  Sense strand starting at position 2136 of SEQ ID NO: 916672
cgcccaacugcguuuguaa

SEQ ID NO: 1175037 - RNA, 19 nt, Artificial Sequence
  Description of Artificial Sequence: Synthetic oligonucleotide
  Antisense strand to SEQ ID NO: 1175036
uuacaaacgcaguugggcg

SEQ ID NO: 1175038 - RNA, 19 nt, Artificial Sequence
  Description of Artificial Sequence: Synthetic oligonucleotide
  Sense strand starting at position 2173 of SEQ ID NO: 916672
gagggucacugacuaguuu

SEQ ID NO: 1175039 - RNA, 19 nt, Artificial Sequence
  Description of Artificial Sequence: Synthetic oligonucleotide
  Antisense strand to SEQ ID NO: 1175038
aaacuagucagugacccuc

SEQ ID NO: 1175040 - RNA, 19 nt, Artificial Sequence
  Description of Artificial Sequence: Synthetic oligonucleotide
  Sense strand starting at position 2236 of SEQ ID NO: 916672
gguucuguugcacacugaa

SEQ ID NO: 1175041 - RNA, 19 nt, Artificial Sequence
  Description of Artificial Sequence: Synthetic oligonucleotide
  Antisense strand to SEQ ID NO: 1175040
uucagugugcaacagaacc

SEQ ID NO: 1175042 - RNA, 19 nt, Artificial Sequence
  Description of Artificial Sequence: Synthetic oligonucleotide
  Sense strand starting at position 2257 of SEQ ID NO: 916672
uuacaauaguguguaggau

SEQ ID NO: 1175043 - RNA, 19 nt, Artificial Sequence
  Description of Artificial Sequence: Synthetic oligonucleotide
  Antisense strand to SEQ ID NO: 1175042
auccuacacacuauuguaa

SEQ ID NO: 1175044 - RNA, 19 nt, Artificial Sequence
  Description of Artificial Sequence: Synthetic oligonucleotide
  Sense strand starting at position 2394 of SEQ ID NO: 916672
ggcauugacaaacgggaaa

SEQ ID NO: 1175045 - RNA, 19 nt, Artificial Sequence
  Description of Artificial Sequence: Synthetic oligonucleotide
  Antisense strand to SEQ ID NO: 1175044
uuucccguuugucaaugcc

SEQ ID NO: 1175046 - RNA, 19 nt, Artificial Sequence
  Description of Artificial Sequence: Synthetic oligonucleotide
  Sense strand starting at position 2428 of SEQ ID NO: 916672
cagguuugagcucaguuua

SEQ ID NO: 1175047 - RNA, 19 nt, Artificial Sequence
  Description of Artificial Sequence: Synthetic oligonucleotide
  Antisense strand to SEQ ID NO: 1175046
uaaacugagcucaaaccug

SEQ ID NO: 1175048 - RNA, 19 nt, Artificial Sequence
  Description of Artificial Sequence: Synthetic oligonucleotide
  Sense strand starting at position 2535 of SEQ ID NO: 916672
agaaacaauacguggucau

SEQ ID NO: 1175049 - RNA, 19 nt, Artificial Sequence
  Description of Artificial Sequence: Synthetic oligonucleotide
  Antisense strand to SEQ ID NO: 1175048
augaccacguauuguuucu

SEQ ID NO: 1175050 - RNA, 19 nt, Artificial Sequence
  Description of Artificial Sequence: Synthetic oligonucleotide
  Sense strand starting at position 2536 of SEQ ID NO: 916672
gaaacaauacguggucauu

SEQ ID NO: 1175051 - RNA, 19 nt, Artificial Sequence
  Description of Artificial Sequence: Synthetic oligonucleotide
  Antisense strand to SEQ ID NO: 1175050
aaugaccacguauuguuuc

SEQ ID NO: 1175052 - RNA, 19 nt, Artificial Sequence
  Description of Artificial Sequence: Synthetic oligonucleotide
  Sense strand starting at position 2539 of SEQ ID NO: 916672
acaauacguggucauugua

SEQ ID NO: 1175053 - RNA, 19 nt, Artificial Sequence
  Description of Artificial Sequence: Synthetic oligonucleotide
  Antisense strand to SEQ ID NO: 1175052
uacaaugaccacguauugu

SEQ ID NO: 1175054 - RNA, 19 nt, Artificial Sequence
  Description of Artificial Sequence: Synthetic oligonucleotide
  Sense strand starting at position 2542 of SEQ ID NO: 916672
auacguggucauuguauuu

SEQ ID NO: 1175055 - RNA, 19 nt, Artificial Sequence
  Description of Artificial Sequence: Synthetic oligonucleotide
  Antisense strand to SEQ ID NO: 1175054
aaauacaaugaccacguau

SEQ ID NO: 1175056 - RNA, 19 nt, Artificial Sequence
  Description of Artificial Sequence: Synthetic oligonucleotide
  Sense strand starting at position 2641 of SEQ ID NO: 916672
aacuguugucguguagugu

SEQ ID NO: 1175057 - RNA, 19 nt, Artificial Sequence
  Description of Artificial Sequence: Synthetic oligonucleotide
  Antisense strand to SEQ ID NO: 1175056
acacuacacgacaacaguu

SEQ ID NO: 1175058 - RNA, 19 nt, Artificial Sequence
  Description of Artificial Sequence: Synthetic oligonucleotide
  Sense strand starting at position 2683 of SEQ ID NO: 916672
ugcgccagugguucucaaa

SEQ ID NO: 1175059 - RNA, 19 nt, Artificial Sequence
  Description of Artificial Sequence: Synthetic oligonucleotide
  Antisense strand to SEQ ID NO: 1175058
uuugagaaccacuggcgca

SEQ ID NO: 1175060 - RNA, 19 nt, Artificial Sequence
  Description of Artificial Sequence: Synthetic oligonucleotide
  Sense strand starting at position 2783 of SEQ ID NO: 916672
cuaagauguuacuugucuu

SEQ ID NO: 1175061 - RNA, 19 nt, Artificial Sequence
  Description of Artificial Sequence: Synthetic oligonucleotide
  Antisense strand to SEQ ID NO: 1175060
aagacaaguaacaucuuag

SEQ ID NO: 1175062 - RNA, 19 nt, Artificial Sequence
  Description of Artificial Sequence: Synthetic oligonucleotide
  Sense strand starting at position 2856 of SEQ ID NO: 916672
acgucacugcucuaggaau

SEQ ID NO: 1175063 - RNA, 19 nt, Artificial Sequence
  Description of Artificial Sequence: Synthetic oligonucleotide
  Antisense strand to SEQ ID NO: 1175062
auuccuagagcagugacgu

SEQ ID NO: 1175064 - RNA, 19 nt, Artificial Sequence
  Description of Artificial Sequence: Synthetic oligonucleotide
  Sense strand starting at position 2867 of SEQ ID NO: 916672
cuaggaauuguguauuguu

SEQ ID NO: 1175065 - RNA, 19 nt, Artificial Sequence
  Description of Artificial Sequence: Synthetic oligonucleotide
  Antisense strand to SEQ ID NO: 1175064
aacaauacacaauuccuag

SEQ ID NO: 1175066 - RNA, 19 nt, Artificial Sequence
  Description of Artificial Sequence: Synthetic oligonucleotide
  Sense strand starting at position 2903 of SEQ ID NO: 916672
cuuuaauguccauaguaaa

SEQ ID NO: 1175067 - RNA, 19 nt, Artificial Sequence
  Description of Artificial Sequence: Synthetic oligonucleotide
  Antisense strand to SEQ ID NO: 1175066
uuuacuauggacauuaaag

SEQ ID NO: 1175068 - RNA, 19 nt, Artificial Sequence
  Description of Artificial Sequence: Synthetic oligonucleotide
  Sense strand starting at position 3173 of SEQ ID NO: 916672
uccaguaucccagaagguu

SEQ ID NO: 1175069 - RNA, 19 nt, Artificial Sequence
  Description of Artificial Sequence: Synthetic oligonucleotide
  Antisense strand to SEQ ID NO: 1175068
aaccuucugggauacugga

SEQ ID NO: 1175070 - RNA, 19 nt, Artificial Sequence
  Description of Artificial Sequence: Synthetic oligonucleotide
  Sense strand starting at position 3208 of SEQ ID NO: 916672
agucaaauugcuuacugcu

SEQ ID NO: 1175071 - RNA, 19 nt, Artificial Sequence
  Description of Artificial Sequence: Synthetic oligonucleotide
  Antisense strand to SEQ ID NO: 1175070
agcaguaagcaauuugacu

SEQ ID NO: 1175072 - RNA, 19 nt, Artificial Sequence
  Description of Artificial Sequence: Synthetic oligonucleotide
  Sense strand starting at position 3696 of SEQ ID NO: 916672
cuggccauuuggcuauauu

SEQ ID NO: 1175073 - RNA, 19 nt, Artificial Sequence
  Description of Artificial Sequence: Synthetic oligonucleotide
  Antisense strand to SEQ ID NO: 1175072
aauauagccaaauggccag

SEQ ID NO: 1175074 - RNA, 19 nt, Artificial Sequence
  Description of Artificial Sequence: Synthetic oligonucleotide
  Sense strand starting at position 3766 of SEQ ID NO: 916672
auuguuuggacguaccauu

SEQ ID NO: 1175075 - RNA, 19 nt, Artificial Sequence
  Description of Artificial Sequence: Synthetic oligonucleotide
  Antisense strand to SEQ ID NO: 1175074
aaugguacguccaaacaau

SEQ ID NO: 1175076 - RNA, 19 nt, Artificial Sequence
  Description of Artificial Sequence: Synthetic oligonucleotide
  Sense strand starting at position 3784 of SEQ ID NO: 916672
ugugaaguuggucaguauc

SEQ ID NO: 1175077 - RNA, 19 nt, Artificial Sequence
  Description of Artificial Sequence: Synthetic oligonucleotide
  Antisense strand to SEQ ID NO: 1175076
gauacugaccaacuucaca

SEQ ID NO: 1175078 - RNA, 19 nt, Artificial Sequence
  Description of Artificial Sequence: Synthetic oligonucleotide
  Sense strand starting at position 3795 of SEQ ID NO: 916672
ucaguaucccuuugguaga

SEQ ID NO: 1175079 - RNA, 19 nt, Artificial Sequence
  Description of Artificial Sequence: Synthetic oligonucleotide
  Antisense strand to SEQ ID NO: 1175078
ucuaccaaagggauacuga

SEQ ID NO: 1175080 - RNA, 19 nt, Artificial Sequence
  Description of Artificial Sequence: Synthetic oligonucleotide
  Sense strand starting at position 3806 of SEQ ID NO: 916672
uugguagacguuuacauua

SEQ ID NO: 1175081 - RNA, 19 nt, Artificial Sequence
  Description of Artificial Sequence: Synthetic oligonucleotide
  Antisense strand to SEQ ID NO: 1175080
uaauguaaacgucuaccaa

SEQ ID NO: 1175082 - RNA, 19 nt, Artificial Sequence
  Description of Artificial Sequence: Synthetic oligonucleotide
  Sense strand starting at position 209 of SEQ ID NO: 916673
gaguuacuguggucaacag

SEQ ID NO: 1175083 - RNA, 19 nt, Artificial Sequence
  Description of Artificial Sequence: Synthetic oligonucleotide
  Antisense strand to SEQ ID NO: 1175082
cuguugaccacaguaacuc

SEQ ID NO: 1175084 - RNA, 19 nt, Artificial Sequence
  Description of Artificial Sequence: Synthetic oligonucleotide
  Sense strand starting at position 218 of SEQ ID NO: 916673
uggucaacagcuugugaaa

SEQ ID NO: 1175085 - RNA, 19 nt, Artificial Sequence
  Description of Artificial Sequence: Synthetic oligonucleotide
  Antisense strand to SEQ ID NO: 1175084
uuucacaagcuguugacca

SEQ ID NO: 1175086 - RNA, 19 nt, Artificial Sequence
  Description of Artificial Sequence: Synthetic oligonucleotide
  Sense strand starting at position 231 of SEQ ID NO: 916673
gugaaagaucucgaccuua

SEQ ID NO: 1175087 - RNA, 19 nt, Artificial Sequence
  Description of Artificial Sequence: Synthetic oligonucleotide
  Antisense strand to SEQ ID NO: 1175086
uaaggucgagaucuuucac

SEQ ID NO: 1175088 - RNA, 19 nt, Artificial Sequence
  Description of Artificial Sequence: Synthetic oligonucleotide
  Sense strand starting at position 416 of SEQ ID NO: 916673
uccuuuguucuccaaguau

SEQ ID NO: 1175089 - RNA, 19 nt, Artificial Sequence
  Description of Artificial Sequence: Synthetic oligonucleotide
  Antisense strand to SEQ ID NO: 1175088
auacuuggagaacaaagga

SEQ ID NO: 1175090 - RNA, 19 nt, Artificial Sequence
  Description of Artificial Sequence: Synthetic oligonucleotide
  Sense strand starting at position 420 of SEQ ID NO: 916673
uuguucuccaaguauguga

SEQ ID NO: 1175091 - RNA, 19 nt, Artificial Sequence
  Description of Artificial Sequence: Synthetic oligonucleotide
  Antisense strand to SEQ ID NO: 1175090
ucacauacuuggagaacaa

SEQ ID NO: 1175092 - RNA, 19 nt, Artificial Sequence
  Description of Artificial Sequence: Synthetic oligonucleotide
  Sense strand starting at position 493 of SEQ ID NO: 916673
gcacuauuccaguauaggc

SEQ ID NO: 1175093 - RNA, 19 nt, Artificial Sequence
  Description of Artificial Sequence: Synthetic oligonucleotide
  Antisense strand to SEQ ID NO: 1175092
gccuauacuggaauagugc

SEQ ID NO: 1175094 - RNA, 19 nt, Artificial Sequence
  Description of Artificial Sequence: Synthetic oligonucleotide
  Sense strand starting at position 502 of SEQ ID NO: 916673
caguauaggcauugagaua

SEQ ID NO: 1175095 - RNA, 19 nt, Artificial Sequence
  Description of Artificial Sequence: Synthetic oligonucleotide
  Antisense strand to SEQ ID NO: 1175094
uaucucaaugccuauacug

SEQ ID NO: 1175096 - RNA, 19 nt, Artificial Sequence
  Description of Artificial Sequence: Synthetic oligonucleotide
  Sense strand starting at position 828 of SEQ ID NO: 916673
cagccagacugucucgaaa

SEQ ID NO: 1175097 - RNA, 19 nt, Artificial Sequence
  Description of Artificial Sequence: Synthetic oligonucleotide
  Antisense strand to SEQ ID NO: 1175096
uuucgagacagucuggcug

SEQ ID NO: 1175098 - RNA, 19 nt, Artificial Sequence
  Description of Artificial Sequence: Synthetic oligonucleotide
  Sense strand starting at position 912 of SEQ ID NO: 916673
uagaucuaucagcgaguaa

SEQ ID NO: 1175099 - RNA, 19 nt, Artificial Sequence
  Description of Artificial Sequence: Synthetic oligonucleotide
  Antisense strand to SEQ ID NO: 1175098
uuacucgcugauagaucua

SEQ ID NO: 1175100 - RNA, 19 nt, Artificial Sequence
  Description of Artificial Sequence: Synthetic oligonucleotide
  Sense strand starting at position 913 of SEQ ID NO: 916673
agaucuaucagcgaguaaa

SEQ ID NO: 1175101 - RNA, 19 nt, Artificial Sequence
  Description of Artificial Sequence: Synthetic oligonucleotide
  Antisense strand to SEQ ID NO: 1175100
uuuacucgcugauagaucu

SEQ ID NO: 1175102 - RNA, 19 nt, Artificial Sequence
  Description of Artificial Sequence: Synthetic oligonucleotide
  Sense strand starting at position 1113 of SEQ ID NO: 916673
gcauuugggcuccguaauu

SEQ ID NO: 1175103 - RNA, 19 nt, Artificial Sequence
  Description of Artificial Sequence: Synthetic oligonucleotide
  Antisense strand to SEQ ID NO: 1175102
aauuacggagcccaaaugc

SEQ ID NO: 1175104 - RNA, 19 nt, Artificial Sequence
  Description of Artificial Sequence: Synthetic oligonucleotide
  Sense strand starting at position 1135 of SEQ ID NO: 916673
guagcagucagcucucagu

SEQ ID NO: 1175105 - RNA, 19 nt, Artificial Sequence
  Description of Artificial Sequence: Synthetic oligonucleotide
  Antisense strand to SEQ ID NO: 1175104
acugagagcugacugcuac

SEQ ID NO: 1175106 - RNA, 19 nt, Artificial Sequence
  Description of Artificial Sequence: Synthetic oligonucleotide
  Sense strand starting at position 1300 of SEQ ID NO: 916673
ucauguguucuguacuuua

SEQ ID NO: 1175107 - RNA, 19 nt, Artificial Sequence
  Description of Artificial Sequence: Synthetic oligonucleotide
  Antisense strand to SEQ ID NO: 1175106
uaaaguacagaacacauga

SEQ ID NO: 1175108 - RNA, 19 nt, Artificial Sequence
  Description of Artificial Sequence: Synthetic oligonucleotide
  Sense strand starting at position 1330 of SEQ ID NO: 916673
agggcuuucccggaguacu

SEQ ID NO: 1175109 - RNA, 19 nt, Artificial Sequence
  Description of Artificial Sequence: Synthetic oligonucleotide
  Antisense strand to SEQ ID NO: 1175108
aguacuccgggaaagcccu

SEQ ID NO: 1175110 - RNA, 19 nt, Artificial Sequence
  Description of Artificial Sequence: Synthetic oligonucleotide
  Sense strand starting at position 1376 of SEQ ID NO: 916673
aauguaaucggucauauaa

SEQ ID NO: 1175111 - RNA, 19 nt, Artificial Sequence
  Description of Artificial Sequence: Synthetic oligonucleotide
  Antisense strand to SEQ ID NO: 1175110
uuauaugaccgauuacauu

SEQ ID NO: 1175112 - RNA, 19 nt, Artificial Sequence
  Description of Artificial Sequence: Synthetic oligonucleotide
  Sense strand starting at position 1395 of SEQ ID NO: 916673
uagcucuuacuaggaagua

SEQ ID NO: 1175113 - RNA, 19 nt, Artificial Sequence
  Description of Artificial Sequence: Synthetic oligonucleotide
  Antisense strand to SEQ ID NO: 1175112
uacuuccuaguaagagcua

SEQ ID NO: 1175114 - RNA, 19 nt, Artificial Sequence
  Description of Artificial Sequence: Synthetic oligonucleotide
  Sense strand starting at position 2073 of SEQ ID NO: 916673
ggauauuagggcggagcua

SEQ ID NO: 1175115 - RNA, 19 nt, Artificial Sequence
  Description of Artificial Sequence: Synthetic oligonucleotide
  Antisense strand to SEQ ID NO: 1175114
uagcuccgcccuaauaucc

SEQ ID NO: 1175116 - RNA, 19 nt, Artificial Sequence
  Description of Artificial Sequence: Synthetic oligonucleotide
  Sense strand starting at position 2132 of SEQ ID NO: 916673
cgcccaacugcguuuguaa

SEQ ID NO: 1175117 - RNA, 19 nt, Artificial Sequence
  Description of Artificial Sequence: Synthetic oligonucleotide
  Antisense strand to SEQ ID NO: 1175116
uuacaaacgcaguugggcg

SEQ ID NO: 1175118 - RNA, 19 nt, Artificial Sequence
  Description of Artificial Sequence: Synthetic oligonucleotide
  Sense strand starting at position 2169 of SEQ ID NO: 916673
gagggucacugacuaguuu

SEQ ID NO: 1175119 - RNA, 19 nt, Artificial Sequence
  Description of Artificial Sequence: Synthetic oligonucleotide
  Antisense strand to SEQ ID NO: 1175118
aaacuagucagugacccuc

SEQ ID NO: 1175120 - RNA, 19 nt, Artificial Sequence
  Description of Artificial Sequence: Synthetic oligonucleotide
  Sense strand starting at position 2232 of SEQ ID NO: 916673
gguucuguugcacacugaa

SEQ ID NO: 1175121 - RNA, 19 nt, Artificial Sequence
  Description of Artificial Sequence: Synthetic oligonucleotide
  Antisense strand to SEQ ID NO: 1175120
uucagugugcaacagaacc

SEQ ID NO: 1175122 - RNA, 19 nt, Artificial Sequence
  Description of Artificial Sequence: Synthetic oligonucleotide
  Sense strand starting at position 2253 of SEQ ID NO: 916673
uuacaauaguguguaggau

SEQ ID NO: 1175123 - RNA, 19 nt, Artificial Sequence
  Description of Artificial Sequence: Synthetic oligonucleotide
  Antisense strand to SEQ ID NO: 1175122
auccuacacacuauuguaa

SEQ ID NO: 1175124 - RNA, 19 nt, Artificial Sequence
  Description of Artificial Sequence: Synthetic oligonucleotide
  Sense strand starting at position 2390 of SEQ ID NO: 916673
ggcauugacaaacgggaaa

SEQ ID NO: 1175125 - RNA, 19 nt, Artificial Sequence
  Description of Artificial Sequence: Synthetic oligonucleotide
  Antisense strand to SEQ ID NO: 1175124
uuucccguuugucaaugcc

SEQ ID NO: 1175126 - RNA, 19 nt, Artificial Sequence
  Description of Artificial Sequence: Synthetic oligonucleotide
  Sense strand starting at position 2424 of SEQ ID NO: 916673
cagguuugagcucaguuua

SEQ ID NO: 1175127 - RNA, 19 nt, Artificial Sequence
  Description of Artificial Sequence: Synthetic oligonucleotide
  Antisense strand to SEQ ID NO: 1175126
uaaacugagcucaaaccug

SEQ ID NO: 1175128 - RNA, 19 nt, Artificial Sequence
  Description of Artificial Sequence: Synthetic oligonucleotide
  Sense strand starting at position 2531 of SEQ ID NO: 916673
agaaacaauacguggucau

SEQ ID NO: 1175129 - RNA, 19 nt, Artificial Sequence
  Description of Artificial Sequence: Synthetic oligonucleotide
  Antisense strand to SEQ ID NO: 1175128
augaccacguauuguuucu

SEQ ID NO: 1175130 - RNA, 19 nt, Artificial Sequence
  Description of Artificial Sequence: Synthetic oligonucleotide
  Sense strand starting at position 2532 of SEQ ID NO: 916673
gaaacaauacguggucauu

SEQ ID NO: 1175131 - RNA, 19 nt, Artificial Sequence
  Description of Artificial Sequence: Synthetic oligonucleotide
  Antisense strand to SEQ ID NO: 1175130
aaugaccacguauuguuuc

SEQ ID NO: 1175132 - RNA, 19 nt, Artificial Sequence
  Description of Artificial Sequence: Synthetic oligonucleotide
  Sense strand starting at position 2535 of SEQ ID NO: 916673
acaauacguggucauugua

SEQ ID NO: 1175133 - RNA, 19 nt, Artificial Sequence
  Description of Artificial Sequence: Synthetic oligonucleotide
  Antisense strand to SEQ ID NO: 1175132
uacaaugaccacguauugu

SEQ ID NO: 1175134 - RNA, 19 nt, Artificial Sequence
  Description of Artificial Sequence: Synthetic oligonucleotide
  Sense strand starting at position 2538 of SEQ ID NO: 916673
auacguggucauuguauuu

SEQ ID NO: 1175135 - RNA, 19 nt, Artificial Sequence
  Description of Artificial Sequence: Synthetic oligonucleotide
  Antisense strand to SEQ ID NO: 1175134
aaauacaaugaccacguau

SEQ ID NO: 1175136 - RNA, 19 nt, Artificial Sequence
  Description of Artificial Sequence: Synthetic oligonucleotide
  Sense strand starting at position 2637 of SEQ ID NO: 916673
aacuguugucguguagugu

SEQ ID NO: 1175137 - RNA, 19 nt, Artificial Sequence
  Description of Artificial Sequence: Synthetic oligonucleotide
  Antisense strand to SEQ ID NO: 1175136
acacuacacgacaacaguu

SEQ ID NO: 1175138 - RNA, 19 nt, Artificial Sequence
  Description of Artificial Sequence: Synthetic oligonucleotide
  Sense strand starting at position 2679 of SEQ ID NO: 916673
ugcgccagugguucucaaa

SEQ ID NO: 1175139 - RNA, 19 nt, Artificial Sequence
  Description of Artificial Sequence: Synthetic oligonucleotide
  Antisense strand to SEQ ID NO: 1175138
uuugagaaccacuggcgca

SEQ ID NO: 1175140 - RNA, 19 nt, Artificial Sequence
  Description of Artificial Sequence: Synthetic oligonucleotide
  Sense strand starting at position 2779 of SEQ ID NO: 916673
cuaagauguuacuugucuu

SEQ ID NO: 1175141 - RNA, 19 nt, Artificial Sequence
  Description of Artificial Sequence: Synthetic oligonucleotide
  Antisense strand to SEQ ID NO: 1175140
aagacaaguaacaucuuag

SEQ ID NO: 1175142 - RNA, 19 nt, Artificial Sequence
  Description of Artificial Sequence: Synthetic oligonucleotide
  Sense strand starting at position 2852 of SEQ ID NO: 916673
acgucacugcucuaggaau

SEQ ID NO: 1175143 - RNA, 19 nt, Artificial Sequence
  Description of Artificial Sequence: Synthetic oligonucleotide
  Antisense strand to SEQ ID NO: 1175142
auuccuagagcagugacgu

SEQ ID NO: 1175144 - RNA, 19 nt, Artificial Sequence
  Description of Artificial Sequence: Synthetic oligonucleotide
  Sense strand starting at position 2863 of SEQ ID NO: 916673
cuaggaauuguguauuguu

SEQ ID NO: 1175145 - RNA, 19 nt, Artificial Sequence
  Description of Artificial Sequence: Synthetic oligonucleotide
  Antisense strand to SEQ ID NO: 1175144
aacaauacacaauuccuag

SEQ ID NO: 1175146 - RNA, 19 nt, Artificial Sequence
  Description of Artificial Sequence: Synthetic oligonucleotide
  Sense strand starting at position 2899 of SEQ ID NO: 916673
cuuuaauguccauaguaaa

SEQ ID NO: 1175147 - RNA, 19 nt, Artificial Sequence
  Description of Artificial Sequence: Synthetic oligonucleotide
  Antisense strand to SEQ ID NO: 1175146
uuuacuauggacauuaaag

SEQ ID NO: 1175148 - RNA, 19 nt, Artificial Sequence
  Description of Artificial Sequence: Synthetic oligonucleotide
  Sense strand starting at position 3169 of SEQ ID NO: 916673
uccaguaucccagaagguu

SEQ ID NO: 1175149 - RNA, 19 nt, Artificial Sequence
  Description of Artificial Sequence: Synthetic oligonucleotide
  Antisense strand to SEQ ID NO: 1175148
aaccuucugggauacugga

SEQ ID NO: 1175150 - RNA, 19 nt, Artificial Sequence
  Description of Artificial Sequence: Synthetic oligonucleotide
  Sense strand starting at position 3204 of SEQ ID NO: 916673
agucaaauugcuuacugcu

SEQ ID NO: 1175151 - RNA, 19 nt, Artificial Sequence
  Description of Artificial Sequence: Synthetic oligonucleotide
  Antisense strand to SEQ ID NO: 1175150
agcaguaagcaauuugacu

SEQ ID NO: 1175152 - RNA, 19 nt, Artificial Sequence
  Description of Artificial Sequence: Synthetic oligonucleotide
  Sense strand starting at position 3692 of SEQ ID NO: 916673
cuggccauuuggcuauauu

SEQ ID NO: 1175153 - RNA, 19 nt, Artificial Sequence
  Description of Artificial Sequence: Synthetic oligonucleotide
  Antisense strand to SEQ ID NO: 1175152
aauauagccaaauggccag

SEQ ID NO: 1175154 - RNA, 19 nt, Artificial Sequence
  Description of Artificial Sequence: Synthetic oligonucleotide
  Sense strand starting at position 3762 of SEQ ID NO: 916673
auuguuuggacguaccauu

SEQ ID NO: 1175155 - RNA, 19 nt, Artificial Sequence
  Description of Artificial Sequence: Synthetic oligonucleotide
  Antisense strand to SEQ ID NO: 1175154
aaugguacguccaaacaau

SEQ ID NO: 1175156 - RNA, 19 nt, Artificial Sequence
  Description of Artificial Sequence: Synthetic oligonucleotide
  Sense strand starting at position 3780 of SEQ ID NO: 916673
ugugaaguuggucaguauc

SEQ ID NO: 1175157 - RNA, 19 nt, Artificial Sequence
  Description of Artificial Sequence: Synthetic oligonucleotide
  Antisense strand to SEQ ID NO: 1175156
gauacugaccaacuucaca

SEQ ID NO: 1175158 - RNA, 19 nt, Artificial Sequence
  Description of Artificial Sequence: Synthetic oligonucleotide
  Sense strand starting at position 3791 of SEQ ID NO: 916673
ucaguaucccuuugguaga

SEQ ID NO: 1175159 - RNA, 19 nt, Artificial Sequence
  Description of Artificial Sequence: Synthetic oligonucleotide
  Antisense strand to SEQ ID NO: 1175158
ucuaccaaagggauacuga

SEQ ID NO: 1175160 - RNA, 19 nt, Artificial Sequence
  Description of Artificial Sequence: Synthetic oligonucleotide
  Sense strand starting at position 3802 of SEQ ID NO: 916673
uugguagacguuuacauua

SEQ ID NO: 1175161 - RNA, 19 nt, Artificial Sequence
  Description of Artificial Sequence: Synthetic oligonucleotide
  Antisense strand to SEQ ID NO: 1175160
uaauguaaacgucuaccaa

SEQ ID NO: 1175162 - RNA, 19 nt, Artificial Sequence
  Description of Artificial Sequence: Synthetic oligonucleotide
  Sense strand starting at position 88 of SEQ ID NO: 916674
ggaacagacuaauggacaa

SEQ ID NO: 1175163 - RNA, 19 nt, Artificial Sequence
  Description of Artificial Sequence: Synthetic oligonucleotide
  Antisense strand to SEQ ID NO: 1175162
uuguccauuagucuguucc

SEQ ID NO: 1175164 - RNA, 19 nt, Artificial Sequence
  Description of Artificial Sequence: Synthetic oligonucleotide
  Sense strand starting at position 128 of SEQ ID NO: 916674
ucagcuucugcaugaguaa

SEQ ID NO: 1175165 - RNA, 19 nt, Artificial Sequence
  Description of Artificial Sequence: Synthetic oligonucleotide
  Antisense strand to SEQ ID NO: 1175164
uuacucaugcagaagcuga

SEQ ID NO: 1175166 - RNA, 19 nt, Artificial Sequence
  Description of Artificial Sequence: Synthetic oligonucleotide
  Sense strand starting at position 129 of SEQ ID NO: 916674
cagcuucugcaugaguaaa

SEQ ID NO: 1175167 - RNA, 19 nt, Artificial Sequence
  Description of Artificial Sequence: Synthetic oligonucleotide
  Antisense strand to SEQ ID NO: 1175166
uuuacucaugcagaagcug

SEQ ID NO: 1175168 - RNA, 19 nt, Artificial Sequence
  Description of Artificial Sequence: Synthetic oligonucleotide
  Sense strand starting at position 208 of SEQ ID NO: 916674
caggaauaggucuggaugu

SEQ ID NO: 1175169 - RNA, 19 nt, Artificial Sequence
  Description of Artificial Sequence: Synthetic oligonucleotide
  Antisense strand to SEQ ID NO: 1175168
acauccagaccuauuccug

SEQ ID NO: 1175170 - RNA, 19 nt, Artificial Sequence
  Description of Artificial Sequence: Synthetic oligonucleotide
  Sense strand starting at position 298 of SEQ ID NO: 916674
ugucuuguaagaugggaau

SEQ ID NO: 1175171 - RNA, 19 nt, Artificial Sequence
  Description of Artificial Sequence: Synthetic oligonucleotide
  Antisense strand to SEQ ID NO: 1175170
auucccaucuuacaagaca

SEQ ID NO: 1175172 - RNA, 19 nt, Artificial Sequence
  Description of Artificial Sequence: Synthetic oligonucleotide
  Sense strand starting at position 301 of SEQ ID NO: 916674
cuuguaagaugggaauaaa

SEQ ID NO: 1175173 - RNA, 19 nt, Artificial Sequence
  Description of Artificial Sequence: Synthetic oligonucleotide
  Antisense strand to SEQ ID NO: 1175172
uuuauucccaucuuacaag

SEQ ID NO: 1175174 - RNA, 19 nt, Artificial Sequence
  Description of Artificial Sequence: Synthetic oligonucleotide
  Sense strand starting at position 397 of SEQ ID NO: 916674
cagcaugggugcuccauaa

SEQ ID NO: 1175175 - RNA, 19 nt, Artificial Sequence
  Description of Artificial Sequence: Synthetic oligonucleotide
  Antisense strand to SEQ ID NO: 1175174
uuauggagcacccaugcug

SEQ ID NO: 1175176 - RNA, 19 nt, Artificial Sequence
  Description of Artificial Sequence: Synthetic oligonucleotide
  Sense strand starting at position 401 of SEQ ID NO: 916674
augggugcuccauaaauga

SEQ ID NO: 1175177 - RNA, 19 nt, Artificial Sequence
  Description of Artificial Sequence: Synthetic oligonucleotide
  Antisense strand to SEQ ID NO: 1175176
ucauuuauggagcacccau

SEQ ID NO: 1175178 - RNA, 19 nt, Artificial Sequence
  Description of Artificial Sequence: Synthetic oligonucleotide
  Sense strand starting at position 523 of SEQ ID NO: 916674
gcuugacgucuguucgagu

SEQ ID NO: 1175179 - RNA, 19 nt, Artificial Sequence
  Description of Artificial Sequence: Synthetic oligonucleotide
  Antisense strand to SEQ ID NO: 1175178
acucgaacagacgucaagc

SEQ ID NO: 1175180 - RNA, 19 nt, Artificial Sequence
  Description of Artificial Sequence: Synthetic oligonucleotide
  Sense strand starting at position 528 of SEQ ID NO: 916674
acgucuguucgaguuucua

SEQ ID NO: 1175181 - RNA, 19 nt, Artificial Sequence
  Description of Artificial Sequence: Synthetic oligonucleotide
  Antisense strand to SEQ ID NO: 1175180
uagaaacucgaacagacgu

SEQ ID NO: 1175182 - RNA, 19 nt, Artificial Sequence
  Description of Artificial Sequence: Synthetic oligonucleotide
  Sense strand starting at position 641 of SEQ ID NO: 916674
agcauuggugaggaucuga

SEQ ID NO: 1175183 - RNA, 19 nt, Artificial Sequence
  Description of Artificial Sequence: Synthetic oligonucleotide
  Antisense strand to SEQ ID NO: 1175182
ucagauccucaccaaugcu

SEQ ID NO: 1175184 - RNA, 19 nt, Artificial Sequence
  Description of Artificial Sequence: Synthetic oligonucleotide
  Sense strand starting at position 649 of SEQ ID NO: 916674
ugaggaucugacugcugau

SEQ ID NO: 1175185 - RNA, 19 nt, Artificial Sequence
  Description of Artificial Sequence: Synthetic oligonucleotide
  Antisense strand to SEQ ID NO: 1175184
aucagcagucagauccuca

SEQ ID NO: 1175186 - RNA, 19 nt, Artificial Sequence
  Description of Artificial Sequence: Synthetic oligonucleotide
  Sense strand starting at position 772 of SEQ ID NO: 916674
ggaagagccuugcucagaa

SEQ ID NO: 1175187 - RNA, 19 nt, Artificial Sequence
  Description of Artificial Sequence: Synthetic oligonucleotide
  Antisense strand to SEQ ID NO: 1175186
uucugagcaaggcucuucc

SEQ ID NO: 1175188 - RNA, 19 nt, Artificial Sequence
  Description of Artificial Sequence: Synthetic oligonucleotide
  Sense strand starting at position 1145 of SEQ ID NO: 916674
aguaacucggguuaaucuu

SEQ ID NO: 1175189 - RNA, 19 nt, Artificial Sequence
  Description of Artificial Sequence: Synthetic oligonucleotide
  Antisense strand to SEQ ID NO: 1175188
aagauuaacccgaguuacu

SEQ ID NO: 1175190 - RNA, 19 nt, Artificial Sequence
  Description of Artificial Sequence: Synthetic oligonucleotide
  Sense strand starting at position 1209 of SEQ ID NO: 916674
augugauccuagucauauc

SEQ ID NO: 1175191 - RNA, 19 nt, Artificial Sequence
  Description of Artificial Sequence: Synthetic oligonucleotide
  Antisense strand to SEQ ID NO: 1175190
gauaugacuaggaucacau

SEQ ID NO: 1175192 - RNA, 19 nt, Artificial Sequence
  Description of Artificial Sequence: Synthetic oligonucleotide
  Sense strand starting at position 1599 of SEQ ID NO: 916674
uuacgauuccugggcuaaa

SEQ ID NO: 1175193 - RNA, 19 nt, Artificial Sequence
  Description of Artificial Sequence: Synthetic oligonucleotide
  Antisense strand to SEQ ID NO: 1175192
uuuagcccaggaaucguaa

SEQ ID NO: 1175194 - RNA, 19 nt, Artificial Sequence
  Description of Artificial Sequence: Synthetic oligonucleotide
  Sense strand starting at position 1600 of SEQ ID NO: 916674
uacgauuccugggcuaaau

SEQ ID NO: 1175195 - RNA, 19 nt, Artificial Sequence
  Description of Artificial Sequence: Synthetic oligonucleotide
  Antisense strand to SEQ ID NO: 1175194
auuuagcccaggaaucgua

SEQ ID NO: 1175196 - RNA, 19 nt, Artificial Sequence
  Description of Artificial Sequence: Synthetic oligonucleotide
  Sense strand starting at position 1982 of SEQ ID NO: 916674
ccacgauucccuugauccu

SEQ ID NO: 1175197 - RNA, 19 nt, Artificial Sequence
  Description of Artificial Sequence: Synthetic oligonucleotide
  Antisense strand to SEQ ID NO: 1175196
aggaucaagggaaucgugg

SEQ ID NO: 1175198 - RNA, 19 nt, Artificial Sequence
  Description of Artificial Sequence: Synthetic oligonucleotide
  Sense strand starting at position 2049 of SEQ ID NO: 916674
aggagauguguagguucaa

SEQ ID NO: 1175199 - RNA, 19 nt, Artificial Sequence
  Description of Artificial Sequence: Synthetic oligonucleotide
  Antisense strand to SEQ ID NO: 1175198
uugaaccuacacaucuccu

SEQ ID NO: 1175200 - RNA, 19 nt, Artificial Sequence
  Description of Artificial Sequence: Synthetic oligonucleotide
  Sense strand starting at position 2050 of SEQ ID NO: 916674
ggagauguguagguucaag

SEQ ID NO: 1175201 - RNA, 19 nt, Artificial Sequence
  Description of Artificial Sequence: Synthetic oligonucleotide
  Antisense strand to SEQ ID NO: 1175200
cuugaaccuacacaucucc

SEQ ID NO: 1175202 - RNA, 19 nt, Artificial Sequence
  Description of Artificial Sequence: Synthetic oligonucleotide
  Sense strand starting at position 2064 of SEQ ID NO: 916674
ucaagaaccagacguugaa

SEQ ID NO: 1175203 - RNA, 19 nt, Artificial Sequence
  Description of Artificial Sequence: Synthetic oligonucleotide
  Antisense strand to SEQ ID NO: 1175202
uucaacgucugguucuuga

SEQ ID NO: 1175204 - RNA, 19 nt, Artificial Sequence
  Description of Artificial Sequence: Synthetic oligonucleotide
  Sense strand starting at position 2068 of SEQ ID NO: 916674
gaaccagacguugaaucuu

SEQ ID NO: 1175205 - RNA, 19 nt, Artificial Sequence
  Description of Artificial Sequence: Synthetic oligonucleotide
  Antisense strand to SEQ ID NO: 1175204
aagauucaacgucugguuc

SEQ ID NO: 1175206 - RNA, 19 nt, Artificial Sequence
  Description of Artificial Sequence: Synthetic oligonucleotide
  Sense strand starting at position 2074 of SEQ ID NO: 916674
gacguugaaucuucuugua

SEQ ID NO: 1175207 - RNA, 19 nt, Artificial Sequence
  Description of Artificial Sequence: Synthetic oligonucleotide
  Antisense strand to SEQ ID NO: 1175206
uacaagaagauucaacguc

SEQ ID NO: 1175208 - RNA, 19 nt, Artificial Sequence
  Description of Artificial Sequence: Synthetic oligonucleotide
  Sense strand starting at position 2353 of SEQ ID NO: 916674
uggugcaguccugggaaga

SEQ ID NO: 1175209 - RNA, 19 nt, Artificial Sequence
  Description of Artificial Sequence: Synthetic oligonucleotide
  Antisense strand to SEQ ID NO: 1175208
ucuucccaggacugcacca

SEQ ID NO: 1175210 - RNA, 19 nt, Artificial Sequence
  Description of Artificial Sequence: Synthetic oligonucleotide
  Sense strand starting at position 2354 of SEQ ID NO: 916674
ggugcaguccugggaagag

SEQ ID NO: 1175211 - RNA, 19 nt, Artificial Sequence
  Description of Artificial Sequence: Synthetic oligonucleotide
  Antisense strand to SEQ ID NO: 1175210
cucuucccaggacugcacc

SEQ ID NO: 1175212 - RNA, 19 nt, Artificial Sequence
  Description of Artificial Sequence: Synthetic oligonucleotide
  Sense strand starting at position 2572 of SEQ ID NO: 916674
cugucagaacuguggcuaa

SEQ ID NO: 1175213 - RNA, 19 nt, Artificial Sequence
  Description of Artificial Sequence: Synthetic oligonucleotide
  Antisense strand to SEQ ID NO: 1175212
uuagccacaguucugacag

SEQ ID NO: 1175214 - RNA, 19 nt, Artificial Sequence
  Description of Artificial Sequence: Synthetic oligonucleotide
  Sense strand starting at position 2575 of SEQ ID NO: 916674
ucagaacuguggcuaaguu

SEQ ID NO: 1175215 - RNA, 19 nt, Artificial Sequence
  Description of Artificial Sequence: Synthetic oligonucleotide
  Antisense strand to SEQ ID NO: 1175214
aacuuagccacaguucuga

SEQ ID NO: 1175216 - RNA, 19 nt, Artificial Sequence
  Description of Artificial Sequence: Synthetic oligonucleotide
  Sense strand starting at position 2576 of SEQ ID NO: 916674
cagaacuguggcuaaguuu

SEQ ID NO: 1175217 - RNA, 19 nt, Artificial Sequence
  Description of Artificial Sequence: Synthetic oligonucleotide
  Antisense strand to SEQ ID NO: 1175216
aaacuuagccacaguucug

SEQ ID NO: 1175218 - RNA, 19 nt, Artificial Sequence
  Description of Artificial Sequence: Synthetic oligonucleotide
  Sense strand starting at position 2816 of SEQ ID NO: 916674
agagaagucgccuaaaucc

SEQ ID NO: 1175219 - RNA, 19 nt, Artificial Sequence
  Description of Artificial Sequence: Synthetic oligonucleotide
  Antisense strand to SEQ ID NO: 1175218
ggauuuaggcgacuucucu

SEQ ID NO: 1175220 - RNA, 19 nt, Artificial Sequence
  Description of Artificial Sequence: Synthetic oligonucleotide
  Sense strand starting at position 2938 of SEQ ID NO: 916674
gugcuuaguggccagggaa

SEQ ID NO: 1175221 - RNA, 19 nt, Artificial Sequence
  Description of Artificial Sequence: Synthetic oligonucleotide
  Antisense strand to SEQ ID NO: 1175220
uucccuggccacuaagcac

SEQ ID NO: 1175222 - RNA, 19 nt, Artificial Sequence
  Description of Artificial Sequence: Synthetic oligonucleotide
  Sense strand starting at position 3067 of SEQ ID NO: 916674
agaggccuccgagaaguuu

SEQ ID NO: 1175223 - RNA, 19 nt, Artificial Sequence
  Description of Artificial Sequence: Synthetic oligonucleotide
  Antisense strand to SEQ ID NO: 1175222
aaacuucucggaggccucu

SEQ ID NO: 1175224 - RNA, 19 nt, Artificial Sequence
  Description of Artificial Sequence: Synthetic oligonucleotide
  Sense strand starting at position 3079 of SEQ ID NO: 916674
gaaguuucugaaggaccau

SEQ ID NO: 1175225 - RNA, 19 nt, Artificial Sequence
  Description of Artificial Sequence: Synthetic oligonucleotide
  Antisense strand to SEQ ID NO: 1175224
augguccuucagaaacuuc

SEQ ID NO: 1175226 - RNA, 19 nt, Artificial Sequence
  Description of Artificial Sequence: Synthetic oligonucleotide
  Sense strand starting at position 3105 of SEQ ID NO: 916674
gcuggaugccuuggaguca

SEQ ID NO: 1175227 - RNA, 19 nt, Artificial Sequence
  Description of Artificial Sequence: Synthetic oligonucleotide
  Antisense strand to SEQ ID NO: 1175226
ugacuccaaggcauccagc

SEQ ID NO: 1175228 - RNA, 19 nt, Artificial Sequence
  Description of Artificial Sequence: Synthetic oligonucleotide
  Sense strand starting at position 3285 of SEQ ID NO: 916674
uuagucauuugauaaacag

SEQ ID NO: 1175229 - RNA, 19 nt, Artificial Sequence
  Description of Artificial Sequence: Synthetic oligonucleotide
  Antisense strand to SEQ ID NO: 1175228
cuguuuaucaaaugacuaa

SEQ ID NO: 1175230 - RNA, 19 nt, Artificial Sequence
  Description of Artificial Sequence: Synthetic oligonucleotide
  Sense strand starting at position 3311 of SEQ ID NO: 916674
ggcugcgugaaagaguuaa

SEQ ID NO: 1175231 - RNA, 19 nt, Artificial Sequence
  Description of Artificial Sequence: Synthetic oligonucleotide
  Antisense strand to SEQ ID NO: 1175230
uuaacucuuucacgcagcc

SEQ ID NO: 1175232 - RNA, 19 nt, Artificial Sequence
  Description of Artificial Sequence: Synthetic oligonucleotide
  Sense strand starting at position 3315 of SEQ ID NO: 916674
gcgugaaagaguuaauguu

SEQ ID NO: 1175233 - RNA, 19 nt, Artificial Sequence
  Description of Artificial Sequence: Synthetic oligonucleotide
  Antisense strand to SEQ ID NO: 1175232
aacauuaacucuuucacgc

SEQ ID NO: 1175234 - RNA, 19 nt, Artificial Sequence
  Description of Artificial Sequence: Synthetic oligonucleotide
  Sense strand starting at position 3324 of SEQ ID NO: 916674
aguuaauguuauuucugca

SEQ ID NO: 1175235 - RNA, 19 nt, Artificial Sequence
  Description of Artificial Sequence: Synthetic oligonucleotide
  Antisense strand to SEQ ID NO: 1175234
ugcagaaauaacauuaacu

SEQ ID NO: 1175236 - RNA, 19 nt, Artificial Sequence
  Description of Artificial Sequence: Synthetic oligonucleotide
  Sense strand starting at position 3359 of SEQ ID NO: 916674
ggagaugauucugcaaaug

SEQ ID NO: 1175237 - RNA, 19 nt, Artificial Sequence
  Description of Artificial Sequence: Synthetic oligonucleotide
  Antisense strand to SEQ ID NO: 1175236
cauuugcagaaucaucucc

SEQ ID NO: 1175238 - RNA, 19 nt, Artificial Sequence
  Description of Artificial Sequence: Synthetic oligonucleotide
  Sense strand starting at position 3390 of SEQ ID NO: 916674
uccaaaugggccugaucua

SEQ ID NO: 1175239 - RNA, 19 nt, Artificial Sequence
  Description of Artificial Sequence: Synthetic oligonucleotide
  Antisense strand to SEQ ID NO: 1175238
uagaucaggcccauuugga

SEQ ID NO: 1175240 - RNA, 19 nt, Artificial Sequence
  Description of Artificial Sequence: Synthetic oligonucleotide
  Sense strand starting at position 3950 of SEQ ID NO: 916674
ucucacaucuagcugaaga

SEQ ID NO: 1175241 - RNA, 19 nt, Artificial Sequence
  Description of Artificial Sequence: Synthetic oligonucleotide
  Antisense strand to SEQ ID NO: 1175240
ucuucagcuagaugugaga

SEQ ID NO: 1175242 - RNA, 19 nt, Artificial Sequence
  Description of Artificial Sequence: Synthetic oligonucleotide
  Sense strand starting at position 1 of SEQ ID NO: 916675
uagguuaccugacugagaa

SEQ ID NO: 1175243 - RNA, 19 nt, Artificial Sequence
  Description of Artificial Sequence: Synthetic oligonucleotide
  Antisense strand to SEQ ID NO: 1175242
uucucagucagguaaccua

SEQ ID NO: 1175244 - RNA, 19 nt, Artificial Sequence
  Description of Artificial Sequence: Synthetic oligonucleotide
  Sense strand starting at position 2 of SEQ ID NO: 916675
agguuaccugacugagaac

SEQ ID NO: 1175245 - RNA, 19 nt, Artificial Sequence
  Description of Artificial Sequence: Synthetic oligonucleotide
  Antisense strand to SEQ ID NO: 1175244
guucucagucagguaaccu

SEQ ID NO: 1175246 - RNA, 19 nt, Artificial Sequence
  Description of Artificial Sequence: Synthetic oligonucleotide
  Sense strand starting at position 134 of SEQ ID NO: 916675
gcuguaaagguuuaauucu

SEQ ID NO: 1175247 - RNA, 19 nt, Artificial Sequence
  Description of Artificial Sequence: Synthetic oligonucleotide
  Antisense strand to SEQ ID NO: 1175246
agaauuaaaccuuuacagc

SEQ ID NO: 1175248 - RNA, 19 nt, Artificial Sequence
  Description of Artificial Sequence: Synthetic oligonucleotide
  Sense strand starting at position 506 of SEQ ID NO: 916675
auggaugacaucugaagca

SEQ ID NO: 1175249 - RNA, 19 nt, Artificial Sequence
  Description of Artificial Sequence: Synthetic oligonucleotide
  Antisense strand to SEQ ID NO: 1175248
ugcuucagaugucauccau

SEQ ID NO: 1175250 - RNA, 19 nt, Artificial Sequence
  Description of Artificial Sequence: Synthetic oligonucleotide
  Sense strand starting at position 782 of SEQ ID NO: 916675
uuugaaaccuagucagaga

SEQ ID NO: 1175251 - RNA, 19 nt, Artificial Sequence
  Description of Artificial Sequence: Synthetic oligonucleotide
  Antisense strand to SEQ ID NO: 1175250
ucucugacuagguuucaaa

SEQ ID NO: 1175252 - RNA, 19 nt, Artificial Sequence
  Description of Artificial Sequence: Synthetic oligonucleotide
  Sense strand starting at position 841 of SEQ ID NO: 916675
aucugauuggcuuaauuau

SEQ ID NO: 1175253 - RNA, 19 nt, Artificial Sequence
  Description of Artificial Sequence: Synthetic oligonucleotide
  Antisense strand to SEQ ID NO: 1175252
auaauuaagccaaucagau

SEQ ID NO: 1175254 - RNA, 19 nt, Artificial Sequence
  Description of Artificial Sequence: Synthetic oligonucleotide
  Sense strand starting at position 865 of SEQ ID NO: 916675
ugcuuaaauuuagccggaa

SEQ ID NO: 1175255 - RNA, 19 nt, Artificial Sequence
  Description of Artificial Sequence: Synthetic oligonucleotide
  Antisense strand to SEQ ID NO: 1175254
uuccggcuaaauuuaagca

SEQ ID NO: 1175256 - RNA, 19 nt, Artificial Sequence
  Description of Artificial Sequence: Synthetic oligonucleotide
  Sense strand starting at position 1010 of SEQ ID NO: 916675
uccaauguguuccuuaaca

SEQ ID NO: 1175257 - RNA, 19 nt, Artificial Sequence
  Description of Artificial Sequence: Synthetic oligonucleotide
  Antisense strand to SEQ ID NO: 1175256
uguuaaggaacacauugga

SEQ ID NO: 1175258 - RNA, 19 nt, Artificial Sequence
  Description of Artificial Sequence: Synthetic oligonucleotide
  Sense strand starting at position 1056 of SEQ ID NO: 916675
cagauaugagagugcuaca

SEQ ID NO: 1175259 - RNA, 19 nt, Artificial Sequence
  Description of Artificial Sequence: Synthetic oligonucleotide
  Antisense strand to SEQ ID NO: 1175258
uguagcacucucauaucug

SEQ ID NO: 1175260 - RNA, 19 nt, Artificial Sequence
  Description of Artificial Sequence: Synthetic oligonucleotide
  Sense strand starting at position 1130 of SEQ ID NO: 916675
ggaauucggcccuacuaga

SEQ ID NO: 1175261 - RNA, 19 nt, Artificial Sequence
  Description of Artificial Sequence: Synthetic oligonucleotide
  Antisense strand to SEQ ID NO: 1175260
ucuaguagggccgaauucc

SEQ ID NO: 1175262 - RNA, 19 nt, Artificial Sequence
  Description of Artificial Sequence: Synthetic oligonucleotide
  Sense strand starting at position 1137 of SEQ ID NO: 916675
ggcccuacuagagguaaga

SEQ ID NO: 1175263 - RNA, 19 nt, Artificial Sequence
  Description of Artificial Sequence: Synthetic oligonucleotide
  Antisense strand to SEQ ID NO: 1175262
ucuuaccucuaguagggcc

SEQ ID NO: 1175264 - RNA, 19 nt, Artificial Sequence
  Description of Artificial Sequence: Synthetic oligonucleotide
  Sense strand starting at position 1170 of SEQ ID NO: 916675
cauagugaguuucuucuga

SEQ ID NO: 1175265 - RNA, 19 nt, Artificial Sequence
  Description of Artificial Sequence: Synthetic oligonucleotide
  Antisense strand to SEQ ID NO: 1175264
ucagaagaaacucacuaug

SEQ ID NO: 1175266 - RNA, 19 nt, Artificial Sequence
  Description of Artificial Sequence: Synthetic oligonucleotide
  Sense strand starting at position 1172 of SEQ ID NO: 916675
uagugaguuucuucugaaa

SEQ ID NO: 1175267 - RNA, 19 nt, Artificial Sequence
  Description of Artificial Sequence: Synthetic oligonucleotide
  Antisense strand to SEQ ID NO: 1175266
uuucagaagaaacucacua

SEQ ID NO: 1175268 - RNA, 19 nt, Artificial Sequence
  Description of Artificial Sequence: Synthetic oligonucleotide
  Sense strand starting at position 1254 of SEQ ID NO: 916675
gagaaauccuagccauugu

SEQ ID NO: 1175269 - RNA, 19 nt, Artificial Sequence
  Description of Artificial Sequence: Synthetic oligonucleotide
  Antisense strand to SEQ ID NO: 1175268
acaauggcuaggauuucuc

SEQ ID NO: 1175270 - RNA, 19 nt, Artificial Sequence
  Description of Artificial Sequence: Synthetic oligonucleotide
  Sense strand starting at position 1326 of SEQ ID NO: 916675
guccucgggaaauaugauu

SEQ ID NO: 1175271 - RNA, 19 nt, Artificial Sequence
  Description of Artificial Sequence: Synthetic oligonucleotide
  Antisense strand to SEQ ID NO: 1175270
aaucauauuucccgaggac

SEQ ID NO: 1175272 - RNA, 19 nt, Artificial Sequence
  Description of Artificial Sequence: Synthetic oligonucleotide
  Sense strand starting at position 1331 of SEQ ID NO: 916675
cgggaaauaugauuaucac

SEQ ID NO: 1175273 - RNA, 19 nt, Artificial Sequence
  Description of Artificial Sequence: Synthetic oligonucleotide
  Antisense strand to SEQ ID NO: 1175272
gugauaaucauauuucccg

SEQ ID NO: 1175274 - RNA, 19 nt, Artificial Sequence
  Description of Artificial Sequence: Synthetic oligonucleotide
  Sense strand starting at position 1579 of SEQ ID NO: 916675
ggcaccuaacgguaaucaa

SEQ ID NO: 1175275 - RNA, 19 nt, Artificial Sequence
  Description of Artificial Sequence: Synthetic oligonucleotide
  Antisense strand to SEQ ID NO: 1175274
uugauuaccguuaggugcc

SEQ ID NO: 1175276 - RNA, 19 nt, Artificial Sequence
  Description of Artificial Sequence: Synthetic oligonucleotide
  Sense strand starting at position 2231 of SEQ ID NO: 916675
gugagaaguaucugggaga

SEQ ID NO: 1175277 - RNA, 19 nt, Artificial Sequence
  Description of Artificial Sequence: Synthetic oligonucleotide
  Antisense strand to SEQ ID NO: 1175276
ucucccagauacuucucac

SEQ ID NO: 1175278 - RNA, 19 nt, Artificial Sequence
  Description of Artificial Sequence: Synthetic oligonucleotide
  Sense strand starting at position 2246 of SEQ ID NO: 916675
gagagaaguucuccaccca

SEQ ID NO: 1175279 - RNA, 19 nt, Artificial Sequence
  Description of Artificial Sequence: Synthetic oligonucleotide
  Antisense strand to SEQ ID NO: 1175278
uggguggagaacuucucuc

SEQ ID NO: 1175280 - RNA, 19 nt, Artificial Sequence
  Description of Artificial Sequence: Synthetic oligonucleotide
  Sense strand starting at position 2296 of SEQ ID NO: 916675
aggcuaacccugggaguua

SEQ ID NO: 1175281 - RNA, 19 nt, Artificial Sequence
  Description of Artificial Sequence: Synthetic oligonucleotide
  Antisense strand to SEQ ID NO: 1175280
uaacucccaggguuagccu

SEQ ID NO: 1175282 - RNA, 19 nt, Artificial Sequence
  Description of Artificial Sequence: Synthetic oligonucleotide
  Sense strand starting at position 2398 of SEQ ID NO: 916675
ccgugucucguuucacuua

SEQ ID NO: 1175283 - RNA, 19 nt, Artificial Sequence
  Description of Artificial Sequence: Synthetic oligonucleotide
  Antisense strand to SEQ ID NO: 1175282
uaagugaaacgagacacgg

SEQ ID NO: 1175284 - RNA, 19 nt, Artificial Sequence
  Description of Artificial Sequence: Synthetic oligonucleotide
  Sense strand starting at position 3033 of SEQ ID NO: 916675
cggucuucugugcuuguca

SEQ ID NO: 1175285 - RNA, 19 nt, Artificial Sequence
  Description of Artificial Sequence: Synthetic oligonucleotide
  Antisense strand to SEQ ID NO: 1175284
ugacaagcacagaagaccg

SEQ ID NO: 1175286 - RNA, 19 nt, Artificial Sequence
  Description of Artificial Sequence: Synthetic oligonucleotide
  Sense strand starting at position 3040 of SEQ ID NO: 916675
cugugcuugucauuucuuu

SEQ ID NO: 1175287 - RNA, 19 nt, Artificial Sequence
  Description of Artificial Sequence: Synthetic oligonucleotide
  Antisense strand to SEQ ID NO: 1175286
aaagaaaugacaagcacag

SEQ ID NO: 1175288 - RNA, 19 nt, Artificial Sequence
  Description of Artificial Sequence: Synthetic oligonucleotide
  Sense strand starting at position 3132 of SEQ ID NO: 916675
cggcaucugucauuucuca

SEQ ID NO: 1175289 - RNA, 19 nt, Artificial Sequence
  Description of Artificial Sequence: Synthetic oligonucleotide
  Antisense strand to SEQ ID NO: 1175288
ugagaaaugacagaugccg

SEQ ID NO: 1175290 - RNA, 19 nt, Artificial Sequence
  Description of Artificial Sequence: Synthetic oligonucleotide
  Sense strand starting at position 3186 of SEQ ID NO: 916675
gguaaugggaauuguaugu

SEQ ID NO: 1175291 - RNA, 19 nt, Artificial Sequence
  Description of Artificial Sequence: Synthetic oligonucleotide
  Antisense strand to SEQ ID NO: 1175290
acauacaauucccauuacc

SEQ ID NO: 1175292 - RNA, 19 nt, Artificial Sequence
  Description of Artificial Sequence: Synthetic oligonucleotide
  Sense strand starting at position 3190 of SEQ ID NO: 916675
augggaauuguauguuaag

SEQ ID NO: 1175293 - RNA, 19 nt, Artificial Sequence
  Description of Artificial Sequence: Synthetic oligonucleotide
  Antisense strand to SEQ ID NO: 1175292
cuuaacauacaauucccau

SEQ ID NO: 1175294 - RNA, 19 nt, Artificial Sequence
  Description of Artificial Sequence: Synthetic oligonucleotide
  Sense strand starting at position 3191 of SEQ ID NO: 916675
ugggaauuguauguuaagu

SEQ ID NO: 1175295 - RNA, 19 nt, Artificial Sequence
  Description of Artificial Sequence: Synthetic oligonucleotide
  Antisense strand to SEQ ID NO: 1175294
acuuaacauacaauuccca

SEQ ID NO: 1175296 - RNA, 19 nt, Artificial Sequence
  Description of Artificial Sequence: Synthetic oligonucleotide
  Sense strand starting at position 3209 of SEQ ID NO: 916675
uauucccugcccgaguaaa

SEQ ID NO: 1175297 - RNA, 19 nt, Artificial Sequence
  Description of Artificial Sequence: Synthetic oligonucleotide
  Antisense strand to SEQ ID NO: 1175296
uuuacucgggcagggaaua

SEQ ID NO: 1175298 - RNA, 19 nt, Artificial Sequence
  Description of Artificial Sequence: Synthetic oligonucleotide
  Sense strand starting at position 3385 of SEQ ID NO: 916675
ggaacguuucugugaggga

SEQ ID NO: 1175299 - RNA, 19 nt, Artificial Sequence
  Description of Artificial Sequence: Synthetic oligonucleotide
  Antisense strand to SEQ ID NO: 1175298
ucccucacagaaacguucc

SEQ ID NO: 1175300 - RNA, 19 nt, Artificial Sequence
  Description of Artificial Sequence: Synthetic oligonucleotide
  Sense strand starting at position 3505 of SEQ ID NO: 916675
cugagugugcuacacgaaa

SEQ ID NO: 1175301 - RNA, 19 nt, Artificial Sequence
  Description of Artificial Sequence: Synthetic oligonucleotide
  Antisense strand to SEQ ID NO: 1175300
uuucguguagcacacucag

SEQ ID NO: 1175302 - RNA, 19 nt, Artificial Sequence
  Description of Artificial Sequence: Synthetic oligonucleotide
  Sense strand starting at position 3635 of SEQ ID NO: 916675
uuuguuucugagggaagua

SEQ ID NO: 1175303 - RNA, 19 nt, Artificial Sequence
  Description of Artificial Sequence: Synthetic oligonucleotide
  Antisense strand to SEQ ID NO: 1175302
uacuucccucagaaacaaa

SEQ ID NO: 1175304 - RNA, 19 nt, Artificial Sequence
  Description of Artificial Sequence: Synthetic oligonucleotide
  Sense strand starting at position 3636 of SEQ ID NO: 916675
uuguuucugagggaaguau

SEQ ID NO: 1175305 - RNA, 19 nt, Artificial Sequence
  Description of Artificial Sequence: Synthetic oligonucleotide
  Antisense strand to SEQ ID NO: 1175304
auacuucccucagaaacaa

SEQ ID NO: 1175306 - RNA, 19 nt, Artificial Sequence
  Description of Artificial Sequence: Synthetic oligonucleotide
  Sense strand starting at position 3667 of SEQ ID NO: 916675
gcgacuuuacaauggaaag

SEQ ID NO: 1175307 - RNA, 19 nt, Artificial Sequence
  Description of Artificial Sequence: Synthetic oligonucleotide
  Antisense strand to SEQ ID NO: 1175306
cuuuccauuguaaagucgc

SEQ ID NO: 1175308 - RNA, 19 nt, Artificial Sequence
  Description of Artificial Sequence: Synthetic oligonucleotide
  Sense strand starting at position 3668 of SEQ ID NO: 916675
cgacuuuacaauggaaagu

SEQ ID NO: 1175309 - RNA, 19 nt, Artificial Sequence
  Description of Artificial Sequence: Synthetic oligonucleotide
  Antisense strand to SEQ ID NO: 1175308
acuuuccauuguaaagucg

SEQ ID NO: 1175310 - RNA, 19 nt, Artificial Sequence
  Description of Artificial Sequence: Synthetic oligonucleotide
  Sense strand starting at position 3712 of SEQ ID NO: 916675
acuucuauucuagacuguu

SEQ ID NO: 1175311 - RNA, 19 nt, Artificial Sequence
  Description of Artificial Sequence: Synthetic oligonucleotide
  Antisense strand to SEQ ID NO: 1175310
aacagucuagaauagaagu

SEQ ID NO: 1175312 - RNA, 19 nt, Artificial Sequence
  Description of Artificial Sequence: Synthetic oligonucleotide
  Sense strand starting at position 3715 of SEQ ID NO: 916675
ucuauucuagacuguuauu

SEQ ID NO: 1175313 - RNA, 19 nt, Artificial Sequence
  Description of Artificial Sequence: Synthetic oligonucleotide
  Antisense strand to SEQ ID NO: 1175312
aauaacagucuagaauaga

SEQ ID NO: 1175314 - RNA, 19 nt, Artificial Sequence
  Description of Artificial Sequence: Synthetic oligonucleotide
  Sense strand starting at position 3791 of SEQ ID NO: 916675
uuagaugucaacuggagca

SEQ ID NO: 1175315 - RNA, 19 nt, Artificial Sequence
  Description of Artificial Sequence: Synthetic oligonucleotide
  Antisense strand to SEQ ID NO: 1175314
ugcuccaguugacaucuaa

SEQ ID NO: 1175316 - RNA, 19 nt, Artificial Sequence
  Description of Artificial Sequence: Synthetic oligonucleotide
  Sense strand starting at position 3821 of SEQ ID NO: 916675
acauaaugugcauacagau

SEQ ID NO: 1175317 - RNA, 19 nt, Artificial Sequence
  Description of Artificial Sequence: Synthetic oligonucleotide
  Antisense strand to SEQ ID NO: 1175316
aucuguaugcacauuaugu

SEQ ID NO: 1175318 - RNA, 19 nt, Artificial Sequence
  Description of Artificial Sequence: Synthetic oligonucleotide
  Sense strand starting at position 3834 of SEQ ID NO: 916675
acagaucauccauggaucu

SEQ ID NO: 1175319 - RNA, 19 nt, Artificial Sequence
  Description of Artificial Sequence: Synthetic oligonucleotide
  Antisense strand to SEQ ID NO: 1175318
agauccauggaugaucugu

SEQ ID NO: 1175320 - RNA, 19 nt, Artificial Sequence
  Description of Artificial Sequence: Synthetic oligonucleotide
  Sense strand starting at position 3976 of SEQ ID NO: 916675
uuugauguggcuuaaauac

SEQ ID NO: 1175321 - RNA, 19 nt, Artificial Sequence
  Description of Artificial Sequence: Synthetic oligonucleotide
  Antisense strand to SEQ ID NO: 1175320
guauuuaagccacaucaaa

SEQ ID NO: 1175322 - RNA, 19 nt, Artificial Sequence
  Description of Artificial Sequence: Synthetic oligonucleotide
  Sense strand starting at position 94 of SEQ ID NO: 916676
aggacaaguuacuuuacau

SEQ ID NO: 1175323 - RNA, 19 nt, Artificial Sequence
  Description of Artificial Sequence: Synthetic oligonucleotide
  Antisense strand to SEQ ID NO: 1175322
auguaaaguaacuuguccu

SEQ ID NO: 1175324 - RNA, 19 nt, Artificial Sequence
  Description of Artificial Sequence: Synthetic oligonucleotide
  Sense strand starting at position 147 of SEQ ID NO: 916676
gccaauaaucuaugcuuag

SEQ ID NO: 1175325 - RNA, 19 nt, Artificial Sequence
  Description of Artificial Sequence: Synthetic oligonucleotide
  Antisense strand to SEQ ID NO: 1175324
cuaagcauagauuauuggc

SEQ ID NO: 1175326 - RNA, 19 nt, Artificial Sequence
  Description of Artificial Sequence: Synthetic oligonucleotide
  Sense strand starting at position 189 of SEQ ID NO: 916676
uagguuaccugacugagaa

SEQ ID NO: 1175327 - RNA, 19 nt, Artificial Sequence
  Description of Artificial Sequence: Synthetic oligonucleotide
  Antisense strand to SEQ ID NO: 1175326
uucucagucagguaaccua

SEQ ID NO: 1175328 - RNA, 19 nt, Artificial Sequence
  Description of Artificial Sequence: Synthetic oligonucleotide
  Sense strand starting at position 190 of SEQ ID NO: 916676
agguuaccugacugagaac

SEQ ID NO: 1175329 - RNA, 19 nt, Artificial Sequence
  Description of Artificial Sequence: Synthetic oligonucleotide
  Antisense strand to SEQ ID NO: 1175328
guucucagucagguaaccu

SEQ ID NO: 1175330 - RNA, 19 nt, Artificial Sequence
  Description of Artificial Sequence: Synthetic oligonucleotide
  Sense strand starting at position 322 of SEQ ID NO: 916676
gcuguaaagguuuaauucu

SEQ ID NO: 1175331 - RNA, 19 nt, Artificial Sequence
  Description of Artificial Sequence: Synthetic oligonucleotide
  Antisense strand to SEQ ID NO: 1175330
agaauuaaaccuuuacagc

SEQ ID NO: 1175332 - RNA, 19 nt, Artificial Sequence
  Description of Artificial Sequence: Synthetic oligonucleotide
  Sense strand starting at position 694 of SEQ ID NO: 916676
auggaugacaucugaagca

SEQ ID NO: 1175333 - RNA, 19 nt, Artificial Sequence
  Description of Artificial Sequence: Synthetic oligonucleotide
  Antisense strand to SEQ ID NO: 1175332
ugcuucagaugucauccau

SEQ ID NO: 1175334 - RNA, 19 nt, Artificial Sequence
  Description of Artificial Sequence: Synthetic oligonucleotide
  Sense strand starting at position 970 of SEQ ID NO: 916676
uuugaaaccuagucagaga

SEQ ID NO: 1175335 - RNA, 19 nt, Artificial Sequence
  Description of Artificial Sequence: Synthetic oligonucleotide
  Antisense strand to SEQ ID NO: 1175334
ucucugacuagguuucaaa

SEQ ID NO: 1175336 - RNA, 19 nt, Artificial Sequence
  Description of Artificial Sequence: Synthetic oligonucleotide
  Sense strand starting at position 1029 of SEQ ID NO: 916676
aucugauuggcuuaauuau

SEQ ID NO: 1175337 - RNA, 19 nt, Artificial Sequence
  Description of Artificial Sequence: Synthetic oligonucleotide
  Antisense strand to SEQ ID NO: 1175336
auaauuaagccaaucagau

SEQ ID NO: 1175338 - RNA, 19 nt, Artificial Sequence
  Description of Artificial Sequence: Synthetic oligonucleotide
  Sense strand starting at position 1053 of SEQ ID NO: 916676
ugcuuaaauuuagccggaa

SEQ ID NO: 1175339 - RNA, 19 nt, Artificial Sequence
  Description of Artificial Sequence: Synthetic oligonucleotide
  Antisense strand to SEQ ID NO: 1175338
uuccggcuaaauuuaagca

SEQ ID NO: 1175340 - RNA, 19 nt, Artificial Sequence
  Description of Artificial Sequence: Synthetic oligonucleotide
  Sense strand starting at position 1198 of SEQ ID NO: 916676
uccaauguguuccuuaaca

SEQ ID NO: 1175341 - RNA, 19 nt, Artificial Sequence
  Description of Artificial Sequence: Synthetic oligonucleotide
  Antisense strand to SEQ ID NO: 1175340
uguuaaggaacacauugga

SEQ ID NO: 1175342 - RNA, 19 nt, Artificial Sequence
  Description of Artificial Sequence: Synthetic oligonucleotide
  Sense strand starting at position 1244 of SEQ ID NO: 916676
cagauaugagagugcuaca

SEQ ID NO: 1175343 - RNA, 19 nt, Artificial Sequence
  Description of Artificial Sequence: Synthetic oligonucleotide
  Antisense strand to SEQ ID NO: 1175342
uguagcacucucauaucug

SEQ ID NO: 1175344 - RNA, 19 nt, Artificial Sequence
  Description of Artificial Sequence: Synthetic oligonucleotide
  Sense strand starting at position 1318 of SEQ ID NO: 916676
ggaauucggcccuacuaga

SEQ ID NO: 1175345 - RNA, 19 nt, Artificial Sequence
  Description of Artificial Sequence: Synthetic oligonucleotide
  Antisense strand to SEQ ID NO: 1175344
ucuaguagggccgaauucc

SEQ ID NO: 1175346 - RNA, 19 nt, Artificial Sequence
  Description of Artificial Sequence: Synthetic oligonucleotide
  Sense strand starting at position 1325 of SEQ ID NO: 916676
ggcccuacuagagguaaga

SEQ ID NO: 1175347 - RNA, 19 nt, Artificial Sequence
  Description of Artificial Sequence: Synthetic oligonucleotide
  Antisense strand to SEQ ID NO: 1175346
ucuuaccucuaguagggcc

SEQ ID NO: 1175348 - RNA, 19 nt, Artificial Sequence
  Description of Artificial Sequence: Synthetic oligonucleotide
  Sense strand starting at position 1358 of SEQ ID NO: 916676
cauagugaguuucuucuga

SEQ ID NO: 1175349 - RNA, 19 nt, Artificial Sequence
  Description of Artificial Sequence: Synthetic oligonucleotide
  Antisense strand to SEQ ID NO: 1175348
ucagaagaaacucacuaug

SEQ ID NO: 1175350 - RNA, 19 nt, Artificial Sequence
  Description of Artificial Sequence: Synthetic oligonucleotide
  Sense strand starting at position 1360 of SEQ ID NO: 916676
uagugaguuucuucugaaa

SEQ ID NO: 1175351 - RNA, 19 nt, Artificial Sequence
  Description of Artificial Sequence: Synthetic oligonucleotide
  Antisense strand to SEQ ID NO: 1175350
uuucagaagaaacucacua

SEQ ID NO: 1175352 - RNA, 19 nt, Artificial Sequence
  Description of Artificial Sequence: Synthetic oligonucleotide
  Sense strand starting at position 1442 of SEQ ID NO: 916676
gagaaauccuagccauugu

SEQ ID NO: 1175353 - RNA, 19 nt, Artificial Sequence
  Description of Artificial Sequence: Synthetic oligonucleotide
  Antisense strand to SEQ ID NO: 1175352
acaauggcuaggauuucuc

SEQ ID NO: 1175354 - RNA, 19 nt, Artificial Sequence
  Description of Artificial Sequence: Synthetic oligonucleotide
  Sense strand starting at position 1514 of SEQ ID NO: 916676
guccucgggaaauaugauu

SEQ ID NO: 1175355 - RNA, 19 nt, Artificial Sequence
  Description of Artificial Sequence: Synthetic oligonucleotide
  Antisense strand to SEQ ID NO: 1175354
aaucauauuucccgaggac

SEQ ID NO: 1175356 - RNA, 19 nt, Artificial Sequence
  Description of Artificial Sequence: Synthetic oligonucleotide
  Sense strand starting at position 1519 of SEQ ID NO: 916676
cgggaaauaugauuaucac

SEQ ID NO: 1175357 - RNA, 19 nt, Artificial Sequence
  Description of Artificial Sequence: Synthetic oligonucleotide
  Antisense strand to SEQ ID NO: 1175356
gugauaaucauauuucccg

SEQ ID NO: 1175358 - RNA, 19 nt, Artificial Sequence
  Description of Artificial Sequence: Synthetic oligonucleotide
  Sense strand starting at position 1767 of SEQ ID NO: 916676
ggcaccuaacgguaaucaa

SEQ ID NO: 1175359 - RNA, 19 nt, Artificial Sequence
  Description of Artificial Sequence: Synthetic oligonucleotide
  Antisense strand to SEQ ID NO: 1175358
uugauuaccguuaggugcc

SEQ ID NO: 1175360 - RNA, 19 nt, Artificial Sequence
  Description of Artificial Sequence: Synthetic oligonucleotide
  Sense strand starting at position 2419 of SEQ ID NO: 916676
gugagaaguaucugggaga

SEQ ID NO: 1175361 - RNA, 19 nt, Artificial Sequence
  Description of Artificial Sequence: Synthetic oligonucleotide
  Antisense strand to SEQ ID NO: 1175360
ucucccagauacuucucac

SEQ ID NO: 1175362 - RNA, 19 nt, Artificial Sequence
  Description of Artificial Sequence: Synthetic oligonucleotide
  Sense strand starting at position 2434 of SEQ ID NO: 916676
gagagaaguucuccaccca

SEQ ID NO: 1175363 - RNA, 19 nt, Artificial Sequence
  Description of Artificial Sequence: Synthetic oligonucleotide
  Antisense strand to SEQ ID NO: 1175362
uggguggagaacuucucuc

SEQ ID NO: 1175364 - RNA, 19 nt, Artificial Sequence
  Description of Artificial Sequence: Synthetic oligonucleotide
  Sense strand starting at position 2484 of SEQ ID NO: 916676
aggcuaacccugggaguua

SEQ ID NO: 1175365 - RNA, 19 nt, Artificial Sequence
  Description of Artificial Sequence: Synthetic oligonucleotide
  Antisense strand to SEQ ID NO: 1175364
uaacucccaggguuagccu

SEQ ID NO: 1175366 - RNA, 19 nt, Artificial Sequence
  Description of Artificial Sequence: Synthetic oligonucleotide
  Sense strand starting at position 2586 of SEQ ID NO: 916676
ccgugucucguuucacuua

SEQ ID NO: 1175367 - RNA, 19 nt, Artificial Sequence
  Description of Artificial Sequence: Synthetic oligonucleotide
  Antisense strand to SEQ ID NO: 1175366
uaagugaaacgagacacgg

SEQ ID NO: 1175368 - RNA, 19 nt, Artificial Sequence
  Description of Artificial Sequence: Synthetic oligonucleotide
  Sense strand starting at position 3221 of SEQ ID NO: 916676
cggucuucugugcuuguca

SEQ ID NO: 1175369 - RNA, 19 nt, Artificial Sequence
  Description of Artificial Sequence: Synthetic oligonucleotide
  Antisense strand to SEQ ID NO: 1175368
ugacaagcacagaagaccg

SEQ ID NO: 1175370 - RNA, 19 nt, Artificial Sequence
  Description of Artificial Sequence: Synthetic oligonucleotide
  Sense strand starting at position 3228 of SEQ ID NO: 916676
cugugcuugucauuucuuu

SEQ ID NO: 1175371 - RNA, 19 nt, Artificial Sequence
  Description of Artificial Sequence: Synthetic oligonucleotide
  Antisense strand to SEQ ID NO: 1175370
aaagaaaugacaagcacag

SEQ ID NO: 1175372 - RNA, 19 nt, Artificial Sequence
  Description of Artificial Sequence: Synthetic oligonucleotide
  Sense strand starting at position 3272 of SEQ ID NO: 916676
gggcaugguagucaugguu

SEQ ID NO: 1175373 - RNA, 19 nt, Artificial Sequence
  Description of Artificial Sequence: Synthetic oligonucleotide
  Antisense strand to SEQ ID NO: 1175372
aaccaugacuaccaugccc

SEQ ID NO: 1175374 - RNA, 19 nt, Artificial Sequence
  Description of Artificial Sequence: Synthetic oligonucleotide
  Sense strand starting at position 3320 of SEQ ID NO: 916676
cggcaucugucauuucuca

SEQ ID NO: 1175375 - RNA, 19 nt, Artificial Sequence
  Description of Artificial Sequence: Synthetic oligonucleotide
  Antisense strand to SEQ ID NO: 1175374
ugagaaaugacagaugccg

SEQ ID NO: 1175376 - RNA, 19 nt, Artificial Sequence
  Description of Artificial Sequence: Synthetic oligonucleotide
  Sense strand starting at position 3374 of SEQ ID NO: 916676
gguaaugggaauuguaugu

SEQ ID NO: 1175377 - RNA, 19 nt, Artificial Sequence
  Description of Artificial Sequence: Synthetic oligonucleotide
  Antisense strand to SEQ ID NO: 1175376
acauacaauucccauuacc

SEQ ID NO: 1175378 - RNA, 19 nt, Artificial Sequence
  Description of Artificial Sequence: Synthetic oligonucleotide
  Sense strand starting at position 3378 of SEQ ID NO: 916676
augggaauuguauguuaag

SEQ ID NO: 1175379 - RNA, 19 nt, Artificial Sequence
  Description of Artificial Sequence: Synthetic oligonucleotide
  Antisense strand to SEQ ID NO: 1175378
cuuaacauacaauucccau

SEQ ID NO: 1175380 - RNA, 19 nt, Artificial Sequence
  Description of Artificial Sequence: Synthetic oligonucleotide
  Sense strand starting at position 3379 of SEQ ID NO: 916676
ugggaauuguauguuaagu

SEQ ID NO: 1175381 - RNA, 19 nt, Artificial Sequence
  Description of Artificial Sequence: Synthetic oligonucleotide
  Antisense strand to SEQ ID NO: 1175380
acuuaacauacaauuccca

SEQ ID NO: 1175382 - RNA, 19 nt, Artificial Sequence
  Description of Artificial Sequence: Synthetic oligonucleotide
  Sense strand starting at position 3397 of SEQ ID NO: 916676
uauucccugcccgaguaaa

SEQ ID NO: 1175383 - RNA, 19 nt, Artificial Sequence
  Description of Artificial Sequence: Synthetic oligonucleotide
  Antisense strand to SEQ ID NO: 1175382
uuuacucgggcagggaaua

SEQ ID NO: 1175384 - RNA, 19 nt, Artificial Sequence
  Description of Artificial Sequence: Synthetic oligonucleotide
  Sense strand starting at position 3573 of SEQ ID NO: 916676
ggaacguuucugugaggga

SEQ ID NO: 1175385 - RNA, 19 nt, Artificial Sequence
  Description of Artificial Sequence: Synthetic oligonucleotide
  Antisense strand to SEQ ID NO: 1175384
ucccucacagaaacguucc

SEQ ID NO: 1175386 - RNA, 19 nt, Artificial Sequence
  Description of Artificial Sequence: Synthetic oligonucleotide
  Sense strand starting at position 3693 of SEQ ID NO: 916676
cugagugugcuacacgaaa

SEQ ID NO: 1175387 - RNA, 19 nt, Artificial Sequence
  Description of Artificial Sequence: Synthetic oligonucleotide
  Antisense strand to SEQ ID NO: 1175386
uuucguguagcacacucag

SEQ ID NO: 1175388 - RNA, 19 nt, Artificial Sequence
  Description of Artificial Sequence: Synthetic oligonucleotide
  Sense strand starting at position 3823 of SEQ ID NO: 916676
uuuguuucugagggaagua

SEQ ID NO: 1175389 - RNA, 19 nt, Artificial Sequence
  Description of Artificial Sequence: Synthetic oligonucleotide
  Antisense strand to SEQ ID NO: 1175388
uacuucccucagaaacaaa

SEQ ID NO: 1175390 - RNA, 19 nt, Artificial Sequence
  Description of Artificial Sequence: Synthetic oligonucleotide
  Sense strand starting at position 3824 of SEQ ID NO: 916676
uuguuucugagggaaguau

SEQ ID NO: 1175391 - RNA, 19 nt, Artificial Sequence
  Description of Artificial Sequence: Synthetic oligonucleotide
  Antisense strand to SEQ ID NO: 1175390
auacuucccucagaaacaa

SEQ ID NO: 1175392 - RNA, 19 nt, Artificial Sequence
  Description of Artificial Sequence: Synthetic oligonucleotide
  Sense strand starting at position 3855 of SEQ ID NO: 916676
gcgacuuuacaauggaaag

SEQ ID NO: 1175393 - RNA, 19 nt, Artificial Sequence
  Description of Artificial Sequence: Synthetic oligonucleotide
  Antisense strand to SEQ ID NO: 1175392
cuuuccauuguaaagucgc

SEQ ID NO: 1175394 - RNA, 19 nt, Artificial Sequence
  Description of Artificial Sequence: Synthetic oligonucleotide
  Sense strand starting at position 3856 of SEQ ID NO: 916676
cgacuuuacaauggaaagu

SEQ ID NO: 1175395 - RNA, 19 nt, Artificial Sequence
  Description of Artificial Sequence: Synthetic oligonucleotide
  Antisense strand to SEQ ID NO: 1175394
acuuuccauuguaaagucg

SEQ ID NO: 1175396 - RNA, 19 nt, Artificial Sequence
  Description of Artificial Sequence: Synthetic oligonucleotide
  Sense strand starting at position 3900 of SEQ ID NO: 916676
acuucuauucuagacuguu

SEQ ID NO: 1175397 - RNA, 19 nt, Artificial Sequence
  Description of Artificial Sequence: Synthetic oligonucleotide
  Antisense strand to SEQ ID NO: 1175396
aacagucuagaauagaagu

SEQ ID NO: 1175398 - RNA, 19 nt, Artificial Sequence
  Description of Artificial Sequence: Synthetic oligonucleotide
  Sense strand starting at position 3903 of SEQ ID NO: 916676
ucuauucuagacuguuauu

SEQ ID NO: 1175399 - RNA, 19 nt, Artificial Sequence
  Description of Artificial Sequence: Synthetic oligonucleotide
  Antisense strand to SEQ ID NO: 1175398
aauaacagucuagaauaga

SEQ ID NO: 1175400 - RNA, 19 nt, Artificial Sequence
  Description of Artificial Sequence: Synthetic oligonucleotide
  Sense strand starting at position 3979 of SEQ ID NO: 916676
uuagaugucaacuggagca

SEQ ID NO: 1175401 - RNA, 19 nt, Artificial Sequence
  Description of Artificial Sequence: Synthetic oligonucleotide
  Antisense strand to SEQ ID NO: 1175400
ugcuccaguugacaucuaa

SEQ ID NO: 1175402 - RNA, 19 nt, Artificial Sequence
  Description of Artificial Sequence: Synthetic oligonucleotide
  Sense strand starting at position 185 of SEQ ID NO: 916677
ucaguaagaucuuuacuga

SEQ ID NO: 1175403 - RNA, 19 nt, Artificial Sequence
  Description of Artificial Sequence: Synthetic oligonucleotide
  Antisense strand to SEQ ID NO: 1175402
ucaguaaagaucuuacuga

SEQ ID NO: 1175404 - RNA, 19 nt, Artificial Sequence
  Description of Artificial Sequence: Synthetic oligonucleotide
  Sense strand starting at position 188 of SEQ ID NO: 916677
guaagaucuuuacugaaag

SEQ ID NO: 1175405 - RNA, 19 nt, Artificial Sequence
  Description of Artificial Sequence: Synthetic oligonucleotide
  Antisense strand to SEQ ID NO: 1175404
cuuucaguaaagaucuuac

SEQ ID NO: 1175406 - RNA, 19 nt, Artificial Sequence
  Description of Artificial Sequence: Synthetic oligonucleotide
  Sense strand starting at position 273 of SEQ ID NO: 916677
gaaguagaauaccuaaugu

SEQ ID NO: 1175407 - RNA, 19 nt, Artificial Sequence
  Description of Artificial Sequence: Synthetic oligonucleotide
  Antisense strand to SEQ ID NO: 1175406
acauuagguauucuacuuc

SEQ ID NO: 1175408 - RNA, 19 nt, Artificial Sequence
  Description of Artificial Sequence: Synthetic oligonucleotide
  Sense strand starting at position 290 of SEQ ID NO: 916677
gucaaaugcuacccaaaga

SEQ ID NO: 1175409 - RNA, 19 nt, Artificial Sequence
  Description of Artificial Sequence: Synthetic oligonucleotide
  Antisense strand to SEQ ID NO: 1175408
ucuuuggguagcauuugac

SEQ ID NO: 1175410 - RNA, 19 nt, Artificial Sequence
  Description of Artificial Sequence: Synthetic oligonucleotide
  Sense strand starting at position 368 of SEQ ID NO: 916677
guaauaauucuguacagca

SEQ ID NO: 1175411 - RNA, 19 nt, Artificial Sequence
  Description of Artificial Sequence: Synthetic oligonucleotide
  Antisense strand to SEQ ID NO: 1175410
ugcuguacagaauuauuac

SEQ ID NO: 1175412 - RNA, 19 nt, Artificial Sequence
  Description of Artificial Sequence: Synthetic oligonucleotide
  Sense strand starting at position 465 of SEQ ID NO: 916677
acagacuugcacuaucagu

SEQ ID NO: 1175413 - RNA, 19 nt, Artificial Sequence
  Description of Artificial Sequence: Synthetic oligonucleotide
  Antisense strand to SEQ ID NO: 1175412
acugauagugcaagucugu

SEQ ID NO: 1175414 - RNA, 19 nt, Artificial Sequence
  Description of Artificial Sequence: Synthetic oligonucleotide
  Sense strand starting at position 471 of SEQ ID NO: 916677
uugcacuaucaguagacau

SEQ ID NO: 1175415 - RNA, 19 nt, Artificial Sequence
  Description of Artificial Sequence: Synthetic oligonucleotide
  Antisense strand to SEQ ID NO: 1175414
augucuacugauagugcaa

SEQ ID NO: 1175416 - RNA, 19 nt, Artificial Sequence
  Description of Artificial Sequence: Synthetic oligonucleotide
  Sense strand starting at position 473 of SEQ ID NO: 916677
gcacuaucaguagacauca

SEQ ID NO: 1175417 - RNA, 19 nt, Artificial Sequence
  Description of Artificial Sequence: Synthetic oligonucleotide
  Antisense strand to SEQ ID NO: 1175416
ugaugucuacugauagugc

SEQ ID NO: 1175418 - RNA, 19 nt, Artificial Sequence
  Description of Artificial Sequence: Synthetic oligonucleotide
  Sense strand starting at position 478 of SEQ ID NO: 916677
aucaguagacaucagugua

SEQ ID NO: 1175419 - RNA, 19 nt, Artificial Sequence
  Description of Artificial Sequence: Synthetic oligonucleotide
  Antisense strand to SEQ ID NO: 1175418
uacacugaugucuacugau

SEQ ID NO: 1175420 - RNA, 19 nt, Artificial Sequence
  Description of Artificial Sequence: Synthetic oligonucleotide
  Sense strand starting at position 688 of SEQ ID NO: 916677
ccaaguaugguauaauuau

SEQ ID NO: 1175421 - RNA, 19 nt, Artificial Sequence
  Description of Artificial Sequence: Synthetic oligonucleotide
  Antisense strand to SEQ ID NO: 1175420
auaauuauaccauacuugg

SEQ ID NO: 1175422 - RNA, 19 nt, Artificial Sequence
  Description of Artificial Sequence: Synthetic oligonucleotide
  Sense strand starting at position 730 of SEQ ID NO: 916677
ggcugucuauauuuccaua

SEQ ID NO: 1175423 - RNA, 19 nt, Artificial Sequence
  Description of Artificial Sequence: Synthetic oligonucleotide
  Antisense strand to SEQ ID NO: 1175422
uauggaaauauagacagcc

SEQ ID NO: 1175424 - RNA, 19 nt, Artificial Sequence
  Description of Artificial Sequence: Synthetic oligonucleotide
  Sense strand starting at position 796 of SEQ ID NO: 916677
cgaugauaugacugaauua

SEQ ID NO: 1175425 - RNA, 19 nt, Artificial Sequence
  Description of Artificial Sequence: Synthetic oligonucleotide
  Antisense strand to SEQ ID NO: 1175424
uaauucagucauaucaucg

SEQ ID NO: 1175426 - RNA, 19 nt, Artificial Sequence
  Description of Artificial Sequence: Synthetic oligonucleotide
  Sense strand starting at position 862 of SEQ ID NO: 916677
gauagaaucugaucuaguu

SEQ ID NO: 1175427 - RNA, 19 nt, Artificial Sequence
  Description of Artificial Sequence: Synthetic oligonucleotide
  Antisense strand to SEQ ID NO: 1175426
aacuagaucagauucuauc

SEQ ID NO: 1175428 - RNA, 19 nt, Artificial Sequence
  Description of Artificial Sequence: Synthetic oligonucleotide
  Sense strand starting at position 869 of SEQ ID NO: 916677
ucugaucuaguuuagacuu

SEQ ID NO: 1175429 - RNA, 19 nt, Artificial Sequence
  Description of Artificial Sequence: Synthetic oligonucleotide
  Antisense strand to SEQ ID NO: 1175428
aagucuaaacuagaucaga

SEQ ID NO: 1175430 - RNA, 19 nt, Artificial Sequence
  Description of Artificial Sequence: Synthetic oligonucleotide
  Sense strand starting at position 1135 of SEQ ID NO: 916677
uguuaaacuguguauauga

SEQ ID NO: 1175431 - RNA, 19 nt, Artificial Sequence
  Description of Artificial Sequence: Synthetic oligonucleotide
  Antisense strand to SEQ ID NO: 1175430
ucauauacacaguuuaaca

SEQ ID NO: 1175432 - RNA, 19 nt, Artificial Sequence
  Description of Artificial Sequence: Synthetic oligonucleotide
  Sense strand starting at position 1179 of SEQ ID NO: 916677
gaggacuuaguuugcaaag

SEQ ID NO: 1175433 - RNA, 19 nt, Artificial Sequence
  Description of Artificial Sequence: Synthetic oligonucleotide
  Antisense strand to SEQ ID NO: 1175432
cuuugcaaacuaaguccuc

SEQ ID NO: 1175434 - RNA, 19 nt, Artificial Sequence
  Description of Artificial Sequence: Synthetic oligonucleotide
  Sense strand starting at position 1541 of SEQ ID NO: 916677
uuaacuuacuaaguaguga

SEQ ID NO: 1175435 - RNA, 19 nt, Artificial Sequence
  Description of Artificial Sequence: Synthetic oligonucleotide
  Antisense strand to SEQ ID NO: 1175434
ucacuacuuaguaaguuaa

SEQ ID NO: 1175436 - RNA, 19 nt, Artificial Sequence
  Description of Artificial Sequence: Synthetic oligonucleotide
  Sense strand starting at position 1829 of SEQ ID NO: 916677
uuugaaaucuuagcugaaa

SEQ ID NO: 1175437 - RNA, 19 nt, Artificial Sequence
  Description of Artificial Sequence: Synthetic oligonucleotide
  Antisense strand to SEQ ID NO: 1175436
uuucagcuaagauuucaaa

SEQ ID NO: 1175438 - RNA, 19 nt, Artificial Sequence
  Description of Artificial Sequence: Synthetic oligonucleotide
  Sense strand starting at position 1841 of SEQ ID NO: 916677
gcugaaagaucaucagcca

SEQ ID NO: 1175439 - RNA, 19 nt, Artificial Sequence
  Description of Artificial Sequence: Synthetic oligonucleotide
  Antisense strand to SEQ ID NO: 1175438
uggcugaugaucuuucagc

SEQ ID NO: 1175440 - RNA, 19 nt, Artificial Sequence
  Description of Artificial Sequence: Synthetic oligonucleotide
  Sense strand starting at position 1875 of SEQ ID NO: 916677
gcuaguucucuagaacaua

SEQ ID NO: 1175441 - RNA, 19 nt, Artificial Sequence
  Description of Artificial Sequence: Synthetic oligonucleotide
  Antisense strand to SEQ ID NO: 1175440
uauguucuagagaacuagc

SEQ ID NO: 1175442 - RNA, 19 nt, Artificial Sequence
  Description of Artificial Sequence: Synthetic oligonucleotide
  Sense strand starting at position 2023 of SEQ ID NO: 916677
cacagucuagcagagugau

SEQ ID NO: 1175443 - RNA, 19 nt, Artificial Sequence
  Description of Artificial Sequence: Synthetic oligonucleotide
  Antisense strand to SEQ ID NO: 1175442
aucacucugcuagacugug

SEQ ID NO: 1175444 - RNA, 19 nt, Artificial Sequence
  Description of Artificial Sequence: Synthetic oligonucleotide
  Sense strand starting at position 2033 of SEQ ID NO: 916677
cagagugauuaugcuaaau

SEQ ID NO: 1175445 - RNA, 19 nt, Artificial Sequence
  Description of Artificial Sequence: Synthetic oligonucleotide
  Antisense strand to SEQ ID NO: 1175444
auuuagcauaaucacucug

SEQ ID NO: 1175446 - RNA, 19 nt, Artificial Sequence
  Description of Artificial Sequence: Synthetic oligonucleotide
  Sense strand starting at position 2150 of SEQ ID NO: 916677
uguuuaaagcucuacuuag

SEQ ID NO: 1175447 - RNA, 19 nt, Artificial Sequence
  Description of Artificial Sequence: Synthetic oligonucleotide
  Antisense strand to SEQ ID NO: 1175446
cuaaguagagcuuuaaaca

SEQ ID NO: 1175448 - RNA, 19 nt, Artificial Sequence
  Description of Artificial Sequence: Synthetic oligonucleotide
  Sense strand starting at position 2338 of SEQ ID NO: 916677
cggauauugagaggcaauu

SEQ ID NO: 1175449 - RNA, 19 nt, Artificial Sequence
  Description of Artificial Sequence: Synthetic oligonucleotide
  Antisense strand to SEQ ID NO: 1175448
aauugccucucaauauccg

SEQ ID NO: 1175450 - RNA, 19 nt, Artificial Sequence
  Description of Artificial Sequence: Synthetic oligonucleotide
  Sense strand starting at position 2366 of SEQ ID NO: 916677
ucaguaagacuguauauac

SEQ ID NO: 1175451 - RNA, 19 nt, Artificial Sequence
  Description of Artificial Sequence: Synthetic oligonucleotide
  Antisense strand to SEQ ID NO: 1175450
guauauacagucuuacuga

SEQ ID NO: 1175452 - RNA, 19 nt, Artificial Sequence
  Description of Artificial Sequence: Synthetic oligonucleotide
  Sense strand starting at position 2444 of SEQ ID NO: 916677
augucaugaauacgaauga

SEQ ID NO: 1175453 - RNA, 19 nt, Artificial Sequence
  Description of Artificial Sequence: Synthetic oligonucleotide
  Antisense strand to SEQ ID NO: 1175452
ucauucguauucaugacau

SEQ ID NO: 1175454 - RNA, 19 nt, Artificial Sequence
  Description of Artificial Sequence: Synthetic oligonucleotide
  Sense strand starting at position 2787 of SEQ ID NO: 916677
cguucaaauguggagacuu

SEQ ID NO: 1175455 - RNA, 19 nt, Artificial Sequence
  Description of Artificial Sequence: Synthetic oligonucleotide
  Antisense strand to SEQ ID NO: 1175454
aagucuccacauuugaacg

SEQ ID NO: 1175456 - RNA, 19 nt, Artificial Sequence
  Description of Artificial Sequence: Synthetic oligonucleotide
  Sense strand starting at position 2845 of SEQ ID NO: 916677
uugugaauguaucuaagau

SEQ ID NO: 1175457 - RNA, 19 nt, Artificial Sequence
  Description of Artificial Sequence: Synthetic oligonucleotide
  Antisense strand to SEQ ID NO: 1175456
aucuuagauacauucacaa

SEQ ID NO: 1175458 - RNA, 19 nt, Artificial Sequence
  Description of Artificial Sequence: Synthetic oligonucleotide
  Sense strand starting at position 2907 of SEQ ID NO: 916677
ggcuguaaaggaugaugau

SEQ ID NO: 1175459 - RNA, 19 nt, Artificial Sequence
  Description of Artificial Sequence: Synthetic oligonucleotide
  Antisense strand to SEQ ID NO: 1175458
aucaucauccuuuacagcc

SEQ ID NO: 1175460 - RNA, 19 nt, Artificial Sequence
  Description of Artificial Sequence: Synthetic oligonucleotide
  Sense strand starting at position 2971 of SEQ ID NO: 916677
ccaauuaugcaugaaguuu

SEQ ID NO: 1175461 - RNA, 19 nt, Artificial Sequence
  Description of Artificial Sequence: Synthetic oligonucleotide
  Antisense strand to SEQ ID NO: 1175460
aaacuucaugcauaauugg

SEQ ID NO: 1175462 - RNA, 19 nt, Artificial Sequence
  Description of Artificial Sequence: Synthetic oligonucleotide
  Sense strand starting at position 2977 of SEQ ID NO: 916677
augcaugaaguuuauaaca

SEQ ID NO: 1175463 - RNA, 19 nt, Artificial Sequence
  Description of Artificial Sequence: Synthetic oligonucleotide
  Antisense strand to SEQ ID NO: 1175462
uguuauaaacuucaugcau

SEQ ID NO: 1175464 - RNA, 19 nt, Artificial Sequence
  Description of Artificial Sequence: Synthetic oligonucleotide
  Sense strand starting at position 3054 of SEQ ID NO: 916677
ugauaaauuaaguguguag

SEQ ID NO: 1175465 - RNA, 19 nt, Artificial Sequence
  Description of Artificial Sequence: Synthetic oligonucleotide
  Antisense strand to SEQ ID NO: 1175464
cuacacacuuaauuuauca

SEQ ID NO: 1175466 - RNA, 19 nt, Artificial Sequence
  Description of Artificial Sequence: Synthetic oligonucleotide
  Sense strand starting at position 3058 of SEQ ID NO: 916677
aaauuaaguguguagguaa

SEQ ID NO: 1175467 - RNA, 19 nt, Artificial Sequence
  Description of Artificial Sequence: Synthetic oligonucleotide
  Antisense strand to SEQ ID NO: 1175466
uuaccuacacacuuaauuu

SEQ ID NO: 1175468 - RNA, 19 nt, Artificial Sequence
  Description of Artificial Sequence: Synthetic oligonucleotide
  Sense strand starting at position 3065 of SEQ ID NO: 916677
guguguagguaauuauuua

SEQ ID NO: 1175469 - RNA, 19 nt, Artificial Sequence
  Description of Artificial Sequence: Synthetic oligonucleotide
  Antisense strand to SEQ ID NO: 1175468
uaaauaauuaccuacacac

SEQ ID NO: 1175470 - RNA, 19 nt, Artificial Sequence
  Description of Artificial Sequence: Synthetic oligonucleotide
  Sense strand starting at position 3175 of SEQ ID NO: 916677
uacagagaauuccuguaug

SEQ ID NO: 1175471 - RNA, 19 nt, Artificial Sequence
  Description of Artificial Sequence: Synthetic oligonucleotide
  Antisense strand to SEQ ID NO: 1175470
cauacaggaauucucugua

SEQ ID NO: 1175472 - RNA, 19 nt, Artificial Sequence
  Description of Artificial Sequence: Synthetic oligonucleotide
  Sense strand starting at position 3178 of SEQ ID NO: 916677
agagaauuccuguaugucc

SEQ ID NO: 1175473 - RNA, 19 nt, Artificial Sequence
  Description of Artificial Sequence: Synthetic oligonucleotide
  Antisense strand to SEQ ID NO: 1175472
ggacauacaggaauucucu

SEQ ID NO: 1175474 - RNA, 19 nt, Artificial Sequence
  Description of Artificial Sequence: Synthetic oligonucleotide
  Sense strand starting at position 3530 of SEQ ID NO: 916677
cugggcuaugaauggauaa

SEQ ID NO: 1175475 - RNA, 19 nt, Artificial Sequence
  Description of Artificial Sequence: Synthetic oligonucleotide
  Antisense strand to SEQ ID NO: 1175474
uuauccauucauagcccag

SEQ ID NO: 1175476 - RNA, 19 nt, Artificial Sequence
  Description of Artificial Sequence: Synthetic oligonucleotide
  Sense strand starting at position 3741 of SEQ ID NO: 916677
guaagaaauggcggaaauu

SEQ ID NO: 1175477 - RNA, 19 nt, Artificial Sequence
  Description of Artificial Sequence: Synthetic oligonucleotide
  Antisense strand to SEQ ID NO: 1175476
aauuuccgccauuucuuac

SEQ ID NO: 1175478 - RNA, 19 nt, Artificial Sequence
  Description of Artificial Sequence: Synthetic oligonucleotide
  Sense strand starting at position 3894 of SEQ ID NO: 916677
uuuacacucugguuugaaa

SEQ ID NO: 1175479 - RNA, 19 nt, Artificial Sequence
  Description of Artificial Sequence: Synthetic oligonucleotide
  Antisense strand to SEQ ID NO: 1175478
uuucaaaccagaguguaaa

SEQ ID NO: 1175480 - RNA, 19 nt, Artificial Sequence
  Description of Artificial Sequence: Synthetic oligonucleotide
  Sense strand starting at position 3963 of SEQ ID NO: 916677
auugguagcuccuuuauuu

SEQ ID NO: 1175481 - RNA, 19 nt, Artificial Sequence
  Description of Artificial Sequence: Synthetic oligonucleotide
  Antisense strand to SEQ ID NO: 1175480
aaauaaaggagcuaccaau

SEQ ID NO: 1175482 - RNA, 19 nt, Artificial Sequence
  Description of Artificial Sequence: Synthetic oligonucleotide
  Sense strand starting at position 53 of SEQ ID NO: 916678
agaaacuauugguuauucu

SEQ ID NO: 1175483 - RNA, 19 nt, Artificial Sequence
  Description of Artificial Sequence: Synthetic oligonucleotide
  Antisense strand to SEQ ID NO: 1175482
agaauaaccaauaguuucu

SEQ ID NO: 1175484 - RNA, 19 nt, Artificial Sequence
  Description of Artificial Sequence: Synthetic oligonucleotide
  Sense strand starting at position 137 of SEQ ID NO: 916678
acuucuauugucugaagaa

SEQ ID NO: 1175485 - RNA, 19 nt, Artificial Sequence
  Description of Artificial Sequence: Synthetic oligonucleotide
  Antisense strand to SEQ ID NO: 1175484
uucuucagacaauagaagu

SEQ ID NO: 1175486 - RNA, 19 nt, Artificial Sequence
  Description of Artificial Sequence: Synthetic oligonucleotide
  Sense strand starting at position 294 of SEQ ID NO: 916678
gucacaaagucaguggaaa

SEQ ID NO: 1175487 - RNA, 19 nt, Artificial Sequence
  Description of Artificial Sequence: Synthetic oligonucleotide
  Antisense strand to SEQ ID NO: 1175486
uuuccacugacuuugugac

SEQ ID NO: 1175488 - RNA, 19 nt, Artificial Sequence
  Description of Artificial Sequence: Synthetic oligonucleotide
  Sense strand starting at position 295 of SEQ ID NO: 916678
ucacaaagucaguggaaau

SEQ ID NO: 1175489 - RNA, 19 nt, Artificial Sequence
  Description of Artificial Sequence: Synthetic oligonucleotide
  Antisense strand to SEQ ID NO: 1175488
auuuccacugacuuuguga

SEQ ID NO: 1175490 - RNA, 19 nt, Artificial Sequence
  Description of Artificial Sequence: Synthetic oligonucleotide
  Sense strand starting at position 307 of SEQ ID NO: 916678
uggaaauaaguuggcauca

SEQ ID NO: 1175491 - RNA, 19 nt, Artificial Sequence
  Description of Artificial Sequence: Synthetic oligonucleotide
  Antisense strand to SEQ ID NO: 1175490
ugaugccaacuuauuucca

SEQ ID NO: 1175492 - RNA, 19 nt, Artificial Sequence
  Description of Artificial Sequence: Synthetic oligonucleotide
  Sense strand starting at position 308 of SEQ ID NO: 916678
ggaaauaaguuggcaucau

SEQ ID NO: 1175493 - RNA, 19 nt, Artificial Sequence
  Description of Artificial Sequence: Synthetic oligonucleotide
  Antisense strand to SEQ ID NO: 1175492
augaugccaacuuauuucc

SEQ ID NO: 1175494 - RNA, 19 nt, Artificial Sequence
  Description of Artificial Sequence: Synthetic oligonucleotide
  Sense strand starting at position 312 of SEQ ID NO: 916678
auaaguuggcaucauagau

SEQ ID NO: 1175495 - RNA, 19 nt, Artificial Sequence
  Description of Artificial Sequence: Synthetic oligonucleotide
  Antisense strand to SEQ ID NO: 1175494
aucuaugaugccaacuuau

SEQ ID NO: 1175496 - RNA, 19 nt, Artificial Sequence
  Description of Artificial Sequence: Synthetic oligonucleotide
  Sense strand starting at position 486 of SEQ ID NO: 916678
gggccauguauuugaaguu

SEQ ID NO: 1175497 - RNA, 19 nt, Artificial Sequence
  Description of Artificial Sequence: Synthetic oligonucleotide
  Antisense strand to SEQ ID NO: 1175496
aacuucaaauacauggccc

SEQ ID NO: 1175498 - RNA, 19 nt, Artificial Sequence
  Description of Artificial Sequence: Synthetic oligonucleotide
  Sense strand starting at position 502 of SEQ ID NO: 916678
guuguaugagaggaaguca

SEQ ID NO: 1175499 - RNA, 19 nt, Artificial Sequence
  Description of Artificial Sequence: Synthetic oligonucleotide
  Antisense strand to SEQ ID NO: 1175498
ugacuuccucucauacaac

SEQ ID NO: 1175500 - RNA, 19 nt, Artificial Sequence
  Description of Artificial Sequence: Synthetic oligonucleotide
  Sense strand starting at position 530 of SEQ ID NO: 916678
acuuucuaauggguaaauu

SEQ ID NO: 1175501 - RNA, 19 nt, Artificial Sequence
  Description of Artificial Sequence: Synthetic oligonucleotide
  Antisense strand to SEQ ID NO: 1175500
aauuuacccauuagaaagu

SEQ ID NO: 1175502 - RNA, 19 nt, Artificial Sequence
  Description of Artificial Sequence: Synthetic oligonucleotide
  Sense strand starting at position 748 of SEQ ID NO: 916678
gccaacuaucaaugagaca

SEQ ID NO: 1175503 - RNA, 19 nt, Artificial Sequence
  Description of Artificial Sequence: Synthetic oligonucleotide
  Antisense strand to SEQ ID NO: 1175502
ugucucauugauaguuggc

SEQ ID NO: 1175504 - RNA, 19 nt, Artificial Sequence
  Description of Artificial Sequence: Synthetic oligonucleotide
  Sense strand starting at position 850 of SEQ ID NO: 916678
cucuacugggauugauacu

SEQ ID NO: 1175505 - RNA, 19 nt, Artificial Sequence
  Description of Artificial Sequence: Synthetic oligonucleotide
  Antisense strand to SEQ ID NO: 1175504
aguaucaaucccaguagag

SEQ ID NO: 1175506 - RNA, 19 nt, Artificial Sequence
  Description of Artificial Sequence: Synthetic oligonucleotide
  Sense strand starting at position 920 of SEQ ID NO: 916678
guagguaucagucacuuga

SEQ ID NO: 1175507 - RNA, 19 nt, Artificial Sequence
  Description of Artificial Sequence: Synthetic oligonucleotide
  Antisense strand to SEQ ID NO: 1175506
ucaagugacugauaccuac

SEQ ID NO: 1175508 - RNA, 19 nt, Artificial Sequence
  Description of Artificial Sequence: Synthetic oligonucleotide
  Sense strand starting at position 922 of SEQ ID NO: 916678
agguaucagucacuugaca

SEQ ID NO: 1175509 - RNA, 19 nt, Artificial Sequence
  Description of Artificial Sequence: Synthetic oligonucleotide
  Antisense strand to SEQ ID NO: 1175508
ugucaagugacugauaccu

SEQ ID NO: 1175510 - RNA, 19 nt, Artificial Sequence
  Description of Artificial Sequence: Synthetic oligonucleotide
  Sense strand starting at position 1073 of SEQ ID NO: 916678
gccucauaugaacauguga

SEQ ID NO: 1175511 - RNA, 19 nt, Artificial Sequence
  Description of Artificial Sequence: Synthetic oligonucleotide
  Antisense strand to SEQ ID NO: 1175510
ucacauguucauaugaggc

SEQ ID NO: 1175512 - RNA, 19 nt, Artificial Sequence
  Description of Artificial Sequence: Synthetic oligonucleotide
  Sense strand starting at position 1346 of SEQ ID NO: 916678
guaguuguaggcguucauu

SEQ ID NO: 1175513 - RNA, 19 nt, Artificial Sequence
  Description of Artificial Sequence: Synthetic oligonucleotide
  Antisense strand to SEQ ID NO: 1175512
aaugaacgccuacaacuac

SEQ ID NO: 1175514 - RNA, 19 nt, Artificial Sequence
  Description of Artificial Sequence: Synthetic oligonucleotide
  Sense strand starting at position 1542 of SEQ ID NO: 916678
uuugauuaaagugguggaa

SEQ ID NO: 1175515 - RNA, 19 nt, Artificial Sequence
  Description of Artificial Sequence: Synthetic oligonucleotide
  Antisense strand to SEQ ID NO: 1175514
uuccaccacuuuaaucaaa

SEQ ID NO: 1175516 - RNA, 19 nt, Artificial Sequence
  Description of Artificial Sequence: Synthetic oligonucleotide
  Sense strand starting at position 1672 of SEQ ID NO: 916678
ggguaauaguucuuaauau

SEQ ID NO: 1175517 - RNA, 19 nt, Artificial Sequence
  Description of Artificial Sequence: Synthetic oligonucleotide
  Antisense strand to SEQ ID NO: 1175516
auauuaagaacuauuaccc

SEQ ID NO: 1175518 - RNA, 19 nt, Artificial Sequence
  Description of Artificial Sequence: Synthetic oligonucleotide
  Sense strand starting at position 2100 of SEQ ID NO: 916678
acagaugguugauuaucaa

SEQ ID NO: 1175519 - RNA, 19 nt, Artificial Sequence
  Description of Artificial Sequence: Synthetic oligonucleotide
  Antisense strand to SEQ ID NO: 1175518
uugauaaucaaccaucugu

SEQ ID NO: 1175520 - RNA, 19 nt, Artificial Sequence
  Description of Artificial Sequence: Synthetic oligonucleotide
  Sense strand starting at position 2103 of SEQ ID NO: 916678
gaugguugauuaucaauaa

SEQ ID NO: 1175521 - RNA, 19 nt, Artificial Sequence
  Description of Artificial Sequence: Synthetic oligonucleotide
  Antisense strand to SEQ ID NO: 1175520
uuauugauaaucaaccauc

SEQ ID NO: 1175522 - RNA, 19 nt, Artificial Sequence
  Description of Artificial Sequence: Synthetic oligonucleotide
  Sense strand starting at position 2160 of SEQ ID NO: 916678
uuagauggauucuauuuag

SEQ ID NO: 1175523 - RNA, 19 nt, Artificial Sequence
  Description of Artificial Sequence: Synthetic oligonucleotide
  Antisense strand to SEQ ID NO: 1175522
cuaaauagaauccaucuaa

SEQ ID NO: 1175524 - RNA, 19 nt, Artificial Sequence
  Description of Artificial Sequence: Synthetic oligonucleotide
  Sense strand starting at position 2187 of SEQ ID NO: 916678
aguaaaguccaguaggacu

SEQ ID NO: 1175525 - RNA, 19 nt, Artificial Sequence
  Description of Artificial Sequence: Synthetic oligonucleotide
  Antisense strand to SEQ ID NO: 1175524
aguccuacuggacuuuacu

SEQ ID NO: 1175526 - RNA, 19 nt, Artificial Sequence
  Description of Artificial Sequence: Synthetic oligonucleotide
  Sense strand starting at position 2274 of SEQ ID NO: 916678
gguagaagagguuggauca

SEQ ID NO: 1175527 - RNA, 19 nt, Artificial Sequence
  Description of Artificial Sequence: Synthetic oligonucleotide
  Antisense strand to SEQ ID NO: 1175526
ugauccaaccucuucuacc

SEQ ID NO: 1175528 - RNA, 19 nt, Artificial Sequence
  Description of Artificial Sequence: Synthetic oligonucleotide
  Sense strand starting at position 2545 of SEQ ID NO: 916678
gauggcuggcaaugaaaga

SEQ ID NO: 1175529 - RNA, 19 nt, Artificial Sequence
  Description of Artificial Sequence: Synthetic oligonucleotide
  Antisense strand to SEQ ID NO: 1175528
ucuuucauugccagccauc

SEQ ID NO: 1175530 - RNA, 19 nt, Artificial Sequence
  Description of Artificial Sequence: Synthetic oligonucleotide
  Sense strand starting at position 2631 of SEQ ID NO: 916678
accagaauaugucucugau

SEQ ID NO: 1175531 - RNA, 19 nt, Artificial Sequence
  Description of Artificial Sequence: Synthetic oligonucleotide
  Antisense strand to SEQ ID NO: 1175530
aucagagacauauucuggu

SEQ ID NO: 1175532 - RNA, 19 nt, Artificial Sequence
  Description of Artificial Sequence: Synthetic oligonucleotide
  Sense strand starting at position 2633 of SEQ ID NO: 916678
cagaauaugucucugauag

SEQ ID NO: 1175533 - RNA, 19 nt, Artificial Sequence
  Description of Artificial Sequence: Synthetic oligonucleotide
  Antisense strand to SEQ ID NO: 1175532
cuaucagagacauauucug

SEQ ID NO: 1175534 - RNA, 19 nt, Artificial Sequence
  Description of Artificial Sequence: Synthetic oligonucleotide
  Sense strand starting at position 2634 of SEQ ID NO: 916678
agaauaugucucugauaga

SEQ ID NO: 1175535 - RNA, 19 nt, Artificial Sequence
  Description of Artificial Sequence: Synthetic oligonucleotide
  Antisense strand to SEQ ID NO: 1175534
ucuaucagagacauauucu

SEQ ID NO: 1175536 - RNA, 19 nt, Artificial Sequence
  Description of Artificial Sequence: Synthetic oligonucleotide
  Sense strand starting at position 2921 of SEQ ID NO: 916678
uggucauuggucuagaauc

SEQ ID NO: 1175537 - RNA, 19 nt, Artificial Sequence
  Description of Artificial Sequence: Synthetic oligonucleotide
  Antisense strand to SEQ ID NO: 1175536
gauucuagaccaaugacca

SEQ ID NO: 1175538 - RNA, 19 nt, Artificial Sequence
  Description of Artificial Sequence: Synthetic oligonucleotide
  Sense strand starting at position 2923 of SEQ ID NO: 916678
gucauuggucuagaaucua

SEQ ID NO: 1175539 - RNA, 19 nt, Artificial Sequence
  Description of Artificial Sequence: Synthetic oligonucleotide
  Antisense strand to SEQ ID NO: 1175538
uagauucuagaccaaugac

SEQ ID NO: 1175540 - RNA, 19 nt, Artificial Sequence
  Description of Artificial Sequence: Synthetic oligonucleotide
  Sense strand starting at position 2952 of SEQ ID NO: 916678
cucagauacuuggucucaa

SEQ ID NO: 1175541 - RNA, 19 nt, Artificial Sequence
  Description of Artificial Sequence: Synthetic oligonucleotide
  Antisense strand to SEQ ID NO: 1175540
uugagaccaaguaucugag

SEQ ID NO: 1175542 - RNA, 19 nt, Artificial Sequence
  Description of Artificial Sequence: Synthetic oligonucleotide
  Sense strand starting at position 2953 of SEQ ID NO: 916678
ucagauacuuggucucaaa

SEQ ID NO: 1175543 - RNA, 19 nt, Artificial Sequence
  Description of Artificial Sequence: Synthetic oligonucleotide
  Antisense strand to SEQ ID NO: 1175542
uuugagaccaaguaucuga

SEQ ID NO: 1175544 - RNA, 19 nt, Artificial Sequence
  Description of Artificial Sequence: Synthetic oligonucleotide
  Sense strand starting at position 2968 of SEQ ID NO: 916678
caaauauuggucuaacggu

SEQ ID NO: 1175545 - RNA, 19 nt, Artificial Sequence
  Description of Artificial Sequence: Synthetic oligonucleotide
  Antisense strand to SEQ ID NO: 1175544
accguuagaccaauauuug

SEQ ID NO: 1175546 - RNA, 19 nt, Artificial Sequence
  Description of Artificial Sequence: Synthetic oligonucleotide
  Sense strand starting at position 2992 of SEQ ID NO: 916678
cucagauauuggucuagaa

SEQ ID NO: 1175547 - RNA, 19 nt, Artificial Sequence
  Description of Artificial Sequence: Synthetic oligonucleotide
  Antisense strand to SEQ ID NO: 1175546
uucuagaccaauaucugag

SEQ ID NO: 1175548 - RNA, 19 nt, Artificial Sequence
  Description of Artificial Sequence: Synthetic oligonucleotide
  Sense strand starting at position 3022 of SEQ ID NO: 916678
acucucagauagguuuaau

SEQ ID NO: 1175549 - RNA, 19 nt, Artificial Sequence
  Description of Artificial Sequence: Synthetic oligonucleotide
  Antisense strand to SEQ ID NO: 1175548
auuaaaccuaucugagagu

SEQ ID NO: 1175550 - RNA, 19 nt, Artificial Sequence
  Description of Artificial Sequence: Synthetic oligonucleotide
  Sense strand starting at position 3088 of SEQ ID NO: 916678
acaacaaugcugugagaac

SEQ ID NO: 1175551 - RNA, 19 nt, Artificial Sequence
  Description of Artificial Sequence: Synthetic oligonucleotide
  Antisense strand to SEQ ID NO: 1175550
guucucacagcauuguugu

SEQ ID NO: 1175552 - RNA, 19 nt, Artificial Sequence
  Description of Artificial Sequence: Synthetic oligonucleotide
  Sense strand starting at position 3106 of SEQ ID NO: 916678
caagaaaucuuguuuguga

SEQ ID NO: 1175553 - RNA, 19 nt, Artificial Sequence
  Description of Artificial Sequence: Synthetic oligonucleotide
  Antisense strand to SEQ ID NO: 1175552
ucacaaacaagauuucuug

SEQ ID NO: 1175554 - RNA, 19 nt, Artificial Sequence
  Description of Artificial Sequence: Synthetic oligonucleotide
  Sense strand starting at position 3107 of SEQ ID NO: 916678
aagaaaucuuguuugugac

SEQ ID NO: 1175555 - RNA, 19 nt, Artificial Sequence
  Description of Artificial Sequence: Synthetic oligonucleotide
  Antisense strand to SEQ ID NO: 1175554
gucacaaacaagauuucuu

SEQ ID NO: 1175556 - RNA, 19 nt, Artificial Sequence
  Description of Artificial Sequence: Synthetic oligonucleotide
  Sense strand starting at position 3168 of SEQ ID NO: 916678
auugauuuguugcugugga

SEQ ID NO: 1175557 - RNA, 19 nt, Artificial Sequence
  Description of Artificial Sequence: Synthetic oligonucleotide
  Antisense strand to SEQ ID NO: 1175556
uccacagcaacaaaucaau

SEQ ID NO: 1175558 - RNA, 19 nt, Artificial Sequence
  Description of Artificial Sequence: Synthetic oligonucleotide
  Sense strand starting at position 3903 of SEQ ID NO: 916678
uuuagaguaaguggaucaa

SEQ ID NO: 1175559 - RNA, 19 nt, Artificial Sequence
  Description of Artificial Sequence: Synthetic oligonucleotide
  Antisense strand to SEQ ID NO: 1175558
uugauccacuuacucuaaa

SEQ ID NO: 1175560 - RNA, 19 nt, Artificial Sequence
  Description of Artificial Sequence: Synthetic oligonucleotide
  Sense strand starting at position 3950 of SEQ ID NO: 916678
ucauaaagauaucugugau

SEQ ID NO: 1175561 - RNA, 19 nt, Artificial Sequence
  Description of Artificial Sequence: Synthetic oligonucleotide
  Antisense strand to SEQ ID NO: 1175560
aucacagauaucuuuauga

SEQ ID NO: 1175562 - RNA, 19 nt, Artificial Sequence
  Description of Artificial Sequence: Synthetic oligonucleotide
  Sense strand starting at position 4 of SEQ ID NO: 916679
cugguaauuguguaaucuu

SEQ ID NO: 1175563 - RNA, 19 nt, Artificial Sequence
  Description of Artificial Sequence: Synthetic oligonucleotide
  Antisense strand to SEQ ID NO: 1175562
aagauuacacaauuaccag

SEQ ID NO: 1175564 - RNA, 19 nt, Artificial Sequence
  Description of Artificial Sequence: Synthetic oligonucleotide
  Sense strand starting at position 19 of SEQ ID NO: 916679
ucuuuaucagcagagcaaa

SEQ ID NO: 1175565 - RNA, 19 nt, Artificial Sequence
  Description of Artificial Sequence: Synthetic oligonucleotide
  Antisense strand to SEQ ID NO: 1175564
uuugcucugcugauaaaga

SEQ ID NO: 1175566 - RNA, 19 nt, Artificial Sequence
  Description of Artificial Sequence: Synthetic oligonucleotide
  Sense strand starting at position 93 of SEQ ID NO: 916679
auuacuuagguaugagaca

SEQ ID NO: 1175567 - RNA, 19 nt, Artificial Sequence
  Description of Artificial Sequence: Synthetic oligonucleotide
  Antisense strand to SEQ ID NO: 1175566
ugucucauaccuaaguaau

SEQ ID NO: 1175568 - RNA, 19 nt, Artificial Sequence
  Description of Artificial Sequence: Synthetic oligonucleotide
  Sense strand starting at position 170 of SEQ ID NO: 916679
agguucuaugauuguacca

SEQ ID NO: 1175569 - RNA, 19 nt, Artificial Sequence
  Description of Artificial Sequence: Synthetic oligonucleotide
  Antisense strand to SEQ ID NO: 1175568
ugguacaaucauagaaccu

SEQ ID NO: 1175570 - RNA, 19 nt, Artificial Sequence
  Description of Artificial Sequence: Synthetic oligonucleotide
  Sense strand starting at position 258 of SEQ ID NO: 916679
agaugauaacccugaguua

SEQ ID NO: 1175571 - RNA, 19 nt, Artificial Sequence
  Description of Artificial Sequence: Synthetic oligonucleotide
  Antisense strand to SEQ ID NO: 1175570
uaacucaggguuaucaucu

SEQ ID NO: 1175572 - RNA, 19 nt, Artificial Sequence
  Description of Artificial Sequence: Synthetic oligonucleotide
  Sense strand starting at position 261 of SEQ ID NO: 916679
ugauaacccugaguuaaga

SEQ ID NO: 1175573 - RNA, 19 nt, Artificial Sequence
  Description of Artificial Sequence: Synthetic oligonucleotide
  Antisense strand to SEQ ID NO: 1175572
ucuuaacucaggguuauca

SEQ ID NO: 1175574 - RNA, 19 nt, Artificial Sequence
  Description of Artificial Sequence: Synthetic oligonucleotide
  Sense strand starting at position 276 of SEQ ID NO: 916679
aagaauaacccguggaauu

SEQ ID NO: 1175575 - RNA, 19 nt, Artificial Sequence
  Description of Artificial Sequence: Synthetic oligonucleotide
  Antisense strand to SEQ ID NO: 1175574
aauuccacggguuauucuu

SEQ ID NO: 1175576 - RNA, 19 nt, Artificial Sequence
  Description of Artificial Sequence: Synthetic oligonucleotide
  Sense strand starting at position 286 of SEQ ID NO: 916679
cguggaauuucugauuugu

SEQ ID NO: 1175577 - RNA, 19 nt, Artificial Sequence
  Description of Artificial Sequence: Synthetic oligonucleotide
  Antisense strand to SEQ ID NO: 1175576
acaaaucagaaauuccacg

SEQ ID NO: 1175578 - RNA, 19 nt, Artificial Sequence
  Description of Artificial Sequence: Synthetic oligonucleotide
  Sense strand starting at position 518 of SEQ ID NO: 916679
augugcaacuaauuagaaa

SEQ ID NO: 1175579 - RNA, 19 nt, Artificial Sequence
  Description of Artificial Sequence: Synthetic oligonucleotide
  Antisense strand to SEQ ID NO: 1175578
uuucuaauuaguugcacau

SEQ ID NO: 1175580 - RNA, 19 nt, Artificial Sequence
  Description of Artificial Sequence: Synthetic oligonucleotide
  Sense strand starting at position 613 of SEQ ID NO: 916679
gguagauguggugaaguua

SEQ ID NO: 1175581 - RNA, 19 nt, Artificial Sequence
  Description of Artificial Sequence: Synthetic oligonucleotide
  Antisense strand to SEQ ID NO: 1175580
uaacuucaccacaucuacc

SEQ ID NO: 1175582 - RNA, 19 nt, Artificial Sequence
  Description of Artificial Sequence: Synthetic oligonucleotide
  Sense strand starting at position 917 of SEQ ID NO: 916679
gggugugucaauuagcaca

SEQ ID NO: 1175583 - RNA, 19 nt, Artificial Sequence
  Description of Artificial Sequence: Synthetic oligonucleotide
  Antisense strand to SEQ ID NO: 1175582
ugugcuaauugacacaccc

SEQ ID NO: 1175584 - RNA, 19 nt, Artificial Sequence
  Description of Artificial Sequence: Synthetic oligonucleotide
  Sense strand starting at position 1264 of SEQ ID NO: 916679
uggcaucuacaucaguaua

SEQ ID NO: 1175585 - RNA, 19 nt, Artificial Sequence
  Description of Artificial Sequence: Synthetic oligonucleotide
  Antisense strand to SEQ ID NO: 1175584
uauacugauguagaugcca

SEQ ID NO: 1175586 - RNA, 19 nt, Artificial Sequence
  Description of Artificial Sequence: Synthetic oligonucleotide
  Sense strand starting at position 1266 of SEQ ID NO: 916679
gcaucuacaucaguauaug

SEQ ID NO: 1175587 - RNA, 19 nt, Artificial Sequence
  Description of Artificial Sequence: Synthetic oligonucleotide
  Antisense strand to SEQ ID NO: 1175586
cauauacugauguagaugc

SEQ ID NO: 1175588 - RNA, 19 nt, Artificial Sequence
  Description of Artificial Sequence: Synthetic oligonucleotide
  Sense strand starting at position 1359 of SEQ ID NO: 916679
ucaauauaugccugguaag

SEQ ID NO: 1175589 - RNA, 19 nt, Artificial Sequence
  Description of Artificial Sequence: Synthetic oligonucleotide
  Antisense strand to SEQ ID NO: 1175588
cuuaccaggcauauauuga

SEQ ID NO: 1175590 - RNA, 19 nt, Artificial Sequence
  Description of Artificial Sequence: Synthetic oligonucleotide
  Sense strand starting at position 1414 of SEQ ID NO: 916679
cugauugucuaacugaaua

SEQ ID NO: 1175591 - RNA, 19 nt, Artificial Sequence
  Description of Artificial Sequence: Synthetic oligonucleotide
  Antisense strand to SEQ ID NO: 1175590
uauucaguuagacaaucag

SEQ ID NO: 1175592 - RNA, 19 nt, Artificial Sequence
  Description of Artificial Sequence: Synthetic oligonucleotide
  Sense strand starting at position 1503 of SEQ ID NO: 916679
ugcuaaauugggcaguaga

SEQ ID NO: 1175593 - RNA, 19 nt, Artificial Sequence
  Description of Artificial Sequence: Synthetic oligonucleotide
  Antisense strand to SEQ ID NO: 1175592
ucuacugcccaauuuagca

SEQ ID NO: 1175594 - RNA, 19 nt, Artificial Sequence
  Description of Artificial Sequence: Synthetic oligonucleotide
  Sense strand starting at position 1644 of SEQ ID NO: 916679
auaaaucagaggugcaguu

SEQ ID NO: 1175595 - RNA, 19 nt, Artificial Sequence
  Description of Artificial Sequence: Synthetic oligonucleotide
  Antisense strand to SEQ ID NO: 1175594
aacugcaccucugauuuau

SEQ ID NO: 1175596 - RNA, 19 nt, Artificial Sequence
  Description of Artificial Sequence: Synthetic oligonucleotide
  Sense strand starting at position 1675 of SEQ ID NO: 916679
ggaaucucucaaggccuau

SEQ ID NO: 1175597 - RNA, 19 nt, Artificial Sequence
  Description of Artificial Sequence: Synthetic oligonucleotide
  Antisense strand to SEQ ID NO: 1175596
auaggccuugagagauucc

SEQ ID NO: 1175598 - RNA, 19 nt, Artificial Sequence
  Description of Artificial Sequence: Synthetic oligonucleotide
  Sense strand starting at position 1687 of SEQ ID NO: 916679
ggccuauagagauguauug

SEQ ID NO: 1175599 - RNA, 19 nt, Artificial Sequence
  Description of Artificial Sequence: Synthetic oligonucleotide
  Antisense strand to SEQ ID NO: 1175598
caauacaucucuauaggcc

SEQ ID NO: 1175600 - RNA, 19 nt, Artificial Sequence
  Description of Artificial Sequence: Synthetic oligonucleotide
  Sense strand starting at position 1771 of SEQ ID NO: 916679
agcuaacaauguguuuaau

SEQ ID NO: 1175601 - RNA, 19 nt, Artificial Sequence
  Description of Artificial Sequence: Synthetic oligonucleotide
  Antisense strand to SEQ ID NO: 1175600
auuaaacacauuguuagcu

SEQ ID NO: 1175602 - RNA, 19 nt, Artificial Sequence
  Description of Artificial Sequence: Synthetic oligonucleotide
  Sense strand starting at position 1783 of SEQ ID NO: 916679
guuuaauacuuagcagaug

SEQ ID NO: 1175603 - RNA, 19 nt, Artificial Sequence
  Description of Artificial Sequence: Synthetic oligonucleotide
  Antisense strand to SEQ ID NO: 1175602
caucugcuaaguauuaaac

SEQ ID NO: 1175604 - RNA, 19 nt, Artificial Sequence
  Description of Artificial Sequence: Synthetic oligonucleotide
  Sense strand starting at position 1995 of SEQ ID NO: 916679
ccuucuaaacuuugugaug

SEQ ID NO: 1175605 - RNA, 19 nt, Artificial Sequence
  Description of Artificial Sequence: Synthetic oligonucleotide
  Antisense strand to SEQ ID NO: 1175604
caucacaaaguuuagaagg

SEQ ID NO: 1175606 - RNA, 19 nt, Artificial Sequence
  Description of Artificial Sequence: Synthetic oligonucleotide
  Sense strand starting at position 2240 of SEQ ID NO: 916679
cugucauucgagcaauaua

SEQ ID NO: 1175607 - RNA, 19 nt, Artificial Sequence
  Description of Artificial Sequence: Synthetic oligonucleotide
  Antisense strand to SEQ ID NO: 1175606
uauauugcucgaaugacag

SEQ ID NO: 1175608 - RNA, 19 nt, Artificial Sequence
  Description of Artificial Sequence: Synthetic oligonucleotide
  Sense strand starting at position 2259 of SEQ ID NO: 916679
cuguauacucaauauguag

SEQ ID NO: 1175609 - RNA, 19 nt, Artificial Sequence
  Description of Artificial Sequence: Synthetic oligonucleotide
  Antisense strand to SEQ ID NO: 1175608
cuacauauugaguauacag

SEQ ID NO: 1175610 - RNA, 19 nt, Artificial Sequence
  Description of Artificial Sequence: Synthetic oligonucleotide
  Sense strand starting at position 2816 of SEQ ID NO: 916679
uuauucuugcagggaugua

SEQ ID NO: 1175611 - RNA, 19 nt, Artificial Sequence
  Description of Artificial Sequence: Synthetic oligonucleotide
  Antisense strand to SEQ ID NO: 1175610
uacaucccugcaagaauaa

SEQ ID NO: 1175612 - RNA, 19 nt, Artificial Sequence
  Description of Artificial Sequence: Synthetic oligonucleotide
  Sense strand starting at position 2857 of SEQ ID NO: 916679
caauauauguuggcaugga

SEQ ID NO: 1175613 - RNA, 19 nt, Artificial Sequence
  Description of Artificial Sequence: Synthetic oligonucleotide
  Antisense strand to SEQ ID NO: 1175612
uccaugccaacauauauug

SEQ ID NO: 1175614 - RNA, 19 nt, Artificial Sequence
  Description of Artificial Sequence: Synthetic oligonucleotide
  Sense strand starting at position 3116 of SEQ ID NO: 916679
ccaucaacccagugguuaa

SEQ ID NO: 1175615 - RNA, 19 nt, Artificial Sequence
  Description of Artificial Sequence: Synthetic oligonucleotide
  Antisense strand to SEQ ID NO: 1175614
uuaaccacuggguugaugg

SEQ ID NO: 1175616 - RNA, 19 nt, Artificial Sequence
  Description of Artificial Sequence: Synthetic oligonucleotide
  Sense strand starting at position 3385 of SEQ ID NO: 916679
uggguaaccuuucucugaa

SEQ ID NO: 1175617 - RNA, 19 nt, Artificial Sequence
  Description of Artificial Sequence: Synthetic oligonucleotide
  Antisense strand to SEQ ID NO: 1175616
uucagagaaagguuaccca

SEQ ID NO: 1175618 - RNA, 19 nt, Artificial Sequence
  Description of Artificial Sequence: Synthetic oligonucleotide
  Sense strand starting at position 3386 of SEQ ID NO: 916679
ggguaaccuuucucugaag

SEQ ID NO: 1175619 - RNA, 19 nt, Artificial Sequence
  Description of Artificial Sequence: Synthetic oligonucleotide
  Antisense strand to SEQ ID NO: 1175618
cuucagagaaagguuaccc

SEQ ID NO: 1175620 - RNA, 19 nt, Artificial Sequence
  Description of Artificial Sequence: Synthetic oligonucleotide
  Sense strand starting at position 3387 of SEQ ID NO: 916679
gguaaccuuucucugaaga

SEQ ID NO: 1175621 - RNA, 19 nt, Artificial Sequence
  Description of Artificial Sequence: Synthetic oligonucleotide
  Antisense strand to SEQ ID NO: 1175620
ucuucagagaaagguuacc

SEQ ID NO: 1175622 - RNA, 19 nt, Artificial Sequence
  Description of Artificial Sequence: Synthetic oligonucleotide
  Sense strand starting at position 3388 of SEQ ID NO: 916679
guaaccuuucucugaagau

SEQ ID NO: 1175623 - RNA, 19 nt, Artificial Sequence
  Description of Artificial Sequence: Synthetic oligonucleotide
  Antisense strand to SEQ ID NO: 1175622
aucuucagagaaagguuac

SEQ ID NO: 1175624 - RNA, 19 nt, Artificial Sequence
  Description of Artificial Sequence: Synthetic oligonucleotide
  Sense strand starting at position 3397 of SEQ ID NO: 916679
cucugaagaucauugucau

SEQ ID NO: 1175625 - RNA, 19 nt, Artificial Sequence
  Description of Artificial Sequence: Synthetic oligonucleotide
  Antisense strand to SEQ ID NO: 1175624
augacaaugaucuucagag

SEQ ID NO: 1175626 - RNA, 19 nt, Artificial Sequence
  Description of Artificial Sequence: Synthetic oligonucleotide
  Sense strand starting at position 3398 of SEQ ID NO: 916679
ucugaagaucauugucaua

SEQ ID NO: 1175627 - RNA, 19 nt, Artificial Sequence
  Description of Artificial Sequence: Synthetic oligonucleotide
  Antisense strand to SEQ ID NO: 1175626
uaugacaaugaucuucaga

SEQ ID NO: 1175628 - RNA, 19 nt, Artificial Sequence
  Description of Artificial Sequence: Synthetic oligonucleotide
  Sense strand starting at position 3400 of SEQ ID NO: 916679
ugaagaucauugucauaag

SEQ ID NO: 1175629 - RNA, 19 nt, Artificial Sequence
  Description of Artificial Sequence: Synthetic oligonucleotide
  Antisense strand to SEQ ID NO: 1175628
cuuaugacaaugaucuuca

SEQ ID NO: 1175630 - RNA, 19 nt, Artificial Sequence
  Description of Artificial Sequence: Synthetic oligonucleotide
  Sense strand starting at position 3527 of SEQ ID NO: 916679
cucucagugccagaauuaa

SEQ ID NO: 1175631 - RNA, 19 nt, Artificial Sequence
  Description of Artificial Sequence: Synthetic oligonucleotide
  Antisense strand to SEQ ID NO: 1175630
uuaauucuggcacugagag

SEQ ID NO: 1175632 - RNA, 19 nt, Artificial Sequence
  Description of Artificial Sequence: Synthetic oligonucleotide
  Sense strand starting at position 3618 of SEQ ID NO: 916679
uuuguuuacccauaugauu

SEQ ID NO: 1175633 - RNA, 19 nt, Artificial Sequence
  Description of Artificial Sequence: Synthetic oligonucleotide
  Antisense strand to SEQ ID NO: 1175632
aaucauauggguaaacaaa

SEQ ID NO: 1175634 - RNA, 19 nt, Artificial Sequence
  Description of Artificial Sequence: Synthetic oligonucleotide
  Sense strand starting at position 3662 of SEQ ID NO: 916679
cagauugauuuggaauugu

SEQ ID NO: 1175635 - RNA, 19 nt, Artificial Sequence
  Description of Artificial Sequence: Synthetic oligonucleotide
  Antisense strand to SEQ ID NO: 1175634
acaauuccaaaucaaucug

SEQ ID NO: 1175636 - RNA, 19 nt, Artificial Sequence
  Description of Artificial Sequence: Synthetic oligonucleotide
  Sense strand starting at position 3801 of SEQ ID NO: 916679
uauauagggucagugcaau

SEQ ID NO: 1175637 - RNA, 19 nt, Artificial Sequence
  Description of Artificial Sequence: Synthetic oligonucleotide
  Antisense strand to SEQ ID NO: 1175636
auugcacugacccuauaua

SEQ ID NO: 1175638 - RNA, 19 nt, Artificial Sequence
  Description of Artificial Sequence: Synthetic oligonucleotide
  Sense strand starting at position 3811 of SEQ ID NO: 916679
cagugcaaugagcagaauu

SEQ ID NO: 1175639 - RNA, 19 nt, Artificial Sequence
  Description of Artificial Sequence: Synthetic oligonucleotide
  Antisense strand to SEQ ID NO: 1175638
aauucugcucauugcacug

SEQ ID NO: 1175640 - RNA, 19 nt, Artificial Sequence
  Description of Artificial Sequence: Synthetic oligonucleotide
  Sense strand starting at position 3819 of SEQ ID NO: 916679
ugagcagaauugcucagaa

SEQ ID NO: 1175641 - RNA, 19 nt, Artificial Sequence
  Description of Artificial Sequence: Synthetic oligonucleotide
  Antisense strand to SEQ ID NO: 1175640
uucugagcaauucugcuca

SEQ ID NO: 1175642 - RNA, 19 nt, Artificial Sequence
  Description of Artificial Sequence: Synthetic oligonucleotide
  Sense strand starting at position 147 of SEQ ID NO: 916680
uuugaaaccuagucagaga

SEQ ID NO: 1175643 - RNA, 19 nt, Artificial Sequence
  Description of Artificial Sequence: Synthetic oligonucleotide
  Antisense strand to SEQ ID NO: 1175642
ucucugacuagguuucaaa

SEQ ID NO: 1175644 - RNA, 19 nt, Artificial Sequence
  Description of Artificial Sequence: Synthetic oligonucleotide
  Sense strand starting at position 206 of SEQ ID NO: 916680
aucugauuggcuuaauuau

SEQ ID NO: 1175645 - RNA, 19 nt, Artificial Sequence
  Description of Artificial Sequence: Synthetic oligonucleotide
  Antisense strand to SEQ ID NO: 1175644
auaauuaagccaaucagau

SEQ ID NO: 1175646 - RNA, 19 nt, Artificial Sequence
  Description of Artificial Sequence: Synthetic oligonucleotide
  Sense strand starting at position 230 of SEQ ID NO: 916680
ugcuuaaauuuagccggaa

SEQ ID NO: 1175647 - RNA, 19 nt, Artificial Sequence
  Description of Artificial Sequence: Synthetic oligonucleotide
  Antisense strand to SEQ ID NO: 1175646
uuccggcuaaauuuaagca

SEQ ID NO: 1175648 - RNA, 19 nt, Artificial Sequence
  Description of Artificial Sequence: Synthetic oligonucleotide
  Sense strand starting at position 421 of SEQ ID NO: 916680
cagauaugagagugcuaca

SEQ ID NO: 1175649 - RNA, 19 nt, Artificial Sequence
  Description of Artificial Sequence: Synthetic oligonucleotide
  Antisense strand to SEQ ID NO: 1175648
uguagcacucucauaucug

SEQ ID NO: 1175650 - RNA, 19 nt, Artificial Sequence
  Description of Artificial Sequence: Synthetic oligonucleotide
  Sense strand starting at position 495 of SEQ ID NO: 916680
ggaauucggcccuacuaga

SEQ ID NO: 1175651 - RNA, 19 nt, Artificial Sequence
  Description of Artificial Sequence: Synthetic oligonucleotide
  Antisense strand to SEQ ID NO: 1175650
ucuaguagggccgaauucc

SEQ ID NO: 1175652 - RNA, 19 nt, Artificial Sequence
  Description of Artificial Sequence: Synthetic oligonucleotide
  Sense strand starting at position 502 of SEQ ID NO: 916680
ggcccuacuagagguaaga

SEQ ID NO: 1175653 - RNA, 19 nt, Artificial Sequence
  Description of Artificial Sequence: Synthetic oligonucleotide
  Antisense strand to SEQ ID NO: 1175652
ucuuaccucuaguagggcc

SEQ ID NO: 1175654 - RNA, 19 nt, Artificial Sequence
  Description of Artificial Sequence: Synthetic oligonucleotide
  Sense strand starting at position 537 of SEQ ID NO: 916680
uagugaguuucuucugaaa

SEQ ID NO: 1175655 - RNA, 19 nt, Artificial Sequence
  Description of Artificial Sequence: Synthetic oligonucleotide
  Antisense strand to SEQ ID NO: 1175654
uuucagaagaaacucacua

SEQ ID NO: 1175656 - RNA, 19 nt, Artificial Sequence
  Description of Artificial Sequence: Synthetic oligonucleotide
  Sense strand starting at position 619 of SEQ ID NO: 916680
gagaaauccuagccauugu

SEQ ID NO: 1175657 - RNA, 19 nt, Artificial Sequence
  Description of Artificial Sequence: Synthetic oligonucleotide
  Antisense strand to SEQ ID NO: 1175656
acaauggcuaggauuucuc

SEQ ID NO: 1175658 - RNA, 19 nt, Artificial Sequence
  Description of Artificial Sequence: Synthetic oligonucleotide
  Sense strand starting at position 691 of SEQ ID NO: 916680
guccucgggaaauaugauu

SEQ ID NO: 1175659 - RNA, 19 nt, Artificial Sequence
  Description of Artificial Sequence: Synthetic oligonucleotide
  Antisense strand to SEQ ID NO: 1175658
aaucauauuucccgaggac

SEQ ID NO: 1175660 - RNA, 19 nt, Artificial Sequence
  Description of Artificial Sequence: Synthetic oligonucleotide
  Sense strand starting at position 696 of SEQ ID NO: 916680
cgggaaauaugauuaucac

SEQ ID NO: 1175661 - RNA, 19 nt, Artificial Sequence
  Description of Artificial Sequence: Synthetic oligonucleotide
  Antisense strand to SEQ ID NO: 1175660
gugauaaucauauuucccg

SEQ ID NO: 1175662 - RNA, 19 nt, Artificial Sequence
  Description of Artificial Sequence: Synthetic oligonucleotide
  Sense strand starting at position 944 of SEQ ID NO: 916680
ggcaccuaacgguaaucaa

SEQ ID NO: 1175663 - RNA, 19 nt, Artificial Sequence
  Description of Artificial Sequence: Synthetic oligonucleotide
  Antisense strand to SEQ ID NO: 1175662
uugauuaccguuaggugcc

SEQ ID NO: 1175664 - RNA, 19 nt, Artificial Sequence
  Description of Artificial Sequence: Synthetic oligonucleotide
  Sense strand starting at position 1596 of SEQ ID NO: 916680
gugagaaguaucugggaga

SEQ ID NO: 1175665 - RNA, 19 nt, Artificial Sequence
  Description of Artificial Sequence: Synthetic oligonucleotide
  Antisense strand to SEQ ID NO: 1175664
ucucccagauacuucucac

SEQ ID NO: 1175666 - RNA, 19 nt, Artificial Sequence
  Description of Artificial Sequence: Synthetic oligonucleotide
  Sense strand starting at position 1611 of SEQ ID NO: 916680
gagagaaguucuccaccca

SEQ ID NO: 1175667 - RNA, 19 nt, Artificial Sequence
  Description of Artificial Sequence: Synthetic oligonucleotide
  Antisense strand to SEQ ID NO: 1175666
uggguggagaacuucucuc

SEQ ID NO: 1175668 - RNA, 19 nt, Artificial Sequence
  Description of Artificial Sequence: Synthetic oligonucleotide
  Sense strand starting at position 1661 of SEQ ID NO: 916680
aggcuaacccugggaguua

SEQ ID NO: 1175669 - RNA, 19 nt, Artificial Sequence
  Description of Artificial Sequence: Synthetic oligonucleotide
  Antisense strand to SEQ ID NO: 1175668
uaacucccaggguuagccu

SEQ ID NO: 1175670 - RNA, 19 nt, Artificial Sequence
  Description of Artificial Sequence: Synthetic oligonucleotide
  Sense strand starting at position 1763 of SEQ ID NO: 916680
ccgugucucguuucacuua

SEQ ID NO: 1175671 - RNA, 19 nt, Artificial Sequence
  Description of Artificial Sequence: Synthetic oligonucleotide
  Antisense strand to SEQ ID NO: 1175670
uaagugaaacgagacacgg

SEQ ID NO: 1175672 - RNA, 19 nt, Artificial Sequence
  Description of Artificial Sequence: Synthetic oligonucleotide
  Sense strand starting at position 2398 of SEQ ID NO: 916680
cggucuucugugcuuguca

SEQ ID NO: 1175673 - RNA, 19 nt, Artificial Sequence
  Description of Artificial Sequence: Synthetic oligonucleotide
  Antisense strand to SEQ ID NO: 1175672
ugacaagcacagaagaccg

SEQ ID NO: 1175674 - RNA, 19 nt, Artificial Sequence
  Description of Artificial Sequence: Synthetic oligonucleotide
  Sense strand starting at position 2497 of SEQ ID NO: 916680
cggcaucugucauuucuca

SEQ ID NO: 1175675 - RNA, 19 nt, Artificial Sequence
  Description of Artificial Sequence: Synthetic oligonucleotide
  Antisense strand to SEQ ID NO: 1175674
ugagaaaugacagaugccg

SEQ ID NO: 1175676 - RNA, 19 nt, Artificial Sequence
  Description of Artificial Sequence: Synthetic oligonucleotide
  Sense strand starting at position 2551 of SEQ ID NO: 916680
gguaaugggaauuguaugu

SEQ ID NO: 1175677 - RNA, 19 nt, Artificial Sequence
  Description of Artificial Sequence: Synthetic oligonucleotide
  Antisense strand to SEQ ID NO: 1175676
acauacaauucccauuacc

SEQ ID NO: 1175678 - RNA, 19 nt, Artificial Sequence
  Description of Artificial Sequence: Synthetic oligonucleotide
  Sense strand starting at position 2555 of SEQ ID NO: 916680
augggaauuguauguuaag

SEQ ID NO: 1175679 - RNA, 19 nt, Artificial Sequence
  Description of Artificial Sequence: Synthetic oligonucleotide
  Antisense strand to SEQ ID NO: 1175678
cuuaacauacaauucccau

SEQ ID NO: 1175680 - RNA, 19 nt, Artificial Sequence
  Description of Artificial Sequence: Synthetic oligonucleotide
  Sense strand starting at position 2750 of SEQ ID NO: 916680
ggaacguuucugugaggga

SEQ ID NO: 1175681 - RNA, 19 nt, Artificial Sequence
  Description of Artificial Sequence: Synthetic oligonucleotide
  Antisense strand to SEQ ID NO: 1175680
ucccucacagaaacguucc

SEQ ID NO: 1175682 - RNA, 19 nt, Artificial Sequence
  Description of Artificial Sequence: Synthetic oligonucleotide
  Sense strand starting at position 2870 of SEQ ID NO: 916680
cugagugugcuacacgaaa

SEQ ID NO: 1175683 - RNA, 19 nt, Artificial Sequence
  Description of Artificial Sequence: Synthetic oligonucleotide
  Antisense strand to SEQ ID NO: 1175682
uuucguguagcacacucag

SEQ ID NO: 1175684 - RNA, 19 nt, Artificial Sequence
  Description of Artificial Sequence: Synthetic oligonucleotide
  Sense strand starting at position 3000 of SEQ ID NO: 916680
uuuguuucugagggaagua

SEQ ID NO: 1175685 - RNA, 19 nt, Artificial Sequence
  Description of Artificial Sequence: Synthetic oligonucleotide
  Antisense strand to SEQ ID NO: 1175684
uacuucccucagaaacaaa

SEQ ID NO: 1175686 - RNA, 19 nt, Artificial Sequence
  Description of Artificial Sequence: Synthetic oligonucleotide
  Sense strand starting at position 3001 of SEQ ID NO: 916680
uuguuucugagggaaguau

SEQ ID NO: 1175687 - RNA, 19 nt, Artificial Sequence
  Description of Artificial Sequence: Synthetic oligonucleotide
  Antisense strand to SEQ ID NO: 1175686
auacuucccucagaaacaa

SEQ ID NO: 1175688 - RNA, 19 nt, Artificial Sequence
  Description of Artificial Sequence: Synthetic oligonucleotide
  Sense strand starting at position 3032 of SEQ ID NO: 916680
gcgacuuuacaauggaaag

SEQ ID NO: 1175689 - RNA, 19 nt, Artificial Sequence
  Description of Artificial Sequence: Synthetic oligonucleotide
  Antisense strand to SEQ ID NO: 1175688
cuuuccauuguaaagucgc

SEQ ID NO: 1175690 - RNA, 19 nt, Artificial Sequence
  Description of Artificial Sequence: Synthetic oligonucleotide
  Sense strand starting at position 3033 of SEQ ID NO: 916680
cgacuuuacaauggaaagu

SEQ ID NO: 1175691 - RNA, 19 nt, Artificial Sequence
  Description of Artificial Sequence: Synthetic oligonucleotide
  Antisense strand to SEQ ID NO: 1175690
acuuuccauuguaaagucg

SEQ ID NO: 1175692 - RNA, 19 nt, Artificial Sequence
  Description of Artificial Sequence: Synthetic oligonucleotide
  Sense strand starting at position 3077 of SEQ ID NO: 916680
acuucuauucuagacuguu

SEQ ID NO: 1175693 - RNA, 19 nt, Artificial Sequence
  Description of Artificial Sequence: Synthetic oligonucleotide
  Antisense strand to SEQ ID NO: 1175692
aacagucuagaauagaagu

SEQ ID NO: 1175694 - RNA, 19 nt, Artificial Sequence
  Description of Artificial Sequence: Synthetic oligonucleotide
  Sense strand starting at position 3156 of SEQ ID NO: 916680
uuagaugucaacuggagca

SEQ ID NO: 1175695 - RNA, 19 nt, Artificial Sequence
  Description of Artificial Sequence: Synthetic oligonucleotide
  Antisense strand to SEQ ID NO: 1175694
ugcuccaguugacaucuaa

SEQ ID NO: 1175696 - RNA, 19 nt, Artificial Sequence
  Description of Artificial Sequence: Synthetic oligonucleotide
  Sense strand starting at position 3186 of SEQ ID NO: 916680
acauaaugugcauacagau

SEQ ID NO: 1175697 - RNA, 19 nt, Artificial Sequence
  Description of Artificial Sequence: Synthetic oligonucleotide
  Antisense strand to SEQ ID NO: 1175696
aucuguaugcacauuaugu

SEQ ID NO: 1175698 - RNA, 19 nt, Artificial Sequence
  Description of Artificial Sequence: Synthetic oligonucleotide
  Sense strand starting at position 3199 of SEQ ID NO: 916680
acagaucauccauggaucu

SEQ ID NO: 1175699 - RNA, 19 nt, Artificial Sequence
  Description of Artificial Sequence: Synthetic oligonucleotide
  Antisense strand to SEQ ID NO: 1175698
agauccauggaugaucugu

SEQ ID NO: 1175700 - RNA, 19 nt, Artificial Sequence
  Description of Artificial Sequence: Synthetic oligonucleotide
  Sense strand starting at position 3341 of SEQ ID NO: 916680
uuugauguggcuuaaauac

SEQ ID NO: 1175701 - RNA, 19 nt, Artificial Sequence
  Description of Artificial Sequence: Synthetic oligonucleotide
  Antisense strand to SEQ ID NO: 1175700
guauuuaagccacaucaaa

SEQ ID NO: 1175702 - RNA, 19 nt, Artificial Sequence
  Description of Artificial Sequence: Synthetic oligonucleotide
  Sense strand starting at position 3574 of SEQ ID NO: 916680
uuauuaaaccuugguuuga

SEQ ID NO: 1175703 - RNA, 19 nt, Artificial Sequence
  Description of Artificial Sequence: Synthetic oligonucleotide
  Antisense strand to SEQ ID NO: 1175702
ucaaaccaagguuuaauaa

SEQ ID NO: 1175704 - RNA, 19 nt, Artificial Sequence
  Description of Artificial Sequence: Synthetic oligonucleotide
  Sense strand starting at position 3576 of SEQ ID NO: 916680
auuaaaccuugguuugaau

SEQ ID NO: 1175705 - RNA, 19 nt, Artificial Sequence
  Description of Artificial Sequence: Synthetic oligonucleotide
  Antisense strand to SEQ ID NO: 1175704
auucaaaccaagguuuaau

SEQ ID NO: 1175706 - RNA, 19 nt, Artificial Sequence
  Description of Artificial Sequence: Synthetic oligonucleotide
  Sense strand starting at position 3617 of SEQ ID NO: 916680
uaauuacuggcucagaugu

SEQ ID NO: 1175707 - RNA, 19 nt, Artificial Sequence
  Description of Artificial Sequence: Synthetic oligonucleotide
  Antisense strand to SEQ ID NO: 1175706
acaucugagccaguaauua

SEQ ID NO: 1175708 - RNA, 19 nt, Artificial Sequence
  Description of Artificial Sequence: Synthetic oligonucleotide
  Sense strand starting at position 3639 of SEQ ID NO: 916680
uacuguuuccaagaagagu

SEQ ID NO: 1175709 - RNA, 19 nt, Artificial Sequence
  Description of Artificial Sequence: Synthetic oligonucleotide
  Antisense strand to SEQ ID NO: 1175708
acucuucuuggaaacagua

SEQ ID NO: 1175710 - RNA, 19 nt, Artificial Sequence
  Description of Artificial Sequence: Synthetic oligonucleotide
  Sense strand starting at position 3727 of SEQ ID NO: 916680
guugacacagcauaguuaa

SEQ ID NO: 1175711 - RNA, 19 nt, Artificial Sequence
  Description of Artificial Sequence: Synthetic oligonucleotide
  Antisense strand to SEQ ID NO: 1175710
uuaacuaugcugugucaac

SEQ ID NO: 1175712 - RNA, 19 nt, Artificial Sequence
  Description of Artificial Sequence: Synthetic oligonucleotide
  Sense strand starting at position 3759 of SEQ ID NO: 916680
guagguaucgcagaaagaa

SEQ ID NO: 1175713 - RNA, 19 nt, Artificial Sequence
  Description of Artificial Sequence: Synthetic oligonucleotide
  Antisense strand to SEQ ID NO: 1175712
uucuuucugcgauaccuac

SEQ ID NO: 1175714 - RNA, 19 nt, Artificial Sequence
  Description of Artificial Sequence: Synthetic oligonucleotide
  Sense strand starting at position 3809 of SEQ ID NO: 916680
ucacgaguuaaaggauauu

SEQ ID NO: 1175715 - RNA, 19 nt, Artificial Sequence
  Description of Artificial Sequence: Synthetic oligonucleotide
  Antisense strand to SEQ ID NO: 1175714
aauauccuuuaacucguga

SEQ ID NO: 1175716 - RNA, 19 nt, Artificial Sequence
  Description of Artificial Sequence: Synthetic oligonucleotide
  Sense strand starting at position 3895 of SEQ ID NO: 916680
cacugcaaagaguguaaau

SEQ ID NO: 1175717 - RNA, 19 nt, Artificial Sequence
  Description of Artificial Sequence: Synthetic oligonucleotide
  Antisense strand to SEQ ID NO: 1175716
auuuacacucuuugcagug

SEQ ID NO: 1175718 - RNA, 19 nt, Artificial Sequence
  Description of Artificial Sequence: Synthetic oligonucleotide
  Sense strand starting at position 3897 of SEQ ID NO: 916680
cugcaaagaguguaaauaa

SEQ ID NO: 1175719 - RNA, 19 nt, Artificial Sequence
  Description of Artificial Sequence: Synthetic oligonucleotide
  Antisense strand to SEQ ID NO: 1175718
uuauuuacacucuuugcag

SEQ ID NO: 1175720 - RNA, 19 nt, Artificial Sequence
  Description of Artificial Sequence: Synthetic oligonucleotide
  Sense strand starting at position 3928 of SEQ ID NO: 916680
gagaaagacuguuuaaagu

SEQ ID NO: 1175721 - RNA, 19 nt, Artificial Sequence
  Description of Artificial Sequence: Synthetic oligonucleotide
  Antisense strand to SEQ ID NO: 1175720
acuuuaaacagucuuucuc

SEQ ID NO: 1175722 - RNA, 19 nt, Artificial Sequence
  Description of Artificial Sequence: Synthetic oligonucleotide
  Sense strand starting at position 90 of SEQ ID NO: 916681
accauuauugcagagccau

SEQ ID NO: 1175723 - RNA, 19 nt, Artificial Sequence
  Description of Artificial Sequence: Synthetic oligonucleotide
  Antisense strand to SEQ ID NO: 1175722
auggcucugcaauaauggu

SEQ ID NO: 1175724 - RNA, 19 nt, Artificial Sequence
  Description of Artificial Sequence: Synthetic oligonucleotide
  Sense strand starting at position 108 of SEQ ID NO: 916681
uuugcaauuucugugucuu

SEQ ID NO: 1175725 - RNA, 19 nt, Artificial Sequence
  Description of Artificial Sequence: Synthetic oligonucleotide
  Antisense strand to SEQ ID NO: 1175724
aagacacagaaauugcaaa

SEQ ID NO: 1175726 - RNA, 19 nt, Artificial Sequence
  Description of Artificial Sequence: Synthetic oligonucleotide
  Sense strand starting at position 109 of SEQ ID NO: 916681
uugcaauuucugugucuua

SEQ ID NO: 1175727 - RNA, 19 nt, Artificial Sequence
  Description of Artificial Sequence: Synthetic oligonucleotide
  Antisense strand to SEQ ID NO: 1175726
uaagacacagaaauugcaa

SEQ ID NO: 1175728 - RNA, 19 nt, Artificial Sequence
  Description of Artificial Sequence: Synthetic oligonucleotide
  Sense strand starting at position 110 of SEQ ID NO: 916681
ugcaauuucugugucuuaa

SEQ ID NO: 1175729 - RNA, 19 nt, Artificial Sequence
  Description of Artificial Sequence: Synthetic oligonucleotide
  Antisense strand to SEQ ID NO: 1175728
uuaagacacagaaauugca

SEQ ID NO: 1175730 - RNA, 19 nt, Artificial Sequence
  Description of Artificial Sequence: Synthetic oligonucleotide
  Sense strand starting at position 405 of SEQ ID NO: 916681
ucuccaucuccuggaaaug

SEQ ID NO: 1175731 - RNA, 19 nt, Artificial Sequence
  Description of Artificial Sequence: Synthetic oligonucleotide
  Antisense strand to SEQ ID NO: 1175730
cauuuccaggagauggaga

SEQ ID NO: 1175732 - RNA, 19 nt, Artificial Sequence
  Description of Artificial Sequence: Synthetic oligonucleotide
  Sense strand starting at position 503 of SEQ ID NO: 916681
guaggauccucacugcuga

SEQ ID NO: 1175733 - RNA, 19 nt, Artificial Sequence
  Description of Artificial Sequence: Synthetic oligonucleotide
  Antisense strand to SEQ ID NO: 1175732
ucagcagugaggauccuac

SEQ ID NO: 1175734 - RNA, 19 nt, Artificial Sequence
  Description of Artificial Sequence: Synthetic oligonucleotide
  Sense strand starting at position 523 of SEQ ID NO: 916681
gaggaacuucggugaagga

SEQ ID NO: 1175735 - RNA, 19 nt, Artificial Sequence
  Description of Artificial Sequence: Synthetic oligonucleotide
  Antisense strand to SEQ ID NO: 1175734
uccuucaccgaaguuccuc

SEQ ID NO: 1175736 - RNA, 19 nt, Artificial Sequence
  Description of Artificial Sequence: Synthetic oligonucleotide
  Sense strand starting at position 561 of SEQ ID NO: 916681
gagucucagcgcuuacuuu

SEQ ID NO: 1175737 - RNA, 19 nt, Artificial Sequence
  Description of Artificial Sequence: Synthetic oligonucleotide
  Antisense strand to SEQ ID NO: 1175736
aaaguaagcgcugagacuc

SEQ ID NO: 1175738 - RNA, 19 nt, Artificial Sequence
  Description of Artificial Sequence: Synthetic oligonucleotide
  Sense strand starting at position 620 of SEQ ID NO: 916681
gccuuaaagcacugaugag

SEQ ID NO: 1175739 - RNA, 19 nt, Artificial Sequence
  Description of Artificial Sequence: Synthetic oligonucleotide
  Antisense strand to SEQ ID NO: 1175738
cucaucagugcuuuaaggc

SEQ ID NO: 1175740 - RNA, 19 nt, Artificial Sequence
  Description of Artificial Sequence: Synthetic oligonucleotide
  Sense strand starting at position 1055 of SEQ ID NO: 916681
ggaaacagaucugaagauu

SEQ ID NO: 1175741 - RNA, 19 nt, Artificial Sequence
  Description of Artificial Sequence: Synthetic oligonucleotide
  Antisense strand to SEQ ID NO: 1175740
aaucuucagaucuguuucc

SEQ ID NO: 1175742 - RNA, 19 nt, Artificial Sequence
  Description of Artificial Sequence: Synthetic oligonucleotide
  Sense strand starting at position 1066 of SEQ ID NO: 916681
ugaagauucucagcagcca

SEQ ID NO: 1175743 - RNA, 19 nt, Artificial Sequence
  Description of Artificial Sequence: Synthetic oligonucleotide
  Antisense strand to SEQ ID NO: 1175742
uggcugcugagaaucuuca

SEQ ID NO: 1175744 - RNA, 19 nt, Artificial Sequence
  Description of Artificial Sequence: Synthetic oligonucleotide
  Sense strand starting at position 1221 of SEQ ID NO: 916681
gugaauuucucacauccug

SEQ ID NO: 1175745 - RNA, 19 nt, Artificial Sequence
  Description of Artificial Sequence: Synthetic oligonucleotide
  Antisense strand to SEQ ID NO: 1175744
caggaugugagaaauucac

SEQ ID NO: 1175746 - RNA, 19 nt, Artificial Sequence
  Description of Artificial Sequence: Synthetic oligonucleotide
  Sense strand starting at position 1229 of SEQ ID NO: 916681
cucacauccugacuggauu

SEQ ID NO: 1175747 - RNA, 19 nt, Artificial Sequence
  Description of Artificial Sequence: Synthetic oligonucleotide
  Antisense strand to SEQ ID NO: 1175746
aauccagucaggaugugag

SEQ ID NO: 1175748 - RNA, 19 nt, Artificial Sequence
  Description of Artificial Sequence: Synthetic oligonucleotide
  Sense strand starting at position 1230 of SEQ ID NO: 916681
ucacauccugacuggauua

SEQ ID NO: 1175749 - RNA, 19 nt, Artificial Sequence
  Description of Artificial Sequence: Synthetic oligonucleotide
  Antisense strand to SEQ ID NO: 1175748
uaauccagucaggauguga

SEQ ID NO: 1175750 - RNA, 19 nt, Artificial Sequence
  Description of Artificial Sequence: Synthetic oligonucleotide
  Sense strand starting at position 1369 of SEQ ID NO: 916681
uugagucgaugauccauaa

SEQ ID NO: 1175751 - RNA, 19 nt, Artificial Sequence
  Description of Artificial Sequence: Synthetic oligonucleotide
  Antisense strand to SEQ ID NO: 1175750
uuauggaucaucgacucaa

SEQ ID NO: 1175752 - RNA, 19 nt, Artificial Sequence
  Description of Artificial Sequence: Synthetic oligonucleotide
  Sense strand starting at position 1462 of SEQ ID NO: 916681
agguauuaccgggagccua

SEQ ID NO: 1175753 - RNA, 19 nt, Artificial Sequence
  Description of Artificial Sequence: Synthetic oligonucleotide
  Antisense strand to SEQ ID NO: 1175752
uaggcucccgguaauaccu

SEQ ID NO: 1175754 - RNA, 19 nt, Artificial Sequence
  Description of Artificial Sequence: Synthetic oligonucleotide
  Sense strand starting at position 1516 of SEQ ID NO: 916681
acguccaauccuggaguau

SEQ ID NO: 1175755 - RNA, 19 nt, Artificial Sequence
  Description of Artificial Sequence: Synthetic oligonucleotide
  Antisense strand to SEQ ID NO: 1175754
auacuccaggauuggacgu

SEQ ID NO: 1175756 - RNA, 19 nt, Artificial Sequence
  Description of Artificial Sequence: Synthetic oligonucleotide
  Sense strand starting at position 1517 of SEQ ID NO: 916681
cguccaauccuggaguauu

SEQ ID NO: 1175757 - RNA, 19 nt, Artificial Sequence
  Description of Artificial Sequence: Synthetic oligonucleotide
  Antisense strand to SEQ ID NO: 1175756
aauacuccaggauuggacg

SEQ ID NO: 1175758 - RNA, 19 nt, Artificial Sequence
  Description of Artificial Sequence: Synthetic oligonucleotide
  Sense strand starting at position 1626 of SEQ ID NO: 916681
acaggagugaguugcacaa

SEQ ID NO: 1175759 - RNA, 19 nt, Artificial Sequence
  Description of Artificial Sequence: Synthetic oligonucleotide
  Antisense strand to SEQ ID NO: 1175758
uugugcaacucacuccugu

SEQ ID NO: 1175760 - RNA, 19 nt, Artificial Sequence
  Description of Artificial Sequence: Synthetic oligonucleotide
  Sense strand starting at position 1630 of SEQ ID NO: 916681
gagugaguugcacaaggaa

SEQ ID NO: 1175761 - RNA, 19 nt, Artificial Sequence
  Description of Artificial Sequence: Synthetic oligonucleotide
  Antisense strand to SEQ ID NO: 1175760
uuccuugugcaacucacuc

SEQ ID NO: 1175762 - RNA, 19 nt, Artificial Sequence
  Description of Artificial Sequence: Synthetic oligonucleotide
  Sense strand starting at position 2159 of SEQ ID NO: 916681
uccugcuaucucuaaggaa

SEQ ID NO: 1175763 - RNA, 19 nt, Artificial Sequence
  Description of Artificial Sequence: Synthetic oligonucleotide
  Antisense strand to SEQ ID NO: 1175762
uuccuuagagauagcagga

SEQ ID NO: 1175764 - RNA, 19 nt, Artificial Sequence
  Description of Artificial Sequence: Synthetic oligonucleotide
  Sense strand starting at position 2513 of SEQ ID NO: 916681
cgagcuuugaauuguuaag

SEQ ID NO: 1175765 - RNA, 19 nt, Artificial Sequence
  Description of Artificial Sequence: Synthetic oligonucleotide
  Antisense strand to SEQ ID NO: 1175764
cuuaacaauucaaagcucg

SEQ ID NO: 1175766 - RNA, 19 nt, Artificial Sequence
  Description of Artificial Sequence: Synthetic oligonucleotide
  Sense strand starting at position 2591 of SEQ ID NO: 916681
aagcuucucgggcaaguaa

SEQ ID NO: 1175767 - RNA, 19 nt, Artificial Sequence
  Description of Artificial Sequence: Synthetic oligonucleotide
  Antisense strand to SEQ ID NO: 1175766
uuacuugcccgagaagcuu

SEQ ID NO: 1175768 - RNA, 19 nt, Artificial Sequence
  Description of Artificial Sequence: Synthetic oligonucleotide
  Sense strand starting at position 2646 of SEQ ID NO: 916681
guuuaaagaccuuaaggcu

SEQ ID NO: 1175769 - RNA, 19 nt, Artificial Sequence
  Description of Artificial Sequence: Synthetic oligonucleotide
  Antisense strand to SEQ ID NO: 1175768
agccuuaaggucuuuaaac

SEQ ID NO: 1175770 - RNA, 19 nt, Artificial Sequence
  Description of Artificial Sequence: Synthetic oligonucleotide
  Sense strand starting at position 2797 of SEQ ID NO: 916681
uaacguuuauccuugacag

SEQ ID NO: 1175771 - RNA, 19 nt, Artificial Sequence
  Description of Artificial Sequence: Synthetic oligonucleotide
  Antisense strand to SEQ ID NO: 1175770
cugucaaggauaaacguua

SEQ ID NO: 1175772 - RNA, 19 nt, Artificial Sequence
  Description of Artificial Sequence: Synthetic oligonucleotide
  Sense strand starting at position 2798 of SEQ ID NO: 916681
aacguuuauccuugacaga

SEQ ID NO: 1175773 - RNA, 19 nt, Artificial Sequence
  Description of Artificial Sequence: Synthetic oligonucleotide
  Antisense strand to SEQ ID NO: 1175772
ucugucaaggauaaacguu

SEQ ID NO: 1175774 - RNA, 19 nt, Artificial Sequence
  Description of Artificial Sequence: Synthetic oligonucleotide
  Sense strand starting at position 2799 of SEQ ID NO: 916681
acguuuauccuugacagau

SEQ ID NO: 1175775 - RNA, 19 nt, Artificial Sequence
  Description of Artificial Sequence: Synthetic oligonucleotide
  Antisense strand to SEQ ID NO: 1175774
aucugucaaggauaaacgu

SEQ ID NO: 1175776 - RNA, 19 nt, Artificial Sequence
  Description of Artificial Sequence: Synthetic oligonucleotide
  Sense strand starting at position 2812 of SEQ ID NO: 916681
acagauaucaugcgguaua

SEQ ID NO: 1175777 - RNA, 19 nt, Artificial Sequence
  Description of Artificial Sequence: Synthetic oligonucleotide
  Antisense strand to SEQ ID NO: 1175776
uauaccgcaugauaucugu

SEQ ID NO: 1175778 - RNA, 19 nt, Artificial Sequence
  Description of Artificial Sequence: Synthetic oligonucleotide
  Sense strand starting at position 2815 of SEQ ID NO: 916681
gauaucaugcgguauaauc

SEQ ID NO: 1175779 - RNA, 19 nt, Artificial Sequence
  Description of Artificial Sequence: Synthetic oligonucleotide
  Antisense strand to SEQ ID NO: 1175778
gauuauaccgcaugauauc

SEQ ID NO: 1175780 - RNA, 19 nt, Artificial Sequence
  Description of Artificial Sequence: Synthetic oligonucleotide
  Sense strand starting at position 2898 of SEQ ID NO: 916681
ggcagaccugaauggugaa

SEQ ID NO: 1175781 - RNA, 19 nt, Artificial Sequence
  Description of Artificial Sequence: Synthetic oligonucleotide
  Antisense strand to SEQ ID NO: 1175780
uucaccauucaggucugcc

SEQ ID NO: 1175782 - RNA, 19 nt, Artificial Sequence
  Description of Artificial Sequence: Synthetic oligonucleotide
  Sense strand starting at position 2899 of SEQ ID NO: 916681
gcagaccugaauggugaaa

SEQ ID NO: 1175783 - RNA, 19 nt, Artificial Sequence
  Description of Artificial Sequence: Synthetic oligonucleotide
  Antisense strand to SEQ ID NO: 1175782
uuucaccauucaggucugc

SEQ ID NO: 1175784 - RNA, 19 nt, Artificial Sequence
  Description of Artificial Sequence: Synthetic oligonucleotide
  Sense strand starting at position 2931 of SEQ ID NO: 916681
guaugagauauagguagca

SEQ ID NO: 1175785 - RNA, 19 nt, Artificial Sequence
  Description of Artificial Sequence: Synthetic oligonucleotide
  Antisense strand to SEQ ID NO: 1175784
ugcuaccuauaucucauac

SEQ ID NO: 1175786 - RNA, 19 nt, Artificial Sequence
  Description of Artificial Sequence: Synthetic oligonucleotide
  Sense strand starting at position 3399 of SEQ ID NO: 916681
cuguaaauugaguguuacu

SEQ ID NO: 1175787 - RNA, 19 nt, Artificial Sequence
  Description of Artificial Sequence: Synthetic oligonucleotide
  Antisense strand to SEQ ID NO: 1175786
aguaacacucaauuuacag

SEQ ID NO: 1175788 - RNA, 19 nt, Artificial Sequence
  Description of Artificial Sequence: Synthetic oligonucleotide
  Sense strand starting at position 3449 of SEQ ID NO: 916681
cagcaaaguuauguaagua

SEQ ID NO: 1175789 - RNA, 19 nt, Artificial Sequence
  Description of Artificial Sequence: Synthetic oligonucleotide
  Antisense strand to SEQ ID NO: 1175788
uacuuacauaacuuugcug

SEQ ID NO: 1175790 - RNA, 19 nt, Artificial Sequence
  Description of Artificial Sequence: Synthetic oligonucleotide
  Sense strand starting at position 3481 of SEQ ID NO: 916681
cagcuagaacuuggauuga

SEQ ID NO: 1175791 - RNA, 19 nt, Artificial Sequence
  Description of Artificial Sequence: Synthetic oligonucleotide
  Antisense strand to SEQ ID NO: 1175790
ucaauccaaguucuagcug

SEQ ID NO: 1175792 - RNA, 19 nt, Artificial Sequence
  Description of Artificial Sequence: Synthetic oligonucleotide
  Sense strand starting at position 3547 of SEQ ID NO: 916681
ucaaguauugaguguccau

SEQ ID NO: 1175793 - RNA, 19 nt, Artificial Sequence
  Description of Artificial Sequence: Synthetic oligonucleotide
  Antisense strand to SEQ ID NO: 1175792
auggacacucaauacuuga

SEQ ID NO: 1175794 - RNA, 19 nt, Artificial Sequence
  Description of Artificial Sequence: Synthetic oligonucleotide
  Sense strand starting at position 3550 of SEQ ID NO: 916681
aguauugaguguccauaau

SEQ ID NO: 1175795 - RNA, 19 nt, Artificial Sequence
  Description of Artificial Sequence: Synthetic oligonucleotide
  Antisense strand to SEQ ID NO: 1175794
auuauggacacucaauacu

SEQ ID NO: 1175796 - RNA, 19 nt, Artificial Sequence
  Description of Artificial Sequence: Synthetic oligonucleotide
  Sense strand starting at position 3663 of SEQ ID NO: 916681
uugucagaccugcaguauu

SEQ ID NO: 1175797 - RNA, 19 nt, Artificial Sequence
  Description of Artificial Sequence: Synthetic oligonucleotide
  Antisense strand to SEQ ID NO: 1175796
aauacugcaggucugacaa

SEQ ID NO: 1175798 - RNA, 19 nt, Artificial Sequence
  Description of Artificial Sequence: Synthetic oligonucleotide
  Sense strand starting at position 3744 of SEQ ID NO: 916681
acucacuaccgaugaguuu

SEQ ID NO: 1175799 - RNA, 19 nt, Artificial Sequence
  Description of Artificial Sequence: Synthetic oligonucleotide
  Antisense strand to SEQ ID NO: 1175798
aaacucaucgguagugagu

SEQ ID NO: 1175800 - RNA, 19 nt, Artificial Sequence
  Description of Artificial Sequence: Synthetic oligonucleotide
  Sense strand starting at position 3907 of SEQ ID NO: 916681
cccucucuguagucaaaca

SEQ ID NO: 1175801 - RNA, 19 nt, Artificial Sequence
  Description of Artificial Sequence: Synthetic oligonucleotide
  Antisense strand to SEQ ID NO: 1175800
uguuugacuacagagaggg

SEQ ID NO: 1175802 - RNA, 19 nt, Artificial Sequence
  Description of Artificial Sequence: Synthetic oligonucleotide
  Sense strand starting at position 88 of SEQ ID NO: 916682
gagacuuguguuugaccca

SEQ ID NO: 1175803 - RNA, 19 nt, Artificial Sequence
  Description of Artificial Sequence: Synthetic oligonucleotide
  Antisense strand to SEQ ID NO: 1175802
ugggucaaacacaagucuc

SEQ ID NO: 1175804 - RNA, 19 nt, Artificial Sequence
  Description of Artificial Sequence: Synthetic oligonucleotide
  Sense strand starting at position 224 of SEQ ID NO: 916682
cugggaucauauucucaca

SEQ ID NO: 1175805 - RNA, 19 nt, Artificial Sequence
  Description of Artificial Sequence: Synthetic oligonucleotide
  Antisense strand to SEQ ID NO: 1175804
ugugagaauaugaucccag

SEQ ID NO: 1175806 - RNA, 19 nt, Artificial Sequence
  Description of Artificial Sequence: Synthetic oligonucleotide
  Sense strand starting at position 278 of SEQ ID NO: 916682
cccuucuaagggugaagua

SEQ ID NO: 1175807 - RNA, 19 nt, Artificial Sequence
  Description of Artificial Sequence: Synthetic oligonucleotide
  Antisense strand to SEQ ID NO: 1175806
uacuucacccuuagaaggg

SEQ ID NO: 1175808 - RNA, 19 nt, Artificial Sequence
  Description of Artificial Sequence: Synthetic oligonucleotide
  Sense strand starting at position 279 of SEQ ID NO: 916682
ccuucuaagggugaaguau

SEQ ID NO: 1175809 - RNA, 19 nt, Artificial Sequence
  Description of Artificial Sequence: Synthetic oligonucleotide
  Antisense strand to SEQ ID NO: 1175808
auacuucacccuuagaagg

SEQ ID NO: 1175810 - RNA, 19 nt, Artificial Sequence
  Description of Artificial Sequence: Synthetic oligonucleotide
  Sense strand starting at position 355 of SEQ ID NO: 916682
agaaauaacugacugucuu

SEQ ID NO: 1175811 - RNA, 19 nt, Artificial Sequence
  Description of Artificial Sequence: Synthetic oligonucleotide
  Antisense strand to SEQ ID NO: 1175810
aagacagucaguuauuucu

SEQ ID NO: 1175812 - RNA, 19 nt, Artificial Sequence
  Description of Artificial Sequence: Synthetic oligonucleotide
  Sense strand starting at position 487 of SEQ ID NO: 916682
ugauaaaugccgugaggga

SEQ ID NO: 1175813 - RNA, 19 nt, Artificial Sequence
  Description of Artificial Sequence: Synthetic oligonucleotide
  Antisense strand to SEQ ID NO: 1175812
ucccucacggcauuuauca

SEQ ID NO: 1175814 - RNA, 19 nt, Artificial Sequence
  Description of Artificial Sequence: Synthetic oligonucleotide
  Sense strand starting at position 488 of SEQ ID NO: 916682
gauaaaugccgugagggaa

SEQ ID NO: 1175815 - RNA, 19 nt, Artificial Sequence
  Description of Artificial Sequence: Synthetic oligonucleotide
  Antisense strand to SEQ ID NO: 1175814
uucccucacggcauuuauc

SEQ ID NO: 1175816 - RNA, 19 nt, Artificial Sequence
  Description of Artificial Sequence: Synthetic oligonucleotide
  Sense strand starting at position 746 of SEQ ID NO: 916682
cuuuaaaugcagggucaga

SEQ ID NO: 1175817 - RNA, 19 nt, Artificial Sequence
  Description of Artificial Sequence: Synthetic oligonucleotide
  Antisense strand to SEQ ID NO: 1175816
ucugacccugcauuuaaag

SEQ ID NO: 1175818 - RNA, 19 nt, Artificial Sequence
  Description of Artificial Sequence: Synthetic oligonucleotide
  Sense strand starting at position 797 of SEQ ID NO: 916682
aucuacguguuaucaauag

SEQ ID NO: 1175819 - RNA, 19 nt, Artificial Sequence
  Description of Artificial Sequence: Synthetic oligonucleotide
  Antisense strand to SEQ ID NO: 1175818
cuauugauaacacguagau

SEQ ID NO: 1175820 - RNA, 19 nt, Artificial Sequence
  Description of Artificial Sequence: Synthetic oligonucleotide
  Sense strand starting at position 801 of SEQ ID NO: 916682
acguguuaucaauaguuaa

SEQ ID NO: 1175821 - RNA, 19 nt, Artificial Sequence
  Description of Artificial Sequence: Synthetic oligonucleotide
  Antisense strand to SEQ ID NO: 1175820
uuaacuauugauaacacgu

SEQ ID NO: 1175822 - RNA, 19 nt, Artificial Sequence
  Description of Artificial Sequence: Synthetic oligonucleotide
  Sense strand starting at position 804 of SEQ ID NO: 916682
uguuaucaauaguuaaggu

SEQ ID NO: 1175823 - RNA, 19 nt, Artificial Sequence
  Description of Artificial Sequence: Synthetic oligonucleotide
  Antisense strand to SEQ ID NO: 1175822
accuuaacuauugauaaca

SEQ ID NO: 1175824 - RNA, 19 nt, Artificial Sequence
  Description of Artificial Sequence: Synthetic oligonucleotide
  Sense strand starting at position 867 of SEQ ID NO: 916682
auaguuuaagcaggaaaua

SEQ ID NO: 1175825 - RNA, 19 nt, Artificial Sequence
  Description of Artificial Sequence: Synthetic oligonucleotide
  Antisense strand to SEQ ID NO: 1175824
uauuuccugcuuaaacuau

SEQ ID NO: 1175826 - RNA, 19 nt, Artificial Sequence
  Description of Artificial Sequence: Synthetic oligonucleotide
  Sense strand starting at position 977 of SEQ ID NO: 916682
gcagcauggaaaugagacu

SEQ ID NO: 1175827 - RNA, 19 nt, Artificial Sequence
  Description of Artificial Sequence: Synthetic oligonucleotide
  Antisense strand to SEQ ID NO: 1175826
agucucauuuccaugcugc

SEQ ID NO: 1175828 - RNA, 19 nt, Artificial Sequence
  Description of Artificial Sequence: Synthetic oligonucleotide
  Sense strand starting at position 1030 of SEQ ID NO: 916682
gcgguaaccaaggauaaca

SEQ ID NO: 1175829 - RNA, 19 nt, Artificial Sequence
  Description of Artificial Sequence: Synthetic oligonucleotide
  Antisense strand to SEQ ID NO: 1175828
uguuauccuugguuaccgc

SEQ ID NO: 1175830 - RNA, 19 nt, Artificial Sequence
  Description of Artificial Sequence: Synthetic oligonucleotide
  Sense strand starting at position 1051 of SEQ ID NO: 916682
gauguaaagcaugguaagu

SEQ ID NO: 1175831 - RNA, 19 nt, Artificial Sequence
  Description of Artificial Sequence: Synthetic oligonucleotide
  Antisense strand to SEQ ID NO: 1175830
acuuaccaugcuuuacauc

SEQ ID NO: 1175832 - RNA, 19 nt, Artificial Sequence
  Description of Artificial Sequence: Synthetic oligonucleotide
  Sense strand starting at position 1078 of SEQ ID NO: 916682
ccacaaguaugccuagaga

SEQ ID NO: 1175833 - RNA, 19 nt, Artificial Sequence
  Description of Artificial Sequence: Synthetic oligonucleotide
  Antisense strand to SEQ ID NO: 1175832
ucucuaggcauacuugugg

SEQ ID NO: 1175834 - RNA, 19 nt, Artificial Sequence
  Description of Artificial Sequence: Synthetic oligonucleotide
  Sense strand starting at position 1081 of SEQ ID NO: 916682
caaguaugccuagagaauu

SEQ ID NO: 1175835 - RNA, 19 nt, Artificial Sequence
  Description of Artificial Sequence: Synthetic oligonucleotide
  Antisense strand to SEQ ID NO: 1175834
aauucucuaggcauacuug

SEQ ID NO: 1175836 - RNA, 19 nt, Artificial Sequence
  Description of Artificial Sequence: Synthetic oligonucleotide
  Sense strand starting at position 1352 of SEQ ID NO: 916682
aggaauggugggcauguua

SEQ ID NO: 1175837 - RNA, 19 nt, Artificial Sequence
  Description of Artificial Sequence: Synthetic oligonucleotide
  Antisense strand to SEQ ID NO: 1175836
uaacaugcccaccauuccu

SEQ ID NO: 1175838 - RNA, 19 nt, Artificial Sequence
  Description of Artificial Sequence: Synthetic oligonucleotide
  Sense strand starting at position 1784 of SEQ ID NO: 916682
ugggcagaauugucacaca

SEQ ID NO: 1175839 - RNA, 19 nt, Artificial Sequence
  Description of Artificial Sequence: Synthetic oligonucleotide
  Antisense strand to SEQ ID NO: 1175838
ugugugacaauucugccca

SEQ ID NO: 1175840 - RNA, 19 nt, Artificial Sequence
  Description of Artificial Sequence: Synthetic oligonucleotide
  Sense strand starting at position 1882 of SEQ ID NO: 916682
ugcauccaucucugggaaa

SEQ ID NO: 1175841 - RNA, 19 nt, Artificial Sequence
  Description of Artificial Sequence: Synthetic oligonucleotide
  Antisense strand to SEQ ID NO: 1175840
uuucccagagauggaugca

SEQ ID NO: 1175842 - RNA, 19 nt, Artificial Sequence
  Description of Artificial Sequence: Synthetic oligonucleotide
  Sense strand starting at position 2414 of SEQ ID NO: 916682
uguugaguuccugaaguuu

SEQ ID NO: 1175843 - RNA, 19 nt, Artificial Sequence
  Description of Artificial Sequence: Synthetic oligonucleotide
  Antisense strand to SEQ ID NO: 1175842
aaacuucaggaacucaaca

SEQ ID NO: 1175844 - RNA, 19 nt, Artificial Sequence
  Description of Artificial Sequence: Synthetic oligonucleotide
  Sense strand starting at position 2611 of SEQ ID NO: 916682
guaauuugcugacuuugua

SEQ ID NO: 1175845 - RNA, 19 nt, Artificial Sequence
  Description of Artificial Sequence: Synthetic oligonucleotide
  Antisense strand to SEQ ID NO: 1175844
uacaaagucagcaaauuac

SEQ ID NO: 1175846 - RNA, 19 nt, Artificial Sequence
  Description of Artificial Sequence: Synthetic oligonucleotide
  Sense strand starting at position 2781 of SEQ ID NO: 916682
guuuauauugucgauacau

SEQ ID NO: 1175847 - RNA, 19 nt, Artificial Sequence
  Description of Artificial Sequence: Synthetic oligonucleotide
  Antisense strand to SEQ ID NO: 1175846
auguaucgacaauauaaac

SEQ ID NO: 1175848 - RNA, 19 nt, Artificial Sequence
  Description of Artificial Sequence: Synthetic oligonucleotide
  Sense strand starting at position 2976 of SEQ ID NO: 916682
gucuccuaagaguguaaua

SEQ ID NO: 1175849 - RNA, 19 nt, Artificial Sequence
  Description of Artificial Sequence: Synthetic oligonucleotide
  Antisense strand to SEQ ID NO: 1175848
uauuacacucuuaggagac

SEQ ID NO: 1175850 - RNA, 19 nt, Artificial Sequence
  Description of Artificial Sequence: Synthetic oligonucleotide
  Sense strand starting at position 2978 of SEQ ID NO: 916682
cuccuaagaguguaauaca

SEQ ID NO: 1175851 - RNA, 19 nt, Artificial Sequence
  Description of Artificial Sequence: Synthetic oligonucleotide
  Antisense strand to SEQ ID NO: 1175850
uguauuacacucuuaggag

SEQ ID NO: 1175852 - RNA, 19 nt, Artificial Sequence
  Description of Artificial Sequence: Synthetic oligonucleotide
  Sense strand starting at position 2986 of SEQ ID NO: 916682
aguguaauacauuguacca

SEQ ID NO: 1175853 - RNA, 19 nt, Artificial Sequence
  Description of Artificial Sequence: Synthetic oligonucleotide
  Antisense strand to SEQ ID NO: 1175852
ugguacaauguauuacacu

SEQ ID NO: 1175854 - RNA, 19 nt, Artificial Sequence
  Description of Artificial Sequence: Synthetic oligonucleotide
  Sense strand starting at position 3344 of SEQ ID NO: 916682
cauggucugaguggaaguu

SEQ ID NO: 1175855 - RNA, 19 nt, Artificial Sequence
  Description of Artificial Sequence: Synthetic oligonucleotide
  Antisense strand to SEQ ID NO: 1175854
aacuuccacucagaccaug

SEQ ID NO: 1175856 - RNA, 19 nt, Artificial Sequence
  Description of Artificial Sequence: Synthetic oligonucleotide
  Sense strand starting at position 3345 of SEQ ID NO: 916682
auggucugaguggaaguua

SEQ ID NO: 1175857 - RNA, 19 nt, Artificial Sequence
  Description of Artificial Sequence: Synthetic oligonucleotide
  Antisense strand to SEQ ID NO: 1175856
uaacuuccacucagaccau

SEQ ID NO: 1175858 - RNA, 19 nt, Artificial Sequence
  Description of Artificial Sequence: Synthetic oligonucleotide
  Sense strand starting at position 3418 of SEQ ID NO: 916682
acaaucuggcacugaaagu

SEQ ID NO: 1175859 - RNA, 19 nt, Artificial Sequence
  Description of Artificial Sequence: Synthetic oligonucleotide
  Antisense strand to SEQ ID NO: 1175858
acuuucagugccagauugu

SEQ ID NO: 1175860 - RNA, 19 nt, Artificial Sequence
  Description of Artificial Sequence: Synthetic oligonucleotide
  Sense strand starting at position 3428 of SEQ ID NO: 916682
acugaaaguguugguauaa

SEQ ID NO: 1175861 - RNA, 19 nt, Artificial Sequence
  Description of Artificial Sequence: Synthetic oligonucleotide
  Antisense strand to SEQ ID NO: 1175860
uuauaccaacacuuucagu

SEQ ID NO: 1175862 - RNA, 19 nt, Artificial Sequence
  Description of Artificial Sequence: Synthetic oligonucleotide
  Sense strand starting at position 3429 of SEQ ID NO: 916682
cugaaaguguugguauaaa

SEQ ID NO: 1175863 - RNA, 19 nt, Artificial Sequence
  Description of Artificial Sequence: Synthetic oligonucleotide
  Antisense strand to SEQ ID NO: 1175862
uuuauaccaacacuuucag

SEQ ID NO: 1175864 - RNA, 19 nt, Artificial Sequence
  Description of Artificial Sequence: Synthetic oligonucleotide
  Sense strand starting at position 3486 of SEQ ID NO: 916682
uuaaguggugacugggaaa

SEQ ID NO: 1175865 - RNA, 19 nt, Artificial Sequence
  Description of Artificial Sequence: Synthetic oligonucleotide
  Antisense strand to SEQ ID NO: 1175864
uuucccagucaccacuuaa

SEQ ID NO: 1175866 - RNA, 19 nt, Artificial Sequence
  Description of Artificial Sequence: Synthetic oligonucleotide
  Sense strand starting at position 3529 of SEQ ID NO: 916682
uggagucauuguuccuaac

SEQ ID NO: 1175867 - RNA, 19 nt, Artificial Sequence
  Description of Artificial Sequence: Synthetic oligonucleotide
  Antisense strand to SEQ ID NO: 1175866
guuaggaacaaugacucca

SEQ ID NO: 1175868 - RNA, 19 nt, Artificial Sequence
  Description of Artificial Sequence: Synthetic oligonucleotide
  Sense strand starting at position 3580 of SEQ ID NO: 916682
gcauaauuaaaucggugau

SEQ ID NO: 1175869 - RNA, 19 nt, Artificial Sequence
  Description of Artificial Sequence: Synthetic oligonucleotide
  Antisense strand to SEQ ID NO: 1175868
aucaccgauuuaauuaugc

SEQ ID NO: 1175870 - RNA, 19 nt, Artificial Sequence
  Description of Artificial Sequence: Synthetic oligonucleotide
  Sense strand starting at position 3582 of SEQ ID NO: 916682
auaauuaaaucggugauug

SEQ ID NO: 1175871 - RNA, 19 nt, Artificial Sequence
  Description of Artificial Sequence: Synthetic oligonucleotide
  Antisense strand to SEQ ID NO: 1175870
caaucaccgauuuaauuau

SEQ ID NO: 1175872 - RNA, 19 nt, Artificial Sequence
  Description of Artificial Sequence: Synthetic oligonucleotide
  Sense strand starting at position 3583 of SEQ ID NO: 916682
uaauuaaaucggugauugu

SEQ ID NO: 1175873 - RNA, 19 nt, Artificial Sequence
  Description of Artificial Sequence: Synthetic oligonucleotide
  Antisense strand to SEQ ID NO: 1175872
acaaucaccgauuuaauua

SEQ ID NO: 1175874 - RNA, 19 nt, Artificial Sequence
  Description of Artificial Sequence: Synthetic oligonucleotide
  Sense strand starting at position 3584 of SEQ ID NO: 916682
aauuaaaucggugauuguu

SEQ ID NO: 1175875 - RNA, 19 nt, Artificial Sequence
  Description of Artificial Sequence: Synthetic oligonucleotide
  Antisense strand to SEQ ID NO: 1175874
aacaaucaccgauuuaauu

SEQ ID NO: 1175876 - RNA, 19 nt, Artificial Sequence
  Description of Artificial Sequence: Synthetic oligonucleotide
  Sense strand starting at position 3586 of SEQ ID NO: 916682
uuaaaucggugauuguuaa

SEQ ID NO: 1175877 - RNA, 19 nt, Artificial Sequence
  Description of Artificial Sequence: Synthetic oligonucleotide
  Antisense strand to SEQ ID NO: 1175876
uuaacaaucaccgauuuaa

SEQ ID NO: 1175878 - RNA, 19 nt, Artificial Sequence
  Description of Artificial Sequence: Synthetic oligonucleotide
  Sense strand starting at position 3587 of SEQ ID NO: 916682
uaaaucggugauuguuaau

SEQ ID NO: 1175879 - RNA, 19 nt, Artificial Sequence
  Description of Artificial Sequence: Synthetic oligonucleotide
  Antisense strand to SEQ ID NO: 1175878
auuaacaaucaccgauuua

SEQ ID NO: 1175880 - RNA, 19 nt, Artificial Sequence
  Description of Artificial Sequence: Synthetic oligonucleotide
  Sense strand starting at position 3646 of SEQ ID NO: 916682
cccagacuggucugaugua

SEQ ID NO: 1175881 - RNA, 19 nt, Artificial Sequence
  Description of Artificial Sequence: Synthetic oligonucleotide
  Antisense strand to SEQ ID NO: 1175880
uacaucagaccagucuggg

SEQ ID NO: 1175882 - RNA, 19 nt, Artificial Sequence
  Description of Artificial Sequence: Synthetic oligonucleotide
  Sense strand starting at position 86 of SEQ ID NO: 916683
agaaauaguguuugguaug

SEQ ID NO: 1175883 - RNA, 19 nt, Artificial Sequence
  Description of Artificial Sequence: Synthetic oligonucleotide
  Antisense strand to SEQ ID NO: 1175882
cauaccaaacacuauuucu

SEQ ID NO: 1175884 - RNA, 19 nt, Artificial Sequence
  Description of Artificial Sequence: Synthetic oligonucleotide
  Sense strand starting at position 93 of SEQ ID NO: 916683
guguuugguauguuuggca

SEQ ID NO: 1175885 - RNA, 19 nt, Artificial Sequence
  Description of Artificial Sequence: Synthetic oligonucleotide
  Antisense strand to SEQ ID NO: 1175884
ugccaaacauaccaaacac

SEQ ID NO: 1175886 - RNA, 19 nt, Artificial Sequence
  Description of Artificial Sequence: Synthetic oligonucleotide
  Sense strand starting at position 128 of SEQ ID NO: 916683
uuaggucuuuccuuacaca

SEQ ID NO: 1175887 - RNA, 19 nt, Artificial Sequence
  Description of Artificial Sequence: Synthetic oligonucleotide
  Antisense strand to SEQ ID NO: 1175886
uguguaaggaaagaccuaa

SEQ ID NO: 1175888 - RNA, 19 nt, Artificial Sequence
  Description of Artificial Sequence: Synthetic oligonucleotide
  Sense strand starting at position 780 of SEQ ID NO: 916683
guuauuaauagucagugga

SEQ ID NO: 1175889 - RNA, 19 nt, Artificial Sequence
  Description of Artificial Sequence: Synthetic oligonucleotide
  Antisense strand to SEQ ID NO: 1175888
uccacugacuauuaauaac

SEQ ID NO: 1175890 - RNA, 19 nt, Artificial Sequence
  Description of Artificial Sequence: Synthetic oligonucleotide
  Sense strand starting at position 782 of SEQ ID NO: 916683
uauuaauagucaguggaaa

SEQ ID NO: 1175891 - RNA, 19 nt, Artificial Sequence
  Description of Artificial Sequence: Synthetic oligonucleotide
  Antisense strand to SEQ ID NO: 1175890
uuuccacugacuauuaaua

SEQ ID NO: 1175892 - RNA, 19 nt, Artificial Sequence
  Description of Artificial Sequence: Synthetic oligonucleotide
  Sense strand starting at position 891 of SEQ ID NO: 916683
ccugaaauagcugaucagu

SEQ ID NO: 1175893 - RNA, 19 nt, Artificial Sequence
  Description of Artificial Sequence: Synthetic oligonucleotide
  Antisense strand to SEQ ID NO: 1175892
acugaucagcuauuucagg

SEQ ID NO: 1175894 - RNA, 19 nt, Artificial Sequence
  Description of Artificial Sequence: Synthetic oligonucleotide
  Sense strand starting at position 893 of SEQ ID NO: 916683
ugaaauagcugaucaguca

SEQ ID NO: 1175895 - RNA, 19 nt, Artificial Sequence
  Description of Artificial Sequence: Synthetic oligonucleotide
  Antisense strand to SEQ ID NO: 1175894
ugacugaucagcuauuuca

SEQ ID NO: 1175896 - RNA, 19 nt, Artificial Sequence
  Description of Artificial Sequence: Synthetic oligonucleotide
  Sense strand starting at position 1083 of SEQ ID NO: 916683
aacugagaccuucggaaau

SEQ ID NO: 1175897 - RNA, 19 nt, Artificial Sequence
  Description of Artificial Sequence: Synthetic oligonucleotide
  Antisense strand to SEQ ID NO: 1175896
auuuccgaaggucucaguu

SEQ ID NO: 1175898 - RNA, 19 nt, Artificial Sequence
  Description of Artificial Sequence: Synthetic oligonucleotide
  Sense strand starting at position 1446 of SEQ ID NO: 916683
gagggaaauggccagugua

SEQ ID NO: 1175899 - RNA, 19 nt, Artificial Sequence
  Description of Artificial Sequence: Synthetic oligonucleotide
  Antisense strand to SEQ ID NO: 1175898
uacacuggccauuucccuc

SEQ ID NO: 1175900 - RNA, 19 nt, Artificial Sequence
  Description of Artificial Sequence: Synthetic oligonucleotide
  Sense strand starting at position 1449 of SEQ ID NO: 916683
ggaaauggccaguguaagu

SEQ ID NO: 1175901 - RNA, 19 nt, Artificial Sequence
  Description of Artificial Sequence: Synthetic oligonucleotide
  Antisense strand to SEQ ID NO: 1175900
acuuacacuggccauuucc

SEQ ID NO: 1175902 - RNA, 19 nt, Artificial Sequence
  Description of Artificial Sequence: Synthetic oligonucleotide
  Sense strand starting at position 1636 of SEQ ID NO: 916683
ccgagucuccuugaggaug

SEQ ID NO: 1175903 - RNA, 19 nt, Artificial Sequence
  Description of Artificial Sequence: Synthetic oligonucleotide
  Antisense strand to SEQ ID NO: 1175902
cauccucaaggagacucgg

SEQ ID NO: 1175904 - RNA, 19 nt, Artificial Sequence
  Description of Artificial Sequence: Synthetic oligonucleotide
  Sense strand starting at position 1801 of SEQ ID NO: 916683
caugaugccgcccaugaaa

SEQ ID NO: 1175905 - RNA, 19 nt, Artificial Sequence
  Description of Artificial Sequence: Synthetic oligonucleotide
  Antisense strand to SEQ ID NO: 1175904
uuucaugggcggcaucaug

SEQ ID NO: 1175906 - RNA, 19 nt, Artificial Sequence
  Description of Artificial Sequence: Synthetic oligonucleotide
  Sense strand starting at position 1815 of SEQ ID NO: 916683
ugaaauuggccacggcaga

SEQ ID NO: 1175907 - RNA, 19 nt, Artificial Sequence
  Description of Artificial Sequence: Synthetic oligonucleotide
  Antisense strand to SEQ ID NO: 1175906
ucugccguggccaauuuca

SEQ ID NO: 1175908 - RNA, 19 nt, Artificial Sequence
  Description of Artificial Sequence: Synthetic oligonucleotide
  Sense strand starting at position 1816 of SEQ ID NO: 916683
gaaauuggccacggcagau

SEQ ID NO: 1175909 - RNA, 19 nt, Artificial Sequence
  Description of Artificial Sequence: Synthetic oligonucleotide
  Antisense strand to SEQ ID NO: 1175908
aucugccguggccaauuuc

SEQ ID NO: 1175910 - RNA, 19 nt, Artificial Sequence
  Description of Artificial Sequence: Synthetic oligonucleotide
  Sense strand starting at position 2621 of SEQ ID NO: 916683
agagacuuuccagggcuua

SEQ ID NO: 1175911 - RNA, 19 nt, Artificial Sequence
  Description of Artificial Sequence: Synthetic oligonucleotide
  Antisense strand to SEQ ID NO: 1175910
uaagcccuggaaagucucu

SEQ ID NO: 1175912 - RNA, 19 nt, Artificial Sequence
  Description of Artificial Sequence: Synthetic oligonucleotide
  Sense strand starting at position 2622 of SEQ ID NO: 916683
gagacuuuccagggcuuaa

SEQ ID NO: 1175913 - RNA, 19 nt, Artificial Sequence
  Description of Artificial Sequence: Synthetic oligonucleotide
  Antisense strand to SEQ ID NO: 1175912
uuaagcccuggaaagucuc

SEQ ID NO: 1175914 - RNA, 19 nt, Artificial Sequence
  Description of Artificial Sequence: Synthetic oligonucleotide
  Sense strand starting at position 2656 of SEQ ID NO: 916683
uacggauugcaugagaauu

SEQ ID NO: 1175915 - RNA, 19 nt, Artificial Sequence
  Description of Artificial Sequence: Synthetic oligonucleotide
  Antisense strand to SEQ ID NO: 1175914
aauucucaugcaauccgua

SEQ ID NO: 1175916 - RNA, 19 nt, Artificial Sequence
  Description of Artificial Sequence: Synthetic oligonucleotide
  Sense strand starting at position 2687 of SEQ ID NO: 916683
ucccuagguauuugucgau

SEQ ID NO: 1175917 - RNA, 19 nt, Artificial Sequence
  Description of Artificial Sequence: Synthetic oligonucleotide
  Antisense strand to SEQ ID NO: 1175916
aucgacaaauaccuaggga

SEQ ID NO: 1175918 - RNA, 19 nt, Artificial Sequence
  Description of Artificial Sequence: Synthetic oligonucleotide
  Sense strand starting at position 2690 of SEQ ID NO: 916683
cuagguauuugucgauuua

SEQ ID NO: 1175919 - RNA, 19 nt, Artificial Sequence
  Description of Artificial Sequence: Synthetic oligonucleotide
  Antisense strand to SEQ ID NO: 1175918
uaaaucgacaaauaccuag

SEQ ID NO: 1175920 - RNA, 19 nt, Artificial Sequence
  Description of Artificial Sequence: Synthetic oligonucleotide
  Sense strand starting at position 2930 of SEQ ID NO: 916683
agggaccauuaguauuuaa

SEQ ID NO: 1175921 - RNA, 19 nt, Artificial Sequence
  Description of Artificial Sequence: Synthetic oligonucleotide
  Antisense strand to SEQ ID NO: 1175920
uuaaauacuaauggucccu

SEQ ID NO: 1175922 - RNA, 19 nt, Artificial Sequence
  Description of Artificial Sequence: Synthetic oligonucleotide
  Sense strand starting at position 2969 of SEQ ID NO: 916683
agcauuauccuccaacgua

SEQ ID NO: 1175923 - RNA, 19 nt, Artificial Sequence
  Description of Artificial Sequence: Synthetic oligonucleotide
  Antisense strand to SEQ ID NO: 1175922
uacguuggaggauaaugcu

SEQ ID NO: 1175924 - RNA, 19 nt, Artificial Sequence
  Description of Artificial Sequence: Synthetic oligonucleotide
  Sense strand starting at position 3016 of SEQ ID NO: 916683
cucguuuacuaucuagaca

SEQ ID NO: 1175925 - RNA, 19 nt, Artificial Sequence
  Description of Artificial Sequence: Synthetic oligonucleotide
  Antisense strand to SEQ ID NO: 1175924
ugucuagauaguaaacgag

SEQ ID NO: 1175926 - RNA, 19 nt, Artificial Sequence
  Description of Artificial Sequence: Synthetic oligonucleotide
  Sense strand starting at position 3088 of SEQ ID NO: 916683
cuuguuuacuaucuagaca

SEQ ID NO: 1175927 - RNA, 19 nt, Artificial Sequence
  Description of Artificial Sequence: Synthetic oligonucleotide
  Antisense strand to SEQ ID NO: 1175926
ugucuagauaguaaacaag

SEQ ID NO: 1175928 - RNA, 19 nt, Artificial Sequence
  Description of Artificial Sequence: Synthetic oligonucleotide
  Sense strand starting at position 3091 of SEQ ID NO: 916683
guuuacuaucuagacacuu

SEQ ID NO: 1175929 - RNA, 19 nt, Artificial Sequence
  Description of Artificial Sequence: Synthetic oligonucleotide
  Antisense strand to SEQ ID NO: 1175928
aagugucuagauaguaaac

SEQ ID NO: 1175930 - RNA, 19 nt, Artificial Sequence
  Description of Artificial Sequence: Synthetic oligonucleotide
  Sense strand starting at position 3260 of SEQ ID NO: 916683
uggugaucauauguuagaa

SEQ ID NO: 1175931 - RNA, 19 nt, Artificial Sequence
  Description of Artificial Sequence: Synthetic oligonucleotide
  Antisense strand to SEQ ID NO: 1175930
uucuaacauaugaucacca

SEQ ID NO: 1175932 - RNA, 19 nt, Artificial Sequence
  Description of Artificial Sequence: Synthetic oligonucleotide
  Sense strand starting at position 3365 of SEQ ID NO: 916683
acguguauccuguucaugu

SEQ ID NO: 1175933 - RNA, 19 nt, Artificial Sequence
  Description of Artificial Sequence: Synthetic oligonucleotide
  Antisense strand to SEQ ID NO: 1175932
acaugaacaggauacacgu

SEQ ID NO: 1175934 - RNA, 19 nt, Artificial Sequence
  Description of Artificial Sequence: Synthetic oligonucleotide
  Sense strand starting at position 3421 of SEQ ID NO: 916683
gcaguuaugcaccaaacag

SEQ ID NO: 1175935 - RNA, 19 nt, Artificial Sequence
  Description of Artificial Sequence: Synthetic oligonucleotide
  Antisense strand to SEQ ID NO: 1175934
cuguuuggugcauaacugc

SEQ ID NO: 1175936 - RNA, 19 nt, Artificial Sequence
  Description of Artificial Sequence: Synthetic oligonucleotide
  Sense strand starting at position 3473 of SEQ ID NO: 916683
cguucuucucagucagugu

SEQ ID NO: 1175937 - RNA, 19 nt, Artificial Sequence
  Description of Artificial Sequence: Synthetic oligonucleotide
  Antisense strand to SEQ ID NO: 1175936
acacugacugagaagaacg

SEQ ID NO: 1175938 - RNA, 19 nt, Artificial Sequence
  Description of Artificial Sequence: Synthetic oligonucleotide
  Sense strand starting at position 3480 of SEQ ID NO: 916683
cucagucaguguuugggaa

SEQ ID NO: 1175939 - RNA, 19 nt, Artificial Sequence
  Description of Artificial Sequence: Synthetic oligonucleotide
  Antisense strand to SEQ ID NO: 1175938
uucccaaacacugacugag

SEQ ID NO: 1175940 - RNA, 19 nt, Artificial Sequence
  Description of Artificial Sequence: Synthetic oligonucleotide
  Sense strand starting at position 3487 of SEQ ID NO: 916683
aguguuugggaaggagagu

SEQ ID NO: 1175941 - RNA, 19 nt, Artificial Sequence
  Description of Artificial Sequence: Synthetic oligonucleotide
  Antisense strand to SEQ ID NO: 1175940
acucuccuucccaaacacu

SEQ ID NO: 1175942 - RNA, 19 nt, Artificial Sequence
  Description of Artificial Sequence: Synthetic oligonucleotide
  Sense strand starting at position 3541 of SEQ ID NO: 916683
gaggaauugugagucaagg

SEQ ID NO: 1175943 - RNA, 19 nt, Artificial Sequence
  Description of Artificial Sequence: Synthetic oligonucleotide
  Antisense strand to SEQ ID NO: 1175942
ccuugacucacaauuccuc

SEQ ID NO: 1175944 - RNA, 19 nt, Artificial Sequence
  Description of Artificial Sequence: Synthetic oligonucleotide
  Sense strand starting at position 3547 of SEQ ID NO: 916683
uugugagucaaggaguucu

SEQ ID NO: 1175945 - RNA, 19 nt, Artificial Sequence
  Description of Artificial Sequence: Synthetic oligonucleotide
  Antisense strand to SEQ ID NO: 1175944
agaacuccuugacucacaa

SEQ ID NO: 1175946 - RNA, 19 nt, Artificial Sequence
  Description of Artificial Sequence: Synthetic oligonucleotide
  Sense strand starting at position 3571 of SEQ ID NO: 916683
uuaggugaggccuggauaa

SEQ ID NO: 1175947 - RNA, 19 nt, Artificial Sequence
  Description of Artificial Sequence: Synthetic oligonucleotide
  Antisense strand to SEQ ID NO: 1175946
uuauccaggccucaccuaa

SEQ ID NO: 1175948 - RNA, 19 nt, Artificial Sequence
  Description of Artificial Sequence: Synthetic oligonucleotide
  Sense strand starting at position 3685 of SEQ ID NO: 916683
gguaccaaauaauuaugua

SEQ ID NO: 1175949 - RNA, 19 nt, Artificial Sequence
  Description of Artificial Sequence: Synthetic oligonucleotide
  Antisense strand to SEQ ID NO: 1175948
uacauaauuauuugguacc

SEQ ID NO: 1175950 - RNA, 19 nt, Artificial Sequence
  Description of Artificial Sequence: Synthetic oligonucleotide
  Sense strand starting at position 3842 of SEQ ID NO: 916683
agauaugucuucuuauccu

SEQ ID NO: 1175951 - RNA, 19 nt, Artificial Sequence
  Description of Artificial Sequence: Synthetic oligonucleotide
  Antisense strand to SEQ ID NO: 1175950
aggauaagaagacauaucu

SEQ ID NO: 1175952 - RNA, 19 nt, Artificial Sequence
  Description of Artificial Sequence: Synthetic oligonucleotide
  Sense strand starting at position 3900 of SEQ ID NO: 916683
ugauuauaugggugguggu

SEQ ID NO: 1175953 - RNA, 19 nt, Artificial Sequence
  Description of Artificial Sequence: Synthetic oligonucleotide
  Antisense strand to SEQ ID NO: 1175952
accaccacccauauaauca

SEQ ID NO: 1175954 - RNA, 19 nt, Artificial Sequence
  Description of Artificial Sequence: Synthetic oligonucleotide
  Sense strand starting at position 3907 of SEQ ID NO: 916683
augggugguggugaaacau

SEQ ID NO: 1175955 - RNA, 19 nt, Artificial Sequence
  Description of Artificial Sequence: Synthetic oligonucleotide
  Antisense strand to SEQ ID NO: 1175954
auguuucaccaccacccau

SEQ ID NO: 1175956 - RNA, 19 nt, Artificial Sequence
  Description of Artificial Sequence: Synthetic oligonucleotide
  Sense strand starting at position 3931 of SEQ ID NO: 916683
auaccacauucucugguau

SEQ ID NO: 1175957 - RNA, 19 nt, Artificial Sequence
  Description of Artificial Sequence: Synthetic oligonucleotide
  Antisense strand to SEQ ID NO: 1175956
auaccagagaaugugguau

SEQ ID NO: 1175958 - RNA, 19 nt, Artificial Sequence
  Description of Artificial Sequence: Synthetic oligonucleotide
  Sense strand starting at position 3945 of SEQ ID NO: 916683
gguauccauugagucuaau

SEQ ID NO: 1175959 - RNA, 19 nt, Artificial Sequence
  Description of Artificial Sequence: Synthetic oligonucleotide
  Antisense strand to SEQ ID NO: 1175958
auuagacucaauggauacc

SEQ ID NO: 1175960 - RNA, 19 nt, Artificial Sequence
  Description of Artificial Sequence: Synthetic oligonucleotide
  Sense strand starting at position 3956 of SEQ ID NO: 916683
agucuaauauaagcuuaga

SEQ ID NO: 1175961 - RNA, 19 nt, Artificial Sequence
  Description of Artificial Sequence: Synthetic oligonucleotide
  Antisense strand to SEQ ID NO: 1175960
ucuaagcuuauauuagacu

SEQ ID NO: 1175962 - RNA, 19 nt, Artificial Sequence
  Description of Artificial Sequence: Synthetic oligonucleotide
  Sense strand starting at position 39 of SEQ ID NO: 916684
ugcugccucgaauaaauua

SEQ ID NO: 1175963 - RNA, 19 nt, Artificial Sequence
  Description of Artificial Sequence: Synthetic oligonucleotide
  Antisense strand to SEQ ID NO: 1175962
uaauuuauucgaggcagca

SEQ ID NO: 1175964 - RNA, 19 nt, Artificial Sequence
  Description of Artificial Sequence: Synthetic oligonucleotide
  Sense strand starting at position 445 of SEQ ID NO: 916684
uuaugaaguguccaaguua

SEQ ID NO: 1175965 - RNA, 19 nt, Artificial Sequence
  Description of Artificial Sequence: Synthetic oligonucleotide
  Antisense strand to SEQ ID NO: 1175964
uaacuuggacacuucauaa

SEQ ID NO: 1175966 - RNA, 19 nt, Artificial Sequence
  Description of Artificial Sequence: Synthetic oligonucleotide
  Sense strand starting at position 482 of SEQ ID NO: 916684
uuacaaagucuuggauaag

SEQ ID NO: 1175967 - RNA, 19 nt, Artificial Sequence
  Description of Artificial Sequence: Synthetic oligonucleotide
  Antisense strand to SEQ ID NO: 1175966
cuuauccaagacuuuguaa

SEQ ID NO: 1175968 - RNA, 19 nt, Artificial Sequence
  Description of Artificial Sequence: Synthetic oligonucleotide
  Sense strand starting at position 621 of SEQ ID NO: 916684
agucuuagaugagccgaaa

SEQ ID NO: 1175969 - RNA, 19 nt, Artificial Sequence
  Description of Artificial Sequence: Synthetic oligonucleotide
  Antisense strand to SEQ ID NO: 1175968
uuucggcucaucuaagacu

SEQ ID NO: 1175970 - RNA, 19 nt, Artificial Sequence
  Description of Artificial Sequence: Synthetic oligonucleotide
  Sense strand starting at position 790 of SEQ ID NO: 916684
aucucaguuucuucuguaa

SEQ ID NO: 1175971 - RNA, 19 nt, Artificial Sequence
  Description of Artificial Sequence: Synthetic oligonucleotide
  Antisense strand to SEQ ID NO: 1175970
uuacagaagaaacugagau

SEQ ID NO: 1175972 - RNA, 19 nt, Artificial Sequence
  Description of Artificial Sequence: Synthetic oligonucleotide
  Sense strand starting at position 840 of SEQ ID NO: 916684
uugcaaugggugggagaau

SEQ ID NO: 1175973 - RNA, 19 nt, Artificial Sequence
  Description of Artificial Sequence: Synthetic oligonucleotide
  Antisense strand to SEQ ID NO: 1175972
auucucccacccauugcaa

SEQ ID NO: 1175974 - RNA, 19 nt, Artificial Sequence
  Description of Artificial Sequence: Synthetic oligonucleotide
  Sense strand starting at position 870 of SEQ ID NO: 916684
ugucuuaagugcucaaaga

SEQ ID NO: 1175975 - RNA, 19 nt, Artificial Sequence
  Description of Artificial Sequence: Synthetic oligonucleotide
  Antisense strand to SEQ ID NO: 1175974
ucuuugagcacuuaagaca

SEQ ID NO: 1175976 - RNA, 19 nt, Artificial Sequence
  Description of Artificial Sequence: Synthetic oligonucleotide
  Sense strand starting at position 871 of SEQ ID NO: 916684
gucuuaagugcucaaagaa

SEQ ID NO: 1175977 - RNA, 19 nt, Artificial Sequence
  Description of Artificial Sequence: Synthetic oligonucleotide
  Antisense strand to SEQ ID NO: 1175976
uucuuugagcacuuaagac

SEQ ID NO: 1175978 - RNA, 19 nt, Artificial Sequence
  Description of Artificial Sequence: Synthetic oligonucleotide
  Sense strand starting at position 908 of SEQ ID NO: 916684
cgcuuuagaagcgucaguu

SEQ ID NO: 1175979 - RNA, 19 nt, Artificial Sequence
  Description of Artificial Sequence: Synthetic oligonucleotide
  Antisense strand to SEQ ID NO: 1175978
aacugacgcuucuaaagcg

SEQ ID NO: 1175980 - RNA, 19 nt, Artificial Sequence
  Description of Artificial Sequence: Synthetic oligonucleotide
  Sense strand starting at position 912 of SEQ ID NO: 916684
uuagaagcgucaguuauga

SEQ ID NO: 1175981 - RNA, 19 nt, Artificial Sequence
  Description of Artificial Sequence: Synthetic oligonucleotide
  Antisense strand to SEQ ID NO: 1175980
ucauaacugacgcuucuaa

SEQ ID NO: 1175982 - RNA, 19 nt, Artificial Sequence
  Description of Artificial Sequence: Synthetic oligonucleotide
  Sense strand starting at position 914 of SEQ ID NO: 916684
agaagcgucaguuaugauu

SEQ ID NO: 1175983 - RNA, 19 nt, Artificial Sequence
  Description of Artificial Sequence: Synthetic oligonucleotide
  Antisense strand to SEQ ID NO: 1175982
aaucauaacugacgcuucu

SEQ ID NO: 1175984 - RNA, 19 nt, Artificial Sequence
  Description of Artificial Sequence: Synthetic oligonucleotide
  Sense strand starting at position 920 of SEQ ID NO: 916684
gucaguuaugauuacagua

SEQ ID NO: 1175985 - RNA, 19 nt, Artificial Sequence
  Description of Artificial Sequence: Synthetic oligonucleotide
  Antisense strand to SEQ ID NO: 1175984
uacuguaaucauaacugac

SEQ ID NO: 1175986 - RNA, 19 nt, Artificial Sequence
  Description of Artificial Sequence: Synthetic oligonucleotide
  Sense strand starting at position 950 of SEQ ID NO: 916684
acgcaaagugcuuaagaca

SEQ ID NO: 1175987 - RNA, 19 nt, Artificial Sequence
  Description of Artificial Sequence: Synthetic oligonucleotide
  Antisense strand to SEQ ID NO: 1175986
ugucuuaagcacuuugcgu

SEQ ID NO: 1175988 - RNA, 19 nt, Artificial Sequence
  Description of Artificial Sequence: Synthetic oligonucleotide
  Sense strand starting at position 1125 of SEQ ID NO: 916684
caugaacgcuuguuaccaa

SEQ ID NO: 1175989 - RNA, 19 nt, Artificial Sequence
  Description of Artificial Sequence: Synthetic oligonucleotide
  Antisense strand to SEQ ID NO: 1175988
uugguaacaagcguucaug

SEQ ID NO: 1175990 - RNA, 19 nt, Artificial Sequence
  Description of Artificial Sequence: Synthetic oligonucleotide
  Sense strand starting at position 1435 of SEQ ID NO: 916684
gccugcauccucgugcaau

SEQ ID NO: 1175991 - RNA, 19 nt, Artificial Sequence
  Description of Artificial Sequence: Synthetic oligonucleotide
  Antisense strand to SEQ ID NO: 1175990
auugcacgaggaugcaggc

SEQ ID NO: 1175992 - RNA, 19 nt, Artificial Sequence
  Description of Artificial Sequence: Synthetic oligonucleotide
  Sense strand starting at position 1702 of SEQ ID NO: 916684
cgauguugaguuuaucuaa

SEQ ID NO: 1175993 - RNA, 19 nt, Artificial Sequence
  Description of Artificial Sequence: Synthetic oligonucleotide
  Antisense strand to SEQ ID NO: 1175992
uuagauaaacucaacaucg

SEQ ID NO: 1175994 - RNA, 19 nt, Artificial Sequence
  Description of Artificial Sequence: Synthetic oligonucleotide
  Sense strand starting at position 1705 of SEQ ID NO: 916684
uguugaguuuaucuaaauc

SEQ ID NO: 1175995 - RNA, 19 nt, Artificial Sequence
  Description of Artificial Sequence: Synthetic oligonucleotide
  Antisense strand to SEQ ID NO: 1175994
gauuuagauaaacucaaca

SEQ ID NO: 1175996 - RNA, 19 nt, Artificial Sequence
  Description of Artificial Sequence: Synthetic oligonucleotide
  Sense strand starting at position 2252 of SEQ ID NO: 916684
gugcauugagucuagaugu

SEQ ID NO: 1175997 - RNA, 19 nt, Artificial Sequence
  Description of Artificial Sequence: Synthetic oligonucleotide
  Antisense strand to SEQ ID NO: 1175996
acaucuagacucaaugcac

SEQ ID NO: 1175998 - RNA, 19 nt, Artificial Sequence
  Description of Artificial Sequence: Synthetic oligonucleotide
  Sense strand starting at position 2259 of SEQ ID NO: 916684
gagucuagauguuugcaga

SEQ ID NO: 1175999 - RNA, 19 nt, Artificial Sequence
  Description of Artificial Sequence: Synthetic oligonucleotide
  Antisense strand to SEQ ID NO: 1175998
ucugcaaacaucuagacuc

SEQ ID NO: 1176000 - RNA, 19 nt, Artificial Sequence
  Description of Artificial Sequence: Synthetic oligonucleotide
  Sense strand starting at position 2427 of SEQ ID NO: 916684
agguuuauuugguaacuaa

SEQ ID NO: 1176001 - RNA, 19 nt, Artificial Sequence
  Description of Artificial Sequence: Synthetic oligonucleotide
  Antisense strand to SEQ ID NO: 1176000
uuaguuaccaaauaaaccu

SEQ ID NO: 1176002 - RNA, 19 nt, Artificial Sequence
  Description of Artificial Sequence: Synthetic oligonucleotide
  Sense strand starting at position 2482 of SEQ ID NO: 916684
acaguuaacucauugugag

SEQ ID NO: 1176003 - RNA, 19 nt, Artificial Sequence
  Description of Artificial Sequence: Synthetic oligonucleotide
  Antisense strand to SEQ ID NO: 1176002
cucacaaugaguuaacugu

SEQ ID NO: 1176004 - RNA, 19 nt, Artificial Sequence
  Description of Artificial Sequence: Synthetic oligonucleotide
  Sense strand starting at position 2483 of SEQ ID NO: 916684
caguuaacucauugugagu

SEQ ID NO: 1176005 - RNA, 19 nt, Artificial Sequence
  Description of Artificial Sequence: Synthetic oligonucleotide
  Antisense strand to SEQ ID NO: 1176004
acucacaaugaguuaacug

SEQ ID NO: 1176006 - RNA, 19 nt, Artificial Sequence
  Description of Artificial Sequence: Synthetic oligonucleotide
  Sense strand starting at position 2622 of SEQ ID NO: 916684
ucggaaaguuauguaauca

SEQ ID NO: 1176007 - RNA, 19 nt, Artificial Sequence
  Description of Artificial Sequence: Synthetic oligonucleotide
  Antisense strand to SEQ ID NO: 1176006
ugauuacauaacuuuccga

SEQ ID NO: 1176008 - RNA, 19 nt, Artificial Sequence
  Description of Artificial Sequence: Synthetic oligonucleotide
  Sense strand starting at position 2623 of SEQ ID NO: 916684
cggaaaguuauguaaucau

SEQ ID NO: 1176009 - RNA, 19 nt, Artificial Sequence
  Description of Artificial Sequence: Synthetic oligonucleotide
  Antisense strand to SEQ ID NO: 1176008
augauuacauaacuuuccg

SEQ ID NO: 1176010 - RNA, 19 nt, Artificial Sequence
  Description of Artificial Sequence: Synthetic oligonucleotide
  Sense strand starting at position 2633 of SEQ ID NO: 916684
uguaaucaucgggacgguu

SEQ ID NO: 1176011 - RNA, 19 nt, Artificial Sequence
  Description of Artificial Sequence: Synthetic oligonucleotide
  Antisense strand to SEQ ID NO: 1176010
aaccgucccgaugauuaca

SEQ ID NO: 1176012 - RNA, 19 nt, Artificial Sequence
  Description of Artificial Sequence: Synthetic oligonucleotide
  Sense strand starting at position 2635 of SEQ ID NO: 916684
uaaucaucgggacgguuau

SEQ ID NO: 1176013 - RNA, 19 nt, Artificial Sequence
  Description of Artificial Sequence: Synthetic oligonucleotide
  Antisense strand to SEQ ID NO: 1176012
auaaccgucccgaugauua

SEQ ID NO: 1176014 - RNA, 19 nt, Artificial Sequence
  Description of Artificial Sequence: Synthetic oligonucleotide
  Sense strand starting at position 2645 of SEQ ID NO: 916684
gacgguuaucccgauucua

SEQ ID NO: 1176015 - RNA, 19 nt, Artificial Sequence
  Description of Artificial Sequence: Synthetic oligonucleotide
  Antisense strand to SEQ ID NO: 1176014
uagaaucgggauaaccguc

SEQ ID NO: 1176016 - RNA, 19 nt, Artificial Sequence
  Description of Artificial Sequence: Synthetic oligonucleotide
  Sense strand starting at position 2656 of SEQ ID NO: 916684
cgauucuagccagggcaaa

SEQ ID NO: 1176017 - RNA, 19 nt, Artificial Sequence
  Description of Artificial Sequence: Synthetic oligonucleotide
  Antisense strand to SEQ ID NO: 1176016
uuugcccuggcuagaaucg

SEQ ID NO: 1176018 - RNA, 19 nt, Artificial Sequence
  Description of Artificial Sequence: Synthetic oligonucleotide
  Sense strand starting at position 3001 of SEQ ID NO: 916684
cccucucuccgagaaauuc

SEQ ID NO: 1176019 - RNA, 19 nt, Artificial Sequence
  Description of Artificial Sequence: Synthetic oligonucleotide
  Antisense strand to SEQ ID NO: 1176018
gaauuucucggagagaggg

SEQ ID NO: 1176020 - RNA, 19 nt, Artificial Sequence
  Description of Artificial Sequence: Synthetic oligonucleotide
  Sense strand starting at position 3061 of SEQ ID NO: 916684
ucaguaugccacgagguaa

SEQ ID NO: 1176021 - RNA, 19 nt, Artificial Sequence
  Description of Artificial Sequence: Synthetic oligonucleotide
  Antisense strand to SEQ ID NO: 1176020
uuaccucguggcauacuga

SEQ ID NO: 1176022 - RNA, 19 nt, Artificial Sequence
  Description of Artificial Sequence: Synthetic oligonucleotide
  Sense strand starting at position 3105 of SEQ ID NO: 916684
aaagcaauguccucagggu

SEQ ID NO: 1176023 - RNA, 19 nt, Artificial Sequence
  Description of Artificial Sequence: Synthetic oligonucleotide
  Antisense strand to SEQ ID NO: 1176022
acccugaggacauugcuuu

SEQ ID NO: 1176024 - RNA, 19 nt, Artificial Sequence
  Description of Artificial Sequence: Synthetic oligonucleotide
  Sense strand starting at position 3333 of SEQ ID NO: 916684
gugaacaucuggcuaugga

SEQ ID NO: 1176025 - RNA, 19 nt, Artificial Sequence
  Description of Artificial Sequence: Synthetic oligonucleotide
  Antisense strand to SEQ ID NO: 1176024
uccauagccagauguucac

SEQ ID NO: 1176026 - RNA, 19 nt, Artificial Sequence
  Description of Artificial Sequence: Synthetic oligonucleotide
  Sense strand starting at position 3403 of SEQ ID NO: 916684
cagggugcaucaucggaau

SEQ ID NO: 1176027 - RNA, 19 nt, Artificial Sequence
  Description of Artificial Sequence: Synthetic oligonucleotide
  Antisense strand to SEQ ID NO: 1176026
auuccgaugaugcacccug

SEQ ID NO: 1176028 - RNA, 19 nt, Artificial Sequence
  Description of Artificial Sequence: Synthetic oligonucleotide
  Sense strand starting at position 3419 of SEQ ID NO: 916684
aauggcauuuaggguagaa

SEQ ID NO: 1176029 - RNA, 19 nt, Artificial Sequence
  Description of Artificial Sequence: Synthetic oligonucleotide
  Antisense strand to SEQ ID NO: 1176028
uucuacccuaaaugccauu

SEQ ID NO: 1176030 - RNA, 19 nt, Artificial Sequence
  Description of Artificial Sequence: Synthetic oligonucleotide
  Sense strand starting at position 3566 of SEQ ID NO: 916684
uagucagucagaugguaag

SEQ ID NO: 1176031 - RNA, 19 nt, Artificial Sequence
  Description of Artificial Sequence: Synthetic oligonucleotide
  Antisense strand to SEQ ID NO: 1176030
cuuaccaucugacugacua

SEQ ID NO: 1176032 - RNA, 19 nt, Artificial Sequence
  Description of Artificial Sequence: Synthetic oligonucleotide
  Sense strand starting at position 3572 of SEQ ID NO: 916684
gucagaugguaagcaaaga

SEQ ID NO: 1176033 - RNA, 19 nt, Artificial Sequence
  Description of Artificial Sequence: Synthetic oligonucleotide
  Antisense strand to SEQ ID NO: 1176032
ucuuugcuuaccaucugac

SEQ ID NO: 1176034 - RNA, 19 nt, Artificial Sequence
  Description of Artificial Sequence: Synthetic oligonucleotide
  Sense strand starting at position 3703 of SEQ ID NO: 916684
ccaagauaauccuaggaau

SEQ ID NO: 1176035 - RNA, 19 nt, Artificial Sequence
  Description of Artificial Sequence: Synthetic oligonucleotide
  Antisense strand to SEQ ID NO: 1176034
auuccuaggauuaucuugg

SEQ ID NO: 1176036 - RNA, 19 nt, Artificial Sequence
  Description of Artificial Sequence: Synthetic oligonucleotide
  Sense strand starting at position 3706 of SEQ ID NO: 916684
agauaauccuaggaauuau

SEQ ID NO: 1176037 - RNA, 19 nt, Artificial Sequence
  Description of Artificial Sequence: Synthetic oligonucleotide
  Antisense strand to SEQ ID NO: 1176036
auaauuccuaggauuaucu

SEQ ID NO: 1176038 - RNA, 19 nt, Artificial Sequence
  Description of Artificial Sequence: Synthetic oligonucleotide
  Sense strand starting at position 3962 of SEQ ID NO: 916684
ugugucucugcccacaaua

SEQ ID NO: 1176039 - RNA, 19 nt, Artificial Sequence
  Description of Artificial Sequence: Synthetic oligonucleotide
  Antisense strand to SEQ ID NO: 1176038
uauugugggcagagacaca

SEQ ID NO: 1176040 - RNA, 19 nt, Artificial Sequence
  Description of Artificial Sequence: Synthetic oligonucleotide
  Sense strand starting at position 3973 of SEQ ID NO: 916684
ccacaauacgagugccaua

SEQ ID NO: 1176041 - RNA, 19 nt, Artificial Sequence
  Description of Artificial Sequence: Synthetic oligonucleotide
  Antisense strand to SEQ ID NO: 1176040
uauggcacucguauugugg

SEQ ID NO: 1176042 - RNA, 19 nt, Artificial Sequence
  Description of Artificial Sequence: Synthetic oligonucleotide
  Sense strand starting at position 140 of SEQ ID NO: 916685
caaguugcccgcuaagaaa

SEQ ID NO: 1176043 - RNA, 19 nt, Artificial Sequence
  Description of Artificial Sequence: Synthetic oligonucleotide
  Antisense strand to SEQ ID NO: 1176042
uuucuuagcgggcaacuug

SEQ ID NO: 1176044 - RNA, 19 nt, Artificial Sequence
  Description of Artificial Sequence: Synthetic oligonucleotide
  Sense strand starting at position 261 of SEQ ID NO: 916685
gcaacauuaucucuggauu

SEQ ID NO: 1176045 - RNA, 19 nt, Artificial Sequence
  Description of Artificial Sequence: Synthetic oligonucleotide
  Antisense strand to SEQ ID NO: 1176044
aauccagagauaauguugc

SEQ ID NO: 1176046 - RNA, 19 nt, Artificial Sequence
  Description of Artificial Sequence: Synthetic oligonucleotide
  Sense strand starting at position 267 of SEQ ID NO: 916685
uuaucucuggauugccaau

SEQ ID NO: 1176047 - RNA, 19 nt, Artificial Sequence
  Description of Artificial Sequence: Synthetic oligonucleotide
  Antisense strand to SEQ ID NO: 1176046
auuggcaauccagagauaa

SEQ ID NO: 1176048 - RNA, 19 nt, Artificial Sequence
  Description of Artificial Sequence: Synthetic oligonucleotide
  Sense strand starting at position 298 of SEQ ID NO: 916685
uuuggcuaacauugagaga

SEQ ID NO: 1176049 - RNA, 19 nt, Artificial Sequence
  Description of Artificial Sequence: Synthetic oligonucleotide
  Antisense strand to SEQ ID NO: 1176048
ucucucaauguuagccaaa

SEQ ID NO: 1176050 - RNA, 19 nt, Artificial Sequence
  Description of Artificial Sequence: Synthetic oligonucleotide
  Sense strand starting at position 370 of SEQ ID NO: 916685
aaaguuugugaccagcuuu

SEQ ID NO: 1176051 - RNA, 19 nt, Artificial Sequence
  Description of Artificial Sequence: Synthetic oligonucleotide
  Antisense strand to SEQ ID NO: 1176050
aaagcuggucacaaacuuu

SEQ ID NO: 1176052 - RNA, 19 nt, Artificial Sequence
  Description of Artificial Sequence: Synthetic oligonucleotide
  Sense strand starting at position 522 of SEQ ID NO: 916685
gcaaacuucgaguaucaga

SEQ ID NO: 1176053 - RNA, 19 nt, Artificial Sequence
  Description of Artificial Sequence: Synthetic oligonucleotide
  Antisense strand to SEQ ID NO: 1176052
ucugauacucgaaguuugc

SEQ ID NO: 1176054 - RNA, 19 nt, Artificial Sequence
  Description of Artificial Sequence: Synthetic oligonucleotide
  Sense strand starting at position 716 of SEQ ID NO: 916685
ggcuuagggcucuagauua

SEQ ID NO: 1176055 - RNA, 19 nt, Artificial Sequence
  Description of Artificial Sequence: Synthetic oligonucleotide
  Antisense strand to SEQ ID NO: 1176054
uaaucuagagcccuaagcc

SEQ ID NO: 1176056 - RNA, 19 nt, Artificial Sequence
  Description of Artificial Sequence: Synthetic oligonucleotide
  Sense strand starting at position 721 of SEQ ID NO: 916685
agggcucuagauuacuauu

SEQ ID NO: 1176057 - RNA, 19 nt, Artificial Sequence
  Description of Artificial Sequence: Synthetic oligonucleotide
  Antisense strand to SEQ ID NO: 1176056
aauaguaaucuagagcccu

SEQ ID NO: 1176058 - RNA, 19 nt, Artificial Sequence
  Description of Artificial Sequence: Synthetic oligonucleotide
  Sense strand starting at position 723 of SEQ ID NO: 916685
ggcucuagauuacuauuau

SEQ ID NO: 1176059 - RNA, 19 nt, Artificial Sequence
  Description of Artificial Sequence: Synthetic oligonucleotide
  Antisense strand to SEQ ID NO: 1176058
auaauaguaaucuagagcc

SEQ ID NO: 1176060 - RNA, 19 nt, Artificial Sequence
  Description of Artificial Sequence: Synthetic oligonucleotide
  Sense strand starting at position 814 of SEQ ID NO: 916685
cugccuaaccguccguaau

SEQ ID NO: 1176061 - RNA, 19 nt, Artificial Sequence
  Description of Artificial Sequence: Synthetic oligonucleotide
  Antisense strand to SEQ ID NO: 1176060
auuacggacgguuaggcag

SEQ ID NO: 1176062 - RNA, 19 nt, Artificial Sequence
  Description of Artificial Sequence: Synthetic oligonucleotide
  Sense strand starting at position 941 of SEQ ID NO: 916685
cagacuuauccacgaaugg

SEQ ID NO: 1176063 - RNA, 19 nt, Artificial Sequence
  Description of Artificial Sequence: Synthetic oligonucleotide
  Antisense strand to SEQ ID NO: 1176062
ccauucguggauaagucug

SEQ ID NO: 1176064 - RNA, 19 nt, Artificial Sequence
  Description of Artificial Sequence: Synthetic oligonucleotide
  Sense strand starting at position 1262 of SEQ ID NO: 916685
uccacauuggcguaauuga

SEQ ID NO: 1176065 - RNA, 19 nt, Artificial Sequence
  Description of Artificial Sequence: Synthetic oligonucleotide
  Antisense strand to SEQ ID NO: 1176064
ucaauuacgccaaugugga

SEQ ID NO: 1176066 - RNA, 19 nt, Artificial Sequence
  Description of Artificial Sequence: Synthetic oligonucleotide
  Sense strand starting at position 1615 of SEQ ID NO: 916685
cgagacuuccaguauccca

SEQ ID NO: 1176067 - RNA, 19 nt, Artificial Sequence
  Description of Artificial Sequence: Synthetic oligonucleotide
  Antisense strand to SEQ ID NO: 1176066
ugggauacuggaagucucg

SEQ ID NO: 1176068 - RNA, 19 nt, Artificial Sequence
  Description of Artificial Sequence: Synthetic oligonucleotide
  Sense strand starting at position 2053 of SEQ ID NO: 916685
uuccuauuggccgcguuau

SEQ ID NO: 1176069 - RNA, 19 nt, Artificial Sequence
  Description of Artificial Sequence: Synthetic oligonucleotide
  Antisense strand to SEQ ID NO: 1176068
auaacgcggccaauaggaa

SEQ ID NO: 1176070 - RNA, 19 nt, Artificial Sequence
  Description of Artificial Sequence: Synthetic oligonucleotide
  Sense strand starting at position 2085 of SEQ ID NO: 916685
aggauaggucgugaaguag

SEQ ID NO: 1176071 - RNA, 19 nt, Artificial Sequence
  Description of Artificial Sequence: Synthetic oligonucleotide
  Antisense strand to SEQ ID NO: 1176070
cuacuucacgaccuauccu

SEQ ID NO: 1176072 - RNA, 19 nt, Artificial Sequence
  Description of Artificial Sequence: Synthetic oligonucleotide
  Sense strand starting at position 2137 of SEQ ID NO: 916685
ugaacuugggcaugucaga

SEQ ID NO: 1176073 - RNA, 19 nt, Artificial Sequence
  Description of Artificial Sequence: Synthetic oligonucleotide
  Antisense strand to SEQ ID NO: 1176072
ucugacaugcccaaguuca

SEQ ID NO: 1176074 - RNA, 19 nt, Artificial Sequence
  Description of Artificial Sequence: Synthetic oligonucleotide
  Sense strand starting at position 2200 of SEQ ID NO: 916685
aaugguaaguucuugaggu

SEQ ID NO: 1176075 - RNA, 19 nt, Artificial Sequence
  Description of Artificial Sequence: Synthetic oligonucleotide
  Antisense strand to SEQ ID NO: 1176074
accucaagaacuuaccauu

SEQ ID NO: 1176076 - RNA, 19 nt, Artificial Sequence
  Description of Artificial Sequence: Synthetic oligonucleotide
  Sense strand starting at position 2245 of SEQ ID NO: 916685
gcuguaauugcuguggcuu

SEQ ID NO: 1176077 - RNA, 19 nt, Artificial Sequence
  Description of Artificial Sequence: Synthetic oligonucleotide
  Antisense strand to SEQ ID NO: 1176076
aagccacagcaauuacagc

SEQ ID NO: 1176078 - RNA, 19 nt, Artificial Sequence
  Description of Artificial Sequence: Synthetic oligonucleotide
  Sense strand starting at position 2361 of SEQ ID NO: 916685
gcuuuaagccugucucgua

SEQ ID NO: 1176079 - RNA, 19 nt, Artificial Sequence
  Description of Artificial Sequence: Synthetic oligonucleotide
  Antisense strand to SEQ ID NO: 1176078
uacgagacaggcuuaaagc

SEQ ID NO: 1176080 - RNA, 19 nt, Artificial Sequence
  Description of Artificial Sequence: Synthetic oligonucleotide
  Sense strand starting at position 2376 of SEQ ID NO: 916685
cguacuacccaugagcuua

SEQ ID NO: 1176081 - RNA, 19 nt, Artificial Sequence
  Description of Artificial Sequence: Synthetic oligonucleotide
  Antisense strand to SEQ ID NO: 1176080
uaagcucauggguaguacg

SEQ ID NO: 1176082 - RNA, 19 nt, Artificial Sequence
  Description of Artificial Sequence: Synthetic oligonucleotide
  Sense strand starting at position 2392 of SEQ ID NO: 916685
uuagcucagccugauuacu

SEQ ID NO: 1176083 - RNA, 19 nt, Artificial Sequence
  Description of Artificial Sequence: Synthetic oligonucleotide
  Antisense strand to SEQ ID NO: 1176082
aguaaucaggcugagcuaa

SEQ ID NO: 1176084 - RNA, 19 nt, Artificial Sequence
  Description of Artificial Sequence: Synthetic oligonucleotide
  Sense strand starting at position 2401 of SEQ ID NO: 916685
ccugauuacugguccuuac

SEQ ID NO: 1176085 - RNA, 19 nt, Artificial Sequence
  Description of Artificial Sequence: Synthetic oligonucleotide
  Antisense strand to SEQ ID NO: 1176084
guaaggaccaguaaucagg

SEQ ID NO: 1176086 - RNA, 19 nt, Artificial Sequence
  Description of Artificial Sequence: Synthetic oligonucleotide
  Sense strand starting at position 2561 of SEQ ID NO: 916685
uguacuaggcacugaagau

SEQ ID NO: 1176087 - RNA, 19 nt, Artificial Sequence
  Description of Artificial Sequence: Synthetic oligonucleotide
  Antisense strand to SEQ ID NO: 1176086
aucuucagugccuaguaca

SEQ ID NO: 1176088 - RNA, 19 nt, Artificial Sequence
  Description of Artificial Sequence: Synthetic oligonucleotide
  Sense strand starting at position 2705 of SEQ ID NO: 916685
uaggauuuguaauacugau

SEQ ID NO: 1176089 - RNA, 19 nt, Artificial Sequence
  Description of Artificial Sequence: Synthetic oligonucleotide
  Antisense strand to SEQ ID NO: 1176088
aucaguauuacaaauccua

SEQ ID NO: 1176090 - RNA, 19 nt, Artificial Sequence
  Description of Artificial Sequence: Synthetic oligonucleotide
  Sense strand starting at position 2866 of SEQ ID NO: 916685
uagacagagucccucaaga

SEQ ID NO: 1176091 - RNA, 19 nt, Artificial Sequence
  Description of Artificial Sequence: Synthetic oligonucleotide
  Antisense strand to SEQ ID NO: 1176090
ucuugagggacucugucua

SEQ ID NO: 1176092 - RNA, 19 nt, Artificial Sequence
  Description of Artificial Sequence: Synthetic oligonucleotide
  Sense strand starting at position 3127 of SEQ ID NO: 916685
gaaccacaguuauuaggau

SEQ ID NO: 1176093 - RNA, 19 nt, Artificial Sequence
  Description of Artificial Sequence: Synthetic oligonucleotide
  Antisense strand to SEQ ID NO: 1176092
auccuaauaacugugguuc

SEQ ID NO: 1176094 - RNA, 19 nt, Artificial Sequence
  Description of Artificial Sequence: Synthetic oligonucleotide
  Sense strand starting at position 3133 of SEQ ID NO: 916685
caguuauuaggauagcgau

SEQ ID NO: 1176095 - RNA, 19 nt, Artificial Sequence
  Description of Artificial Sequence: Synthetic oligonucleotide
  Antisense strand to SEQ ID NO: 1176094
aucgcuauccuaauaacug

SEQ ID NO: 1176096 - RNA, 19 nt, Artificial Sequence
  Description of Artificial Sequence: Synthetic oligonucleotide
  Sense strand starting at position 3274 of SEQ ID NO: 916685
uugaauacucaugguguua

SEQ ID NO: 1176097 - RNA, 19 nt, Artificial Sequence
  Description of Artificial Sequence: Synthetic oligonucleotide
  Antisense strand to SEQ ID NO: 1176096
uaacaccaugaguauucaa

SEQ ID NO: 1176098 - RNA, 19 nt, Artificial Sequence
  Description of Artificial Sequence: Synthetic oligonucleotide
  Sense strand starting at position 3283 of SEQ ID NO: 916685
caugguguuagguacugaa

SEQ ID NO: 1176099 - RNA, 19 nt, Artificial Sequence
  Description of Artificial Sequence: Synthetic oligonucleotide
  Antisense strand to SEQ ID NO: 1176098
uucaguaccuaacaccaug

SEQ ID NO: 1176100 - RNA, 19 nt, Artificial Sequence
  Description of Artificial Sequence: Synthetic oligonucleotide
  Sense strand starting at position 3475 of SEQ ID NO: 916685
gcaguauagaugggaaucu

SEQ ID NO: 1176101 - RNA, 19 nt, Artificial Sequence
  Description of Artificial Sequence: Synthetic oligonucleotide
  Antisense strand to SEQ ID NO: 1176100
agauucccaucuauacugc

SEQ ID NO: 1176102 - RNA, 19 nt, Artificial Sequence
  Description of Artificial Sequence: Synthetic oligonucleotide
  Sense strand starting at position 3512 of SEQ ID NO: 916685
aaaggaauuuagugggaag

SEQ ID NO: 1176103 - RNA, 19 nt, Artificial Sequence
  Description of Artificial Sequence: Synthetic oligonucleotide
  Antisense strand to SEQ ID NO: 1176102
cuucccacuaaauuccuuu

SEQ ID NO: 1176104 - RNA, 19 nt, Artificial Sequence
  Description of Artificial Sequence: Synthetic oligonucleotide
  Sense strand starting at position 3515 of SEQ ID NO: 916685
ggaauuuagugggaaguau

SEQ ID NO: 1176105 - RNA, 19 nt, Artificial Sequence
  Description of Artificial Sequence: Synthetic oligonucleotide
  Antisense strand to SEQ ID NO: 1176104
auacuucccacuaaauucc

SEQ ID NO: 1176106 - RNA, 19 nt, Artificial Sequence
  Description of Artificial Sequence: Synthetic oligonucleotide
  Sense strand starting at position 3527 of SEQ ID NO: 916685
gaaguaugcuauuccugau

SEQ ID NO: 1176107 - RNA, 19 nt, Artificial Sequence
  Description of Artificial Sequence: Synthetic oligonucleotide
  Antisense strand to SEQ ID NO: 1176106
aucaggaauagcauacuuc

SEQ ID NO: 1176108 - RNA, 19 nt, Artificial Sequence
  Description of Artificial Sequence: Synthetic oligonucleotide
  Sense strand starting at position 3731 of SEQ ID NO: 916685
uugaaaguacucugaaacu

SEQ ID NO: 1176109 - RNA, 19 nt, Artificial Sequence
  Description of Artificial Sequence: Synthetic oligonucleotide
  Antisense strand to SEQ ID NO: 1176108
aguuucagaguacuuucaa

SEQ ID NO: 1176110 - RNA, 19 nt, Artificial Sequence
  Description of Artificial Sequence: Synthetic oligonucleotide
  Sense strand starting at position 3754 of SEQ ID NO: 916685
ccuacuuugucuuuaggga

SEQ ID NO: 1176111 - RNA, 19 nt, Artificial Sequence
  Description of Artificial Sequence: Synthetic oligonucleotide
  Antisense strand to SEQ ID NO: 1176110
ucccuaaagacaaaguagg

SEQ ID NO: 1176112 - RNA, 19 nt, Artificial Sequence
  Description of Artificial Sequence: Synthetic oligonucleotide
  Sense strand starting at position 3759 of SEQ ID NO: 916685
uuugucuuuagggaggauu

SEQ ID NO: 1176113 - RNA, 19 nt, Artificial Sequence
  Description of Artificial Sequence: Synthetic oligonucleotide
  Antisense strand to SEQ ID NO: 1176112
aauccucccuaaagacaaa

SEQ ID NO: 1176114 - RNA, 19 nt, Artificial Sequence
  Description of Artificial Sequence: Synthetic oligonucleotide
  Sense strand starting at position 3808 of SEQ ID NO: 916685
uacugaagaccuuggguua

SEQ ID NO: 1176115 - RNA, 19 nt, Artificial Sequence
  Description of Artificial Sequence: Synthetic oligonucleotide
  Antisense strand to SEQ ID NO: 1176114
uaacccaaggucuucagua

SEQ ID NO: 1176116 - RNA, 19 nt, Artificial Sequence
  Description of Artificial Sequence: Synthetic oligonucleotide
  Sense strand starting at position 3809 of SEQ ID NO: 916685
acugaagaccuuggguuaa

SEQ ID NO: 1176117 - RNA, 19 nt, Artificial Sequence
  Description of Artificial Sequence: Synthetic oligonucleotide
  Antisense strand to SEQ ID NO: 1176116
uuaacccaaggucuucagu

SEQ ID NO: 1176118 - RNA, 19 nt, Artificial Sequence
  Description of Artificial Sequence: Synthetic oligonucleotide
  Sense strand starting at position 3811 of SEQ ID NO: 916685
ugaagaccuuggguuaauu

SEQ ID NO: 1176119 - RNA, 19 nt, Artificial Sequence
  Description of Artificial Sequence: Synthetic oligonucleotide
  Antisense strand to SEQ ID NO: 1176118
aauuaacccaaggucuuca

SEQ ID NO: 1176120 - RNA, 19 nt, Artificial Sequence
  Description of Artificial Sequence: Synthetic oligonucleotide
  Sense strand starting at position 3975 of SEQ ID NO: 916685
agagcuagacccuaucuuu

SEQ ID NO: 1176121 - RNA, 19 nt, Artificial Sequence
  Description of Artificial Sequence: Synthetic oligonucleotide
  Antisense strand to SEQ ID NO: 1176120
aaagauagggucuagcucu

SEQ ID NO: 1176122 - RNA, 19 nt, Artificial Sequence
  Description of Artificial Sequence: Synthetic oligonucleotide
  Sense strand starting at position 37 of SEQ ID NO: 916686
uuaucaaggucuccuggau

SEQ ID NO: 1176123 - RNA, 19 nt, Artificial Sequence
  Description of Artificial Sequence: Synthetic oligonucleotide
  Antisense strand to SEQ ID NO: 1176122
auccaggagaccuugauaa

SEQ ID NO: 1176124 - RNA, 19 nt, Artificial Sequence
  Description of Artificial Sequence: Synthetic oligonucleotide
  Sense strand starting at position 328 of SEQ ID NO: 916686
ucuguucuuguauaacacu

SEQ ID NO: 1176125 - RNA, 19 nt, Artificial Sequence
  Description of Artificial Sequence: Synthetic oligonucleotide
  Antisense strand to SEQ ID NO: 1176124
aguguuauacaagaacaga

SEQ ID NO: 1176126 - RNA, 19 nt, Artificial Sequence
  Description of Artificial Sequence: Synthetic oligonucleotide
  Sense strand starting at position 385 of SEQ ID NO: 916686
ugauacauuuaaugagaag

SEQ ID NO: 1176127 - RNA, 19 nt, Artificial Sequence
  Description of Artificial Sequence: Synthetic oligonucleotide
  Antisense strand to SEQ ID NO: 1176126
cuucucauuaaauguauca

SEQ ID NO: 1176128 - RNA, 19 nt, Artificial Sequence
  Description of Artificial Sequence: Synthetic oligonucleotide
  Sense strand starting at position 433 of SEQ ID NO: 916686
cuuagcucccaguauuaug

SEQ ID NO: 1176129 - RNA, 19 nt, Artificial Sequence
  Description of Artificial Sequence: Synthetic oligonucleotide
  Antisense strand to SEQ ID NO: 1176128
cauaauacugggagcuaag

SEQ ID NO: 1176130 - RNA, 19 nt, Artificial Sequence
  Description of Artificial Sequence: Synthetic oligonucleotide
  Sense strand starting at position 1053 of SEQ ID NO: 916686
acacuagcaguguaugaga

SEQ ID NO: 1176131 - RNA, 19 nt, Artificial Sequence
  Description of Artificial Sequence: Synthetic oligonucleotide
  Antisense strand to SEQ ID NO: 1176130
ucucauacacugcuagugu

SEQ ID NO: 1176132 - RNA, 19 nt, Artificial Sequence
  Description of Artificial Sequence: Synthetic oligonucleotide
  Sense strand starting at position 1179 of SEQ ID NO: 916686
uucucuggugaaugagauu

SEQ ID NO: 1176133 - RNA, 19 nt, Artificial Sequence
  Description of Artificial Sequence: Synthetic oligonucleotide
  Antisense strand to SEQ ID NO: 1176132
aaucucauucaccagagaa

SEQ ID NO: 1176134 - RNA, 19 nt, Artificial Sequence
  Description of Artificial Sequence: Synthetic oligonucleotide
  Sense strand starting at position 1210 of SEQ ID NO: 916686
guauguuuauuaccaauag

SEQ ID NO: 1176135 - RNA, 19 nt, Artificial Sequence
  Description of Artificial Sequence: Synthetic oligonucleotide
  Antisense strand to SEQ ID NO: 1176134
cuauugguaauaaacauac

SEQ ID NO: 1176136 - RNA, 19 nt, Artificial Sequence
  Description of Artificial Sequence: Synthetic oligonucleotide
  Sense strand starting at position 1307 of SEQ ID NO: 916686
uuuccuuuauggguaauaa

SEQ ID NO: 1176137 - RNA, 19 nt, Artificial Sequence
  Description of Artificial Sequence: Synthetic oligonucleotide
  Antisense strand to SEQ ID NO: 1176136
uuauuacccauaaaggaaa

SEQ ID NO: 1176138 - RNA, 19 nt, Artificial Sequence
  Description of Artificial Sequence: Synthetic oligonucleotide
  Sense strand starting at position 1308 of SEQ ID NO: 916686
uuccuuuauggguaauaau

SEQ ID NO: 1176139 - RNA, 19 nt, Artificial Sequence
  Description of Artificial Sequence: Synthetic oligonucleotide
  Antisense strand to SEQ ID NO: 1176138
auuauuacccauaaaggaa

SEQ ID NO: 1176140 - RNA, 19 nt, Artificial Sequence
  Description of Artificial Sequence: Synthetic oligonucleotide
  Sense strand starting at position 1676 of SEQ ID NO: 916686
agucuuaauguccaucaga

SEQ ID NO: 1176141 - RNA, 19 nt, Artificial Sequence
  Description of Artificial Sequence: Synthetic oligonucleotide
  Antisense strand to SEQ ID NO: 1176140
ucugauggacauuaagacu

SEQ ID NO: 1176142 - RNA, 19 nt, Artificial Sequence
  Description of Artificial Sequence: Synthetic oligonucleotide
  Sense strand starting at position 1679 of SEQ ID NO: 916686
cuuaauguccaucagaguc

SEQ ID NO: 1176143 - RNA, 19 nt, Artificial Sequence
  Description of Artificial Sequence: Synthetic oligonucleotide
  Antisense strand to SEQ ID NO: 1176142
gacucugauggacauuaag

SEQ ID NO: 1176144 - RNA, 19 nt, Artificial Sequence
  Description of Artificial Sequence: Synthetic oligonucleotide
  Sense strand starting at position 1955 of SEQ ID NO: 916686
agaagucuacaagguuaau

SEQ ID NO: 1176145 - RNA, 19 nt, Artificial Sequence
  Description of Artificial Sequence: Synthetic oligonucleotide
  Antisense strand to SEQ ID NO: 1176144
auuaaccuuguagacuucu

SEQ ID NO: 1176146 - RNA, 19 nt, Artificial Sequence
  Description of Artificial Sequence: Synthetic oligonucleotide
  Sense strand starting at position 1989 of SEQ ID NO: 916686
caagcauaugauggaguuu

SEQ ID NO: 1176147 - RNA, 19 nt, Artificial Sequence
  Description of Artificial Sequence: Synthetic oligonucleotide
  Antisense strand to SEQ ID NO: 1176146
aaacuccaucauaugcuug

SEQ ID NO: 1176148 - RNA, 19 nt, Artificial Sequence
  Description of Artificial Sequence: Synthetic oligonucleotide
  Sense strand starting at position 2023 of SEQ ID NO: 916686
gugacaucacaauaggcua

SEQ ID NO: 1176149 - RNA, 19 nt, Artificial Sequence
  Description of Artificial Sequence: Synthetic oligonucleotide
  Antisense strand to SEQ ID NO: 1176148
uagccuauugugaugucac

SEQ ID NO: 1176150 - RNA, 19 nt, Artificial Sequence
  Description of Artificial Sequence: Synthetic oligonucleotide
  Sense strand starting at position 2172 of SEQ ID NO: 916686
uuggaauguaauggguuau

SEQ ID NO: 1176151 - RNA, 19 nt, Artificial Sequence
  Description of Artificial Sequence: Synthetic oligonucleotide
  Antisense strand to SEQ ID NO: 1176150
auaacccauuacauuccaa

SEQ ID NO: 1176152 - RNA, 19 nt, Artificial Sequence
  Description of Artificial Sequence: Synthetic oligonucleotide
  Sense strand starting at position 2173 of SEQ ID NO: 916686
uggaauguaauggguuauu

SEQ ID NO: 1176153 - RNA, 19 nt, Artificial Sequence
  Description of Artificial Sequence: Synthetic oligonucleotide
  Antisense strand to SEQ ID NO: 1176152
aauaacccauuacauucca

SEQ ID NO: 1176154 - RNA, 19 nt, Artificial Sequence
  Description of Artificial Sequence: Synthetic oligonucleotide
  Sense strand starting at position 2506 of SEQ ID NO: 916686
gcuaguguguccuugauuu

SEQ ID NO: 1176155 - RNA, 19 nt, Artificial Sequence
  Description of Artificial Sequence: Synthetic oligonucleotide
  Antisense strand to SEQ ID NO: 1176154
aaaucaaggacacacuagc

SEQ ID NO: 1176156 - RNA, 19 nt, Artificial Sequence
  Description of Artificial Sequence: Synthetic oligonucleotide
  Sense strand starting at position 2660 of SEQ ID NO: 916686
cgcuuauuauuuccagcuu

SEQ ID NO: 1176157 - RNA, 19 nt, Artificial Sequence
  Description of Artificial Sequence: Synthetic oligonucleotide
  Antisense strand to SEQ ID NO: 1176156
aagcuggaaauaauaagcg

SEQ ID NO: 1176158 - RNA, 19 nt, Artificial Sequence
  Description of Artificial Sequence: Synthetic oligonucleotide
  Sense strand starting at position 2762 of SEQ ID NO: 916686
cauugaugaccuuguauga

SEQ ID NO: 1176159 - RNA, 19 nt, Artificial Sequence
  Description of Artificial Sequence: Synthetic oligonucleotide
  Antisense strand to SEQ ID NO: 1176158
ucauacaaggucaucaaug

SEQ ID NO: 1176160 - RNA, 19 nt, Artificial Sequence
  Description of Artificial Sequence: Synthetic oligonucleotide
  Sense strand starting at position 2766 of SEQ ID NO: 916686
gaugaccuuguaugauaca

SEQ ID NO: 1176161 - RNA, 19 nt, Artificial Sequence
  Description of Artificial Sequence: Synthetic oligonucleotide
  Antisense strand to SEQ ID NO: 1176160
uguaucauacaaggucauc

SEQ ID NO: 1176162 - RNA, 19 nt, Artificial Sequence
  Description of Artificial Sequence: Synthetic oligonucleotide
  Sense strand starting at position 2809 of SEQ ID NO: 916686
ggucccuuuccuggaaauc

SEQ ID NO: 1176163 - RNA, 19 nt, Artificial Sequence
  Description of Artificial Sequence: Synthetic oligonucleotide
  Antisense strand to SEQ ID NO: 1176162
gauuuccaggaaagggacc

SEQ ID NO: 1176164 - RNA, 19 nt, Artificial Sequence
  Description of Artificial Sequence: Synthetic oligonucleotide
  Sense strand starting at position 2876 of SEQ ID NO: 916686
gaauguaaacucuggaagu

SEQ ID NO: 1176165 - RNA, 19 nt, Artificial Sequence
  Description of Artificial Sequence: Synthetic oligonucleotide
  Antisense strand to SEQ ID NO: 1176164
acuuccagaguuuacauuc

SEQ ID NO: 1176166 - RNA, 19 nt, Artificial Sequence
  Description of Artificial Sequence: Synthetic oligonucleotide
  Sense strand starting at position 2961 of SEQ ID NO: 916686
cuggauuuguuagaaacaa

SEQ ID NO: 1176167 - RNA, 19 nt, Artificial Sequence
  Description of Artificial Sequence: Synthetic oligonucleotide
  Antisense strand to SEQ ID NO: 1176166
uuguuucuaacaaauccag

SEQ ID NO: 1176168 - RNA, 19 nt, Artificial Sequence
  Description of Artificial Sequence: Synthetic oligonucleotide
  Sense strand starting at position 3001 of SEQ ID NO: 916686
ucuugaguugcauauagua

SEQ ID NO: 1176169 - RNA, 19 nt, Artificial Sequence
  Description of Artificial Sequence: Synthetic oligonucleotide
  Antisense strand to SEQ ID NO: 1176168
uacuauaugcaacucaaga

SEQ ID NO: 1176170 - RNA, 19 nt, Artificial Sequence
  Description of Artificial Sequence: Synthetic oligonucleotide
  Sense strand starting at position 3162 of SEQ ID NO: 916686
cuacuagagguuggucuaa

SEQ ID NO: 1176171 - RNA, 19 nt, Artificial Sequence
  Description of Artificial Sequence: Synthetic oligonucleotide
  Antisense strand to SEQ ID NO: 1176170
uuagaccaaccucuaguag

SEQ ID NO: 1176172 - RNA, 19 nt, Artificial Sequence
  Description of Artificial Sequence: Synthetic oligonucleotide
  Sense strand starting at position 3164 of SEQ ID NO: 916686
acuagagguuggucuaaca

SEQ ID NO: 1176173 - RNA, 19 nt, Artificial Sequence
  Description of Artificial Sequence: Synthetic oligonucleotide
  Antisense strand to SEQ ID NO: 1176172
uguuagaccaaccucuagu

SEQ ID NO: 1176174 - RNA, 19 nt, Artificial Sequence
  Description of Artificial Sequence: Synthetic oligonucleotide
  Sense strand starting at position 3174 of SEQ ID NO: 916686
ggucuaacacuguagguaa

SEQ ID NO: 1176175 - RNA, 19 nt, Artificial Sequence
  Description of Artificial Sequence: Synthetic oligonucleotide
  Antisense strand to SEQ ID NO: 1176174
uuaccuacaguguuagacc

SEQ ID NO: 1176176 - RNA, 19 nt, Artificial Sequence
  Description of Artificial Sequence: Synthetic oligonucleotide
  Sense strand starting at position 3258 of SEQ ID NO: 916686
gauggaguucugggaaucu

SEQ ID NO: 1176177 - RNA, 19 nt, Artificial Sequence
  Description of Artificial Sequence: Synthetic oligonucleotide
  Antisense strand to SEQ ID NO: 1176176
agauucccagaacuccauc

SEQ ID NO: 1176178 - RNA, 19 nt, Artificial Sequence
  Description of Artificial Sequence: Synthetic oligonucleotide
  Sense strand starting at position 3297 of SEQ ID NO: 916686
auuacuauacugugaagua

SEQ ID NO: 1176179 - RNA, 19 nt, Artificial Sequence
  Description of Artificial Sequence: Synthetic oligonucleotide
  Antisense strand to SEQ ID NO: 1176178
uacuucacaguauaguaau

SEQ ID NO: 1176180 - RNA, 19 nt, Artificial Sequence
  Description of Artificial Sequence: Synthetic oligonucleotide
  Sense strand starting at position 3313 of SEQ ID NO: 916686
guacgugugcuugcuuaug

SEQ ID NO: 1176181 - RNA, 19 nt, Artificial Sequence
  Description of Artificial Sequence: Synthetic oligonucleotide
  Antisense strand to SEQ ID NO: 1176180
cauaagcaagcacacguac

SEQ ID NO: 1176182 - RNA, 19 nt, Artificial Sequence
  Description of Artificial Sequence: Synthetic oligonucleotide
  Sense strand starting at position 3334 of SEQ ID NO: 916686
ugagaauguaugcauguuu

SEQ ID NO: 1176183 - RNA, 19 nt, Artificial Sequence
  Description of Artificial Sequence: Synthetic oligonucleotide
  Antisense strand to SEQ ID NO: 1176182
aaacaugcauacauucuca

SEQ ID NO: 1176184 - RNA, 19 nt, Artificial Sequence
  Description of Artificial Sequence: Synthetic oligonucleotide
  Sense strand starting at position 3514 of SEQ ID NO: 916686
gugaucuuacaaugcagaa

SEQ ID NO: 1176185 - RNA, 19 nt, Artificial Sequence
  Description of Artificial Sequence: Synthetic oligonucleotide
  Antisense strand to SEQ ID NO: 1176184
uucugcauuguaagaucac

SEQ ID NO: 1176186 - RNA, 19 nt, Artificial Sequence
  Description of Artificial Sequence: Synthetic oligonucleotide
  Sense strand starting at position 3602 of SEQ ID NO: 916686
auuauacuguugucagaca

SEQ ID NO: 1176187 - RNA, 19 nt, Artificial Sequence
  Description of Artificial Sequence: Synthetic oligonucleotide
  Antisense strand to SEQ ID NO: 1176186
ugucugacaacaguauaau

SEQ ID NO: 1176188 - RNA, 19 nt, Artificial Sequence
  Description of Artificial Sequence: Synthetic oligonucleotide
  Sense strand starting at position 3875 of SEQ ID NO: 916686
uuggguugacacugaguga

SEQ ID NO: 1176189 - RNA, 19 nt, Artificial Sequence
  Description of Artificial Sequence: Synthetic oligonucleotide
  Antisense strand to SEQ ID NO: 1176188
ucacucagugucaacccaa

SEQ ID NO: 1176190 - RNA, 19 nt, Artificial Sequence
  Description of Artificial Sequence: Synthetic oligonucleotide
  Sense strand starting at position 3876 of SEQ ID NO: 916686
uggguugacacugagugau

SEQ ID NO: 1176191 - RNA, 19 nt, Artificial Sequence
  Description of Artificial Sequence: Synthetic oligonucleotide
  Antisense strand to SEQ ID NO: 1176190
aucacucagugucaaccca

SEQ ID NO: 1176192 - RNA, 19 nt, Artificial Sequence
  Description of Artificial Sequence: Synthetic oligonucleotide
  Sense strand starting at position 3878 of SEQ ID NO: 916686
gguugacacugagugauca

SEQ ID NO: 1176193 - RNA, 19 nt, Artificial Sequence
  Description of Artificial Sequence: Synthetic oligonucleotide
  Antisense strand to SEQ ID NO: 1176192
ugaucacucagugucaacc

SEQ ID NO: 1176194 - RNA, 19 nt, Artificial Sequence
  Description of Artificial Sequence: Synthetic oligonucleotide
  Sense strand starting at position 3879 of SEQ ID NO: 916686
guugacacugagugaucaa

SEQ ID NO: 1176195 - RNA, 19 nt, Artificial Sequence
  Description of Artificial Sequence: Synthetic oligonucleotide
  Antisense strand to SEQ ID NO: 1176194
uugaucacucagugucaac

SEQ ID NO: 1176196 - RNA, 19 nt, Artificial Sequence
  Description of Artificial Sequence: Synthetic oligonucleotide
  Sense strand starting at position 3882 of SEQ ID NO: 916686
gacacugagugaucaauca

SEQ ID NO: 1176197 - RNA, 19 nt, Artificial Sequence
  Description of Artificial Sequence: Synthetic oligonucleotide
  Antisense strand to SEQ ID NO: 1176196
ugauugaucacucaguguc

SEQ ID NO: 1176198 - RNA, 19 nt, Artificial Sequence
  Description of Artificial Sequence: Synthetic oligonucleotide
  Sense strand starting at position 3904 of SEQ ID NO: 916686
ggcugacauguauacagua

SEQ ID NO: 1176199 - RNA, 19 nt, Artificial Sequence
  Description of Artificial Sequence: Synthetic oligonucleotide
  Antisense strand to SEQ ID NO: 1176198
uacuguauacaugucagcc

SEQ ID NO: 1176200 - RNA, 19 nt, Artificial Sequence
  Description of Artificial Sequence: Synthetic oligonucleotide
  Sense strand starting at position 3977 of SEQ ID NO: 916686
ucauguuaaccguaaagac

SEQ ID NO: 1176201 - RNA, 19 nt, Artificial Sequence
  Description of Artificial Sequence: Synthetic oligonucleotide
  Antisense strand to SEQ ID NO: 1176200
gucuuuacgguuaacauga

SEQ ID NO: 1176202 - RNA, 19 nt, Artificial Sequence
  Description of Artificial Sequence: Synthetic oligonucleotide
  Sense strand starting at position 143 of SEQ ID NO: 916687
cgaguuaugauaugccuua

SEQ ID NO: 1176203 - RNA, 19 nt, Artificial Sequence
  Description of Artificial Sequence: Synthetic oligonucleotide
  Antisense strand to SEQ ID NO: 1176202
uaaggcauaucauaacucg

SEQ ID NO: 1176204 - RNA, 19 nt, Artificial Sequence
  Description of Artificial Sequence: Synthetic oligonucleotide
  Sense strand starting at position 144 of SEQ ID NO: 916687
gaguuaugauaugccuuaa

SEQ ID NO: 1176205 - RNA, 19 nt, Artificial Sequence
  Description of Artificial Sequence: Synthetic oligonucleotide
  Antisense strand to SEQ ID NO: 1176204
uuaaggcauaucauaacuc

SEQ ID NO: 1176206 - RNA, 19 nt, Artificial Sequence
  Description of Artificial Sequence: Synthetic oligonucleotide
  Sense strand starting at position 313 of SEQ ID NO: 916687
uccagucaacuuuguaaac

SEQ ID NO: 1176207 - RNA, 19 nt, Artificial Sequence
  Description of Artificial Sequence: Synthetic oligonucleotide
  Antisense strand to SEQ ID NO: 1176206
guuuacaaaguugacugga

SEQ ID NO: 1176208 - RNA, 19 nt, Artificial Sequence
  Description of Artificial Sequence: Synthetic oligonucleotide
  Sense strand starting at position 314 of SEQ ID NO: 916687
ccagucaacuuuguaaaca

SEQ ID NO: 1176209 - RNA, 19 nt, Artificial Sequence
  Description of Artificial Sequence: Synthetic oligonucleotide
  Antisense strand to SEQ ID NO: 1176208
uguuuacaaaguugacugg

SEQ ID NO: 1176210 - RNA, 19 nt, Artificial Sequence
  Description of Artificial Sequence: Synthetic oligonucleotide
  Sense strand starting at position 603 of SEQ ID NO: 916687
ggaagcuaucgcugcaaag

SEQ ID NO: 1176211 - RNA, 19 nt, Artificial Sequence
  Description of Artificial Sequence: Synthetic oligonucleotide
  Antisense strand to SEQ ID NO: 1176210
cuuugcagcgauagcuucc

SEQ ID NO: 1176212 - RNA, 19 nt, Artificial Sequence
  Description of Artificial Sequence: Synthetic oligonucleotide
  Sense strand starting at position 644 of SEQ ID NO: 916687
caaguugcccgcuaagaaa

SEQ ID NO: 1176213 - RNA, 19 nt, Artificial Sequence
  Description of Artificial Sequence: Synthetic oligonucleotide
  Antisense strand to SEQ ID NO: 1176212
uuucuuagcgggcaacuug

SEQ ID NO: 1176214 - RNA, 19 nt, Artificial Sequence
  Description of Artificial Sequence: Synthetic oligonucleotide
  Sense strand starting at position 765 of SEQ ID NO: 916687
gcaacauuaucucuggauu

SEQ ID NO: 1176215 - RNA, 19 nt, Artificial Sequence
  Description of Artificial Sequence: Synthetic oligonucleotide
  Antisense strand to SEQ ID NO: 1176214
aauccagagauaauguugc

SEQ ID NO: 1176216 - RNA, 19 nt, Artificial Sequence
  Description of Artificial Sequence: Synthetic oligonucleotide
  Sense strand starting at position 771 of SEQ ID NO: 916687
uuaucucuggauugccaau

SEQ ID NO: 1176217 - RNA, 19 nt, Artificial Sequence
  Description of Artificial Sequence: Synthetic oligonucleotide
  Antisense strand to SEQ ID NO: 1176216
auuggcaauccagagauaa

SEQ ID NO: 1176218 - RNA, 19 nt, Artificial Sequence
  Description of Artificial Sequence: Synthetic oligonucleotide
  Sense strand starting at position 802 of SEQ ID NO: 916687
uuuggcuaacauugagaga

SEQ ID NO: 1176219 - RNA, 19 nt, Artificial Sequence
  Description of Artificial Sequence: Synthetic oligonucleotide
  Antisense strand to SEQ ID NO: 1176218
ucucucaauguuagccaaa

SEQ ID NO: 1176220 - RNA, 19 nt, Artificial Sequence
  Description of Artificial Sequence: Synthetic oligonucleotide
  Sense strand starting at position 874 of SEQ ID NO: 916687
aaaguuugugaccagcuuu

SEQ ID NO: 1176221 - RNA, 19 nt, Artificial Sequence
  Description of Artificial Sequence: Synthetic oligonucleotide
  Antisense strand to SEQ ID NO: 1176220
aaagcuggucacaaacuuu

SEQ ID NO: 1176222 - RNA, 19 nt, Artificial Sequence
  Description of Artificial Sequence: Synthetic oligonucleotide
  Sense strand starting at position 1026 of SEQ ID NO: 916687
gcaaacuucgaguaucaga

SEQ ID NO: 1176223 - RNA, 19 nt, Artificial Sequence
  Description of Artificial Sequence: Synthetic oligonucleotide
  Antisense strand to SEQ ID NO: 1176222
ucugauacucgaaguuugc

SEQ ID NO: 1176224 - RNA, 19 nt, Artificial Sequence
  Description of Artificial Sequence: Synthetic oligonucleotide
  Sense strand starting at position 1220 of SEQ ID NO: 916687
ggcuuagggcucuagauua

SEQ ID NO: 1176225 - RNA, 19 nt, Artificial Sequence
  Description of Artificial Sequence: Synthetic oligonucleotide
  Antisense strand to SEQ ID NO: 1176224
uaaucuagagcccuaagcc

SEQ ID NO: 1176226 - RNA, 19 nt, Artificial Sequence
  Description of Artificial Sequence: Synthetic oligonucleotide
  Sense strand starting at position 1225 of SEQ ID NO: 916687
agggcucuagauuacuauu

SEQ ID NO: 1176227 - RNA, 19 nt, Artificial Sequence
  Description of Artificial Sequence: Synthetic oligonucleotide
  Antisense strand to SEQ ID NO: 1176226
aauaguaaucuagagcccu

SEQ ID NO: 1176228 - RNA, 19 nt, Artificial Sequence
  Description of Artificial Sequence: Synthetic oligonucleotide
  Sense strand starting at position 1227 of SEQ ID NO: 916687
ggcucuagauuacuauuau

SEQ ID NO: 1176229 - RNA, 19 nt, Artificial Sequence
  Description of Artificial Sequence: Synthetic oligonucleotide
  Antisense strand to SEQ ID NO: 1176228
auaauaguaaucuagagcc

SEQ ID NO: 1176230 - RNA, 19 nt, Artificial Sequence
  Description of Artificial Sequence: Synthetic oligonucleotide
  Sense strand starting at position 1318 of SEQ ID NO: 916687
cugccuaaccguccguaau

SEQ ID NO: 1176231 - RNA, 19 nt, Artificial Sequence
  Description of Artificial Sequence: Synthetic oligonucleotide
  Antisense strand to SEQ ID NO: 1176230
auuacggacgguuaggcag

SEQ ID NO: 1176232 - RNA, 19 nt, Artificial Sequence
  Description of Artificial Sequence: Synthetic oligonucleotide
  Sense strand starting at position 1445 of SEQ ID NO: 916687
cagacuuauccacgaaugg

SEQ ID NO: 1176233 - RNA, 19 nt, Artificial Sequence
  Description of Artificial Sequence: Synthetic oligonucleotide
  Antisense strand to SEQ ID NO: 1176232
ccauucguggauaagucug

SEQ ID NO: 1176234 - RNA, 19 nt, Artificial Sequence
  Description of Artificial Sequence: Synthetic oligonucleotide
  Sense strand starting at position 1766 of SEQ ID NO: 916687
uccacauuggcguaauuga

SEQ ID NO: 1176235 - RNA, 19 nt, Artificial Sequence
  Description of Artificial Sequence: Synthetic oligonucleotide
  Antisense strand to SEQ ID NO: 1176234
ucaauuacgccaaugugga

SEQ ID NO: 1176236 - RNA, 19 nt, Artificial Sequence
  Description of Artificial Sequence: Synthetic oligonucleotide
  Sense strand starting at position 2119 of SEQ ID NO: 916687
cgagacuuccaguauccca

SEQ ID NO: 1176237 - RNA, 19 nt, Artificial Sequence
  Description of Artificial Sequence: Synthetic oligonucleotide
  Antisense strand to SEQ ID NO: 1176236
ugggauacuggaagucucg

SEQ ID NO: 1176238 - RNA, 19 nt, Artificial Sequence
  Description of Artificial Sequence: Synthetic oligonucleotide
  Sense strand starting at position 2557 of SEQ ID NO: 916687
uuccuauuggccgcguuau

SEQ ID NO: 1176239 - RNA, 19 nt, Artificial Sequence
  Description of Artificial Sequence: Synthetic oligonucleotide
  Antisense strand to SEQ ID NO: 1176238
auaacgcggccaauaggaa

SEQ ID NO: 1176240 - RNA, 19 nt, Artificial Sequence
  Description of Artificial Sequence: Synthetic oligonucleotide
  Sense strand starting at position 2589 of SEQ ID NO: 916687
aggauaggucgugaaguag

SEQ ID NO: 1176241 - RNA, 19 nt, Artificial Sequence
  Description of Artificial Sequence: Synthetic oligonucleotide
  Antisense strand to SEQ ID NO: 1176240
cuacuucacgaccuauccu

SEQ ID NO: 1176242 - RNA, 19 nt, Artificial Sequence
  Description of Artificial Sequence: Synthetic oligonucleotide
  Sense strand starting at position 2613 of SEQ ID NO: 916687
gcugguugaucuuucuaag

SEQ ID NO: 1176243 - RNA, 19 nt, Artificial Sequence
  Description of Artificial Sequence: Synthetic oligonucleotide
  Antisense strand to SEQ ID NO: 1176242
cuuagaaagaucaaccagc

SEQ ID NO: 1176244 - RNA, 19 nt, Artificial Sequence
  Description of Artificial Sequence: Synthetic oligonucleotide
  Sense strand starting at position 2641 of SEQ ID NO: 916687
ugaacuugggcaugucaga

SEQ ID NO: 1176245 - RNA, 19 nt, Artificial Sequence
  Description of Artificial Sequence: Synthetic oligonucleotide
  Antisense strand to SEQ ID NO: 1176244
ucugacaugcccaaguuca

SEQ ID NO: 1176246 - RNA, 19 nt, Artificial Sequence
  Description of Artificial Sequence: Synthetic oligonucleotide
  Sense strand starting at position 2704 of SEQ ID NO: 916687
aaugguaaguucuugaggu

SEQ ID NO: 1176247 - RNA, 19 nt, Artificial Sequence
  Description of Artificial Sequence: Synthetic oligonucleotide
  Antisense strand to SEQ ID NO: 1176246
accucaagaacuuaccauu

SEQ ID NO: 1176248 - RNA, 19 nt, Artificial Sequence
  Description of Artificial Sequence: Synthetic oligonucleotide
  Sense strand starting at position 2749 of SEQ ID NO: 916687
gcuguaauugcuguggcuu

SEQ ID NO: 1176249 - RNA, 19 nt, Artificial Sequence
  Description of Artificial Sequence: Synthetic oligonucleotide
  Antisense strand to SEQ ID NO: 1176248
aagccacagcaauuacagc

SEQ ID NO: 1176250 - RNA, 19 nt, Artificial Sequence
  Description of Artificial Sequence: Synthetic oligonucleotide
  Sense strand starting at position 2865 of SEQ ID NO: 916687
gcuuuaagccugucucgua

SEQ ID NO: 1176251 - RNA, 19 nt, Artificial Sequence
  Description of Artificial Sequence: Synthetic oligonucleotide
  Antisense strand to SEQ ID NO: 1176250
uacgagacaggcuuaaagc

SEQ ID NO: 1176252 - RNA, 19 nt, Artificial Sequence
  Description of Artificial Sequence: Synthetic oligonucleotide
  Sense strand starting at position 2880 of SEQ ID NO: 916687
cguacuacccaugagcuua

SEQ ID NO: 1176253 - RNA, 19 nt, Artificial Sequence
  Description of Artificial Sequence: Synthetic oligonucleotide
  Antisense strand to SEQ ID NO: 1176252
uaagcucauggguaguacg

SEQ ID NO: 1176254 - RNA, 19 nt, Artificial Sequence
  Description of Artificial Sequence: Synthetic oligonucleotide
  Sense strand starting at position 2896 of SEQ ID NO: 916687
uuagcucagccugauuacu

SEQ ID NO: 1176255 - RNA, 19 nt, Artificial Sequence
  Description of Artificial Sequence: Synthetic oligonucleotide
  Antisense strand to SEQ ID NO: 1176254
aguaaucaggcugagcuaa

SEQ ID NO: 1176256 - RNA, 19 nt, Artificial Sequence
  Description of Artificial Sequence: Synthetic oligonucleotide
  Sense strand starting at position 2905 of SEQ ID NO: 916687
ccugauuacugguccuuac

SEQ ID NO: 1176257 - RNA, 19 nt, Artificial Sequence
  Description of Artificial Sequence: Synthetic oligonucleotide
  Antisense strand to SEQ ID NO: 1176256
guaaggaccaguaaucagg

SEQ ID NO: 1176258 - RNA, 19 nt, Artificial Sequence
  Description of Artificial Sequence: Synthetic oligonucleotide
  Sense strand starting at position 3065 of SEQ ID NO: 916687
uguacuaggcacugaagau

SEQ ID NO: 1176259 - RNA, 19 nt, Artificial Sequence
  Description of Artificial Sequence: Synthetic oligonucleotide
  Antisense strand to SEQ ID NO: 1176258
aucuucagugccuaguaca

SEQ ID NO: 1176260 - RNA, 19 nt, Artificial Sequence
  Description of Artificial Sequence: Synthetic oligonucleotide
  Sense strand starting at position 3173 of SEQ ID NO: 916687
uuaacuuugccuuguauga

SEQ ID NO: 1176261 - RNA, 19 nt, Artificial Sequence
  Description of Artificial Sequence: Synthetic oligonucleotide
  Antisense strand to SEQ ID NO: 1176260
ucauacaaggcaaaguuaa

SEQ ID NO: 1176262 - RNA, 19 nt, Artificial Sequence
  Description of Artificial Sequence: Synthetic oligonucleotide
  Sense strand starting at position 3209 of SEQ ID NO: 916687
uaggauuuguaauacugau

SEQ ID NO: 1176263 - RNA, 19 nt, Artificial Sequence
  Description of Artificial Sequence: Synthetic oligonucleotide
  Antisense strand to SEQ ID NO: 1176262
aucaguauuacaaauccua

SEQ ID NO: 1176264 - RNA, 19 nt, Artificial Sequence
  Description of Artificial Sequence: Synthetic oligonucleotide
  Sense strand starting at position 3370 of SEQ ID NO: 916687
uagacagagucccucaaga

SEQ ID NO: 1176265 - RNA, 19 nt, Artificial Sequence
  Description of Artificial Sequence: Synthetic oligonucleotide
  Antisense strand to SEQ ID NO: 1176264
ucuugagggacucugucua

SEQ ID NO: 1176266 - RNA, 19 nt, Artificial Sequence
  Description of Artificial Sequence: Synthetic oligonucleotide
  Sense strand starting at position 3605 of SEQ ID NO: 916687
acugucugccugugagaca

SEQ ID NO: 1176267 - RNA, 19 nt, Artificial Sequence
  Description of Artificial Sequence: Synthetic oligonucleotide
  Antisense strand to SEQ ID NO: 1176266
ugucucacaggcagacagu

SEQ ID NO: 1176268 - RNA, 19 nt, Artificial Sequence
  Description of Artificial Sequence: Synthetic oligonucleotide
  Sense strand starting at position 3631 of SEQ ID NO: 916687
gaaccacaguuauuaggau

SEQ ID NO: 1176269 - RNA, 19 nt, Artificial Sequence
  Description of Artificial Sequence: Synthetic oligonucleotide
  Antisense strand to SEQ ID NO: 1176268
auccuaauaacugugguuc

SEQ ID NO: 1176270 - RNA, 19 nt, Artificial Sequence
  Description of Artificial Sequence: Synthetic oligonucleotide
  Sense strand starting at position 3637 of SEQ ID NO: 916687
caguuauuaggauagcgau

SEQ ID NO: 1176271 - RNA, 19 nt, Artificial Sequence
  Description of Artificial Sequence: Synthetic oligonucleotide
  Antisense strand to SEQ ID NO: 1176270
aucgcuauccuaauaacug

SEQ ID NO: 1176272 - RNA, 19 nt, Artificial Sequence
  Description of Artificial Sequence: Synthetic oligonucleotide
  Sense strand starting at position 3778 of SEQ ID NO: 916687
uugaauacucaugguguua

SEQ ID NO: 1176273 - RNA, 19 nt, Artificial Sequence
  Description of Artificial Sequence: Synthetic oligonucleotide
  Antisense strand to SEQ ID NO: 1176272
uaacaccaugaguauucaa

SEQ ID NO: 1176274 - RNA, 19 nt, Artificial Sequence
  Description of Artificial Sequence: Synthetic oligonucleotide
  Sense strand starting at position 3787 of SEQ ID NO: 916687
caugguguuagguacugaa

SEQ ID NO: 1176275 - RNA, 19 nt, Artificial Sequence
  Description of Artificial Sequence: Synthetic oligonucleotide
  Antisense strand to SEQ ID NO: 1176274
uucaguaccuaacaccaug

SEQ ID NO: 1176276 - RNA, 19 nt, Artificial Sequence
  Description of Artificial Sequence: Synthetic oligonucleotide
  Sense strand starting at position 3877 of SEQ ID NO: 916687
ugaggauugccuugucagc

SEQ ID NO: 1176277 - RNA, 19 nt, Artificial Sequence
  Description of Artificial Sequence: Synthetic oligonucleotide
  Antisense strand to SEQ ID NO: 1176276
gcugacaaggcaauccuca

SEQ ID NO: 1176278 - RNA, 19 nt, Artificial Sequence
  Description of Artificial Sequence: Synthetic oligonucleotide
  Sense strand starting at position 3971 of SEQ ID NO: 916687
gugcccuugcaguauagau

SEQ ID NO: 1176279 - RNA, 19 nt, Artificial Sequence
  Description of Artificial Sequence: Synthetic oligonucleotide
  Antisense strand to SEQ ID NO: 1176278
aucuauacugcaagggcac

SEQ ID NO: 1176280 - RNA, 19 nt, Artificial Sequence
  Description of Artificial Sequence: Synthetic oligonucleotide
  Sense strand starting at position 3979 of SEQ ID NO: 916687
gcaguauagaugggaaucu

SEQ ID NO: 1176281 - RNA, 19 nt, Artificial Sequence
  Description of Artificial Sequence: Synthetic oligonucleotide
  Antisense strand to SEQ ID NO: 1176280
agauucccaucuauacugc

SEQ ID NO: 1176282 - RNA, 19 nt, Artificial Sequence
  Description of Artificial Sequence: Synthetic oligonucleotide
  Sense strand starting at position 66 of SEQ ID NO: 916688
uccagucaacuuuguaaac

SEQ ID NO: 1176283 - RNA, 19 nt, Artificial Sequence
  Description of Artificial Sequence: Synthetic oligonucleotide
  Antisense strand to SEQ ID NO: 1176282
guuuacaaaguugacugga

SEQ ID NO: 1176284 - RNA, 19 nt, Artificial Sequence
  Description of Artificial Sequence: Synthetic oligonucleotide
  Sense strand starting at position 67 of SEQ ID NO: 916688
ccagucaacuuuguaaaca

SEQ ID NO: 1176285 - RNA, 19 nt, Artificial Sequence
  Description of Artificial Sequence: Synthetic oligonucleotide
  Antisense strand to SEQ ID NO: 1176284
uguuuacaaaguugacugg

SEQ ID NO: 1176286 - RNA, 19 nt, Artificial Sequence
  Description of Artificial Sequence: Synthetic oligonucleotide
  Sense strand starting at position 397 of SEQ ID NO: 916688
caaguugcccgcuaagaaa

SEQ ID NO: 1176287 - RNA, 19 nt, Artificial Sequence
  Description of Artificial Sequence: Synthetic oligonucleotide
  Antisense strand to SEQ ID NO: 1176286
uuucuuagcgggcaacuug

SEQ ID NO: 1176288 - RNA, 19 nt, Artificial Sequence
  Description of Artificial Sequence: Synthetic oligonucleotide
  Sense strand starting at position 518 of SEQ ID NO: 916688
gcaacauuaucucuggauu

SEQ ID NO: 1176289 - RNA, 19 nt, Artificial Sequence
  Description of Artificial Sequence: Synthetic oligonucleotide
  Antisense strand to SEQ ID NO: 1176288
aauccagagauaauguugc

SEQ ID NO: 1176290 - RNA, 19 nt, Artificial Sequence
  Description of Artificial Sequence: Synthetic oligonucleotide
  Sense strand starting at position 524 of SEQ ID NO: 916688
uuaucucuggauugccaau

SEQ ID NO: 1176291 - RNA, 19 nt, Artificial Sequence
  Description of Artificial Sequence: Synthetic oligonucleotide
  Antisense strand to SEQ ID NO: 1176290
auuggcaauccagagauaa

SEQ ID NO: 1176292 - RNA, 19 nt, Artificial Sequence
  Description of Artificial Sequence: Synthetic oligonucleotide
  Sense strand starting at position 555 of SEQ ID NO: 916688
uuuggcuaacauugagaga

SEQ ID NO: 1176293 - RNA, 19 nt, Artificial Sequence
  Description of Artificial Sequence: Synthetic oligonucleotide
  Antisense strand to SEQ ID NO: 1176292
ucucucaauguuagccaaa

SEQ ID NO: 1176294 - RNA, 19 nt, Artificial Sequence
  Description of Artificial Sequence: Synthetic oligonucleotide
  Sense strand starting at position 627 of SEQ ID NO: 916688
aaaguuugugaccagcuuu

SEQ ID NO: 1176295 - RNA, 19 nt, Artificial Sequence
  Description of Artificial Sequence: Synthetic oligonucleotide
  Antisense strand to SEQ ID NO: 1176294
aaagcuggucacaaacuuu

SEQ ID NO: 1176296 - RNA, 19 nt, Artificial Sequence
  Description of Artificial Sequence: Synthetic oligonucleotide
  Sense strand starting at position 779 of SEQ ID NO: 916688
gcaaacuucgaguaucaga

SEQ ID NO: 1176297 - RNA, 19 nt, Artificial Sequence
  Description of Artificial Sequence: Synthetic oligonucleotide
  Antisense strand to SEQ ID NO: 1176296
ucugauacucgaaguuugc

SEQ ID NO: 1176298 - RNA, 19 nt, Artificial Sequence
  Description of Artificial Sequence: Synthetic oligonucleotide
  Sense strand starting at position 973 of SEQ ID NO: 916688
ggcuuagggcucuagauua

SEQ ID NO: 1176299 - RNA, 19 nt, Artificial Sequence
  Description of Artificial Sequence: Synthetic oligonucleotide
  Antisense strand to SEQ ID NO: 1176298
uaaucuagagcccuaagcc

SEQ ID NO: 1176300 - RNA, 19 nt, Artificial Sequence
  Description of Artificial Sequence: Synthetic oligonucleotide
  Sense strand starting at position 978 of SEQ ID NO: 916688
agggcucuagauuacuauu

SEQ ID NO: 1176301 - RNA, 19 nt, Artificial Sequence
  Description of Artificial Sequence: Synthetic oligonucleotide
  Antisense strand to SEQ ID NO: 1176300
aauaguaaucuagagcccu

SEQ ID NO: 1176302 - RNA, 19 nt, Artificial Sequence
  Description of Artificial Sequence: Synthetic oligonucleotide
  Sense strand starting at position 980 of SEQ ID NO: 916688
ggcucuagauuacuauuau

SEQ ID NO: 1176303 - RNA, 19 nt, Artificial Sequence
  Description of Artificial Sequence: Synthetic oligonucleotide
  Antisense strand to SEQ ID NO: 1176302
auaauaguaaucuagagcc

SEQ ID NO: 1176304 - RNA, 19 nt, Artificial Sequence
  Description of Artificial Sequence: Synthetic oligonucleotide
  Sense strand starting at position 1071 of SEQ ID NO: 916688
cugccuaaccguccguaau

SEQ ID NO: 1176305 - RNA, 19 nt, Artificial Sequence
  Description of Artificial Sequence: Synthetic oligonucleotide
  Antisense strand to SEQ ID NO: 1176304
auuacggacgguuaggcag

SEQ ID NO: 1176306 - RNA, 19 nt, Artificial Sequence
  Description of Artificial Sequence: Synthetic oligonucleotide
  Sense strand starting at position 1198 of SEQ ID NO: 916688
cagacuuauccacgaaugg

SEQ ID NO: 1176307 - RNA, 19 nt, Artificial Sequence
  Description of Artificial Sequence: Synthetic oligonucleotide
  Antisense strand to SEQ ID NO: 1176306
ccauucguggauaagucug

SEQ ID NO: 1176308 - RNA, 19 nt, Artificial Sequence
  Description of Artificial Sequence: Synthetic oligonucleotide
  Sense strand starting at position 1519 of SEQ ID NO: 916688
uccacauuggcguaauuga

SEQ ID NO: 1176309 - RNA, 19 nt, Artificial Sequence
  Description of Artificial Sequence: Synthetic oligonucleotide
  Antisense strand to SEQ ID NO: 1176308
ucaauuacgccaaugugga

SEQ ID NO: 1176310 - RNA, 19 nt, Artificial Sequence
  Description of Artificial Sequence: Synthetic oligonucleotide
  Sense strand starting at position 1872 of SEQ ID NO: 916688
cgagacuuccaguauccca

SEQ ID NO: 1176311 - RNA, 19 nt, Artificial Sequence
  Description of Artificial Sequence: Synthetic oligonucleotide
  Antisense strand to SEQ ID NO: 1176310
ugggauacuggaagucucg

SEQ ID NO: 1176312 - RNA, 19 nt, Artificial Sequence
  Description of Artificial Sequence: Synthetic oligonucleotide
  Sense strand starting at position 2310 of SEQ ID NO: 916688
uuccuauuggccgcguuau

SEQ ID NO: 1176313 - RNA, 19 nt, Artificial Sequence
  Description of Artificial Sequence: Synthetic oligonucleotide
  Antisense strand to SEQ ID NO: 1176312
auaacgcggccaauaggaa

SEQ ID NO: 1176314 - RNA, 19 nt, Artificial Sequence
  Description of Artificial Sequence: Synthetic oligonucleotide
  Sense strand starting at position 2342 of SEQ ID NO: 916688
aggauaggucgugaaguag

SEQ ID NO: 1176315 - RNA, 19 nt, Artificial Sequence
  Description of Artificial Sequence: Synthetic oligonucleotide
  Antisense strand to SEQ ID NO: 1176314
cuacuucacgaccuauccu

SEQ ID NO: 1176316 - RNA, 19 nt, Artificial Sequence
  Description of Artificial Sequence: Synthetic oligonucleotide
  Sense strand starting at position 2366 of SEQ ID NO: 916688
gcugguugaucuuucuaag

SEQ ID NO: 1176317 - RNA, 19 nt, Artificial Sequence
  Description of Artificial Sequence: Synthetic oligonucleotide
  Antisense strand to SEQ ID NO: 1176316
cuuagaaagaucaaccagc

SEQ ID NO: 1176318 - RNA, 19 nt, Artificial Sequence
  Description of Artificial Sequence: Synthetic oligonucleotide
  Sense strand starting at position 2394 of SEQ ID NO: 916688
ugaacuugggcaugucaga

SEQ ID NO: 1176319 - RNA, 19 nt, Artificial Sequence
  Description of Artificial Sequence: Synthetic oligonucleotide
  Antisense strand to SEQ ID NO: 1176318
ucugacaugcccaaguuca

SEQ ID NO: 1176320 - RNA, 19 nt, Artificial Sequence
  Description of Artificial Sequence: Synthetic oligonucleotide
  Sense strand starting at position 2457 of SEQ ID NO: 916688
aaugguaaguucuugaggu

SEQ ID NO: 1176321 - RNA, 19 nt, Artificial Sequence
  Description of Artificial Sequence: Synthetic oligonucleotide
  Antisense strand to SEQ ID NO: 1176320
accucaagaacuuaccauu

SEQ ID NO: 1176322 - RNA, 19 nt, Artificial Sequence
  Description of Artificial Sequence: Synthetic oligonucleotide
  Sense strand starting at position 2502 of SEQ ID NO: 916688
gcuguaauugcuguggcuu

SEQ ID NO: 1176323 - RNA, 19 nt, Artificial Sequence
  Description of Artificial Sequence: Synthetic oligonucleotide
  Antisense strand to SEQ ID NO: 1176322
aagccacagcaauuacagc

SEQ ID NO: 1176324 - RNA, 19 nt, Artificial Sequence
  Description of Artificial Sequence: Synthetic oligonucleotide
  Sense strand starting at position 2618 of SEQ ID NO: 916688
gcuuuaagccugucucgua

SEQ ID NO: 1176325 - RNA, 19 nt, Artificial Sequence
  Description of Artificial Sequence: Synthetic oligonucleotide
  Antisense strand to SEQ ID NO: 1176324
uacgagacaggcuuaaagc

SEQ ID NO: 1176326 - RNA, 19 nt, Artificial Sequence
  Description of Artificial Sequence: Synthetic oligonucleotide
  Sense strand starting at position 2633 of SEQ ID NO: 916688
cguacuacccaugagcuua

SEQ ID NO: 1176327 - RNA, 19 nt, Artificial Sequence
  Description of Artificial Sequence: Synthetic oligonucleotide
  Antisense strand to SEQ ID NO: 1176326
uaagcucauggguaguacg

SEQ ID NO: 1176328 - RNA, 19 nt, Artificial Sequence
  Description of Artificial Sequence: Synthetic oligonucleotide
  Sense strand starting at position 2649 of SEQ ID NO: 916688
uuagcucagccugauuacu

SEQ ID NO: 1176329 - RNA, 19 nt, Artificial Sequence
  Description of Artificial Sequence: Synthetic oligonucleotide
  Antisense strand to SEQ ID NO: 1176328
aguaaucaggcugagcuaa

SEQ ID NO: 1176330 - RNA, 19 nt, Artificial Sequence
  Description of Artificial Sequence: Synthetic oligonucleotide
  Sense strand starting at position 2658 of SEQ ID NO: 916688
ccugauuacugguccuuac

SEQ ID NO: 1176331 - RNA, 19 nt, Artificial Sequence
  Description of Artificial Sequence: Synthetic oligonucleotide
  Antisense strand to SEQ ID NO: 1176330
guaaggaccaguaaucagg

SEQ ID NO: 1176332 - RNA, 19 nt, Artificial Sequence
  Description of Artificial Sequence: Synthetic oligonucleotide
  Sense strand starting at position 2818 of SEQ ID NO: 916688
uguacuaggcacugaagau

SEQ ID NO: 1176333 - RNA, 19 nt, Artificial Sequence
  Description of Artificial Sequence: Synthetic oligonucleotide
  Antisense strand to SEQ ID NO: 1176332
aucuucagugccuaguaca

SEQ ID NO: 1176334 - RNA, 19 nt, Artificial Sequence
  Description of Artificial Sequence: Synthetic oligonucleotide
  Sense strand starting at position 2926 of SEQ ID NO: 916688
uuaacuuugccuuguauga

SEQ ID NO: 1176335 - RNA, 19 nt, Artificial Sequence
  Description of Artificial Sequence: Synthetic oligonucleotide
  Antisense strand to SEQ ID NO: 1176334
ucauacaaggcaaaguuaa

SEQ ID NO: 1176336 - RNA, 19 nt, Artificial Sequence
  Description of Artificial Sequence: Synthetic oligonucleotide
  Sense strand starting at position 2962 of SEQ ID NO: 916688
uaggauuuguaauacugau

SEQ ID NO: 1176337 - RNA, 19 nt, Artificial Sequence
  Description of Artificial Sequence: Synthetic oligonucleotide
  Antisense strand to SEQ ID NO: 1176336
aucaguauuacaaauccua

SEQ ID NO: 1176338 - RNA, 19 nt, Artificial Sequence
  Description of Artificial Sequence: Synthetic oligonucleotide
  Sense strand starting at position 3123 of SEQ ID NO: 916688
uagacagagucccucaaga

SEQ ID NO: 1176339 - RNA, 19 nt, Artificial Sequence
  Description of Artificial Sequence: Synthetic oligonucleotide
  Antisense strand to SEQ ID NO: 1176338
ucuugagggacucugucua

SEQ ID NO: 1176340 - RNA, 19 nt, Artificial Sequence
  Description of Artificial Sequence: Synthetic oligonucleotide
  Sense strand starting at position 3358 of SEQ ID NO: 916688
acugucugccugugagaca

SEQ ID NO: 1176341 - RNA, 19 nt, Artificial Sequence
  Description of Artificial Sequence: Synthetic oligonucleotide
  Antisense strand to SEQ ID NO: 1176340
ugucucacaggcagacagu

SEQ ID NO: 1176342 - RNA, 19 nt, Artificial Sequence
  Description of Artificial Sequence: Synthetic oligonucleotide
  Sense strand starting at position 3384 of SEQ ID NO: 916688
gaaccacaguuauuaggau

SEQ ID NO: 1176343 - RNA, 19 nt, Artificial Sequence
  Description of Artificial Sequence: Synthetic oligonucleotide
  Antisense strand to SEQ ID NO: 1176342
auccuaauaacugugguuc

SEQ ID NO: 1176344 - RNA, 19 nt, Artificial Sequence
  Description of Artificial Sequence: Synthetic oligonucleotide
  Sense strand starting at position 3390 of SEQ ID NO: 916688
caguuauuaggauagcgau

SEQ ID NO: 1176345 - RNA, 19 nt, Artificial Sequence
  Description of Artificial Sequence: Synthetic oligonucleotide
  Antisense strand to SEQ ID NO: 1176344
aucgcuauccuaauaacug

SEQ ID NO: 1176346 - RNA, 19 nt, Artificial Sequence
  Description of Artificial Sequence: Synthetic oligonucleotide
  Sense strand starting at position 3531 of SEQ ID NO: 916688
uugaauacucaugguguua

SEQ ID NO: 1176347 - RNA, 19 nt, Artificial Sequence
  Description of Artificial Sequence: Synthetic oligonucleotide
  Antisense strand to SEQ ID NO: 1176346
uaacaccaugaguauucaa

SEQ ID NO: 1176348 - RNA, 19 nt, Artificial Sequence
  Description of Artificial Sequence: Synthetic oligonucleotide
  Sense strand starting at position 3540 of SEQ ID NO: 916688
caugguguuagguacugaa

SEQ ID NO: 1176349 - RNA, 19 nt, Artificial Sequence
  Description of Artificial Sequence: Synthetic oligonucleotide
  Antisense strand to SEQ ID NO: 1176348
uucaguaccuaacaccaug

SEQ ID NO: 1176350 - RNA, 19 nt, Artificial Sequence
  Description of Artificial Sequence: Synthetic oligonucleotide
  Sense strand starting at position 3724 of SEQ ID NO: 916688
gugcccuugcaguauagau

SEQ ID NO: 1176351 - RNA, 19 nt, Artificial Sequence
  Description of Artificial Sequence: Synthetic oligonucleotide
  Antisense strand to SEQ ID NO: 1176350
aucuauacugcaagggcac

SEQ ID NO: 1176352 - RNA, 19 nt, Artificial Sequence
  Description of Artificial Sequence: Synthetic oligonucleotide
  Sense strand starting at position 3732 of SEQ ID NO: 916688
gcaguauagaugggaaucu

SEQ ID NO: 1176353 - RNA, 19 nt, Artificial Sequence
  Description of Artificial Sequence: Synthetic oligonucleotide
  Antisense strand to SEQ ID NO: 1176352
agauucccaucuauacugc

SEQ ID NO: 1176354 - RNA, 19 nt, Artificial Sequence
  Description of Artificial Sequence: Synthetic oligonucleotide
  Sense strand starting at position 3769 of SEQ ID NO: 916688
aaaggaauuuagugggaag

SEQ ID NO: 1176355 - RNA, 19 nt, Artificial Sequence
  Description of Artificial Sequence: Synthetic oligonucleotide
  Antisense strand to SEQ ID NO: 1176354
cuucccacuaaauuccuuu

SEQ ID NO: 1176356 - RNA, 19 nt, Artificial Sequence
  Description of Artificial Sequence: Synthetic oligonucleotide
  Sense strand starting at position 3772 of SEQ ID NO: 916688
ggaauuuagugggaaguau

SEQ ID NO: 1176357 - RNA, 19 nt, Artificial Sequence
  Description of Artificial Sequence: Synthetic oligonucleotide
  Antisense strand to SEQ ID NO: 1176356
auacuucccacuaaauucc

SEQ ID NO: 1176358 - RNA, 19 nt, Artificial Sequence
  Description of Artificial Sequence: Synthetic oligonucleotide
  Sense strand starting at position 3784 of SEQ ID NO: 916688
gaaguaugcuauuccugau

SEQ ID NO: 1176359 - RNA, 19 nt, Artificial Sequence
  Description of Artificial Sequence: Synthetic oligonucleotide
  Antisense strand to SEQ ID NO: 1176358
aucaggaauagcauacuuc

SEQ ID NO: 1176360 - RNA, 19 nt, Artificial Sequence
  Description of Artificial Sequence: Synthetic oligonucleotide
  Sense strand starting at position 3964 of SEQ ID NO: 916688
gggucaagaugcucuaugu

SEQ ID NO: 1176361 - RNA, 19 nt, Artificial Sequence
  Description of Artificial Sequence: Synthetic oligonucleotide
  Antisense strand to SEQ ID NO: 1176360
acauagagcaucuugaccc

SEQ ID NO: 1176362 - RNA, 19 nt, Artificial Sequence
  Description of Artificial Sequence: Synthetic oligonucleotide
  Sense strand starting at position 44 of SEQ ID NO: 916689
cccucugacuccucaggau

SEQ ID NO: 1176363 - RNA, 19 nt, Artificial Sequence
  Description of Artificial Sequence: Synthetic oligonucleotide
  Antisense strand to SEQ ID NO: 1176362
auccugaggagucagaggg

SEQ ID NO: 1176364 - RNA, 19 nt, Artificial Sequence
  Description of Artificial Sequence: Synthetic oligonucleotide
  Sense strand starting at position 268 of SEQ ID NO: 916689
ugagguuauccuggcugau

SEQ ID NO: 1176365 - RNA, 19 nt, Artificial Sequence
  Description of Artificial Sequence: Synthetic oligonucleotide
  Antisense strand to SEQ ID NO: 1176364
aucagccaggauaaccuca

SEQ ID NO: 1176366 - RNA, 19 nt, Artificial Sequence
  Description of Artificial Sequence: Synthetic oligonucleotide
  Sense strand starting at position 682 of SEQ ID NO: 916689
gagaacugaccuuguggga

SEQ ID NO: 1176367 - RNA, 19 nt, Artificial Sequence
  Description of Artificial Sequence: Synthetic oligonucleotide
  Antisense strand to SEQ ID NO: 1176366
ucccacaaggucaguucuc

SEQ ID NO: 1176368 - RNA, 19 nt, Artificial Sequence
  Description of Artificial Sequence: Synthetic oligonucleotide
  Sense strand starting at position 686 of SEQ ID NO: 916689
acugaccuugugggaaauu

SEQ ID NO: 1176369 - RNA, 19 nt, Artificial Sequence
  Description of Artificial Sequence: Synthetic oligonucleotide
  Antisense strand to SEQ ID NO: 1176368
aauuucccacaaggucagu

SEQ ID NO: 1176370 - RNA, 19 nt, Artificial Sequence
  Description of Artificial Sequence: Synthetic oligonucleotide
  Sense strand starting at position 720 of SEQ ID NO: 916689
ugggaaugucuaggcaaau

SEQ ID NO: 1176371 - RNA, 19 nt, Artificial Sequence
  Description of Artificial Sequence: Synthetic oligonucleotide
  Antisense strand to SEQ ID NO: 1176370
auuugccuagacauuccca

SEQ ID NO: 1176372 - RNA, 19 nt, Artificial Sequence
  Description of Artificial Sequence: Synthetic oligonucleotide
  Sense strand starting at position 721 of SEQ ID NO: 916689
gggaaugucuaggcaaaug

SEQ ID NO: 1176373 - RNA, 19 nt, Artificial Sequence
  Description of Artificial Sequence: Synthetic oligonucleotide
  Antisense strand to SEQ ID NO: 1176372
cauuugccuagacauuccc

SEQ ID NO: 1176374 - RNA, 19 nt, Artificial Sequence
  Description of Artificial Sequence: Synthetic oligonucleotide
  Sense strand starting at position 778 of SEQ ID NO: 916689
gcaaauauuuggcaaacaa

SEQ ID NO: 1176375 - RNA, 19 nt, Artificial Sequence
  Description of Artificial Sequence: Synthetic oligonucleotide
  Antisense strand to SEQ ID NO: 1176374
uuguuugccaaauauuugc

SEQ ID NO: 1176376 - RNA, 19 nt, Artificial Sequence
  Description of Artificial Sequence: Synthetic oligonucleotide
  Sense strand starting at position 1268 of SEQ ID NO: 916689
gagagcuguuucuccucuu

SEQ ID NO: 1176377 - RNA, 19 nt, Artificial Sequence
  Description of Artificial Sequence: Synthetic oligonucleotide
  Antisense strand to SEQ ID NO: 1176376
aagaggagaaacagcucuc

SEQ ID NO: 1176378 - RNA, 19 nt, Artificial Sequence
  Description of Artificial Sequence: Synthetic oligonucleotide
  Sense strand starting at position 1619 of SEQ ID NO: 916689
cugagcguucguccucaaa

SEQ ID NO: 1176379 - RNA, 19 nt, Artificial Sequence
  Description of Artificial Sequence: Synthetic oligonucleotide
  Antisense strand to SEQ ID NO: 1176378
uuugaggacgaacgcucag

SEQ ID NO: 1176380 - RNA, 19 nt, Artificial Sequence
  Description of Artificial Sequence: Synthetic oligonucleotide
  Sense strand starting at position 1788 of SEQ ID NO: 916689
gaccgugaacuggaucuuu

SEQ ID NO: 1176381 - RNA, 19 nt, Artificial Sequence
  Description of Artificial Sequence: Synthetic oligonucleotide
  Antisense strand to SEQ ID NO: 1176380
aaagauccaguucacgguc

SEQ ID NO: 1176382 - RNA, 19 nt, Artificial Sequence
  Description of Artificial Sequence: Synthetic oligonucleotide
  Sense strand starting at position 1811 of SEQ ID NO: 916689
ggcuguugucuugcuccau

SEQ ID NO: 1176383 - RNA, 19 nt, Artificial Sequence
  Description of Artificial Sequence: Synthetic oligonucleotide
  Antisense strand to SEQ ID NO: 1176382
auggagcaagacaacagcc

SEQ ID NO: 1176384 - RNA, 19 nt, Artificial Sequence
  Description of Artificial Sequence: Synthetic oligonucleotide
  Sense strand starting at position 2300 of SEQ ID NO: 916689
agaggaagauugcauuuau

SEQ ID NO: 1176385 - RNA, 19 nt, Artificial Sequence
  Description of Artificial Sequence: Synthetic oligonucleotide
  Antisense strand to SEQ ID NO: 1176384
auaaaugcaaucuuccucu

SEQ ID NO: 1176386 - RNA, 19 nt, Artificial Sequence
  Description of Artificial Sequence: Synthetic oligonucleotide
  Sense strand starting at position 2359 of SEQ ID NO: 916689
gggauuuaggcaugcagca

SEQ ID NO: 1176387 - RNA, 19 nt, Artificial Sequence
  Description of Artificial Sequence: Synthetic oligonucleotide
  Antisense strand to SEQ ID NO: 1176386
ugcugcaugccuaaauccc

SEQ ID NO: 1176388 - RNA, 19 nt, Artificial Sequence
  Description of Artificial Sequence: Synthetic oligonucleotide
  Sense strand starting at position 2402 of SEQ ID NO: 916689
gagggacuuuccuuugcaa

SEQ ID NO: 1176389 - RNA, 19 nt, Artificial Sequence
  Description of Artificial Sequence: Synthetic oligonucleotide
  Antisense strand to SEQ ID NO: 1176388
uugcaaaggaaagucccuc

SEQ ID NO: 1176390 - RNA, 19 nt, Artificial Sequence
  Description of Artificial Sequence: Synthetic oligonucleotide
  Sense strand starting at position 2405 of SEQ ID NO: 916689
ggacuuuccuuugcaagga

SEQ ID NO: 1176391 - RNA, 19 nt, Artificial Sequence
  Description of Artificial Sequence: Synthetic oligonucleotide
  Antisense strand to SEQ ID NO: 1176390
uccuugcaaaggaaagucc

SEQ ID NO: 1176392 - RNA, 19 nt, Artificial Sequence
  Description of Artificial Sequence: Synthetic oligonucleotide
  Sense strand starting at position 2535 of SEQ ID NO: 916689
ggcgcguuucucucgaagu

SEQ ID NO: 1176393 - RNA, 19 nt, Artificial Sequence
  Description of Artificial Sequence: Synthetic oligonucleotide
  Antisense strand to SEQ ID NO: 1176392
acuucgagagaaacgcgcc

SEQ ID NO: 1176394 - RNA, 19 nt, Artificial Sequence
  Description of Artificial Sequence: Synthetic oligonucleotide
  Sense strand starting at position 2591 of SEQ ID NO: 916689
ccaucugggacucgacaaa

SEQ ID NO: 1176395 - RNA, 19 nt, Artificial Sequence
  Description of Artificial Sequence: Synthetic oligonucleotide
  Antisense strand to SEQ ID NO: 1176394
uuugucgagucccagaugg

SEQ ID NO: 1176396 - RNA, 19 nt, Artificial Sequence
  Description of Artificial Sequence: Synthetic oligonucleotide
  Sense strand starting at position 2630 of SEQ ID NO: 916689
gccaauccugcuugugaaa

SEQ ID NO: 1176397 - RNA, 19 nt, Artificial Sequence
  Description of Artificial Sequence: Synthetic oligonucleotide
  Antisense strand to SEQ ID NO: 1176396
uuucacaagcaggauuggc

SEQ ID NO: 1176398 - RNA, 19 nt, Artificial Sequence
  Description of Artificial Sequence: Synthetic oligonucleotide
  Sense strand starting at position 2639 of SEQ ID NO: 916689
gcuugugaaaucgaguucu

SEQ ID NO: 1176399 - RNA, 19 nt, Artificial Sequence
  Description of Artificial Sequence: Synthetic oligonucleotide
  Antisense strand to SEQ ID NO: 1176398
agaacucgauuucacaagc

SEQ ID NO: 1176400 - RNA, 19 nt, Artificial Sequence
  Description of Artificial Sequence: Synthetic oligonucleotide
  Sense strand starting at position 2645 of SEQ ID NO: 916689
gaaaucgaguucucuuucu

SEQ ID NO: 1176401 - RNA, 19 nt, Artificial Sequence
  Description of Artificial Sequence: Synthetic oligonucleotide
  Antisense strand to SEQ ID NO: 1176400
agaaagagaacucgauuuc

SEQ ID NO: 1176402 - RNA, 19 nt, Artificial Sequence
  Description of Artificial Sequence: Synthetic oligonucleotide
  Sense strand starting at position 2649 of SEQ ID NO: 916689
ucgaguucucuuucugcuu

SEQ ID NO: 1176403 - RNA, 19 nt, Artificial Sequence
  Description of Artificial Sequence: Synthetic oligonucleotide
  Antisense strand to SEQ ID NO: 1176402
aagcagaaagagaacucga

SEQ ID NO: 1176404 - RNA, 19 nt, Artificial Sequence
  Description of Artificial Sequence: Synthetic oligonucleotide
  Sense strand starting at position 2680 of SEQ ID NO: 916689
gaugguaaaguaggugaaa

SEQ ID NO: 1176405 - RNA, 19 nt, Artificial Sequence
  Description of Artificial Sequence: Synthetic oligonucleotide
  Antisense strand to SEQ ID NO: 1176404
uuucaccuacuuuaccauc

SEQ ID NO: 1176406 - RNA, 19 nt, Artificial Sequence
  Description of Artificial Sequence: Synthetic oligonucleotide
  Sense strand starting at position 2730 of SEQ ID NO: 916689
gagagaaacuccuuuggug

SEQ ID NO: 1176407 - RNA, 19 nt, Artificial Sequence
  Description of Artificial Sequence: Synthetic oligonucleotide
  Antisense strand to SEQ ID NO: 1176406
caccaaaggaguuucucuc

SEQ ID NO: 1176408 - RNA, 19 nt, Artificial Sequence
  Description of Artificial Sequence: Synthetic oligonucleotide
  Sense strand starting at position 2755 of SEQ ID NO: 916689
cuuguuuacagauaggguu

SEQ ID NO: 1176409 - RNA, 19 nt, Artificial Sequence
  Description of Artificial Sequence: Synthetic oligonucleotide
  Antisense strand to SEQ ID NO: 1176408
aacccuaucuguaaacaag

SEQ ID NO: 1176410 - RNA, 19 nt, Artificial Sequence
  Description of Artificial Sequence: Synthetic oligonucleotide
  Sense strand starting at position 2763 of SEQ ID NO: 916689
cagauaggguugguuucua

SEQ ID NO: 1176411 - RNA, 19 nt, Artificial Sequence
  Description of Artificial Sequence: Synthetic oligonucleotide
  Antisense strand to SEQ ID NO: 1176410
uagaaaccaacccuaucug

SEQ ID NO: 1176412 - RNA, 19 nt, Artificial Sequence
  Description of Artificial Sequence: Synthetic oligonucleotide
  Sense strand starting at position 2785 of SEQ ID NO: 916689
ucacuauuggcaggauacu

SEQ ID NO: 1176413 - RNA, 19 nt, Artificial Sequence
  Description of Artificial Sequence: Synthetic oligonucleotide
  Antisense strand to SEQ ID NO: 1176412
aguauccugccaauaguga

SEQ ID NO: 1176414 - RNA, 19 nt, Artificial Sequence
  Description of Artificial Sequence: Synthetic oligonucleotide
  Sense strand starting at position 2857 of SEQ ID NO: 916689
acuaguuugguggaagacu

SEQ ID NO: 1176415 - RNA, 19 nt, Artificial Sequence
  Description of Artificial Sequence: Synthetic oligonucleotide
  Antisense strand to SEQ ID NO: 1176414
agucuuccaccaaacuagu

SEQ ID NO: 1176416 - RNA, 19 nt, Artificial Sequence
  Description of Artificial Sequence: Synthetic oligonucleotide
  Sense strand starting at position 3118 of SEQ ID NO: 916689
uggcaagugccauacagau

SEQ ID NO: 1176417 - RNA, 19 nt, Artificial Sequence
  Description of Artificial Sequence: Synthetic oligonucleotide
  Antisense strand to SEQ ID NO: 1176416
aucuguauggcacuugcca

SEQ ID NO: 1176418 - RNA, 19 nt, Artificial Sequence
  Description of Artificial Sequence: Synthetic oligonucleotide
  Sense strand starting at position 3151 of SEQ ID NO: 916689
uggagaaccauauggucau

SEQ ID NO: 1176419 - RNA, 19 nt, Artificial Sequence
  Description of Artificial Sequence: Synthetic oligonucleotide
  Antisense strand to SEQ ID NO: 1176418
augaccauaugguucucca

SEQ ID NO: 1176420 - RNA, 19 nt, Artificial Sequence
  Description of Artificial Sequence: Synthetic oligonucleotide
  Sense strand starting at position 3154 of SEQ ID NO: 916689
agaaccauauggucaucuu

SEQ ID NO: 1176421 - RNA, 19 nt, Artificial Sequence
  Description of Artificial Sequence: Synthetic oligonucleotide
  Antisense strand to SEQ ID NO: 1176420
aagaugaccauaugguucu

SEQ ID NO: 1176422 - RNA, 19 nt, Artificial Sequence
  Description of Artificial Sequence: Synthetic oligonucleotide
  Sense strand starting at position 3375 of SEQ ID NO: 916689
gaccucugucugcagguua

SEQ ID NO: 1176423 - RNA, 19 nt, Artificial Sequence
  Description of Artificial Sequence: Synthetic oligonucleotide
  Antisense strand to SEQ ID NO: 1176422
uaaccugcagacagagguc

SEQ ID NO: 1176424 - RNA, 19 nt, Artificial Sequence
  Description of Artificial Sequence: Synthetic oligonucleotide
  Sense strand starting at position 3622 of SEQ ID NO: 916689
ggagauaccuggcucauua

SEQ ID NO: 1176425 - RNA, 19 nt, Artificial Sequence
  Description of Artificial Sequence: Synthetic oligonucleotide
  Antisense strand to SEQ ID NO: 1176424
uaaugagccagguaucucc

SEQ ID NO: 1176426 - RNA, 19 nt, Artificial Sequence
  Description of Artificial Sequence: Synthetic oligonucleotide
  Sense strand starting at position 3702 of SEQ ID NO: 916689
agagcaggaucccaaauau

SEQ ID NO: 1176427 - RNA, 19 nt, Artificial Sequence
  Description of Artificial Sequence: Synthetic oligonucleotide
  Antisense strand to SEQ ID NO: 1176426
auauuugggauccugcucu

SEQ ID NO: 1176428 - RNA, 19 nt, Artificial Sequence
  Description of Artificial Sequence: Synthetic oligonucleotide
  Sense strand starting at position 3728 of SEQ ID NO: 916689
auaggugacuugucuauuc

SEQ ID NO: 1176429 - RNA, 19 nt, Artificial Sequence
  Description of Artificial Sequence: Synthetic oligonucleotide
  Antisense strand to SEQ ID NO: 1176428
gaauagacaagucaccuau

SEQ ID NO: 1176430 - RNA, 19 nt, Artificial Sequence
  Description of Artificial Sequence: Synthetic oligonucleotide
  Sense strand starting at position 3879 of SEQ ID NO: 916689
gaguaucaucuuggguaga

SEQ ID NO: 1176431 - RNA, 19 nt, Artificial Sequence
  Description of Artificial Sequence: Synthetic oligonucleotide
  Antisense strand to SEQ ID NO: 1176430
ucuacccaagaugauacuc

SEQ ID NO: 1176432 - RNA, 19 nt, Artificial Sequence
  Description of Artificial Sequence: Synthetic oligonucleotide
  Sense strand starting at position 3881 of SEQ ID NO: 916689
guaucaucuuggguagagu

SEQ ID NO: 1176433 - RNA, 19 nt, Artificial Sequence
  Description of Artificial Sequence: Synthetic oligonucleotide
  Antisense strand to SEQ ID NO: 1176432
acucuacccaagaugauac

SEQ ID NO: 1176434 - RNA, 19 nt, Artificial Sequence
  Description of Artificial Sequence: Synthetic oligonucleotide
  Sense strand starting at position 3882 of SEQ ID NO: 916689
uaucaucuuggguagagua

SEQ ID NO: 1176435 - RNA, 19 nt, Artificial Sequence
  Description of Artificial Sequence: Synthetic oligonucleotide
  Antisense strand to SEQ ID NO: 1176434
uacucuacccaagaugaua

SEQ ID NO: 1176436 - RNA, 19 nt, Artificial Sequence
  Description of Artificial Sequence: Synthetic oligonucleotide
  Sense strand starting at position 3892 of SEQ ID NO: 916689
gguagaguaccuggugcau

SEQ ID NO: 1176437 - RNA, 19 nt, Artificial Sequence
  Description of Artificial Sequence: Synthetic oligonucleotide
  Antisense strand to SEQ ID NO: 1176436
augcaccagguacucuacc

SEQ ID NO: 1176438 - RNA, 19 nt, Artificial Sequence
  Description of Artificial Sequence: Synthetic oligonucleotide
  Sense strand starting at position 3909 of SEQ ID NO: 916689
auagaaggucacgguuaau

SEQ ID NO: 1176439 - RNA, 19 nt, Artificial Sequence
  Description of Artificial Sequence: Synthetic oligonucleotide
  Antisense strand to SEQ ID NO: 1176438
auuaaccgugaccuucuau

SEQ ID NO: 1176440 - RNA, 19 nt, Artificial Sequence
  Description of Artificial Sequence: Synthetic oligonucleotide
  Sense strand starting at position 3912 of SEQ ID NO: 916689
gaaggucacgguuaauugu

SEQ ID NO: 1176441 - RNA, 19 nt, Artificial Sequence
  Description of Artificial Sequence: Synthetic oligonucleotide
  Antisense strand to SEQ ID NO: 1176440
acaauuaaccgugaccuuc

SEQ ID NO: 1176442 - RNA, 19 nt, Artificial Sequence
  Description of Artificial Sequence: Synthetic oligonucleotide
  Sense strand starting at position 177 of SEQ ID NO: 916690
ucacaagcucauugaguga

SEQ ID NO: 1176443 - RNA, 19 nt, Artificial Sequence
  Description of Artificial Sequence: Synthetic oligonucleotide
  Antisense strand to SEQ ID NO: 1176442
ucacucaaugagcuuguga

SEQ ID NO: 1176444 - RNA, 19 nt, Artificial Sequence
  Description of Artificial Sequence: Synthetic oligonucleotide
  Sense strand starting at position 303 of SEQ ID NO: 916690
uguuaauaucaauagcguu

SEQ ID NO: 1176445 - RNA, 19 nt, Artificial Sequence
  Description of Artificial Sequence: Synthetic oligonucleotide
  Antisense strand to SEQ ID NO: 1176444
aacgcuauugauauuaaca

SEQ ID NO: 1176446 - RNA, 19 nt, Artificial Sequence
  Description of Artificial Sequence: Synthetic oligonucleotide
  Sense strand starting at position 313 of SEQ ID NO: 916690
aauagcguugccuaaacau

SEQ ID NO: 1176447 - RNA, 19 nt, Artificial Sequence
  Description of Artificial Sequence: Synthetic oligonucleotide
  Antisense strand to SEQ ID NO: 1176446
auguuuaggcaacgcuauu

SEQ ID NO: 1176448 - RNA, 19 nt, Artificial Sequence
  Description of Artificial Sequence: Synthetic oligonucleotide
  Sense strand starting at position 440 of SEQ ID NO: 916690
cuaggcaauuauucugaga

SEQ ID NO: 1176449 - RNA, 19 nt, Artificial Sequence
  Description of Artificial Sequence: Synthetic oligonucleotide
  Antisense strand to SEQ ID NO: 1176448
ucucagaauaauugccuag

SEQ ID NO: 1176450 - RNA, 19 nt, Artificial Sequence
  Description of Artificial Sequence: Synthetic oligonucleotide
  Sense strand starting at position 521 of SEQ ID NO: 916690
ucugccucagcauaugaaa

SEQ ID NO: 1176451 - RNA, 19 nt, Artificial Sequence
  Description of Artificial Sequence: Synthetic oligonucleotide
  Antisense strand to SEQ ID NO: 1176450
uuucauaugcugaggcaga

SEQ ID NO: 1176452 - RNA, 19 nt, Artificial Sequence
  Description of Artificial Sequence: Synthetic oligonucleotide
  Sense strand starting at position 557 of SEQ ID NO: 916690
cuuagucucaccugggaag

SEQ ID NO: 1176453 - RNA, 19 nt, Artificial Sequence
  Description of Artificial Sequence: Synthetic oligonucleotide
  Antisense strand to SEQ ID NO: 1176452
cuucccaggugagacuaag

SEQ ID NO: 1176454 - RNA, 19 nt, Artificial Sequence
  Description of Artificial Sequence: Synthetic oligonucleotide
  Sense strand starting at position 699 of SEQ ID NO: 916690
ucuccuaaggcguacauua

SEQ ID NO: 1176455 - RNA, 19 nt, Artificial Sequence
  Description of Artificial Sequence: Synthetic oligonucleotide
  Antisense strand to SEQ ID NO: 1176454
uaauguacgccuuaggaga

SEQ ID NO: 1176456 - RNA, 19 nt, Artificial Sequence
  Description of Artificial Sequence: Synthetic oligonucleotide
  Sense strand starting at position 725 of SEQ ID NO: 916690
guuucugacugcuugugaa

SEQ ID NO: 1176457 - RNA, 19 nt, Artificial Sequence
  Description of Artificial Sequence: Synthetic oligonucleotide
  Antisense strand to SEQ ID NO: 1176456
uucacaagcagucagaaac

SEQ ID NO: 1176458 - RNA, 19 nt, Artificial Sequence
  Description of Artificial Sequence: Synthetic oligonucleotide
  Sense strand starting at position 878 of SEQ ID NO: 916690
acaaguaggcucgaccauu

SEQ ID NO: 1176459 - RNA, 19 nt, Artificial Sequence
  Description of Artificial Sequence: Synthetic oligonucleotide
  Antisense strand to SEQ ID NO: 1176458
aauggucgagccuacuugu

SEQ ID NO: 1176460 - RNA, 19 nt, Artificial Sequence
  Description of Artificial Sequence: Synthetic oligonucleotide
  Sense strand starting at position 947 of SEQ ID NO: 916690
caagaucaauuugggagaa

SEQ ID NO: 1176461 - RNA, 19 nt, Artificial Sequence
  Description of Artificial Sequence: Synthetic oligonucleotide
  Antisense strand to SEQ ID NO: 1176460
uucucccaaauugaucuug

SEQ ID NO: 1176462 - RNA, 19 nt, Artificial Sequence
  Description of Artificial Sequence: Synthetic oligonucleotide
  Sense strand starting at position 1303 of SEQ ID NO: 916690
gguugugaccuugagcaca

SEQ ID NO: 1176463 - RNA, 19 nt, Artificial Sequence
  Description of Artificial Sequence: Synthetic oligonucleotide
  Antisense strand to SEQ ID NO: 1176462
ugugcucaaggucacaacc

SEQ ID NO: 1176464 - RNA, 19 nt, Artificial Sequence
  Description of Artificial Sequence: Synthetic oligonucleotide
  Sense strand starting at position 2167 of SEQ ID NO: 916690
ugcagucaccaagguugaa

SEQ ID NO: 1176465 - RNA, 19 nt, Artificial Sequence
  Description of Artificial Sequence: Synthetic oligonucleotide
  Antisense strand to SEQ ID NO: 1176464
uucaaccuuggugacugca

SEQ ID NO: 1176466 - RNA, 19 nt, Artificial Sequence
  Description of Artificial Sequence: Synthetic oligonucleotide
  Sense strand starting at position 2217 of SEQ ID NO: 916690
ugggaauuauagucccgga

SEQ ID NO: 1176467 - RNA, 19 nt, Artificial Sequence
  Description of Artificial Sequence: Synthetic oligonucleotide
  Antisense strand to SEQ ID NO: 1176466
uccgggacuauaauuccca

SEQ ID NO: 1176468 - RNA, 19 nt, Artificial Sequence
  Description of Artificial Sequence: Synthetic oligonucleotide
  Sense strand starting at position 2260 of SEQ ID NO: 916690
gccaaagauuuaggaccua

SEQ ID NO: 1176469 - RNA, 19 nt, Artificial Sequence
  Description of Artificial Sequence: Synthetic oligonucleotide
  Antisense strand to SEQ ID NO: 1176468
uagguccuaaaucuuuggc

SEQ ID NO: 1176470 - RNA, 19 nt, Artificial Sequence
  Description of Artificial Sequence: Synthetic oligonucleotide
  Sense strand starting at position 2299 of SEQ ID NO: 916690
gaccuauguuaaguuagua

SEQ ID NO: 1176471 - RNA, 19 nt, Artificial Sequence
  Description of Artificial Sequence: Synthetic oligonucleotide
  Antisense strand to SEQ ID NO: 1176470
uacuaacuuaacauagguc

SEQ ID NO: 1176472 - RNA, 19 nt, Artificial Sequence
  Description of Artificial Sequence: Synthetic oligonucleotide
  Sense strand starting at position 2303 of SEQ ID NO: 916690
uauguuaaguuaguaggaa

SEQ ID NO: 1176473 - RNA, 19 nt, Artificial Sequence
  Description of Artificial Sequence: Synthetic oligonucleotide
  Antisense strand to SEQ ID NO: 1176472
uuccuacuaacuuaacaua

SEQ ID NO: 1176474 - RNA, 19 nt, Artificial Sequence
  Description of Artificial Sequence: Synthetic oligonucleotide
  Sense strand starting at position 2512 of SEQ ID NO: 916690
gcggcaaacuguuuggaaa

SEQ ID NO: 1176475 - RNA, 19 nt, Artificial Sequence
  Description of Artificial Sequence: Synthetic oligonucleotide
  Antisense strand to SEQ ID NO: 1176474
uuuccaaacaguuugccgc

SEQ ID NO: 1176476 - RNA, 19 nt, Artificial Sequence
  Description of Artificial Sequence: Synthetic oligonucleotide
  Sense strand starting at position 2513 of SEQ ID NO: 916690
cggcaaacuguuuggaaag

SEQ ID NO: 1176477 - RNA, 19 nt, Artificial Sequence
  Description of Artificial Sequence: Synthetic oligonucleotide
  Antisense strand to SEQ ID NO: 1176476
cuuuccaaacaguuugccg

SEQ ID NO: 1176478 - RNA, 19 nt, Artificial Sequence
  Description of Artificial Sequence: Synthetic oligonucleotide
  Sense strand starting at position 2571 of SEQ ID NO: 916690
uguuaugugucccuaucag

SEQ ID NO: 1176479 - RNA, 19 nt, Artificial Sequence
  Description of Artificial Sequence: Synthetic oligonucleotide
  Antisense strand to SEQ ID NO: 1176478
cugauagggacacauaaca

SEQ ID NO: 1176480 - RNA, 19 nt, Artificial Sequence
  Description of Artificial Sequence: Synthetic oligonucleotide
  Sense strand starting at position 2646 of SEQ ID NO: 916690
gcucacagcugucucaaga

SEQ ID NO: 1176481 - RNA, 19 nt, Artificial Sequence
  Description of Artificial Sequence: Synthetic oligonucleotide
  Antisense strand to SEQ ID NO: 1176480
ucuugagacagcugugagc

SEQ ID NO: 1176482 - RNA, 19 nt, Artificial Sequence
  Description of Artificial Sequence: Synthetic oligonucleotide
  Sense strand starting at position 2682 of SEQ ID NO: 916690
gcuucuacccuuuggaaug

SEQ ID NO: 1176483 - RNA, 19 nt, Artificial Sequence
  Description of Artificial Sequence: Synthetic oligonucleotide
  Antisense strand to SEQ ID NO: 1176482
cauuccaaaggguagaagc

SEQ ID NO: 1176484 - RNA, 19 nt, Artificial Sequence
  Description of Artificial Sequence: Synthetic oligonucleotide
  Sense strand starting at position 2692 of SEQ ID NO: 916690
uuuggaauguaauucguuu

SEQ ID NO: 1176485 - RNA, 19 nt, Artificial Sequence
  Description of Artificial Sequence: Synthetic oligonucleotide
  Antisense strand to SEQ ID NO: 1176484
aaacgaauuacauuccaaa

SEQ ID NO: 1176486 - RNA, 19 nt, Artificial Sequence
  Description of Artificial Sequence: Synthetic oligonucleotide
  Sense strand starting at position 2696 of SEQ ID NO: 916690
gaauguaauucguuuaccu

SEQ ID NO: 1176487 - RNA, 19 nt, Artificial Sequence
  Description of Artificial Sequence: Synthetic oligonucleotide
  Antisense strand to SEQ ID NO: 1176486
agguaaacgaauuacauuc

SEQ ID NO: 1176488 - RNA, 19 nt, Artificial Sequence
  Description of Artificial Sequence: Synthetic oligonucleotide
  Sense strand starting at position 2698 of SEQ ID NO: 916690
auguaauucguuuaccuga

SEQ ID NO: 1176489 - RNA, 19 nt, Artificial Sequence
  Description of Artificial Sequence: Synthetic oligonucleotide
  Antisense strand to SEQ ID NO: 1176488
ucagguaaacgaauuacau

SEQ ID NO: 1176490 - RNA, 19 nt, Artificial Sequence
  Description of Artificial Sequence: Synthetic oligonucleotide
  Sense strand starting at position 2754 of SEQ ID NO: 916690
gugagcacccaguaaauau

SEQ ID NO: 1176491 - RNA, 19 nt, Artificial Sequence
  Description of Artificial Sequence: Synthetic oligonucleotide
  Antisense strand to SEQ ID NO: 1176490
auauuuacugggugcucac

SEQ ID NO: 1176492 - RNA, 19 nt, Artificial Sequence
  Description of Artificial Sequence: Synthetic oligonucleotide
  Sense strand starting at position 2809 of SEQ ID NO: 916690
auucuaaguuucccaagga

SEQ ID NO: 1176493 - RNA, 19 nt, Artificial Sequence
  Description of Artificial Sequence: Synthetic oligonucleotide
  Antisense strand to SEQ ID NO: 1176492
uccuugggaaacuuagaau

SEQ ID NO: 1176494 - RNA, 19 nt, Artificial Sequence
  Description of Artificial Sequence: Synthetic oligonucleotide
  Sense strand starting at position 2840 of SEQ ID NO: 916690
gcugcucaauuauuagaau

SEQ ID NO: 1176495 - RNA, 19 nt, Artificial Sequence
  Description of Artificial Sequence: Synthetic oligonucleotide
  Antisense strand to SEQ ID NO: 1176494
auucuaauaauugagcagc

SEQ ID NO: 1176496 - RNA, 19 nt, Artificial Sequence
  Description of Artificial Sequence: Synthetic oligonucleotide
  Sense strand starting at position 2881 of SEQ ID NO: 916690
guaggagaguguguaaaug

SEQ ID NO: 1176497 - RNA, 19 nt, Artificial Sequence
  Description of Artificial Sequence: Synthetic oligonucleotide
  Antisense strand to SEQ ID NO: 1176496
cauuuacacacucuccuac

SEQ ID NO: 1176498 - RNA, 19 nt, Artificial Sequence
  Description of Artificial Sequence: Synthetic oligonucleotide
  Sense strand starting at position 2890 of SEQ ID NO: 916690
uguguaaaugucuguggaa

SEQ ID NO: 1176499 - RNA, 19 nt, Artificial Sequence
  Description of Artificial Sequence: Synthetic oligonucleotide
  Antisense strand to SEQ ID NO: 1176498
uuccacagacauuuacaca

SEQ ID NO: 1176500 - RNA, 19 nt, Artificial Sequence
  Description of Artificial Sequence: Synthetic oligonucleotide
  Sense strand starting at position 2891 of SEQ ID NO: 916690
guguaaaugucuguggaau

SEQ ID NO: 1176501 - RNA, 19 nt, Artificial Sequence
  Description of Artificial Sequence: Synthetic oligonucleotide
  Antisense strand to SEQ ID NO: 1176500
auuccacagacauuuacac

SEQ ID NO: 1176502 - RNA, 19 nt, Artificial Sequence
  Description of Artificial Sequence: Synthetic oligonucleotide
  Sense strand starting at position 2892 of SEQ ID NO: 916690
uguaaaugucuguggaaua

SEQ ID NO: 1176503 - RNA, 19 nt, Artificial Sequence
  Description of Artificial Sequence: Synthetic oligonucleotide
  Antisense strand to SEQ ID NO: 1176502
uauuccacagacauuuaca

SEQ ID NO: 1176504 - RNA, 19 nt, Artificial Sequence
  Description of Artificial Sequence: Synthetic oligonucleotide
  Sense strand starting at position 3019 of SEQ ID NO: 916690
ccaacauggucucuacuga

SEQ ID NO: 1176505 - RNA, 19 nt, Artificial Sequence
  Description of Artificial Sequence: Synthetic oligonucleotide
  Antisense strand to SEQ ID NO: 1176504
ucaguagagaccauguugg

SEQ ID NO: 1176506 - RNA, 19 nt, Artificial Sequence
  Description of Artificial Sequence: Synthetic oligonucleotide
  Sense strand starting at position 3066 of SEQ ID NO: 916690
gugacaaacgauuguaaug

SEQ ID NO: 1176507 - RNA, 19 nt, Artificial Sequence
  Description of Artificial Sequence: Synthetic oligonucleotide
  Antisense strand to SEQ ID NO: 1176506
cauuacaaucguuugucac

SEQ ID NO: 1176508 - RNA, 19 nt, Artificial Sequence
  Description of Artificial Sequence: Synthetic oligonucleotide
  Sense strand starting at position 3252 of SEQ ID NO: 916690
aaagucauguuuguugaau

SEQ ID NO: 1176509 - RNA, 19 nt, Artificial Sequence
  Description of Artificial Sequence: Synthetic oligonucleotide
  Antisense strand to SEQ ID NO: 1176508
auucaacaaacaugacuuu

SEQ ID NO: 1176510 - RNA, 19 nt, Artificial Sequence
  Description of Artificial Sequence: Synthetic oligonucleotide
  Sense strand starting at position 3253 of SEQ ID NO: 916690
aagucauguuuguugaaua

SEQ ID NO: 1176511 - RNA, 19 nt, Artificial Sequence
  Description of Artificial Sequence: Synthetic oligonucleotide
  Antisense strand to SEQ ID NO: 1176510
uauucaacaaacaugacuu

SEQ ID NO: 1176512 - RNA, 19 nt, Artificial Sequence
  Description of Artificial Sequence: Synthetic oligonucleotide
  Sense strand starting at position 3511 of SEQ ID NO: 916690
auauuauuccguuauccua

SEQ ID NO: 1176513 - RNA, 19 nt, Artificial Sequence
  Description of Artificial Sequence: Synthetic oligonucleotide
  Antisense strand to SEQ ID NO: 1176512
uaggauaacggaauaauau

SEQ ID NO: 1176514 - RNA, 19 nt, Artificial Sequence
  Description of Artificial Sequence: Synthetic oligonucleotide
  Sense strand starting at position 3519 of SEQ ID NO: 916690
ccguuauccuaauuacugu

SEQ ID NO: 1176515 - RNA, 19 nt, Artificial Sequence
  Description of Artificial Sequence: Synthetic oligonucleotide
  Antisense strand to SEQ ID NO: 1176514
acaguaauuaggauaacgg

SEQ ID NO: 1176516 - RNA, 19 nt, Artificial Sequence
  Description of Artificial Sequence: Synthetic oligonucleotide
  Sense strand starting at position 3570 of SEQ ID NO: 916690
ccaaguacugucuauauau

SEQ ID NO: 1176517 - RNA, 19 nt, Artificial Sequence
  Description of Artificial Sequence: Synthetic oligonucleotide
  Antisense strand to SEQ ID NO: 1176516
auauauagacaguacuugg

SEQ ID NO: 1176518 - RNA, 19 nt, Artificial Sequence
  Description of Artificial Sequence: Synthetic oligonucleotide
  Sense strand starting at position 3589 of SEQ ID NO: 916690
auguuucugucuuuaagag

SEQ ID NO: 1176519 - RNA, 19 nt, Artificial Sequence
  Description of Artificial Sequence: Synthetic oligonucleotide
  Antisense strand to SEQ ID NO: 1176518
cucuuaaagacagaaacau

SEQ ID NO: 1176520 - RNA, 19 nt, Artificial Sequence
  Description of Artificial Sequence: Synthetic oligonucleotide
  Sense strand starting at position 3746 of SEQ ID NO: 916690
ggcacaagaauuggagagu

SEQ ID NO: 1176521 - RNA, 19 nt, Artificial Sequence
  Description of Artificial Sequence: Synthetic oligonucleotide
  Antisense strand to SEQ ID NO: 1176520
acucuccaauucuugugcc

SEQ ID NO: 1176522 - RNA, 19 nt, Artificial Sequence
  Description of Artificial Sequence: Synthetic oligonucleotide
  Sense strand starting at position 465 of SEQ ID NO: 916691
acugaauaguugcaguaaa

SEQ ID NO: 1176523 - RNA, 19 nt, Artificial Sequence
  Description of Artificial Sequence: Synthetic oligonucleotide
  Antisense strand to SEQ ID NO: 1176522
uuuacugcaacuauucagu

SEQ ID NO: 1176524 - RNA, 19 nt, Artificial Sequence
  Description of Artificial Sequence: Synthetic oligonucleotide
  Sense strand starting at position 487 of SEQ ID NO: 916691
uuaucagcuuggguaacaa

SEQ ID NO: 1176525 - RNA, 19 nt, Artificial Sequence
  Description of Artificial Sequence: Synthetic oligonucleotide
  Antisense strand to SEQ ID NO: 1176524
uuguuacccaagcugauaa

SEQ ID NO: 1176526 - RNA, 19 nt, Artificial Sequence
  Description of Artificial Sequence: Synthetic oligonucleotide
  Sense strand starting at position 613 of SEQ ID NO: 916691
gagggccucucaguauaaa

SEQ ID NO: 1176527 - RNA, 19 nt, Artificial Sequence
  Description of Artificial Sequence: Synthetic oligonucleotide
  Antisense strand to SEQ ID NO: 1176526
uuuauacugagaggcccuc

SEQ ID NO: 1176528 - RNA, 19 nt, Artificial Sequence
  Description of Artificial Sequence: Synthetic oligonucleotide
  Sense strand starting at position 707 of SEQ ID NO: 916691
acacuccuguugucaucua

SEQ ID NO: 1176529 - RNA, 19 nt, Artificial Sequence
  Description of Artificial Sequence: Synthetic oligonucleotide
  Antisense strand to SEQ ID NO: 1176528
uagaugacaacaggagugu

SEQ ID NO: 1176530 - RNA, 19 nt, Artificial Sequence
  Description of Artificial Sequence: Synthetic oligonucleotide
  Sense strand starting at position 786 of SEQ ID NO: 916691
cacgaagagugccuauauu

SEQ ID NO: 1176531 - RNA, 19 nt, Artificial Sequence
  Description of Artificial Sequence: Synthetic oligonucleotide
  Antisense strand to SEQ ID NO: 1176530
aauauaggcacucuucgug

SEQ ID NO: 1176532 - RNA, 19 nt, Artificial Sequence
  Description of Artificial Sequence: Synthetic oligonucleotide
  Sense strand starting at position 909 of SEQ ID NO: 916691
gagaacgaaucaggcuuua

SEQ ID NO: 1176533 - RNA, 19 nt, Artificial Sequence
  Description of Artificial Sequence: Synthetic oligonucleotide
  Antisense strand to SEQ ID NO: 1176532
uaaagccugauucguucuc

SEQ ID NO: 1176534 - RNA, 19 nt, Artificial Sequence
  Description of Artificial Sequence: Synthetic oligonucleotide
  Sense strand starting at position 1129 of SEQ ID NO: 916691
gggagacaggguuguuaug

SEQ ID NO: 1176535 - RNA, 19 nt, Artificial Sequence
  Description of Artificial Sequence: Synthetic oligonucleotide
  Antisense strand to SEQ ID NO: 1176534
cauaacaacccugucuccc

SEQ ID NO: 1176536 - RNA, 19 nt, Artificial Sequence
  Description of Artificial Sequence: Synthetic oligonucleotide
  Sense strand starting at position 1506 of SEQ ID NO: 916691
guguguuuaucgccaucau

SEQ ID NO: 1176537 - RNA, 19 nt, Artificial Sequence
  Description of Artificial Sequence: Synthetic oligonucleotide
  Antisense strand to SEQ ID NO: 1176536
augauggcgauaaacacac

SEQ ID NO: 1176538 - RNA, 19 nt, Artificial Sequence
  Description of Artificial Sequence: Synthetic oligonucleotide
  Sense strand starting at position 1507 of SEQ ID NO: 916691
uguguuuaucgccaucauc

SEQ ID NO: 1176539 - RNA, 19 nt, Artificial Sequence
  Description of Artificial Sequence: Synthetic oligonucleotide
  Antisense strand to SEQ ID NO: 1176538
gaugauggcgauaaacaca

SEQ ID NO: 1176540 - RNA, 19 nt, Artificial Sequence
  Description of Artificial Sequence: Synthetic oligonucleotide
  Sense strand starting at position 1510 of SEQ ID NO: 916691
guuuaucgccaucaucgau

SEQ ID NO: 1176541 - RNA, 19 nt, Artificial Sequence
  Description of Artificial Sequence: Synthetic oligonucleotide
  Antisense strand to SEQ ID NO: 1176540
aucgaugauggcgauaaac

SEQ ID NO: 1176542 - RNA, 19 nt, Artificial Sequence
  Description of Artificial Sequence: Synthetic oligonucleotide
  Sense strand starting at position 1516 of SEQ ID NO: 916691
cgccaucaucgaugcugau

SEQ ID NO: 1176543 - RNA, 19 nt, Artificial Sequence
  Description of Artificial Sequence: Synthetic oligonucleotide
  Antisense strand to SEQ ID NO: 1176542
aucagcaucgaugauggcg

SEQ ID NO: 1176544 - RNA, 19 nt, Artificial Sequence
  Description of Artificial Sequence: Synthetic oligonucleotide
  Sense strand starting at position 1738 of SEQ ID NO: 916691
aacccuuaguguggaauga

SEQ ID NO: 1176545 - RNA, 19 nt, Artificial Sequence
  Description of Artificial Sequence: Synthetic oligonucleotide
  Antisense strand to SEQ ID NO: 1176544
ucauuccacacuaaggguu

SEQ ID NO: 1176546 - RNA, 19 nt, Artificial Sequence
  Description of Artificial Sequence: Synthetic oligonucleotide
  Sense strand starting at position 2392 of SEQ ID NO: 916691
ggucaauaucucugcaucu

SEQ ID NO: 1176547 - RNA, 19 nt, Artificial Sequence
  Description of Artificial Sequence: Synthetic oligonucleotide
  Antisense strand to SEQ ID NO: 1176546
agaugcagagauauugacc

SEQ ID NO: 1176548 - RNA, 19 nt, Artificial Sequence
  Description of Artificial Sequence: Synthetic oligonucleotide
  Sense strand starting at position 2682 of SEQ ID NO: 916691
ggguuauuaaugcaaagua

SEQ ID NO: 1176549 - RNA, 19 nt, Artificial Sequence
  Description of Artificial Sequence: Synthetic oligonucleotide
  Antisense strand to SEQ ID NO: 1176548
uacuuugcauuaauaaccc

SEQ ID NO: 1176550 - RNA, 19 nt, Artificial Sequence
  Description of Artificial Sequence: Synthetic oligonucleotide
  Sense strand starting at position 2745 of SEQ ID NO: 916691
uacauaguucuuugaggga

SEQ ID NO: 1176551 - RNA, 19 nt, Artificial Sequence
  Description of Artificial Sequence: Synthetic oligonucleotide
  Antisense strand to SEQ ID NO: 1176550
ucccucaaagaacuaugua

SEQ ID NO: 1176552 - RNA, 19 nt, Artificial Sequence
  Description of Artificial Sequence: Synthetic oligonucleotide
  Sense strand starting at position 2750 of SEQ ID NO: 916691
aguucuuugagggagccau

SEQ ID NO: 1176553 - RNA, 19 nt, Artificial Sequence
  Description of Artificial Sequence: Synthetic oligonucleotide
  Antisense strand to SEQ ID NO: 1176552
auggcucccucaaagaacu

SEQ ID NO: 1176554 - RNA, 19 nt, Artificial Sequence
  Description of Artificial Sequence: Synthetic oligonucleotide
  Sense strand starting at position 2882 of SEQ ID NO: 916691
uuaauuaaguggccacaau

SEQ ID NO: 1176555 - RNA, 19 nt, Artificial Sequence
  Description of Artificial Sequence: Synthetic oligonucleotide
  Antisense strand to SEQ ID NO: 1176554
auuguggccacuuaauuaa

SEQ ID NO: 1176556 - RNA, 19 nt, Artificial Sequence
  Description of Artificial Sequence: Synthetic oligonucleotide
  Sense strand starting at position 2961 of SEQ ID NO: 916691
uuucuuuguuuagucagua

SEQ ID NO: 1176557 - RNA, 19 nt, Artificial Sequence
  Description of Artificial Sequence: Synthetic oligonucleotide
  Antisense strand to SEQ ID NO: 1176556
uacugacuaaacaaagaaa

SEQ ID NO: 1176558 - RNA, 19 nt, Artificial Sequence
  Description of Artificial Sequence: Synthetic oligonucleotide
  Sense strand starting at position 2962 of SEQ ID NO: 916691
uucuuuguuuagucaguau

SEQ ID NO: 1176559 - RNA, 19 nt, Artificial Sequence
  Description of Artificial Sequence: Synthetic oligonucleotide
  Antisense strand to SEQ ID NO: 1176558
auacugacuaaacaaagaa

SEQ ID NO: 1176560 - RNA, 19 nt, Artificial Sequence
  Description of Artificial Sequence: Synthetic oligonucleotide
  Sense strand starting at position 2965 of SEQ ID NO: 916691
uuuguuuagucaguauuug

SEQ ID NO: 1176561 - RNA, 19 nt, Artificial Sequence
  Description of Artificial Sequence: Synthetic oligonucleotide
  Antisense strand to SEQ ID NO: 1176560
caaauacugacuaaacaaa

SEQ ID NO: 1176562 - RNA, 19 nt, Artificial Sequence
  Description of Artificial Sequence: Synthetic oligonucleotide
  Sense strand starting at position 2966 of SEQ ID NO: 916691
uuguuuagucaguauuugu

SEQ ID NO: 1176563 - RNA, 19 nt, Artificial Sequence
  Description of Artificial Sequence: Synthetic oligonucleotide
  Antisense strand to SEQ ID NO: 1176562
acaaauacugacuaaacaa

SEQ ID NO: 1176564 - RNA, 19 nt, Artificial Sequence
  Description of Artificial Sequence: Synthetic oligonucleotide
  Sense strand starting at position 3005 of SEQ ID NO: 916691
cuucuuccacaaggaguau

SEQ ID NO: 1176565 - RNA, 19 nt, Artificial Sequence
  Description of Artificial Sequence: Synthetic oligonucleotide
  Antisense strand to SEQ ID NO: 1176564
auacuccuuguggaagaag

SEQ ID NO: 1176566 - RNA, 19 nt, Artificial Sequence
  Description of Artificial Sequence: Synthetic oligonucleotide
  Sense strand starting at position 3145 of SEQ ID NO: 916691
ccaugaauuuagugagauu

SEQ ID NO: 1176567 - RNA, 19 nt, Artificial Sequence
  Description of Artificial Sequence: Synthetic oligonucleotide
  Antisense strand to SEQ ID NO: 1176566
aaucucacuaaauucaugg

SEQ ID NO: 1176568 - RNA, 19 nt, Artificial Sequence
  Description of Artificial Sequence: Synthetic oligonucleotide
  Sense strand starting at position 3269 of SEQ ID NO: 916691
cucagaguccugcacuguu

SEQ ID NO: 1176569 - RNA, 19 nt, Artificial Sequence
  Description of Artificial Sequence: Synthetic oligonucleotide
  Antisense strand to SEQ ID NO: 1176568
aacagugcaggacucugag

SEQ ID NO: 1176570 - RNA, 19 nt, Artificial Sequence
  Description of Artificial Sequence: Synthetic oligonucleotide
  Sense strand starting at position 3335 of SEQ ID NO: 916691
ugcucaucaguucguggaa

SEQ ID NO: 1176571 - RNA, 19 nt, Artificial Sequence
  Description of Artificial Sequence: Synthetic oligonucleotide
  Antisense strand to SEQ ID NO: 1176570
uuccacgaacugaugagca

SEQ ID NO: 1176572 - RNA, 19 nt, Artificial Sequence
  Description of Artificial Sequence: Synthetic oligonucleotide
  Sense strand starting at position 3336 of SEQ ID NO: 916691
gcucaucaguucguggaau

SEQ ID NO: 1176573 - RNA, 19 nt, Artificial Sequence
  Description of Artificial Sequence: Synthetic oligonucleotide
  Antisense strand to SEQ ID NO: 1176572
auuccacgaacugaugagc

SEQ ID NO: 1176574 - RNA, 19 nt, Artificial Sequence
  Description of Artificial Sequence: Synthetic oligonucleotide
  Sense strand starting at position 3338 of SEQ ID NO: 916691
ucaucaguucguggaauau

SEQ ID NO: 1176575 - RNA, 19 nt, Artificial Sequence
  Description of Artificial Sequence: Synthetic oligonucleotide
  Antisense strand to SEQ ID NO: 1176574
auauuccacgaacugauga

SEQ ID NO: 1176576 - RNA, 19 nt, Artificial Sequence
  Description of Artificial Sequence: Synthetic oligonucleotide
  Sense strand starting at position 3348 of SEQ ID NO: 916691
guggaauauacagguuagu

SEQ ID NO: 1176577 - RNA, 19 nt, Artificial Sequence
  Description of Artificial Sequence: Synthetic oligonucleotide
  Antisense strand to SEQ ID NO: 1176576
acuaaccuguauauuccac

SEQ ID NO: 1176578 - RNA, 19 nt, Artificial Sequence
  Description of Artificial Sequence: Synthetic oligonucleotide
  Sense strand starting at position 3404 of SEQ ID NO: 916691
augugucuuguguaauucu

SEQ ID NO: 1176579 - RNA, 19 nt, Artificial Sequence
  Description of Artificial Sequence: Synthetic oligonucleotide
  Antisense strand to SEQ ID NO: 1176578
agaauuacacaagacacau

SEQ ID NO: 1176580 - RNA, 19 nt, Artificial Sequence
  Description of Artificial Sequence: Synthetic oligonucleotide
  Sense strand starting at position 3627 of SEQ ID NO: 916691
aaggcuuugcuauggauaa

SEQ ID NO: 1176581 - RNA, 19 nt, Artificial Sequence
  Description of Artificial Sequence: Synthetic oligonucleotide
  Antisense strand to SEQ ID NO: 1176580
uuauccauagcaaagccuu

SEQ ID NO: 1176582 - RNA, 19 nt, Artificial Sequence
  Description of Artificial Sequence: Synthetic oligonucleotide
  Sense strand starting at position 3629 of SEQ ID NO: 916691
ggcuuugcuauggauaauu

SEQ ID NO: 1176583 - RNA, 19 nt, Artificial Sequence
  Description of Artificial Sequence: Synthetic oligonucleotide
  Antisense strand to SEQ ID NO: 1176582
aauuauccauagcaaagcc

SEQ ID NO: 1176584 - RNA, 19 nt, Artificial Sequence
  Description of Artificial Sequence: Synthetic oligonucleotide
  Sense strand starting at position 3821 of SEQ ID NO: 916691
agcagaucccacuguauug

SEQ ID NO: 1176585 - RNA, 19 nt, Artificial Sequence
  Description of Artificial Sequence: Synthetic oligonucleotide
  Antisense strand to SEQ ID NO: 1176584
caauacagugggaucugcu

SEQ ID NO: 1176586 - RNA, 19 nt, Artificial Sequence
  Description of Artificial Sequence: Synthetic oligonucleotide
  Sense strand starting at position 3828 of SEQ ID NO: 916691
cccacuguauuguugagau

SEQ ID NO: 1176587 - RNA, 19 nt, Artificial Sequence
  Description of Artificial Sequence: Synthetic oligonucleotide
  Antisense strand to SEQ ID NO: 1176586
aucucaacaauacaguggg

SEQ ID NO: 1176588 - RNA, 19 nt, Artificial Sequence
  Description of Artificial Sequence: Synthetic oligonucleotide
  Sense strand starting at position 3836 of SEQ ID NO: 916691
auuguugagauuugugucu

SEQ ID NO: 1176589 - RNA, 19 nt, Artificial Sequence
  Description of Artificial Sequence: Synthetic oligonucleotide
  Antisense strand to SEQ ID NO: 1176588
agacacaaaucucaacaau

SEQ ID NO: 1176590 - RNA, 19 nt, Artificial Sequence
  Description of Artificial Sequence: Synthetic oligonucleotide
  Sense strand starting at position 3841 of SEQ ID NO: 916691
ugagauuugugucucuugu

SEQ ID NO: 1176591 - RNA, 19 nt, Artificial Sequence
  Description of Artificial Sequence: Synthetic oligonucleotide
  Antisense strand to SEQ ID NO: 1176590
acaagagacacaaaucuca

SEQ ID NO: 1176592 - RNA, 19 nt, Artificial Sequence
  Description of Artificial Sequence: Synthetic oligonucleotide
  Sense strand starting at position 3843 of SEQ ID NO: 916691
agauuugugucucuugucu

SEQ ID NO: 1176593 - RNA, 19 nt, Artificial Sequence
  Description of Artificial Sequence: Synthetic oligonucleotide
  Antisense strand to SEQ ID NO: 1176592
agacaagagacacaaaucu

SEQ ID NO: 1176594 - RNA, 19 nt, Artificial Sequence
  Description of Artificial Sequence: Synthetic oligonucleotide
  Sense strand starting at position 3847 of SEQ ID NO: 916691
uugugucucuugucucaca

SEQ ID NO: 1176595 - RNA, 19 nt, Artificial Sequence
  Description of Artificial Sequence: Synthetic oligonucleotide
  Antisense strand to SEQ ID NO: 1176594
ugugagacaagagacacaa

SEQ ID NO: 1176596 - RNA, 19 nt, Artificial Sequence
  Description of Artificial Sequence: Synthetic oligonucleotide
  Sense strand starting at position 3894 of SEQ ID NO: 916691
gagcaauccugccuaggug

SEQ ID NO: 1176597 - RNA, 19 nt, Artificial Sequence
  Description of Artificial Sequence: Synthetic oligonucleotide
  Antisense strand to SEQ ID NO: 1176596
caccuaggcaggauugcuc

SEQ ID NO: 1176598 - RNA, 19 nt, Artificial Sequence
  Description of Artificial Sequence: Synthetic oligonucleotide
  Sense strand starting at position 3974 of SEQ ID NO: 916691
ggaugacauugccuguuua

SEQ ID NO: 1176599 - RNA, 19 nt, Artificial Sequence
  Description of Artificial Sequence: Synthetic oligonucleotide
  Antisense strand to SEQ ID NO: 1176598
uaaacaggcaaugucaucc

SEQ ID NO: 1176600 - RNA, 19 nt, Artificial Sequence
  Description of Artificial Sequence: Synthetic oligonucleotide
  Sense strand starting at position 3975 of SEQ ID NO: 916691
gaugacauugccuguuuau

SEQ ID NO: 1176601 - RNA, 19 nt, Artificial Sequence
  Description of Artificial Sequence: Synthetic oligonucleotide
  Antisense strand to SEQ ID NO: 1176600
auaaacaggcaaugucauc

SEQ ID NO: 1176602 - RNA, 19 nt, Artificial Sequence
  Description of Artificial Sequence: Synthetic oligonucleotide
  Sense strand starting at position 488 of SEQ ID NO: 916692
uuaucaguuuggguaacaa

SEQ ID NO: 1176603 - RNA, 19 nt, Artificial Sequence
  Description of Artificial Sequence: Synthetic oligonucleotide
  Antisense strand to SEQ ID NO: 1176602
uuguuacccaaacugauaa

SEQ ID NO: 1176604 - RNA, 19 nt, Artificial Sequence
  Description of Artificial Sequence: Synthetic oligonucleotide
  Sense strand starting at position 653 of SEQ ID NO: 916692
ugcccauuugucugucauc

SEQ ID NO: 1176605 - RNA, 19 nt, Artificial Sequence
  Description of Artificial Sequence: Synthetic oligonucleotide
  Antisense strand to SEQ ID NO: 1176604
gaugacagacaaaugggca

SEQ ID NO: 1176606 - RNA, 19 nt, Artificial Sequence
  Description of Artificial Sequence: Synthetic oligonucleotide
  Sense strand starting at position 654 of SEQ ID NO: 916692
gcccauuugucugucaucu

SEQ ID NO: 1176607 - RNA, 19 nt, Artificial Sequence
  Description of Artificial Sequence: Synthetic oligonucleotide
  Antisense strand to SEQ ID NO: 1176606
agaugacagacaaaugggc

SEQ ID NO: 1176608 - RNA, 19 nt, Artificial Sequence
  Description of Artificial Sequence: Synthetic oligonucleotide
  Sense strand starting at position 788 of SEQ ID NO: 916692
caugaagagugccuauauu

SEQ ID NO: 1176609 - RNA, 19 nt, Artificial Sequence
  Description of Artificial Sequence: Synthetic oligonucleotide
  Antisense strand to SEQ ID NO: 1176608
aauauaggcacucuucaug

SEQ ID NO: 1176610 - RNA, 19 nt, Artificial Sequence
  Description of Artificial Sequence: Synthetic oligonucleotide
  Sense strand starting at position 901 of SEQ ID NO: 916692
agaacagauugagaaugaa

SEQ ID NO: 1176611 - RNA, 19 nt, Artificial Sequence
  Description of Artificial Sequence: Synthetic oligonucleotide
  Antisense strand to SEQ ID NO: 1176610
uucauucucaaucuguucu

SEQ ID NO: 1176612 - RNA, 19 nt, Artificial Sequence
  Description of Artificial Sequence: Synthetic oligonucleotide
  Sense strand starting at position 911 of SEQ ID NO: 916692
gagaaugaaucgggauuua

SEQ ID NO: 1176613 - RNA, 19 nt, Artificial Sequence
  Description of Artificial Sequence: Synthetic oligonucleotide
  Antisense strand to SEQ ID NO: 1176612
uaaaucccgauucauucuc

SEQ ID NO: 1176614 - RNA, 19 nt, Artificial Sequence
  Description of Artificial Sequence: Synthetic oligonucleotide
  Sense strand starting at position 920 of SEQ ID NO: 916692
ucgggauuuaccugcuauu

SEQ ID NO: 1176615 - RNA, 19 nt, Artificial Sequence
  Description of Artificial Sequence: Synthetic oligonucleotide
  Antisense strand to SEQ ID NO: 1176614
aauagcagguaaaucccga

SEQ ID NO: 1176616 - RNA, 19 nt, Artificial Sequence
  Description of Artificial Sequence: Synthetic oligonucleotide
  Sense strand starting at position 923 of SEQ ID NO: 916692
ggauuuaccugcuauuagg

SEQ ID NO: 1176617 - RNA, 19 nt, Artificial Sequence
  Description of Artificial Sequence: Synthetic oligonucleotide
  Antisense strand to SEQ ID NO: 1176616
ccuaauagcagguaaaucc

SEQ ID NO: 1176618 - RNA, 19 nt, Artificial Sequence
  Description of Artificial Sequence: Synthetic oligonucleotide
  Sense strand starting at position 1233 of SEQ ID NO: 916692
ucacaaaugccagguacuu

SEQ ID NO: 1176619 - RNA, 19 nt, Artificial Sequence
  Description of Artificial Sequence: Synthetic oligonucleotide
  Antisense strand to SEQ ID NO: 1176618
aaguaccuggcauuuguga

SEQ ID NO: 1176620 - RNA, 19 nt, Artificial Sequence
  Description of Artificial Sequence: Synthetic oligonucleotide
  Sense strand starting at position 1511 of SEQ ID NO: 916692
ugucuaucgccgucaucga

SEQ ID NO: 1176621 - RNA, 19 nt, Artificial Sequence
  Description of Artificial Sequence: Synthetic oligonucleotide
  Antisense strand to SEQ ID NO: 1176620
ucgaugacggcgauagaca

SEQ ID NO: 1176622 - RNA, 19 nt, Artificial Sequence
  Description of Artificial Sequence: Synthetic oligonucleotide
  Sense strand starting at position 1736 of SEQ ID NO: 916692
uagaaacucuuauugugga

SEQ ID NO: 1176623 - RNA, 19 nt, Artificial Sequence
  Description of Artificial Sequence: Synthetic oligonucleotide
  Antisense strand to SEQ ID NO: 1176622
uccacaauaagaguuucua

SEQ ID NO: 1176624 - RNA, 19 nt, Artificial Sequence
  Description of Artificial Sequence: Synthetic oligonucleotide
  Sense strand starting at position 2119 of SEQ ID NO: 916692
ucagguguuuccuuuauuu

SEQ ID NO: 1176625 - RNA, 19 nt, Artificial Sequence
  Description of Artificial Sequence: Synthetic oligonucleotide
  Antisense strand to SEQ ID NO: 1176624
aaauaaaggaaacaccuga

SEQ ID NO: 1176626 - RNA, 19 nt, Artificial Sequence
  Description of Artificial Sequence: Synthetic oligonucleotide
  Sense strand starting at position 2393 of SEQ ID NO: 916692
uggucaauaucucuggaua

SEQ ID NO: 1176627 - RNA, 19 nt, Artificial Sequence
  Description of Artificial Sequence: Synthetic oligonucleotide
  Antisense strand to SEQ ID NO: 1176626
uauccagagauauugacca

SEQ ID NO: 1176628 - RNA, 19 nt, Artificial Sequence
  Description of Artificial Sequence: Synthetic oligonucleotide
  Sense strand starting at position 2394 of SEQ ID NO: 916692
ggucaauaucucuggauau

SEQ ID NO: 1176629 - RNA, 19 nt, Artificial Sequence
  Description of Artificial Sequence: Synthetic oligonucleotide
  Antisense strand to SEQ ID NO: 1176628
auauccagagauauugacc

SEQ ID NO: 1176630 - RNA, 19 nt, Artificial Sequence
  Description of Artificial Sequence: Synthetic oligonucleotide
  Sense strand starting at position 2407 of SEQ ID NO: 916692
ggauauuauuaugcccuau

SEQ ID NO: 1176631 - RNA, 19 nt, Artificial Sequence
  Description of Artificial Sequence: Synthetic oligonucleotide
  Antisense strand to SEQ ID NO: 1176630
auagggcauaauaauaucc

SEQ ID NO: 1176632 - RNA, 19 nt, Artificial Sequence
  Description of Artificial Sequence: Synthetic oligonucleotide
  Sense strand starting at position 2747 of SEQ ID NO: 916692
uacauaguucugugaggga

SEQ ID NO: 1176633 - RNA, 19 nt, Artificial Sequence
  Description of Artificial Sequence: Synthetic oligonucleotide
  Antisense strand to SEQ ID NO: 1176632
ucccucacagaacuaugua

SEQ ID NO: 1176634 - RNA, 19 nt, Artificial Sequence
  Description of Artificial Sequence: Synthetic oligonucleotide
  Sense strand starting at position 2765 of SEQ ID NO: 916692
agccaugcgaugucauguu

SEQ ID NO: 1176635 - RNA, 19 nt, Artificial Sequence
  Description of Artificial Sequence: Synthetic oligonucleotide
  Antisense strand to SEQ ID NO: 1176634
aacaugacaucgcauggcu

SEQ ID NO: 1176636 - RNA, 19 nt, Artificial Sequence
  Description of Artificial Sequence: Synthetic oligonucleotide
  Sense strand starting at position 2769 of SEQ ID NO: 916692
augcgaugucauguugcua

SEQ ID NO: 1176637 - RNA, 19 nt, Artificial Sequence
  Description of Artificial Sequence: Synthetic oligonucleotide
  Antisense strand to SEQ ID NO: 1176636
uagcaacaugacaucgcau

SEQ ID NO: 1176638 - RNA, 19 nt, Artificial Sequence
  Description of Artificial Sequence: Synthetic oligonucleotide
  Sense strand starting at position 2770 of SEQ ID NO: 916692
ugcgaugucauguugcuaa

SEQ ID NO: 1176639 - RNA, 19 nt, Artificial Sequence
  Description of Artificial Sequence: Synthetic oligonucleotide
  Antisense strand to SEQ ID NO: 1176638
uuagcaacaugacaucgca

SEQ ID NO: 1176640 - RNA, 19 nt, Artificial Sequence
  Description of Artificial Sequence: Synthetic oligonucleotide
  Sense strand starting at position 2866 of SEQ ID NO: 916692
aucgaauucuuaccacuga

SEQ ID NO: 1176641 - RNA, 19 nt, Artificial Sequence
  Description of Artificial Sequence: Synthetic oligonucleotide
  Antisense strand to SEQ ID NO: 1176640
ucagugguaagaauucgau

SEQ ID NO: 1176642 - RNA, 19 nt, Artificial Sequence
  Description of Artificial Sequence: Synthetic oligonucleotide
  Sense strand starting at position 2884 of SEQ ID NO: 916692
auaauuaaguggccacaau

SEQ ID NO: 1176643 - RNA, 19 nt, Artificial Sequence
  Description of Artificial Sequence: Synthetic oligonucleotide
  Antisense strand to SEQ ID NO: 1176642
auuguggccacuuaauuau

SEQ ID NO: 1176644 - RNA, 19 nt, Artificial Sequence
  Description of Artificial Sequence: Synthetic oligonucleotide
  Sense strand starting at position 2963 of SEQ ID NO: 916692
uuuauugguuuagucagua

SEQ ID NO: 1176645 - RNA, 19 nt, Artificial Sequence
  Description of Artificial Sequence: Synthetic oligonucleotide
  Antisense strand to SEQ ID NO: 1176644
uacugacuaaaccaauaaa

SEQ ID NO: 1176646 - RNA, 19 nt, Artificial Sequence
  Description of Artificial Sequence: Synthetic oligonucleotide
  Sense strand starting at position 3000 of SEQ ID NO: 916692
ucagauucuucuuccacga

SEQ ID NO: 1176647 - RNA, 19 nt, Artificial Sequence
  Description of Artificial Sequence: Synthetic oligonucleotide
  Antisense strand to SEQ ID NO: 1176646
ucguggaagaagaaucuga

SEQ ID NO: 1176648 - RNA, 19 nt, Artificial Sequence
  Description of Artificial Sequence: Synthetic oligonucleotide
  Sense strand starting at position 3004 of SEQ ID NO: 916692
auucuucuuccacgaguau

SEQ ID NO: 1176649 - RNA, 19 nt, Artificial Sequence
  Description of Artificial Sequence: Synthetic oligonucleotide
  Antisense strand to SEQ ID NO: 1176648
auacucguggaagaagaau

SEQ ID NO: 1176650 - RNA, 19 nt, Artificial Sequence
  Description of Artificial Sequence: Synthetic oligonucleotide
  Sense strand starting at position 3005 of SEQ ID NO: 916692
uucuucuuccacgaguauu

SEQ ID NO: 1176651 - RNA, 19 nt, Artificial Sequence
  Description of Artificial Sequence: Synthetic oligonucleotide
  Antisense strand to SEQ ID NO: 1176650
aauacucguggaagaagaa

SEQ ID NO: 1176652 - RNA, 19 nt, Artificial Sequence
  Description of Artificial Sequence: Synthetic oligonucleotide
  Sense strand starting at position 3102 of SEQ ID NO: 916692
gcucauuauguguaucuuu

SEQ ID NO: 1176653 - RNA, 19 nt, Artificial Sequence
  Description of Artificial Sequence: Synthetic oligonucleotide
  Antisense strand to SEQ ID NO: 1176652
aaagauacacauaaugagc

SEQ ID NO: 1176654 - RNA, 19 nt, Artificial Sequence
  Description of Artificial Sequence: Synthetic oligonucleotide
  Sense strand starting at position 3437 of SEQ ID NO: 916692
ugguguuaauuugagaaca

SEQ ID NO: 1176655 - RNA, 19 nt, Artificial Sequence
  Description of Artificial Sequence: Synthetic oligonucleotide
  Antisense strand to SEQ ID NO: 1176654
uguucucaaauuaacacca

SEQ ID NO: 1176656 - RNA, 19 nt, Artificial Sequence
  Description of Artificial Sequence: Synthetic oligonucleotide
  Sense strand starting at position 3439 of SEQ ID NO: 916692
guguuaauuugagaacaga

SEQ ID NO: 1176657 - RNA, 19 nt, Artificial Sequence
  Description of Artificial Sequence: Synthetic oligonucleotide
  Antisense strand to SEQ ID NO: 1176656
ucuguucucaaauuaacac

SEQ ID NO: 1176658 - RNA, 19 nt, Artificial Sequence
  Description of Artificial Sequence: Synthetic oligonucleotide
  Sense strand starting at position 3452 of SEQ ID NO: 916692
aacagauuggugggaggua

SEQ ID NO: 1176659 - RNA, 19 nt, Artificial Sequence
  Description of Artificial Sequence: Synthetic oligonucleotide
  Antisense strand to SEQ ID NO: 1176658
uaccucccaccaaucuguu

SEQ ID NO: 1176660 - RNA, 19 nt, Artificial Sequence
  Description of Artificial Sequence: Synthetic oligonucleotide
  Sense strand starting at position 3785 of SEQ ID NO: 916692
uuaucuuaggcagggagua

SEQ ID NO: 1176661 - RNA, 19 nt, Artificial Sequence
  Description of Artificial Sequence: Synthetic oligonucleotide
  Antisense strand to SEQ ID NO: 1176660
uacucccugccuaagauaa

SEQ ID NO: 1176662 - RNA, 19 nt, Artificial Sequence
  Description of Artificial Sequence: Synthetic oligonucleotide
  Sense strand starting at position 3824 of SEQ ID NO: 916692
cccagugcuuuguugagau

SEQ ID NO: 1176663 - RNA, 19 nt, Artificial Sequence
  Description of Artificial Sequence: Synthetic oligonucleotide
  Antisense strand to SEQ ID NO: 1176662
aucucaacaaagcacuggg

SEQ ID NO: 1176664 - RNA, 19 nt, Artificial Sequence
  Description of Artificial Sequence: Synthetic oligonucleotide
  Sense strand starting at position 3832 of SEQ ID NO: 916692
uuuguugagauuugugucu

SEQ ID NO: 1176665 - RNA, 19 nt, Artificial Sequence
  Description of Artificial Sequence: Synthetic oligonucleotide
  Antisense strand to SEQ ID NO: 1176664
agacacaaaucucaacaaa

SEQ ID NO: 1176666 - RNA, 19 nt, Artificial Sequence
  Description of Artificial Sequence: Synthetic oligonucleotide
  Sense strand starting at position 3837 of SEQ ID NO: 916692
ugagauuugugucucuggu

SEQ ID NO: 1176667 - RNA, 19 nt, Artificial Sequence
  Description of Artificial Sequence: Synthetic oligonucleotide
  Antisense strand to SEQ ID NO: 1176666
accagagacacaaaucuca

SEQ ID NO: 1176668 - RNA, 19 nt, Artificial Sequence
  Description of Artificial Sequence: Synthetic oligonucleotide
  Sense strand starting at position 3928 of SEQ ID NO: 916692
guagcaaaggaaugucaga

SEQ ID NO: 1176669 - RNA, 19 nt, Artificial Sequence
  Description of Artificial Sequence: Synthetic oligonucleotide
  Antisense strand to SEQ ID NO: 1176668
ucugacauuccuuugcuac

SEQ ID NO: 1176670 - RNA, 19 nt, Artificial Sequence
  Description of Artificial Sequence: Synthetic oligonucleotide
  Sense strand starting at position 3933 of SEQ ID NO: 916692
aaaggaaugucagagacaa

SEQ ID NO: 1176671 - RNA, 19 nt, Artificial Sequence
  Description of Artificial Sequence: Synthetic oligonucleotide
  Antisense strand to SEQ ID NO: 1176670
uugucucugacauuccuuu

SEQ ID NO: 1176672 - RNA, 19 nt, Artificial Sequence
  Description of Artificial Sequence: Synthetic oligonucleotide
  Sense strand starting at position 3970 of SEQ ID NO: 916692
ggaugacauugccugauua

SEQ ID NO: 1176673 - RNA, 19 nt, Artificial Sequence
  Description of Artificial Sequence: Synthetic oligonucleotide
  Antisense strand to SEQ ID NO: 1176672
uaaucaggcaaugucaucc

SEQ ID NO: 1176674 - RNA, 19 nt, Artificial Sequence
  Description of Artificial Sequence: Synthetic oligonucleotide
  Sense strand starting at position 3971 of SEQ ID NO: 916692
gaugacauugccugauuau

SEQ ID NO: 1176675 - RNA, 19 nt, Artificial Sequence
  Description of Artificial Sequence: Synthetic oligonucleotide
  Antisense strand to SEQ ID NO: 1176674
auaaucaggcaaugucauc

SEQ ID NO: 1176676 - RNA, 19 nt, Artificial Sequence
  Description of Artificial Sequence: Synthetic oligonucleotide
  Sense strand starting at position 3972 of SEQ ID NO: 916692
augacauugccugauuaug

SEQ ID NO: 1176677 - RNA, 19 nt, Artificial Sequence
  Description of Artificial Sequence: Synthetic oligonucleotide
  Antisense strand to SEQ ID NO: 1176676
cauaaucaggcaaugucau

SEQ ID NO: 1176678 - RNA, 19 nt, Artificial Sequence
  Description of Artificial Sequence: Synthetic oligonucleotide
  Sense strand starting at position 3974 of SEQ ID NO: 916692
gacauugccugauuauguc

SEQ ID NO: 1176679 - RNA, 19 nt, Artificial Sequence
  Description of Artificial Sequence: Synthetic oligonucleotide
  Antisense strand to SEQ ID NO: 1176678
gacauaaucaggcaauguc

SEQ ID NO: 1176680 - RNA, 19 nt, Artificial Sequence
  Description of Artificial Sequence: Synthetic oligonucleotide
  Sense strand starting at position 3982 of SEQ ID NO: 916692
cugauuaugucaccaacug

SEQ ID NO: 1176681 - RNA, 19 nt, Artificial Sequence
  Description of Artificial Sequence: Synthetic oligonucleotide
  Antisense strand to SEQ ID NO: 1176680
caguuggugacauaaucag

SEQ ID NO: 1176682 - RNA, 19 nt, Artificial Sequence
  Description of Artificial Sequence: Synthetic oligonucleotide
  Sense strand starting at position 468 of SEQ ID NO: 916693
acugaauaguugccgcaaa

SEQ ID NO: 1176683 - RNA, 19 nt, Artificial Sequence
  Description of Artificial Sequence: Synthetic oligonucleotide
  Antisense strand to SEQ ID NO: 1176682
uuugcggcaacuauucagu

SEQ ID NO: 1176684 - RNA, 19 nt, Artificial Sequence
  Description of Artificial Sequence: Synthetic oligonucleotide
  Sense strand starting at position 783 of SEQ ID NO: 916693
gcaugaagauugccugcau

SEQ ID NO: 1176685 - RNA, 19 nt, Artificial Sequence
  Description of Artificial Sequence: Synthetic oligonucleotide
  Antisense strand to SEQ ID NO: 1176684
augcaggcaaucuucaugc

SEQ ID NO: 1176686 - RNA, 19 nt, Artificial Sequence
  Description of Artificial Sequence: Synthetic oligonucleotide
  Sense strand starting at position 1020 of SEQ ID NO: 916693
agguguucuacagggaaag

SEQ ID NO: 1176687 - RNA, 19 nt, Artificial Sequence
  Description of Artificial Sequence: Synthetic oligonucleotide
  Antisense strand to SEQ ID NO: 1176686
cuuucccuguagaacaccu

SEQ ID NO: 1176688 - RNA, 19 nt, Artificial Sequence
  Description of Artificial Sequence: Synthetic oligonucleotide
  Sense strand starting at position 1069 of SEQ ID NO: 916693
uagguuagcucaucagcua

SEQ ID NO: 1176689 - RNA, 19 nt, Artificial Sequence
  Description of Artificial Sequence: Synthetic oligonucleotide
  Antisense strand to SEQ ID NO: 1176688
uagcugaugagcuaaccua

SEQ ID NO: 1176690 - RNA, 19 nt, Artificial Sequence
  Description of Artificial Sequence: Synthetic oligonucleotide
  Sense strand starting at position 1264 of SEQ ID NO: 916693
guauucuuaugcccuccau

SEQ ID NO: 1176691 - RNA, 19 nt, Artificial Sequence
  Description of Artificial Sequence: Synthetic oligonucleotide
  Antisense strand to SEQ ID NO: 1176690
auggagggcauaagaauac

SEQ ID NO: 1176692 - RNA, 19 nt, Artificial Sequence
  Description of Artificial Sequence: Synthetic oligonucleotide
  Sense strand starting at position 1380 of SEQ ID NO: 916693
auugaaauacuguguguag

SEQ ID NO: 1176693 - RNA, 19 nt, Artificial Sequence
  Description of Artificial Sequence: Synthetic oligonucleotide
  Antisense strand to SEQ ID NO: 1176692
cuacacacaguauuucaau

SEQ ID NO: 1176694 - RNA, 19 nt, Artificial Sequence
  Description of Artificial Sequence: Synthetic oligonucleotide
  Sense strand starting at position 1432 of SEQ ID NO: 916693
uuucuauaucuguaguuag

SEQ ID NO: 1176695 - RNA, 19 nt, Artificial Sequence
  Description of Artificial Sequence: Synthetic oligonucleotide
  Antisense strand to SEQ ID NO: 1176694
cuaacuacagauauagaaa

SEQ ID NO: 1176696 - RNA, 19 nt, Artificial Sequence
  Description of Artificial Sequence: Synthetic oligonucleotide
  Sense strand starting at position 1435 of SEQ ID NO: 916693
cuauaucuguaguuagaca

SEQ ID NO: 1176697 - RNA, 19 nt, Artificial Sequence
  Description of Artificial Sequence: Synthetic oligonucleotide
  Antisense strand to SEQ ID NO: 1176696
ugucuaacuacagauauag

SEQ ID NO: 1176698 - RNA, 19 nt, Artificial Sequence
  Description of Artificial Sequence: Synthetic oligonucleotide
  Sense strand starting at position 1442 of SEQ ID NO: 916693
uguaguuagacacaggcaa

SEQ ID NO: 1176699 - RNA, 19 nt, Artificial Sequence
  Description of Artificial Sequence: Synthetic oligonucleotide
  Antisense strand to SEQ ID NO: 1176698
uugccugugucuaacuaca

SEQ ID NO: 1176700 - RNA, 19 nt, Artificial Sequence
  Description of Artificial Sequence: Synthetic oligonucleotide
  Sense strand starting at position 1489 of SEQ ID NO: 916693
aucucuaauguguguuuau

SEQ ID NO: 1176701 - RNA, 19 nt, Artificial Sequence
  Description of Artificial Sequence: Synthetic oligonucleotide
  Antisense strand to SEQ ID NO: 1176700
auaaacacacauuagagau

SEQ ID NO: 1176702 - RNA, 19 nt, Artificial Sequence
  Description of Artificial Sequence: Synthetic oligonucleotide
  Sense strand starting at position 1499 of SEQ ID NO: 916693
uguguuuaucuccaucauc

SEQ ID NO: 1176703 - RNA, 19 nt, Artificial Sequence
  Description of Artificial Sequence: Synthetic oligonucleotide
  Antisense strand to SEQ ID NO: 1176702
gaugauggagauaaacaca

SEQ ID NO: 1176704 - RNA, 19 nt, Artificial Sequence
  Description of Artificial Sequence: Synthetic oligonucleotide
  Sense strand starting at position 1545 of SEQ ID NO: 916693
ccacaaucaucccugugua

SEQ ID NO: 1176705 - RNA, 19 nt, Artificial Sequence
  Description of Artificial Sequence: Synthetic oligonucleotide
  Antisense strand to SEQ ID NO: 1176704
uacacagggaugauugugg

SEQ ID NO: 1176706 - RNA, 19 nt, Artificial Sequence
  Description of Artificial Sequence: Synthetic oligonucleotide
  Sense strand starting at position 2012 of SEQ ID NO: 916693
ggcagcucccuuuauaaag

SEQ ID NO: 1176707 - RNA, 19 nt, Artificial Sequence
  Description of Artificial Sequence: Synthetic oligonucleotide
  Antisense strand to SEQ ID NO: 1176706
cuuuauaaagggagcugcc

SEQ ID NO: 1176708 - RNA, 19 nt, Artificial Sequence
  Description of Artificial Sequence: Synthetic oligonucleotide
  Sense strand starting at position 2131 of SEQ ID NO: 916693
auuucugucugggacucua

SEQ ID NO: 1176709 - RNA, 19 nt, Artificial Sequence
  Description of Artificial Sequence: Synthetic oligonucleotide
  Antisense strand to SEQ ID NO: 1176708
uagagucccagacagaaau

SEQ ID NO: 1176710 - RNA, 19 nt, Artificial Sequence
  Description of Artificial Sequence: Synthetic oligonucleotide
  Sense strand starting at position 2175 of SEQ ID NO: 916693
uguuguuuguaccuuauuu

SEQ ID NO: 1176711 - RNA, 19 nt, Artificial Sequence
  Description of Artificial Sequence: Synthetic oligonucleotide
  Antisense strand to SEQ ID NO: 1176710
aaauaagguacaaacaaca

SEQ ID NO: 1176712 - RNA, 19 nt, Artificial Sequence
  Description of Artificial Sequence: Synthetic oligonucleotide
  Sense strand starting at position 2231 of SEQ ID NO: 916693
aggaacuguguccaagcaa

SEQ ID NO: 1176713 - RNA, 19 nt, Artificial Sequence
  Description of Artificial Sequence: Synthetic oligonucleotide
  Antisense strand to SEQ ID NO: 1176712
uugcuuggacacaguuccu

SEQ ID NO: 1176714 - RNA, 19 nt, Artificial Sequence
  Description of Artificial Sequence: Synthetic oligonucleotide
  Sense strand starting at position 2247 of SEQ ID NO: 916693
caaucagcacggugucaua

SEQ ID NO: 1176715 - RNA, 19 nt, Artificial Sequence
  Description of Artificial Sequence: Synthetic oligonucleotide
  Antisense strand to SEQ ID NO: 1176714
uaugacaccgugcugauug

SEQ ID NO: 1176716 - RNA, 19 nt, Artificial Sequence
  Description of Artificial Sequence: Synthetic oligonucleotide
  Sense strand starting at position 2256 of SEQ ID NO: 916693
cggugucauaauugaacuu

SEQ ID NO: 1176717 - RNA, 19 nt, Artificial Sequence
  Description of Artificial Sequence: Synthetic oligonucleotide
  Antisense strand to SEQ ID NO: 1176716
aaguucaauuaugacaccg

SEQ ID NO: 1176718 - RNA, 19 nt, Artificial Sequence
  Description of Artificial Sequence: Synthetic oligonucleotide
  Sense strand starting at position 2304 of SEQ ID NO: 916693
guaagacuauuguccacuu

SEQ ID NO: 1176719 - RNA, 19 nt, Artificial Sequence
  Description of Artificial Sequence: Synthetic oligonucleotide
  Antisense strand to SEQ ID NO: 1176718
aaguggacaauagucuuac

SEQ ID NO: 1176720 - RNA, 19 nt, Artificial Sequence
  Description of Artificial Sequence: Synthetic oligonucleotide
  Sense strand starting at position 2377 of SEQ ID NO: 916693
agcggugaugaugaucaau

SEQ ID NO: 1176721 - RNA, 19 nt, Artificial Sequence
  Description of Artificial Sequence: Synthetic oligonucleotide
  Antisense strand to SEQ ID NO: 1176720
auugaucaucaucaccgcu

SEQ ID NO: 1176722 - RNA, 19 nt, Artificial Sequence
  Description of Artificial Sequence: Synthetic oligonucleotide
  Sense strand starting at position 2379 of SEQ ID NO: 916693
cggugaugaugaucaauau

SEQ ID NO: 1176723 - RNA, 19 nt, Artificial Sequence
  Description of Artificial Sequence: Synthetic oligonucleotide
  Antisense strand to SEQ ID NO: 1176722
auauugaucaucaucaccg

SEQ ID NO: 1176724 - RNA, 19 nt, Artificial Sequence
  Description of Artificial Sequence: Synthetic oligonucleotide
  Sense strand starting at position 2389 of SEQ ID NO: 916693
gaucaauaucucuggcugu

SEQ ID NO: 1176725 - RNA, 19 nt, Artificial Sequence
  Description of Artificial Sequence: Synthetic oligonucleotide
  Antisense strand to SEQ ID NO: 1176724
acagccagagauauugauc

SEQ ID NO: 1176726 - RNA, 19 nt, Artificial Sequence
  Description of Artificial Sequence: Synthetic oligonucleotide
  Sense strand starting at position 2446 of SEQ ID NO: 916693
cagagaguaucacauuuag

SEQ ID NO: 1176727 - RNA, 19 nt, Artificial Sequence
  Description of Artificial Sequence: Synthetic oligonucleotide
  Antisense strand to SEQ ID NO: 1176726
cuaaaugugauacucucug

SEQ ID NO: 1176728 - RNA, 19 nt, Artificial Sequence
  Description of Artificial Sequence: Synthetic oligonucleotide
  Sense strand starting at position 2474 of SEQ ID NO: 916693
ugaugcgauagagauaguu

SEQ ID NO: 1176729 - RNA, 19 nt, Artificial Sequence
  Description of Artificial Sequence: Synthetic oligonucleotide
  Antisense strand to SEQ ID NO: 1176728
aacuaucucuaucgcauca

SEQ ID NO: 1176730 - RNA, 19 nt, Artificial Sequence
  Description of Artificial Sequence: Synthetic oligonucleotide
  Sense strand starting at position 2482 of SEQ ID NO: 916693
uagagauaguuucugcuau

SEQ ID NO: 1176731 - RNA, 19 nt, Artificial Sequence
  Description of Artificial Sequence: Synthetic oligonucleotide
  Antisense strand to SEQ ID NO: 1176730
auagcagaaacuaucucua

SEQ ID NO: 1176732 - RNA, 19 nt, Artificial Sequence
  Description of Artificial Sequence: Synthetic oligonucleotide
  Sense strand starting at position 2484 of SEQ ID NO: 916693
gagauaguuucugcuaucu

SEQ ID NO: 1176733 - RNA, 19 nt, Artificial Sequence
  Description of Artificial Sequence: Synthetic oligonucleotide
  Antisense strand to SEQ ID NO: 1176732
agauagcagaaacuaucuc

SEQ ID NO: 1176734 - RNA, 19 nt, Artificial Sequence
  Description of Artificial Sequence: Synthetic oligonucleotide
  Sense strand starting at position 2490 of SEQ ID NO: 916693
guuucugcuaucugggaga

SEQ ID NO: 1176735 - RNA, 19 nt, Artificial Sequence
  Description of Artificial Sequence: Synthetic oligonucleotide
  Antisense strand to SEQ ID NO: 1176734
ucucccagauagcagaaac

SEQ ID NO: 1176736 - RNA, 19 nt, Artificial Sequence
  Description of Artificial Sequence: Synthetic oligonucleotide
  Sense strand starting at position 2495 of SEQ ID NO: 916693
ugcuaucugggagauguuu

SEQ ID NO: 1176737 - RNA, 19 nt, Artificial Sequence
  Description of Artificial Sequence: Synthetic oligonucleotide
  Antisense strand to SEQ ID NO: 1176736
aaacaucucccagauagca

SEQ ID NO: 1176738 - RNA, 19 nt, Artificial Sequence
  Description of Artificial Sequence: Synthetic oligonucleotide
  Sense strand starting at position 2497 of SEQ ID NO: 916693
cuaucugggagauguuuga

SEQ ID NO: 1176739 - RNA, 19 nt, Artificial Sequence
  Description of Artificial Sequence: Synthetic oligonucleotide
  Antisense strand to SEQ ID NO: 1176738
ucaaacaucucccagauag

SEQ ID NO: 1176740 - RNA, 19 nt, Artificial Sequence
  Description of Artificial Sequence: Synthetic oligonucleotide
  Sense strand starting at position 2617 of SEQ ID NO: 916693
aaaggcuucuuguugugaa

SEQ ID NO: 1176741 - RNA, 19 nt, Artificial Sequence
  Description of Artificial Sequence: Synthetic oligonucleotide
  Antisense strand to SEQ ID NO: 1176740
uucacaacaagaagccuuu

SEQ ID NO: 1176742 - RNA, 19 nt, Artificial Sequence
  Description of Artificial Sequence: Synthetic oligonucleotide
  Sense strand starting at position 2709 of SEQ ID NO: 916693
cgaggaaauuucuagaccu

SEQ ID NO: 1176743 - RNA, 19 nt, Artificial Sequence
  Description of Artificial Sequence: Synthetic oligonucleotide
  Antisense strand to SEQ ID NO: 1176742
aggucuagaaauuuccucg

SEQ ID NO: 1176744 - RNA, 19 nt, Artificial Sequence
  Description of Artificial Sequence: Synthetic oligonucleotide
  Sense strand starting at position 2740 of SEQ ID NO: 916693
uauauaguuccuugcagga

SEQ ID NO: 1176745 - RNA, 19 nt, Artificial Sequence
  Description of Artificial Sequence: Synthetic oligonucleotide
  Antisense strand to SEQ ID NO: 1176744
uccugcaaggaacuauaua

SEQ ID NO: 1176746 - RNA, 19 nt, Artificial Sequence
  Description of Artificial Sequence: Synthetic oligonucleotide
  Sense strand starting at position 2956 of SEQ ID NO: 916693
uuucuugguuuagucagua

SEQ ID NO: 1176747 - RNA, 19 nt, Artificial Sequence
  Description of Artificial Sequence: Synthetic oligonucleotide
  Antisense strand to SEQ ID NO: 1176746
uacugacuaaaccaagaaa

SEQ ID NO: 1176748 - RNA, 19 nt, Artificial Sequence
  Description of Artificial Sequence: Synthetic oligonucleotide
  Sense strand starting at position 3143 of SEQ ID NO: 916693
ccaggaauuugguaagauu

SEQ ID NO: 1176749 - RNA, 19 nt, Artificial Sequence
  Description of Artificial Sequence: Synthetic oligonucleotide
  Antisense strand to SEQ ID NO: 1176748
aaucuuaccaaauuccugg

SEQ ID NO: 1176750 - RNA, 19 nt, Artificial Sequence
  Description of Artificial Sequence: Synthetic oligonucleotide
  Sense strand starting at position 3300 of SEQ ID NO: 916693
gcugauucuucuguuauac

SEQ ID NO: 1176751 - RNA, 19 nt, Artificial Sequence
  Description of Artificial Sequence: Synthetic oligonucleotide
  Antisense strand to SEQ ID NO: 1176750
guauaacagaagaaucagc

SEQ ID NO: 1176752 - RNA, 19 nt, Artificial Sequence
  Description of Artificial Sequence: Synthetic oligonucleotide
  Sense strand starting at position 3354 of SEQ ID NO: 916693
cagguuagucagugaguca

SEQ ID NO: 1176753 - RNA, 19 nt, Artificial Sequence
  Description of Artificial Sequence: Synthetic oligonucleotide
  Antisense strand to SEQ ID NO: 1176752
ugacucacugacuaaccug

SEQ ID NO: 1176754 - RNA, 19 nt, Artificial Sequence
  Description of Artificial Sequence: Synthetic oligonucleotide
  Sense strand starting at position 3436 of SEQ ID NO: 916693
ugguauuaauuugaggaca

SEQ ID NO: 1176755 - RNA, 19 nt, Artificial Sequence
  Description of Artificial Sequence: Synthetic oligonucleotide
  Antisense strand to SEQ ID NO: 1176754
uguccucaaauuaauacca

SEQ ID NO: 1176756 - RNA, 19 nt, Artificial Sequence
  Description of Artificial Sequence: Synthetic oligonucleotide
  Sense strand starting at position 3848 of SEQ ID NO: 916693
ucuggucuccuccauagga

SEQ ID NO: 1176757 - RNA, 19 nt, Artificial Sequence
  Description of Artificial Sequence: Synthetic oligonucleotide
  Antisense strand to SEQ ID NO: 1176756
uccuauggaggagaccaga

SEQ ID NO: 1176758 - RNA, 19 nt, Artificial Sequence
  Description of Artificial Sequence: Synthetic oligonucleotide
  Sense strand starting at position 3891 of SEQ ID NO: 916693
ggugucuuaaguuagacca

SEQ ID NO: 1176759 - RNA, 19 nt, Artificial Sequence
  Description of Artificial Sequence: Synthetic oligonucleotide
  Antisense strand to SEQ ID NO: 1176758
uggucuaacuuaagacacc

SEQ ID NO: 1176760 - RNA, 19 nt, Artificial Sequence
  Description of Artificial Sequence: Synthetic oligonucleotide
  Sense strand starting at position 3969 of SEQ ID NO: 916693
ugauguugucgccaacuua

SEQ ID NO: 1176761 - RNA, 19 nt, Artificial Sequence
  Description of Artificial Sequence: Synthetic oligonucleotide
  Antisense strand to SEQ ID NO: 1176760
uaaguuggcgacaacauca

SEQ ID NO: 1176762 - RNA, 19 nt, Artificial Sequence
  Description of Artificial Sequence: Synthetic oligonucleotide
  Sense strand starting at position 477 of SEQ ID NO: 916694
acugaauaguugccacaaa

SEQ ID NO: 1176763 - RNA, 19 nt, Artificial Sequence
  Description of Artificial Sequence: Synthetic oligonucleotide
  Antisense strand to SEQ ID NO: 1176762
uuuguggcaacuauucagu

SEQ ID NO: 1176764 - RNA, 19 nt, Artificial Sequence
  Description of Artificial Sequence: Synthetic oligonucleotide
  Sense strand starting at position 778 of SEQ ID NO: 916694
cagaaucaaguuugcauga

SEQ ID NO: 1176765 - RNA, 19 nt, Artificial Sequence
  Description of Artificial Sequence: Synthetic oligonucleotide
  Antisense strand to SEQ ID NO: 1176764
ucaugcaaacuugauucug

SEQ ID NO: 1176766 - RNA, 19 nt, Artificial Sequence
  Description of Artificial Sequence: Synthetic oligonucleotide
  Sense strand starting at position 779 of SEQ ID NO: 916694
agaaucaaguuugcaugaa

SEQ ID NO: 1176767 - RNA, 19 nt, Artificial Sequence
  Description of Artificial Sequence: Synthetic oligonucleotide
  Antisense strand to SEQ ID NO: 1176766
uucaugcaaacuugauucu

SEQ ID NO: 1176768 - RNA, 19 nt, Artificial Sequence
  Description of Artificial Sequence: Synthetic oligonucleotide
  Sense strand starting at position 783 of SEQ ID NO: 916694
ucaaguuugcaugaagauu

SEQ ID NO: 1176769 - RNA, 19 nt, Artificial Sequence
  Description of Artificial Sequence: Synthetic oligonucleotide
  Antisense strand to SEQ ID NO: 1176768
aaucuucaugcaaacuuga

SEQ ID NO: 1176770 - RNA, 19 nt, Artificial Sequence
  Description of Artificial Sequence: Synthetic oligonucleotide
  Sense strand starting at position 791 of SEQ ID NO: 916694
gcaugaagauugccuauau

SEQ ID NO: 1176771 - RNA, 19 nt, Artificial Sequence
  Description of Artificial Sequence: Synthetic oligonucleotide
  Antisense strand to SEQ ID NO: 1176770
auauaggcaaucuucaugc

SEQ ID NO: 1176772 - RNA, 19 nt, Artificial Sequence
  Description of Artificial Sequence: Synthetic oligonucleotide
  Sense strand starting at position 915 of SEQ ID NO: 916694
gagaaugaauugggauuua

SEQ ID NO: 1176773 - RNA, 19 nt, Artificial Sequence
  Description of Artificial Sequence: Synthetic oligonucleotide
  Antisense strand to SEQ ID NO: 1176772
uaaaucccaauucauucuc

SEQ ID NO: 1176774 - RNA, 19 nt, Artificial Sequence
  Description of Artificial Sequence: Synthetic oligonucleotide
  Sense strand starting at position 927 of SEQ ID NO: 916694
ggauuuaccugauauuagg

SEQ ID NO: 1176775 - RNA, 19 nt, Artificial Sequence
  Description of Artificial Sequence: Synthetic oligonucleotide
  Antisense strand to SEQ ID NO: 1176774
ccuaauaucagguaaaucc

SEQ ID NO: 1176776 - RNA, 19 nt, Artificial Sequence
  Description of Artificial Sequence: Synthetic oligonucleotide
  Sense strand starting at position 948 of SEQ ID NO: 916694
gagagauucuuccuggcug

SEQ ID NO: 1176777 - RNA, 19 nt, Artificial Sequence
  Description of Artificial Sequence: Synthetic oligonucleotide
  Antisense strand to SEQ ID NO: 1176776
cagccaggaagaaucucuc

SEQ ID NO: 1176778 - RNA, 19 nt, Artificial Sequence
  Description of Artificial Sequence: Synthetic oligonucleotide
  Sense strand starting at position 1227 of SEQ ID NO: 916694
gcuuauuuaguuuaugcau

SEQ ID NO: 1176779 - RNA, 19 nt, Artificial Sequence
  Description of Artificial Sequence: Synthetic oligonucleotide
  Antisense strand to SEQ ID NO: 1176778
augcauaaacuaaauaagc

SEQ ID NO: 1176780 - RNA, 19 nt, Artificial Sequence
  Description of Artificial Sequence: Synthetic oligonucleotide
  Sense strand starting at position 1443 of SEQ ID NO: 916694
cuacaucuuuaguuagaca

SEQ ID NO: 1176781 - RNA, 19 nt, Artificial Sequence
  Description of Artificial Sequence: Synthetic oligonucleotide
  Antisense strand to SEQ ID NO: 1176780
ugucuaacuaaagauguag

SEQ ID NO: 1176782 - RNA, 19 nt, Artificial Sequence
  Description of Artificial Sequence: Synthetic oligonucleotide
  Sense strand starting at position 1497 of SEQ ID NO: 916694
aucucugauguguauguau

SEQ ID NO: 1176783 - RNA, 19 nt, Artificial Sequence
  Description of Artificial Sequence: Synthetic oligonucleotide
  Antisense strand to SEQ ID NO: 1176782
auacauacacaucagagau

SEQ ID NO: 1176784 - RNA, 19 nt, Artificial Sequence
  Description of Artificial Sequence: Synthetic oligonucleotide
  Sense strand starting at position 1564 of SEQ ID NO: 916694
uguguacuuacugggauca

SEQ ID NO: 1176785 - RNA, 19 nt, Artificial Sequence
  Description of Artificial Sequence: Synthetic oligonucleotide
  Antisense strand to SEQ ID NO: 1176784
ugaucccaguaaguacaca

SEQ ID NO: 1176786 - RNA, 19 nt, Artificial Sequence
  Description of Artificial Sequence: Synthetic oligonucleotide
  Sense strand starting at position 1576 of SEQ ID NO: 916694
gggaucaguauaggaucuu

SEQ ID NO: 1176787 - RNA, 19 nt, Artificial Sequence
  Description of Artificial Sequence: Synthetic oligonucleotide
  Antisense strand to SEQ ID NO: 1176786
aagauccuauacugauccc

SEQ ID NO: 1176788 - RNA, 19 nt, Artificial Sequence
  Description of Artificial Sequence: Synthetic oligonucleotide
  Sense strand starting at position 1697 of SEQ ID NO: 916694
acaaauucguuauuggauu

SEQ ID NO: 1176789 - RNA, 19 nt, Artificial Sequence
  Description of Artificial Sequence: Synthetic oligonucleotide
  Antisense strand to SEQ ID NO: 1176788
aauccaauaacgaauuugu

SEQ ID NO: 1176790 - RNA, 19 nt, Artificial Sequence
  Description of Artificial Sequence: Synthetic oligonucleotide
  Sense strand starting at position 1734 of SEQ ID NO: 916694
auuagaaguccuuauugug

SEQ ID NO: 1176791 - RNA, 19 nt, Artificial Sequence
  Description of Artificial Sequence: Synthetic oligonucleotide
  Antisense strand to SEQ ID NO: 1176790
cacaauaaggacuucuaau

SEQ ID NO: 1176792 - RNA, 19 nt, Artificial Sequence
  Description of Artificial Sequence: Synthetic oligonucleotide
  Sense strand starting at position 2173 of SEQ ID NO: 916694
uuguuugugccuuauuucu

SEQ ID NO: 1176793 - RNA, 19 nt, Artificial Sequence
  Description of Artificial Sequence: Synthetic oligonucleotide
  Antisense strand to SEQ ID NO: 1176792
agaaauaaggcacaaacaa

SEQ ID NO: 1176794 - RNA, 19 nt, Artificial Sequence
  Description of Artificial Sequence: Synthetic oligonucleotide
  Sense strand starting at position 2175 of SEQ ID NO: 916694
guuugugccuuauuucuaa

SEQ ID NO: 1176795 - RNA, 19 nt, Artificial Sequence
  Description of Artificial Sequence: Synthetic oligonucleotide
  Antisense strand to SEQ ID NO: 1176794
uuagaaauaaggcacaaac

SEQ ID NO: 1176796 - RNA, 19 nt, Artificial Sequence
  Description of Artificial Sequence: Synthetic oligonucleotide
  Sense strand starting at position 2197 of SEQ ID NO: 916694
guacgacuaugacuugaau

SEQ ID NO: 1176797 - RNA, 19 nt, Artificial Sequence
  Description of Artificial Sequence: Synthetic oligonucleotide
  Antisense strand to SEQ ID NO: 1176796
auucaagucauagucguac

SEQ ID NO: 1176798 - RNA, 19 nt, Artificial Sequence
  Description of Artificial Sequence: Synthetic oligonucleotide
  Sense strand starting at position 2227 of SEQ ID NO: 916694
aggaacuguguccaagcua

SEQ ID NO: 1176799 - RNA, 19 nt, Artificial Sequence
  Description of Artificial Sequence: Synthetic oligonucleotide
  Antisense strand to SEQ ID NO: 1176798
uagcuuggacacaguuccu

SEQ ID NO: 1176800 - RNA, 19 nt, Artificial Sequence
  Description of Artificial Sequence: Synthetic oligonucleotide
  Sense strand starting at position 2385 of SEQ ID NO: 916694
ggucaauuucucuggcucu

SEQ ID NO: 1176801 - RNA, 19 nt, Artificial Sequence
  Description of Artificial Sequence: Synthetic oligonucleotide
  Antisense strand to SEQ ID NO: 1176800
agagccagagaaauugacc

SEQ ID NO: 1176802 - RNA, 19 nt, Artificial Sequence
  Description of Artificial Sequence: Synthetic oligonucleotide
  Sense strand starting at position 2450 of SEQ ID NO: 916694
aucacaauuggcuaaaguu

SEQ ID NO: 1176803 - RNA, 19 nt, Artificial Sequence
  Description of Artificial Sequence: Synthetic oligonucleotide
  Antisense strand to SEQ ID NO: 1176802
aacuuuagccaauugugau

SEQ ID NO: 1176804 - RNA, 19 nt, Artificial Sequence
  Description of Artificial Sequence: Synthetic oligonucleotide
  Sense strand starting at position 2478 of SEQ ID NO: 916694
uagagaugguuucuguuac

SEQ ID NO: 1176805 - RNA, 19 nt, Artificial Sequence
  Description of Artificial Sequence: Synthetic oligonucleotide
  Antisense strand to SEQ ID NO: 1176804
guaacagaaaccaucucua

SEQ ID NO: 1176806 - RNA, 19 nt, Artificial Sequence
  Description of Artificial Sequence: Synthetic oligonucleotide
  Sense strand starting at position 2914 of SEQ ID NO: 916694
aucagauacccucguuaaa

SEQ ID NO: 1176807 - RNA, 19 nt, Artificial Sequence
  Description of Artificial Sequence: Synthetic oligonucleotide
  Antisense strand to SEQ ID NO: 1176806
uuuaacgaggguaucugau

SEQ ID NO: 1176808 - RNA, 19 nt, Artificial Sequence
  Description of Artificial Sequence: Synthetic oligonucleotide
  Sense strand starting at position 3184 of SEQ ID NO: 916694
aggauauaguacuuaccau

SEQ ID NO: 1176809 - RNA, 19 nt, Artificial Sequence
  Description of Artificial Sequence: Synthetic oligonucleotide
  Antisense strand to SEQ ID NO: 1176808
augguaaguacuauauccu

SEQ ID NO: 1176810 - RNA, 19 nt, Artificial Sequence
  Description of Artificial Sequence: Synthetic oligonucleotide
  Sense strand starting at position 3262 of SEQ ID NO: 916694
aucagagaccugcauuguu

SEQ ID NO: 1176811 - RNA, 19 nt, Artificial Sequence
  Description of Artificial Sequence: Synthetic oligonucleotide
  Antisense strand to SEQ ID NO: 1176810
aacaaugcaggucucugau

SEQ ID NO: 1176812 - RNA, 19 nt, Artificial Sequence
  Description of Artificial Sequence: Synthetic oligonucleotide
  Sense strand starting at position 3349 of SEQ ID NO: 916694
acagguuacucaguaucaa

SEQ ID NO: 1176813 - RNA, 19 nt, Artificial Sequence
  Description of Artificial Sequence: Synthetic oligonucleotide
  Antisense strand to SEQ ID NO: 1176812
uugauacugaguaaccugu

SEQ ID NO: 1176814 - RNA, 19 nt, Artificial Sequence
  Description of Artificial Sequence: Synthetic oligonucleotide
  Sense strand starting at position 3433 of SEQ ID NO: 916694
ugguauuaauuugagaaca

SEQ ID NO: 1176815 - RNA, 19 nt, Artificial Sequence
  Description of Artificial Sequence: Synthetic oligonucleotide
  Antisense strand to SEQ ID NO: 1176814
uguucucaaauuaauacca

SEQ ID NO: 1176816 - RNA, 19 nt, Artificial Sequence
  Description of Artificial Sequence: Synthetic oligonucleotide
  Sense strand starting at position 3512 of SEQ ID NO: 916694
ccucuugaacauuguggau

SEQ ID NO: 1176817 - RNA, 19 nt, Artificial Sequence
  Description of Artificial Sequence: Synthetic oligonucleotide
  Antisense strand to SEQ ID NO: 1176816
auccacaauguucaagagg

SEQ ID NO: 1176818 - RNA, 19 nt, Artificial Sequence
  Description of Artificial Sequence: Synthetic oligonucleotide
  Sense strand starting at position 3518 of SEQ ID NO: 916694
gaacauuguggaugaguag

SEQ ID NO: 1176819 - RNA, 19 nt, Artificial Sequence
  Description of Artificial Sequence: Synthetic oligonucleotide
  Antisense strand to SEQ ID NO: 1176818
cuacucauccacaauguuc

SEQ ID NO: 1176820 - RNA, 19 nt, Artificial Sequence
  Description of Artificial Sequence: Synthetic oligonucleotide
  Sense strand starting at position 3540 of SEQ ID NO: 916694
cugggcuuugcagaugaga

SEQ ID NO: 1176821 - RNA, 19 nt, Artificial Sequence
  Description of Artificial Sequence: Synthetic oligonucleotide
  Antisense strand to SEQ ID NO: 1176820
ucucaucugcaaagcccag

SEQ ID NO: 1176822 - RNA, 19 nt, Artificial Sequence
  Description of Artificial Sequence: Synthetic oligonucleotide
  Sense strand starting at position 3542 of SEQ ID NO: 916694
gggcuuugcagaugagaau

SEQ ID NO: 1176823 - RNA, 19 nt, Artificial Sequence
  Description of Artificial Sequence: Synthetic oligonucleotide
  Antisense strand to SEQ ID NO: 1176822
auucucaucugcaaagccc

SEQ ID NO: 1176824 - RNA, 19 nt, Artificial Sequence
  Description of Artificial Sequence: Synthetic oligonucleotide
  Sense strand starting at position 3543 of SEQ ID NO: 916694
ggcuuugcagaugagaauc

SEQ ID NO: 1176825 - RNA, 19 nt, Artificial Sequence
  Description of Artificial Sequence: Synthetic oligonucleotide
  Antisense strand to SEQ ID NO: 1176824
gauucucaucugcaaagcc

SEQ ID NO: 1176826 - RNA, 19 nt, Artificial Sequence
  Description of Artificial Sequence: Synthetic oligonucleotide
  Sense strand starting at position 3575 of SEQ ID NO: 916694
ugaagaguugcagguaaua

SEQ ID NO: 1176827 - RNA, 19 nt, Artificial Sequence
  Description of Artificial Sequence: Synthetic oligonucleotide
  Antisense strand to SEQ ID NO: 1176826
uauuaccugcaacucuuca

SEQ ID NO: 1176828 - RNA, 19 nt, Artificial Sequence
  Description of Artificial Sequence: Synthetic oligonucleotide
  Sense strand starting at position 3577 of SEQ ID NO: 916694
aagaguugcagguaauagu

SEQ ID NO: 1176829 - RNA, 19 nt, Artificial Sequence
  Description of Artificial Sequence: Synthetic oligonucleotide
  Antisense strand to SEQ ID NO: 1176828
acuauuaccugcaacucuu

SEQ ID NO: 1176830 - RNA, 19 nt, Artificial Sequence
  Description of Artificial Sequence: Synthetic oligonucleotide
  Sense strand starting at position 3686 of SEQ ID NO: 916694
auauacacguacuugaaau

SEQ ID NO: 1176831 - RNA, 19 nt, Artificial Sequence
  Description of Artificial Sequence: Synthetic oligonucleotide
  Antisense strand to SEQ ID NO: 1176830
auuucaaguacguguauau

SEQ ID NO: 1176832 - RNA, 19 nt, Artificial Sequence
  Description of Artificial Sequence: Synthetic oligonucleotide
  Sense strand starting at position 3692 of SEQ ID NO: 916694
acguacuugaaaugggaau

SEQ ID NO: 1176833 - RNA, 19 nt, Artificial Sequence
  Description of Artificial Sequence: Synthetic oligonucleotide
  Antisense strand to SEQ ID NO: 1176832
auucccauuucaaguacgu

SEQ ID NO: 1176834 - RNA, 19 nt, Artificial Sequence
  Description of Artificial Sequence: Synthetic oligonucleotide
  Sense strand starting at position 3693 of SEQ ID NO: 916694
cguacuugaaaugggaaua

SEQ ID NO: 1176835 - RNA, 19 nt, Artificial Sequence
  Description of Artificial Sequence: Synthetic oligonucleotide
  Antisense strand to SEQ ID NO: 1176834
uauucccauuucaaguacg

SEQ ID NO: 1176836 - RNA, 19 nt, Artificial Sequence
  Description of Artificial Sequence: Synthetic oligonucleotide
  Sense strand starting at position 3803 of SEQ ID NO: 916694
cugacauugccugauauug

SEQ ID NO: 1176837 - RNA, 19 nt, Artificial Sequence
  Description of Artificial Sequence: Synthetic oligonucleotide
  Antisense strand to SEQ ID NO: 1176836
caauaucaggcaaugucag

SEQ ID NO: 1176838 - RNA, 19 nt, Artificial Sequence
  Description of Artificial Sequence: Synthetic oligonucleotide
  Sense strand starting at position 3813 of SEQ ID NO: 916694
cugauauugucaccaacug

SEQ ID NO: 1176839 - RNA, 19 nt, Artificial Sequence
  Description of Artificial Sequence: Synthetic oligonucleotide
  Antisense strand to SEQ ID NO: 1176838
caguuggugacaauaucag

SEQ ID NO: 1176840 - RNA, 19 nt, Artificial Sequence
  Description of Artificial Sequence: Synthetic oligonucleotide
  Sense strand starting at position 3955 of SEQ ID NO: 916694
gaguaaaguuuaucaggaa

SEQ ID NO: 1176841 - RNA, 19 nt, Artificial Sequence
  Description of Artificial Sequence: Synthetic oligonucleotide
  Antisense strand to SEQ ID NO: 1176840
uuccugauaaacuuuacuc

SEQ ID NO: 1176842 - RNA, 19 nt, Artificial Sequence
  Description of Artificial Sequence: Synthetic oligonucleotide
  Sense strand starting at position 138 of SEQ ID NO: 916695
aucccuguagccuaaagaa

SEQ ID NO: 1176843 - RNA, 19 nt, Artificial Sequence
  Description of Artificial Sequence: Synthetic oligonucleotide
  Antisense strand to SEQ ID NO: 1176842
uucuuuaggcuacagggau

SEQ ID NO: 1176844 - RNA, 19 nt, Artificial Sequence
  Description of Artificial Sequence: Synthetic oligonucleotide
  Sense strand starting at position 185 of SEQ ID NO: 916695
cugggcuugaguugguuua

SEQ ID NO: 1176845 - RNA, 19 nt, Artificial Sequence
  Description of Artificial Sequence: Synthetic oligonucleotide
  Antisense strand to SEQ ID NO: 1176844
uaaaccaacucaagcccag

SEQ ID NO: 1176846 - RNA, 19 nt, Artificial Sequence
  Description of Artificial Sequence: Synthetic oligonucleotide
  Sense strand starting at position 186 of SEQ ID NO: 916695
ugggcuugaguugguuuaa

SEQ ID NO: 1176847 - RNA, 19 nt, Artificial Sequence
  Description of Artificial Sequence: Synthetic oligonucleotide
  Antisense strand to SEQ ID NO: 1176846
uuaaaccaacucaagccca

SEQ ID NO: 1176848 - RNA, 19 nt, Artificial Sequence
  Description of Artificial Sequence: Synthetic oligonucleotide
  Sense strand starting at position 187 of SEQ ID NO: 916695
gggcuugaguugguuuaaa

SEQ ID NO: 1176849 - RNA, 19 nt, Artificial Sequence
  Description of Artificial Sequence: Synthetic oligonucleotide
  Antisense strand to SEQ ID NO: 1176848
uuuaaaccaacucaagccc

SEQ ID NO: 1176850 - RNA, 19 nt, Artificial Sequence
  Description of Artificial Sequence: Synthetic oligonucleotide
  Sense strand starting at position 266 of SEQ ID NO: 916695
gcuguaacagccuacuuaa

SEQ ID NO: 1176851 - RNA, 19 nt, Artificial Sequence
  Description of Artificial Sequence: Synthetic oligonucleotide
  Antisense strand to SEQ ID NO: 1176850
uuaaguaggcuguuacagc

SEQ ID NO: 1176852 - RNA, 19 nt, Artificial Sequence
  Description of Artificial Sequence: Synthetic oligonucleotide
  Sense strand starting at position 392 of SEQ ID NO: 916695
ugguguuucuagguugacu

SEQ ID NO: 1176853 - RNA, 19 nt, Artificial Sequence
  Description of Artificial Sequence: Synthetic oligonucleotide
  Antisense strand to SEQ ID NO: 1176852
agucaaccuagaaacacca

SEQ ID NO: 1176854 - RNA, 19 nt, Artificial Sequence
  Description of Artificial Sequence: Synthetic oligonucleotide
  Sense strand starting at position 449 of SEQ ID NO: 916695
gcgagaggcucagcagauu

SEQ ID NO: 1176855 - RNA, 19 nt, Artificial Sequence
  Description of Artificial Sequence: Synthetic oligonucleotide
  Antisense strand to SEQ ID NO: 1176854
aaucugcugagccucucgc

SEQ ID NO: 1176856 - RNA, 19 nt, Artificial Sequence
  Description of Artificial Sequence: Synthetic oligonucleotide
  Sense strand starting at position 461 of SEQ ID NO: 916695
gcagauuucugcuuuguug

SEQ ID NO: 1176857 - RNA, 19 nt, Artificial Sequence
  Description of Artificial Sequence: Synthetic oligonucleotide
  Antisense strand to SEQ ID NO: 1176856
caacaaagcagaaaucugc

SEQ ID NO: 1176858 - RNA, 19 nt, Artificial Sequence
  Description of Artificial Sequence: Synthetic oligonucleotide
  Sense strand starting at position 464 of SEQ ID NO: 916695
gauuucugcuuuguuguga

SEQ ID NO: 1176859 - RNA, 19 nt, Artificial Sequence
  Description of Artificial Sequence: Synthetic oligonucleotide
  Antisense strand to SEQ ID NO: 1176858
ucacaacaaagcagaaauc

SEQ ID NO: 1176860 - RNA, 19 nt, Artificial Sequence
  Description of Artificial Sequence: Synthetic oligonucleotide
  Sense strand starting at position 473 of SEQ ID NO: 916695
uuuguugugagucacuaaa

SEQ ID NO: 1176861 - RNA, 19 nt, Artificial Sequence
  Description of Artificial Sequence: Synthetic oligonucleotide
  Antisense strand to SEQ ID NO: 1176860
uuuagugacucacaacaaa

SEQ ID NO: 1176862 - RNA, 19 nt, Artificial Sequence
  Description of Artificial Sequence: Synthetic oligonucleotide
  Sense strand starting at position 630 of SEQ ID NO: 916695
augagauucuaagaagcaa

SEQ ID NO: 1176863 - RNA, 19 nt, Artificial Sequence
  Description of Artificial Sequence: Synthetic oligonucleotide
  Antisense strand to SEQ ID NO: 1176862
uugcuucuuagaaucucau

SEQ ID NO: 1176864 - RNA, 19 nt, Artificial Sequence
  Description of Artificial Sequence: Synthetic oligonucleotide
  Sense strand starting at position 871 of SEQ ID NO: 916695
augaauuugugccuuaucu

SEQ ID NO: 1176865 - RNA, 19 nt, Artificial Sequence
  Description of Artificial Sequence: Synthetic oligonucleotide
  Antisense strand to SEQ ID NO: 1176864
agauaaggcacaaauucau

SEQ ID NO: 1176866 - RNA, 19 nt, Artificial Sequence
  Description of Artificial Sequence: Synthetic oligonucleotide
  Sense strand starting at position 979 of SEQ ID NO: 916695
cagcaugaagcuugcagaa

SEQ ID NO: 1176867 - RNA, 19 nt, Artificial Sequence
  Description of Artificial Sequence: Synthetic oligonucleotide
  Antisense strand to SEQ ID NO: 1176866
uucugcaagcuucaugcug

SEQ ID NO: 1176868 - RNA, 19 nt, Artificial Sequence
  Description of Artificial Sequence: Synthetic oligonucleotide
  Sense strand starting at position 1176 of SEQ ID NO: 916695
uuuccacauguggaguaaa

SEQ ID NO: 1176869 - RNA, 19 nt, Artificial Sequence
  Description of Artificial Sequence: Synthetic oligonucleotide
  Antisense strand to SEQ ID NO: 1176868
uuuacuccacauguggaaa

SEQ ID NO: 1176870 - RNA, 19 nt, Artificial Sequence
  Description of Artificial Sequence: Synthetic oligonucleotide
  Sense strand starting at position 1189 of SEQ ID NO: 916695
aguaaauuaggaugcauga

SEQ ID NO: 1176871 - RNA, 19 nt, Artificial Sequence
  Description of Artificial Sequence: Synthetic oligonucleotide
  Antisense strand to SEQ ID NO: 1176870
ucaugcauccuaauuuacu

SEQ ID NO: 1176872 - RNA, 19 nt, Artificial Sequence
  Description of Artificial Sequence: Synthetic oligonucleotide
  Sense strand starting at position 1235 of SEQ ID NO: 916695
uggauuuguuuccuuugca

SEQ ID NO: 1176873 - RNA, 19 nt, Artificial Sequence
  Description of Artificial Sequence: Synthetic oligonucleotide
  Antisense strand to SEQ ID NO: 1176872
ugcaaaggaaacaaaucca

SEQ ID NO: 1176874 - RNA, 19 nt, Artificial Sequence
  Description of Artificial Sequence: Synthetic oligonucleotide
  Sense strand starting at position 1236 of SEQ ID NO: 916695
ggauuuguuuccuuugcaa

SEQ ID NO: 1176875 - RNA, 19 nt, Artificial Sequence
  Description of Artificial Sequence: Synthetic oligonucleotide
  Antisense strand to SEQ ID NO: 1176874
uugcaaaggaaacaaaucc

SEQ ID NO: 1176876 - RNA, 19 nt, Artificial Sequence
  Description of Artificial Sequence: Synthetic oligonucleotide
  Sense strand starting at position 1319 of SEQ ID NO: 916695
cagaguuuccaacgauguc

SEQ ID NO: 1176877 - RNA, 19 nt, Artificial Sequence
  Description of Artificial Sequence: Synthetic oligonucleotide
  Antisense strand to SEQ ID NO: 1176876
gacaucguuggaaacucug

SEQ ID NO: 1176878 - RNA, 19 nt, Artificial Sequence
  Description of Artificial Sequence: Synthetic oligonucleotide
  Sense strand starting at position 1320 of SEQ ID NO: 916695
agaguuuccaacgauguca

SEQ ID NO: 1176879 - RNA, 19 nt, Artificial Sequence
  Description of Artificial Sequence: Synthetic oligonucleotide
  Antisense strand to SEQ ID NO: 1176878
ugacaucguuggaaacucu

SEQ ID NO: 1176880 - RNA, 19 nt, Artificial Sequence
  Description of Artificial Sequence: Synthetic oligonucleotide
  Sense strand starting at position 1359 of SEQ ID NO: 916695
ccuacucaccugugaugca

SEQ ID NO: 1176881 - RNA, 19 nt, Artificial Sequence
  Description of Artificial Sequence: Synthetic oligonucleotide
  Antisense strand to SEQ ID NO: 1176880
ugcaucacaggugaguagg

SEQ ID NO: 1176882 - RNA, 19 nt, Artificial Sequence
  Description of Artificial Sequence: Synthetic oligonucleotide
  Sense strand starting at position 1387 of SEQ ID NO: 916695
ggccaaauaucagagaaag

SEQ ID NO: 1176883 - RNA, 19 nt, Artificial Sequence
  Description of Artificial Sequence: Synthetic oligonucleotide
  Antisense strand to SEQ ID NO: 1176882
cuuucucugauauuuggcc

SEQ ID NO: 1176884 - RNA, 19 nt, Artificial Sequence
  Description of Artificial Sequence: Synthetic oligonucleotide
  Sense strand starting at position 2173 of SEQ ID NO: 916695
gggaguuccgcgucuccau

SEQ ID NO: 1176885 - RNA, 19 nt, Artificial Sequence
  Description of Artificial Sequence: Synthetic oligonucleotide
  Antisense strand to SEQ ID NO: 1176884
auggagacgcggaacuccc

SEQ ID NO: 1176886 - RNA, 19 nt, Artificial Sequence
  Description of Artificial Sequence: Synthetic oligonucleotide
  Sense strand starting at position 2360 of SEQ ID NO: 916695
aaauucgaaguaugggauu

SEQ ID NO: 1176887 - RNA, 19 nt, Artificial Sequence
  Description of Artificial Sequence: Synthetic oligonucleotide
  Antisense strand to SEQ ID NO: 1176886
aaucccauacuucgaauuu

SEQ ID NO: 1176888 - RNA, 19 nt, Artificial Sequence
  Description of Artificial Sequence: Synthetic oligonucleotide
  Sense strand starting at position 2414 of SEQ ID NO: 916695
uugggauucuauccugaau

SEQ ID NO: 1176889 - RNA, 19 nt, Artificial Sequence
  Description of Artificial Sequence: Synthetic oligonucleotide
  Antisense strand to SEQ ID NO: 1176888
auucaggauagaaucccaa

SEQ ID NO: 1176890 - RNA, 19 nt, Artificial Sequence
  Description of Artificial Sequence: Synthetic oligonucleotide
  Sense strand starting at position 2472 of SEQ ID NO: 916695
cccugcuucccgucguaaa

SEQ ID NO: 1176891 - RNA, 19 nt, Artificial Sequence
  Description of Artificial Sequence: Synthetic oligonucleotide
  Antisense strand to SEQ ID NO: 1176890
uuuacgacgggaagcaggg

SEQ ID NO: 1176892 - RNA, 19 nt, Artificial Sequence
  Description of Artificial Sequence: Synthetic oligonucleotide
  Sense strand starting at position 2581 of SEQ ID NO: 916695
ggaguaccgagauggcuuu

SEQ ID NO: 1176893 - RNA, 19 nt, Artificial Sequence
  Description of Artificial Sequence: Synthetic oligonucleotide
  Antisense strand to SEQ ID NO: 1176892
aaagccaucucgguacucc

SEQ ID NO: 1176894 - RNA, 19 nt, Artificial Sequence
  Description of Artificial Sequence: Synthetic oligonucleotide
  Sense strand starting at position 2625 of SEQ ID NO: 916695
agcaguagacguugaaauu

SEQ ID NO: 1176895 - RNA, 19 nt, Artificial Sequence
  Description of Artificial Sequence: Synthetic oligonucleotide
  Antisense strand to SEQ ID NO: 1176894
aauuucaacgucuacugcu

SEQ ID NO: 1176896 - RNA, 19 nt, Artificial Sequence
  Description of Artificial Sequence: Synthetic oligonucleotide
  Sense strand starting at position 2626 of SEQ ID NO: 916695
gcaguagacguugaaauua

SEQ ID NO: 1176897 - RNA, 19 nt, Artificial Sequence
  Description of Artificial Sequence: Synthetic oligonucleotide
  Antisense strand to SEQ ID NO: 1176896
uaauuucaacgucuacugc

SEQ ID NO: 1176898 - RNA, 19 nt, Artificial Sequence
  Description of Artificial Sequence: Synthetic oligonucleotide
  Sense strand starting at position 2710 of SEQ ID NO: 916695
ucacaaagcgucuguugaa

SEQ ID NO: 1176899 - RNA, 19 nt, Artificial Sequence
  Description of Artificial Sequence: Synthetic oligonucleotide
  Antisense strand to SEQ ID NO: 1176898
uucaacagacgcuuuguga

SEQ ID NO: 1176900 - RNA, 19 nt, Artificial Sequence
  Description of Artificial Sequence: Synthetic oligonucleotide
  Sense strand starting at position 2711 of SEQ ID NO: 916695
cacaaagcgucuguugaau

SEQ ID NO: 1176901 - RNA, 19 nt, Artificial Sequence
  Description of Artificial Sequence: Synthetic oligonucleotide
  Antisense strand to SEQ ID NO: 1176900
auucaacagacgcuuugug

SEQ ID NO: 1176902 - RNA, 19 nt, Artificial Sequence
  Description of Artificial Sequence: Synthetic oligonucleotide
  Sense strand starting at position 2823 of SEQ ID NO: 916695
ucuaaugugaaaggguaga

SEQ ID NO: 1176903 - RNA, 19 nt, Artificial Sequence
  Description of Artificial Sequence: Synthetic oligonucleotide
  Antisense strand to SEQ ID NO: 1176902
ucuacccuuucacauuaga

SEQ ID NO: 1176904 - RNA, 19 nt, Artificial Sequence
  Description of Artificial Sequence: Synthetic oligonucleotide
  Sense strand starting at position 2926 of SEQ ID NO: 916695
gcacauuccagaugaggaa

SEQ ID NO: 1176905 - RNA, 19 nt, Artificial Sequence
  Description of Artificial Sequence: Synthetic oligonucleotide
  Antisense strand to SEQ ID NO: 1176904
uuccucaucuggaaugugc

SEQ ID NO: 1176906 - RNA, 19 nt, Artificial Sequence
  Description of Artificial Sequence: Synthetic oligonucleotide
  Sense strand starting at position 3039 of SEQ ID NO: 916695
gagacaguauucccugaaa

SEQ ID NO: 1176907 - RNA, 19 nt, Artificial Sequence
  Description of Artificial Sequence: Synthetic oligonucleotide
  Antisense strand to SEQ ID NO: 1176906
uuucagggaauacugucuc

SEQ ID NO: 1176908 - RNA, 19 nt, Artificial Sequence
  Description of Artificial Sequence: Synthetic oligonucleotide
  Sense strand starting at position 3041 of SEQ ID NO: 916695
gacaguauucccugaaaug

SEQ ID NO: 1176909 - RNA, 19 nt, Artificial Sequence
  Description of Artificial Sequence: Synthetic oligonucleotide
  Antisense strand to SEQ ID NO: 1176908
cauuucagggaauacuguc

SEQ ID NO: 1176910 - RNA, 19 nt, Artificial Sequence
  Description of Artificial Sequence: Synthetic oligonucleotide
  Sense strand starting at position 3042 of SEQ ID NO: 916695
acaguauucccugaaaugc

SEQ ID NO: 1176911 - RNA, 19 nt, Artificial Sequence
  Description of Artificial Sequence: Synthetic oligonucleotide
  Antisense strand to SEQ ID NO: 1176910
gcauuucagggaauacugu

SEQ ID NO: 1176912 - RNA, 19 nt, Artificial Sequence
  Description of Artificial Sequence: Synthetic oligonucleotide
  Sense strand starting at position 3216 of SEQ ID NO: 916695
ccauaauacuuacagagga

SEQ ID NO: 1176913 - RNA, 19 nt, Artificial Sequence
  Description of Artificial Sequence: Synthetic oligonucleotide
  Antisense strand to SEQ ID NO: 1176912
uccucuguaaguauuaugg

SEQ ID NO: 1176914 - RNA, 19 nt, Artificial Sequence
  Description of Artificial Sequence: Synthetic oligonucleotide
  Sense strand starting at position 3501 of SEQ ID NO: 916695
ggaguaugagguugcaaug

SEQ ID NO: 1176915 - RNA, 19 nt, Artificial Sequence
  Description of Artificial Sequence: Synthetic oligonucleotide
  Antisense strand to SEQ ID NO: 1176914
cauugcaaccucauacucc

SEQ ID NO: 1176916 - RNA, 19 nt, Artificial Sequence
  Description of Artificial Sequence: Synthetic oligonucleotide
  Sense strand starting at position 3803 of SEQ ID NO: 916695
aagcuauauggauggcgau

SEQ ID NO: 1176917 - RNA, 19 nt, Artificial Sequence
  Description of Artificial Sequence: Synthetic oligonucleotide
  Antisense strand to SEQ ID NO: 1176916
aucgccauccauauagcuu

SEQ ID NO: 1176918 - RNA, 19 nt, Artificial Sequence
  Description of Artificial Sequence: Synthetic oligonucleotide
  Sense strand starting at position 3804 of SEQ ID NO: 916695
agcuauauggauggcgauu

SEQ ID NO: 1176919 - RNA, 19 nt, Artificial Sequence
  Description of Artificial Sequence: Synthetic oligonucleotide
  Antisense strand to SEQ ID NO: 1176918
aaucgccauccauauagcu

SEQ ID NO: 1176920 - RNA, 19 nt, Artificial Sequence
  Description of Artificial Sequence: Synthetic oligonucleotide
  Sense strand starting at position 3846 of SEQ ID NO: 916695
aucauuagguaucaaagaa

SEQ ID NO: 1176921 - RNA, 19 nt, Artificial Sequence
  Description of Artificial Sequence: Synthetic oligonucleotide
  Antisense strand to SEQ ID NO: 1176920
uucuuugauaccuaaugau

SEQ ID NO: 1176922 - RNA, 19 nt, Artificial Sequence
  Description of Artificial Sequence: Synthetic oligonucleotide
  Sense strand starting at position 28 of SEQ ID NO: 916696
ucugaauggcucuguguau

SEQ ID NO: 1176923 - RNA, 19 nt, Artificial Sequence
  Description of Artificial Sequence: Synthetic oligonucleotide
  Antisense strand to SEQ ID NO: 1176922
auacacagagccauucaga

SEQ ID NO: 1176924 - RNA, 19 nt, Artificial Sequence
  Description of Artificial Sequence: Synthetic oligonucleotide
  Sense strand starting at position 29 of SEQ ID NO: 916696
cugaauggcucuguguauu

SEQ ID NO: 1176925 - RNA, 19 nt, Artificial Sequence
  Description of Artificial Sequence: Synthetic oligonucleotide
  Antisense strand to SEQ ID NO: 1176924
aauacacagagccauucag

SEQ ID NO: 1176926 - RNA, 19 nt, Artificial Sequence
  Description of Artificial Sequence: Synthetic oligonucleotide
  Sense strand starting at position 32 of SEQ ID NO: 916696
aauggcucuguguauuagu

SEQ ID NO: 1176927 - RNA, 19 nt, Artificial Sequence
  Description of Artificial Sequence: Synthetic oligonucleotide
  Antisense strand to SEQ ID NO: 1176926
acuaauacacagagccauu

SEQ ID NO: 1176928 - RNA, 19 nt, Artificial Sequence
  Description of Artificial Sequence: Synthetic oligonucleotide
  Sense strand starting at position 66 of SEQ ID NO: 916696
gggaguaaauuauaugugu

SEQ ID NO: 1176929 - RNA, 19 nt, Artificial Sequence
  Description of Artificial Sequence: Synthetic oligonucleotide
  Antisense strand to SEQ ID NO: 1176928
acacauauaauuuacuccc

SEQ ID NO: 1176930 - RNA, 19 nt, Artificial Sequence
  Description of Artificial Sequence: Synthetic oligonucleotide
  Sense strand starting at position 72 of SEQ ID NO: 916696
aaauuauaugugugaacug

SEQ ID NO: 1176931 - RNA, 19 nt, Artificial Sequence
  Description of Artificial Sequence: Synthetic oligonucleotide
  Antisense strand to SEQ ID NO: 1176930
caguucacacauauaauuu

SEQ ID NO: 1176932 - RNA, 19 nt, Artificial Sequence
  Description of Artificial Sequence: Synthetic oligonucleotide
  Sense strand starting at position 73 of SEQ ID NO: 916696
aauuauaugugugaacuga

SEQ ID NO: 1176933 - RNA, 19 nt, Artificial Sequence
  Description of Artificial Sequence: Synthetic oligonucleotide
  Antisense strand to SEQ ID NO: 1176932
ucaguucacacauauaauu

SEQ ID NO: 1176934 - RNA, 19 nt, Artificial Sequence
  Description of Artificial Sequence: Synthetic oligonucleotide
  Sense strand starting at position 275 of SEQ ID NO: 916696
auuuaucaguggcacguua

SEQ ID NO: 1176935 - RNA, 19 nt, Artificial Sequence
  Description of Artificial Sequence: Synthetic oligonucleotide
  Antisense strand to SEQ ID NO: 1176934
uaacgugccacugauaaau

SEQ ID NO: 1176936 - RNA, 19 nt, Artificial Sequence
  Description of Artificial Sequence: Synthetic oligonucleotide
  Sense strand starting at position 277 of SEQ ID NO: 916696
uuaucaguggcacguuauu

SEQ ID NO: 1176937 - RNA, 19 nt, Artificial Sequence
  Description of Artificial Sequence: Synthetic oligonucleotide
  Antisense strand to SEQ ID NO: 1176936
aauaacgugccacugauaa

SEQ ID NO: 1176938 - RNA, 19 nt, Artificial Sequence
  Description of Artificial Sequence: Synthetic oligonucleotide
  Sense strand starting at position 286 of SEQ ID NO: 916696
gcacguuauuucuaccagu

SEQ ID NO: 1176939 - RNA, 19 nt, Artificial Sequence
  Description of Artificial Sequence: Synthetic oligonucleotide
  Antisense strand to SEQ ID NO: 1176938
acugguagaaauaacgugc

SEQ ID NO: 1176940 - RNA, 19 nt, Artificial Sequence
  Description of Artificial Sequence: Synthetic oligonucleotide
  Sense strand starting at position 289 of SEQ ID NO: 916696
cguuauuucuaccagucau

SEQ ID NO: 1176941 - RNA, 19 nt, Artificial Sequence
  Description of Artificial Sequence: Synthetic oligonucleotide
  Antisense strand to SEQ ID NO: 1176940
augacugguagaaauaacg

SEQ ID NO: 1176942 - RNA, 19 nt, Artificial Sequence
  Description of Artificial Sequence: Synthetic oligonucleotide
  Sense strand starting at position 303 of SEQ ID NO: 916696
gucauauaaucaguagacu

SEQ ID NO: 1176943 - RNA, 19 nt, Artificial Sequence
  Description of Artificial Sequence: Synthetic oligonucleotide
  Antisense strand to SEQ ID NO: 1176942
agucuacugauuauaugac

SEQ ID NO: 1176944 - RNA, 19 nt, Artificial Sequence
  Description of Artificial Sequence: Synthetic oligonucleotide
  Sense strand starting at position 349 of SEQ ID NO: 916696
ccguacuugugcucugaau

SEQ ID NO: 1176945 - RNA, 19 nt, Artificial Sequence
  Description of Artificial Sequence: Synthetic oligonucleotide
  Antisense strand to SEQ ID NO: 1176944
auucagagcacaaguacgg

SEQ ID NO: 1176946 - RNA, 19 nt, Artificial Sequence
  Description of Artificial Sequence: Synthetic oligonucleotide
  Sense strand starting at position 351 of SEQ ID NO: 916696
guacuugugcucugaauag

SEQ ID NO: 1176947 - RNA, 19 nt, Artificial Sequence
  Description of Artificial Sequence: Synthetic oligonucleotide
  Antisense strand to SEQ ID NO: 1176946
cuauucagagcacaaguac

SEQ ID NO: 1176948 - RNA, 19 nt, Artificial Sequence
  Description of Artificial Sequence: Synthetic oligonucleotide
  Sense strand starting at position 400 of SEQ ID NO: 916696
gugguaucucaacaaugcu

SEQ ID NO: 1176949 - RNA, 19 nt, Artificial Sequence
  Description of Artificial Sequence: Synthetic oligonucleotide
  Antisense strand to SEQ ID NO: 1176948
agcauuguugagauaccac

SEQ ID NO: 1176950 - RNA, 19 nt, Artificial Sequence
  Description of Artificial Sequence: Synthetic oligonucleotide
  Sense strand starting at position 443 of SEQ ID NO: 916696
aggucaugaucagaaauca

SEQ ID NO: 1176951 - RNA, 19 nt, Artificial Sequence
  Description of Artificial Sequence: Synthetic oligonucleotide
  Antisense strand to SEQ ID NO: 1176950
ugauuucugaucaugaccu

SEQ ID NO: 1176952 - RNA, 19 nt, Artificial Sequence
  Description of Artificial Sequence: Synthetic oligonucleotide
  Sense strand starting at position 575 of SEQ ID NO: 916696
aaaguauuguggcuauuag

SEQ ID NO: 1176953 - RNA, 19 nt, Artificial Sequence
  Description of Artificial Sequence: Synthetic oligonucleotide
  Antisense strand to SEQ ID NO: 1176952
cuaauagccacaauacuuu

SEQ ID NO: 1176954 - RNA, 19 nt, Artificial Sequence
  Description of Artificial Sequence: Synthetic oligonucleotide
  Sense strand starting at position 576 of SEQ ID NO: 916696
aaguauuguggcuauuaga

SEQ ID NO: 1176955 - RNA, 19 nt, Artificial Sequence
  Description of Artificial Sequence: Synthetic oligonucleotide
  Antisense strand to SEQ ID NO: 1176954
ucuaauagccacaauacuu

SEQ ID NO: 1176956 - RNA, 19 nt, Artificial Sequence
  Description of Artificial Sequence: Synthetic oligonucleotide
  Sense strand starting at position 612 of SEQ ID NO: 916696
cucuaaugguauuaagagu

SEQ ID NO: 1176957 - RNA, 19 nt, Artificial Sequence
  Description of Artificial Sequence: Synthetic oligonucleotide
  Antisense strand to SEQ ID NO: 1176956
acucuuaauaccauuagag

SEQ ID NO: 1176958 - RNA, 19 nt, Artificial Sequence
  Description of Artificial Sequence: Synthetic oligonucleotide
  Sense strand starting at position 620 of SEQ ID NO: 916696
guauuaagaguuuggaagu

SEQ ID NO: 1176959 - RNA, 19 nt, Artificial Sequence
  Description of Artificial Sequence: Synthetic oligonucleotide
  Antisense strand to SEQ ID NO: 1176958
acuuccaaacucuuaauac

SEQ ID NO: 1176960 - RNA, 19 nt, Artificial Sequence
  Description of Artificial Sequence: Synthetic oligonucleotide
  Sense strand starting at position 950 of SEQ ID NO: 916696
ggaaguacagaguaguauu

SEQ ID NO: 1176961 - RNA, 19 nt, Artificial Sequence
  Description of Artificial Sequence: Synthetic oligonucleotide
  Antisense strand to SEQ ID NO: 1176960
aauacuacucuguacuucc

SEQ ID NO: 1176962 - RNA, 19 nt, Artificial Sequence
  Description of Artificial Sequence: Synthetic oligonucleotide
  Sense strand starting at position 1014 of SEQ ID NO: 916696
gcagaaauggcugaagcuu

SEQ ID NO: 1176963 - RNA, 19 nt, Artificial Sequence
  Description of Artificial Sequence: Synthetic oligonucleotide
  Antisense strand to SEQ ID NO: 1176962
aagcuucagccauuucugc

SEQ ID NO: 1176964 - RNA, 19 nt, Artificial Sequence
  Description of Artificial Sequence: Synthetic oligonucleotide
  Sense strand starting at position 1057 of SEQ ID NO: 916696
ggguuuacauggcugggaa

SEQ ID NO: 1176965 - RNA, 19 nt, Artificial Sequence
  Description of Artificial Sequence: Synthetic oligonucleotide
  Antisense strand to SEQ ID NO: 1176964
uucccagccauguaaaccc

SEQ ID NO: 1176966 - RNA, 19 nt, Artificial Sequence
  Description of Artificial Sequence: Synthetic oligonucleotide
  Sense strand starting at position 1058 of SEQ ID NO: 916696
gguuuacauggcugggaau

SEQ ID NO: 1176967 - RNA, 19 nt, Artificial Sequence
  Description of Artificial Sequence: Synthetic oligonucleotide
  Antisense strand to SEQ ID NO: 1176966
auucccagccauguaaacc

SEQ ID NO: 1176968 - RNA, 19 nt, Artificial Sequence
  Description of Artificial Sequence: Synthetic oligonucleotide
  Sense strand starting at position 1059 of SEQ ID NO: 916696
guuuacauggcugggaaua

SEQ ID NO: 1176969 - RNA, 19 nt, Artificial Sequence
  Description of Artificial Sequence: Synthetic oligonucleotide
  Antisense strand to SEQ ID NO: 1176968
uauucccagccauguaaac

SEQ ID NO: 1176970 - RNA, 19 nt, Artificial Sequence
  Description of Artificial Sequence: Synthetic oligonucleotide
  Sense strand starting at position 1061 of SEQ ID NO: 916696
uuacauggcugggaauaua

SEQ ID NO: 1176971 - RNA, 19 nt, Artificial Sequence
  Description of Artificial Sequence: Synthetic oligonucleotide
  Antisense strand to SEQ ID NO: 1176970
uauauucccagccauguaa

SEQ ID NO: 1176972 - RNA, 19 nt, Artificial Sequence
  Description of Artificial Sequence: Synthetic oligonucleotide
  Sense strand starting at position 1085 of SEQ ID NO: 916696
guauguauguccuuaugua

SEQ ID NO: 1176973 - RNA, 19 nt, Artificial Sequence
  Description of Artificial Sequence: Synthetic oligonucleotide
  Antisense strand to SEQ ID NO: 1176972
uacauaaggacauacauac

SEQ ID NO: 1176974 - RNA, 19 nt, Artificial Sequence
  Description of Artificial Sequence: Synthetic oligonucleotide
  Sense strand starting at position 1086 of SEQ ID NO: 916696
uauguauguccuuauguau

SEQ ID NO: 1176975 - RNA, 19 nt, Artificial Sequence
  Description of Artificial Sequence: Synthetic oligonucleotide
  Antisense strand to SEQ ID NO: 1176974
auacauaaggacauacaua

SEQ ID NO: 1176976 - RNA, 19 nt, Artificial Sequence
  Description of Artificial Sequence: Synthetic oligonucleotide
  Sense strand starting at position 1089 of SEQ ID NO: 916696
guauguccuuauguauaua

SEQ ID NO: 1176977 - RNA, 19 nt, Artificial Sequence
  Description of Artificial Sequence: Synthetic oligonucleotide
  Antisense strand to SEQ ID NO: 1176976
uauauacauaaggacauac

SEQ ID NO: 1176978 - RNA, 19 nt, Artificial Sequence
  Description of Artificial Sequence: Synthetic oligonucleotide
  Sense strand starting at position 1130 of SEQ ID NO: 916696
uugcuugaauguuuaucau

SEQ ID NO: 1176979 - RNA, 19 nt, Artificial Sequence
  Description of Artificial Sequence: Synthetic oligonucleotide
  Antisense strand to SEQ ID NO: 1176978
augauaaacauucaagcaa

SEQ ID NO: 1176980 - RNA, 19 nt, Artificial Sequence
  Description of Artificial Sequence: Synthetic oligonucleotide
  Sense strand starting at position 1196 of SEQ ID NO: 916696
agacuaagauugugauccu

SEQ ID NO: 1176981 - RNA, 19 nt, Artificial Sequence
  Description of Artificial Sequence: Synthetic oligonucleotide
  Antisense strand to SEQ ID NO: 1176980
aggaucacaaucuuagucu

SEQ ID NO: 1176982 - RNA, 19 nt, Artificial Sequence
  Description of Artificial Sequence: Synthetic oligonucleotide
  Sense strand starting at position 1197 of SEQ ID NO: 916696
gacuaagauugugauccuu

SEQ ID NO: 1176983 - RNA, 19 nt, Artificial Sequence
  Description of Artificial Sequence: Synthetic oligonucleotide
  Antisense strand to SEQ ID NO: 1176982
aaggaucacaaucuuaguc

SEQ ID NO: 1176984 - RNA, 19 nt, Artificial Sequence
  Description of Artificial Sequence: Synthetic oligonucleotide
  Sense strand starting at position 1257 of SEQ ID NO: 916696
uuuauuggcguaggaauca

SEQ ID NO: 1176985 - RNA, 19 nt, Artificial Sequence
  Description of Artificial Sequence: Synthetic oligonucleotide
  Antisense strand to SEQ ID NO: 1176984
ugauuccuacgccaauaaa

SEQ ID NO: 1176986 - RNA, 19 nt, Artificial Sequence
  Description of Artificial Sequence: Synthetic oligonucleotide
  Sense strand starting at position 1269 of SEQ ID NO: 916696
ggaaucaucuugcccuaau

SEQ ID NO: 1176987 - RNA, 19 nt, Artificial Sequence
  Description of Artificial Sequence: Synthetic oligonucleotide
  Antisense strand to SEQ ID NO: 1176986
auuagggcaagaugauucc

SEQ ID NO: 1176988 - RNA, 19 nt, Artificial Sequence
  Description of Artificial Sequence: Synthetic oligonucleotide
  Sense strand starting at position 1308 of SEQ ID NO: 916696
aggguaagauuccuaacau

SEQ ID NO: 1176989 - RNA, 19 nt, Artificial Sequence
  Description of Artificial Sequence: Synthetic oligonucleotide
  Antisense strand to SEQ ID NO: 1176988
auguuaggaaucuuacccu

SEQ ID NO: 1176990 - RNA, 19 nt, Artificial Sequence
  Description of Artificial Sequence: Synthetic oligonucleotide
  Sense strand starting at position 1309 of SEQ ID NO: 916696
ggguaagauuccuaacauc

SEQ ID NO: 1176991 - RNA, 19 nt, Artificial Sequence
  Description of Artificial Sequence: Synthetic oligonucleotide
  Antisense strand to SEQ ID NO: 1176990
gauguuaggaaucuuaccc

SEQ ID NO: 1176992 - RNA, 19 nt, Artificial Sequence
  Description of Artificial Sequence: Synthetic oligonucleotide
  Sense strand starting at position 1364 of SEQ ID NO: 916696
agcuuuggcccuuacaaau

SEQ ID NO: 1176993 - RNA, 19 nt, Artificial Sequence
  Description of Artificial Sequence: Synthetic oligonucleotide
  Antisense strand to SEQ ID NO: 1176992
auuuguaagggccaaagcu

SEQ ID NO: 1176994 - RNA, 19 nt, Artificial Sequence
  Description of Artificial Sequence: Synthetic oligonucleotide
  Sense strand starting at position 1399 of SEQ ID NO: 916696
aguuacaucucgcuuagau

SEQ ID NO: 1176995 - RNA, 19 nt, Artificial Sequence
  Description of Artificial Sequence: Synthetic oligonucleotide
  Antisense strand to SEQ ID NO: 1176994
aucuaagcgagauguaacu

SEQ ID NO: 1176996 - RNA, 19 nt, Artificial Sequence
  Description of Artificial Sequence: Synthetic oligonucleotide
  Sense strand starting at position 1435 of SEQ ID NO: 916696
gaacuaucugcauggaugu

SEQ ID NO: 1176997 - RNA, 19 nt, Artificial Sequence
  Description of Artificial Sequence: Synthetic oligonucleotide
  Antisense strand to SEQ ID NO: 1176996
acauccaugcagauaguuc

SEQ ID NO: 1176998 - RNA, 19 nt, Artificial Sequence
  Description of Artificial Sequence: Synthetic oligonucleotide
  Sense strand starting at position 1454 of SEQ ID NO: 916696
ucguacaugcuauauaaca

SEQ ID NO: 1176999 - RNA, 19 nt, Artificial Sequence
  Description of Artificial Sequence: Synthetic oligonucleotide
  Antisense strand to SEQ ID NO: 1176998
uguuauauagcauguacga

SEQ ID NO: 1177000 - RNA, 19 nt, Artificial Sequence
  Description of Artificial Sequence: Synthetic oligonucleotide
  Sense strand starting at position 1494 of SEQ ID NO: 916696
accaucaguugagcucuaa

SEQ ID NO: 1177001 - RNA, 19 nt, Artificial Sequence
  Description of Artificial Sequence: Synthetic oligonucleotide
  Antisense strand to SEQ ID NO: 1177000
uuagagcucaacugauggu

SEQ ID NO: 1177002 - RNA, 19 nt, Artificial Sequence
  Description of Artificial Sequence: Synthetic oligonucleotide
  Sense strand starting at position 574 of SEQ ID NO: 916697
aucugugugaguugaaaca

SEQ ID NO: 1177003 - RNA, 19 nt, Artificial Sequence
  Description of Artificial Sequence: Synthetic oligonucleotide
  Antisense strand to SEQ ID NO: 1177002
uguuucaacucacacagau

SEQ ID NO: 1177004 - RNA, 19 nt, Artificial Sequence
  Description of Artificial Sequence: Synthetic oligonucleotide
  Sense strand starting at position 737 of SEQ ID NO: 916697
uccacauuaggguggugaa

SEQ ID NO: 1177005 - RNA, 19 nt, Artificial Sequence
  Description of Artificial Sequence: Synthetic oligonucleotide
  Antisense strand to SEQ ID NO: 1177004
uucaccacccuaaugugga

SEQ ID NO: 1177006 - RNA, 19 nt, Artificial Sequence
  Description of Artificial Sequence: Synthetic oligonucleotide
  Sense strand starting at position 738 of SEQ ID NO: 916697
ccacauuaggguggugaaa

SEQ ID NO: 1177007 - RNA, 19 nt, Artificial Sequence
  Description of Artificial Sequence: Synthetic oligonucleotide
  Antisense strand to SEQ ID NO: 1177006
uuucaccacccuaaugugg

SEQ ID NO: 1177008 - RNA, 19 nt, Artificial Sequence
  Description of Artificial Sequence: Synthetic oligonucleotide
  Sense strand starting at position 903 of SEQ ID NO: 916697
agaguuuacugagaauuua

SEQ ID NO: 1177009 - RNA, 19 nt, Artificial Sequence
  Description of Artificial Sequence: Synthetic oligonucleotide
  Antisense strand to SEQ ID NO: 1177008
uaaauucucaguaaacucu

SEQ ID NO: 1177010 - RNA, 19 nt, Artificial Sequence
  Description of Artificial Sequence: Synthetic oligonucleotide
  Sense strand starting at position 911 of SEQ ID NO: 916697
cugagaauuuauugggauu

SEQ ID NO: 1177011 - RNA, 19 nt, Artificial Sequence
  Description of Artificial Sequence: Synthetic oligonucleotide
  Antisense strand to SEQ ID NO: 1177010
aaucccaauaaauucucag

SEQ ID NO: 1177012 - RNA, 19 nt, Artificial Sequence
  Description of Artificial Sequence: Synthetic oligonucleotide
  Sense strand starting at position 925 of SEQ ID NO: 916697
ggauuuaccugauauuacc

SEQ ID NO: 1177013 - RNA, 19 nt, Artificial Sequence
  Description of Artificial Sequence: Synthetic oligonucleotide
  Antisense strand to SEQ ID NO: 1177012
gguaauaucagguaaaucc

SEQ ID NO: 1177014 - RNA, 19 nt, Artificial Sequence
  Description of Artificial Sequence: Synthetic oligonucleotide
  Sense strand starting at position 1027 of SEQ ID NO: 916697
aguguucuacgaggauaaa

SEQ ID NO: 1177015 - RNA, 19 nt, Artificial Sequence
  Description of Artificial Sequence: Synthetic oligonucleotide
  Antisense strand to SEQ ID NO: 1177014
uuuauccucguagaacacu

SEQ ID NO: 1177016 - RNA, 19 nt, Artificial Sequence
  Description of Artificial Sequence: Synthetic oligonucleotide
  Sense strand starting at position 1028 of SEQ ID NO: 916697
guguucuacgaggauaaag

SEQ ID NO: 1177017 - RNA, 19 nt, Artificial Sequence
  Description of Artificial Sequence: Synthetic oligonucleotide
  Antisense strand to SEQ ID NO: 1177016
cuuuauccucguagaacac

SEQ ID NO: 1177018 - RNA, 19 nt, Artificial Sequence
  Description of Artificial Sequence: Synthetic oligonucleotide
  Sense strand starting at position 1135 of SEQ ID NO: 916697
gcaggauuguuacuacacu

SEQ ID NO: 1177019 - RNA, 19 nt, Artificial Sequence
  Description of Artificial Sequence: Synthetic oligonucleotide
  Antisense strand to SEQ ID NO: 1177018
aguguaguaacaauccugc

SEQ ID NO: 1177020 - RNA, 19 nt, Artificial Sequence
  Description of Artificial Sequence: Synthetic oligonucleotide
  Sense strand starting at position 1216 of SEQ ID NO: 916697
cuuagugcuuauuuaguua

SEQ ID NO: 1177021 - RNA, 19 nt, Artificial Sequence
  Description of Artificial Sequence: Synthetic oligonucleotide
  Antisense strand to SEQ ID NO: 1177020
uaacuaaauaagcacuaag

SEQ ID NO: 1177022 - RNA, 19 nt, Artificial Sequence
  Description of Artificial Sequence: Synthetic oligonucleotide
  Sense strand starting at position 1433 of SEQ ID NO: 916697
gugauucucuaacucuaug

SEQ ID NO: 1177023 - RNA, 19 nt, Artificial Sequence
  Description of Artificial Sequence: Synthetic oligonucleotide
  Antisense strand to SEQ ID NO: 1177022
cauagaguuagagaaucac

SEQ ID NO: 1177024 - RNA, 19 nt, Artificial Sequence
  Description of Artificial Sequence: Synthetic oligonucleotide
  Sense strand starting at position 1458 of SEQ ID NO: 916697
gaggcaaguguuuacccaa

SEQ ID NO: 1177025 - RNA, 19 nt, Artificial Sequence
  Description of Artificial Sequence: Synthetic oligonucleotide
  Antisense strand to SEQ ID NO: 1177024
uuggguaaacacuugccuc

SEQ ID NO: 1177026 - RNA, 19 nt, Artificial Sequence
  Description of Artificial Sequence: Synthetic oligonucleotide
  Sense strand starting at position 1562 of SEQ ID NO: 916697
gucuacugggaucaguaua

SEQ ID NO: 1177027 - RNA, 19 nt, Artificial Sequence
  Description of Artificial Sequence: Synthetic oligonucleotide
  Antisense strand to SEQ ID NO: 1177026
uauacugaucccaguagac

SEQ ID NO: 1177028 - RNA, 19 nt, Artificial Sequence
  Description of Artificial Sequence: Synthetic oligonucleotide
  Sense strand starting at position 1569 of SEQ ID NO: 916697
gggaucaguauaggaucuu

SEQ ID NO: 1177029 - RNA, 19 nt, Artificial Sequence
  Description of Artificial Sequence: Synthetic oligonucleotide
  Antisense strand to SEQ ID NO: 1177028
aagauccuauacugauccc

SEQ ID NO: 1177030 - RNA, 19 nt, Artificial Sequence
  Description of Artificial Sequence: Synthetic oligonucleotide
  Sense strand starting at position 1639 of SEQ ID NO: 916697
agucccaugucucuauaaa

SEQ ID NO: 1177031 - RNA, 19 nt, Artificial Sequence
  Description of Artificial Sequence: Synthetic oligonucleotide
  Antisense strand to SEQ ID NO: 1177030
uuuauagagacaugggacu

SEQ ID NO: 1177032 - RNA, 19 nt, Artificial Sequence
  Description of Artificial Sequence: Synthetic oligonucleotide
  Sense strand starting at position 1640 of SEQ ID NO: 916697
gucccaugucucuauaaau

SEQ ID NO: 1177033 - RNA, 19 nt, Artificial Sequence
  Description of Artificial Sequence: Synthetic oligonucleotide
  Antisense strand to SEQ ID NO: 1177032
auuuauagagacaugggac

SEQ ID NO: 1177034 - RNA, 19 nt, Artificial Sequence
  Description of Artificial Sequence: Synthetic oligonucleotide
  Sense strand starting at position 1691 of SEQ ID NO: 916697
auucuuuauuggguucuau

SEQ ID NO: 1177035 - RNA, 19 nt, Artificial Sequence
  Description of Artificial Sequence: Synthetic oligonucleotide
  Antisense strand to SEQ ID NO: 1177034
auagaacccaauaaagaau

SEQ ID NO: 1177036 - RNA, 19 nt, Artificial Sequence
  Description of Artificial Sequence: Synthetic oligonucleotide
  Sense strand starting at position 1699 of SEQ ID NO: 916697
uuggguucuauuugugcaa

SEQ ID NO: 1177037 - RNA, 19 nt, Artificial Sequence
  Description of Artificial Sequence: Synthetic oligonucleotide
  Antisense strand to SEQ ID NO: 1177036
uugcacaaauagaacccaa

SEQ ID NO: 1177038 - RNA, 19 nt, Artificial Sequence
  Description of Artificial Sequence: Synthetic oligonucleotide
  Sense strand starting at position 1700 of SEQ ID NO: 916697
uggguucuauuugugcaau

SEQ ID NO: 1177039 - RNA, 19 nt, Artificial Sequence
  Description of Artificial Sequence: Synthetic oligonucleotide
  Antisense strand to SEQ ID NO: 1177038
auugcacaaauagaaccca

SEQ ID NO: 1177040 - RNA, 19 nt, Artificial Sequence
  Description of Artificial Sequence: Synthetic oligonucleotide
  Sense strand starting at position 1702 of SEQ ID NO: 916697
gguucuauuugugcaauca

SEQ ID NO: 1177041 - RNA, 19 nt, Artificial Sequence
  Description of Artificial Sequence: Synthetic oligonucleotide
  Antisense strand to SEQ ID NO: 1177040
ugauugcacaaauagaacc

SEQ ID NO: 1177042 - RNA, 19 nt, Artificial Sequence
  Description of Artificial Sequence: Synthetic oligonucleotide
  Sense strand starting at position 1767 of SEQ ID NO: 916697
ugauccuuggcaugagaac

SEQ ID NO: 1177043 - RNA, 19 nt, Artificial Sequence
  Description of Artificial Sequence: Synthetic oligonucleotide
  Antisense strand to SEQ ID NO: 1177042
guucucaugccaaggauca

SEQ ID NO: 1177044 - RNA, 19 nt, Artificial Sequence
  Description of Artificial Sequence: Synthetic oligonucleotide
  Sense strand starting at position 2013 of SEQ ID NO: 916697
gucagcucccuuuauaaag

SEQ ID NO: 1177045 - RNA, 19 nt, Artificial Sequence
  Description of Artificial Sequence: Synthetic oligonucleotide
  Antisense strand to SEQ ID NO: 1177044
cuuuauaaagggagcugac

SEQ ID NO: 1177046 - RNA, 19 nt, Artificial Sequence
  Description of Artificial Sequence: Synthetic oligonucleotide
  Sense strand starting at position 2175 of SEQ ID NO: 916697
uguuguuuguggcuaauuu

SEQ ID NO: 1177047 - RNA, 19 nt, Artificial Sequence
  Description of Artificial Sequence: Synthetic oligonucleotide
  Antisense strand to SEQ ID NO: 1177046
aaauuagccacaaacaaca

SEQ ID NO: 1177048 - RNA, 19 nt, Artificial Sequence
  Description of Artificial Sequence: Synthetic oligonucleotide
  Sense strand starting at position 2179 of SEQ ID NO: 916697
guuuguggcuaauuucuaa

SEQ ID NO: 1177049 - RNA, 19 nt, Artificial Sequence
  Description of Artificial Sequence: Synthetic oligonucleotide
  Antisense strand to SEQ ID NO: 1177048
uuagaaauuagccacaaac

SEQ ID NO: 1177050 - RNA, 19 nt, Artificial Sequence
  Description of Artificial Sequence: Synthetic oligonucleotide
  Sense strand starting at position 2231 of SEQ ID NO: 916697
cggaacuguguccaagcaa

SEQ ID NO: 1177051 - RNA, 19 nt, Artificial Sequence
  Description of Artificial Sequence: Synthetic oligonucleotide
  Antisense strand to SEQ ID NO: 1177050
uugcuuggacacaguuccg

SEQ ID NO: 1177052 - RNA, 19 nt, Artificial Sequence
  Description of Artificial Sequence: Synthetic oligonucleotide
  Sense strand starting at position 2256 of SEQ ID NO: 916697
cagugucaggauugaacuu

SEQ ID NO: 1177053 - RNA, 19 nt, Artificial Sequence
  Description of Artificial Sequence: Synthetic oligonucleotide
  Antisense strand to SEQ ID NO: 1177052
aaguucaauccugacacug

SEQ ID NO: 1177054 - RNA, 19 nt, Artificial Sequence
  Description of Artificial Sequence: Synthetic oligonucleotide
  Sense strand starting at position 2336 of SEQ ID NO: 916697
uucauuuguguguauguga

SEQ ID NO: 1177055 - RNA, 19 nt, Artificial Sequence
  Description of Artificial Sequence: Synthetic oligonucleotide
  Antisense strand to SEQ ID NO: 1177054
ucacauacacacaaaugaa

SEQ ID NO: 1177056 - RNA, 19 nt, Artificial Sequence
  Description of Artificial Sequence: Synthetic oligonucleotide
  Sense strand starting at position 2382 of SEQ ID NO: 916697
gcagcaauccuacagcuaa

SEQ ID NO: 1177057 - RNA, 19 nt, Artificial Sequence
  Description of Artificial Sequence: Synthetic oligonucleotide
  Antisense strand to SEQ ID NO: 1177056
uuagcuguaggauugcugc

SEQ ID NO: 1177058 - RNA, 19 nt, Artificial Sequence
  Description of Artificial Sequence: Synthetic oligonucleotide
  Sense strand starting at position 2402 of SEQ ID NO: 916697
agugaagacggucaauaug

SEQ ID NO: 1177059 - RNA, 19 nt, Artificial Sequence
  Description of Artificial Sequence: Synthetic oligonucleotide
  Antisense strand to SEQ ID NO: 1177058
cauauugaccgucuucacu

SEQ ID NO: 1177060 - RNA, 19 nt, Artificial Sequence
  Description of Artificial Sequence: Synthetic oligonucleotide
  Sense strand starting at position 2643 of SEQ ID NO: 916697
agcguuggugcuguacaau

SEQ ID NO: 1177061 - RNA, 19 nt, Artificial Sequence
  Description of Artificial Sequence: Synthetic oligonucleotide
  Antisense strand to SEQ ID NO: 1177060
auuguacagcaccaacgcu

SEQ ID NO: 1177062 - RNA, 19 nt, Artificial Sequence
  Description of Artificial Sequence: Synthetic oligonucleotide
  Sense strand starting at position 2762 of SEQ ID NO: 916697
acugaaacaugguucccaa

SEQ ID NO: 1177063 - RNA, 19 nt, Artificial Sequence
  Description of Artificial Sequence: Synthetic oligonucleotide
  Antisense strand to SEQ ID NO: 1177062
uugggaaccauguuucagu

SEQ ID NO: 1177064 - RNA, 19 nt, Artificial Sequence
  Description of Artificial Sequence: Synthetic oligonucleotide
  Sense strand starting at position 2765 of SEQ ID NO: 916697
gaaacaugguucccaaagu

SEQ ID NO: 1177065 - RNA, 19 nt, Artificial Sequence
  Description of Artificial Sequence: Synthetic oligonucleotide
  Antisense strand to SEQ ID NO: 1177064
acuuugggaaccauguuuc

SEQ ID NO: 1177066 - RNA, 19 nt, Artificial Sequence
  Description of Artificial Sequence: Synthetic oligonucleotide
  Sense strand starting at position 2985 of SEQ ID NO: 916697
guauuuaugucaccaguuu

SEQ ID NO: 1177067 - RNA, 19 nt, Artificial Sequence
  Description of Artificial Sequence: Synthetic oligonucleotide
  Antisense strand to SEQ ID NO: 1177066
aaacuggugacauaaauac

SEQ ID NO: 1177068 - RNA, 19 nt, Artificial Sequence
  Description of Artificial Sequence: Synthetic oligonucleotide
  Sense strand starting at position 3157 of SEQ ID NO: 916697
acaugacuugugggagaug

SEQ ID NO: 1177069 - RNA, 19 nt, Artificial Sequence
  Description of Artificial Sequence: Synthetic oligonucleotide
  Antisense strand to SEQ ID NO: 1177068
caucucccacaagucaugu

SEQ ID NO: 1177070 - RNA, 19 nt, Artificial Sequence
  Description of Artificial Sequence: Synthetic oligonucleotide
  Sense strand starting at position 3162 of SEQ ID NO: 916697
acuugugggagaugacauu

SEQ ID NO: 1177071 - RNA, 19 nt, Artificial Sequence
  Description of Artificial Sequence: Synthetic oligonucleotide
  Antisense strand to SEQ ID NO: 1177070
aaugucaucucccacaagu

SEQ ID NO: 1177072 - RNA, 19 nt, Artificial Sequence
  Description of Artificial Sequence: Synthetic oligonucleotide
  Sense strand starting at position 3193 of SEQ ID NO: 916697
uaagcaaugguguauggua

SEQ ID NO: 1177073 - RNA, 19 nt, Artificial Sequence
  Description of Artificial Sequence: Synthetic oligonucleotide
  Antisense strand to SEQ ID NO: 1177072
uaccauacaccauugcuua

SEQ ID NO: 1177074 - RNA, 19 nt, Artificial Sequence
  Description of Artificial Sequence: Synthetic oligonucleotide
  Sense strand starting at position 3447 of SEQ ID NO: 916697
acggcuaguguuuauuuga

SEQ ID NO: 1177075 - RNA, 19 nt, Artificial Sequence
  Description of Artificial Sequence: Synthetic oligonucleotide
  Antisense strand to SEQ ID NO: 1177074
ucaaauaaacacuagccgu

SEQ ID NO: 1177076 - RNA, 19 nt, Artificial Sequence
  Description of Artificial Sequence: Synthetic oligonucleotide
  Sense strand starting at position 3463 of SEQ ID NO: 916697
ugaggauagcuugguugga

SEQ ID NO: 1177077 - RNA, 19 nt, Artificial Sequence
  Description of Artificial Sequence: Synthetic oligonucleotide
  Antisense strand to SEQ ID NO: 1177076
uccaaccaagcuauccuca

SEQ ID NO: 1177078 - RNA, 19 nt, Artificial Sequence
  Description of Artificial Sequence: Synthetic oligonucleotide
  Sense strand starting at position 3719 of SEQ ID NO: 916697
gggaaugcauucuuaauug

SEQ ID NO: 1177079 - RNA, 19 nt, Artificial Sequence
  Description of Artificial Sequence: Synthetic oligonucleotide
  Antisense strand to SEQ ID NO: 1177078
caauuaagaaugcauuccc

SEQ ID NO: 1177080 - RNA, 19 nt, Artificial Sequence
  Description of Artificial Sequence: Synthetic oligonucleotide
  Sense strand starting at position 3982 of SEQ ID NO: 916697
gacagauauugccugauga

SEQ ID NO: 1177081 - RNA, 19 nt, Artificial Sequence
  Description of Artificial Sequence: Synthetic oligonucleotide
  Antisense strand to SEQ ID NO: 1177080
ucaucaggcaauaucuguc

SEQ ID NO: 1177082 - RNA, 19 nt, Artificial Sequence
  Description of Artificial Sequence: Synthetic oligonucleotide
  Sense strand starting at position 573 of SEQ ID NO: 916698
aucugugugaguugaaaca

SEQ ID NO: 1177083 - RNA, 19 nt, Artificial Sequence
  Description of Artificial Sequence: Synthetic oligonucleotide
  Antisense strand to SEQ ID NO: 1177082
uguuucaacucacacagau

SEQ ID NO: 1177084 - RNA, 19 nt, Artificial Sequence
  Description of Artificial Sequence: Synthetic oligonucleotide
  Sense strand starting at position 736 of SEQ ID NO: 916698
uccacauuaggguggugaa

SEQ ID NO: 1177085 - RNA, 19 nt, Artificial Sequence
  Description of Artificial Sequence: Synthetic oligonucleotide
  Antisense strand to SEQ ID NO: 1177084
uucaccacccuaaugugga

SEQ ID NO: 1177086 - RNA, 19 nt, Artificial Sequence
  Description of Artificial Sequence: Synthetic oligonucleotide
  Sense strand starting at position 737 of SEQ ID NO: 916698
ccacauuaggguggugaaa

SEQ ID NO: 1177087 - RNA, 19 nt, Artificial Sequence
  Description of Artificial Sequence: Synthetic oligonucleotide
  Antisense strand to SEQ ID NO: 1177086
uuucaccacccuaaugugg

SEQ ID NO: 1177088 - RNA, 19 nt, Artificial Sequence
  Description of Artificial Sequence: Synthetic oligonucleotide
  Sense strand starting at position 902 of SEQ ID NO: 916698
agaguuuacugagaauuua

SEQ ID NO: 1177089 - RNA, 19 nt, Artificial Sequence
  Description of Artificial Sequence: Synthetic oligonucleotide
  Antisense strand to SEQ ID NO: 1177088
uaaauucucaguaaacucu

SEQ ID NO: 1177090 - RNA, 19 nt, Artificial Sequence
  Description of Artificial Sequence: Synthetic oligonucleotide
  Sense strand starting at position 910 of SEQ ID NO: 916698
cugagaauuuauugggauu

SEQ ID NO: 1177091 - RNA, 19 nt, Artificial Sequence
  Description of Artificial Sequence: Synthetic oligonucleotide
  Antisense strand to SEQ ID NO: 1177090
aaucccaauaaauucucag

SEQ ID NO: 1177092 - RNA, 19 nt, Artificial Sequence
  Description of Artificial Sequence: Synthetic oligonucleotide
  Sense strand starting at position 924 of SEQ ID NO: 916698
ggauuuaccugauauuacc

SEQ ID NO: 1177093 - RNA, 19 nt, Artificial Sequence
  Description of Artificial Sequence: Synthetic oligonucleotide
  Antisense strand to SEQ ID NO: 1177092
gguaauaucagguaaaucc

SEQ ID NO: 1177094 - RNA, 19 nt, Artificial Sequence
  Description of Artificial Sequence: Synthetic oligonucleotide
  Sense strand starting at position 1026 of SEQ ID NO: 916698
aguguucuacgaggauaaa

SEQ ID NO: 1177095 - RNA, 19 nt, Artificial Sequence
  Description of Artificial Sequence: Synthetic oligonucleotide
  Antisense strand to SEQ ID NO: 1177094
uuuauccucguagaacacu

SEQ ID NO: 1177096 - RNA, 19 nt, Artificial Sequence
  Description of Artificial Sequence: Synthetic oligonucleotide
  Sense strand starting at position 1027 of SEQ ID NO: 916698
guguucuacgaggauaaag

SEQ ID NO: 1177097 - RNA, 19 nt, Artificial Sequence
  Description of Artificial Sequence: Synthetic oligonucleotide
  Antisense strand to SEQ ID NO: 1177096
cuuuauccucguagaacac

SEQ ID NO: 1177098 - RNA, 19 nt, Artificial Sequence
  Description of Artificial Sequence: Synthetic oligonucleotide
  Sense strand starting at position 1134 of SEQ ID NO: 916698
gcaggauuguuacuacacu

SEQ ID NO: 1177099 - RNA, 19 nt, Artificial Sequence
  Description of Artificial Sequence: Synthetic oligonucleotide
  Antisense strand to SEQ ID NO: 1177098
aguguaguaacaauccugc

SEQ ID NO: 1177100 - RNA, 19 nt, Artificial Sequence
  Description of Artificial Sequence: Synthetic oligonucleotide
  Sense strand starting at position 1215 of SEQ ID NO: 916698
cuuagugcuuauuuaguua

SEQ ID NO: 1177101 - RNA, 19 nt, Artificial Sequence
  Description of Artificial Sequence: Synthetic oligonucleotide
  Antisense strand to SEQ ID NO: 1177100
uaacuaaauaagcacuaag

SEQ ID NO: 1177102 - RNA, 19 nt, Artificial Sequence
  Description of Artificial Sequence: Synthetic oligonucleotide
  Sense strand starting at position 1432 of SEQ ID NO: 916698
gugauucucuaacucuaug

SEQ ID NO: 1177103 - RNA, 19 nt, Artificial Sequence
  Description of Artificial Sequence: Synthetic oligonucleotide
  Antisense strand to SEQ ID NO: 1177102
cauagaguuagagaaucac

SEQ ID NO: 1177104 - RNA, 19 nt, Artificial Sequence
  Description of Artificial Sequence: Synthetic oligonucleotide
  Sense strand starting at position 1457 of SEQ ID NO: 916698
gaggcaaguguuuacccaa

SEQ ID NO: 1177105 - RNA, 19 nt, Artificial Sequence
  Description of Artificial Sequence: Synthetic oligonucleotide
  Antisense strand to SEQ ID NO: 1177104
uuggguaaacacuugccuc

SEQ ID NO: 1177106 - RNA, 19 nt, Artificial Sequence
  Description of Artificial Sequence: Synthetic oligonucleotide
  Sense strand starting at position 1561 of SEQ ID NO: 916698
gucuacugggaucaguaua

SEQ ID NO: 1177107 - RNA, 19 nt, Artificial Sequence
  Description of Artificial Sequence: Synthetic oligonucleotide
  Antisense strand to SEQ ID NO: 1177106
uauacugaucccaguagac

SEQ ID NO: 1177108 - RNA, 19 nt, Artificial Sequence
  Description of Artificial Sequence: Synthetic oligonucleotide
  Sense strand starting at position 1568 of SEQ ID NO: 916698
gggaucaguauaggaucuu

SEQ ID NO: 1177109 - RNA, 19 nt, Artificial Sequence
  Description of Artificial Sequence: Synthetic oligonucleotide
  Antisense strand to SEQ ID NO: 1177108
aagauccuauacugauccc

SEQ ID NO: 1177110 - RNA, 19 nt, Artificial Sequence
  Description of Artificial Sequence: Synthetic oligonucleotide
  Sense strand starting at position 1638 of SEQ ID NO: 916698
agucccaugucucuauaaa

SEQ ID NO: 1177111 - RNA, 19 nt, Artificial Sequence
  Description of Artificial Sequence: Synthetic oligonucleotide
  Antisense strand to SEQ ID NO: 1177110
uuuauagagacaugggacu

SEQ ID NO: 1177112 - RNA, 19 nt, Artificial Sequence
  Description of Artificial Sequence: Synthetic oligonucleotide
  Sense strand starting at position 1639 of SEQ ID NO: 916698
gucccaugucucuauaaau

SEQ ID NO: 1177113 - RNA, 19 nt, Artificial Sequence
  Description of Artificial Sequence: Synthetic oligonucleotide
  Antisense strand to SEQ ID NO: 1177112
auuuauagagacaugggac

SEQ ID NO: 1177114 - RNA, 19 nt, Artificial Sequence
  Description of Artificial Sequence: Synthetic oligonucleotide
  Sense strand starting at position 1690 of SEQ ID NO: 916698
auucuuuauuggguucuau

SEQ ID NO: 1177115 - RNA, 19 nt, Artificial Sequence
  Description of Artificial Sequence: Synthetic oligonucleotide
  Antisense strand to SEQ ID NO: 1177114
auagaacccaauaaagaau

SEQ ID NO: 1177116 - RNA, 19 nt, Artificial Sequence
  Description of Artificial Sequence: Synthetic oligonucleotide
  Sense strand starting at position 1698 of SEQ ID NO: 916698
uuggguucuauuugugcaa

SEQ ID NO: 1177117 - RNA, 19 nt, Artificial Sequence
  Description of Artificial Sequence: Synthetic oligonucleotide
  Antisense strand to SEQ ID NO: 1177116
uugcacaaauagaacccaa

SEQ ID NO: 1177118 - RNA, 19 nt, Artificial Sequence
  Description of Artificial Sequence: Synthetic oligonucleotide
  Sense strand starting at position 1699 of SEQ ID NO: 916698
uggguucuauuugugcaau

SEQ ID NO: 1177119 - RNA, 19 nt, Artificial Sequence
  Description of Artificial Sequence: Synthetic oligonucleotide
  Antisense strand to SEQ ID NO: 1177118
auugcacaaauagaaccca

SEQ ID NO: 1177120 - RNA, 19 nt, Artificial Sequence
  Description of Artificial Sequence: Synthetic oligonucleotide
  Sense strand starting at position 1701 of SEQ ID NO: 916698
gguucuauuugugcaauca

SEQ ID NO: 1177121 - RNA, 19 nt, Artificial Sequence
  Description of Artificial Sequence: Synthetic oligonucleotide
  Antisense strand to SEQ ID NO: 1177120
ugauugcacaaauagaacc

SEQ ID NO: 1177122 - RNA, 19 nt, Artificial Sequence
  Description of Artificial Sequence: Synthetic oligonucleotide
  Sense strand starting at position 1766 of SEQ ID NO: 916698
ugauccuuggcaugagaac

SEQ ID NO: 1177123 - RNA, 19 nt, Artificial Sequence
  Description of Artificial Sequence: Synthetic oligonucleotide
  Antisense strand to SEQ ID NO: 1177122
guucucaugccaaggauca

SEQ ID NO: 1177124 - RNA, 19 nt, Artificial Sequence
  Description of Artificial Sequence: Synthetic oligonucleotide
  Sense strand starting at position 2012 of SEQ ID NO: 916698
gucagcucccuuuauaaag

SEQ ID NO: 1177125 - RNA, 19 nt, Artificial Sequence
  Description of Artificial Sequence: Synthetic oligonucleotide
  Antisense strand to SEQ ID NO: 1177124
cuuuauaaagggagcugac

SEQ ID NO: 1177126 - RNA, 19 nt, Artificial Sequence
  Description of Artificial Sequence: Synthetic oligonucleotide
  Sense strand starting at position 2174 of SEQ ID NO: 916698
uguuguuuguggcuaauuu

SEQ ID NO: 1177127 - RNA, 19 nt, Artificial Sequence
  Description of Artificial Sequence: Synthetic oligonucleotide
  Antisense strand to SEQ ID NO: 1177126
aaauuagccacaaacaaca

SEQ ID NO: 1177128 - RNA, 19 nt, Artificial Sequence
  Description of Artificial Sequence: Synthetic oligonucleotide
  Sense strand starting at position 2178 of SEQ ID NO: 916698
guuuguggcuaauuucuaa

SEQ ID NO: 1177129 - RNA, 19 nt, Artificial Sequence
  Description of Artificial Sequence: Synthetic oligonucleotide
  Antisense strand to SEQ ID NO: 1177128
uuagaaauuagccacaaac

SEQ ID NO: 1177130 - RNA, 19 nt, Artificial Sequence
  Description of Artificial Sequence: Synthetic oligonucleotide
  Sense strand starting at position 2230 of SEQ ID NO: 916698
cggaacuguguccaagcaa

SEQ ID NO: 1177131 - RNA, 19 nt, Artificial Sequence
  Description of Artificial Sequence: Synthetic oligonucleotide
  Antisense strand to SEQ ID NO: 1177130
uugcuuggacacaguuccg

SEQ ID NO: 1177132 - RNA, 19 nt, Artificial Sequence
  Description of Artificial Sequence: Synthetic oligonucleotide
  Sense strand starting at position 2255 of SEQ ID NO: 916698
cagugucaggauugaacuu

SEQ ID NO: 1177133 - RNA, 19 nt, Artificial Sequence
  Description of Artificial Sequence: Synthetic oligonucleotide
  Antisense strand to SEQ ID NO: 1177132
aaguucaauccugacacug

SEQ ID NO: 1177134 - RNA, 19 nt, Artificial Sequence
  Description of Artificial Sequence: Synthetic oligonucleotide
  Sense strand starting at position 2335 of SEQ ID NO: 916698
uucauuuguguguauguga

SEQ ID NO: 1177135 - RNA, 19 nt, Artificial Sequence
  Description of Artificial Sequence: Synthetic oligonucleotide
  Antisense strand to SEQ ID NO: 1177134
ucacauacacacaaaugaa

SEQ ID NO: 1177136 - RNA, 19 nt, Artificial Sequence
  Description of Artificial Sequence: Synthetic oligonucleotide
  Sense strand starting at position 2381 of SEQ ID NO: 916698
gcagcaauccuacagcuaa

SEQ ID NO: 1177137 - RNA, 19 nt, Artificial Sequence
  Description of Artificial Sequence: Synthetic oligonucleotide
  Antisense strand to SEQ ID NO: 1177136
uuagcuguaggauugcugc

SEQ ID NO: 1177138 - RNA, 19 nt, Artificial Sequence
  Description of Artificial Sequence: Synthetic oligonucleotide
  Sense strand starting at position 2401 of SEQ ID NO: 916698
agugaagacggucaauaug

SEQ ID NO: 1177139 - RNA, 19 nt, Artificial Sequence
  Description of Artificial Sequence: Synthetic oligonucleotide
  Antisense strand to SEQ ID NO: 1177138
cauauugaccgucuucacu

SEQ ID NO: 1177140 - RNA, 19 nt, Artificial Sequence
  Description of Artificial Sequence: Synthetic oligonucleotide
  Sense strand starting at position 2642 of SEQ ID NO: 916698
agcguuggugcuguacaau

SEQ ID NO: 1177141 - RNA, 19 nt, Artificial Sequence
  Description of Artificial Sequence: Synthetic oligonucleotide
  Antisense strand to SEQ ID NO: 1177140
auuguacagcaccaacgcu

SEQ ID NO: 1177142 - RNA, 19 nt, Artificial Sequence
  Description of Artificial Sequence: Synthetic oligonucleotide
  Sense strand starting at position 2761 of SEQ ID NO: 916698
acugaaacaugguucccaa

SEQ ID NO: 1177143 - RNA, 19 nt, Artificial Sequence
  Description of Artificial Sequence: Synthetic oligonucleotide
  Antisense strand to SEQ ID NO: 1177142
uugggaaccauguuucagu

SEQ ID NO: 1177144 - RNA, 19 nt, Artificial Sequence
  Description of Artificial Sequence: Synthetic oligonucleotide
  Sense strand starting at position 2764 of SEQ ID NO: 916698
gaaacaugguucccaaagu

SEQ ID NO: 1177145 - RNA, 19 nt, Artificial Sequence
  Description of Artificial Sequence: Synthetic oligonucleotide
  Antisense strand to SEQ ID NO: 1177144
acuuugggaaccauguuuc

SEQ ID NO: 1177146 - RNA, 19 nt, Artificial Sequence
  Description of Artificial Sequence: Synthetic oligonucleotide
  Sense strand starting at position 2984 of SEQ ID NO: 916698
guauuuaugucaccaguuu

SEQ ID NO: 1177147 - RNA, 19 nt, Artificial Sequence
  Description of Artificial Sequence: Synthetic oligonucleotide
  Antisense strand to SEQ ID NO: 1177146
aaacuggugacauaaauac

SEQ ID NO: 1177148 - RNA, 19 nt, Artificial Sequence
  Description of Artificial Sequence: Synthetic oligonucleotide
  Sense strand starting at position 3156 of SEQ ID NO: 916698
acaugacuugugggagaug

SEQ ID NO: 1177149 - RNA, 19 nt, Artificial Sequence
  Description of Artificial Sequence: Synthetic oligonucleotide
  Antisense strand to SEQ ID NO: 1177148
caucucccacaagucaugu

SEQ ID NO: 1177150 - RNA, 19 nt, Artificial Sequence
  Description of Artificial Sequence: Synthetic oligonucleotide
  Sense strand starting at position 3161 of SEQ ID NO: 916698
acuugugggagaugacauu

SEQ ID NO: 1177151 - RNA, 19 nt, Artificial Sequence
  Description of Artificial Sequence: Synthetic oligonucleotide
  Antisense strand to SEQ ID NO: 1177150
aaugucaucucccacaagu

SEQ ID NO: 1177152 - RNA, 19 nt, Artificial Sequence
  Description of Artificial Sequence: Synthetic oligonucleotide
  Sense strand starting at position 3192 of SEQ ID NO: 916698
uaagcaaugguguauggua

SEQ ID NO: 1177153 - RNA, 19 nt, Artificial Sequence
  Description of Artificial Sequence: Synthetic oligonucleotide
  Antisense strand to SEQ ID NO: 1177152
uaccauacaccauugcuua

SEQ ID NO: 1177154 - RNA, 19 nt, Artificial Sequence
  Description of Artificial Sequence: Synthetic oligonucleotide
  Sense strand starting at position 3446 of SEQ ID NO: 916698
acggcuaguguuuauuuga

SEQ ID NO: 1177155 - RNA, 19 nt, Artificial Sequence
  Description of Artificial Sequence: Synthetic oligonucleotide
  Antisense strand to SEQ ID NO: 1177154
ucaaauaaacacuagccgu

SEQ ID NO: 1177156 - RNA, 19 nt, Artificial Sequence
  Description of Artificial Sequence: Synthetic oligonucleotide
  Sense strand starting at position 3462 of SEQ ID NO: 916698
ugaggauagcuugguugga

SEQ ID NO: 1177157 - RNA, 19 nt, Artificial Sequence
  Description of Artificial Sequence: Synthetic oligonucleotide
  Antisense strand to SEQ ID NO: 1177156
uccaaccaagcuauccuca

SEQ ID NO: 1177158 - RNA, 19 nt, Artificial Sequence
  Description of Artificial Sequence: Synthetic oligonucleotide
  Sense strand starting at position 3718 of SEQ ID NO: 916698
gggaaugcauucuuaauug

SEQ ID NO: 1177159 - RNA, 19 nt, Artificial Sequence
  Description of Artificial Sequence: Synthetic oligonucleotide
  Antisense strand to SEQ ID NO: 1177158
caauuaagaaugcauuccc

SEQ ID NO: 1177160 - RNA, 19 nt, Artificial Sequence
  Description of Artificial Sequence: Synthetic oligonucleotide
  Sense strand starting at position 3981 of SEQ ID NO: 916698
gacagauauugccugauga

SEQ ID NO: 1177161 - RNA, 19 nt, Artificial Sequence
  Description of Artificial Sequence: Synthetic oligonucleotide
  Antisense strand to SEQ ID NO: 1177160
ucaucaggcaauaucuguc

SEQ ID NO: 1177162 - RNA, 19 nt, Artificial Sequence
  Description of Artificial Sequence: Synthetic oligonucleotide
  Sense strand starting at position 44 of SEQ ID NO: 916699
acuacauaugcaggugaau

SEQ ID NO: 1177163 - RNA, 19 nt, Artificial Sequence
  Description of Artificial Sequence: Synthetic oligonucleotide
  Antisense strand to SEQ ID NO: 1177162
auucaccugcauauguagu

SEQ ID NO: 1177164 - RNA, 19 nt, Artificial Sequence
  Description of Artificial Sequence: Synthetic oligonucleotide
  Sense strand starting at position 76 of SEQ ID NO: 916699
agacuaauuuagcaguaca

SEQ ID NO: 1177165 - RNA, 19 nt, Artificial Sequence
  Description of Artificial Sequence: Synthetic oligonucleotide
  Antisense strand to SEQ ID NO: 1177164
uguacugcuaaauuagucu

SEQ ID NO: 1177166 - RNA, 19 nt, Artificial Sequence
  Description of Artificial Sequence: Synthetic oligonucleotide
  Sense strand starting at position 167 of SEQ ID NO: 916699
uuaggauguccuuaacuuc

SEQ ID NO: 1177167 - RNA, 19 nt, Artificial Sequence
  Description of Artificial Sequence: Synthetic oligonucleotide
  Antisense strand to SEQ ID NO: 1177166
gaaguuaaggacauccuaa

SEQ ID NO: 1177168 - RNA, 19 nt, Artificial Sequence
  Description of Artificial Sequence: Synthetic oligonucleotide
  Sense strand starting at position 266 of SEQ ID NO: 916699
gugcuuacugucuacuaaa

SEQ ID NO: 1177169 - RNA, 19 nt, Artificial Sequence
  Description of Artificial Sequence: Synthetic oligonucleotide
  Antisense strand to SEQ ID NO: 1177168
uuuaguagacaguaagcac

SEQ ID NO: 1177170 - RNA, 19 nt, Artificial Sequence
  Description of Artificial Sequence: Synthetic oligonucleotide
  Sense strand starting at position 350 of SEQ ID NO: 916699
guuaucaggagauauuguu

SEQ ID NO: 1177171 - RNA, 19 nt, Artificial Sequence
  Description of Artificial Sequence: Synthetic oligonucleotide
  Antisense strand to SEQ ID NO: 1177170
aacaauaucuccugauaac

SEQ ID NO: 1177172 - RNA, 19 nt, Artificial Sequence
  Description of Artificial Sequence: Synthetic oligonucleotide
  Sense strand starting at position 421 of SEQ ID NO: 916699
ccauaugcccuuuaguauu

SEQ ID NO: 1177173 - RNA, 19 nt, Artificial Sequence
  Description of Artificial Sequence: Synthetic oligonucleotide
  Antisense strand to SEQ ID NO: 1177172
aauacuaaagggcauaugg

SEQ ID NO: 1177174 - RNA, 19 nt, Artificial Sequence
  Description of Artificial Sequence: Synthetic oligonucleotide
  Sense strand starting at position 514 of SEQ ID NO: 916699
agcugagugggcuaucaca

SEQ ID NO: 1177175 - RNA, 19 nt, Artificial Sequence
  Description of Artificial Sequence: Synthetic oligonucleotide
  Antisense strand to SEQ ID NO: 1177174
ugugauagcccacucagcu

SEQ ID NO: 1177176 - RNA, 19 nt, Artificial Sequence
  Description of Artificial Sequence: Synthetic oligonucleotide
  Sense strand starting at position 614 of SEQ ID NO: 916699
aguacauuccaugacagua

SEQ ID NO: 1177177 - RNA, 19 nt, Artificial Sequence
  Description of Artificial Sequence: Synthetic oligonucleotide
  Antisense strand to SEQ ID NO: 1177176
uacugucauggaauguacu

SEQ ID NO: 1177178 - RNA, 19 nt, Artificial Sequence
  Description of Artificial Sequence: Synthetic oligonucleotide
  Sense strand starting at position 685 of SEQ ID NO: 916699
cgcuucuagggucagauua

SEQ ID NO: 1177179 - RNA, 19 nt, Artificial Sequence
  Description of Artificial Sequence: Synthetic oligonucleotide
  Antisense strand to SEQ ID NO: 1177178
uaaucugacccuagaagcg

SEQ ID NO: 1177180 - RNA, 19 nt, Artificial Sequence
  Description of Artificial Sequence: Synthetic oligonucleotide
  Sense strand starting at position 696 of SEQ ID NO: 916699
ucagauuauccgcacacga

SEQ ID NO: 1177181 - RNA, 19 nt, Artificial Sequence
  Description of Artificial Sequence: Synthetic oligonucleotide
  Antisense strand to SEQ ID NO: 1177180
ucgugugcggauaaucuga

SEQ ID NO: 1177182 - RNA, 19 nt, Artificial Sequence
  Description of Artificial Sequence: Synthetic oligonucleotide
  Sense strand starting at position 698 of SEQ ID NO: 916699
agauuauccgcacacgagu

SEQ ID NO: 1177183 - RNA, 19 nt, Artificial Sequence
  Description of Artificial Sequence: Synthetic oligonucleotide
  Antisense strand to SEQ ID NO: 1177182
acucgugugcggauaaucu

SEQ ID NO: 1177184 - RNA, 19 nt, Artificial Sequence
  Description of Artificial Sequence: Synthetic oligonucleotide
  Sense strand starting at position 736 of SEQ ID NO: 916699
aaugcaugccauggaauga

SEQ ID NO: 1177185 - RNA, 19 nt, Artificial Sequence
  Description of Artificial Sequence: Synthetic oligonucleotide
  Antisense strand to SEQ ID NO: 1177184
ucauuccauggcaugcauu

SEQ ID NO: 1177186 - RNA, 19 nt, Artificial Sequence
  Description of Artificial Sequence: Synthetic oligonucleotide
  Sense strand starting at position 1154 of SEQ ID NO: 916699
aaaggaugucaccguacuu

SEQ ID NO: 1177187 - RNA, 19 nt, Artificial Sequence
  Description of Artificial Sequence: Synthetic oligonucleotide
  Antisense strand to SEQ ID NO: 1177186
aaguacggugacauccuuu

SEQ ID NO: 1177188 - RNA, 19 nt, Artificial Sequence
  Description of Artificial Sequence: Synthetic oligonucleotide
  Sense strand starting at position 1161 of SEQ ID NO: 916699
gucaccguacuuugggaaa

SEQ ID NO: 1177189 - RNA, 19 nt, Artificial Sequence
  Description of Artificial Sequence: Synthetic oligonucleotide
  Antisense strand to SEQ ID NO: 1177188
uuucccaaaguacggugac

SEQ ID NO: 1177190 - RNA, 19 nt, Artificial Sequence
  Description of Artificial Sequence: Synthetic oligonucleotide
  Sense strand starting at position 1493 of SEQ ID NO: 916699
cuuguccuccagcauagaa

SEQ ID NO: 1177191 - RNA, 19 nt, Artificial Sequence
  Description of Artificial Sequence: Synthetic oligonucleotide
  Antisense strand to SEQ ID NO: 1177190
uucuaugcuggaggacaag

SEQ ID NO: 1177192 - RNA, 19 nt, Artificial Sequence
  Description of Artificial Sequence: Synthetic oligonucleotide
  Sense strand starting at position 2694 of SEQ ID NO: 916699
gagugaagccgcuaagaug

SEQ ID NO: 1177193 - RNA, 19 nt, Artificial Sequence
  Description of Artificial Sequence: Synthetic oligonucleotide
  Antisense strand to SEQ ID NO: 1177192
caucuuagcggcuucacuc

SEQ ID NO: 1177194 - RNA, 19 nt, Artificial Sequence
  Description of Artificial Sequence: Synthetic oligonucleotide
  Sense strand starting at position 2769 of SEQ ID NO: 916699
cacgaaacgcugggagaau

SEQ ID NO: 1177195 - RNA, 19 nt, Artificial Sequence
  Description of Artificial Sequence: Synthetic oligonucleotide
  Antisense strand to SEQ ID NO: 1177194
auucucccagcguuucgug

SEQ ID NO: 1177196 - RNA, 19 nt, Artificial Sequence
  Description of Artificial Sequence: Synthetic oligonucleotide
  Sense strand starting at position 2880 of SEQ ID NO: 916699
ggcucauuagcauaugaau

SEQ ID NO: 1177197 - RNA, 19 nt, Artificial Sequence
  Description of Artificial Sequence: Synthetic oligonucleotide
  Antisense strand to SEQ ID NO: 1177196
auucauaugcuaaugagcc

SEQ ID NO: 1177198 - RNA, 19 nt, Artificial Sequence
  Description of Artificial Sequence: Synthetic oligonucleotide
  Sense strand starting at position 2938 of SEQ ID NO: 916699
ugcuuagcgcaggagauuu

SEQ ID NO: 1177199 - RNA, 19 nt, Artificial Sequence
  Description of Artificial Sequence: Synthetic oligonucleotide
  Antisense strand to SEQ ID NO: 1177198
aaaucuccugcgcuaagca

SEQ ID NO: 1177200 - RNA, 19 nt, Artificial Sequence
  Description of Artificial Sequence: Synthetic oligonucleotide
  Sense strand starting at position 3098 of SEQ ID NO: 916699
ucuuguuucugagcuauuu

SEQ ID NO: 1177201 - RNA, 19 nt, Artificial Sequence
  Description of Artificial Sequence: Synthetic oligonucleotide
  Antisense strand to SEQ ID NO: 1177200
aaauagcucagaaacaaga

SEQ ID NO: 1177202 - RNA, 19 nt, Artificial Sequence
  Description of Artificial Sequence: Synthetic oligonucleotide
  Sense strand starting at position 3104 of SEQ ID NO: 916699
uucugagcuauuuguaggu

SEQ ID NO: 1177203 - RNA, 19 nt, Artificial Sequence
  Description of Artificial Sequence: Synthetic oligonucleotide
  Antisense strand to SEQ ID NO: 1177202
accuacaaauagcucagaa

SEQ ID NO: 1177204 - RNA, 19 nt, Artificial Sequence
  Description of Artificial Sequence: Synthetic oligonucleotide
  Sense strand starting at position 3216 of SEQ ID NO: 916699
auagauuaguacucaucag

SEQ ID NO: 1177205 - RNA, 19 nt, Artificial Sequence
  Description of Artificial Sequence: Synthetic oligonucleotide
  Antisense strand to SEQ ID NO: 1177204
cugaugaguacuaaucuau

SEQ ID NO: 1177206 - RNA, 19 nt, Artificial Sequence
  Description of Artificial Sequence: Synthetic oligonucleotide
  Sense strand starting at position 3220 of SEQ ID NO: 916699
auuaguacucaucaguaga

SEQ ID NO: 1177207 - RNA, 19 nt, Artificial Sequence
  Description of Artificial Sequence: Synthetic oligonucleotide
  Antisense strand to SEQ ID NO: 1177206
ucuacugaugaguacuaau

SEQ ID NO: 1177208 - RNA, 19 nt, Artificial Sequence
  Description of Artificial Sequence: Synthetic oligonucleotide
  Sense strand starting at position 3223 of SEQ ID NO: 916699
aguacucaucaguagaggu

SEQ ID NO: 1177209 - RNA, 19 nt, Artificial Sequence
  Description of Artificial Sequence: Synthetic oligonucleotide
  Antisense strand to SEQ ID NO: 1177208
accucuacugaugaguacu

SEQ ID NO: 1177210 - RNA, 19 nt, Artificial Sequence
  Description of Artificial Sequence: Synthetic oligonucleotide
  Sense strand starting at position 3231 of SEQ ID NO: 916699
ucaguagaggucuaaucuc

SEQ ID NO: 1177211 - RNA, 19 nt, Artificial Sequence
  Description of Artificial Sequence: Synthetic oligonucleotide
  Antisense strand to SEQ ID NO: 1177210
gagauuagaccucuacuga

SEQ ID NO: 1177212 - RNA, 19 nt, Artificial Sequence
  Description of Artificial Sequence: Synthetic oligonucleotide
  Sense strand starting at position 3237 of SEQ ID NO: 916699
gaggucuaaucucuucuga

SEQ ID NO: 1177213 - RNA, 19 nt, Artificial Sequence
  Description of Artificial Sequence: Synthetic oligonucleotide
  Antisense strand to SEQ ID NO: 1177212
ucagaagagauuagaccuc

SEQ ID NO: 1177214 - RNA, 19 nt, Artificial Sequence
  Description of Artificial Sequence: Synthetic oligonucleotide
  Sense strand starting at position 3239 of SEQ ID NO: 916699
ggucuaaucucuucugaac

SEQ ID NO: 1177215 - RNA, 19 nt, Artificial Sequence
  Description of Artificial Sequence: Synthetic oligonucleotide
  Antisense strand to SEQ ID NO: 1177214
guucagaagagauuagacc

SEQ ID NO: 1177216 - RNA, 19 nt, Artificial Sequence
  Description of Artificial Sequence: Synthetic oligonucleotide
  Sense strand starting at position 3284 of SEQ ID NO: 916699
uccuuaucacaaggugaua

SEQ ID NO: 1177217 - RNA, 19 nt, Artificial Sequence
  Description of Artificial Sequence: Synthetic oligonucleotide
  Antisense strand to SEQ ID NO: 1177216
uaucaccuugugauaagga

SEQ ID NO: 1177218 - RNA, 19 nt, Artificial Sequence
  Description of Artificial Sequence: Synthetic oligonucleotide
  Sense strand starting at position 3447 of SEQ ID NO: 916699
ucaggauuccuugggauug

SEQ ID NO: 1177219 - RNA, 19 nt, Artificial Sequence
  Description of Artificial Sequence: Synthetic oligonucleotide
  Antisense strand to SEQ ID NO: 1177218
caaucccaaggaauccuga

SEQ ID NO: 1177220 - RNA, 19 nt, Artificial Sequence
  Description of Artificial Sequence: Synthetic oligonucleotide
  Sense strand starting at position 3459 of SEQ ID NO: 916699
gggauugauuugcaaccua

SEQ ID NO: 1177221 - RNA, 19 nt, Artificial Sequence
  Description of Artificial Sequence: Synthetic oligonucleotide
  Antisense strand to SEQ ID NO: 1177220
uagguugcaaaucaauccc

SEQ ID NO: 1177222 - RNA, 19 nt, Artificial Sequence
  Description of Artificial Sequence: Synthetic oligonucleotide
  Sense strand starting at position 3488 of SEQ ID NO: 916699
caguauacacgugaacaau

SEQ ID NO: 1177223 - RNA, 19 nt, Artificial Sequence
  Description of Artificial Sequence: Synthetic oligonucleotide
  Antisense strand to SEQ ID NO: 1177222
auuguucacguguauacug

SEQ ID NO: 1177224 - RNA, 19 nt, Artificial Sequence
  Description of Artificial Sequence: Synthetic oligonucleotide
  Sense strand starting at position 3499 of SEQ ID NO: 916699
ugaacaauagcucauugua

SEQ ID NO: 1177225 - RNA, 19 nt, Artificial Sequence
  Description of Artificial Sequence: Synthetic oligonucleotide
  Antisense strand to SEQ ID NO: 1177224
uacaaugagcuauuguuca

SEQ ID NO: 1177226 - RNA, 19 nt, Artificial Sequence
  Description of Artificial Sequence: Synthetic oligonucleotide
  Sense strand starting at position 3550 of SEQ ID NO: 916699
auaaauagaucagucaagu

SEQ ID NO: 1177227 - RNA, 19 nt, Artificial Sequence
  Description of Artificial Sequence: Synthetic oligonucleotide
  Antisense strand to SEQ ID NO: 1177226
acuugacugaucuauuuau

SEQ ID NO: 1177228 - RNA, 19 nt, Artificial Sequence
  Description of Artificial Sequence: Synthetic oligonucleotide
  Sense strand starting at position 3571 of SEQ ID NO: 916699
aucacucuguggccaaauu

SEQ ID NO: 1177229 - RNA, 19 nt, Artificial Sequence
  Description of Artificial Sequence: Synthetic oligonucleotide
  Antisense strand to SEQ ID NO: 1177228
aauuuggccacagagugau

SEQ ID NO: 1177230 - RNA, 19 nt, Artificial Sequence
  Description of Artificial Sequence: Synthetic oligonucleotide
  Sense strand starting at position 3699 of SEQ ID NO: 916699
cugguagacuaguuuggaa

SEQ ID NO: 1177231 - RNA, 19 nt, Artificial Sequence
  Description of Artificial Sequence: Synthetic oligonucleotide
  Antisense strand to SEQ ID NO: 1177230
uuccaaacuagucuaccag

SEQ ID NO: 1177232 - RNA, 19 nt, Artificial Sequence
  Description of Artificial Sequence: Synthetic oligonucleotide
  Sense strand starting at position 3701 of SEQ ID NO: 916699
gguagacuaguuuggaaac

SEQ ID NO: 1177233 - RNA, 19 nt, Artificial Sequence
  Description of Artificial Sequence: Synthetic oligonucleotide
  Antisense strand to SEQ ID NO: 1177232
guuuccaaacuagucuacc

SEQ ID NO: 1177234 - RNA, 19 nt, Artificial Sequence
  Description of Artificial Sequence: Synthetic oligonucleotide
  Sense strand starting at position 3755 of SEQ ID NO: 916699
acucuuuauuggccaaaug

SEQ ID NO: 1177235 - RNA, 19 nt, Artificial Sequence
  Description of Artificial Sequence: Synthetic oligonucleotide
  Antisense strand to SEQ ID NO: 1177234
cauuuggccaauaaagagu

SEQ ID NO: 1177236 - RNA, 19 nt, Artificial Sequence
  Description of Artificial Sequence: Synthetic oligonucleotide
  Sense strand starting at position 3842 of SEQ ID NO: 916699
agggauuugugggaagacu

SEQ ID NO: 1177237 - RNA, 19 nt, Artificial Sequence
  Description of Artificial Sequence: Synthetic oligonucleotide
  Antisense strand to SEQ ID NO: 1177236
agucuucccacaaaucccu

SEQ ID NO: 1177238 - RNA, 19 nt, Artificial Sequence
  Description of Artificial Sequence: Synthetic oligonucleotide
  Sense strand starting at position 3902 of SEQ ID NO: 916699
caugaauaccuaggucaga

SEQ ID NO: 1177239 - RNA, 19 nt, Artificial Sequence
  Description of Artificial Sequence: Synthetic oligonucleotide
  Antisense strand to SEQ ID NO: 1177238
ucugaccuagguauucaug

SEQ ID NO: 1177240 - RNA, 19 nt, Artificial Sequence
  Description of Artificial Sequence: Synthetic oligonucleotide
  Sense strand starting at position 3903 of SEQ ID NO: 916699
augaauaccuaggucagau

SEQ ID NO: 1177241 - RNA, 19 nt, Artificial Sequence
  Description of Artificial Sequence: Synthetic oligonucleotide
  Antisense strand to SEQ ID NO: 1177240
aucugaccuagguauucau

SEQ ID NO: 1177242 - RNA, 19 nt, Artificial Sequence
  Description of Artificial Sequence: Synthetic oligonucleotide
  Sense strand starting at position 40 of SEQ ID NO: 916700
ccauaugcccuuuaguauu

SEQ ID NO: 1177243 - RNA, 19 nt, Artificial Sequence
  Description of Artificial Sequence: Synthetic oligonucleotide
  Antisense strand to SEQ ID NO: 1177242
aauacuaaagggcauaugg

SEQ ID NO: 1177244 - RNA, 19 nt, Artificial Sequence
  Description of Artificial Sequence: Synthetic oligonucleotide
  Sense strand starting at position 133 of SEQ ID NO: 916700
agcugagugggcuaucaca

SEQ ID NO: 1177245 - RNA, 19 nt, Artificial Sequence
  Description of Artificial Sequence: Synthetic oligonucleotide
  Antisense strand to SEQ ID NO: 1177244
ugugauagcccacucagcu

SEQ ID NO: 1177246 - RNA, 19 nt, Artificial Sequence
  Description of Artificial Sequence: Synthetic oligonucleotide
  Sense strand starting at position 233 of SEQ ID NO: 916700
aguacauuccaugacagua

SEQ ID NO: 1177247 - RNA, 19 nt, Artificial Sequence
  Description of Artificial Sequence: Synthetic oligonucleotide
  Antisense strand to SEQ ID NO: 1177246
uacugucauggaauguacu

SEQ ID NO: 1177248 - RNA, 19 nt, Artificial Sequence
  Description of Artificial Sequence: Synthetic oligonucleotide
  Sense strand starting at position 304 of SEQ ID NO: 916700
cgcuucuagggucagauua

SEQ ID NO: 1177249 - RNA, 19 nt, Artificial Sequence
  Description of Artificial Sequence: Synthetic oligonucleotide
  Antisense strand to SEQ ID NO: 1177248
uaaucugacccuagaagcg

SEQ ID NO: 1177250 - RNA, 19 nt, Artificial Sequence
  Description of Artificial Sequence: Synthetic oligonucleotide
  Sense strand starting at position 315 of SEQ ID NO: 916700
ucagauuauccgcacacga

SEQ ID NO: 1177251 - RNA, 19 nt, Artificial Sequence
  Description of Artificial Sequence: Synthetic oligonucleotide
  Antisense strand to SEQ ID NO: 1177250
ucgugugcggauaaucuga

SEQ ID NO: 1177252 - RNA, 19 nt, Artificial Sequence
  Description of Artificial Sequence: Synthetic oligonucleotide
  Sense strand starting at position 317 of SEQ ID NO: 916700
agauuauccgcacacgagu

SEQ ID NO: 1177253 - RNA, 19 nt, Artificial Sequence
  Description of Artificial Sequence: Synthetic oligonucleotide
  Antisense strand to SEQ ID NO: 1177252
acucgugugcggauaaucu

SEQ ID NO: 1177254 - RNA, 19 nt, Artificial Sequence
  Description of Artificial Sequence: Synthetic oligonucleotide
  Sense strand starting at position 355 of SEQ ID NO: 916700
aaugcaugccauggaauga

SEQ ID NO: 1177255 - RNA, 19 nt, Artificial Sequence
  Description of Artificial Sequence: Synthetic oligonucleotide
  Antisense strand to SEQ ID NO: 1177254
ucauuccauggcaugcauu

SEQ ID NO: 1177256 - RNA, 19 nt, Artificial Sequence
  Description of Artificial Sequence: Synthetic oligonucleotide
  Sense strand starting at position 773 of SEQ ID NO: 916700
aaaggaugucaccguacuu

SEQ ID NO: 1177257 - RNA, 19 nt, Artificial Sequence
  Description of Artificial Sequence: Synthetic oligonucleotide
  Antisense strand to SEQ ID NO: 1177256
aaguacggugacauccuuu

SEQ ID NO: 1177258 - RNA, 19 nt, Artificial Sequence
  Description of Artificial Sequence: Synthetic oligonucleotide
  Sense strand starting at position 780 of SEQ ID NO: 916700
gucaccguacuuugggaaa

SEQ ID NO: 1177259 - RNA, 19 nt, Artificial Sequence
  Description of Artificial Sequence: Synthetic oligonucleotide
  Antisense strand to SEQ ID NO: 1177258
uuucccaaaguacggugac

SEQ ID NO: 1177260 - RNA, 19 nt, Artificial Sequence
  Description of Artificial Sequence: Synthetic oligonucleotide
  Sense strand starting at position 1112 of SEQ ID NO: 916700
cuuguccuccagcauagaa

SEQ ID NO: 1177261 - RNA, 19 nt, Artificial Sequence
  Description of Artificial Sequence: Synthetic oligonucleotide
  Antisense strand to SEQ ID NO: 1177260
uucuaugcuggaggacaag

SEQ ID NO: 1177262 - RNA, 19 nt, Artificial Sequence
  Description of Artificial Sequence: Synthetic oligonucleotide
  Sense strand starting at position 2313 of SEQ ID NO: 916700
gagugaagccgcuaagaug

SEQ ID NO: 1177263 - RNA, 19 nt, Artificial Sequence
  Description of Artificial Sequence: Synthetic oligonucleotide
  Antisense strand to SEQ ID NO: 1177262
caucuuagcggcuucacuc

SEQ ID NO: 1177264 - RNA, 19 nt, Artificial Sequence
  Description of Artificial Sequence: Synthetic oligonucleotide
  Sense strand starting at position 2388 of SEQ ID NO: 916700
cacgaaacgcugggagaau

SEQ ID NO: 1177265 - RNA, 19 nt, Artificial Sequence
  Description of Artificial Sequence: Synthetic oligonucleotide
  Antisense strand to SEQ ID NO: 1177264
auucucccagcguuucgug

SEQ ID NO: 1177266 - RNA, 19 nt, Artificial Sequence
  Description of Artificial Sequence: Synthetic oligonucleotide
  Sense strand starting at position 2499 of SEQ ID NO: 916700
ggcucauuagcauaugaau

SEQ ID NO: 1177267 - RNA, 19 nt, Artificial Sequence
  Description of Artificial Sequence: Synthetic oligonucleotide
  Antisense strand to SEQ ID NO: 1177266
auucauaugcuaaugagcc

SEQ ID NO: 1177268 - RNA, 19 nt, Artificial Sequence
  Description of Artificial Sequence: Synthetic oligonucleotide
  Sense strand starting at position 2522 of SEQ ID NO: 916700
uuaggacuuucccugcauu

SEQ ID NO: 1177269 - RNA, 19 nt, Artificial Sequence
  Description of Artificial Sequence: Synthetic oligonucleotide
  Antisense strand to SEQ ID NO: 1177268
aaugcagggaaaguccuaa

SEQ ID NO: 1177270 - RNA, 19 nt, Artificial Sequence
  Description of Artificial Sequence: Synthetic oligonucleotide
  Sense strand starting at position 2557 of SEQ ID NO: 916700
ugcuuagcgcaggagauuu

SEQ ID NO: 1177271 - RNA, 19 nt, Artificial Sequence
  Description of Artificial Sequence: Synthetic oligonucleotide
  Antisense strand to SEQ ID NO: 1177270
aaaucuccugcgcuaagca

SEQ ID NO: 1177272 - RNA, 19 nt, Artificial Sequence
  Description of Artificial Sequence: Synthetic oligonucleotide
  Sense strand starting at position 2717 of SEQ ID NO: 916700
ucuuguuucugagcuauuu

SEQ ID NO: 1177273 - RNA, 19 nt, Artificial Sequence
  Description of Artificial Sequence: Synthetic oligonucleotide
  Antisense strand to SEQ ID NO: 1177272
aaauagcucagaaacaaga

SEQ ID NO: 1177274 - RNA, 19 nt, Artificial Sequence
  Description of Artificial Sequence: Synthetic oligonucleotide
  Sense strand starting at position 2723 of SEQ ID NO: 916700
uucugagcuauuuguaggu

SEQ ID NO: 1177275 - RNA, 19 nt, Artificial Sequence
  Description of Artificial Sequence: Synthetic oligonucleotide
  Antisense strand to SEQ ID NO: 1177274
accuacaaauagcucagaa

SEQ ID NO: 1177276 - RNA, 19 nt, Artificial Sequence
  Description of Artificial Sequence: Synthetic oligonucleotide
  Sense strand starting at position 2835 of SEQ ID NO: 916700
auagauuaguacucaucag

SEQ ID NO: 1177277 - RNA, 19 nt, Artificial Sequence
  Description of Artificial Sequence: Synthetic oligonucleotide
  Antisense strand to SEQ ID NO: 1177276
cugaugaguacuaaucuau

SEQ ID NO: 1177278 - RNA, 19 nt, Artificial Sequence
  Description of Artificial Sequence: Synthetic oligonucleotide
  Sense strand starting at position 2839 of SEQ ID NO: 916700
auuaguacucaucaguaga

SEQ ID NO: 1177279 - RNA, 19 nt, Artificial Sequence
  Description of Artificial Sequence: Synthetic oligonucleotide
  Antisense strand to SEQ ID NO: 1177278
ucuacugaugaguacuaau

SEQ ID NO: 1177280 - RNA, 19 nt, Artificial Sequence
  Description of Artificial Sequence: Synthetic oligonucleotide
  Sense strand starting at position 2842 of SEQ ID NO: 916700
aguacucaucaguagaggu

SEQ ID NO: 1177281 - RNA, 19 nt, Artificial Sequence
  Description of Artificial Sequence: Synthetic oligonucleotide
  Antisense strand to SEQ ID NO: 1177280
accucuacugaugaguacu

SEQ ID NO: 1177282 - RNA, 19 nt, Artificial Sequence
  Description of Artificial Sequence: Synthetic oligonucleotide
  Sense strand starting at position 2850 of SEQ ID NO: 916700
ucaguagaggucuaaucuc

SEQ ID NO: 1177283 - RNA, 19 nt, Artificial Sequence
  Description of Artificial Sequence: Synthetic oligonucleotide
  Antisense strand to SEQ ID NO: 1177282
gagauuagaccucuacuga

SEQ ID NO: 1177284 - RNA, 19 nt, Artificial Sequence
  Description of Artificial Sequence: Synthetic oligonucleotide
  Sense strand starting at position 2856 of SEQ ID NO: 916700
gaggucuaaucucuucuga

SEQ ID NO: 1177285 - RNA, 19 nt, Artificial Sequence
  Description of Artificial Sequence: Synthetic oligonucleotide
  Antisense strand to SEQ ID NO: 1177284
ucagaagagauuagaccuc

SEQ ID NO: 1177286 - RNA, 19 nt, Artificial Sequence
  Description of Artificial Sequence: Synthetic oligonucleotide
  Sense strand starting at position 2858 of SEQ ID NO: 916700
ggucuaaucucuucugaac

SEQ ID NO: 1177287 - RNA, 19 nt, Artificial Sequence
  Description of Artificial Sequence: Synthetic oligonucleotide
  Antisense strand to SEQ ID NO: 1177286
guucagaagagauuagacc

SEQ ID NO: 1177288 - RNA, 19 nt, Artificial Sequence
  Description of Artificial Sequence: Synthetic oligonucleotide
  Sense strand starting at position 2903 of SEQ ID NO: 916700
uccuuaucacaaggugaua

SEQ ID NO: 1177289 - RNA, 19 nt, Artificial Sequence
  Description of Artificial Sequence: Synthetic oligonucleotide
  Antisense strand to SEQ ID NO: 1177288
uaucaccuugugauaagga

SEQ ID NO: 1177290 - RNA, 19 nt, Artificial Sequence
  Description of Artificial Sequence: Synthetic oligonucleotide
  Sense strand starting at position 3066 of SEQ ID NO: 916700
ucaggauuccuugggauug

SEQ ID NO: 1177291 - RNA, 19 nt, Artificial Sequence
  Description of Artificial Sequence: Synthetic oligonucleotide
  Antisense strand to SEQ ID NO: 1177290
caaucccaaggaauccuga

SEQ ID NO: 1177292 - RNA, 19 nt, Artificial Sequence
  Description of Artificial Sequence: Synthetic oligonucleotide
  Sense strand starting at position 3078 of SEQ ID NO: 916700
gggauugauuugcaaccua

SEQ ID NO: 1177293 - RNA, 19 nt, Artificial Sequence
  Description of Artificial Sequence: Synthetic oligonucleotide
  Antisense strand to SEQ ID NO: 1177292
uagguugcaaaucaauccc

SEQ ID NO: 1177294 - RNA, 19 nt, Artificial Sequence
  Description of Artificial Sequence: Synthetic oligonucleotide
  Sense strand starting at position 3107 of SEQ ID NO: 916700
caguauacacgugaacaau

SEQ ID NO: 1177295 - RNA, 19 nt, Artificial Sequence
  Description of Artificial Sequence: Synthetic oligonucleotide
  Antisense strand to SEQ ID NO: 1177294
auuguucacguguauacug

SEQ ID NO: 1177296 - RNA, 19 nt, Artificial Sequence
  Description of Artificial Sequence: Synthetic oligonucleotide
  Sense strand starting at position 3118 of SEQ ID NO: 916700
ugaacaauagcucauugua

SEQ ID NO: 1177297 - RNA, 19 nt, Artificial Sequence
  Description of Artificial Sequence: Synthetic oligonucleotide
  Antisense strand to SEQ ID NO: 1177296
uacaaugagcuauuguuca

SEQ ID NO: 1177298 - RNA, 19 nt, Artificial Sequence
  Description of Artificial Sequence: Synthetic oligonucleotide
  Sense strand starting at position 3169 of SEQ ID NO: 916700
auaaauagaucagucaagu

SEQ ID NO: 1177299 - RNA, 19 nt, Artificial Sequence
  Description of Artificial Sequence: Synthetic oligonucleotide
  Antisense strand to SEQ ID NO: 1177298
acuugacugaucuauuuau

SEQ ID NO: 1177300 - RNA, 19 nt, Artificial Sequence
  Description of Artificial Sequence: Synthetic oligonucleotide
  Sense strand starting at position 3190 of SEQ ID NO: 916700
aucacucuguggccaaauu

SEQ ID NO: 1177301 - RNA, 19 nt, Artificial Sequence
  Description of Artificial Sequence: Synthetic oligonucleotide
  Antisense strand to SEQ ID NO: 1177300
aauuuggccacagagugau

SEQ ID NO: 1177302 - RNA, 19 nt, Artificial Sequence
  Description of Artificial Sequence: Synthetic oligonucleotide
  Sense strand starting at position 3318 of SEQ ID NO: 916700
cugguagacuaguuuggaa

SEQ ID NO: 1177303 - RNA, 19 nt, Artificial Sequence
  Description of Artificial Sequence: Synthetic oligonucleotide
  Antisense strand to SEQ ID NO: 1177302
uuccaaacuagucuaccag

SEQ ID NO: 1177304 - RNA, 19 nt, Artificial Sequence
  Description of Artificial Sequence: Synthetic oligonucleotide
  Sense strand starting at position 3320 of SEQ ID NO: 916700
gguagacuaguuuggaaac

SEQ ID NO: 1177305 - RNA, 19 nt, Artificial Sequence
  Description of Artificial Sequence: Synthetic oligonucleotide
  Antisense strand to SEQ ID NO: 1177304
guuuccaaacuagucuacc

SEQ ID NO: 1177306 - RNA, 19 nt, Artificial Sequence
  Description of Artificial Sequence: Synthetic oligonucleotide
  Sense strand starting at position 3374 of SEQ ID NO: 916700
acucuuuauuggccaaaug

SEQ ID NO: 1177307 - RNA, 19 nt, Artificial Sequence
  Description of Artificial Sequence: Synthetic oligonucleotide
  Antisense strand to SEQ ID NO: 1177306
cauuuggccaauaaagagu

SEQ ID NO: 1177308 - RNA, 19 nt, Artificial Sequence
  Description of Artificial Sequence: Synthetic oligonucleotide
  Sense strand starting at position 3461 of SEQ ID NO: 916700
agggauuugugggaagacu

SEQ ID NO: 1177309 - RNA, 19 nt, Artificial Sequence
  Description of Artificial Sequence: Synthetic oligonucleotide
  Antisense strand to SEQ ID NO: 1177308
agucuucccacaaaucccu

SEQ ID NO: 1177310 - RNA, 19 nt, Artificial Sequence
  Description of Artificial Sequence: Synthetic oligonucleotide
  Sense strand starting at position 3521 of SEQ ID NO: 916700
caugaauaccuaggucaga

SEQ ID NO: 1177311 - RNA, 19 nt, Artificial Sequence
  Description of Artificial Sequence: Synthetic oligonucleotide
  Antisense strand to SEQ ID NO: 1177310
ucugaccuagguauucaug

SEQ ID NO: 1177312 - RNA, 19 nt, Artificial Sequence
  Description of Artificial Sequence: Synthetic oligonucleotide
  Sense strand starting at position 3522 of SEQ ID NO: 916700
augaauaccuaggucagau

SEQ ID NO: 1177313 - RNA, 19 nt, Artificial Sequence
  Description of Artificial Sequence: Synthetic oligonucleotide
  Antisense strand to SEQ ID NO: 1177312
aucugaccuagguauucau

SEQ ID NO: 1177314 - RNA, 19 nt, Artificial Sequence
  Description of Artificial Sequence: Synthetic oligonucleotide
  Sense strand starting at position 3603 of SEQ ID NO: 916700
aggagaaaugcgcaaucaa

SEQ ID NO: 1177315 - RNA, 19 nt, Artificial Sequence
  Description of Artificial Sequence: Synthetic oligonucleotide
  Antisense strand to SEQ ID NO: 1177314
uugauugcgcauuucuccu

SEQ ID NO: 1177316 - RNA, 19 nt, Artificial Sequence
  Description of Artificial Sequence: Synthetic oligonucleotide
  Sense strand starting at position 3669 of SEQ ID NO: 916700
ggaguaucagcaggugaau

SEQ ID NO: 1177317 - RNA, 19 nt, Artificial Sequence
  Description of Artificial Sequence: Synthetic oligonucleotide
  Antisense strand to SEQ ID NO: 1177316
auucaccugcugauacucc

SEQ ID NO: 1177318 - RNA, 19 nt, Artificial Sequence
  Description of Artificial Sequence: Synthetic oligonucleotide
  Sense strand starting at position 3927 of SEQ ID NO: 916700
gcaagcuuccuacaaaggu

SEQ ID NO: 1177319 - RNA, 19 nt, Artificial Sequence
  Description of Artificial Sequence: Synthetic oligonucleotide
  Antisense strand to SEQ ID NO: 1177318
accuuuguaggaagcuugc

SEQ ID NO: 1177320 - RNA, 19 nt, Artificial Sequence
  Description of Artificial Sequence: Synthetic oligonucleotide
  Sense strand starting at position 3964 of SEQ ID NO: 916700
acuuuagucuggucugaaa

SEQ ID NO: 1177321 - RNA, 19 nt, Artificial Sequence
  Description of Artificial Sequence: Synthetic oligonucleotide
  Antisense strand to SEQ ID NO: 1177320
uuucagaccagacuaaagu

SEQ ID NO: 1177322 - RNA, 19 nt, Artificial Sequence
  Description of Artificial Sequence: Synthetic oligonucleotide
  Sense strand starting at position 37 of SEQ ID NO: 916701
gaguaaauauuguuccaga

SEQ ID NO: 1177323 - RNA, 19 nt, Artificial Sequence
  Description of Artificial Sequence: Synthetic oligonucleotide
  Antisense strand to SEQ ID NO: 1177322
ucuggaacaauauuuacuc

SEQ ID NO: 1177324 - RNA, 19 nt, Artificial Sequence
  Description of Artificial Sequence: Synthetic oligonucleotide
  Sense strand starting at position 38 of SEQ ID NO: 916701
aguaaauauuguuccagag

SEQ ID NO: 1177325 - RNA, 19 nt, Artificial Sequence
  Description of Artificial Sequence: Synthetic oligonucleotide
  Antisense strand to SEQ ID NO: 1177324
cucuggaacaauauuuacu

SEQ ID NO: 1177326 - RNA, 19 nt, Artificial Sequence
  Description of Artificial Sequence: Synthetic oligonucleotide
  Sense strand starting at position 65 of SEQ ID NO: 916701
ugacaaauacugcgucauc

SEQ ID NO: 1177327 - RNA, 19 nt, Artificial Sequence
  Description of Artificial Sequence: Synthetic oligonucleotide
  Antisense strand to SEQ ID NO: 1177326
gaugacgcaguauuuguca

SEQ ID NO: 1177328 - RNA, 19 nt, Artificial Sequence
  Description of Artificial Sequence: Synthetic oligonucleotide
  Sense strand starting at position 74 of SEQ ID NO: 916701
cugcgucauccuuacagaa

SEQ ID NO: 1177329 - RNA, 19 nt, Artificial Sequence
  Description of Artificial Sequence: Synthetic oligonucleotide
  Antisense strand to SEQ ID NO: 1177328
uucuguaaggaugacgcag

SEQ ID NO: 1177330 - RNA, 19 nt, Artificial Sequence
  Description of Artificial Sequence: Synthetic oligonucleotide
  Sense strand starting at position 152 of SEQ ID NO: 916701
ucuugcugucaugggauuu

SEQ ID NO: 1177331 - RNA, 19 nt, Artificial Sequence
  Description of Artificial Sequence: Synthetic oligonucleotide
  Antisense strand to SEQ ID NO: 1177330
aaaucccaugacagcaaga

SEQ ID NO: 1177332 - RNA, 19 nt, Artificial Sequence
  Description of Artificial Sequence: Synthetic oligonucleotide
  Sense strand starting at position 344 of SEQ ID NO: 916701
ccaguugucaccuaaguga

SEQ ID NO: 1177333 - RNA, 19 nt, Artificial Sequence
  Description of Artificial Sequence: Synthetic oligonucleotide
  Antisense strand to SEQ ID NO: 1177332
ucacuuaggugacaacugg

SEQ ID NO: 1177334 - RNA, 19 nt, Artificial Sequence
  Description of Artificial Sequence: Synthetic oligonucleotide
  Sense strand starting at position 456 of SEQ ID NO: 916701
gauggaaguucccucuacu

SEQ ID NO: 1177335 - RNA, 19 nt, Artificial Sequence
  Description of Artificial Sequence: Synthetic oligonucleotide
  Antisense strand to SEQ ID NO: 1177334
aguagagggaacuuccauc

SEQ ID NO: 1177336 - RNA, 19 nt, Artificial Sequence
  Description of Artificial Sequence: Synthetic oligonucleotide
  Sense strand starting at position 580 of SEQ ID NO: 916701
cacuguaugcaugaacaga

SEQ ID NO: 1177337 - RNA, 19 nt, Artificial Sequence
  Description of Artificial Sequence: Synthetic oligonucleotide
  Antisense strand to SEQ ID NO: 1177336
ucuguucaugcauacagug

SEQ ID NO: 1177338 - RNA, 19 nt, Artificial Sequence
  Description of Artificial Sequence: Synthetic oligonucleotide
  Sense strand starting at position 674 of SEQ ID NO: 916701
agcacaaaugcauguuaac

SEQ ID NO: 1177339 - RNA, 19 nt, Artificial Sequence
  Description of Artificial Sequence: Synthetic oligonucleotide
  Antisense strand to SEQ ID NO: 1177338
guuaacaugcauuugugcu

SEQ ID NO: 1177340 - RNA, 19 nt, Artificial Sequence
  Description of Artificial Sequence: Synthetic oligonucleotide
  Sense strand starting at position 683 of SEQ ID NO: 916701
gcauguuaacucugcagga

SEQ ID NO: 1177341 - RNA, 19 nt, Artificial Sequence
  Description of Artificial Sequence: Synthetic oligonucleotide
  Antisense strand to SEQ ID NO: 1177340
uccugcagaguuaacaugc

SEQ ID NO: 1177342 - RNA, 19 nt, Artificial Sequence
  Description of Artificial Sequence: Synthetic oligonucleotide
  Sense strand starting at position 685 of SEQ ID NO: 916701
auguuaacucugcaggaga

SEQ ID NO: 1177343 - RNA, 19 nt, Artificial Sequence
  Description of Artificial Sequence: Synthetic oligonucleotide
  Antisense strand to SEQ ID NO: 1177342
ucuccugcagaguuaacau

SEQ ID NO: 1177344 - RNA, 19 nt, Artificial Sequence
  Description of Artificial Sequence: Synthetic oligonucleotide
  Sense strand starting at position 798 of SEQ ID NO: 916701
cucaguucugccgcugaua

SEQ ID NO: 1177345 - RNA, 19 nt, Artificial Sequence
  Description of Artificial Sequence: Synthetic oligonucleotide
  Antisense strand to SEQ ID NO: 1177344
uaucagcggcagaacugag

SEQ ID NO: 1177346 - RNA, 19 nt, Artificial Sequence
  Description of Artificial Sequence: Synthetic oligonucleotide
  Sense strand starting at position 998 of SEQ ID NO: 916701
ccaauagucacuggcgaug

SEQ ID NO: 1177347 - RNA, 19 nt, Artificial Sequence
  Description of Artificial Sequence: Synthetic oligonucleotide
  Antisense strand to SEQ ID NO: 1177346
caucgccagugacuauugg

SEQ ID NO: 1177348 - RNA, 19 nt, Artificial Sequence
  Description of Artificial Sequence: Synthetic oligonucleotide
  Sense strand starting at position 1217 of SEQ ID NO: 916701
aguugauucgccucugcca

SEQ ID NO: 1177349 - RNA, 19 nt, Artificial Sequence
  Description of Artificial Sequence: Synthetic oligonucleotide
  Antisense strand to SEQ ID NO: 1177348
uggcagaggcgaaucaacu

SEQ ID NO: 1177350 - RNA, 19 nt, Artificial Sequence
  Description of Artificial Sequence: Synthetic oligonucleotide
  Sense strand starting at position 1218 of SEQ ID NO: 916701
guugauucgccucugccaa

SEQ ID NO: 1177351 - RNA, 19 nt, Artificial Sequence
  Description of Artificial Sequence: Synthetic oligonucleotide
  Antisense strand to SEQ ID NO: 1177350
uuggcagaggcgaaucaac

SEQ ID NO: 1177352 - RNA, 19 nt, Artificial Sequence
  Description of Artificial Sequence: Synthetic oligonucleotide
  Sense strand starting at position 1416 of SEQ ID NO: 916701
agggaagaguugguuguga

SEQ ID NO: 1177353 - RNA, 19 nt, Artificial Sequence
  Description of Artificial Sequence: Synthetic oligonucleotide
  Antisense strand to SEQ ID NO: 1177352
ucacaaccaacucuucccu

SEQ ID NO: 1177354 - RNA, 19 nt, Artificial Sequence
  Description of Artificial Sequence: Synthetic oligonucleotide
  Sense strand starting at position 1417 of SEQ ID NO: 916701
gggaagaguugguugugau

SEQ ID NO: 1177355 - RNA, 19 nt, Artificial Sequence
  Description of Artificial Sequence: Synthetic oligonucleotide
  Antisense strand to SEQ ID NO: 1177354
aucacaaccaacucuuccc

SEQ ID NO: 1177356 - RNA, 19 nt, Artificial Sequence
  Description of Artificial Sequence: Synthetic oligonucleotide
  Sense strand starting at position 1418 of SEQ ID NO: 916701
ggaagaguugguugugaug

SEQ ID NO: 1177357 - RNA, 19 nt, Artificial Sequence
  Description of Artificial Sequence: Synthetic oligonucleotide
  Antisense strand to SEQ ID NO: 1177356
caucacaaccaacucuucc

SEQ ID NO: 1177358 - RNA, 19 nt, Artificial Sequence
  Description of Artificial Sequence: Synthetic oligonucleotide
  Sense strand starting at position 1425 of SEQ ID NO: 916701
uugguugugaugcagcaaa

SEQ ID NO: 1177359 - RNA, 19 nt, Artificial Sequence
  Description of Artificial Sequence: Synthetic oligonucleotide
  Antisense strand to SEQ ID NO: 1177358
uuugcugcaucacaaccaa

SEQ ID NO: 1177360 - RNA, 19 nt, Artificial Sequence
  Description of Artificial Sequence: Synthetic oligonucleotide
  Sense strand starting at position 2225 of SEQ ID NO: 916701
ggauuaugcgcagggagaa

SEQ ID NO: 1177361 - RNA, 19 nt, Artificial Sequence
  Description of Artificial Sequence: Synthetic oligonucleotide
  Antisense strand to SEQ ID NO: 1177360
uucucccugcgcauaaucc

SEQ ID NO: 1177362 - RNA, 19 nt, Artificial Sequence
  Description of Artificial Sequence: Synthetic oligonucleotide
  Sense strand starting at position 2444 of SEQ ID NO: 916701
gugccuauuugaguuccuu

SEQ ID NO: 1177363 - RNA, 19 nt, Artificial Sequence
  Description of Artificial Sequence: Synthetic oligonucleotide
  Antisense strand to SEQ ID NO: 1177362
aaggaacucaaauaggcac

SEQ ID NO: 1177364 - RNA, 19 nt, Artificial Sequence
  Description of Artificial Sequence: Synthetic oligonucleotide
  Sense strand starting at position 2552 of SEQ ID NO: 916701
cgauccugucucguguaau

SEQ ID NO: 1177365 - RNA, 19 nt, Artificial Sequence
  Description of Artificial Sequence: Synthetic oligonucleotide
  Antisense strand to SEQ ID NO: 1177364
auuacacgagacaggaucg

SEQ ID NO: 1177366 - RNA, 19 nt, Artificial Sequence
  Description of Artificial Sequence: Synthetic oligonucleotide
  Sense strand starting at position 2676 of SEQ ID NO: 916701
ccuggucgucuccaugaaa

SEQ ID NO: 1177367 - RNA, 19 nt, Artificial Sequence
  Description of Artificial Sequence: Synthetic oligonucleotide
  Antisense strand to SEQ ID NO: 1177366
uuucauggagacgaccagg

SEQ ID NO: 1177368 - RNA, 19 nt, Artificial Sequence
  Description of Artificial Sequence: Synthetic oligonucleotide
  Sense strand starting at position 2798 of SEQ ID NO: 916701
auccgaacacggugacaau

SEQ ID NO: 1177369 - RNA, 19 nt, Artificial Sequence
  Description of Artificial Sequence: Synthetic oligonucleotide
  Antisense strand to SEQ ID NO: 1177368
auugucaccguguucggau

SEQ ID NO: 1177370 - RNA, 19 nt, Artificial Sequence
  Description of Artificial Sequence: Synthetic oligonucleotide
  Sense strand starting at position 2916 of SEQ ID NO: 916701
uuugaaaguucugcccuga

SEQ ID NO: 1177371 - RNA, 19 nt, Artificial Sequence
  Description of Artificial Sequence: Synthetic oligonucleotide
  Antisense strand to SEQ ID NO: 1177370
ucagggcagaacuuucaaa

SEQ ID NO: 1177372 - RNA, 19 nt, Artificial Sequence
  Description of Artificial Sequence: Synthetic oligonucleotide
  Sense strand starting at position 2932 of SEQ ID NO: 916701
ugacauuugugucacacua

SEQ ID NO: 1177373 - RNA, 19 nt, Artificial Sequence
  Description of Artificial Sequence: Synthetic oligonucleotide
  Antisense strand to SEQ ID NO: 1177372
uagugugacacaaauguca

SEQ ID NO: 1177374 - RNA, 19 nt, Artificial Sequence
  Description of Artificial Sequence: Synthetic oligonucleotide
  Sense strand starting at position 2934 of SEQ ID NO: 916701
acauuugugucacacuaaa

SEQ ID NO: 1177375 - RNA, 19 nt, Artificial Sequence
  Description of Artificial Sequence: Synthetic oligonucleotide
  Antisense strand to SEQ ID NO: 1177374
uuuagugugacacaaaugu

SEQ ID NO: 1177376 - RNA, 19 nt, Artificial Sequence
  Description of Artificial Sequence: Synthetic oligonucleotide
  Sense strand starting at position 3112 of SEQ ID NO: 916701
uccacaacgcucuaggaua

SEQ ID NO: 1177377 - RNA, 19 nt, Artificial Sequence
  Description of Artificial Sequence: Synthetic oligonucleotide
  Antisense strand to SEQ ID NO: 1177376
uauccuagagcguugugga

SEQ ID NO: 1177378 - RNA, 19 nt, Artificial Sequence
  Description of Artificial Sequence: Synthetic oligonucleotide
  Sense strand starting at position 3130 of SEQ ID NO: 916701
acuguaucaucuuccagga

SEQ ID NO: 1177379 - RNA, 19 nt, Artificial Sequence
  Description of Artificial Sequence: Synthetic oligonucleotide
  Antisense strand to SEQ ID NO: 1177378
uccuggaagaugauacagu

SEQ ID NO: 1177380 - RNA, 19 nt, Artificial Sequence
  Description of Artificial Sequence: Synthetic oligonucleotide
  Sense strand starting at position 3146 of SEQ ID NO: 916701
ggaagaugaggaugugugu

SEQ ID NO: 1177381 - RNA, 19 nt, Artificial Sequence
  Description of Artificial Sequence: Synthetic oligonucleotide
  Antisense strand to SEQ ID NO: 1177380
acacacauccucaucuucc

SEQ ID NO: 1177382 - RNA, 19 nt, Artificial Sequence
  Description of Artificial Sequence: Synthetic oligonucleotide
  Sense strand starting at position 3180 of SEQ ID NO: 916701
ggagguguugacugaugca

SEQ ID NO: 1177383 - RNA, 19 nt, Artificial Sequence
  Description of Artificial Sequence: Synthetic oligonucleotide
  Antisense strand to SEQ ID NO: 1177382
ugcaucagucaacaccucc

SEQ ID NO: 1177384 - RNA, 19 nt, Artificial Sequence
  Description of Artificial Sequence: Synthetic oligonucleotide
  Sense strand starting at position 3269 of SEQ ID NO: 916701
uuucguugggaauaaagca

SEQ ID NO: 1177385 - RNA, 19 nt, Artificial Sequence
  Description of Artificial Sequence: Synthetic oligonucleotide
  Antisense strand to SEQ ID NO: 1177384
ugcuuuauucccaacgaaa

SEQ ID NO: 1177386 - RNA, 19 nt, Artificial Sequence
  Description of Artificial Sequence: Synthetic oligonucleotide
  Sense strand starting at position 3389 of SEQ ID NO: 916701
agcacugugcucuauaauu

SEQ ID NO: 1177387 - RNA, 19 nt, Artificial Sequence
  Description of Artificial Sequence: Synthetic oligonucleotide
  Antisense strand to SEQ ID NO: 1177386
aauuauagagcacagugcu

SEQ ID NO: 1177388 - RNA, 19 nt, Artificial Sequence
  Description of Artificial Sequence: Synthetic oligonucleotide
  Sense strand starting at position 3459 of SEQ ID NO: 916701
ggcagaguuccugagcuca

SEQ ID NO: 1177389 - RNA, 19 nt, Artificial Sequence
  Description of Artificial Sequence: Synthetic oligonucleotide
  Antisense strand to SEQ ID NO: 1177388
ugagcucaggaacucugcc

SEQ ID NO: 1177390 - RNA, 19 nt, Artificial Sequence
  Description of Artificial Sequence: Synthetic oligonucleotide
  Sense strand starting at position 3461 of SEQ ID NO: 916701
cagaguuccugagcucaga

SEQ ID NO: 1177391 - RNA, 19 nt, Artificial Sequence
  Description of Artificial Sequence: Synthetic oligonucleotide
  Antisense strand to SEQ ID NO: 1177390
ucugagcucaggaacucug

SEQ ID NO: 1177392 - RNA, 19 nt, Artificial Sequence
  Description of Artificial Sequence: Synthetic oligonucleotide
  Sense strand starting at position 3790 of SEQ ID NO: 916701
acgagaaucugggaaagaa

SEQ ID NO: 1177393 - RNA, 19 nt, Artificial Sequence
  Description of Artificial Sequence: Synthetic oligonucleotide
  Antisense strand to SEQ ID NO: 1177392
uucuuucccagauucucgu

SEQ ID NO: 1177394 - RNA, 19 nt, Artificial Sequence
  Description of Artificial Sequence: Synthetic oligonucleotide
  Sense strand starting at position 3843 of SEQ ID NO: 916701
ggaauuggccuuugaaguu

SEQ ID NO: 1177395 - RNA, 19 nt, Artificial Sequence
  Description of Artificial Sequence: Synthetic oligonucleotide
  Antisense strand to SEQ ID NO: 1177394
aacuucaaaggccaauucc

SEQ ID NO: 1177396 - RNA, 19 nt, Artificial Sequence
  Description of Artificial Sequence: Synthetic oligonucleotide
  Sense strand starting at position 3882 of SEQ ID NO: 916701
gguuacaaaugcuucuauu

SEQ ID NO: 1177397 - RNA, 19 nt, Artificial Sequence
  Description of Artificial Sequence: Synthetic oligonucleotide
  Antisense strand to SEQ ID NO: 1177396
aauagaagcauuuguaacc

SEQ ID NO: 1177398 - RNA, 19 nt, Artificial Sequence
  Description of Artificial Sequence: Synthetic oligonucleotide
  Sense strand starting at position 3953 of SEQ ID NO: 916701
ucacuaccuccauagguga

SEQ ID NO: 1177399 - RNA, 19 nt, Artificial Sequence
  Description of Artificial Sequence: Synthetic oligonucleotide
  Antisense strand to SEQ ID NO: 1177398
ucaccuauggagguaguga

SEQ ID NO: 1177400 - RNA, 19 nt, Artificial Sequence
  Description of Artificial Sequence: Synthetic oligonucleotide
  Sense strand starting at position 3956 of SEQ ID NO: 916701
cuaccuccauaggugaaau

SEQ ID NO: 1177401 - RNA, 19 nt, Artificial Sequence
  Description of Artificial Sequence: Synthetic oligonucleotide
  Antisense strand to SEQ ID NO: 1177400
auuucaccuauggagguag

SEQ ID NO: 1177402 - RNA, 19 nt, Artificial Sequence
  Description of Artificial Sequence: Synthetic oligonucleotide
  Sense strand starting at position 2 of SEQ ID NO: 916702
uuccuaauagaauggguau

SEQ ID NO: 1177403 - RNA, 19 nt, Artificial Sequence
  Description of Artificial Sequence: Synthetic oligonucleotide
  Antisense strand to SEQ ID NO: 1177402
auacccauucuauuaggaa

SEQ ID NO: 1177404 - RNA, 19 nt, Artificial Sequence
  Description of Artificial Sequence: Synthetic oligonucleotide
  Sense strand starting at position 14 of SEQ ID NO: 916702
uggguaugggaaugugaga

SEQ ID NO: 1177405 - RNA, 19 nt, Artificial Sequence
  Description of Artificial Sequence: Synthetic oligonucleotide
  Antisense strand to SEQ ID NO: 1177404
ucucacauucccauaccca

SEQ ID NO: 1177406 - RNA, 19 nt, Artificial Sequence
  Description of Artificial Sequence: Synthetic oligonucleotide
  Sense strand starting at position 84 of SEQ ID NO: 916702
uguuuauuaugacugaacu

SEQ ID NO: 1177407 - RNA, 19 nt, Artificial Sequence
  Description of Artificial Sequence: Synthetic oligonucleotide
  Antisense strand to SEQ ID NO: 1177406
aguucagucauaauaaaca

SEQ ID NO: 1177408 - RNA, 19 nt, Artificial Sequence
  Description of Artificial Sequence: Synthetic oligonucleotide
  Sense strand starting at position 85 of SEQ ID NO: 916702
guuuauuaugacugaacug

SEQ ID NO: 1177409 - RNA, 19 nt, Artificial Sequence
  Description of Artificial Sequence: Synthetic oligonucleotide
  Antisense strand to SEQ ID NO: 1177408
caguucagucauaauaaac

SEQ ID NO: 1177410 - RNA, 19 nt, Artificial Sequence
  Description of Artificial Sequence: Synthetic oligonucleotide
  Sense strand starting at position 105 of SEQ ID NO: 916702
acacuuaaacgugguaaag

SEQ ID NO: 1177411 - RNA, 19 nt, Artificial Sequence
  Description of Artificial Sequence: Synthetic oligonucleotide
  Antisense strand to SEQ ID NO: 1177410
cuuuaccacguuuaagugu

SEQ ID NO: 1177412 - RNA, 19 nt, Artificial Sequence
  Description of Artificial Sequence: Synthetic oligonucleotide
  Sense strand starting at position 183 of SEQ ID NO: 916702
gaauaacuuccauggugga

SEQ ID NO: 1177413 - RNA, 19 nt, Artificial Sequence
  Description of Artificial Sequence: Synthetic oligonucleotide
  Antisense strand to SEQ ID NO: 1177412
uccaccauggaaguuauuc

SEQ ID NO: 1177414 - RNA, 19 nt, Artificial Sequence
  Description of Artificial Sequence: Synthetic oligonucleotide
  Sense strand starting at position 427 of SEQ ID NO: 916702
ucuuccuaguagcuagaua

SEQ ID NO: 1177415 - RNA, 19 nt, Artificial Sequence
  Description of Artificial Sequence: Synthetic oligonucleotide
  Antisense strand to SEQ ID NO: 1177414
uaucuagcuacuaggaaga

SEQ ID NO: 1177416 - RNA, 19 nt, Artificial Sequence
  Description of Artificial Sequence: Synthetic oligonucleotide
  Sense strand starting at position 503 of SEQ ID NO: 916702
aguaaugcagaacgucaaa

SEQ ID NO: 1177417 - RNA, 19 nt, Artificial Sequence
  Description of Artificial Sequence: Synthetic oligonucleotide
  Antisense strand to SEQ ID NO: 1177416
uuugacguucugcauuacu

SEQ ID NO: 1177418 - RNA, 19 nt, Artificial Sequence
  Description of Artificial Sequence: Synthetic oligonucleotide
  Sense strand starting at position 668 of SEQ ID NO: 916702
uuucuuacucugugagaau

SEQ ID NO: 1177419 - RNA, 19 nt, Artificial Sequence
  Description of Artificial Sequence: Synthetic oligonucleotide
  Antisense strand to SEQ ID NO: 1177418
auucucacagaguaagaaa

SEQ ID NO: 1177420 - RNA, 19 nt, Artificial Sequence
  Description of Artificial Sequence: Synthetic oligonucleotide
  Sense strand starting at position 685 of SEQ ID NO: 916702
auauacugcgccuauauca

SEQ ID NO: 1177421 - RNA, 19 nt, Artificial Sequence
  Description of Artificial Sequence: Synthetic oligonucleotide
  Antisense strand to SEQ ID NO: 1177420
ugauauaggcgcaguauau

SEQ ID NO: 1177422 - RNA, 19 nt, Artificial Sequence
  Description of Artificial Sequence: Synthetic oligonucleotide
  Sense strand starting at position 740 of SEQ ID NO: 916702
agaucacucugguuguuga

SEQ ID NO: 1177423 - RNA, 19 nt, Artificial Sequence
  Description of Artificial Sequence: Synthetic oligonucleotide
  Antisense strand to SEQ ID NO: 1177422
ucaacaaccagagugaucu

SEQ ID NO: 1177424 - RNA, 19 nt, Artificial Sequence
  Description of Artificial Sequence: Synthetic oligonucleotide
  Sense strand starting at position 741 of SEQ ID NO: 916702
gaucacucugguuguugaa

SEQ ID NO: 1177425 - RNA, 19 nt, Artificial Sequence
  Description of Artificial Sequence: Synthetic oligonucleotide
  Antisense strand to SEQ ID NO: 1177424
uucaacaaccagagugauc

SEQ ID NO: 1177426 - RNA, 19 nt, Artificial Sequence
  Description of Artificial Sequence: Synthetic oligonucleotide
  Sense strand starting at position 759 of SEQ ID NO: 916702
aggauugguagcgaaugua

SEQ ID NO: 1177427 - RNA, 19 nt, Artificial Sequence
  Description of Artificial Sequence: Synthetic oligonucleotide
  Antisense strand to SEQ ID NO: 1177426
uacauucgcuaccaauccu

SEQ ID NO: 1177428 - RNA, 19 nt, Artificial Sequence
  Description of Artificial Sequence: Synthetic oligonucleotide
  Sense strand starting at position 809 of SEQ ID NO: 916702
cgguguugaaaguaauucu

SEQ ID NO: 1177429 - RNA, 19 nt, Artificial Sequence
  Description of Artificial Sequence: Synthetic oligonucleotide
  Antisense strand to SEQ ID NO: 1177428
agaauuacuuucaacaccg

SEQ ID NO: 1177430 - RNA, 19 nt, Artificial Sequence
  Description of Artificial Sequence: Synthetic oligonucleotide
  Sense strand starting at position 879 of SEQ ID NO: 916702
ggcucagggcauuauaauu

SEQ ID NO: 1177431 - RNA, 19 nt, Artificial Sequence
  Description of Artificial Sequence: Synthetic oligonucleotide
  Antisense strand to SEQ ID NO: 1177430
aauuauaaugcccugagcc

SEQ ID NO: 1177432 - RNA, 19 nt, Artificial Sequence
  Description of Artificial Sequence: Synthetic oligonucleotide
  Sense strand starting at position 1411 of SEQ ID NO: 916702
cucgauucgcacuaauaaa

SEQ ID NO: 1177433 - RNA, 19 nt, Artificial Sequence
  Description of Artificial Sequence: Synthetic oligonucleotide
  Antisense strand to SEQ ID NO: 1177432
uuuauuagugcgaaucgag

SEQ ID NO: 1177434 - RNA, 19 nt, Artificial Sequence
  Description of Artificial Sequence: Synthetic oligonucleotide
  Sense strand starting at position 1840 of SEQ ID NO: 916702
cguaguugagccagcgaua

SEQ ID NO: 1177435 - RNA, 19 nt, Artificial Sequence
  Description of Artificial Sequence: Synthetic oligonucleotide
  Antisense strand to SEQ ID NO: 1177434
uaucgcuggcucaacuacg

SEQ ID NO: 1177436 - RNA, 19 nt, Artificial Sequence
  Description of Artificial Sequence: Synthetic oligonucleotide
  Sense strand starting at position 1852 of SEQ ID NO: 916702
agcgauaguacugagagua

SEQ ID NO: 1177437 - RNA, 19 nt, Artificial Sequence
  Description of Artificial Sequence: Synthetic oligonucleotide
  Antisense strand to SEQ ID NO: 1177436
uacucucaguacuaucgcu

SEQ ID NO: 1177438 - RNA, 19 nt, Artificial Sequence
  Description of Artificial Sequence: Synthetic oligonucleotide
  Sense strand starting at position 1875 of SEQ ID NO: 916702
aagagccuccgguaauaaa

SEQ ID NO: 1177439 - RNA, 19 nt, Artificial Sequence
  Description of Artificial Sequence: Synthetic oligonucleotide
  Antisense strand to SEQ ID NO: 1177438
uuuauuaccggaggcucuu

SEQ ID NO: 1177440 - RNA, 19 nt, Artificial Sequence
  Description of Artificial Sequence: Synthetic oligonucleotide
  Sense strand starting at position 1921 of SEQ ID NO: 916702
ggucaaacgucuccauuga

SEQ ID NO: 1177441 - RNA, 19 nt, Artificial Sequence
  Description of Artificial Sequence: Synthetic oligonucleotide
  Antisense strand to SEQ ID NO: 1177440
ucaauggagacguuugacc

SEQ ID NO: 1177442 - RNA, 19 nt, Artificial Sequence
  Description of Artificial Sequence: Synthetic oligonucleotide
  Sense strand starting at position 1969 of SEQ ID NO: 916702
acaggaauuggcgggaaca

SEQ ID NO: 1177443 - RNA, 19 nt, Artificial Sequence
  Description of Artificial Sequence: Synthetic oligonucleotide
  Antisense strand to SEQ ID NO: 1177442
uguucccgccaauuccugu

SEQ ID NO: 1177444 - RNA, 19 nt, Artificial Sequence
  Description of Artificial Sequence: Synthetic oligonucleotide
  Sense strand starting at position 2200 of SEQ ID NO: 916702
agaggaucuucuccggaaa

SEQ ID NO: 1177445 - RNA, 19 nt, Artificial Sequence
  Description of Artificial Sequence: Synthetic oligonucleotide
  Antisense strand to SEQ ID NO: 1177444
uuuccggagaagauccucu

SEQ ID NO: 1177446 - RNA, 19 nt, Artificial Sequence
  Description of Artificial Sequence: Synthetic oligonucleotide
  Sense strand starting at position 2201 of SEQ ID NO: 916702
gaggaucuucuccggaaau

SEQ ID NO: 1177447 - RNA, 19 nt, Artificial Sequence
  Description of Artificial Sequence: Synthetic oligonucleotide
  Antisense strand to SEQ ID NO: 1177446
auuuccggagaagauccuc

SEQ ID NO: 1177448 - RNA, 19 nt, Artificial Sequence
  Description of Artificial Sequence: Synthetic oligonucleotide
  Sense strand starting at position 2203 of SEQ ID NO: 916702
ggaucuucuccggaaaugu

SEQ ID NO: 1177449 - RNA, 19 nt, Artificial Sequence
  Description of Artificial Sequence: Synthetic oligonucleotide
  Antisense strand to SEQ ID NO: 1177448
acauuuccggagaagaucc

SEQ ID NO: 1177450 - RNA, 19 nt, Artificial Sequence
  Description of Artificial Sequence: Synthetic oligonucleotide
  Sense strand starting at position 2218 of SEQ ID NO: 916702
augugagaccuauagcaua

SEQ ID NO: 1177451 - RNA, 19 nt, Artificial Sequence
  Description of Artificial Sequence: Synthetic oligonucleotide
  Antisense strand to SEQ ID NO: 1177450
uaugcuauaggucucacau

SEQ ID NO: 1177452 - RNA, 19 nt, Artificial Sequence
  Description of Artificial Sequence: Synthetic oligonucleotide
  Sense strand starting at position 2239 of SEQ ID NO: 916702
gauuuagguuauuaagaug

SEQ ID NO: 1177453 - RNA, 19 nt, Artificial Sequence
  Description of Artificial Sequence: Synthetic oligonucleotide
  Antisense strand to SEQ ID NO: 1177452
caucuuaauaaccuaaauc

SEQ ID NO: 1177454 - RNA, 19 nt, Artificial Sequence
  Description of Artificial Sequence: Synthetic oligonucleotide
  Sense strand starting at position 2244 of SEQ ID NO: 916702
agguuauuaagaugaagua

SEQ ID NO: 1177455 - RNA, 19 nt, Artificial Sequence
  Description of Artificial Sequence: Synthetic oligonucleotide
  Antisense strand to SEQ ID NO: 1177454
uacuucaucuuaauaaccu

SEQ ID NO: 1177456 - RNA, 19 nt, Artificial Sequence
  Description of Artificial Sequence: Synthetic oligonucleotide
  Sense strand starting at position 2627 of SEQ ID NO: 916702
ggccgacaccaguaucuuu

SEQ ID NO: 1177457 - RNA, 19 nt, Artificial Sequence
  Description of Artificial Sequence: Synthetic oligonucleotide
  Antisense strand to SEQ ID NO: 1177456
aaagauacuggugucggcc

SEQ ID NO: 1177458 - RNA, 19 nt, Artificial Sequence
  Description of Artificial Sequence: Synthetic oligonucleotide
  Sense strand starting at position 2761 of SEQ ID NO: 916702
ugagaucucugucuacaca

SEQ ID NO: 1177459 - RNA, 19 nt, Artificial Sequence
  Description of Artificial Sequence: Synthetic oligonucleotide
  Antisense strand to SEQ ID NO: 1177458
uguguagacagagaucuca

SEQ ID NO: 1177460 - RNA, 19 nt, Artificial Sequence
  Description of Artificial Sequence: Synthetic oligonucleotide
  Sense strand starting at position 3169 of SEQ ID NO: 916702
aagggaagccgucaaggua

SEQ ID NO: 1177461 - RNA, 19 nt, Artificial Sequence
  Description of Artificial Sequence: Synthetic oligonucleotide
  Antisense strand to SEQ ID NO: 1177460
uaccuugacggcuucccuu

SEQ ID NO: 1177462 - RNA, 19 nt, Artificial Sequence
  Description of Artificial Sequence: Synthetic oligonucleotide
  Sense strand starting at position 3240 of SEQ ID NO: 916702
aguaggaugcgguauguga

SEQ ID NO: 1177463 - RNA, 19 nt, Artificial Sequence
  Description of Artificial Sequence: Synthetic oligonucleotide
  Antisense strand to SEQ ID NO: 1177462
ucacauaccgcauccuacu

SEQ ID NO: 1177464 - RNA, 19 nt, Artificial Sequence
  Description of Artificial Sequence: Synthetic oligonucleotide
  Sense strand starting at position 3401 of SEQ ID NO: 916702
gcaguuugacuuuauacaa

SEQ ID NO: 1177465 - RNA, 19 nt, Artificial Sequence
  Description of Artificial Sequence: Synthetic oligonucleotide
  Antisense strand to SEQ ID NO: 1177464
uuguauaaagucaaacugc

SEQ ID NO: 1177466 - RNA, 19 nt, Artificial Sequence
  Description of Artificial Sequence: Synthetic oligonucleotide
  Sense strand starting at position 3495 of SEQ ID NO: 916702
uagauugugggucagaguu

SEQ ID NO: 1177467 - RNA, 19 nt, Artificial Sequence
  Description of Artificial Sequence: Synthetic oligonucleotide
  Antisense strand to SEQ ID NO: 1177466
aacucugacccacaaucua

SEQ ID NO: 1177468 - RNA, 19 nt, Artificial Sequence
  Description of Artificial Sequence: Synthetic oligonucleotide
  Sense strand starting at position 3604 of SEQ ID NO: 916702
ugcagaaucauggagagcu

SEQ ID NO: 1177469 - RNA, 19 nt, Artificial Sequence
  Description of Artificial Sequence: Synthetic oligonucleotide
  Antisense strand to SEQ ID NO: 1177468
agcucuccaugauucugca

SEQ ID NO: 1177470 - RNA, 19 nt, Artificial Sequence
  Description of Artificial Sequence: Synthetic oligonucleotide
  Sense strand starting at position 3612 of SEQ ID NO: 916702
cauggagagcuuuacaagu

SEQ ID NO: 1177471 - RNA, 19 nt, Artificial Sequence
  Description of Artificial Sequence: Synthetic oligonucleotide
  Antisense strand to SEQ ID NO: 1177470
acuuguaaagcucuccaug

SEQ ID NO: 1177472 - RNA, 19 nt, Artificial Sequence
  Description of Artificial Sequence: Synthetic oligonucleotide
  Sense strand starting at position 3646 of SEQ ID NO: 916702
cugcuauugauguggagau

SEQ ID NO: 1177473 - RNA, 19 nt, Artificial Sequence
  Description of Artificial Sequence: Synthetic oligonucleotide
  Antisense strand to SEQ ID NO: 1177472
aucuccacaucaauagcag

SEQ ID NO: 1177474 - RNA, 19 nt, Artificial Sequence
  Description of Artificial Sequence: Synthetic oligonucleotide
  Sense strand starting at position 3648 of SEQ ID NO: 916702
gcuauugauguggagaucu

SEQ ID NO: 1177475 - RNA, 19 nt, Artificial Sequence
  Description of Artificial Sequence: Synthetic oligonucleotide
  Antisense strand to SEQ ID NO: 1177474
agaucuccacaucaauagc

SEQ ID NO: 1177476 - RNA, 19 nt, Artificial Sequence
  Description of Artificial Sequence: Synthetic oligonucleotide
  Sense strand starting at position 3674 of SEQ ID NO: 916702
acucuuacuguguaaugau

SEQ ID NO: 1177477 - RNA, 19 nt, Artificial Sequence
  Description of Artificial Sequence: Synthetic oligonucleotide
  Antisense strand to SEQ ID NO: 1177476
aucauuacacaguaagagu

SEQ ID NO: 1177478 - RNA, 19 nt, Artificial Sequence
  Description of Artificial Sequence: Synthetic oligonucleotide
  Sense strand starting at position 3698 of SEQ ID NO: 916702
auggcaauugugggcuaga

SEQ ID NO: 1177479 - RNA, 19 nt, Artificial Sequence
  Description of Artificial Sequence: Synthetic oligonucleotide
  Antisense strand to SEQ ID NO: 1177478
ucuagcccacaauugccau

SEQ ID NO: 1177480 - RNA, 19 nt, Artificial Sequence
  Description of Artificial Sequence: Synthetic oligonucleotide
  Sense strand starting at position 3718 of SEQ ID NO: 916702
ugggcagucacaugaauaa

SEQ ID NO: 1177481 - RNA, 19 nt, Artificial Sequence
  Description of Artificial Sequence: Synthetic oligonucleotide
  Antisense strand to SEQ ID NO: 1177480
uuauucaugugacugccca

SEQ ID NO: 1177482 - RNA, 19 nt, Artificial Sequence
  Description of Artificial Sequence: Synthetic oligonucleotide
  Sense strand starting at position 275 of SEQ ID NO: 916703
augguuugaguccgggaga

SEQ ID NO: 1177483 - RNA, 19 nt, Artificial Sequence
  Description of Artificial Sequence: Synthetic oligonucleotide
  Antisense strand to SEQ ID NO: 1177482
ucucccggacucaaaccau

SEQ ID NO: 1177484 - RNA, 19 nt, Artificial Sequence
  Description of Artificial Sequence: Synthetic oligonucleotide
  Sense strand starting at position 278 of SEQ ID NO: 916703
guuugaguccgggagacga

SEQ ID NO: 1177485 - RNA, 19 nt, Artificial Sequence
  Description of Artificial Sequence: Synthetic oligonucleotide
  Antisense strand to SEQ ID NO: 1177484
ucgucucccggacucaaac

SEQ ID NO: 1177486 - RNA, 19 nt, Artificial Sequence
  Description of Artificial Sequence: Synthetic oligonucleotide
  Sense strand starting at position 748 of SEQ ID NO: 916703
gcauaaagauugcuugaac

SEQ ID NO: 1177487 - RNA, 19 nt, Artificial Sequence
  Description of Artificial Sequence: Synthetic oligonucleotide
  Antisense strand to SEQ ID NO: 1177486
guucaagcaaucuuuaugc

SEQ ID NO: 1177488 - RNA, 19 nt, Artificial Sequence
  Description of Artificial Sequence: Synthetic oligonucleotide
  Sense strand starting at position 983 of SEQ ID NO: 916703
cggcuaauuagugagacca

SEQ ID NO: 1177489 - RNA, 19 nt, Artificial Sequence
  Description of Artificial Sequence: Synthetic oligonucleotide
  Antisense strand to SEQ ID NO: 1177488
uggucucacuaauuagccg

SEQ ID NO: 1177490 - RNA, 19 nt, Artificial Sequence
  Description of Artificial Sequence: Synthetic oligonucleotide
  Sense strand starting at position 1034 of SEQ ID NO: 916703
aaguguugggcagaacuaa

SEQ ID NO: 1177491 - RNA, 19 nt, Artificial Sequence
  Description of Artificial Sequence: Synthetic oligonucleotide
  Antisense strand to SEQ ID NO: 1177490
uuaguucugcccaacacuu

SEQ ID NO: 1177492 - RNA, 19 nt, Artificial Sequence
  Description of Artificial Sequence: Synthetic oligonucleotide
  Sense strand starting at position 1179 of SEQ ID NO: 916703
gggaauuugucucaaagca

SEQ ID NO: 1177493 - RNA, 19 nt, Artificial Sequence
  Description of Artificial Sequence: Synthetic oligonucleotide
  Antisense strand to SEQ ID NO: 1177492
ugcuuugagacaaauuccc

SEQ ID NO: 1177494 - RNA, 19 nt, Artificial Sequence
  Description of Artificial Sequence: Synthetic oligonucleotide
  Sense strand starting at position 1249 of SEQ ID NO: 916703
uuagcucgacucugaauua

SEQ ID NO: 1177495 - RNA, 19 nt, Artificial Sequence
  Description of Artificial Sequence: Synthetic oligonucleotide
  Antisense strand to SEQ ID NO: 1177494
uaauucagagucgagcuaa

SEQ ID NO: 1177496 - RNA, 19 nt, Artificial Sequence
  Description of Artificial Sequence: Synthetic oligonucleotide
  Sense strand starting at position 1292 of SEQ ID NO: 916703
agagcugcuuucuccuuaa

SEQ ID NO: 1177497 - RNA, 19 nt, Artificial Sequence
  Description of Artificial Sequence: Synthetic oligonucleotide
  Antisense strand to SEQ ID NO: 1177496
uuaaggagaaagcagcucu

SEQ ID NO: 1177498 - RNA, 19 nt, Artificial Sequence
  Description of Artificial Sequence: Synthetic oligonucleotide
  Sense strand starting at position 1342 of SEQ ID NO: 916703
cagggugacuuucucauau

SEQ ID NO: 1177499 - RNA, 19 nt, Artificial Sequence
  Description of Artificial Sequence: Synthetic oligonucleotide
  Antisense strand to SEQ ID NO: 1177498
auaugagaaagucacccug

SEQ ID NO: 1177500 - RNA, 19 nt, Artificial Sequence
  Description of Artificial Sequence: Synthetic oligonucleotide
  Sense strand starting at position 1355 of SEQ ID NO: 916703
ucauauugguaauuagaca

SEQ ID NO: 1177501 - RNA, 19 nt, Artificial Sequence
  Description of Artificial Sequence: Synthetic oligonucleotide
  Antisense strand to SEQ ID NO: 1177500
ugucuaauuaccaauauga

SEQ ID NO: 1177502 - RNA, 19 nt, Artificial Sequence
  Description of Artificial Sequence: Synthetic oligonucleotide
  Sense strand starting at position 1422 of SEQ ID NO: 916703
aagugcaccggguaaugua

SEQ ID NO: 1177503 - RNA, 19 nt, Artificial Sequence
  Description of Artificial Sequence: Synthetic oligonucleotide
  Antisense strand to SEQ ID NO: 1177502
uacauuacccggugcacuu

SEQ ID NO: 1177504 - RNA, 19 nt, Artificial Sequence
  Description of Artificial Sequence: Synthetic oligonucleotide
  Sense strand starting at position 1495 of SEQ ID NO: 916703
gaggguuccucuccucaac

SEQ ID NO: 1177505 - RNA, 19 nt, Artificial Sequence
  Description of Artificial Sequence: Synthetic oligonucleotide
  Antisense strand to SEQ ID NO: 1177504
guugaggagaggaacccuc

SEQ ID NO: 1177506 - RNA, 19 nt, Artificial Sequence
  Description of Artificial Sequence: Synthetic oligonucleotide
  Sense strand starting at position 1497 of SEQ ID NO: 916703
ggguuccucuccucaacau

SEQ ID NO: 1177507 - RNA, 19 nt, Artificial Sequence
  Description of Artificial Sequence: Synthetic oligonucleotide
  Antisense strand to SEQ ID NO: 1177506
auguugaggagaggaaccc

SEQ ID NO: 1177508 - RNA, 19 nt, Artificial Sequence
  Description of Artificial Sequence: Synthetic oligonucleotide
  Sense strand starting at position 2255 of SEQ ID NO: 916703
augcgcugggcugaauaau

SEQ ID NO: 1177509 - RNA, 19 nt, Artificial Sequence
  Description of Artificial Sequence: Synthetic oligonucleotide
  Antisense strand to SEQ ID NO: 1177508
auuauucagcccagcgcau

SEQ ID NO: 1177510 - RNA, 19 nt, Artificial Sequence
  Description of Artificial Sequence: Synthetic oligonucleotide
  Sense strand starting at position 2264 of SEQ ID NO: 916703
gcugaauaaugccauuuag

SEQ ID NO: 1177511 - RNA, 19 nt, Artificial Sequence
  Description of Artificial Sequence: Synthetic oligonucleotide
  Antisense strand to SEQ ID NO: 1177510
cuaaauggcauuauucagc

SEQ ID NO: 1177512 - RNA, 19 nt, Artificial Sequence
  Description of Artificial Sequence: Synthetic oligonucleotide
  Sense strand starting at position 2293 of SEQ ID NO: 916703
ucacuuauaguugauucua

SEQ ID NO: 1177513 - RNA, 19 nt, Artificial Sequence
  Description of Artificial Sequence: Synthetic oligonucleotide
  Antisense strand to SEQ ID NO: 1177512
uagaaucaacuauaaguga

SEQ ID NO: 1177514 - RNA, 19 nt, Artificial Sequence
  Description of Artificial Sequence: Synthetic oligonucleotide
  Sense strand starting at position 2295 of SEQ ID NO: 916703
acuuauaguugauucuaca

SEQ ID NO: 1177515 - RNA, 19 nt, Artificial Sequence
  Description of Artificial Sequence: Synthetic oligonucleotide
  Antisense strand to SEQ ID NO: 1177514
uguagaaucaacuauaagu

SEQ ID NO: 1177516 - RNA, 19 nt, Artificial Sequence
  Description of Artificial Sequence: Synthetic oligonucleotide
  Sense strand starting at position 2389 of SEQ ID NO: 916703
cguguucucacgcuuuaca

SEQ ID NO: 1177517 - RNA, 19 nt, Artificial Sequence
  Description of Artificial Sequence: Synthetic oligonucleotide
  Antisense strand to SEQ ID NO: 1177516
uguaaagcgugagaacacg

SEQ ID NO: 1177518 - RNA, 19 nt, Artificial Sequence
  Description of Artificial Sequence: Synthetic oligonucleotide
  Sense strand starting at position 2500 of SEQ ID NO: 916703
ggcagucuugcagguauuu

SEQ ID NO: 1177519 - RNA, 19 nt, Artificial Sequence
  Description of Artificial Sequence: Synthetic oligonucleotide
  Antisense strand to SEQ ID NO: 1177518
aaauaccugcaagacugcc

SEQ ID NO: 1177520 - RNA, 19 nt, Artificial Sequence
  Description of Artificial Sequence: Synthetic oligonucleotide
  Sense strand starting at position 2544 of SEQ ID NO: 916703
cuggaaauuucuuaugucu

SEQ ID NO: 1177521 - RNA, 19 nt, Artificial Sequence
  Description of Artificial Sequence: Synthetic oligonucleotide
  Antisense strand to SEQ ID NO: 1177520
agacauaagaaauuuccag

SEQ ID NO: 1177522 - RNA, 19 nt, Artificial Sequence
  Description of Artificial Sequence: Synthetic oligonucleotide
  Sense strand starting at position 2546 of SEQ ID NO: 916703
ggaaauuucuuaugucuag

SEQ ID NO: 1177523 - RNA, 19 nt, Artificial Sequence
  Description of Artificial Sequence: Synthetic oligonucleotide
  Antisense strand to SEQ ID NO: 1177522
cuagacauaagaaauuucc

SEQ ID NO: 1177524 - RNA, 19 nt, Artificial Sequence
  Description of Artificial Sequence: Synthetic oligonucleotide
  Sense strand starting at position 2637 of SEQ ID NO: 916703
uuugcaagauaucuuguaa

SEQ ID NO: 1177525 - RNA, 19 nt, Artificial Sequence
  Description of Artificial Sequence: Synthetic oligonucleotide
  Antisense strand to SEQ ID NO: 1177524
uuacaagauaucuugcaaa

SEQ ID NO: 1177526 - RNA, 19 nt, Artificial Sequence
  Description of Artificial Sequence: Synthetic oligonucleotide
  Sense strand starting at position 2650 of SEQ ID NO: 916703
uuguaaucacuucggaaac

SEQ ID NO: 1177527 - RNA, 19 nt, Artificial Sequence
  Description of Artificial Sequence: Synthetic oligonucleotide
  Antisense strand to SEQ ID NO: 1177526
guuuccgaagugauuacaa

SEQ ID NO: 1177528 - RNA, 19 nt, Artificial Sequence
  Description of Artificial Sequence: Synthetic oligonucleotide
  Sense strand starting at position 2661 of SEQ ID NO: 916703
ucggaaacauccuucugca

SEQ ID NO: 1177529 - RNA, 19 nt, Artificial Sequence
  Description of Artificial Sequence: Synthetic oligonucleotide
  Antisense strand to SEQ ID NO: 1177528
ugcagaaggauguuuccga

SEQ ID NO: 1177530 - RNA, 19 nt, Artificial Sequence
  Description of Artificial Sequence: Synthetic oligonucleotide
  Sense strand starting at position 2683 of SEQ ID NO: 916703
gaugcauuagcguuuguca

SEQ ID NO: 1177531 - RNA, 19 nt, Artificial Sequence
  Description of Artificial Sequence: Synthetic oligonucleotide
  Antisense strand to SEQ ID NO: 1177530
ugacaaacgcuaaugcauc

SEQ ID NO: 1177532 - RNA, 19 nt, Artificial Sequence
  Description of Artificial Sequence: Synthetic oligonucleotide
  Sense strand starting at position 2684 of SEQ ID NO: 916703
augcauuagcguuugucau

SEQ ID NO: 1177533 - RNA, 19 nt, Artificial Sequence
  Description of Artificial Sequence: Synthetic oligonucleotide
  Antisense strand to SEQ ID NO: 1177532
augacaaacgcuaaugcau

SEQ ID NO: 1177534 - RNA, 19 nt, Artificial Sequence
  Description of Artificial Sequence: Synthetic oligonucleotide
  Sense strand starting at position 2686 of SEQ ID NO: 916703
gcauuagcguuugucauuu

SEQ ID NO: 1177535 - RNA, 19 nt, Artificial Sequence
  Description of Artificial Sequence: Synthetic oligonucleotide
  Antisense strand to SEQ ID NO: 1177534
aaaugacaaacgcuaaugc

SEQ ID NO: 1177536 - RNA, 19 nt, Artificial Sequence
  Description of Artificial Sequence: Synthetic oligonucleotide
  Sense strand starting at position 2690 of SEQ ID NO: 916703
uagcguuugucauuuacuc

SEQ ID NO: 1177537 - RNA, 19 nt, Artificial Sequence
  Description of Artificial Sequence: Synthetic oligonucleotide
  Antisense strand to SEQ ID NO: 1177536
gaguaaaugacaaacgcua

SEQ ID NO: 1177538 - RNA, 19 nt, Artificial Sequence
  Description of Artificial Sequence: Synthetic oligonucleotide
  Sense strand starting at position 2764 of SEQ ID NO: 916703
uucucauugucagucauug

SEQ ID NO: 1177539 - RNA, 19 nt, Artificial Sequence
  Description of Artificial Sequence: Synthetic oligonucleotide
  Antisense strand to SEQ ID NO: 1177538
caaugacugacaaugagaa

SEQ ID NO: 1177540 - RNA, 19 nt, Artificial Sequence
  Description of Artificial Sequence: Synthetic oligonucleotide
  Sense strand starting at position 2768 of SEQ ID NO: 916703
cauugucagucauugucau

SEQ ID NO: 1177541 - RNA, 19 nt, Artificial Sequence
  Description of Artificial Sequence: Synthetic oligonucleotide
  Antisense strand to SEQ ID NO: 1177540
augacaaugacugacaaug

SEQ ID NO: 1177542 - RNA, 19 nt, Artificial Sequence
  Description of Artificial Sequence: Synthetic oligonucleotide
  Sense strand starting at position 2769 of SEQ ID NO: 916703
auugucagucauugucaua

SEQ ID NO: 1177543 - RNA, 19 nt, Artificial Sequence
  Description of Artificial Sequence: Synthetic oligonucleotide
  Antisense strand to SEQ ID NO: 1177542
uaugacaaugacugacaau

SEQ ID NO: 1177544 - RNA, 19 nt, Artificial Sequence
  Description of Artificial Sequence: Synthetic oligonucleotide
  Sense strand starting at position 3015 of SEQ ID NO: 916703
uaggaaacuugugcagaaa

SEQ ID NO: 1177545 - RNA, 19 nt, Artificial Sequence
  Description of Artificial Sequence: Synthetic oligonucleotide
  Antisense strand to SEQ ID NO: 1177544
uuucugcacaaguuuccua

SEQ ID NO: 1177546 - RNA, 19 nt, Artificial Sequence
  Description of Artificial Sequence: Synthetic oligonucleotide
  Sense strand starting at position 3170 of SEQ ID NO: 916703
aucuuacacuuggugaaau

SEQ ID NO: 1177547 - RNA, 19 nt, Artificial Sequence
  Description of Artificial Sequence: Synthetic oligonucleotide
  Antisense strand to SEQ ID NO: 1177546
auuucaccaaguguaagau

SEQ ID NO: 1177548 - RNA, 19 nt, Artificial Sequence
  Description of Artificial Sequence: Synthetic oligonucleotide
  Sense strand starting at position 3218 of SEQ ID NO: 916703
aguuguucaguaggagaau

SEQ ID NO: 1177549 - RNA, 19 nt, Artificial Sequence
  Description of Artificial Sequence: Synthetic oligonucleotide
  Antisense strand to SEQ ID NO: 1177548
auucuccuacugaacaacu

SEQ ID NO: 1177550 - RNA, 19 nt, Artificial Sequence
  Description of Artificial Sequence: Synthetic oligonucleotide
  Sense strand starting at position 3406 of SEQ ID NO: 916703
agauucuggcuuuaccauu

SEQ ID NO: 1177551 - RNA, 19 nt, Artificial Sequence
  Description of Artificial Sequence: Synthetic oligonucleotide
  Antisense strand to SEQ ID NO: 1177550
aaugguaaagccagaaucu

SEQ ID NO: 1177552 - RNA, 19 nt, Artificial Sequence
  Description of Artificial Sequence: Synthetic oligonucleotide
  Sense strand starting at position 3584 of SEQ ID NO: 916703
gcacuauuaggcuagcaaa

SEQ ID NO: 1177553 - RNA, 19 nt, Artificial Sequence
  Description of Artificial Sequence: Synthetic oligonucleotide
  Antisense strand to SEQ ID NO: 1177552
uuugcuagccuaauagugc

SEQ ID NO: 1177554 - RNA, 19 nt, Artificial Sequence
  Description of Artificial Sequence: Synthetic oligonucleotide
  Sense strand starting at position 3606 of SEQ ID NO: 916703
aaaguucuggaaggguaua

SEQ ID NO: 1177555 - RNA, 19 nt, Artificial Sequence
  Description of Artificial Sequence: Synthetic oligonucleotide
  Antisense strand to SEQ ID NO: 1177554
uauacccuuccagaacuuu

SEQ ID NO: 1177556 - RNA, 19 nt, Artificial Sequence
  Description of Artificial Sequence: Synthetic oligonucleotide
  Sense strand starting at position 3839 of SEQ ID NO: 916703
gcaauaauauagcuaggua

SEQ ID NO: 1177557 - RNA, 19 nt, Artificial Sequence
  Description of Artificial Sequence: Synthetic oligonucleotide
  Antisense strand to SEQ ID NO: 1177556
uaccuagcuauauuauugc

SEQ ID NO: 1177558 - RNA, 19 nt, Artificial Sequence
  Description of Artificial Sequence: Synthetic oligonucleotide
  Sense strand starting at position 3934 of SEQ ID NO: 916703
ccaggagggucuuccugaa

SEQ ID NO: 1177559 - RNA, 19 nt, Artificial Sequence
  Description of Artificial Sequence: Synthetic oligonucleotide
  Antisense strand to SEQ ID NO: 1177558
uucaggaagacccuccugg

SEQ ID NO: 1177560 - RNA, 19 nt, Artificial Sequence
  Description of Artificial Sequence: Synthetic oligonucleotide
  Sense strand starting at position 3959 of SEQ ID NO: 916703
gacugagaauuugaaugua

SEQ ID NO: 1177561 - RNA, 19 nt, Artificial Sequence
  Description of Artificial Sequence: Synthetic oligonucleotide
  Antisense strand to SEQ ID NO: 1177560
uacauucaaauucucaguc

SEQ ID NO: 1177562 - RNA, 19 nt, Artificial Sequence
  Description of Artificial Sequence: Synthetic oligonucleotide
  Sense strand starting at position 317 of SEQ ID NO: 916704
uccaguuaggcugaacauu

SEQ ID NO: 1177563 - RNA, 19 nt, Artificial Sequence
  Description of Artificial Sequence: Synthetic oligonucleotide
  Antisense strand to SEQ ID NO: 1177562
aauguucagccuaacugga

SEQ ID NO: 1177564 - RNA, 19 nt, Artificial Sequence
  Description of Artificial Sequence: Synthetic oligonucleotide
  Sense strand starting at position 538 of SEQ ID NO: 916704
uuuguuucugucgagacag

SEQ ID NO: 1177565 - RNA, 19 nt, Artificial Sequence
  Description of Artificial Sequence: Synthetic oligonucleotide
  Antisense strand to SEQ ID NO: 1177564
cugucucgacagaaacaaa

SEQ ID NO: 1177566 - RNA, 19 nt, Artificial Sequence
  Description of Artificial Sequence: Synthetic oligonucleotide
  Sense strand starting at position 720 of SEQ ID NO: 916704
aaguguaaaggcuaaauua

SEQ ID NO: 1177567 - RNA, 19 nt, Artificial Sequence
  Description of Artificial Sequence: Synthetic oligonucleotide
  Antisense strand to SEQ ID NO: 1177566
uaauuuagccuuuacacuu

SEQ ID NO: 1177568 - RNA, 19 nt, Artificial Sequence
  Description of Artificial Sequence: Synthetic oligonucleotide
  Sense strand starting at position 784 of SEQ ID NO: 916704
guaaguagaauaugacaug

SEQ ID NO: 1177569 - RNA, 19 nt, Artificial Sequence
  Description of Artificial Sequence: Synthetic oligonucleotide
  Antisense strand to SEQ ID NO: 1177568
caugucauauucuacuuac

SEQ ID NO: 1177570 - RNA, 19 nt, Artificial Sequence
  Description of Artificial Sequence: Synthetic oligonucleotide
  Sense strand starting at position 839 of SEQ ID NO: 916704
uguuuaagauuauccugau

SEQ ID NO: 1177571 - RNA, 19 nt, Artificial Sequence
  Description of Artificial Sequence: Synthetic oligonucleotide
  Antisense strand to SEQ ID NO: 1177570
aucaggauaaucuuaaaca

SEQ ID NO: 1177572 - RNA, 19 nt, Artificial Sequence
  Description of Artificial Sequence: Synthetic oligonucleotide
  Sense strand starting at position 840 of SEQ ID NO: 916704
guuuaagauuauccugauu

SEQ ID NO: 1177573 - RNA, 19 nt, Artificial Sequence
  Description of Artificial Sequence: Synthetic oligonucleotide
  Antisense strand to SEQ ID NO: 1177572
aaucaggauaaucuuaaac

SEQ ID NO: 1177574 - RNA, 19 nt, Artificial Sequence
  Description of Artificial Sequence: Synthetic oligonucleotide
  Sense strand starting at position 845 of SEQ ID NO: 916704
agauuauccugauuaguca

SEQ ID NO: 1177575 - RNA, 19 nt, Artificial Sequence
  Description of Artificial Sequence: Synthetic oligonucleotide
  Antisense strand to SEQ ID NO: 1177574
ugacuaaucaggauaaucu

SEQ ID NO: 1177576 - RNA, 19 nt, Artificial Sequence
  Description of Artificial Sequence: Synthetic oligonucleotide
  Sense strand starting at position 848 of SEQ ID NO: 916704
uuauccugauuagucagaa

SEQ ID NO: 1177577 - RNA, 19 nt, Artificial Sequence
  Description of Artificial Sequence: Synthetic oligonucleotide
  Antisense strand to SEQ ID NO: 1177576
uucugacuaaucaggauaa

SEQ ID NO: 1177578 - RNA, 19 nt, Artificial Sequence
  Description of Artificial Sequence: Synthetic oligonucleotide
  Sense strand starting at position 962 of SEQ ID NO: 916704
agagaaacgguguggcaaa

SEQ ID NO: 1177579 - RNA, 19 nt, Artificial Sequence
  Description of Artificial Sequence: Synthetic oligonucleotide
  Antisense strand to SEQ ID NO: 1177578
uuugccacaccguuucucu

SEQ ID NO: 1177580 - RNA, 19 nt, Artificial Sequence
  Description of Artificial Sequence: Synthetic oligonucleotide
  Sense strand starting at position 980 of SEQ ID NO: 916704
agaauuacucugggcaugu

SEQ ID NO: 1177581 - RNA, 19 nt, Artificial Sequence
  Description of Artificial Sequence: Synthetic oligonucleotide
  Antisense strand to SEQ ID NO: 1177580
acaugcccagaguaauucu

SEQ ID NO: 1177582 - RNA, 19 nt, Artificial Sequence
  Description of Artificial Sequence: Synthetic oligonucleotide
  Sense strand starting at position 981 of SEQ ID NO: 916704
gaauuacucugggcaugua

SEQ ID NO: 1177583 - RNA, 19 nt, Artificial Sequence
  Description of Artificial Sequence: Synthetic oligonucleotide
  Antisense strand to SEQ ID NO: 1177582
uacaugcccagaguaauuc

SEQ ID NO: 1177584 - RNA, 19 nt, Artificial Sequence
  Description of Artificial Sequence: Synthetic oligonucleotide
  Sense strand starting at position 982 of SEQ ID NO: 916704
aauuacucugggcauguaa

SEQ ID NO: 1177585 - RNA, 19 nt, Artificial Sequence
  Description of Artificial Sequence: Synthetic oligonucleotide
  Antisense strand to SEQ ID NO: 1177584
uuacaugcccagaguaauu

SEQ ID NO: 1177586 - RNA, 19 nt, Artificial Sequence
  Description of Artificial Sequence: Synthetic oligonucleotide
  Sense strand starting at position 991 of SEQ ID NO: 916704
gggcauguaauccaaagca

SEQ ID NO: 1177587 - RNA, 19 nt, Artificial Sequence
  Description of Artificial Sequence: Synthetic oligonucleotide
  Antisense strand to SEQ ID NO: 1177586
ugcuuuggauuacaugccc

SEQ ID NO: 1177588 - RNA, 19 nt, Artificial Sequence
  Description of Artificial Sequence: Synthetic oligonucleotide
  Sense strand starting at position 1067 of SEQ ID NO: 916704
aagaguuacucugccugaa

SEQ ID NO: 1177589 - RNA, 19 nt, Artificial Sequence
  Description of Artificial Sequence: Synthetic oligonucleotide
  Antisense strand to SEQ ID NO: 1177588
uucaggcagaguaacucuu

SEQ ID NO: 1177590 - RNA, 19 nt, Artificial Sequence
  Description of Artificial Sequence: Synthetic oligonucleotide
  Sense strand starting at position 1069 of SEQ ID NO: 916704
gaguuacucugccugaaag

SEQ ID NO: 1177591 - RNA, 19 nt, Artificial Sequence
  Description of Artificial Sequence: Synthetic oligonucleotide
  Antisense strand to SEQ ID NO: 1177590
cuuucaggcagaguaacuc

SEQ ID NO: 1177592 - RNA, 19 nt, Artificial Sequence
  Description of Artificial Sequence: Synthetic oligonucleotide
  Sense strand starting at position 1070 of SEQ ID NO: 916704
aguuacucugccugaaaga

SEQ ID NO: 1177593 - RNA, 19 nt, Artificial Sequence
  Description of Artificial Sequence: Synthetic oligonucleotide
  Antisense strand to SEQ ID NO: 1177592
ucuuucaggcagaguaacu

SEQ ID NO: 1177594 - RNA, 19 nt, Artificial Sequence
  Description of Artificial Sequence: Synthetic oligonucleotide
  Sense strand starting at position 1071 of SEQ ID NO: 916704
guuacucugccugaaagaa

SEQ ID NO: 1177595 - RNA, 19 nt, Artificial Sequence
  Description of Artificial Sequence: Synthetic oligonucleotide
  Antisense strand to SEQ ID NO: 1177594
uucuuucaggcagaguaac

SEQ ID NO: 1177596 - RNA, 19 nt, Artificial Sequence
  Description of Artificial Sequence: Synthetic oligonucleotide
  Sense strand starting at position 1330 of SEQ ID NO: 916704
ggccucuaacacugcaaga

SEQ ID NO: 1177597 - RNA, 19 nt, Artificial Sequence
  Description of Artificial Sequence: Synthetic oligonucleotide
  Antisense strand to SEQ ID NO: 1177596
ucuugcaguguuagaggcc

SEQ ID NO: 1177598 - RNA, 19 nt, Artificial Sequence
  Description of Artificial Sequence: Synthetic oligonucleotide
  Sense strand starting at position 1378 of SEQ ID NO: 916704
ggucuuauuaagggaaugu

SEQ ID NO: 1177599 - RNA, 19 nt, Artificial Sequence
  Description of Artificial Sequence: Synthetic oligonucleotide
  Antisense strand to SEQ ID NO: 1177598
acauucccuuaauaagacc

SEQ ID NO: 1177600 - RNA, 19 nt, Artificial Sequence
  Description of Artificial Sequence: Synthetic oligonucleotide
  Sense strand starting at position 1379 of SEQ ID NO: 916704
gucuuauuaagggaaugug

SEQ ID NO: 1177601 - RNA, 19 nt, Artificial Sequence
  Description of Artificial Sequence: Synthetic oligonucleotide
  Antisense strand to SEQ ID NO: 1177600
cacauucccuuaauaagac

SEQ ID NO: 1177602 - RNA, 19 nt, Artificial Sequence
  Description of Artificial Sequence: Synthetic oligonucleotide
  Sense strand starting at position 1382 of SEQ ID NO: 916704
uuauuaagggaaugugacu

SEQ ID NO: 1177603 - RNA, 19 nt, Artificial Sequence
  Description of Artificial Sequence: Synthetic oligonucleotide
  Antisense strand to SEQ ID NO: 1177602
agucacauucccuuaauaa

SEQ ID NO: 1177604 - RNA, 19 nt, Artificial Sequence
  Description of Artificial Sequence: Synthetic oligonucleotide
  Sense strand starting at position 1915 of SEQ ID NO: 916704
guuuccucgcuuuaggaaa

SEQ ID NO: 1177605 - RNA, 19 nt, Artificial Sequence
  Description of Artificial Sequence: Synthetic oligonucleotide
  Antisense strand to SEQ ID NO: 1177604
uuuccuaaagcgaggaaac

SEQ ID NO: 1177606 - RNA, 19 nt, Artificial Sequence
  Description of Artificial Sequence: Synthetic oligonucleotide
  Sense strand starting at position 2118 of SEQ ID NO: 916704
gacggagccgcuuguauuu

SEQ ID NO: 1177607 - RNA, 19 nt, Artificial Sequence
  Description of Artificial Sequence: Synthetic oligonucleotide
  Antisense strand to SEQ ID NO: 1177606
aaauacaagcggcuccguc

SEQ ID NO: 1177608 - RNA, 19 nt, Artificial Sequence
  Description of Artificial Sequence: Synthetic oligonucleotide
  Sense strand starting at position 2205 of SEQ ID NO: 916704
ugccucucgcaacauaaau

SEQ ID NO: 1177609 - RNA, 19 nt, Artificial Sequence
  Description of Artificial Sequence: Synthetic oligonucleotide
  Antisense strand to SEQ ID NO: 1177608
auuuauguugcgagaggca

SEQ ID NO: 1177610 - RNA, 19 nt, Artificial Sequence
  Description of Artificial Sequence: Synthetic oligonucleotide
  Sense strand starting at position 2233 of SEQ ID NO: 916704
ucagaaugaucgcugauac

SEQ ID NO: 1177611 - RNA, 19 nt, Artificial Sequence
  Description of Artificial Sequence: Synthetic oligonucleotide
  Antisense strand to SEQ ID NO: 1177610
guaucagcgaucauucuga

SEQ ID NO: 1177612 - RNA, 19 nt, Artificial Sequence
  Description of Artificial Sequence: Synthetic oligonucleotide
  Sense strand starting at position 2234 of SEQ ID NO: 916704
cagaaugaucgcugauaca

SEQ ID NO: 1177613 - RNA, 19 nt, Artificial Sequence
  Description of Artificial Sequence: Synthetic oligonucleotide
  Antisense strand to SEQ ID NO: 1177612
uguaucagcgaucauucug

SEQ ID NO: 1177614 - RNA, 19 nt, Artificial Sequence
  Description of Artificial Sequence: Synthetic oligonucleotide
  Sense strand starting at position 2391 of SEQ ID NO: 916704
ucacacuugucagcgauuu

SEQ ID NO: 1177615 - RNA, 19 nt, Artificial Sequence
  Description of Artificial Sequence: Synthetic oligonucleotide
  Antisense strand to SEQ ID NO: 1177614
aaaucgcugacaaguguga

SEQ ID NO: 1177616 - RNA, 19 nt, Artificial Sequence
  Description of Artificial Sequence: Synthetic oligonucleotide
  Sense strand starting at position 2392 of SEQ ID NO: 916704
cacacuugucagcgauuua

SEQ ID NO: 1177617 - RNA, 19 nt, Artificial Sequence
  Description of Artificial Sequence: Synthetic oligonucleotide
  Antisense strand to SEQ ID NO: 1177616
uaaaucgcugacaagugug

SEQ ID NO: 1177618 - RNA, 19 nt, Artificial Sequence
  Description of Artificial Sequence: Synthetic oligonucleotide
  Sense strand starting at position 2476 of SEQ ID NO: 916704
ugaguaugugcgaguguaa

SEQ ID NO: 1177619 - RNA, 19 nt, Artificial Sequence
  Description of Artificial Sequence: Synthetic oligonucleotide
  Antisense strand to SEQ ID NO: 1177618
uuacacucgcacauacuca

SEQ ID NO: 1177620 - RNA, 19 nt, Artificial Sequence
  Description of Artificial Sequence: Synthetic oligonucleotide
  Sense strand starting at position 2605 of SEQ ID NO: 916704
uugggucugaguuauaguu

SEQ ID NO: 1177621 - RNA, 19 nt, Artificial Sequence
  Description of Artificial Sequence: Synthetic oligonucleotide
  Antisense strand to SEQ ID NO: 1177620
aacuauaacucagacccaa

SEQ ID NO: 1177622 - RNA, 19 nt, Artificial Sequence
  Description of Artificial Sequence: Synthetic oligonucleotide
  Sense strand starting at position 2685 of SEQ ID NO: 916704
cuagcauaugcuuacaaag

SEQ ID NO: 1177623 - RNA, 19 nt, Artificial Sequence
  Description of Artificial Sequence: Synthetic oligonucleotide
  Antisense strand to SEQ ID NO: 1177622
cuuuguaagcauaugcuag

SEQ ID NO: 1177624 - RNA, 19 nt, Artificial Sequence
  Description of Artificial Sequence: Synthetic oligonucleotide
  Sense strand starting at position 2899 of SEQ ID NO: 916704
ggcuguuauucucuuaaac

SEQ ID NO: 1177625 - RNA, 19 nt, Artificial Sequence
  Description of Artificial Sequence: Synthetic oligonucleotide
  Antisense strand to SEQ ID NO: 1177624
guuuaagagaauaacagcc

SEQ ID NO: 1177626 - RNA, 19 nt, Artificial Sequence
  Description of Artificial Sequence: Synthetic oligonucleotide
  Sense strand starting at position 2925 of SEQ ID NO: 916704
gcuugaaacaguugaggaa

SEQ ID NO: 1177627 - RNA, 19 nt, Artificial Sequence
  Description of Artificial Sequence: Synthetic oligonucleotide
  Antisense strand to SEQ ID NO: 1177626
uuccucaacuguuucaagc

SEQ ID NO: 1177628 - RNA, 19 nt, Artificial Sequence
  Description of Artificial Sequence: Synthetic oligonucleotide
  Sense strand starting at position 3097 of SEQ ID NO: 916704
ccagacaucugauucuuga

SEQ ID NO: 1177629 - RNA, 19 nt, Artificial Sequence
  Description of Artificial Sequence: Synthetic oligonucleotide
  Antisense strand to SEQ ID NO: 1177628
ucaagaaucagaugucugg

SEQ ID NO: 1177630 - RNA, 19 nt, Artificial Sequence
  Description of Artificial Sequence: Synthetic oligonucleotide
  Sense strand starting at position 3356 of SEQ ID NO: 916704
guuauaacauaguccaacu

SEQ ID NO: 1177631 - RNA, 19 nt, Artificial Sequence
  Description of Artificial Sequence: Synthetic oligonucleotide
  Antisense strand to SEQ ID NO: 1177630
aguuggacuauguuauaac

SEQ ID NO: 1177632 - RNA, 19 nt, Artificial Sequence
  Description of Artificial Sequence: Synthetic oligonucleotide
  Sense strand starting at position 3698 of SEQ ID NO: 916704
uguacaaucccauguauaa

SEQ ID NO: 1177633 - RNA, 19 nt, Artificial Sequence
  Description of Artificial Sequence: Synthetic oligonucleotide
  Antisense strand to SEQ ID NO: 1177632
uuauacaugggauuguaca

SEQ ID NO: 1177634 - RNA, 19 nt, Artificial Sequence
  Description of Artificial Sequence: Synthetic oligonucleotide
  Sense strand starting at position 3801 of SEQ ID NO: 916704
caguuuggugacugaggga

SEQ ID NO: 1177635 - RNA, 19 nt, Artificial Sequence
  Description of Artificial Sequence: Synthetic oligonucleotide
  Antisense strand to SEQ ID NO: 1177634
ucccucagucaccaaacug

SEQ ID NO: 1177636 - RNA, 19 nt, Artificial Sequence
  Description of Artificial Sequence: Synthetic oligonucleotide
  Sense strand starting at position 3872 of SEQ ID NO: 916704
agggauagcccucacccua

SEQ ID NO: 1177637 - RNA, 19 nt, Artificial Sequence
  Description of Artificial Sequence: Synthetic oligonucleotide
  Antisense strand to SEQ ID NO: 1177636
uagggugagggcuaucccu

SEQ ID NO: 1177638 - RNA, 19 nt, Artificial Sequence
  Description of Artificial Sequence: Synthetic oligonucleotide
  Sense strand starting at position 3957 of SEQ ID NO: 916704
gggagauauccugguccua

SEQ ID NO: 1177639 - RNA, 19 nt, Artificial Sequence
  Description of Artificial Sequence: Synthetic oligonucleotide
  Antisense strand to SEQ ID NO: 1177638
uaggaccaggauaucuccc

SEQ ID NO: 1177640 - RNA, 19 nt, Artificial Sequence
  Description of Artificial Sequence: Synthetic oligonucleotide
  Sense strand starting at position 3959 of SEQ ID NO: 916704
gagauauccugguccuagg

SEQ ID NO: 1177641 - RNA, 19 nt, Artificial Sequence
  Description of Artificial Sequence: Synthetic oligonucleotide
  Antisense strand to SEQ ID NO: 1177640
ccuaggaccaggauaucuc

SEQ ID NO: 1177642 - RNA, 19 nt, Artificial Sequence
  Description of Artificial Sequence: Synthetic oligonucleotide
  Sense strand starting at position 415 of SEQ ID NO: 916705
uccaguuaggcugaacauu

SEQ ID NO: 1177643 - RNA, 19 nt, Artificial Sequence
  Description of Artificial Sequence: Synthetic oligonucleotide
  Antisense strand to SEQ ID NO: 1177642
aauguucagccuaacugga

SEQ ID NO: 1177644 - RNA, 19 nt, Artificial Sequence
  Description of Artificial Sequence: Synthetic oligonucleotide
  Sense strand starting at position 636 of SEQ ID NO: 916705
uuuguuucugucgagacag

SEQ ID NO: 1177645 - RNA, 19 nt, Artificial Sequence
  Description of Artificial Sequence: Synthetic oligonucleotide
  Antisense strand to SEQ ID NO: 1177644
cugucucgacagaaacaaa

SEQ ID NO: 1177646 - RNA, 19 nt, Artificial Sequence
  Description of Artificial Sequence: Synthetic oligonucleotide
  Sense strand starting at position 818 of SEQ ID NO: 916705
aaguguaaaggcuaaauua

SEQ ID NO: 1177647 - RNA, 19 nt, Artificial Sequence
  Description of Artificial Sequence: Synthetic oligonucleotide
  Antisense strand to SEQ ID NO: 1177646
uaauuuagccuuuacacuu

SEQ ID NO: 1177648 - RNA, 19 nt, Artificial Sequence
  Description of Artificial Sequence: Synthetic oligonucleotide
  Sense strand starting at position 882 of SEQ ID NO: 916705
guaaguagaauaugacaug

SEQ ID NO: 1177649 - RNA, 19 nt, Artificial Sequence
  Description of Artificial Sequence: Synthetic oligonucleotide
  Antisense strand to SEQ ID NO: 1177648
caugucauauucuacuuac

SEQ ID NO: 1177650 - RNA, 19 nt, Artificial Sequence
  Description of Artificial Sequence: Synthetic oligonucleotide
  Sense strand starting at position 937 of SEQ ID NO: 916705
uguuuaagauuauccugau

SEQ ID NO: 1177651 - RNA, 19 nt, Artificial Sequence
  Description of Artificial Sequence: Synthetic oligonucleotide
  Antisense strand to SEQ ID NO: 1177650
aucaggauaaucuuaaaca

SEQ ID NO: 1177652 - RNA, 19 nt, Artificial Sequence
  Description of Artificial Sequence: Synthetic oligonucleotide
  Sense strand starting at position 938 of SEQ ID NO: 916705
guuuaagauuauccugauu

SEQ ID NO: 1177653 - RNA, 19 nt, Artificial Sequence
  Description of Artificial Sequence: Synthetic oligonucleotide
  Antisense strand to SEQ ID NO: 1177652
aaucaggauaaucuuaaac

SEQ ID NO: 1177654 - RNA, 19 nt, Artificial Sequence
  Description of Artificial Sequence: Synthetic oligonucleotide
  Sense strand starting at position 943 of SEQ ID NO: 916705
agauuauccugauuaguca

SEQ ID NO: 1177655 - RNA, 19 nt, Artificial Sequence
  Description of Artificial Sequence: Synthetic oligonucleotide
  Antisense strand to SEQ ID NO: 1177654
ugacuaaucaggauaaucu

SEQ ID NO: 1177656 - RNA, 19 nt, Artificial Sequence
  Description of Artificial Sequence: Synthetic oligonucleotide
  Sense strand starting at position 946 of SEQ ID NO: 916705
uuauccugauuagucagaa

SEQ ID NO: 1177657 - RNA, 19 nt, Artificial Sequence
  Description of Artificial Sequence: Synthetic oligonucleotide
  Antisense strand to SEQ ID NO: 1177656
uucugacuaaucaggauaa

SEQ ID NO: 1177658 - RNA, 19 nt, Artificial Sequence
  Description of Artificial Sequence: Synthetic oligonucleotide
  Sense strand starting at position 1060 of SEQ ID NO: 916705
agagaaacgguguggcaaa

SEQ ID NO: 1177659 - RNA, 19 nt, Artificial Sequence
  Description of Artificial Sequence: Synthetic oligonucleotide
  Antisense strand to SEQ ID NO: 1177658
uuugccacaccguuucucu

SEQ ID NO: 1177660 - RNA, 19 nt, Artificial Sequence
  Description of Artificial Sequence: Synthetic oligonucleotide
  Sense strand starting at position 1078 of SEQ ID NO: 916705
agaauuacucugggcaugu

SEQ ID NO: 1177661 - RNA, 19 nt, Artificial Sequence
  Description of Artificial Sequence: Synthetic oligonucleotide
  Antisense strand to SEQ ID NO: 1177660
acaugcccagaguaauucu

SEQ ID NO: 1177662 - RNA, 19 nt, Artificial Sequence
  Description of Artificial Sequence: Synthetic oligonucleotide
  Sense strand starting at position 1079 of SEQ ID NO: 916705
gaauuacucugggcaugua

SEQ ID NO: 1177663 - RNA, 19 nt, Artificial Sequence
  Description of Artificial Sequence: Synthetic oligonucleotide
  Antisense strand to SEQ ID NO: 1177662
uacaugcccagaguaauuc

SEQ ID NO: 1177664 - RNA, 19 nt, Artificial Sequence
  Description of Artificial Sequence: Synthetic oligonucleotide
  Sense strand starting at position 1080 of SEQ ID NO: 916705
aauuacucugggcauguaa

SEQ ID NO: 1177665 - RNA, 19 nt, Artificial Sequence
  Description of Artificial Sequence: Synthetic oligonucleotide
  Antisense strand to SEQ ID NO: 1177664
uuacaugcccagaguaauu

SEQ ID NO: 1177666 - RNA, 19 nt, Artificial Sequence
  Description of Artificial Sequence: Synthetic oligonucleotide
  Sense strand starting at position 1089 of SEQ ID NO: 916705
gggcauguaauccaaagca

SEQ ID NO: 1177667 - RNA, 19 nt, Artificial Sequence
  Description of Artificial Sequence: Synthetic oligonucleotide
  Antisense strand to SEQ ID NO: 1177666
ugcuuuggauuacaugccc

SEQ ID NO: 1177668 - RNA, 19 nt, Artificial Sequence
  Description of Artificial Sequence: Synthetic oligonucleotide
  Sense strand starting at position 1165 of SEQ ID NO: 916705
aagaguuacucugccugaa

SEQ ID NO: 1177669 - RNA, 19 nt, Artificial Sequence
  Description of Artificial Sequence: Synthetic oligonucleotide
  Antisense strand to SEQ ID NO: 1177668
uucaggcagaguaacucuu

SEQ ID NO: 1177670 - RNA, 19 nt, Artificial Sequence
  Description of Artificial Sequence: Synthetic oligonucleotide
  Sense strand starting at position 1167 of SEQ ID NO: 916705
gaguuacucugccugaaag

SEQ ID NO: 1177671 - RNA, 19 nt, Artificial Sequence
  Description of Artificial Sequence: Synthetic oligonucleotide
  Antisense strand to SEQ ID NO: 1177670
cuuucaggcagaguaacuc

SEQ ID NO: 1177672 - RNA, 19 nt, Artificial Sequence
  Description of Artificial Sequence: Synthetic oligonucleotide
  Sense strand starting at position 1168 of SEQ ID NO: 916705
aguuacucugccugaaaga

SEQ ID NO: 1177673 - RNA, 19 nt, Artificial Sequence
  Description of Artificial Sequence: Synthetic oligonucleotide
  Antisense strand to SEQ ID NO: 1177672
ucuuucaggcagaguaacu

SEQ ID NO: 1177674 - RNA, 19 nt, Artificial Sequence
  Description of Artificial Sequence: Synthetic oligonucleotide
  Sense strand starting at position 1169 of SEQ ID NO: 916705
guuacucugccugaaagaa

SEQ ID NO: 1177675 - RNA, 19 nt, Artificial Sequence
  Description of Artificial Sequence: Synthetic oligonucleotide
  Antisense strand to SEQ ID NO: 1177674
uucuuucaggcagaguaac

SEQ ID NO: 1177676 - RNA, 19 nt, Artificial Sequence
  Description of Artificial Sequence: Synthetic oligonucleotide
  Sense strand starting at position 1428 of SEQ ID NO: 916705
ggccucuaacacugcaaga

SEQ ID NO: 1177677 - RNA, 19 nt, Artificial Sequence
  Description of Artificial Sequence: Synthetic oligonucleotide
  Antisense strand to SEQ ID NO: 1177676
ucuugcaguguuagaggcc

SEQ ID NO: 1177678 - RNA, 19 nt, Artificial Sequence
  Description of Artificial Sequence: Synthetic oligonucleotide
  Sense strand starting at position 1464 of SEQ ID NO: 916705
accucaauucucggucuua

SEQ ID NO: 1177679 - RNA, 19 nt, Artificial Sequence
  Description of Artificial Sequence: Synthetic oligonucleotide
  Antisense strand to SEQ ID NO: 1177678
uaagaccgagaauugaggu

SEQ ID NO: 1177680 - RNA, 19 nt, Artificial Sequence
  Description of Artificial Sequence: Synthetic oligonucleotide
  Sense strand starting at position 1465 of SEQ ID NO: 916705
ccucaauucucggucuuau

SEQ ID NO: 1177681 - RNA, 19 nt, Artificial Sequence
  Description of Artificial Sequence: Synthetic oligonucleotide
  Antisense strand to SEQ ID NO: 1177680
auaagaccgagaauugagg

SEQ ID NO: 1177682 - RNA, 19 nt, Artificial Sequence
  Description of Artificial Sequence: Synthetic oligonucleotide
  Sense strand starting at position 1476 of SEQ ID NO: 916705
ggucuuauuaagggaaugu

SEQ ID NO: 1177683 - RNA, 19 nt, Artificial Sequence
  Description of Artificial Sequence: Synthetic oligonucleotide
  Antisense strand to SEQ ID NO: 1177682
acauucccuuaauaagacc

SEQ ID NO: 1177684 - RNA, 19 nt, Artificial Sequence
  Description of Artificial Sequence: Synthetic oligonucleotide
  Sense strand starting at position 1477 of SEQ ID NO: 916705
gucuuauuaagggaaugug

SEQ ID NO: 1177685 - RNA, 19 nt, Artificial Sequence
  Description of Artificial Sequence: Synthetic oligonucleotide
  Antisense strand to SEQ ID NO: 1177684
cacauucccuuaauaagac

SEQ ID NO: 1177686 - RNA, 19 nt, Artificial Sequence
  Description of Artificial Sequence: Synthetic oligonucleotide
  Sense strand starting at position 1480 of SEQ ID NO: 916705
uuauuaagggaaugugacu

SEQ ID NO: 1177687 - RNA, 19 nt, Artificial Sequence
  Description of Artificial Sequence: Synthetic oligonucleotide
  Antisense strand to SEQ ID NO: 1177686
agucacauucccuuaauaa

SEQ ID NO: 1177688 - RNA, 19 nt, Artificial Sequence
  Description of Artificial Sequence: Synthetic oligonucleotide
  Sense strand starting at position 2013 of SEQ ID NO: 916705
guuuccucgcuuuaggaaa

SEQ ID NO: 1177689 - RNA, 19 nt, Artificial Sequence
  Description of Artificial Sequence: Synthetic oligonucleotide
  Antisense strand to SEQ ID NO: 1177688
uuuccuaaagcgaggaaac

SEQ ID NO: 1177690 - RNA, 19 nt, Artificial Sequence
  Description of Artificial Sequence: Synthetic oligonucleotide
  Sense strand starting at position 2216 of SEQ ID NO: 916705
gacggagccgcuuguauuu

SEQ ID NO: 1177691 - RNA, 19 nt, Artificial Sequence
  Description of Artificial Sequence: Synthetic oligonucleotide
  Antisense strand to SEQ ID NO: 1177690
aaauacaagcggcuccguc

SEQ ID NO: 1177692 - RNA, 19 nt, Artificial Sequence
  Description of Artificial Sequence: Synthetic oligonucleotide
  Sense strand starting at position 2303 of SEQ ID NO: 916705
ugccucucgcaacauaaau

SEQ ID NO: 1177693 - RNA, 19 nt, Artificial Sequence
  Description of Artificial Sequence: Synthetic oligonucleotide
  Antisense strand to SEQ ID NO: 1177692
auuuauguugcgagaggca

SEQ ID NO: 1177694 - RNA, 19 nt, Artificial Sequence
  Description of Artificial Sequence: Synthetic oligonucleotide
  Sense strand starting at position 2331 of SEQ ID NO: 916705
ucagaaugaucgcugauac

SEQ ID NO: 1177695 - RNA, 19 nt, Artificial Sequence
  Description of Artificial Sequence: Synthetic oligonucleotide
  Antisense strand to SEQ ID NO: 1177694
guaucagcgaucauucuga

SEQ ID NO: 1177696 - RNA, 19 nt, Artificial Sequence
  Description of Artificial Sequence: Synthetic oligonucleotide
  Sense strand starting at position 2332 of SEQ ID NO: 916705
cagaaugaucgcugauaca

SEQ ID NO: 1177697 - RNA, 19 nt, Artificial Sequence
  Description of Artificial Sequence: Synthetic oligonucleotide
  Antisense strand to SEQ ID NO: 1177696
uguaucagcgaucauucug

SEQ ID NO: 1177698 - RNA, 19 nt, Artificial Sequence
  Description of Artificial Sequence: Synthetic oligonucleotide
  Sense strand starting at position 2489 of SEQ ID NO: 916705
ucacacuugucagcgauuu

SEQ ID NO: 1177699 - RNA, 19 nt, Artificial Sequence
  Description of Artificial Sequence: Synthetic oligonucleotide
  Antisense strand to SEQ ID NO: 1177698
aaaucgcugacaaguguga

SEQ ID NO: 1177700 - RNA, 19 nt, Artificial Sequence
  Description of Artificial Sequence: Synthetic oligonucleotide
  Sense strand starting at position 2490 of SEQ ID NO: 916705
cacacuugucagcgauuua

SEQ ID NO: 1177701 - RNA, 19 nt, Artificial Sequence
  Description of Artificial Sequence: Synthetic oligonucleotide
  Antisense strand to SEQ ID NO: 1177700
uaaaucgcugacaagugug

SEQ ID NO: 1177702 - RNA, 19 nt, Artificial Sequence
  Description of Artificial Sequence: Synthetic oligonucleotide
  Sense strand starting at position 2574 of SEQ ID NO: 916705
ugaguaugugcgaguguaa

SEQ ID NO: 1177703 - RNA, 19 nt, Artificial Sequence
  Description of Artificial Sequence: Synthetic oligonucleotide
  Antisense strand to SEQ ID NO: 1177702
uuacacucgcacauacuca

SEQ ID NO: 1177704 - RNA, 19 nt, Artificial Sequence
  Description of Artificial Sequence: Synthetic oligonucleotide
  Sense strand starting at position 2703 of SEQ ID NO: 916705
uugggucugaguuauaguu

SEQ ID NO: 1177705 - RNA, 19 nt, Artificial Sequence
  Description of Artificial Sequence: Synthetic oligonucleotide
  Antisense strand to SEQ ID NO: 1177704
aacuauaacucagacccaa

SEQ ID NO: 1177706 - RNA, 19 nt, Artificial Sequence
  Description of Artificial Sequence: Synthetic oligonucleotide
  Sense strand starting at position 2783 of SEQ ID NO: 916705
cuagcauaugcuuacaaag

SEQ ID NO: 1177707 - RNA, 19 nt, Artificial Sequence
  Description of Artificial Sequence: Synthetic oligonucleotide
  Antisense strand to SEQ ID NO: 1177706
cuuuguaagcauaugcuag

SEQ ID NO: 1177708 - RNA, 19 nt, Artificial Sequence
  Description of Artificial Sequence: Synthetic oligonucleotide
  Sense strand starting at position 2997 of SEQ ID NO: 916705
ggcuguuauucucuuaaac

SEQ ID NO: 1177709 - RNA, 19 nt, Artificial Sequence
  Description of Artificial Sequence: Synthetic oligonucleotide
  Antisense strand to SEQ ID NO: 1177708
guuuaagagaauaacagcc

SEQ ID NO: 1177710 - RNA, 19 nt, Artificial Sequence
  Description of Artificial Sequence: Synthetic oligonucleotide
  Sense strand starting at position 3023 of SEQ ID NO: 916705
gcuugaaacaguugaggaa

SEQ ID NO: 1177711 - RNA, 19 nt, Artificial Sequence
  Description of Artificial Sequence: Synthetic oligonucleotide
  Antisense strand to SEQ ID NO: 1177710
uuccucaacuguuucaagc

SEQ ID NO: 1177712 - RNA, 19 nt, Artificial Sequence
  Description of Artificial Sequence: Synthetic oligonucleotide
  Sense strand starting at position 3195 of SEQ ID NO: 916705
ccagacaucugauucuuga

SEQ ID NO: 1177713 - RNA, 19 nt, Artificial Sequence
  Description of Artificial Sequence: Synthetic oligonucleotide
  Antisense strand to SEQ ID NO: 1177712
ucaagaaucagaugucugg

SEQ ID NO: 1177714 - RNA, 19 nt, Artificial Sequence
  Description of Artificial Sequence: Synthetic oligonucleotide
  Sense strand starting at position 3454 of SEQ ID NO: 916705
guuauaacauaguccaacu

SEQ ID NO: 1177715 - RNA, 19 nt, Artificial Sequence
  Description of Artificial Sequence: Synthetic oligonucleotide
  Antisense strand to SEQ ID NO: 1177714
aguuggacuauguuauaac

SEQ ID NO: 1177716 - RNA, 19 nt, Artificial Sequence
  Description of Artificial Sequence: Synthetic oligonucleotide
  Sense strand starting at position 3796 of SEQ ID NO: 916705
uguacaaucccauguauaa

SEQ ID NO: 1177717 - RNA, 19 nt, Artificial Sequence
  Description of Artificial Sequence: Synthetic oligonucleotide
  Antisense strand to SEQ ID NO: 1177716
uuauacaugggauuguaca

SEQ ID NO: 1177718 - RNA, 19 nt, Artificial Sequence
  Description of Artificial Sequence: Synthetic oligonucleotide
  Sense strand starting at position 3899 of SEQ ID NO: 916705
caguuuggugacugaggga

SEQ ID NO: 1177719 - RNA, 19 nt, Artificial Sequence
  Description of Artificial Sequence: Synthetic oligonucleotide
  Antisense strand to SEQ ID NO: 1177718
ucccucagucaccaaacug

SEQ ID NO: 1177720 - RNA, 19 nt, Artificial Sequence
  Description of Artificial Sequence: Synthetic oligonucleotide
  Sense strand starting at position 3970 of SEQ ID NO: 916705
agggauagcccucacccua

SEQ ID NO: 1177721 - RNA, 19 nt, Artificial Sequence
  Description of Artificial Sequence: Synthetic oligonucleotide
  Antisense strand to SEQ ID NO: 1177720
uagggugagggcuaucccu

SEQ ID NO: 1177722 - RNA, 19 nt, Artificial Sequence
  Description of Artificial Sequence: Synthetic oligonucleotide
  Sense strand starting at position 23 of SEQ ID NO: 916706
gaggaaagaugauaauuau

SEQ ID NO: 1177723 - RNA, 19 nt, Artificial Sequence
  Description of Artificial Sequence: Synthetic oligonucleotide
  Antisense strand to SEQ ID NO: 1177722
auaauuaucaucuuuccuc

SEQ ID NO: 1177724 - RNA, 19 nt, Artificial Sequence
  Description of Artificial Sequence: Synthetic oligonucleotide
  Sense strand starting at position 260 of SEQ ID NO: 916706
ugguacugguggaaggaua

SEQ ID NO: 1177725 - RNA, 19 nt, Artificial Sequence
  Description of Artificial Sequence: Synthetic oligonucleotide
  Antisense strand to SEQ ID NO: 1177724
uauccuuccaccaguacca

SEQ ID NO: 1177726 - RNA, 19 nt, Artificial Sequence
  Description of Artificial Sequence: Synthetic oligonucleotide
  Sense strand starting at position 326 of SEQ ID NO: 916706
cacaaauacgcauaaguga

SEQ ID NO: 1177727 - RNA, 19 nt, Artificial Sequence
  Description of Artificial Sequence: Synthetic oligonucleotide
  Antisense strand to SEQ ID NO: 1177726
ucacuuaugcguauuugug

SEQ ID NO: 1177728 - RNA, 19 nt, Artificial Sequence
  Description of Artificial Sequence: Synthetic oligonucleotide
  Sense strand starting at position 412 of SEQ ID NO: 916706
gcaauuggauuccuacaag

SEQ ID NO: 1177729 - RNA, 19 nt, Artificial Sequence
  Description of Artificial Sequence: Synthetic oligonucleotide
  Antisense strand to SEQ ID NO: 1177728
cuuguaggaauccaauugc

SEQ ID NO: 1177730 - RNA, 19 nt, Artificial Sequence
  Description of Artificial Sequence: Synthetic oligonucleotide
  Sense strand starting at position 448 of SEQ ID NO: 916706
cccuaaguccuacauggua

SEQ ID NO: 1177731 - RNA, 19 nt, Artificial Sequence
  Description of Artificial Sequence: Synthetic oligonucleotide
  Antisense strand to SEQ ID NO: 1177730
uaccauguaggacuuaggg

SEQ ID NO: 1177732 - RNA, 19 nt, Artificial Sequence
  Description of Artificial Sequence: Synthetic oligonucleotide
  Sense strand starting at position 554 of SEQ ID NO: 916706
ggguuaggccaagagaucu

SEQ ID NO: 1177733 - RNA, 19 nt, Artificial Sequence
  Description of Artificial Sequence: Synthetic oligonucleotide
  Antisense strand to SEQ ID NO: 1177732
agaucucuuggccuaaccc

SEQ ID NO: 1177734 - RNA, 19 nt, Artificial Sequence
  Description of Artificial Sequence: Synthetic oligonucleotide
  Sense strand starting at position 1193 of SEQ ID NO: 916706
uggagacaguccuuaugcu

SEQ ID NO: 1177735 - RNA, 19 nt, Artificial Sequence
  Description of Artificial Sequence: Synthetic oligonucleotide
  Antisense strand to SEQ ID NO: 1177734
agcauaaggacugucucca

SEQ ID NO: 1177736 - RNA, 19 nt, Artificial Sequence
  Description of Artificial Sequence: Synthetic oligonucleotide
  Sense strand starting at position 1209 of SEQ ID NO: 916706
gcucuucagugagugaaug

SEQ ID NO: 1177737 - RNA, 19 nt, Artificial Sequence
  Description of Artificial Sequence: Synthetic oligonucleotide
  Antisense strand to SEQ ID NO: 1177736
cauucacucacugaagagc

SEQ ID NO: 1177738 - RNA, 19 nt, Artificial Sequence
  Description of Artificial Sequence: Synthetic oligonucleotide
  Sense strand starting at position 1240 of SEQ ID NO: 916706
auaguacaucugcaagaug

SEQ ID NO: 1177739 - RNA, 19 nt, Artificial Sequence
  Description of Artificial Sequence: Synthetic oligonucleotide
  Antisense strand to SEQ ID NO: 1177738
caucuugcagauguacuau

SEQ ID NO: 1177740 - RNA, 19 nt, Artificial Sequence
  Description of Artificial Sequence: Synthetic oligonucleotide
  Sense strand starting at position 1384 of SEQ ID NO: 916706
ccauuuauguagcuaucuu

SEQ ID NO: 1177741 - RNA, 19 nt, Artificial Sequence
  Description of Artificial Sequence: Synthetic oligonucleotide
  Antisense strand to SEQ ID NO: 1177740
aagauagcuacauaaaugg

SEQ ID NO: 1177742 - RNA, 19 nt, Artificial Sequence
  Description of Artificial Sequence: Synthetic oligonucleotide
  Sense strand starting at position 1388 of SEQ ID NO: 916706
uuauguagcuaucuugaaa

SEQ ID NO: 1177743 - RNA, 19 nt, Artificial Sequence
  Description of Artificial Sequence: Synthetic oligonucleotide
  Antisense strand to SEQ ID NO: 1177742
uuucaagauagcuacauaa

SEQ ID NO: 1177744 - RNA, 19 nt, Artificial Sequence
  Description of Artificial Sequence: Synthetic oligonucleotide
  Sense strand starting at position 1391 of SEQ ID NO: 916706
uguagcuaucuugaaauga

SEQ ID NO: 1177745 - RNA, 19 nt, Artificial Sequence
  Description of Artificial Sequence: Synthetic oligonucleotide
  Antisense strand to SEQ ID NO: 1177744
ucauuucaagauagcuaca

SEQ ID NO: 1177746 - RNA, 19 nt, Artificial Sequence
  Description of Artificial Sequence: Synthetic oligonucleotide
  Sense strand starting at position 1431 of SEQ ID NO: 916706
ugaauuagugguugccaaa

SEQ ID NO: 1177747 - RNA, 19 nt, Artificial Sequence
  Description of Artificial Sequence: Synthetic oligonucleotide
  Antisense strand to SEQ ID NO: 1177746
uuuggcaaccacuaauuca

SEQ ID NO: 1177748 - RNA, 19 nt, Artificial Sequence
  Description of Artificial Sequence: Synthetic oligonucleotide
  Sense strand starting at position 1539 of SEQ ID NO: 916706
ucuguaucuugauuacuuc

SEQ ID NO: 1177749 - RNA, 19 nt, Artificial Sequence
  Description of Artificial Sequence: Synthetic oligonucleotide
  Antisense strand to SEQ ID NO: 1177748
gaaguaaucaagauacaga

SEQ ID NO: 1177750 - RNA, 19 nt, Artificial Sequence
  Description of Artificial Sequence: Synthetic oligonucleotide
  Sense strand starting at position 1558 of SEQ ID NO: 916706
aaggucaauuuccagguua

SEQ ID NO: 1177751 - RNA, 19 nt, Artificial Sequence
  Description of Artificial Sequence: Synthetic oligonucleotide
  Antisense strand to SEQ ID NO: 1177750
uaaccuggaaauugaccuu

SEQ ID NO: 1177752 - RNA, 19 nt, Artificial Sequence
  Description of Artificial Sequence: Synthetic oligonucleotide
  Sense strand starting at position 1628 of SEQ ID NO: 916706
gcagaaucucucugaauua

SEQ ID NO: 1177753 - RNA, 19 nt, Artificial Sequence
  Description of Artificial Sequence: Synthetic oligonucleotide
  Antisense strand to SEQ ID NO: 1177752
uaauucagagagauucugc

SEQ ID NO: 1177754 - RNA, 19 nt, Artificial Sequence
  Description of Artificial Sequence: Synthetic oligonucleotide
  Sense strand starting at position 1790 of SEQ ID NO: 916706
aggcucugcagaugacaaa

SEQ ID NO: 1177755 - RNA, 19 nt, Artificial Sequence
  Description of Artificial Sequence: Synthetic oligonucleotide
  Antisense strand to SEQ ID NO: 1177754
uuugucaucugcagagccu

SEQ ID NO: 1177756 - RNA, 19 nt, Artificial Sequence
  Description of Artificial Sequence: Synthetic oligonucleotide
  Sense strand starting at position 2051 of SEQ ID NO: 916706
gcaguuuggacacauguuu

SEQ ID NO: 1177757 - RNA, 19 nt, Artificial Sequence
  Description of Artificial Sequence: Synthetic oligonucleotide
  Antisense strand to SEQ ID NO: 1177756
aaacauguguccaaacugc

SEQ ID NO: 1177758 - RNA, 19 nt, Artificial Sequence
  Description of Artificial Sequence: Synthetic oligonucleotide
  Sense strand starting at position 2056 of SEQ ID NO: 916706
uuggacacauguuugcaau

SEQ ID NO: 1177759 - RNA, 19 nt, Artificial Sequence
  Description of Artificial Sequence: Synthetic oligonucleotide
  Antisense strand to SEQ ID NO: 1177758
auugcaaacauguguccaa

SEQ ID NO: 1177760 - RNA, 19 nt, Artificial Sequence
  Description of Artificial Sequence: Synthetic oligonucleotide
  Sense strand starting at position 2058 of SEQ ID NO: 916706
ggacacauguuugcaaucu

SEQ ID NO: 1177761 - RNA, 19 nt, Artificial Sequence
  Description of Artificial Sequence: Synthetic oligonucleotide
  Antisense strand to SEQ ID NO: 1177760
agauugcaaacaugugucc

SEQ ID NO: 1177762 - RNA, 19 nt, Artificial Sequence
  Description of Artificial Sequence: Synthetic oligonucleotide
  Sense strand starting at position 2077 of SEQ ID NO: 916706
gaaggcuuccugugaggua

SEQ ID NO: 1177763 - RNA, 19 nt, Artificial Sequence
  Description of Artificial Sequence: Synthetic oligonucleotide
  Antisense strand to SEQ ID NO: 1177762
uaccucacaggaagccuuc

SEQ ID NO: 1177764 - RNA, 19 nt, Artificial Sequence
  Description of Artificial Sequence: Synthetic oligonucleotide
  Sense strand starting at position 2256 of SEQ ID NO: 916706
gugggaaacugcucucaau

SEQ ID NO: 1177765 - RNA, 19 nt, Artificial Sequence
  Description of Artificial Sequence: Synthetic oligonucleotide
  Antisense strand to SEQ ID NO: 1177764
auugagagcaguuucccac

SEQ ID NO: 1177766 - RNA, 19 nt, Artificial Sequence
  Description of Artificial Sequence: Synthetic oligonucleotide
  Sense strand starting at position 2291 of SEQ ID NO: 916706
agaucauuugcgugugcuu

SEQ ID NO: 1177767 - RNA, 19 nt, Artificial Sequence
  Description of Artificial Sequence: Synthetic oligonucleotide
  Antisense strand to SEQ ID NO: 1177766
aagcacacgcaaaugaucu

SEQ ID NO: 1177768 - RNA, 19 nt, Artificial Sequence
  Description of Artificial Sequence: Synthetic oligonucleotide
  Sense strand starting at position 2569 of SEQ ID NO: 916706
aggagcaguucccuuccua

SEQ ID NO: 1177769 - RNA, 19 nt, Artificial Sequence
  Description of Artificial Sequence: Synthetic oligonucleotide
  Antisense strand to SEQ ID NO: 1177768
uaggaagggaacugcuccu

SEQ ID NO: 1177770 - RNA, 19 nt, Artificial Sequence
  Description of Artificial Sequence: Synthetic oligonucleotide
  Sense strand starting at position 2657 of SEQ ID NO: 916706
ucguuugacccauaucuca

SEQ ID NO: 1177771 - RNA, 19 nt, Artificial Sequence
  Description of Artificial Sequence: Synthetic oligonucleotide
  Antisense strand to SEQ ID NO: 1177770
ugagauaugggucaaacga

SEQ ID NO: 1177772 - RNA, 19 nt, Artificial Sequence
  Description of Artificial Sequence: Synthetic oligonucleotide
  Sense strand starting at position 2772 of SEQ ID NO: 916706
gguucuacccaguaauaug

SEQ ID NO: 1177773 - RNA, 19 nt, Artificial Sequence
  Description of Artificial Sequence: Synthetic oligonucleotide
  Antisense strand to SEQ ID NO: 1177772
cauauuacuggguagaacc

SEQ ID NO: 1177774 - RNA, 19 nt, Artificial Sequence
  Description of Artificial Sequence: Synthetic oligonucleotide
  Sense strand starting at position 2783 of SEQ ID NO: 916706
guaauauguaagugacagu

SEQ ID NO: 1177775 - RNA, 19 nt, Artificial Sequence
  Description of Artificial Sequence: Synthetic oligonucleotide
  Antisense strand to SEQ ID NO: 1177774
acugucacuuacauauuac

SEQ ID NO: 1177776 - RNA, 19 nt, Artificial Sequence
  Description of Artificial Sequence: Synthetic oligonucleotide
  Sense strand starting at position 2931 of SEQ ID NO: 916706
uguugcaaucaugaggcaa

SEQ ID NO: 1177777 - RNA, 19 nt, Artificial Sequence
  Description of Artificial Sequence: Synthetic oligonucleotide
  Antisense strand to SEQ ID NO: 1177776
uugccucaugauugcaaca

SEQ ID NO: 1177778 - RNA, 19 nt, Artificial Sequence
  Description of Artificial Sequence: Synthetic oligonucleotide
  Sense strand starting at position 2971 of SEQ ID NO: 916706
cuguauugugucuaacaua

SEQ ID NO: 1177779 - RNA, 19 nt, Artificial Sequence
  Description of Artificial Sequence: Synthetic oligonucleotide
  Antisense strand to SEQ ID NO: 1177778
uauguuagacacaauacag

SEQ ID NO: 1177780 - RNA, 19 nt, Artificial Sequence
  Description of Artificial Sequence: Synthetic oligonucleotide
  Sense strand starting at position 3069 of SEQ ID NO: 916706
aagugcaagugauuuguuu

SEQ ID NO: 1177781 - RNA, 19 nt, Artificial Sequence
  Description of Artificial Sequence: Synthetic oligonucleotide
  Antisense strand to SEQ ID NO: 1177780
aaacaaaucacuugcacuu

SEQ ID NO: 1177782 - RNA, 19 nt, Artificial Sequence
  Description of Artificial Sequence: Synthetic oligonucleotide
  Sense strand starting at position 3114 of SEQ ID NO: 916706
accacuucgucucuuggaa

SEQ ID NO: 1177783 - RNA, 19 nt, Artificial Sequence
  Description of Artificial Sequence: Synthetic oligonucleotide
  Antisense strand to SEQ ID NO: 1177782
uuccaagagacgaaguggu

SEQ ID NO: 1177784 - RNA, 19 nt, Artificial Sequence
  Description of Artificial Sequence: Synthetic oligonucleotide
  Sense strand starting at position 3163 of SEQ ID NO: 916706
gaaguuuacccaggaaagu

SEQ ID NO: 1177785 - RNA, 19 nt, Artificial Sequence
  Description of Artificial Sequence: Synthetic oligonucleotide
  Antisense strand to SEQ ID NO: 1177784
acuuuccuggguaaacuuc

SEQ ID NO: 1177786 - RNA, 19 nt, Artificial Sequence
  Description of Artificial Sequence: Synthetic oligonucleotide
  Sense strand starting at position 3204 of SEQ ID NO: 916706
uccaauucugcagagccau

SEQ ID NO: 1177787 - RNA, 19 nt, Artificial Sequence
  Description of Artificial Sequence: Synthetic oligonucleotide
  Antisense strand to SEQ ID NO: 1177786
auggcucugcagaauugga

SEQ ID NO: 1177788 - RNA, 19 nt, Artificial Sequence
  Description of Artificial Sequence: Synthetic oligonucleotide
  Sense strand starting at position 3216 of SEQ ID NO: 916706
gagccauuuccguaggguc

SEQ ID NO: 1177789 - RNA, 19 nt, Artificial Sequence
  Description of Artificial Sequence: Synthetic oligonucleotide
  Antisense strand to SEQ ID NO: 1177788
gacccuacggaaauggcuc

SEQ ID NO: 1177790 - RNA, 19 nt, Artificial Sequence
  Description of Artificial Sequence: Synthetic oligonucleotide
  Sense strand starting at position 3230 of SEQ ID NO: 916706
gggucacgcaccgaagauu

SEQ ID NO: 1177791 - RNA, 19 nt, Artificial Sequence
  Description of Artificial Sequence: Synthetic oligonucleotide
  Antisense strand to SEQ ID NO: 1177790
aaucuucggugcgugaccc

SEQ ID NO: 1177792 - RNA, 19 nt, Artificial Sequence
  Description of Artificial Sequence: Synthetic oligonucleotide
  Sense strand starting at position 3381 of SEQ ID NO: 916706
ggaucugugaccuggacuu

SEQ ID NO: 1177793 - RNA, 19 nt, Artificial Sequence
  Description of Artificial Sequence: Synthetic oligonucleotide
  Antisense strand to SEQ ID NO: 1177792
aaguccaggucacagaucc

SEQ ID NO: 1177794 - RNA, 19 nt, Artificial Sequence
  Description of Artificial Sequence: Synthetic oligonucleotide
  Sense strand starting at position 3568 of SEQ ID NO: 916706
aaggucaucugguugguaa

SEQ ID NO: 1177795 - RNA, 19 nt, Artificial Sequence
  Description of Artificial Sequence: Synthetic oligonucleotide
  Antisense strand to SEQ ID NO: 1177794
uuaccaaccagaugaccuu

SEQ ID NO: 1177796 - RNA, 19 nt, Artificial Sequence
  Description of Artificial Sequence: Synthetic oligonucleotide
  Sense strand starting at position 3569 of SEQ ID NO: 916706
aggucaucugguugguaag

SEQ ID NO: 1177797 - RNA, 19 nt, Artificial Sequence
  Description of Artificial Sequence: Synthetic oligonucleotide
  Antisense strand to SEQ ID NO: 1177796
cuuaccaaccagaugaccu

SEQ ID NO: 1177798 - RNA, 19 nt, Artificial Sequence
  Description of Artificial Sequence: Synthetic oligonucleotide
  Sense strand starting at position 3738 of SEQ ID NO: 916706
agucauugugacgauggaa

SEQ ID NO: 1177799 - RNA, 19 nt, Artificial Sequence
  Description of Artificial Sequence: Synthetic oligonucleotide
  Antisense strand to SEQ ID NO: 1177798
uuccaucgucacaaugacu

SEQ ID NO: 1177800 - RNA, 19 nt, Artificial Sequence
  Description of Artificial Sequence: Synthetic oligonucleotide
  Sense strand starting at position 3741 of SEQ ID NO: 916706
cauugugacgauggaaagu

SEQ ID NO: 1177801 - RNA, 19 nt, Artificial Sequence
  Description of Artificial Sequence: Synthetic oligonucleotide
  Antisense strand to SEQ ID NO: 1177800
acuuuccaucgucacaaug

SEQ ID NO: 1177802 - RNA, 19 nt, Artificial Sequence
  Description of Artificial Sequence: Synthetic oligonucleotide
  Sense strand starting at position 18 of SEQ ID NO: 916707
gcccuaacucaaggagaca

SEQ ID NO: 1177803 - RNA, 19 nt, Artificial Sequence
  Description of Artificial Sequence: Synthetic oligonucleotide
  Antisense strand to SEQ ID NO: 1177802
ugucuccuugaguuagggc

SEQ ID NO: 1177804 - RNA, 19 nt, Artificial Sequence
  Description of Artificial Sequence: Synthetic oligonucleotide
  Sense strand starting at position 33 of SEQ ID NO: 916707
gacagcauucgcuacugaa

SEQ ID NO: 1177805 - RNA, 19 nt, Artificial Sequence
  Description of Artificial Sequence: Synthetic oligonucleotide
  Antisense strand to SEQ ID NO: 1177804
uucaguagcgaaugcuguc

SEQ ID NO: 1177806 - RNA, 19 nt, Artificial Sequence
  Description of Artificial Sequence: Synthetic oligonucleotide
  Sense strand starting at position 92 of SEQ ID NO: 916707
aauugacaauugucagaug

SEQ ID NO: 1177807 - RNA, 19 nt, Artificial Sequence
  Description of Artificial Sequence: Synthetic oligonucleotide
  Antisense strand to SEQ ID NO: 1177806
caucugacaauugucaauu

SEQ ID NO: 1177808 - RNA, 19 nt, Artificial Sequence
  Description of Artificial Sequence: Synthetic oligonucleotide
  Sense strand starting at position 190 of SEQ ID NO: 916707
gaguuaagaacucgaggga

SEQ ID NO: 1177809 - RNA, 19 nt, Artificial Sequence
  Description of Artificial Sequence: Synthetic oligonucleotide
  Antisense strand to SEQ ID NO: 1177808
ucccucgaguucuuaacuc

SEQ ID NO: 1177810 - RNA, 19 nt, Artificial Sequence
  Description of Artificial Sequence: Synthetic oligonucleotide
  Sense strand starting at position 237 of SEQ ID NO: 916707
uuugcauuccggcaagaca

SEQ ID NO: 1177811 - RNA, 19 nt, Artificial Sequence
  Description of Artificial Sequence: Synthetic oligonucleotide
  Antisense strand to SEQ ID NO: 1177810
ugucuugccggaaugcaaa

SEQ ID NO: 1177812 - RNA, 19 nt, Artificial Sequence
  Description of Artificial Sequence: Synthetic oligonucleotide
  Sense strand starting at position 296 of SEQ ID NO: 916707
gcugcauauggguaaccau

SEQ ID NO: 1177813 - RNA, 19 nt, Artificial Sequence
  Description of Artificial Sequence: Synthetic oligonucleotide
  Antisense strand to SEQ ID NO: 1177812
augguuacccauaugcagc

SEQ ID NO: 1177814 - RNA, 19 nt, Artificial Sequence
  Description of Artificial Sequence: Synthetic oligonucleotide
  Sense strand starting at position 304 of SEQ ID NO: 916707
uggguaaccauaugugaaa

SEQ ID NO: 1177815 - RNA, 19 nt, Artificial Sequence
  Description of Artificial Sequence: Synthetic oligonucleotide
  Antisense strand to SEQ ID NO: 1177814
uuucacauaugguuaccca

SEQ ID NO: 1177816 - RNA, 19 nt, Artificial Sequence
  Description of Artificial Sequence: Synthetic oligonucleotide
  Sense strand starting at position 305 of SEQ ID NO: 916707
ggguaaccauaugugaaau

SEQ ID NO: 1177817 - RNA, 19 nt, Artificial Sequence
  Description of Artificial Sequence: Synthetic oligonucleotide
  Antisense strand to SEQ ID NO: 1177816
auuucacauaugguuaccc

SEQ ID NO: 1177818 - RNA, 19 nt, Artificial Sequence
  Description of Artificial Sequence: Synthetic oligonucleotide
  Sense strand starting at position 306 of SEQ ID NO: 916707
gguaaccauaugugaaaug

SEQ ID NO: 1177819 - RNA, 19 nt, Artificial Sequence
  Description of Artificial Sequence: Synthetic oligonucleotide
  Antisense strand to SEQ ID NO: 1177818
cauuucacauaugguuacc

SEQ ID NO: 1177820 - RNA, 19 nt, Artificial Sequence
  Description of Artificial Sequence: Synthetic oligonucleotide
  Sense strand starting at position 352 of SEQ ID NO: 916707
auuaauagagccugggagu

SEQ ID NO: 1177821 - RNA, 19 nt, Artificial Sequence
  Description of Artificial Sequence: Synthetic oligonucleotide
  Antisense strand to SEQ ID NO: 1177820
acucccaggcucuauuaau

SEQ ID NO: 1177822 - RNA, 19 nt, Artificial Sequence
  Description of Artificial Sequence: Synthetic oligonucleotide
  Sense strand starting at position 397 of SEQ ID NO: 916707
cugaguaagggaugaucuu

SEQ ID NO: 1177823 - RNA, 19 nt, Artificial Sequence
  Description of Artificial Sequence: Synthetic oligonucleotide
  Antisense strand to SEQ ID NO: 1177822
aagaucaucccuuacucag

SEQ ID NO: 1177824 - RNA, 19 nt, Artificial Sequence
  Description of Artificial Sequence: Synthetic oligonucleotide
  Sense strand starting at position 451 of SEQ ID NO: 916707
accguuucuccaggaaggu

SEQ ID NO: 1177825 - RNA, 19 nt, Artificial Sequence
  Description of Artificial Sequence: Synthetic oligonucleotide
  Antisense strand to SEQ ID NO: 1177824
accuuccuggagaaacggu

SEQ ID NO: 1177826 - RNA, 19 nt, Artificial Sequence
  Description of Artificial Sequence: Synthetic oligonucleotide
  Sense strand starting at position 452 of SEQ ID NO: 916707
ccguuucuccaggaaggua

SEQ ID NO: 1177827 - RNA, 19 nt, Artificial Sequence
  Description of Artificial Sequence: Synthetic oligonucleotide
  Antisense strand to SEQ ID NO: 1177826
uaccuuccuggagaaacgg

SEQ ID NO: 1177828 - RNA, 19 nt, Artificial Sequence
  Description of Artificial Sequence: Synthetic oligonucleotide
  Sense strand starting at position 871 of SEQ ID NO: 916707
ggcucugauaucugaggau

SEQ ID NO: 1177829 - RNA, 19 nt, Artificial Sequence
  Description of Artificial Sequence: Synthetic oligonucleotide
  Antisense strand to SEQ ID NO: 1177828
auccucagauaucagagcc

SEQ ID NO: 1177830 - RNA, 19 nt, Artificial Sequence
  Description of Artificial Sequence: Synthetic oligonucleotide
  Sense strand starting at position 2364 of SEQ ID NO: 916707
ggauccuuccucggcgaau

SEQ ID NO: 1177831 - RNA, 19 nt, Artificial Sequence
  Description of Artificial Sequence: Synthetic oligonucleotide
  Antisense strand to SEQ ID NO: 1177830
auucgccgaggaaggaucc

SEQ ID NO: 1177832 - RNA, 19 nt, Artificial Sequence
  Description of Artificial Sequence: Synthetic oligonucleotide
  Sense strand starting at position 2365 of SEQ ID NO: 916707
gauccuuccucggcgaauu

SEQ ID NO: 1177833 - RNA, 19 nt, Artificial Sequence
  Description of Artificial Sequence: Synthetic oligonucleotide
  Antisense strand to SEQ ID NO: 1177832
aauucgccgaggaaggauc

SEQ ID NO: 1177834 - RNA, 19 nt, Artificial Sequence
  Description of Artificial Sequence: Synthetic oligonucleotide
  Sense strand starting at position 2366 of SEQ ID NO: 916707
auccuuccucggcgaauua

SEQ ID NO: 1177835 - RNA, 19 nt, Artificial Sequence
  Description of Artificial Sequence: Synthetic oligonucleotide
  Antisense strand to SEQ ID NO: 1177834
uaauucgccgaggaaggau

SEQ ID NO: 1177836 - RNA, 19 nt, Artificial Sequence
  Description of Artificial Sequence: Synthetic oligonucleotide
  Sense strand starting at position 2458 of SEQ ID NO: 916707
uggugucauucuuuauccu

SEQ ID NO: 1177837 - RNA, 19 nt, Artificial Sequence
  Description of Artificial Sequence: Synthetic oligonucleotide
  Antisense strand to SEQ ID NO: 1177836
aggauaaagaaugacacca

SEQ ID NO: 1177838 - RNA, 19 nt, Artificial Sequence
  Description of Artificial Sequence: Synthetic oligonucleotide
  Sense strand starting at position 2459 of SEQ ID NO: 916707
ggugucauucuuuauccuu

SEQ ID NO: 1177839 - RNA, 19 nt, Artificial Sequence
  Description of Artificial Sequence: Synthetic oligonucleotide
  Antisense strand to SEQ ID NO: 1177838
aaggauaaagaaugacacc

SEQ ID NO: 1177840 - RNA, 19 nt, Artificial Sequence
  Description of Artificial Sequence: Synthetic oligonucleotide
  Sense strand starting at position 2588 of SEQ ID NO: 916707
gccagaguggcuugggaaa

SEQ ID NO: 1177841 - RNA, 19 nt, Artificial Sequence
  Description of Artificial Sequence: Synthetic oligonucleotide
  Antisense strand to SEQ ID NO: 1177840
uuucccaagccacucuggc

SEQ ID NO: 1177842 - RNA, 19 nt, Artificial Sequence
  Description of Artificial Sequence: Synthetic oligonucleotide
  Sense strand starting at position 2615 of SEQ ID NO: 916707
gagaaagucaaaugcgaga

SEQ ID NO: 1177843 - RNA, 19 nt, Artificial Sequence
  Description of Artificial Sequence: Synthetic oligonucleotide
  Antisense strand to SEQ ID NO: 1177842
ucucgcauuugacuuucuc

SEQ ID NO: 1177844 - RNA, 19 nt, Artificial Sequence
  Description of Artificial Sequence: Synthetic oligonucleotide
  Sense strand starting at position 2764 of SEQ ID NO: 916707
ucacguacccgucaggauu

SEQ ID NO: 1177845 - RNA, 19 nt, Artificial Sequence
  Description of Artificial Sequence: Synthetic oligonucleotide
  Antisense strand to SEQ ID NO: 1177844
aauccugacggguacguga

SEQ ID NO: 1177846 - RNA, 19 nt, Artificial Sequence
  Description of Artificial Sequence: Synthetic oligonucleotide
  Sense strand starting at position 2772 of SEQ ID NO: 916707
ccgucaggauucucuugau

SEQ ID NO: 1177847 - RNA, 19 nt, Artificial Sequence
  Description of Artificial Sequence: Synthetic oligonucleotide
  Antisense strand to SEQ ID NO: 1177846
aucaagagaauccugacgg

SEQ ID NO: 1177848 - RNA, 19 nt, Artificial Sequence
  Description of Artificial Sequence: Synthetic oligonucleotide
  Sense strand starting at position 3026 of SEQ ID NO: 916707
ccuauaagaugcucccuga

SEQ ID NO: 1177849 - RNA, 19 nt, Artificial Sequence
  Description of Artificial Sequence: Synthetic oligonucleotide
  Antisense strand to SEQ ID NO: 1177848
ucagggagcaucuuauagg

SEQ ID NO: 1177850 - RNA, 19 nt, Artificial Sequence
  Description of Artificial Sequence: Synthetic oligonucleotide
  Sense strand starting at position 3029 of SEQ ID NO: 916707
auaagaugcucccugagca

SEQ ID NO: 1177851 - RNA, 19 nt, Artificial Sequence
  Description of Artificial Sequence: Synthetic oligonucleotide
  Antisense strand to SEQ ID NO: 1177850
ugcucagggagcaucuuau

SEQ ID NO: 1177852 - RNA, 19 nt, Artificial Sequence
  Description of Artificial Sequence: Synthetic oligonucleotide
  Sense strand starting at position 3147 of SEQ ID NO: 916707
gccugacuguccucaacua

SEQ ID NO: 1177853 - RNA, 19 nt, Artificial Sequence
  Description of Artificial Sequence: Synthetic oligonucleotide
  Antisense strand to SEQ ID NO: 1177852
uaguugaggacagucaggc

SEQ ID NO: 1177854 - RNA, 19 nt, Artificial Sequence
  Description of Artificial Sequence: Synthetic oligonucleotide
  Sense strand starting at position 3168 of SEQ ID NO: 916707
cccagaguccauugaagaa

SEQ ID NO: 1177855 - RNA, 19 nt, Artificial Sequence
  Description of Artificial Sequence: Synthetic oligonucleotide
  Antisense strand to SEQ ID NO: 1177854
uucuucaauggacucuggg

SEQ ID NO: 1177856 - RNA, 19 nt, Artificial Sequence
  Description of Artificial Sequence: Synthetic oligonucleotide
  Sense strand starting at position 3189 of SEQ ID NO: 916707
ggucuagaaucauucucag

SEQ ID NO: 1177857 - RNA, 19 nt, Artificial Sequence
  Description of Artificial Sequence: Synthetic oligonucleotide
  Antisense strand to SEQ ID NO: 1177856
cugagaaugauucuagacc

SEQ ID NO: 1177858 - RNA, 19 nt, Artificial Sequence
  Description of Artificial Sequence: Synthetic oligonucleotide
  Sense strand starting at position 3192 of SEQ ID NO: 916707
cuagaaucauucucaguag

SEQ ID NO: 1177859 - RNA, 19 nt, Artificial Sequence
  Description of Artificial Sequence: Synthetic oligonucleotide
  Antisense strand to SEQ ID NO: 1177858
cuacugagaaugauucuag

SEQ ID NO: 1177860 - RNA, 19 nt, Artificial Sequence
  Description of Artificial Sequence: Synthetic oligonucleotide
  Sense strand starting at position 3195 of SEQ ID NO: 916707
gaaucauucucaguaggaa

SEQ ID NO: 1177861 - RNA, 19 nt, Artificial Sequence
  Description of Artificial Sequence: Synthetic oligonucleotide
  Antisense strand to SEQ ID NO: 1177860
uuccuacugagaaugauuc

SEQ ID NO: 1177862 - RNA, 19 nt, Artificial Sequence
  Description of Artificial Sequence: Synthetic oligonucleotide
  Sense strand starting at position 3198 of SEQ ID NO: 916707
ucauucucaguaggaaaca

SEQ ID NO: 1177863 - RNA, 19 nt, Artificial Sequence
  Description of Artificial Sequence: Synthetic oligonucleotide
  Antisense strand to SEQ ID NO: 1177862
uguuuccuacugagaauga

SEQ ID NO: 1177864 - RNA, 19 nt, Artificial Sequence
  Description of Artificial Sequence: Synthetic oligonucleotide
  Sense strand starting at position 3250 of SEQ ID NO: 916707
gauacauugcacuaaguag

SEQ ID NO: 1177865 - RNA, 19 nt, Artificial Sequence
  Description of Artificial Sequence: Synthetic oligonucleotide
  Antisense strand to SEQ ID NO: 1177864
cuacuuagugcaauguauc

SEQ ID NO: 1177866 - RNA, 19 nt, Artificial Sequence
  Description of Artificial Sequence: Synthetic oligonucleotide
  Sense strand starting at position 3258 of SEQ ID NO: 916707
gcacuaaguagaggugaga

SEQ ID NO: 1177867 - RNA, 19 nt, Artificial Sequence
  Description of Artificial Sequence: Synthetic oligonucleotide
  Antisense strand to SEQ ID NO: 1177866
ucucaccucuacuuagugc

SEQ ID NO: 1177868 - RNA, 19 nt, Artificial Sequence
  Description of Artificial Sequence: Synthetic oligonucleotide
  Sense strand starting at position 3475 of SEQ ID NO: 916707
ugagcagaauccuugacaa

SEQ ID NO: 1177869 - RNA, 19 nt, Artificial Sequence
  Description of Artificial Sequence: Synthetic oligonucleotide
  Antisense strand to SEQ ID NO: 1177868
uugucaaggauucugcuca

SEQ ID NO: 1177870 - RNA, 19 nt, Artificial Sequence
  Description of Artificial Sequence: Synthetic oligonucleotide
  Sense strand starting at position 3593 of SEQ ID NO: 916707
cuaggcaucuucucagaga

SEQ ID NO: 1177871 - RNA, 19 nt, Artificial Sequence
  Description of Artificial Sequence: Synthetic oligonucleotide
  Antisense strand to SEQ ID NO: 1177870
ucucugagaagaugccuag

SEQ ID NO: 1177872 - RNA, 19 nt, Artificial Sequence
  Description of Artificial Sequence: Synthetic oligonucleotide
  Sense strand starting at position 3707 of SEQ ID NO: 916707
gugguccaauccucucauu

SEQ ID NO: 1177873 - RNA, 19 nt, Artificial Sequence
  Description of Artificial Sequence: Synthetic oligonucleotide
  Antisense strand to SEQ ID NO: 1177872
aaugagaggauuggaccac

SEQ ID NO: 1177874 - RNA, 19 nt, Artificial Sequence
  Description of Artificial Sequence: Synthetic oligonucleotide
  Sense strand starting at position 3857 of SEQ ID NO: 916707
uugugcaugccuucuguga

SEQ ID NO: 1177875 - RNA, 19 nt, Artificial Sequence
  Description of Artificial Sequence: Synthetic oligonucleotide
  Antisense strand to SEQ ID NO: 1177874
ucacagaaggcaugcacaa

SEQ ID NO: 1177876 - RNA, 19 nt, Artificial Sequence
  Description of Artificial Sequence: Synthetic oligonucleotide
  Sense strand starting at position 3861 of SEQ ID NO: 916707
gcaugccuucugugacuaa

SEQ ID NO: 1177877 - RNA, 19 nt, Artificial Sequence
  Description of Artificial Sequence: Synthetic oligonucleotide
  Antisense strand to SEQ ID NO: 1177876
uuagucacagaaggcaugc

SEQ ID NO: 1177878 - RNA, 19 nt, Artificial Sequence
  Description of Artificial Sequence: Synthetic oligonucleotide
  Sense strand starting at position 3901 of SEQ ID NO: 916707
acaagcucccaccgaaaua

SEQ ID NO: 1177879 - RNA, 19 nt, Artificial Sequence
  Description of Artificial Sequence: Synthetic oligonucleotide
  Antisense strand to SEQ ID NO: 1177878
uauuucggugggagcuugu

SEQ ID NO: 1177880 - RNA, 19 nt, Artificial Sequence
  Description of Artificial Sequence: Synthetic oligonucleotide
  Sense strand starting at position 3935 of SEQ ID NO: 916707
gugauuauguugcuaugag

SEQ ID NO: 1177881 - RNA, 19 nt, Artificial Sequence
  Description of Artificial Sequence: Synthetic oligonucleotide
  Antisense strand to SEQ ID NO: 1177880
cucauagcaacauaaucac

SEQ ID NO: 1177882 - RNA, 19 nt, Artificial Sequence
  Description of Artificial Sequence: Synthetic oligonucleotide
  Sense strand starting at position 1 of SEQ ID NO: 916708
gcaaccaucucagagguua

SEQ ID NO: 1177883 - RNA, 19 nt, Artificial Sequence
  Description of Artificial Sequence: Synthetic oligonucleotide
  Antisense strand to SEQ ID NO: 1177882
uaaccucugagaugguugc

SEQ ID NO: 1177884 - RNA, 19 nt, Artificial Sequence
  Description of Artificial Sequence: Synthetic oligonucleotide
  Sense strand starting at position 12 of SEQ ID NO: 916708
agagguuauuauucccauu

SEQ ID NO: 1177885 - RNA, 19 nt, Artificial Sequence
  Description of Artificial Sequence: Synthetic oligonucleotide
  Antisense strand to SEQ ID NO: 1177884
aaugggaauaauaaccucu

SEQ ID NO: 1177886 - RNA, 19 nt, Artificial Sequence
  Description of Artificial Sequence: Synthetic oligonucleotide
  Sense strand starting at position 176 of SEQ ID NO: 916708
ggaugauggcgccacagau

SEQ ID NO: 1177887 - RNA, 19 nt, Artificial Sequence
  Description of Artificial Sequence: Synthetic oligonucleotide
  Antisense strand to SEQ ID NO: 1177886
aucuguggcgccaucaucc

SEQ ID NO: 1177888 - RNA, 19 nt, Artificial Sequence
  Description of Artificial Sequence: Synthetic oligonucleotide
  Sense strand starting at position 191 of SEQ ID NO: 916708
agaugauacugcuuacauu

SEQ ID NO: 1177889 - RNA, 19 nt, Artificial Sequence
  Description of Artificial Sequence: Synthetic oligonucleotide
  Antisense strand to SEQ ID NO: 1177888
aauguaagcaguaucaucu

SEQ ID NO: 1177890 - RNA, 19 nt, Artificial Sequence
  Description of Artificial Sequence: Synthetic oligonucleotide
  Sense strand starting at position 289 of SEQ ID NO: 916708
gucugcuuggucugacuca

SEQ ID NO: 1177891 - RNA, 19 nt, Artificial Sequence
  Description of Artificial Sequence: Synthetic oligonucleotide
  Antisense strand to SEQ ID NO: 1177890
ugagucagaccaagcagac

SEQ ID NO: 1177892 - RNA, 19 nt, Artificial Sequence
  Description of Artificial Sequence: Synthetic oligonucleotide
  Sense strand starting at position 334 of SEQ ID NO: 916708
ggaggcacaucucucagaa

SEQ ID NO: 1177893 - RNA, 19 nt, Artificial Sequence
  Description of Artificial Sequence: Synthetic oligonucleotide
  Antisense strand to SEQ ID NO: 1177892
uucugagagaugugccucc

SEQ ID NO: 1177894 - RNA, 19 nt, Artificial Sequence
  Description of Artificial Sequence: Synthetic oligonucleotide
  Sense strand starting at position 336 of SEQ ID NO: 916708
aggcacaucucucagaaag

SEQ ID NO: 1177895 - RNA, 19 nt, Artificial Sequence
  Description of Artificial Sequence: Synthetic oligonucleotide
  Antisense strand to SEQ ID NO: 1177894
cuuucugagagaugugccu

SEQ ID NO: 1177896 - RNA, 19 nt, Artificial Sequence
  Description of Artificial Sequence: Synthetic oligonucleotide
  Sense strand starting at position 338 of SEQ ID NO: 916708
gcacaucucucagaaagug

SEQ ID NO: 1177897 - RNA, 19 nt, Artificial Sequence
  Description of Artificial Sequence: Synthetic oligonucleotide
  Antisense strand to SEQ ID NO: 1177896
cacuuucugagagaugugc

SEQ ID NO: 1177898 - RNA, 19 nt, Artificial Sequence
  Description of Artificial Sequence: Synthetic oligonucleotide
  Sense strand starting at position 353 of SEQ ID NO: 916708
agugguagccaucaucaaa

SEQ ID NO: 1177899 - RNA, 19 nt, Artificial Sequence
  Description of Artificial Sequence: Synthetic oligonucleotide
  Antisense strand to SEQ ID NO: 1177898
uuugaugauggcuaccacu

SEQ ID NO: 1177900 - RNA, 19 nt, Artificial Sequence
  Description of Artificial Sequence: Synthetic oligonucleotide
  Sense strand starting at position 391 of SEQ ID NO: 916708
cugguuacccugugaucua

SEQ ID NO: 1177901 - RNA, 19 nt, Artificial Sequence
  Description of Artificial Sequence: Synthetic oligonucleotide
  Antisense strand to SEQ ID NO: 1177900
uagaucacaggguaaccag

SEQ ID NO: 1177902 - RNA, 19 nt, Artificial Sequence
  Description of Artificial Sequence: Synthetic oligonucleotide
  Sense strand starting at position 519 of SEQ ID NO: 916708
agaucugccuuacuagaaa

SEQ ID NO: 1177903 - RNA, 19 nt, Artificial Sequence
  Description of Artificial Sequence: Synthetic oligonucleotide
  Antisense strand to SEQ ID NO: 1177902
uuucuaguaaggcagaucu

SEQ ID NO: 1177904 - RNA, 19 nt, Artificial Sequence
  Description of Artificial Sequence: Synthetic oligonucleotide
  Sense strand starting at position 522 of SEQ ID NO: 916708
ucugccuuacuagaaagua

SEQ ID NO: 1177905 - RNA, 19 nt, Artificial Sequence
  Description of Artificial Sequence: Synthetic oligonucleotide
  Antisense strand to SEQ ID NO: 1177904
uacuuucuaguaaggcaga

SEQ ID NO: 1177906 - RNA, 19 nt, Artificial Sequence
  Description of Artificial Sequence: Synthetic oligonucleotide
  Sense strand starting at position 847 of SEQ ID NO: 916708
cccuguugcuucuuucuga

SEQ ID NO: 1177907 - RNA, 19 nt, Artificial Sequence
  Description of Artificial Sequence: Synthetic oligonucleotide
  Antisense strand to SEQ ID NO: 1177906
ucagaaagaagcaacaggg

SEQ ID NO: 1177908 - RNA, 19 nt, Artificial Sequence
  Description of Artificial Sequence: Synthetic oligonucleotide
  Sense strand starting at position 891 of SEQ ID NO: 916708
ugaagaagcgaauguuacu

SEQ ID NO: 1177909 - RNA, 19 nt, Artificial Sequence
  Description of Artificial Sequence: Synthetic oligonucleotide
  Antisense strand to SEQ ID NO: 1177908
aguaacauucgcuucuuca

SEQ ID NO: 1177910 - RNA, 19 nt, Artificial Sequence
  Description of Artificial Sequence: Synthetic oligonucleotide
  Sense strand starting at position 945 of SEQ ID NO: 916708
uccuccucuccuuagaguu

SEQ ID NO: 1177911 - RNA, 19 nt, Artificial Sequence
  Description of Artificial Sequence: Synthetic oligonucleotide
  Antisense strand to SEQ ID NO: 1177910
aacucuaaggagaggagga

SEQ ID NO: 1177912 - RNA, 19 nt, Artificial Sequence
  Description of Artificial Sequence: Synthetic oligonucleotide
  Sense strand starting at position 953 of SEQ ID NO: 916708
uccuuagaguucuuccauc

SEQ ID NO: 1177913 - RNA, 19 nt, Artificial Sequence
  Description of Artificial Sequence: Synthetic oligonucleotide
  Antisense strand to SEQ ID NO: 1177912
gauggaagaacucuaagga

SEQ ID NO: 1177914 - RNA, 19 nt, Artificial Sequence
  Description of Artificial Sequence: Synthetic oligonucleotide
  Sense strand starting at position 1208 of SEQ ID NO: 916708
ugggaaaucugaggcccaa

SEQ ID NO: 1177915 - RNA, 19 nt, Artificial Sequence
  Description of Artificial Sequence: Synthetic oligonucleotide
  Antisense strand to SEQ ID NO: 1177914
uugggccucagauuuccca

SEQ ID NO: 1177916 - RNA, 19 nt, Artificial Sequence
  Description of Artificial Sequence: Synthetic oligonucleotide
  Sense strand starting at position 2225 of SEQ ID NO: 916708
aauuuaauuugcuguguag

SEQ ID NO: 1177917 - RNA, 19 nt, Artificial Sequence
  Description of Artificial Sequence: Synthetic oligonucleotide
  Antisense strand to SEQ ID NO: 1177916
cuacacagcaaauuaaauu

SEQ ID NO: 1177918 - RNA, 19 nt, Artificial Sequence
  Description of Artificial Sequence: Synthetic oligonucleotide
  Sense strand starting at position 2227 of SEQ ID NO: 916708
uuuaauuugcuguguagcu

SEQ ID NO: 1177919 - RNA, 19 nt, Artificial Sequence
  Description of Artificial Sequence: Synthetic oligonucleotide
  Antisense strand to SEQ ID NO: 1177918
agcuacacagcaaauuaaa

SEQ ID NO: 1177920 - RNA, 19 nt, Artificial Sequence
  Description of Artificial Sequence: Synthetic oligonucleotide
  Sense strand starting at position 2264 of SEQ ID NO: 916708
guuaguuaacuccagaacu

SEQ ID NO: 1177921 - RNA, 19 nt, Artificial Sequence
  Description of Artificial Sequence: Synthetic oligonucleotide
  Antisense strand to SEQ ID NO: 1177920
aguucuggaguuaacuaac

SEQ ID NO: 1177922 - RNA, 19 nt, Artificial Sequence
  Description of Artificial Sequence: Synthetic oligonucleotide
  Sense strand starting at position 2449 of SEQ ID NO: 916708
gagcgcugaacucaugaga

SEQ ID NO: 1177923 - RNA, 19 nt, Artificial Sequence
  Description of Artificial Sequence: Synthetic oligonucleotide
  Antisense strand to SEQ ID NO: 1177922
ucucaugaguucagcgcuc

SEQ ID NO: 1177924 - RNA, 19 nt, Artificial Sequence
  Description of Artificial Sequence: Synthetic oligonucleotide
  Sense strand starting at position 2452 of SEQ ID NO: 916708
cgcugaacucaugagagca

SEQ ID NO: 1177925 - RNA, 19 nt, Artificial Sequence
  Description of Artificial Sequence: Synthetic oligonucleotide
  Antisense strand to SEQ ID NO: 1177924
ugcucucaugaguucagcg

SEQ ID NO: 1177926 - RNA, 19 nt, Artificial Sequence
  Description of Artificial Sequence: Synthetic oligonucleotide
  Sense strand starting at position 2471 of SEQ ID NO: 916708
gggcccacucuuugacaga

SEQ ID NO: 1177927 - RNA, 19 nt, Artificial Sequence
  Description of Artificial Sequence: Synthetic oligonucleotide
  Antisense strand to SEQ ID NO: 1177926
ucugucaaagagugggccc

SEQ ID NO: 1177928 - RNA, 19 nt, Artificial Sequence
  Description of Artificial Sequence: Synthetic oligonucleotide
  Sense strand starting at position 2472 of SEQ ID NO: 916708
ggcccacucuuugacagaa

SEQ ID NO: 1177929 - RNA, 19 nt, Artificial Sequence
  Description of Artificial Sequence: Synthetic oligonucleotide
  Antisense strand to SEQ ID NO: 1177928
uucugucaaagagugggcc

SEQ ID NO: 1177930 - RNA, 19 nt, Artificial Sequence
  Description of Artificial Sequence: Synthetic oligonucleotide
  Sense strand starting at position 2474 of SEQ ID NO: 916708
cccacucuuugacagaagu

SEQ ID NO: 1177931 - RNA, 19 nt, Artificial Sequence
  Description of Artificial Sequence: Synthetic oligonucleotide
  Antisense strand to SEQ ID NO: 1177930
acuucugucaaagaguggg

SEQ ID NO: 1177932 - RNA, 19 nt, Artificial Sequence
  Description of Artificial Sequence: Synthetic oligonucleotide
  Sense strand starting at position 2652 of SEQ ID NO: 916708
gcuuccuguucccuuuauu

SEQ ID NO: 1177933 - RNA, 19 nt, Artificial Sequence
  Description of Artificial Sequence: Synthetic oligonucleotide
  Antisense strand to SEQ ID NO: 1177932
aauaaagggaacaggaagc

SEQ ID NO: 1177934 - RNA, 19 nt, Artificial Sequence
  Description of Artificial Sequence: Synthetic oligonucleotide
  Sense strand starting at position 2695 of SEQ ID NO: 916708
gcgugaugccgugcuaggu

SEQ ID NO: 1177935 - RNA, 19 nt, Artificial Sequence
  Description of Artificial Sequence: Synthetic oligonucleotide
  Antisense strand to SEQ ID NO: 1177934
accuagcacggcaucacgc

SEQ ID NO: 1177936 - RNA, 19 nt, Artificial Sequence
  Description of Artificial Sequence: Synthetic oligonucleotide
  Sense strand starting at position 2708 of SEQ ID NO: 916708
cuagguuccugagagccaa

SEQ ID NO: 1177937 - RNA, 19 nt, Artificial Sequence
  Description of Artificial Sequence: Synthetic oligonucleotide
  Antisense strand to SEQ ID NO: 1177936
uuggcucucaggaaccuag

SEQ ID NO: 1177938 - RNA, 19 nt, Artificial Sequence
  Description of Artificial Sequence: Synthetic oligonucleotide
  Sense strand starting at position 2759 of SEQ ID NO: 916708
cgaagaguuagaggugaca

SEQ ID NO: 1177939 - RNA, 19 nt, Artificial Sequence
  Description of Artificial Sequence: Synthetic oligonucleotide
  Antisense strand to SEQ ID NO: 1177938
ugucaccucuaacucuucg

SEQ ID NO: 1177940 - RNA, 19 nt, Artificial Sequence
  Description of Artificial Sequence: Synthetic oligonucleotide
  Sense strand starting at position 2830 of SEQ ID NO: 916708
aaugcuuugugguuuaauc

SEQ ID NO: 1177941 - RNA, 19 nt, Artificial Sequence
  Description of Artificial Sequence: Synthetic oligonucleotide
  Antisense strand to SEQ ID NO: 1177940
gauuaaaccacaaagcauu

SEQ ID NO: 1177942 - RNA, 19 nt, Artificial Sequence
  Description of Artificial Sequence: Synthetic oligonucleotide
  Sense strand starting at position 2832 of SEQ ID NO: 916708
ugcuuugugguuuaaucaa

SEQ ID NO: 1177943 - RNA, 19 nt, Artificial Sequence
  Description of Artificial Sequence: Synthetic oligonucleotide
  Antisense strand to SEQ ID NO: 1177942
uugauuaaaccacaaagca

SEQ ID NO: 1177944 - RNA, 19 nt, Artificial Sequence
  Description of Artificial Sequence: Synthetic oligonucleotide
  Sense strand starting at position 2858 of SEQ ID NO: 916708
cccacauggucucaaauga

SEQ ID NO: 1177945 - RNA, 19 nt, Artificial Sequence
  Description of Artificial Sequence: Synthetic oligonucleotide
  Antisense strand to SEQ ID NO: 1177944
ucauuugagaccauguggg

SEQ ID NO: 1177946 - RNA, 19 nt, Artificial Sequence
  Description of Artificial Sequence: Synthetic oligonucleotide
  Sense strand starting at position 2901 of SEQ ID NO: 916708
ucuuauuugaggcagcgua

SEQ ID NO: 1177947 - RNA, 19 nt, Artificial Sequence
  Description of Artificial Sequence: Synthetic oligonucleotide
  Antisense strand to SEQ ID NO: 1177946
uacgcugccucaaauaaga

SEQ ID NO: 1177948 - RNA, 19 nt, Artificial Sequence
  Description of Artificial Sequence: Synthetic oligonucleotide
  Sense strand starting at position 3309 of SEQ ID NO: 916708
gaucucuaaguauagcaga

SEQ ID NO: 1177949 - RNA, 19 nt, Artificial Sequence
  Description of Artificial Sequence: Synthetic oligonucleotide
  Antisense strand to SEQ ID NO: 1177948
ucugcuauacuuagagauc

SEQ ID NO: 1177950 - RNA, 19 nt, Artificial Sequence
  Description of Artificial Sequence: Synthetic oligonucleotide
  Sense strand starting at position 3312 of SEQ ID NO: 916708
cucuaaguauagcagaagu

SEQ ID NO: 1177951 - RNA, 19 nt, Artificial Sequence
  Description of Artificial Sequence: Synthetic oligonucleotide
  Antisense strand to SEQ ID NO: 1177950
acuucugcuauacuuagag

SEQ ID NO: 1177952 - RNA, 19 nt, Artificial Sequence
  Description of Artificial Sequence: Synthetic oligonucleotide
  Sense strand starting at position 3323 of SEQ ID NO: 916708
gcagaagugguccagaggu

SEQ ID NO: 1177953 - RNA, 19 nt, Artificial Sequence
  Description of Artificial Sequence: Synthetic oligonucleotide
  Antisense strand to SEQ ID NO: 1177952
accucuggaccacuucugc

SEQ ID NO: 1177954 - RNA, 19 nt, Artificial Sequence
  Description of Artificial Sequence: Synthetic oligonucleotide
  Sense strand starting at position 3333 of SEQ ID NO: 916708
uccagagguuccgugaacu

SEQ ID NO: 1177955 - RNA, 19 nt, Artificial Sequence
  Description of Artificial Sequence: Synthetic oligonucleotide
  Antisense strand to SEQ ID NO: 1177954
aguucacggaaccucugga

SEQ ID NO: 1177956 - RNA, 19 nt, Artificial Sequence
  Description of Artificial Sequence: Synthetic oligonucleotide
  Sense strand starting at position 3433 of SEQ ID NO: 916708
aucgaauaauuguaccaga

SEQ ID NO: 1177957 - RNA, 19 nt, Artificial Sequence
  Description of Artificial Sequence: Synthetic oligonucleotide
  Antisense strand to SEQ ID NO: 1177956
ucugguacaauuauucgau

SEQ ID NO: 1177958 - RNA, 19 nt, Artificial Sequence
  Description of Artificial Sequence: Synthetic oligonucleotide
  Sense strand starting at position 3866 of SEQ ID NO: 916708
agcagagaauucucuccau

SEQ ID NO: 1177959 - RNA, 19 nt, Artificial Sequence
  Description of Artificial Sequence: Synthetic oligonucleotide
  Antisense strand to SEQ ID NO: 1177958
auggagagaauucucugcu

SEQ ID NO: 1177960 - RNA, 19 nt, Artificial Sequence
  Description of Artificial Sequence: Synthetic oligonucleotide
  Sense strand starting at position 3895 of SEQ ID NO: 916708
ugaagacaucacugcugga

SEQ ID NO: 1177961 - RNA, 19 nt, Artificial Sequence
  Description of Artificial Sequence: Synthetic oligonucleotide
  Antisense strand to SEQ ID NO: 1177960
uccagcagugaugucuuca

SEQ ID NO: 1177962 - RNA, 19 nt, Artificial Sequence
  Description of Artificial Sequence: Synthetic oligonucleotide
  Sense strand starting at position 13 of SEQ ID NO: 916709
aucaauacuucugggacuu

SEQ ID NO: 1177963 - RNA, 19 nt, Artificial Sequence
  Description of Artificial Sequence: Synthetic oligonucleotide
  Antisense strand to SEQ ID NO: 1177962
aagucccagaaguauugau

SEQ ID NO: 1177964 - RNA, 19 nt, Artificial Sequence
  Description of Artificial Sequence: Synthetic oligonucleotide
  Sense strand starting at position 14 of SEQ ID NO: 916709
ucaauacuucugggacuuc

SEQ ID NO: 1177965 - RNA, 19 nt, Artificial Sequence
  Description of Artificial Sequence: Synthetic oligonucleotide
  Antisense strand to SEQ ID NO: 1177964
gaagucccagaaguauuga

SEQ ID NO: 1177966 - RNA, 19 nt, Artificial Sequence
  Description of Artificial Sequence: Synthetic oligonucleotide
  Sense strand starting at position 124 of SEQ ID NO: 916709
agggaaugauaacagcuaa

SEQ ID NO: 1177967 - RNA, 19 nt, Artificial Sequence
  Description of Artificial Sequence: Synthetic oligonucleotide
  Antisense strand to SEQ ID NO: 1177966
uuagcuguuaucauucccu

SEQ ID NO: 1177968 - RNA, 19 nt, Artificial Sequence
  Description of Artificial Sequence: Synthetic oligonucleotide
  Sense strand starting at position 173 of SEQ ID NO: 916709
gccagauacugugucaaac

SEQ ID NO: 1177969 - RNA, 19 nt, Artificial Sequence
  Description of Artificial Sequence: Synthetic oligonucleotide
  Antisense strand to SEQ ID NO: 1177968
guuugacacaguaucuggc

SEQ ID NO: 1177970 - RNA, 19 nt, Artificial Sequence
  Description of Artificial Sequence: Synthetic oligonucleotide
  Sense strand starting at position 207 of SEQ ID NO: 916709
gcaaccaucucagagguua

SEQ ID NO: 1177971 - RNA, 19 nt, Artificial Sequence
  Description of Artificial Sequence: Synthetic oligonucleotide
  Antisense strand to SEQ ID NO: 1177970
uaaccucugagaugguugc

SEQ ID NO: 1177972 - RNA, 19 nt, Artificial Sequence
  Description of Artificial Sequence: Synthetic oligonucleotide
  Sense strand starting at position 218 of SEQ ID NO: 916709
agagguuauuauucccauu

SEQ ID NO: 1177973 - RNA, 19 nt, Artificial Sequence
  Description of Artificial Sequence: Synthetic oligonucleotide
  Antisense strand to SEQ ID NO: 1177972
aaugggaauaauaaccucu

SEQ ID NO: 1177974 - RNA, 19 nt, Artificial Sequence
  Description of Artificial Sequence: Synthetic oligonucleotide
  Sense strand starting at position 382 of SEQ ID NO: 916709
ggaugauggcgccacagau

SEQ ID NO: 1177975 - RNA, 19 nt, Artificial Sequence
  Description of Artificial Sequence: Synthetic oligonucleotide
  Antisense strand to SEQ ID NO: 1177974
aucuguggcgccaucaucc

SEQ ID NO: 1177976 - RNA, 19 nt, Artificial Sequence
  Description of Artificial Sequence: Synthetic oligonucleotide
  Sense strand starting at position 397 of SEQ ID NO: 916709
agaugauacugcuuacauu

SEQ ID NO: 1177977 - RNA, 19 nt, Artificial Sequence
  Description of Artificial Sequence: Synthetic oligonucleotide
  Antisense strand to SEQ ID NO: 1177976
aauguaagcaguaucaucu

SEQ ID NO: 1177978 - RNA, 19 nt, Artificial Sequence
  Description of Artificial Sequence: Synthetic oligonucleotide
  Sense strand starting at position 495 of SEQ ID NO: 916709
gucugcuuggucugacuca

SEQ ID NO: 1177979 - RNA, 19 nt, Artificial Sequence
  Description of Artificial Sequence: Synthetic oligonucleotide
  Antisense strand to SEQ ID NO: 1177978
ugagucagaccaagcagac

SEQ ID NO: 1177980 - RNA, 19 nt, Artificial Sequence
  Description of Artificial Sequence: Synthetic oligonucleotide
  Sense strand starting at position 540 of SEQ ID NO: 916709
ggaggcacaucucucagaa

SEQ ID NO: 1177981 - RNA, 19 nt, Artificial Sequence
  Description of Artificial Sequence: Synthetic oligonucleotide
  Antisense strand to SEQ ID NO: 1177980
uucugagagaugugccucc

SEQ ID NO: 1177982 - RNA, 19 nt, Artificial Sequence
  Description of Artificial Sequence: Synthetic oligonucleotide
  Sense strand starting at position 542 of SEQ ID NO: 916709
aggcacaucucucagaaag

SEQ ID NO: 1177983 - RNA, 19 nt, Artificial Sequence
  Description of Artificial Sequence: Synthetic oligonucleotide
  Antisense strand to SEQ ID NO: 1177982
cuuucugagagaugugccu

SEQ ID NO: 1177984 - RNA, 19 nt, Artificial Sequence
  Description of Artificial Sequence: Synthetic oligonucleotide
  Sense strand starting at position 544 of SEQ ID NO: 916709
gcacaucucucagaaagug

SEQ ID NO: 1177985 - RNA, 19 nt, Artificial Sequence
  Description of Artificial Sequence: Synthetic oligonucleotide
  Antisense strand to SEQ ID NO: 1177984
cacuuucugagagaugugc

SEQ ID NO: 1177986 - RNA, 19 nt, Artificial Sequence
  Description of Artificial Sequence: Synthetic oligonucleotide
  Sense strand starting at position 559 of SEQ ID NO: 916709
agugguagccaucaucaaa

SEQ ID NO: 1177987 - RNA, 19 nt, Artificial Sequence
  Description of Artificial Sequence: Synthetic oligonucleotide
  Antisense strand to SEQ ID NO: 1177986
uuugaugauggcuaccacu

SEQ ID NO: 1177988 - RNA, 19 nt, Artificial Sequence
  Description of Artificial Sequence: Synthetic oligonucleotide
  Sense strand starting at position 597 of SEQ ID NO: 916709
cugguuacccugugaucua

SEQ ID NO: 1177989 - RNA, 19 nt, Artificial Sequence
  Description of Artificial Sequence: Synthetic oligonucleotide
  Antisense strand to SEQ ID NO: 1177988
uagaucacaggguaaccag

SEQ ID NO: 1177990 - RNA, 19 nt, Artificial Sequence
  Description of Artificial Sequence: Synthetic oligonucleotide
  Sense strand starting at position 725 of SEQ ID NO: 916709
agaucugccuuacuagaaa

SEQ ID NO: 1177991 - RNA, 19 nt, Artificial Sequence
  Description of Artificial Sequence: Synthetic oligonucleotide
  Antisense strand to SEQ ID NO: 1177990
uuucuaguaaggcagaucu

SEQ ID NO: 1177992 - RNA, 19 nt, Artificial Sequence
  Description of Artificial Sequence: Synthetic oligonucleotide
  Sense strand starting at position 728 of SEQ ID NO: 916709
ucugccuuacuagaaagua

SEQ ID NO: 1177993 - RNA, 19 nt, Artificial Sequence
  Description of Artificial Sequence: Synthetic oligonucleotide
  Antisense strand to SEQ ID NO: 1177992
uacuuucuaguaaggcaga

SEQ ID NO: 1177994 - RNA, 19 nt, Artificial Sequence
  Description of Artificial Sequence: Synthetic oligonucleotide
  Sense strand starting at position 1053 of SEQ ID NO: 916709
cccuguugcuucuuucuga

SEQ ID NO: 1177995 - RNA, 19 nt, Artificial Sequence
  Description of Artificial Sequence: Synthetic oligonucleotide
  Antisense strand to SEQ ID NO: 1177994
ucagaaagaagcaacaggg

SEQ ID NO: 1177996 - RNA, 19 nt, Artificial Sequence
  Description of Artificial Sequence: Synthetic oligonucleotide
  Sense strand starting at position 1097 of SEQ ID NO: 916709
ugaagaagcgaauguuacu

SEQ ID NO: 1177997 - RNA, 19 nt, Artificial Sequence
  Description of Artificial Sequence: Synthetic oligonucleotide
  Antisense strand to SEQ ID NO: 1177996
aguaacauucgcuucuuca

SEQ ID NO: 1177998 - RNA, 19 nt, Artificial Sequence
  Description of Artificial Sequence: Synthetic oligonucleotide
  Sense strand starting at position 1151 of SEQ ID NO: 916709
uccuccucuccuuagaguu

SEQ ID NO: 1177999 - RNA, 19 nt, Artificial Sequence
  Description of Artificial Sequence: Synthetic oligonucleotide
  Antisense strand to SEQ ID NO: 1177998
aacucuaaggagaggagga

SEQ ID NO: 1178000 - RNA, 19 nt, Artificial Sequence
  Description of Artificial Sequence: Synthetic oligonucleotide
  Sense strand starting at position 1159 of SEQ ID NO: 916709
uccuuagaguucuuccauc

SEQ ID NO: 1178001 - RNA, 19 nt, Artificial Sequence
  Description of Artificial Sequence: Synthetic oligonucleotide
  Antisense strand to SEQ ID NO: 1178000
gauggaagaacucuaagga

SEQ ID NO: 1178002 - RNA, 19 nt, Artificial Sequence
  Description of Artificial Sequence: Synthetic oligonucleotide
  Sense strand starting at position 1414 of SEQ ID NO: 916709
ugggaaaucugaggcccaa

SEQ ID NO: 1178003 - RNA, 19 nt, Artificial Sequence
  Description of Artificial Sequence: Synthetic oligonucleotide
  Antisense strand to SEQ ID NO: 1178002
uugggccucagauuuccca

SEQ ID NO: 1178004 - RNA, 19 nt, Artificial Sequence
  Description of Artificial Sequence: Synthetic oligonucleotide
  Sense strand starting at position 2431 of SEQ ID NO: 916709
aauuuaauuugcuguguag

SEQ ID NO: 1178005 - RNA, 19 nt, Artificial Sequence
  Description of Artificial Sequence: Synthetic oligonucleotide
  Antisense strand to SEQ ID NO: 1178004
cuacacagcaaauuaaauu

SEQ ID NO: 1178006 - RNA, 19 nt, Artificial Sequence
  Description of Artificial Sequence: Synthetic oligonucleotide
  Sense strand starting at position 2433 of SEQ ID NO: 916709
uuuaauuugcuguguagcu

SEQ ID NO: 1178007 - RNA, 19 nt, Artificial Sequence
  Description of Artificial Sequence: Synthetic oligonucleotide
  Antisense strand to SEQ ID NO: 1178006
agcuacacagcaaauuaaa

SEQ ID NO: 1178008 - RNA, 19 nt, Artificial Sequence
  Description of Artificial Sequence: Synthetic oligonucleotide
  Sense strand starting at position 2470 of SEQ ID NO: 916709
guuaguuaacuccagaacu

SEQ ID NO: 1178009 - RNA, 19 nt, Artificial Sequence
  Description of Artificial Sequence: Synthetic oligonucleotide
  Antisense strand to SEQ ID NO: 1178008
aguucuggaguuaacuaac

SEQ ID NO: 1178010 - RNA, 19 nt, Artificial Sequence
  Description of Artificial Sequence: Synthetic oligonucleotide
  Sense strand starting at position 2655 of SEQ ID NO: 916709
gagcgcugaacucaugaga

SEQ ID NO: 1178011 - RNA, 19 nt, Artificial Sequence
  Description of Artificial Sequence: Synthetic oligonucleotide
  Antisense strand to SEQ ID NO: 1178010
ucucaugaguucagcgcuc

SEQ ID NO: 1178012 - RNA, 19 nt, Artificial Sequence
  Description of Artificial Sequence: Synthetic oligonucleotide
  Sense strand starting at position 2658 of SEQ ID NO: 916709
cgcugaacucaugagagca

SEQ ID NO: 1178013 - RNA, 19 nt, Artificial Sequence
  Description of Artificial Sequence: Synthetic oligonucleotide
  Antisense strand to SEQ ID NO: 1178012
ugcucucaugaguucagcg

SEQ ID NO: 1178014 - RNA, 19 nt, Artificial Sequence
  Description of Artificial Sequence: Synthetic oligonucleotide
  Sense strand starting at position 2677 of SEQ ID NO: 916709
gggcccacucuuugacaga

SEQ ID NO: 1178015 - RNA, 19 nt, Artificial Sequence
  Description of Artificial Sequence: Synthetic oligonucleotide
  Antisense strand to SEQ ID NO: 1178014
ucugucaaagagugggccc

SEQ ID NO: 1178016 - RNA, 19 nt, Artificial Sequence
  Description of Artificial Sequence: Synthetic oligonucleotide
  Sense strand starting at position 2678 of SEQ ID NO: 916709
ggcccacucuuugacagaa

SEQ ID NO: 1178017 - RNA, 19 nt, Artificial Sequence
  Description of Artificial Sequence: Synthetic oligonucleotide
  Antisense strand to SEQ ID NO: 1178016
uucugucaaagagugggcc

SEQ ID NO: 1178018 - RNA, 19 nt, Artificial Sequence
  Description of Artificial Sequence: Synthetic oligonucleotide
  Sense strand starting at position 2680 of SEQ ID NO: 916709
cccacucuuugacagaagu

SEQ ID NO: 1178019 - RNA, 19 nt, Artificial Sequence
  Description of Artificial Sequence: Synthetic oligonucleotide
  Antisense strand to SEQ ID NO: 1178018
acuucugucaaagaguggg

SEQ ID NO: 1178020 - RNA, 19 nt, Artificial Sequence
  Description of Artificial Sequence: Synthetic oligonucleotide
  Sense strand starting at position 2858 of SEQ ID NO: 916709
gcuuccuguucccuuuauu

SEQ ID NO: 1178021 - RNA, 19 nt, Artificial Sequence
  Description of Artificial Sequence: Synthetic oligonucleotide
  Antisense strand to SEQ ID NO: 1178020
aauaaagggaacaggaagc

SEQ ID NO: 1178022 - RNA, 19 nt, Artificial Sequence
  Description of Artificial Sequence: Synthetic oligonucleotide
  Sense strand starting at position 2901 of SEQ ID NO: 916709
gcgugaugccgugcuaggu

SEQ ID NO: 1178023 - RNA, 19 nt, Artificial Sequence
  Description of Artificial Sequence: Synthetic oligonucleotide
  Antisense strand to SEQ ID NO: 1178022
accuagcacggcaucacgc

SEQ ID NO: 1178024 - RNA, 19 nt, Artificial Sequence
  Description of Artificial Sequence: Synthetic oligonucleotide
  Sense strand starting at position 2965 of SEQ ID NO: 916709
cgaagaguuagaggugaca

SEQ ID NO: 1178025 - RNA, 19 nt, Artificial Sequence
  Description of Artificial Sequence: Synthetic oligonucleotide
  Antisense strand to SEQ ID NO: 1178024
ugucaccucuaacucuucg

SEQ ID NO: 1178026 - RNA, 19 nt, Artificial Sequence
  Description of Artificial Sequence: Synthetic oligonucleotide
  Sense strand starting at position 3036 of SEQ ID NO: 916709
aaugcuuugugguuuaauc

SEQ ID NO: 1178027 - RNA, 19 nt, Artificial Sequence
  Description of Artificial Sequence: Synthetic oligonucleotide
  Antisense strand to SEQ ID NO: 1178026
gauuaaaccacaaagcauu

SEQ ID NO: 1178028 - RNA, 19 nt, Artificial Sequence
  Description of Artificial Sequence: Synthetic oligonucleotide
  Sense strand starting at position 3038 of SEQ ID NO: 916709
ugcuuugugguuuaaucaa

SEQ ID NO: 1178029 - RNA, 19 nt, Artificial Sequence
  Description of Artificial Sequence: Synthetic oligonucleotide
  Antisense strand to SEQ ID NO: 1178028
uugauuaaaccacaaagca

SEQ ID NO: 1178030 - RNA, 19 nt, Artificial Sequence
  Description of Artificial Sequence: Synthetic oligonucleotide
  Sense strand starting at position 3064 of SEQ ID NO: 916709
cccacauggucucaaauga

SEQ ID NO: 1178031 - RNA, 19 nt, Artificial Sequence
  Description of Artificial Sequence: Synthetic oligonucleotide
  Antisense strand to SEQ ID NO: 1178030
ucauuugagaccauguggg

SEQ ID NO: 1178032 - RNA, 19 nt, Artificial Sequence
  Description of Artificial Sequence: Synthetic oligonucleotide
  Sense strand starting at position 3107 of SEQ ID NO: 916709
ucuuauuugaggcagcgua

SEQ ID NO: 1178033 - RNA, 19 nt, Artificial Sequence
  Description of Artificial Sequence: Synthetic oligonucleotide
  Antisense strand to SEQ ID NO: 1178032
uacgcugccucaaauaaga

SEQ ID NO: 1178034 - RNA, 19 nt, Artificial Sequence
  Description of Artificial Sequence: Synthetic oligonucleotide
  Sense strand starting at position 3515 of SEQ ID NO: 916709
gaucucuaaguauagcaga

SEQ ID NO: 1178035 - RNA, 19 nt, Artificial Sequence
  Description of Artificial Sequence: Synthetic oligonucleotide
  Antisense strand to SEQ ID NO: 1178034
ucugcuauacuuagagauc

SEQ ID NO: 1178036 - RNA, 19 nt, Artificial Sequence
  Description of Artificial Sequence: Synthetic oligonucleotide
  Sense strand starting at position 3529 of SEQ ID NO: 916709
gcagaagugguccagaggu

SEQ ID NO: 1178037 - RNA, 19 nt, Artificial Sequence
  Description of Artificial Sequence: Synthetic oligonucleotide
  Antisense strand to SEQ ID NO: 1178036
accucuggaccacuucugc

SEQ ID NO: 1178038 - RNA, 19 nt, Artificial Sequence
  Description of Artificial Sequence: Synthetic oligonucleotide
  Sense strand starting at position 3539 of SEQ ID NO: 916709
uccagagguuccgugaacu

SEQ ID NO: 1178039 - RNA, 19 nt, Artificial Sequence
  Description of Artificial Sequence: Synthetic oligonucleotide
  Antisense strand to SEQ ID NO: 1178038
aguucacggaaccucugga

SEQ ID NO: 1178040 - RNA, 19 nt, Artificial Sequence
  Description of Artificial Sequence: Synthetic oligonucleotide
  Sense strand starting at position 3639 of SEQ ID NO: 916709
aucgaauaauuguaccaga

SEQ ID NO: 1178041 - RNA, 19 nt, Artificial Sequence
  Description of Artificial Sequence: Synthetic oligonucleotide
  Antisense strand to SEQ ID NO: 1178040
ucugguacaauuauucgau

SEQ ID NO: 1178042 - RNA, 19 nt, Artificial Sequence
  Description of Artificial Sequence: Synthetic oligonucleotide
  Sense strand starting at position 314 of SEQ ID NO: 916710
agaagaaacgcuugaacga

SEQ ID NO: 1178043 - RNA, 19 nt, Artificial Sequence
  Description of Artificial Sequence: Synthetic oligonucleotide
  Antisense strand to SEQ ID NO: 1178042
ucguucaagcguuucuucu

SEQ ID NO: 1178044 - RNA, 19 nt, Artificial Sequence
  Description of Artificial Sequence: Synthetic oligonucleotide
  Sense strand starting at position 776 of SEQ ID NO: 916710
ucaggaggcaucuggguua

SEQ ID NO: 1178045 - RNA, 19 nt, Artificial Sequence
  Description of Artificial Sequence: Synthetic oligonucleotide
  Antisense strand to SEQ ID NO: 1178044
uaacccagaugccuccuga

SEQ ID NO: 1178046 - RNA, 19 nt, Artificial Sequence
  Description of Artificial Sequence: Synthetic oligonucleotide
  Sense strand starting at position 881 of SEQ ID NO: 916710
ggacucaccuugcggaaga

SEQ ID NO: 1178047 - RNA, 19 nt, Artificial Sequence
  Description of Artificial Sequence: Synthetic oligonucleotide
  Antisense strand to SEQ ID NO: 1178046
ucuuccgcaaggugagucc

SEQ ID NO: 1178048 - RNA, 19 nt, Artificial Sequence
  Description of Artificial Sequence: Synthetic oligonucleotide
  Sense strand starting at position 1066 of SEQ ID NO: 916710
gagggcugaggcugucuaa

SEQ ID NO: 1178049 - RNA, 19 nt, Artificial Sequence
  Description of Artificial Sequence: Synthetic oligonucleotide
  Antisense strand to SEQ ID NO: 1178048
uuagacagccucagcccuc

SEQ ID NO: 1178050 - RNA, 19 nt, Artificial Sequence
  Description of Artificial Sequence: Synthetic oligonucleotide
  Sense strand starting at position 1073 of SEQ ID NO: 916710
gaggcugucuaauggaauu

SEQ ID NO: 1178051 - RNA, 19 nt, Artificial Sequence
  Description of Artificial Sequence: Synthetic oligonucleotide
  Antisense strand to SEQ ID NO: 1178050
aauuccauuagacagccuc

SEQ ID NO: 1178052 - RNA, 19 nt, Artificial Sequence
  Description of Artificial Sequence: Synthetic oligonucleotide
  Sense strand starting at position 1095 of SEQ ID NO: 916710
ccgcauugucucuaacgga

SEQ ID NO: 1178053 - RNA, 19 nt, Artificial Sequence
  Description of Artificial Sequence: Synthetic oligonucleotide
  Antisense strand to SEQ ID NO: 1178052
uccguuagagacaaugcgg

SEQ ID NO: 1178054 - RNA, 19 nt, Artificial Sequence
  Description of Artificial Sequence: Synthetic oligonucleotide
  Sense strand starting at position 2233 of SEQ ID NO: 916710
guaggaaggccugacuuga

SEQ ID NO: 1178055 - RNA, 19 nt, Artificial Sequence
  Description of Artificial Sequence: Synthetic oligonucleotide
  Antisense strand to SEQ ID NO: 1178054
ucaagucaggccuuccuac

SEQ ID NO: 1178056 - RNA, 19 nt, Artificial Sequence
  Description of Artificial Sequence: Synthetic oligonucleotide
  Sense strand starting at position 2275 of SEQ ID NO: 916710
gguagaaggaccugaaguu

SEQ ID NO: 1178057 - RNA, 19 nt, Artificial Sequence
  Description of Artificial Sequence: Synthetic oligonucleotide
  Antisense strand to SEQ ID NO: 1178056
aacuucagguccuucuacc

SEQ ID NO: 1178058 - RNA, 19 nt, Artificial Sequence
  Description of Artificial Sequence: Synthetic oligonucleotide
  Sense strand starting at position 2603 of SEQ ID NO: 916710
gagguugucugcugauguu

SEQ ID NO: 1178059 - RNA, 19 nt, Artificial Sequence
  Description of Artificial Sequence: Synthetic oligonucleotide
  Antisense strand to SEQ ID NO: 1178058
aacaucagcagacaaccuc

SEQ ID NO: 1178060 - RNA, 19 nt, Artificial Sequence
  Description of Artificial Sequence: Synthetic oligonucleotide
  Sense strand starting at position 2776 of SEQ ID NO: 916710
uuuguauucugucuugguu

SEQ ID NO: 1178061 - RNA, 19 nt, Artificial Sequence
  Description of Artificial Sequence: Synthetic oligonucleotide
  Antisense strand to SEQ ID NO: 1178060
aaccaagacagaauacaaa

SEQ ID NO: 1178062 - RNA, 19 nt, Artificial Sequence
  Description of Artificial Sequence: Synthetic oligonucleotide
  Sense strand starting at position 2778 of SEQ ID NO: 916710
uguauucugucuugguuua

SEQ ID NO: 1178063 - RNA, 19 nt, Artificial Sequence
  Description of Artificial Sequence: Synthetic oligonucleotide
  Antisense strand to SEQ ID NO: 1178062
uaaaccaagacagaauaca

SEQ ID NO: 1178064 - RNA, 19 nt, Artificial Sequence
  Description of Artificial Sequence: Synthetic oligonucleotide
  Sense strand starting at position 2824 of SEQ ID NO: 916710
accaauugcugcucaguca

SEQ ID NO: 1178065 - RNA, 19 nt, Artificial Sequence
  Description of Artificial Sequence: Synthetic oligonucleotide
  Antisense strand to SEQ ID NO: 1178064
ugacugagcagcaauuggu

SEQ ID NO: 1178066 - RNA, 19 nt, Artificial Sequence
  Description of Artificial Sequence: Synthetic oligonucleotide
  Sense strand starting at position 2825 of SEQ ID NO: 916710
ccaauugcugcucagucau

SEQ ID NO: 1178067 - RNA, 19 nt, Artificial Sequence
  Description of Artificial Sequence: Synthetic oligonucleotide
  Antisense strand to SEQ ID NO: 1178066
augacugagcagcaauugg

SEQ ID NO: 1178068 - RNA, 19 nt, Artificial Sequence
  Description of Artificial Sequence: Synthetic oligonucleotide
  Sense strand starting at position 2833 of SEQ ID NO: 916710
ugcucagucaugggcuuua

SEQ ID NO: 1178069 - RNA, 19 nt, Artificial Sequence
  Description of Artificial Sequence: Synthetic oligonucleotide
  Antisense strand to SEQ ID NO: 1178068
uaaagcccaugacugagca

SEQ ID NO: 1178070 - RNA, 19 nt, Artificial Sequence
  Description of Artificial Sequence: Synthetic oligonucleotide
  Sense strand starting at position 2855 of SEQ ID NO: 916710
gaaccagagugauuccuga

SEQ ID NO: 1178071 - RNA, 19 nt, Artificial Sequence
  Description of Artificial Sequence: Synthetic oligonucleotide
  Antisense strand to SEQ ID NO: 1178070
ucaggaaucacucugguuc

SEQ ID NO: 1178072 - RNA, 19 nt, Artificial Sequence
  Description of Artificial Sequence: Synthetic oligonucleotide
  Sense strand starting at position 2859 of SEQ ID NO: 916710
cagagugauuccugaggua

SEQ ID NO: 1178073 - RNA, 19 nt, Artificial Sequence
  Description of Artificial Sequence: Synthetic oligonucleotide
  Antisense strand to SEQ ID NO: 1178072
uaccucaggaaucacucug

SEQ ID NO: 1178074 - RNA, 19 nt, Artificial Sequence
  Description of Artificial Sequence: Synthetic oligonucleotide
  Sense strand starting at position 2862 of SEQ ID NO: 916710
agugauuccugagguagga

SEQ ID NO: 1178075 - RNA, 19 nt, Artificial Sequence
  Description of Artificial Sequence: Synthetic oligonucleotide
  Antisense strand to SEQ ID NO: 1178074
uccuaccucaggaaucacu

SEQ ID NO: 1178076 - RNA, 19 nt, Artificial Sequence
  Description of Artificial Sequence: Synthetic oligonucleotide
  Sense strand starting at position 2939 of SEQ ID NO: 916710
aggagcugguuuccaguau

SEQ ID NO: 1178077 - RNA, 19 nt, Artificial Sequence
  Description of Artificial Sequence: Synthetic oligonucleotide
  Antisense strand to SEQ ID NO: 1178076
auacuggaaaccagcuccu

SEQ ID NO: 1178078 - RNA, 19 nt, Artificial Sequence
  Description of Artificial Sequence: Synthetic oligonucleotide
  Sense strand starting at position 2940 of SEQ ID NO: 916710
ggagcugguuuccaguauu

SEQ ID NO: 1178079 - RNA, 19 nt, Artificial Sequence
  Description of Artificial Sequence: Synthetic oligonucleotide
  Antisense strand to SEQ ID NO: 1178078
aauacuggaaaccagcucc

SEQ ID NO: 1178080 - RNA, 19 nt, Artificial Sequence
  Description of Artificial Sequence: Synthetic oligonucleotide
  Sense strand starting at position 2943 of SEQ ID NO: 916710
gcugguuuccaguauugau

SEQ ID NO: 1178081 - RNA, 19 nt, Artificial Sequence
  Description of Artificial Sequence: Synthetic oligonucleotide
  Antisense strand to SEQ ID NO: 1178080
aucaauacuggaaaccagc

SEQ ID NO: 1178082 - RNA, 19 nt, Artificial Sequence
  Description of Artificial Sequence: Synthetic oligonucleotide
  Sense strand starting at position 2947 of SEQ ID NO: 916710
guuuccaguauugaugagu

SEQ ID NO: 1178083 - RNA, 19 nt, Artificial Sequence
  Description of Artificial Sequence: Synthetic oligonucleotide
  Antisense strand to SEQ ID NO: 1178082
acucaucaauacuggaaac

SEQ ID NO: 1178084 - RNA, 19 nt, Artificial Sequence
  Description of Artificial Sequence: Synthetic oligonucleotide
  Sense strand starting at position 3106 of SEQ ID NO: 916710
uuguauaucuaugcgcaca

SEQ ID NO: 1178085 - RNA, 19 nt, Artificial Sequence
  Description of Artificial Sequence: Synthetic oligonucleotide
  Antisense strand to SEQ ID NO: 1178084
ugugcgcauagauauacaa

SEQ ID NO: 1178086 - RNA, 19 nt, Artificial Sequence
  Description of Artificial Sequence: Synthetic oligonucleotide
  Sense strand starting at position 3108 of SEQ ID NO: 916710
guauaucuaugcgcacaca

SEQ ID NO: 1178087 - RNA, 19 nt, Artificial Sequence
  Description of Artificial Sequence: Synthetic oligonucleotide
  Antisense strand to SEQ ID NO: 1178086
ugugugcgcauagauauac

SEQ ID NO: 1178088 - RNA, 19 nt, Artificial Sequence
  Description of Artificial Sequence: Synthetic oligonucleotide
  Sense strand starting at position 3191 of SEQ ID NO: 916710
uagcgagaaggcugauauc

SEQ ID NO: 1178089 - RNA, 19 nt, Artificial Sequence
  Description of Artificial Sequence: Synthetic oligonucleotide
  Antisense strand to SEQ ID NO: 1178088
gauaucagccuucucgcua

SEQ ID NO: 1178090 - RNA, 19 nt, Artificial Sequence
  Description of Artificial Sequence: Synthetic oligonucleotide
  Sense strand starting at position 3201 of SEQ ID NO: 916710
gcugauaucuggccuuugu

SEQ ID NO: 1178091 - RNA, 19 nt, Artificial Sequence
  Description of Artificial Sequence: Synthetic oligonucleotide
  Antisense strand to SEQ ID NO: 1178090
acaaaggccagauaucagc

SEQ ID NO: 1178092 - RNA, 19 nt, Artificial Sequence
  Description of Artificial Sequence: Synthetic oligonucleotide
  Sense strand starting at position 3209 of SEQ ID NO: 916710
cuggccuuuguaugucaaa

SEQ ID NO: 1178093 - RNA, 19 nt, Artificial Sequence
  Description of Artificial Sequence: Synthetic oligonucleotide
  Antisense strand to SEQ ID NO: 1178092
uuugacauacaaaggccag

SEQ ID NO: 1178094 - RNA, 19 nt, Artificial Sequence
  Description of Artificial Sequence: Synthetic oligonucleotide
  Sense strand starting at position 3313 of SEQ ID NO: 916710
cuggguuugccaggaacca

SEQ ID NO: 1178095 - RNA, 19 nt, Artificial Sequence
  Description of Artificial Sequence: Synthetic oligonucleotide
  Antisense strand to SEQ ID NO: 1178094
ugguuccuggcaaacccag

SEQ ID NO: 1178096 - RNA, 19 nt, Artificial Sequence
  Description of Artificial Sequence: Synthetic oligonucleotide
  Sense strand starting at position 3366 of SEQ ID NO: 916710
agcgcuguccugugagaca

SEQ ID NO: 1178097 - RNA, 19 nt, Artificial Sequence
  Description of Artificial Sequence: Synthetic oligonucleotide
  Antisense strand to SEQ ID NO: 1178096
ugucucacaggacagcgcu

SEQ ID NO: 1178098 - RNA, 19 nt, Artificial Sequence
  Description of Artificial Sequence: Synthetic oligonucleotide
  Sense strand starting at position 3439 of SEQ ID NO: 916710
ucagguuccugccuggaua

SEQ ID NO: 1178099 - RNA, 19 nt, Artificial Sequence
  Description of Artificial Sequence: Synthetic oligonucleotide
  Antisense strand to SEQ ID NO: 1178098
uauccaggcaggaaccuga

SEQ ID NO: 1178100 - RNA, 19 nt, Artificial Sequence
  Description of Artificial Sequence: Synthetic oligonucleotide
  Sense strand starting at position 3440 of SEQ ID NO: 916710
cagguuccugccuggauau

SEQ ID NO: 1178101 - RNA, 19 nt, Artificial Sequence
  Description of Artificial Sequence: Synthetic oligonucleotide
  Antisense strand to SEQ ID NO: 1178100
auauccaggcaggaaccug

SEQ ID NO: 1178102 - RNA, 19 nt, Artificial Sequence
  Description of Artificial Sequence: Synthetic oligonucleotide
  Sense strand starting at position 3491 of SEQ ID NO: 916710
uggccagcuccucaguauu

SEQ ID NO: 1178103 - RNA, 19 nt, Artificial Sequence
  Description of Artificial Sequence: Synthetic oligonucleotide
  Antisense strand to SEQ ID NO: 1178102
aauacugaggagcuggcca

SEQ ID NO: 1178104 - RNA, 19 nt, Artificial Sequence
  Description of Artificial Sequence: Synthetic oligonucleotide
  Sense strand starting at position 3533 of SEQ ID NO: 916710
cuuugugcguccugugaga

SEQ ID NO: 1178105 - RNA, 19 nt, Artificial Sequence
  Description of Artificial Sequence: Synthetic oligonucleotide
  Antisense strand to SEQ ID NO: 1178104
ucucacaggacgcacaaag

SEQ ID NO: 1178106 - RNA, 19 nt, Artificial Sequence
  Description of Artificial Sequence: Synthetic oligonucleotide
  Sense strand starting at position 3535 of SEQ ID NO: 916710
uugugcguccugugagaug

SEQ ID NO: 1178107 - RNA, 19 nt, Artificial Sequence
  Description of Artificial Sequence: Synthetic oligonucleotide
  Antisense strand to SEQ ID NO: 1178106
caucucacaggacgcacaa

SEQ ID NO: 1178108 - RNA, 19 nt, Artificial Sequence
  Description of Artificial Sequence: Synthetic oligonucleotide
  Sense strand starting at position 3649 of SEQ ID NO: 916710
gccaguuccuucuccuuga

SEQ ID NO: 1178109 - RNA, 19 nt, Artificial Sequence
  Description of Artificial Sequence: Synthetic oligonucleotide
  Antisense strand to SEQ ID NO: 1178108
ucaaggagaaggaacuggc

SEQ ID NO: 1178110 - RNA, 19 nt, Artificial Sequence
  Description of Artificial Sequence: Synthetic oligonucleotide
  Sense strand starting at position 3751 of SEQ ID NO: 916710
cccuaacuccugggaauug

SEQ ID NO: 1178111 - RNA, 19 nt, Artificial Sequence
  Description of Artificial Sequence: Synthetic oligonucleotide
  Antisense strand to SEQ ID NO: 1178110
caauucccaggaguuaggg

SEQ ID NO: 1178112 - RNA, 19 nt, Artificial Sequence
  Description of Artificial Sequence: Synthetic oligonucleotide
  Sense strand starting at position 641 of SEQ ID NO: 916711
uagcaugcgucuguaaucu

SEQ ID NO: 1178113 - RNA, 19 nt, Artificial Sequence
  Description of Artificial Sequence: Synthetic oligonucleotide
  Antisense strand to SEQ ID NO: 1178112
agauuacagacgcaugcua

SEQ ID NO: 1178114 - RNA, 19 nt, Artificial Sequence
  Description of Artificial Sequence: Synthetic oligonucleotide
  Sense strand starting at position 788 of SEQ ID NO: 916711
gcucuagacuaaggacuuu

SEQ ID NO: 1178115 - RNA, 19 nt, Artificial Sequence
  Description of Artificial Sequence: Synthetic oligonucleotide
  Antisense strand to SEQ ID NO: 1178114
aaaguccuuagucuagagc

SEQ ID NO: 1178116 - RNA, 19 nt, Artificial Sequence
  Description of Artificial Sequence: Synthetic oligonucleotide
  Sense strand starting at position 850 of SEQ ID NO: 916711
gaaacuuccuguuauagag

SEQ ID NO: 1178117 - RNA, 19 nt, Artificial Sequence
  Description of Artificial Sequence: Synthetic oligonucleotide
  Antisense strand to SEQ ID NO: 1178116
cucuauaacaggaaguuuc

SEQ ID NO: 1178118 - RNA, 19 nt, Artificial Sequence
  Description of Artificial Sequence: Synthetic oligonucleotide
  Sense strand starting at position 859 of SEQ ID NO: 916711
uguuauagagcccaucaga

SEQ ID NO: 1178119 - RNA, 19 nt, Artificial Sequence
  Description of Artificial Sequence: Synthetic oligonucleotide
  Antisense strand to SEQ ID NO: 1178118
ucugaugggcucuauaaca

SEQ ID NO: 1178120 - RNA, 19 nt, Artificial Sequence
  Description of Artificial Sequence: Synthetic oligonucleotide
  Sense strand starting at position 982 of SEQ ID NO: 916711
agaugacggucuagaggua

SEQ ID NO: 1178121 - RNA, 19 nt, Artificial Sequence
  Description of Artificial Sequence: Synthetic oligonucleotide
  Antisense strand to SEQ ID NO: 1178120
uaccucuagaccgucaucu

SEQ ID NO: 1178122 - RNA, 19 nt, Artificial Sequence
  Description of Artificial Sequence: Synthetic oligonucleotide
  Sense strand starting at position 1053 of SEQ ID NO: 916711
ggcucuccuaccuggagaa

SEQ ID NO: 1178123 - RNA, 19 nt, Artificial Sequence
  Description of Artificial Sequence: Synthetic oligonucleotide
  Antisense strand to SEQ ID NO: 1178122
uucuccagguaggagagcc

SEQ ID NO: 1178124 - RNA, 19 nt, Artificial Sequence
  Description of Artificial Sequence: Synthetic oligonucleotide
  Sense strand starting at position 1424 of SEQ ID NO: 916711
cuuguuucuucgcccucaa

SEQ ID NO: 1178125 - RNA, 19 nt, Artificial Sequence
  Description of Artificial Sequence: Synthetic oligonucleotide
  Antisense strand to SEQ ID NO: 1178124
uugagggcgaagaaacaag

SEQ ID NO: 1178126 - RNA, 19 nt, Artificial Sequence
  Description of Artificial Sequence: Synthetic oligonucleotide
  Sense strand starting at position 1495 of SEQ ID NO: 916711
gguggaagcgucuaacucu

SEQ ID NO: 1178127 - RNA, 19 nt, Artificial Sequence
  Description of Artificial Sequence: Synthetic oligonucleotide
  Antisense strand to SEQ ID NO: 1178126
agaguuagacgcuuccacc

SEQ ID NO: 1178128 - RNA, 19 nt, Artificial Sequence
  Description of Artificial Sequence: Synthetic oligonucleotide
  Sense strand starting at position 1502 of SEQ ID NO: 916711
gcgucuaacucuucggaag

SEQ ID NO: 1178129 - RNA, 19 nt, Artificial Sequence
  Description of Artificial Sequence: Synthetic oligonucleotide
  Antisense strand to SEQ ID NO: 1178128
cuuccgaagaguuagacgc

SEQ ID NO: 1178130 - RNA, 19 nt, Artificial Sequence
  Description of Artificial Sequence: Synthetic oligonucleotide
  Sense strand starting at position 1503 of SEQ ID NO: 916711
cgucuaacucuucggaagu

SEQ ID NO: 1178131 - RNA, 19 nt, Artificial Sequence
  Description of Artificial Sequence: Synthetic oligonucleotide
  Antisense strand to SEQ ID NO: 1178130
acuuccgaagaguuagacg

SEQ ID NO: 1178132 - RNA, 19 nt, Artificial Sequence
  Description of Artificial Sequence: Synthetic oligonucleotide
  Sense strand starting at position 1504 of SEQ ID NO: 916711
gucuaacucuucggaagua

SEQ ID NO: 1178133 - RNA, 19 nt, Artificial Sequence
  Description of Artificial Sequence: Synthetic oligonucleotide
  Antisense strand to SEQ ID NO: 1178132
uacuuccgaagaguuagac

SEQ ID NO: 1178134 - RNA, 19 nt, Artificial Sequence
  Description of Artificial Sequence: Synthetic oligonucleotide
  Sense strand starting at position 1721 of SEQ ID NO: 916711
acuuaaauauguggacaca

SEQ ID NO: 1178135 - RNA, 19 nt, Artificial Sequence
  Description of Artificial Sequence: Synthetic oligonucleotide
  Antisense strand to SEQ ID NO: 1178134
uguguccacauauuuaagu

SEQ ID NO: 1178136 - RNA, 19 nt, Artificial Sequence
  Description of Artificial Sequence: Synthetic oligonucleotide
  Sense strand starting at position 1794 of SEQ ID NO: 916711
cgaagagacucuugaccua

SEQ ID NO: 1178137 - RNA, 19 nt, Artificial Sequence
  Description of Artificial Sequence: Synthetic oligonucleotide
  Antisense strand to SEQ ID NO: 1178136
uaggucaagagucucuucg

SEQ ID NO: 1178138 - RNA, 19 nt, Artificial Sequence
  Description of Artificial Sequence: Synthetic oligonucleotide
  Sense strand starting at position 2028 of SEQ ID NO: 916711
ggaggaaacgguugcucua

SEQ ID NO: 1178139 - RNA, 19 nt, Artificial Sequence
  Description of Artificial Sequence: Synthetic oligonucleotide
  Antisense strand to SEQ ID NO: 1178138
uagagcaaccguuuccucc

SEQ ID NO: 1178140 - RNA, 19 nt, Artificial Sequence
  Description of Artificial Sequence: Synthetic oligonucleotide
  Sense strand starting at position 2205 of SEQ ID NO: 916711
ugguucacugggugcaaua

SEQ ID NO: 1178141 - RNA, 19 nt, Artificial Sequence
  Description of Artificial Sequence: Synthetic oligonucleotide
  Antisense strand to SEQ ID NO: 1178140
uauugcacccagugaacca

SEQ ID NO: 1178142 - RNA, 19 nt, Artificial Sequence
  Description of Artificial Sequence: Synthetic oligonucleotide
  Sense strand starting at position 2234 of SEQ ID NO: 916711
ugaauacacuaugguaagu

SEQ ID NO: 1178143 - RNA, 19 nt, Artificial Sequence
  Description of Artificial Sequence: Synthetic oligonucleotide
  Antisense strand to SEQ ID NO: 1178142
acuuaccauaguguauuca

SEQ ID NO: 1178144 - RNA, 19 nt, Artificial Sequence
  Description of Artificial Sequence: Synthetic oligonucleotide
  Sense strand starting at position 2245 of SEQ ID NO: 916711
ugguaaguguuguaauaca

SEQ ID NO: 1178145 - RNA, 19 nt, Artificial Sequence
  Description of Artificial Sequence: Synthetic oligonucleotide
  Antisense strand to SEQ ID NO: 1178144
uguauuacaacacuuacca

SEQ ID NO: 1178146 - RNA, 19 nt, Artificial Sequence
  Description of Artificial Sequence: Synthetic oligonucleotide
  Sense strand starting at position 2250 of SEQ ID NO: 916711
aguguuguaauacagauau

SEQ ID NO: 1178147 - RNA, 19 nt, Artificial Sequence
  Description of Artificial Sequence: Synthetic oligonucleotide
  Antisense strand to SEQ ID NO: 1178146
auaucuguauuacaacacu

SEQ ID NO: 1178148 - RNA, 19 nt, Artificial Sequence
  Description of Artificial Sequence: Synthetic oligonucleotide
  Sense strand starting at position 2268 of SEQ ID NO: 916711
uagacagaguucucggcaa

SEQ ID NO: 1178149 - RNA, 19 nt, Artificial Sequence
  Description of Artificial Sequence: Synthetic oligonucleotide
  Antisense strand to SEQ ID NO: 1178148
uugccgagaacucugucua

SEQ ID NO: 1178150 - RNA, 19 nt, Artificial Sequence
  Description of Artificial Sequence: Synthetic oligonucleotide
  Sense strand starting at position 2363 of SEQ ID NO: 916711
caaacauucuugcggaaga

SEQ ID NO: 1178151 - RNA, 19 nt, Artificial Sequence
  Description of Artificial Sequence: Synthetic oligonucleotide
  Antisense strand to SEQ ID NO: 1178150
ucuuccgcaagaauguuug

SEQ ID NO: 1178152 - RNA, 19 nt, Artificial Sequence
  Description of Artificial Sequence: Synthetic oligonucleotide
  Sense strand starting at position 2364 of SEQ ID NO: 916711
aaacauucuugcggaagau

SEQ ID NO: 1178153 - RNA, 19 nt, Artificial Sequence
  Description of Artificial Sequence: Synthetic oligonucleotide
  Antisense strand to SEQ ID NO: 1178152
aucuuccgcaagaauguuu

SEQ ID NO: 1178154 - RNA, 19 nt, Artificial Sequence
  Description of Artificial Sequence: Synthetic oligonucleotide
  Sense strand starting at position 2365 of SEQ ID NO: 916711
aacauucuugcggaagaua

SEQ ID NO: 1178155 - RNA, 19 nt, Artificial Sequence
  Description of Artificial Sequence: Synthetic oligonucleotide
  Antisense strand to SEQ ID NO: 1178154
uaucuuccgcaagaauguu

SEQ ID NO: 1178156 - RNA, 19 nt, Artificial Sequence
  Description of Artificial Sequence: Synthetic oligonucleotide
  Sense strand starting at position 3592 of SEQ ID NO: 916711
guuaaaugugugccaugcu

SEQ ID NO: 1178157 - RNA, 19 nt, Artificial Sequence
  Description of Artificial Sequence: Synthetic oligonucleotide
  Antisense strand to SEQ ID NO: 1178156
agcauggcacacauuuaac

SEQ ID NO: 1178158 - RNA, 19 nt, Artificial Sequence
  Description of Artificial Sequence: Synthetic oligonucleotide
  Sense strand starting at position 3788 of SEQ ID NO: 916711
gugagaacauguuccugca

SEQ ID NO: 1178159 - RNA, 19 nt, Artificial Sequence
  Description of Artificial Sequence: Synthetic oligonucleotide
  Antisense strand to SEQ ID NO: 1178158
ugcaggaacauguucucac

SEQ ID NO: 1178160 - RNA, 19 nt, Artificial Sequence
  Description of Artificial Sequence: Synthetic oligonucleotide
  Sense strand starting at position 3791 of SEQ ID NO: 916711
agaacauguuccugcauga

SEQ ID NO: 1178161 - RNA, 19 nt, Artificial Sequence
  Description of Artificial Sequence: Synthetic oligonucleotide
  Antisense strand to SEQ ID NO: 1178160
ucaugcaggaacauguucu

SEQ ID NO: 1178162 - RNA, 19 nt, Artificial Sequence
  Description of Artificial Sequence: Synthetic oligonucleotide
  Sense strand starting at position 3795 of SEQ ID NO: 916711
cauguuccugcaugaguuu

SEQ ID NO: 1178163 - RNA, 19 nt, Artificial Sequence
  Description of Artificial Sequence: Synthetic oligonucleotide
  Antisense strand to SEQ ID NO: 1178162
aaacucaugcaggaacaug

SEQ ID NO: 1178164 - RNA, 19 nt, Artificial Sequence
  Description of Artificial Sequence: Synthetic oligonucleotide
  Sense strand starting at position 3804 of SEQ ID NO: 916711
gcaugaguuugcugagguu

SEQ ID NO: 1178165 - RNA, 19 nt, Artificial Sequence
  Description of Artificial Sequence: Synthetic oligonucleotide
  Antisense strand to SEQ ID NO: 1178164
aaccucagcaaacucaugc

SEQ ID NO: 1178166 - RNA, 19 nt, Artificial Sequence
  Description of Artificial Sequence: Synthetic oligonucleotide
  Sense strand starting at position 3807 of SEQ ID NO: 916711
ugaguuugcugagguuaau

SEQ ID NO: 1178167 - RNA, 19 nt, Artificial Sequence
  Description of Artificial Sequence: Synthetic oligonucleotide
  Antisense strand to SEQ ID NO: 1178166
auuaaccucagcaaacuca

SEQ ID NO: 1178168 - RNA, 19 nt, Artificial Sequence
  Description of Artificial Sequence: Synthetic oligonucleotide
  Sense strand starting at position 3942 of SEQ ID NO: 916711
uuggauuaauuccaugucu

SEQ ID NO: 1178169 - RNA, 19 nt, Artificial Sequence
  Description of Artificial Sequence: Synthetic oligonucleotide
  Antisense strand to SEQ ID NO: 1178168
agacauggaauuaauccaa

SEQ ID NO: 1178170 - RNA, 19 nt, Artificial Sequence
  Description of Artificial Sequence: Synthetic oligonucleotide
  Sense strand starting at position 3944 of SEQ ID NO: 916711
ggauuaauuccaugucuuu

SEQ ID NO: 1178171 - RNA, 19 nt, Artificial Sequence
  Description of Artificial Sequence: Synthetic oligonucleotide
  Antisense strand to SEQ ID NO: 1178170
aaagacauggaauuaaucc

SEQ ID NO: 1178172 - RNA, 19 nt, Artificial Sequence
  Description of Artificial Sequence: Synthetic oligonucleotide
  Sense strand starting at position 111 of SEQ ID NO: 916712
acaaguauguuuccuuaaa

SEQ ID NO: 1178173 - RNA, 19 nt, Artificial Sequence
  Description of Artificial Sequence: Synthetic oligonucleotide
  Antisense strand to SEQ ID NO: 1178172
uuuaaggaaacauacuugu

SEQ ID NO: 1178174 - RNA, 19 nt, Artificial Sequence
  Description of Artificial Sequence: Synthetic oligonucleotide
  Sense strand starting at position 385 of SEQ ID NO: 916712
ugugaaagccugcacauga

SEQ ID NO: 1178175 - RNA, 19 nt, Artificial Sequence
  Description of Artificial Sequence: Synthetic oligonucleotide
  Antisense strand to SEQ ID NO: 1178174
ucaugugcaggcuuucaca

SEQ ID NO: 1178176 - RNA, 19 nt, Artificial Sequence
  Description of Artificial Sequence: Synthetic oligonucleotide
  Sense strand starting at position 726 of SEQ ID NO: 916712
auggguaagaauugccuau

SEQ ID NO: 1178177 - RNA, 19 nt, Artificial Sequence
  Description of Artificial Sequence: Synthetic oligonucleotide
  Antisense strand to SEQ ID NO: 1178176
auaggcaauucuuacccau

SEQ ID NO: 1178178 - RNA, 19 nt, Artificial Sequence
  Description of Artificial Sequence: Synthetic oligonucleotide
  Sense strand starting at position 728 of SEQ ID NO: 916712
ggguaagaauugccuauau

SEQ ID NO: 1178179 - RNA, 19 nt, Artificial Sequence
  Description of Artificial Sequence: Synthetic oligonucleotide
  Antisense strand to SEQ ID NO: 1178178
auauaggcaauucuuaccc

SEQ ID NO: 1178180 - RNA, 19 nt, Artificial Sequence
  Description of Artificial Sequence: Synthetic oligonucleotide
  Sense strand starting at position 730 of SEQ ID NO: 916712
guaagaauugccuauauau

SEQ ID NO: 1178181 - RNA, 19 nt, Artificial Sequence
  Description of Artificial Sequence: Synthetic oligonucleotide
  Antisense strand to SEQ ID NO: 1178180
auauauaggcaauucuuac

SEQ ID NO: 1178182 - RNA, 19 nt, Artificial Sequence
  Description of Artificial Sequence: Synthetic oligonucleotide
  Sense strand starting at position 877 of SEQ ID NO: 916712
gaggaucauugggauuuac

SEQ ID NO: 1178183 - RNA, 19 nt, Artificial Sequence
  Description of Artificial Sequence: Synthetic oligonucleotide
  Antisense strand to SEQ ID NO: 1178182
guaaaucccaaugauccuc

SEQ ID NO: 1178184 - RNA, 19 nt, Artificial Sequence
  Description of Artificial Sequence: Synthetic oligonucleotide
  Sense strand starting at position 1097 of SEQ ID NO: 916712
gaggcaggauuguuacuau

SEQ ID NO: 1178185 - RNA, 19 nt, Artificial Sequence
  Description of Artificial Sequence: Synthetic oligonucleotide
  Antisense strand to SEQ ID NO: 1178184
auaguaacaauccugccuc

SEQ ID NO: 1178186 - RNA, 19 nt, Artificial Sequence
  Description of Artificial Sequence: Synthetic oligonucleotide
  Sense strand starting at position 1525 of SEQ ID NO: 916712
guccacugagauuacugua

SEQ ID NO: 1178187 - RNA, 19 nt, Artificial Sequence
  Description of Artificial Sequence: Synthetic oligonucleotide
  Antisense strand to SEQ ID NO: 1178186
uacaguaaucucaguggac

SEQ ID NO: 1178188 - RNA, 19 nt, Artificial Sequence
  Description of Artificial Sequence: Synthetic oligonucleotide
  Sense strand starting at position 1530 of SEQ ID NO: 916712
cugagauuacuguagcauc

SEQ ID NO: 1178189 - RNA, 19 nt, Artificial Sequence
  Description of Artificial Sequence: Synthetic oligonucleotide
  Antisense strand to SEQ ID NO: 1178188
gaugcuacaguaaucucag

SEQ ID NO: 1178190 - RNA, 19 nt, Artificial Sequence
  Description of Artificial Sequence: Synthetic oligonucleotide
  Sense strand starting at position 1557 of SEQ ID NO: 916712
uggacuucccuggaucagu

SEQ ID NO: 1178191 - RNA, 19 nt, Artificial Sequence
  Description of Artificial Sequence: Synthetic oligonucleotide
  Antisense strand to SEQ ID NO: 1178190
acugauccagggaagucca

SEQ ID NO: 1178192 - RNA, 19 nt, Artificial Sequence
  Description of Artificial Sequence: Synthetic oligonucleotide
  Sense strand starting at position 1669 of SEQ ID NO: 916712
ggguuccaaguguauauca

SEQ ID NO: 1178193 - RNA, 19 nt, Artificial Sequence
  Description of Artificial Sequence: Synthetic oligonucleotide
  Antisense strand to SEQ ID NO: 1178192
ugauauacacuuggaaccc

SEQ ID NO: 1178194 - RNA, 19 nt, Artificial Sequence
  Description of Artificial Sequence: Synthetic oligonucleotide
  Sense strand starting at position 1671 of SEQ ID NO: 916712
guuccaaguguauaucaaa

SEQ ID NO: 1178195 - RNA, 19 nt, Artificial Sequence
  Description of Artificial Sequence: Synthetic oligonucleotide
  Antisense strand to SEQ ID NO: 1178194
uuugauauacacuuggaac

SEQ ID NO: 1178196 - RNA, 19 nt, Artificial Sequence
  Description of Artificial Sequence: Synthetic oligonucleotide
  Sense strand starting at position 1727 of SEQ ID NO: 916712
agaugucauccuuggaaug

SEQ ID NO: 1178197 - RNA, 19 nt, Artificial Sequence
  Description of Artificial Sequence: Synthetic oligonucleotide
  Antisense strand to SEQ ID NO: 1178196
cauuccaaggaugacaucu

SEQ ID NO: 1178198 - RNA, 19 nt, Artificial Sequence
  Description of Artificial Sequence: Synthetic oligonucleotide
  Sense strand starting at position 1728 of SEQ ID NO: 916712
gaugucauccuuggaauga

SEQ ID NO: 1178199 - RNA, 19 nt, Artificial Sequence
  Description of Artificial Sequence: Synthetic oligonucleotide
  Antisense strand to SEQ ID NO: 1178198
ucauuccaaggaugacauc

SEQ ID NO: 1178200 - RNA, 19 nt, Artificial Sequence
  Description of Artificial Sequence: Synthetic oligonucleotide
  Sense strand starting at position 1988 of SEQ ID NO: 916712
caacucugcguugagagaa

SEQ ID NO: 1178201 - RNA, 19 nt, Artificial Sequence
  Description of Artificial Sequence: Synthetic oligonucleotide
  Antisense strand to SEQ ID NO: 1178200
uucucucaacgcagaguug

SEQ ID NO: 1178202 - RNA, 19 nt, Artificial Sequence
  Description of Artificial Sequence: Synthetic oligonucleotide
  Sense strand starting at position 2170 of SEQ ID NO: 916712
ggaugugguuagguacaaa

SEQ ID NO: 1178203 - RNA, 19 nt, Artificial Sequence
  Description of Artificial Sequence: Synthetic oligonucleotide
  Antisense strand to SEQ ID NO: 1178202
uuuguaccuaaccacaucc

SEQ ID NO: 1178204 - RNA, 19 nt, Artificial Sequence
  Description of Artificial Sequence: Synthetic oligonucleotide
  Sense strand starting at position 2197 of SEQ ID NO: 916712
ugagcauaguuucugaaga

SEQ ID NO: 1178205 - RNA, 19 nt, Artificial Sequence
  Description of Artificial Sequence: Synthetic oligonucleotide
  Antisense strand to SEQ ID NO: 1178204
ucuucagaaacuaugcuca

SEQ ID NO: 1178206 - RNA, 19 nt, Artificial Sequence
  Description of Artificial Sequence: Synthetic oligonucleotide
  Sense strand starting at position 2246 of SEQ ID NO: 916712
acaauugaaguuuggucau

SEQ ID NO: 1178207 - RNA, 19 nt, Artificial Sequence
  Description of Artificial Sequence: Synthetic oligonucleotide
  Antisense strand to SEQ ID NO: 1178206
augaccaaacuucaauugu

SEQ ID NO: 1178208 - RNA, 19 nt, Artificial Sequence
  Description of Artificial Sequence: Synthetic oligonucleotide
  Sense strand starting at position 2248 of SEQ ID NO: 916712
aauugaaguuuggucauca

SEQ ID NO: 1178209 - RNA, 19 nt, Artificial Sequence
  Description of Artificial Sequence: Synthetic oligonucleotide
  Antisense strand to SEQ ID NO: 1178208
ugaugaccaaacuucaauu

SEQ ID NO: 1178210 - RNA, 19 nt, Artificial Sequence
  Description of Artificial Sequence: Synthetic oligonucleotide
  Sense strand starting at position 2281 of SEQ ID NO: 916712
ggguuagacaguuagucuu

SEQ ID NO: 1178211 - RNA, 19 nt, Artificial Sequence
  Description of Artificial Sequence: Synthetic oligonucleotide
  Antisense strand to SEQ ID NO: 1178210
aagacuaacugucuaaccc

SEQ ID NO: 1178212 - RNA, 19 nt, Artificial Sequence
  Description of Artificial Sequence: Synthetic oligonucleotide
  Sense strand starting at position 2327 of SEQ ID NO: 916712
acgugcuuacguuuguaua

SEQ ID NO: 1178213 - RNA, 19 nt, Artificial Sequence
  Description of Artificial Sequence: Synthetic oligonucleotide
  Antisense strand to SEQ ID NO: 1178212
uauacaaacguaagcacgu

SEQ ID NO: 1178214 - RNA, 19 nt, Artificial Sequence
  Description of Artificial Sequence: Synthetic oligonucleotide
  Sense strand starting at position 2358 of SEQ ID NO: 916712
gugaucuuauagccagaag

SEQ ID NO: 1178215 - RNA, 19 nt, Artificial Sequence
  Description of Artificial Sequence: Synthetic oligonucleotide
  Antisense strand to SEQ ID NO: 1178214
cuucuggcuauaagaucac

SEQ ID NO: 1178216 - RNA, 19 nt, Artificial Sequence
  Description of Artificial Sequence: Synthetic oligonucleotide
  Sense strand starting at position 2361 of SEQ ID NO: 916712
aucuuauagccagaaguga

SEQ ID NO: 1178217 - RNA, 19 nt, Artificial Sequence
  Description of Artificial Sequence: Synthetic oligonucleotide
  Antisense strand to SEQ ID NO: 1178216
ucacuucuggcuauaagau

SEQ ID NO: 1178218 - RNA, 19 nt, Artificial Sequence
  Description of Artificial Sequence: Synthetic oligonucleotide
  Sense strand starting at position 2444 of SEQ ID NO: 916712
auggaugauauguagcuua

SEQ ID NO: 1178219 - RNA, 19 nt, Artificial Sequence
  Description of Artificial Sequence: Synthetic oligonucleotide
  Antisense strand to SEQ ID NO: 1178218
uaagcuacauaucauccau

SEQ ID NO: 1178220 - RNA, 19 nt, Artificial Sequence
  Description of Artificial Sequence: Synthetic oligonucleotide
  Sense strand starting at position 2617 of SEQ ID NO: 916712
uuuauuguuguagaacaca

SEQ ID NO: 1178221 - RNA, 19 nt, Artificial Sequence
  Description of Artificial Sequence: Synthetic oligonucleotide
  Antisense strand to SEQ ID NO: 1178220
uguguucuacaacaauaaa

SEQ ID NO: 1178222 - RNA, 19 nt, Artificial Sequence
  Description of Artificial Sequence: Synthetic oligonucleotide
  Sense strand starting at position 2656 of SEQ ID NO: 916712
uuauuaauacccuggaggu

SEQ ID NO: 1178223 - RNA, 19 nt, Artificial Sequence
  Description of Artificial Sequence: Synthetic oligonucleotide
  Antisense strand to SEQ ID NO: 1178222
accuccaggguauuaauaa

SEQ ID NO: 1178224 - RNA, 19 nt, Artificial Sequence
  Description of Artificial Sequence: Synthetic oligonucleotide
  Sense strand starting at position 2657 of SEQ ID NO: 916712
uauuaauacccuggagguu

SEQ ID NO: 1178225 - RNA, 19 nt, Artificial Sequence
  Description of Artificial Sequence: Synthetic oligonucleotide
  Antisense strand to SEQ ID NO: 1178224
aaccuccaggguauuaaua

SEQ ID NO: 1178226 - RNA, 19 nt, Artificial Sequence
  Description of Artificial Sequence: Synthetic oligonucleotide
  Sense strand starting at position 2863 of SEQ ID NO: 916712
acugguuauugaguggaca

SEQ ID NO: 1178227 - RNA, 19 nt, Artificial Sequence
  Description of Artificial Sequence: Synthetic oligonucleotide
  Antisense strand to SEQ ID NO: 1178226
uguccacucaauaaccagu

SEQ ID NO: 1178228 - RNA, 19 nt, Artificial Sequence
  Description of Artificial Sequence: Synthetic oligonucleotide
  Sense strand starting at position 2865 of SEQ ID NO: 916712
ugguuauugaguggacaca

SEQ ID NO: 1178229 - RNA, 19 nt, Artificial Sequence
  Description of Artificial Sequence: Synthetic oligonucleotide
  Antisense strand to SEQ ID NO: 1178228
uguguccacucaauaacca

SEQ ID NO: 1178230 - RNA, 19 nt, Artificial Sequence
  Description of Artificial Sequence: Synthetic oligonucleotide
  Sense strand starting at position 2916 of SEQ ID NO: 916712
uguugaaagccucaaguau

SEQ ID NO: 1178231 - RNA, 19 nt, Artificial Sequence
  Description of Artificial Sequence: Synthetic oligonucleotide
  Antisense strand to SEQ ID NO: 1178230
auacuugaggcuuucaaca

SEQ ID NO: 1178232 - RNA, 19 nt, Artificial Sequence
  Description of Artificial Sequence: Synthetic oligonucleotide
  Sense strand starting at position 3421 of SEQ ID NO: 916712
uggugauaauuugaggaua

SEQ ID NO: 1178233 - RNA, 19 nt, Artificial Sequence
  Description of Artificial Sequence: Synthetic oligonucleotide
  Antisense strand to SEQ ID NO: 1178232
uauccucaaauuaucacca

SEQ ID NO: 1178234 - RNA, 19 nt, Artificial Sequence
  Description of Artificial Sequence: Synthetic oligonucleotide
  Sense strand starting at position 3433 of SEQ ID NO: 916712
gaggauagcuugguuggaa

SEQ ID NO: 1178235 - RNA, 19 nt, Artificial Sequence
  Description of Artificial Sequence: Synthetic oligonucleotide
  Antisense strand to SEQ ID NO: 1178234
uuccaaccaagcuauccuc

SEQ ID NO: 1178236 - RNA, 19 nt, Artificial Sequence
  Description of Artificial Sequence: Synthetic oligonucleotide
  Sense strand starting at position 3441 of SEQ ID NO: 916712
cuugguuggaaguaugaca

SEQ ID NO: 1178237 - RNA, 19 nt, Artificial Sequence
  Description of Artificial Sequence: Synthetic oligonucleotide
  Antisense strand to SEQ ID NO: 1178236
ugucauacuuccaaccaag

SEQ ID NO: 1178238 - RNA, 19 nt, Artificial Sequence
  Description of Artificial Sequence: Synthetic oligonucleotide
  Sense strand starting at position 3554 of SEQ ID NO: 916712
gcaauucugaaggguugga

SEQ ID NO: 1178239 - RNA, 19 nt, Artificial Sequence
  Description of Artificial Sequence: Synthetic oligonucleotide
  Antisense strand to SEQ ID NO: 1178238
uccaacccuucagaauugc

SEQ ID NO: 1178240 - RNA, 19 nt, Artificial Sequence
  Description of Artificial Sequence: Synthetic oligonucleotide
  Sense strand starting at position 3607 of SEQ ID NO: 916712
guuuguuauggauaacuuu

SEQ ID NO: 1178241 - RNA, 19 nt, Artificial Sequence
  Description of Artificial Sequence: Synthetic oligonucleotide
  Antisense strand to SEQ ID NO: 1178240
aaaguuauccauaacaaac

SEQ ID NO: 1178242 - RNA, 19 nt, Artificial Sequence
  Description of Artificial Sequence: Synthetic oligonucleotide
  Sense strand starting at position 3616 of SEQ ID NO: 916712
ggauaacuuuacuuuggca

SEQ ID NO: 1178243 - RNA, 19 nt, Artificial Sequence
  Description of Artificial Sequence: Synthetic oligonucleotide
  Antisense strand to SEQ ID NO: 1178242
ugccaaaguaaaguuaucc

SEQ ID NO: 1178244 - RNA, 19 nt, Artificial Sequence
  Description of Artificial Sequence: Synthetic oligonucleotide
  Sense strand starting at position 3711 of SEQ ID NO: 916712
aauucuucucuauguggga

SEQ ID NO: 1178245 - RNA, 19 nt, Artificial Sequence
  Description of Artificial Sequence: Synthetic oligonucleotide
  Antisense strand to SEQ ID NO: 1178244
ucccacauagagaagaauu

SEQ ID NO: 1178246 - RNA, 19 nt, Artificial Sequence
  Description of Artificial Sequence: Synthetic oligonucleotide
  Sense strand starting at position 3712 of SEQ ID NO: 916712
auucuucucuaugugggaa

SEQ ID NO: 1178247 - RNA, 19 nt, Artificial Sequence
  Description of Artificial Sequence: Synthetic oligonucleotide
  Antisense strand to SEQ ID NO: 1178246
uucccacauagagaagaau

SEQ ID NO: 1178248 - RNA, 19 nt, Artificial Sequence
  Description of Artificial Sequence: Synthetic oligonucleotide
  Sense strand starting at position 3815 of SEQ ID NO: 916712
gauugcugccucugauuuc

SEQ ID NO: 1178249 - RNA, 19 nt, Artificial Sequence
  Description of Artificial Sequence: Synthetic oligonucleotide
  Antisense strand to SEQ ID NO: 1178248
gaaaucagaggcagcaauc

SEQ ID NO: 1178250 - RNA, 19 nt, Artificial Sequence
  Description of Artificial Sequence: Synthetic oligonucleotide
  Sense strand starting at position 3841 of SEQ ID NO: 916712
acuguuuaacaugggaagu

SEQ ID NO: 1178251 - RNA, 19 nt, Artificial Sequence
  Description of Artificial Sequence: Synthetic oligonucleotide
  Antisense strand to SEQ ID NO: 1178250
acuucccauguuaaacagu

SEQ ID NO: 1178252 - RNA, 19 nt, Artificial Sequence
  Description of Artificial Sequence: Synthetic oligonucleotide
  Sense strand starting at position 325 of SEQ ID NO: 916713
acacaagugguauaugcau

SEQ ID NO: 1178253 - RNA, 19 nt, Artificial Sequence
  Description of Artificial Sequence: Synthetic oligonucleotide
  Antisense strand to SEQ ID NO: 1178252
augcauauaccacuugugu

SEQ ID NO: 1178254 - RNA, 19 nt, Artificial Sequence
  Description of Artificial Sequence: Synthetic oligonucleotide
  Sense strand starting at position 347 of SEQ ID NO: 916713
guauacugcaugugguaga

SEQ ID NO: 1178255 - RNA, 19 nt, Artificial Sequence
  Description of Artificial Sequence: Synthetic oligonucleotide
  Antisense strand to SEQ ID NO: 1178254
ucuaccacaugcaguauac

SEQ ID NO: 1178256 - RNA, 19 nt, Artificial Sequence
  Description of Artificial Sequence: Synthetic oligonucleotide
  Sense strand starting at position 352 of SEQ ID NO: 916713
cugcaugugguagaaagua

SEQ ID NO: 1178257 - RNA, 19 nt, Artificial Sequence
  Description of Artificial Sequence: Synthetic oligonucleotide
  Antisense strand to SEQ ID NO: 1178256
uacuuucuaccacaugcag

SEQ ID NO: 1178258 - RNA, 19 nt, Artificial Sequence
  Description of Artificial Sequence: Synthetic oligonucleotide
  Sense strand starting at position 372 of SEQ ID NO: 916713
acuaaaguuugagaaauug

SEQ ID NO: 1178259 - RNA, 19 nt, Artificial Sequence
  Description of Artificial Sequence: Synthetic oligonucleotide
  Antisense strand to SEQ ID NO: 1178258
caauuucucaaacuuuagu

SEQ ID NO: 1178260 - RNA, 19 nt, Artificial Sequence
  Description of Artificial Sequence: Synthetic oligonucleotide
  Sense strand starting at position 381 of SEQ ID NO: 916713
ugagaaauugcugguaauu

SEQ ID NO: 1178261 - RNA, 19 nt, Artificial Sequence
  Description of Artificial Sequence: Synthetic oligonucleotide
  Antisense strand to SEQ ID NO: 1178260
aauuaccagcaauuucuca

SEQ ID NO: 1178262 - RNA, 19 nt, Artificial Sequence
  Description of Artificial Sequence: Synthetic oligonucleotide
  Sense strand starting at position 383 of SEQ ID NO: 916713
agaaauugcugguaauuug

SEQ ID NO: 1178263 - RNA, 19 nt, Artificial Sequence
  Description of Artificial Sequence: Synthetic oligonucleotide
  Antisense strand to SEQ ID NO: 1178262
caaauuaccagcaauuucu

SEQ ID NO: 1178264 - RNA, 19 nt, Artificial Sequence
  Description of Artificial Sequence: Synthetic oligonucleotide
  Sense strand starting at position 390 of SEQ ID NO: 916713
gcugguaauuugcuugaaa

SEQ ID NO: 1178265 - RNA, 19 nt, Artificial Sequence
  Description of Artificial Sequence: Synthetic oligonucleotide
  Antisense strand to SEQ ID NO: 1178264
uuucaagcaaauuaccagc

SEQ ID NO: 1178266 - RNA, 19 nt, Artificial Sequence
  Description of Artificial Sequence: Synthetic oligonucleotide
  Sense strand starting at position 392 of SEQ ID NO: 916713
ugguaauuugcuugaaagc

SEQ ID NO: 1178267 - RNA, 19 nt, Artificial Sequence
  Description of Artificial Sequence: Synthetic oligonucleotide
  Antisense strand to SEQ ID NO: 1178266
gcuuucaagcaaauuacca

SEQ ID NO: 1178268 - RNA, 19 nt, Artificial Sequence
  Description of Artificial Sequence: Synthetic oligonucleotide
  Sense strand starting at position 411 of SEQ ID NO: 916713
acagguucugaauguaaca

SEQ ID NO: 1178269 - RNA, 19 nt, Artificial Sequence
  Description of Artificial Sequence: Synthetic oligonucleotide
  Antisense strand to SEQ ID NO: 1178268
uguuacauucagaaccugu

SEQ ID NO: 1178270 - RNA, 19 nt, Artificial Sequence
  Description of Artificial Sequence: Synthetic oligonucleotide
  Sense strand starting at position 486 of SEQ ID NO: 916713
ucuggcccuccguaugaaa

SEQ ID NO: 1178271 - RNA, 19 nt, Artificial Sequence
  Description of Artificial Sequence: Synthetic oligonucleotide
  Antisense strand to SEQ ID NO: 1178270
uuucauacggagggccaga

SEQ ID NO: 1178272 - RNA, 19 nt, Artificial Sequence
  Description of Artificial Sequence: Synthetic oligonucleotide
  Sense strand starting at position 850 of SEQ ID NO: 916713
acccuacuugggcauaauu

SEQ ID NO: 1178273 - RNA, 19 nt, Artificial Sequence
  Description of Artificial Sequence: Synthetic oligonucleotide
  Antisense strand to SEQ ID NO: 1178272
aauuaugcccaaguagggu

SEQ ID NO: 1178274 - RNA, 19 nt, Artificial Sequence
  Description of Artificial Sequence: Synthetic oligonucleotide
  Sense strand starting at position 852 of SEQ ID NO: 916713
ccuacuugggcauaauuaa

SEQ ID NO: 1178275 - RNA, 19 nt, Artificial Sequence
  Description of Artificial Sequence: Synthetic oligonucleotide
  Antisense strand to SEQ ID NO: 1178274
uuaauuaugcccaaguagg

SEQ ID NO: 1178276 - RNA, 19 nt, Artificial Sequence
  Description of Artificial Sequence: Synthetic oligonucleotide
  Sense strand starting at position 882 of SEQ ID NO: 916713
ucugcaaacugaucuguga

SEQ ID NO: 1178277 - RNA, 19 nt, Artificial Sequence
  Description of Artificial Sequence: Synthetic oligonucleotide
  Antisense strand to SEQ ID NO: 1178276
ucacagaucaguuugcaga

SEQ ID NO: 1178278 - RNA, 19 nt, Artificial Sequence
  Description of Artificial Sequence: Synthetic oligonucleotide
  Sense strand starting at position 1009 of SEQ ID NO: 916713
ucaguuuccuccuuaugca

SEQ ID NO: 1178279 - RNA, 19 nt, Artificial Sequence
  Description of Artificial Sequence: Synthetic oligonucleotide
  Antisense strand to SEQ ID NO: 1178278
ugcauaaggaggaaacuga

SEQ ID NO: 1178280 - RNA, 19 nt, Artificial Sequence
  Description of Artificial Sequence: Synthetic oligonucleotide
  Sense strand starting at position 1017 of SEQ ID NO: 916713
cuccuuaugcaauaaggau

SEQ ID NO: 1178281 - RNA, 19 nt, Artificial Sequence
  Description of Artificial Sequence: Synthetic oligonucleotide
  Antisense strand to SEQ ID NO: 1178280
auccuuauugcauaaggag

SEQ ID NO: 1178282 - RNA, 19 nt, Artificial Sequence
  Description of Artificial Sequence: Synthetic oligonucleotide
  Sense strand starting at position 1029 of SEQ ID NO: 916713
uaaggaugaugagccuuau

SEQ ID NO: 1178283 - RNA, 19 nt, Artificial Sequence
  Description of Artificial Sequence: Synthetic oligonucleotide
  Antisense strand to SEQ ID NO: 1178282
auaaggcucaucauccuua

SEQ ID NO: 1178284 - RNA, 19 nt, Artificial Sequence
  Description of Artificial Sequence: Synthetic oligonucleotide
  Sense strand starting at position 1053 of SEQ ID NO: 916713
acucaaaguucgguccuua

SEQ ID NO: 1178285 - RNA, 19 nt, Artificial Sequence
  Description of Artificial Sequence: Synthetic oligonucleotide
  Antisense strand to SEQ ID NO: 1178284
uaaggaccgaacuuugagu

SEQ ID NO: 1178286 - RNA, 19 nt, Artificial Sequence
  Description of Artificial Sequence: Synthetic oligonucleotide
  Sense strand starting at position 1094 of SEQ ID NO: 916713
gggaguuugcuacaaaugc

SEQ ID NO: 1178287 - RNA, 19 nt, Artificial Sequence
  Description of Artificial Sequence: Synthetic oligonucleotide
  Antisense strand to SEQ ID NO: 1178286
gcauuuguagcaaacuccc

SEQ ID NO: 1178288 - RNA, 19 nt, Artificial Sequence
  Description of Artificial Sequence: Synthetic oligonucleotide
  Sense strand starting at position 1285 of SEQ ID NO: 916713
ccaugaguucgauaccaac

SEQ ID NO: 1178289 - RNA, 19 nt, Artificial Sequence
  Description of Artificial Sequence: Synthetic oligonucleotide
  Antisense strand to SEQ ID NO: 1178288
guugguaucgaacucaugg

SEQ ID NO: 1178290 - RNA, 19 nt, Artificial Sequence
  Description of Artificial Sequence: Synthetic oligonucleotide
  Sense strand starting at position 1379 of SEQ ID NO: 916713
gcuguuuaaucaccaagua

SEQ ID NO: 1178291 - RNA, 19 nt, Artificial Sequence
  Description of Artificial Sequence: Synthetic oligonucleotide
  Antisense strand to SEQ ID NO: 1178290
uacuuggugauuaaacagc

SEQ ID NO: 1178292 - RNA, 19 nt, Artificial Sequence
  Description of Artificial Sequence: Synthetic oligonucleotide
  Sense strand starting at position 1444 of SEQ ID NO: 916713
cucaaaggguuguugcaaa

SEQ ID NO: 1178293 - RNA, 19 nt, Artificial Sequence
  Description of Artificial Sequence: Synthetic oligonucleotide
  Antisense strand to SEQ ID NO: 1178292
uuugcaacaacccuuugag

SEQ ID NO: 1178294 - RNA, 19 nt, Artificial Sequence
  Description of Artificial Sequence: Synthetic oligonucleotide
  Sense strand starting at position 1528 of SEQ ID NO: 916713
acucuugcuggauaucaau

SEQ ID NO: 1178295 - RNA, 19 nt, Artificial Sequence
  Description of Artificial Sequence: Synthetic oligonucleotide
  Antisense strand to SEQ ID NO: 1178294
auugauauccagcaagagu

SEQ ID NO: 1178296 - RNA, 19 nt, Artificial Sequence
  Description of Artificial Sequence: Synthetic oligonucleotide
  Sense strand starting at position 1534 of SEQ ID NO: 916713
gcuggauaucaauauggcu

SEQ ID NO: 1178297 - RNA, 19 nt, Artificial Sequence
  Description of Artificial Sequence: Synthetic oligonucleotide
  Antisense strand to SEQ ID NO: 1178296
agccauauugauauccagc

SEQ ID NO: 1178298 - RNA, 19 nt, Artificial Sequence
  Description of Artificial Sequence: Synthetic oligonucleotide
  Sense strand starting at position 2172 of SEQ ID NO: 916713
uucucauucgugcagcaga

SEQ ID NO: 1178299 - RNA, 19 nt, Artificial Sequence
  Description of Artificial Sequence: Synthetic oligonucleotide
  Antisense strand to SEQ ID NO: 1178298
ucugcugcacgaaugagaa

SEQ ID NO: 1178300 - RNA, 19 nt, Artificial Sequence
  Description of Artificial Sequence: Synthetic oligonucleotide
  Sense strand starting at position 2179 of SEQ ID NO: 916713
ucgugcagcagacauuuau

SEQ ID NO: 1178301 - RNA, 19 nt, Artificial Sequence
  Description of Artificial Sequence: Synthetic oligonucleotide
  Antisense strand to SEQ ID NO: 1178300
auaaaugucugcugcacga

SEQ ID NO: 1178302 - RNA, 19 nt, Artificial Sequence
  Description of Artificial Sequence: Synthetic oligonucleotide
  Sense strand starting at position 2219 of SEQ ID NO: 916713
gauacuguacgccagagaa

SEQ ID NO: 1178303 - RNA, 19 nt, Artificial Sequence
  Description of Artificial Sequence: Synthetic oligonucleotide
  Antisense strand to SEQ ID NO: 1178302
uucucuggcguacaguauc

SEQ ID NO: 1178304 - RNA, 19 nt, Artificial Sequence
  Description of Artificial Sequence: Synthetic oligonucleotide
  Sense strand starting at position 2331 of SEQ ID NO: 916713
auccgauaugccugaguac

SEQ ID NO: 1178305 - RNA, 19 nt, Artificial Sequence
  Description of Artificial Sequence: Synthetic oligonucleotide
  Antisense strand to SEQ ID NO: 1178304
guacucaggcauaucggau

SEQ ID NO: 1178306 - RNA, 19 nt, Artificial Sequence
  Description of Artificial Sequence: Synthetic oligonucleotide
  Sense strand starting at position 2332 of SEQ ID NO: 916713
uccgauaugccugaguaca

SEQ ID NO: 1178307 - RNA, 19 nt, Artificial Sequence
  Description of Artificial Sequence: Synthetic oligonucleotide
  Antisense strand to SEQ ID NO: 1178306
uguacucaggcauaucgga

SEQ ID NO: 1178308 - RNA, 19 nt, Artificial Sequence
  Description of Artificial Sequence: Synthetic oligonucleotide
  Sense strand starting at position 2334 of SEQ ID NO: 916713
cgauaugccugaguacaca

SEQ ID NO: 1178309 - RNA, 19 nt, Artificial Sequence
  Description of Artificial Sequence: Synthetic oligonucleotide
  Antisense strand to SEQ ID NO: 1178308
uguguacucaggcauaucg

SEQ ID NO: 1178310 - RNA, 19 nt, Artificial Sequence
  Description of Artificial Sequence: Synthetic oligonucleotide
  Sense strand starting at position 2504 of SEQ ID NO: 916713
ugauuccuaugagccauau

SEQ ID NO: 1178311 - RNA, 19 nt, Artificial Sequence
  Description of Artificial Sequence: Synthetic oligonucleotide
  Antisense strand to SEQ ID NO: 1178310
auauggcucauaggaauca

SEQ ID NO: 1178312 - RNA, 19 nt, Artificial Sequence
  Description of Artificial Sequence: Synthetic oligonucleotide
  Sense strand starting at position 2574 of SEQ ID NO: 916713
uaauaauaacgguaacagu

SEQ ID NO: 1178313 - RNA, 19 nt, Artificial Sequence
  Description of Artificial Sequence: Synthetic oligonucleotide
  Antisense strand to SEQ ID NO: 1178312
acuguuaccguuauuauua

SEQ ID NO: 1178314 - RNA, 19 nt, Artificial Sequence
  Description of Artificial Sequence: Synthetic oligonucleotide
  Sense strand starting at position 2583 of SEQ ID NO: 916713
cgguaacaguguuuauuua

SEQ ID NO: 1178315 - RNA, 19 nt, Artificial Sequence
  Description of Artificial Sequence: Synthetic oligonucleotide
  Antisense strand to SEQ ID NO: 1178314
uaaauaaacacuguuaccg

SEQ ID NO: 1178316 - RNA, 19 nt, Artificial Sequence
  Description of Artificial Sequence: Synthetic oligonucleotide
  Sense strand starting at position 2855 of SEQ ID NO: 916713
acauguuugcccugaaucu

SEQ ID NO: 1178317 - RNA, 19 nt, Artificial Sequence
  Description of Artificial Sequence: Synthetic oligonucleotide
  Antisense strand to SEQ ID NO: 1178316
agauucagggcaaacaugu

SEQ ID NO: 1178318 - RNA, 19 nt, Artificial Sequence
  Description of Artificial Sequence: Synthetic oligonucleotide
  Sense strand starting at position 3005 of SEQ ID NO: 916713
auaugcaauugccuagauu

SEQ ID NO: 1178319 - RNA, 19 nt, Artificial Sequence
  Description of Artificial Sequence: Synthetic oligonucleotide
  Antisense strand to SEQ ID NO: 1178318
aaucuaggcaauugcauau

SEQ ID NO: 1178320 - RNA, 19 nt, Artificial Sequence
  Description of Artificial Sequence: Synthetic oligonucleotide
  Sense strand starting at position 3409 of SEQ ID NO: 916713
ucccauuaugcugggagau

SEQ ID NO: 1178321 - RNA, 19 nt, Artificial Sequence
  Description of Artificial Sequence: Synthetic oligonucleotide
  Antisense strand to SEQ ID NO: 1178320
aucucccagcauaauggga

SEQ ID NO: 1178322 - RNA, 19 nt, Artificial Sequence
  Description of Artificial Sequence: Synthetic oligonucleotide
  Sense strand starting at position 3410 of SEQ ID NO: 916713
cccauuaugcugggagauc

SEQ ID NO: 1178323 - RNA, 19 nt, Artificial Sequence
  Description of Artificial Sequence: Synthetic oligonucleotide
  Antisense strand to SEQ ID NO: 1178322
gaucucccagcauaauggg

SEQ ID NO: 1178324 - RNA, 19 nt, Artificial Sequence
  Description of Artificial Sequence: Synthetic oligonucleotide
  Sense strand starting at position 3442 of SEQ ID NO: 916713
cccuuagguccaggaguuu

SEQ ID NO: 1178325 - RNA, 19 nt, Artificial Sequence
  Description of Artificial Sequence: Synthetic oligonucleotide
  Antisense strand to SEQ ID NO: 1178324
aaacuccuggaccuaaggg

SEQ ID NO: 1178326 - RNA, 19 nt, Artificial Sequence
  Description of Artificial Sequence: Synthetic oligonucleotide
  Sense strand starting at position 3516 of SEQ ID NO: 916713
auaauuaauuagcagagga

SEQ ID NO: 1178327 - RNA, 19 nt, Artificial Sequence
  Description of Artificial Sequence: Synthetic oligonucleotide
  Antisense strand to SEQ ID NO: 1178326
uccucugcuaauuaauuau

SEQ ID NO: 1178328 - RNA, 19 nt, Artificial Sequence
  Description of Artificial Sequence: Synthetic oligonucleotide
  Sense strand starting at position 3913 of SEQ ID NO: 916713
gcagcuuuacaagacuuau

SEQ ID NO: 1178329 - RNA, 19 nt, Artificial Sequence
  Description of Artificial Sequence: Synthetic oligonucleotide
  Antisense strand to SEQ ID NO: 1178328
auaagucuuguaaagcugc

SEQ ID NO: 1178330 - RNA, 19 nt, Artificial Sequence
  Description of Artificial Sequence: Synthetic oligonucleotide
  Sense strand starting at position 3933 of SEQ ID NO: 916713
gggccaacuggugaaaucu

SEQ ID NO: 1178331 - RNA, 19 nt, Artificial Sequence
  Description of Artificial Sequence: Synthetic oligonucleotide
  Antisense strand to SEQ ID NO: 1178330
agauuucaccaguuggccc

SEQ ID NO: 1178332 - RNA, 19 nt, Artificial Sequence
  Description of Artificial Sequence: Synthetic oligonucleotide
  Sense strand starting at position 350 of SEQ ID NO: 916714
agaagcuuguucccaguga

SEQ ID NO: 1178333 - RNA, 19 nt, Artificial Sequence
  Description of Artificial Sequence: Synthetic oligonucleotide
  Antisense strand to SEQ ID NO: 1178332
ucacugggaacaagcuucu

SEQ ID NO: 1178334 - RNA, 19 nt, Artificial Sequence
  Description of Artificial Sequence: Synthetic oligonucleotide
  Sense strand starting at position 354 of SEQ ID NO: 916714
gcuuguucccagugauaaa

SEQ ID NO: 1178335 - RNA, 19 nt, Artificial Sequence
  Description of Artificial Sequence: Synthetic oligonucleotide
  Antisense strand to SEQ ID NO: 1178334
uuuaucacugggaacaagc

SEQ ID NO: 1178336 - RNA, 19 nt, Artificial Sequence
  Description of Artificial Sequence: Synthetic oligonucleotide
  Sense strand starting at position 424 of SEQ ID NO: 916714
ucaguaucaugacuugaau

SEQ ID NO: 1178337 - RNA, 19 nt, Artificial Sequence
  Description of Artificial Sequence: Synthetic oligonucleotide
  Antisense strand to SEQ ID NO: 1178336
auucaagucaugauacuga

SEQ ID NO: 1178338 - RNA, 19 nt, Artificial Sequence
  Description of Artificial Sequence: Synthetic oligonucleotide
  Sense strand starting at position 565 of SEQ ID NO: 916714
cguaguuaguaccuugaaa

SEQ ID NO: 1178339 - RNA, 19 nt, Artificial Sequence
  Description of Artificial Sequence: Synthetic oligonucleotide
  Antisense strand to SEQ ID NO: 1178338
uuucaagguacuaacuacg

SEQ ID NO: 1178340 - RNA, 19 nt, Artificial Sequence
  Description of Artificial Sequence: Synthetic oligonucleotide
  Sense strand starting at position 662 of SEQ ID NO: 916714
caagaauucuuaccgguua

SEQ ID NO: 1178341 - RNA, 19 nt, Artificial Sequence
  Description of Artificial Sequence: Synthetic oligonucleotide
  Antisense strand to SEQ ID NO: 1178340
uaaccgguaagaauucuug

SEQ ID NO: 1178342 - RNA, 19 nt, Artificial Sequence
  Description of Artificial Sequence: Synthetic oligonucleotide
  Sense strand starting at position 758 of SEQ ID NO: 916714
gaucuuugggacgacugua

SEQ ID NO: 1178343 - RNA, 19 nt, Artificial Sequence
  Description of Artificial Sequence: Synthetic oligonucleotide
  Antisense strand to SEQ ID NO: 1178342
uacagucgucccaaagauc

SEQ ID NO: 1178344 - RNA, 19 nt, Artificial Sequence
  Description of Artificial Sequence: Synthetic oligonucleotide
  Sense strand starting at position 766 of SEQ ID NO: 916714
ggacgacuguagguuaauu

SEQ ID NO: 1178345 - RNA, 19 nt, Artificial Sequence
  Description of Artificial Sequence: Synthetic oligonucleotide
  Antisense strand to SEQ ID NO: 1178344
aauuaaccuacagucgucc

SEQ ID NO: 1178346 - RNA, 19 nt, Artificial Sequence
  Description of Artificial Sequence: Synthetic oligonucleotide
  Sense strand starting at position 768 of SEQ ID NO: 916714
acgacuguagguuaauuaa

SEQ ID NO: 1178347 - RNA, 19 nt, Artificial Sequence
  Description of Artificial Sequence: Synthetic oligonucleotide
  Antisense strand to SEQ ID NO: 1178346
uuaauuaaccuacagucgu

SEQ ID NO: 1178348 - RNA, 19 nt, Artificial Sequence
  Description of Artificial Sequence: Synthetic oligonucleotide
  Sense strand starting at position 829 of SEQ ID NO: 916714
agugaaaccucaccucaag

SEQ ID NO: 1178349 - RNA, 19 nt, Artificial Sequence
  Description of Artificial Sequence: Synthetic oligonucleotide
  Antisense strand to SEQ ID NO: 1178348
cuugaggugagguuucacu

SEQ ID NO: 1178350 - RNA, 19 nt, Artificial Sequence
  Description of Artificial Sequence: Synthetic oligonucleotide
  Sense strand starting at position 868 of SEQ ID NO: 916714
auguccguaucuuuccaaa

SEQ ID NO: 1178351 - RNA, 19 nt, Artificial Sequence
  Description of Artificial Sequence: Synthetic oligonucleotide
  Antisense strand to SEQ ID NO: 1178350
uuuggaaagauacggacau

SEQ ID NO: 1178352 - RNA, 19 nt, Artificial Sequence
  Description of Artificial Sequence: Synthetic oligonucleotide
  Sense strand starting at position 935 of SEQ ID NO: 916714
cagggaagcggcugaguuu

SEQ ID NO: 1178353 - RNA, 19 nt, Artificial Sequence
  Description of Artificial Sequence: Synthetic oligonucleotide
  Antisense strand to SEQ ID NO: 1178352
aaacucagccgcuucccug

SEQ ID NO: 1178354 - RNA, 19 nt, Artificial Sequence
  Description of Artificial Sequence: Synthetic oligonucleotide
  Sense strand starting at position 1956 of SEQ ID NO: 916714
cgcggcuuucuagagauau

SEQ ID NO: 1178355 - RNA, 19 nt, Artificial Sequence
  Description of Artificial Sequence: Synthetic oligonucleotide
  Antisense strand to SEQ ID NO: 1178354
auaucucuagaaagccgcg

SEQ ID NO: 1178356 - RNA, 19 nt, Artificial Sequence
  Description of Artificial Sequence: Synthetic oligonucleotide
  Sense strand starting at position 1958 of SEQ ID NO: 916714
cggcuuucuagagauaucu

SEQ ID NO: 1178357 - RNA, 19 nt, Artificial Sequence
  Description of Artificial Sequence: Synthetic oligonucleotide
  Antisense strand to SEQ ID NO: 1178356
agauaucucuagaaagccg

SEQ ID NO: 1178358 - RNA, 19 nt, Artificial Sequence
  Description of Artificial Sequence: Synthetic oligonucleotide
  Sense strand starting at position 2103 of SEQ ID NO: 916714
cugucuucucgcguuagaa

SEQ ID NO: 1178359 - RNA, 19 nt, Artificial Sequence
  Description of Artificial Sequence: Synthetic oligonucleotide
  Antisense strand to SEQ ID NO: 1178358
uucuaacgcgagaagacag

SEQ ID NO: 1178360 - RNA, 19 nt, Artificial Sequence
  Description of Artificial Sequence: Synthetic oligonucleotide
  Sense strand starting at position 2104 of SEQ ID NO: 916714
ugucuucucgcguuagaaa

SEQ ID NO: 1178361 - RNA, 19 nt, Artificial Sequence
  Description of Artificial Sequence: Synthetic oligonucleotide
  Antisense strand to SEQ ID NO: 1178360
uuucuaacgcgagaagaca

SEQ ID NO: 1178362 - RNA, 19 nt, Artificial Sequence
  Description of Artificial Sequence: Synthetic oligonucleotide
  Sense strand starting at position 2156 of SEQ ID NO: 916714
uucggcgauuucucugaga

SEQ ID NO: 1178363 - RNA, 19 nt, Artificial Sequence
  Description of Artificial Sequence: Synthetic oligonucleotide
  Antisense strand to SEQ ID NO: 1178362
ucucagagaaaucgccgaa

SEQ ID NO: 1178364 - RNA, 19 nt, Artificial Sequence
  Description of Artificial Sequence: Synthetic oligonucleotide
  Sense strand starting at position 2159 of SEQ ID NO: 916714
ggcgauuucucugagaaac

SEQ ID NO: 1178365 - RNA, 19 nt, Artificial Sequence
  Description of Artificial Sequence: Synthetic oligonucleotide
  Antisense strand to SEQ ID NO: 1178364
guuucucagagaaaucgcc

SEQ ID NO: 1178366 - RNA, 19 nt, Artificial Sequence
  Description of Artificial Sequence: Synthetic oligonucleotide
  Sense strand starting at position 2161 of SEQ ID NO: 916714
cgauuucucugagaaacgg

SEQ ID NO: 1178367 - RNA, 19 nt, Artificial Sequence
  Description of Artificial Sequence: Synthetic oligonucleotide
  Antisense strand to SEQ ID NO: 1178366
ccguuucucagagaaaucg

SEQ ID NO: 1178368 - RNA, 19 nt, Artificial Sequence
  Description of Artificial Sequence: Synthetic oligonucleotide
  Sense strand starting at position 2242 of SEQ ID NO: 916714
ugaaauggcgcguugguua

SEQ ID NO: 1178369 - RNA, 19 nt, Artificial Sequence
  Description of Artificial Sequence: Synthetic oligonucleotide
  Antisense strand to SEQ ID NO: 1178368
uaaccaacgcgccauuuca

SEQ ID NO: 1178370 - RNA, 19 nt, Artificial Sequence
  Description of Artificial Sequence: Synthetic oligonucleotide
  Sense strand starting at position 2257 of SEQ ID NO: 916714
guuacucuugagggaguaa

SEQ ID NO: 1178371 - RNA, 19 nt, Artificial Sequence
  Description of Artificial Sequence: Synthetic oligonucleotide
  Antisense strand to SEQ ID NO: 1178370
uuacucccucaagaguaac

SEQ ID NO: 1178372 - RNA, 19 nt, Artificial Sequence
  Description of Artificial Sequence: Synthetic oligonucleotide
  Sense strand starting at position 2268 of SEQ ID NO: 916714
gggaguaaaucagcucacu

SEQ ID NO: 1178373 - RNA, 19 nt, Artificial Sequence
  Description of Artificial Sequence: Synthetic oligonucleotide
  Antisense strand to SEQ ID NO: 1178372
agugagcugauuuacuccc

SEQ ID NO: 1178374 - RNA, 19 nt, Artificial Sequence
  Description of Artificial Sequence: Synthetic oligonucleotide
  Sense strand starting at position 2482 of SEQ ID NO: 916714
accuuagugcuguagauga

SEQ ID NO: 1178375 - RNA, 19 nt, Artificial Sequence
  Description of Artificial Sequence: Synthetic oligonucleotide
  Antisense strand to SEQ ID NO: 1178374
ucaucuacagcacuaaggu

SEQ ID NO: 1178376 - RNA, 19 nt, Artificial Sequence
  Description of Artificial Sequence: Synthetic oligonucleotide
  Sense strand starting at position 2520 of SEQ ID NO: 916714
gggagagucuagguuucug

SEQ ID NO: 1178377 - RNA, 19 nt, Artificial Sequence
  Description of Artificial Sequence: Synthetic oligonucleotide
  Antisense strand to SEQ ID NO: 1178376
cagaaaccuagacucuccc

SEQ ID NO: 1178378 - RNA, 19 nt, Artificial Sequence
  Description of Artificial Sequence: Synthetic oligonucleotide
  Sense strand starting at position 2524 of SEQ ID NO: 916714
gagucuagguuucugggaa

SEQ ID NO: 1178379 - RNA, 19 nt, Artificial Sequence
  Description of Artificial Sequence: Synthetic oligonucleotide
  Antisense strand to SEQ ID NO: 1178378
uucccagaaaccuagacuc

SEQ ID NO: 1178380 - RNA, 19 nt, Artificial Sequence
  Description of Artificial Sequence: Synthetic oligonucleotide
  Sense strand starting at position 2553 of SEQ ID NO: 916714
aggacauuguguguuucca

SEQ ID NO: 1178381 - RNA, 19 nt, Artificial Sequence
  Description of Artificial Sequence: Synthetic oligonucleotide
  Antisense strand to SEQ ID NO: 1178380
uggaaacacacaauguccu

SEQ ID NO: 1178382 - RNA, 19 nt, Artificial Sequence
  Description of Artificial Sequence: Synthetic oligonucleotide
  Sense strand starting at position 2561 of SEQ ID NO: 916714
guguguuuccacgcacauc

SEQ ID NO: 1178383 - RNA, 19 nt, Artificial Sequence
  Description of Artificial Sequence: Synthetic oligonucleotide
  Antisense strand to SEQ ID NO: 1178382
gaugugcguggaaacacac

SEQ ID NO: 1178384 - RNA, 19 nt, Artificial Sequence
  Description of Artificial Sequence: Synthetic oligonucleotide
  Sense strand starting at position 2605 of SEQ ID NO: 916714
cgcuuugugcaacauauua

SEQ ID NO: 1178385 - RNA, 19 nt, Artificial Sequence
  Description of Artificial Sequence: Synthetic oligonucleotide
  Antisense strand to SEQ ID NO: 1178384
uaauauguugcacaaagcg

SEQ ID NO: 1178386 - RNA, 19 nt, Artificial Sequence
  Description of Artificial Sequence: Synthetic oligonucleotide
  Sense strand starting at position 2618 of SEQ ID NO: 916714
auauuaguaggguguagua

SEQ ID NO: 1178387 - RNA, 19 nt, Artificial Sequence
  Description of Artificial Sequence: Synthetic oligonucleotide
  Antisense strand to SEQ ID NO: 1178386
uacuacacccuacuaauau

SEQ ID NO: 1178388 - RNA, 19 nt, Artificial Sequence
  Description of Artificial Sequence: Synthetic oligonucleotide
  Sense strand starting at position 2742 of SEQ ID NO: 916714
guuuaacgaaagugcuaua

SEQ ID NO: 1178389 - RNA, 19 nt, Artificial Sequence
  Description of Artificial Sequence: Synthetic oligonucleotide
  Antisense strand to SEQ ID NO: 1178388
uauagcacuuucguuaaac

SEQ ID NO: 1178390 - RNA, 19 nt, Artificial Sequence
  Description of Artificial Sequence: Synthetic oligonucleotide
  Sense strand starting at position 2793 of SEQ ID NO: 916714
gcacuaagguauuuagugu

SEQ ID NO: 1178391 - RNA, 19 nt, Artificial Sequence
  Description of Artificial Sequence: Synthetic oligonucleotide
  Antisense strand to SEQ ID NO: 1178390
acacuaaauaccuuagugc

SEQ ID NO: 1178392 - RNA, 19 nt, Artificial Sequence
  Description of Artificial Sequence: Synthetic oligonucleotide
  Sense strand starting at position 2800 of SEQ ID NO: 916714
gguauuuagugucuguguu

SEQ ID NO: 1178393 - RNA, 19 nt, Artificial Sequence
  Description of Artificial Sequence: Synthetic oligonucleotide
  Antisense strand to SEQ ID NO: 1178392
aacacagacacuaaauacc

SEQ ID NO: 1178394 - RNA, 19 nt, Artificial Sequence
  Description of Artificial Sequence: Synthetic oligonucleotide
  Sense strand starting at position 2801 of SEQ ID NO: 916714
guauuuagugucuguguug

SEQ ID NO: 1178395 - RNA, 19 nt, Artificial Sequence
  Description of Artificial Sequence: Synthetic oligonucleotide
  Antisense strand to SEQ ID NO: 1178394
caacacagacacuaaauac

SEQ ID NO: 1178396 - RNA, 19 nt, Artificial Sequence
  Description of Artificial Sequence: Synthetic oligonucleotide
  Sense strand starting at position 2810 of SEQ ID NO: 916714
gucuguguugugcaggaca

SEQ ID NO: 1178397 - RNA, 19 nt, Artificial Sequence
  Description of Artificial Sequence: Synthetic oligonucleotide
  Antisense strand to SEQ ID NO: 1178396
uguccugcacaacacagac

SEQ ID NO: 1178398 - RNA, 19 nt, Artificial Sequence
  Description of Artificial Sequence: Synthetic oligonucleotide
  Sense strand starting at position 2829 of SEQ ID NO: 916714
gguagugggagcuacgaaa

SEQ ID NO: 1178399 - RNA, 19 nt, Artificial Sequence
  Description of Artificial Sequence: Synthetic oligonucleotide
  Antisense strand to SEQ ID NO: 1178398
uuucguagcucccacuacc

SEQ ID NO: 1178400 - RNA, 19 nt, Artificial Sequence
  Description of Artificial Sequence: Synthetic oligonucleotide
  Sense strand starting at position 3049 of SEQ ID NO: 916714
gccaaauacuagcuaguau

SEQ ID NO: 1178401 - RNA, 19 nt, Artificial Sequence
  Description of Artificial Sequence: Synthetic oligonucleotide
  Antisense strand to SEQ ID NO: 1178400
auacuagcuaguauuuggc

SEQ ID NO: 1178402 - RNA, 19 nt, Artificial Sequence
  Description of Artificial Sequence: Synthetic oligonucleotide
  Sense strand starting at position 3446 of SEQ ID NO: 916714
gagugagucugggucucaa

SEQ ID NO: 1178403 - RNA, 19 nt, Artificial Sequence
  Description of Artificial Sequence: Synthetic oligonucleotide
  Antisense strand to SEQ ID NO: 1178402
uugagacccagacucacuc

SEQ ID NO: 1178404 - RNA, 19 nt, Artificial Sequence
  Description of Artificial Sequence: Synthetic oligonucleotide
  Sense strand starting at position 3767 of SEQ ID NO: 916714
gggcguggugugccuauaa

SEQ ID NO: 1178405 - RNA, 19 nt, Artificial Sequence
  Description of Artificial Sequence: Synthetic oligonucleotide
  Antisense strand to SEQ ID NO: 1178404
uuauaggcacaccacgccc

SEQ ID NO: 1178406 - RNA, 19 nt, Artificial Sequence
  Description of Artificial Sequence: Synthetic oligonucleotide
  Sense strand starting at position 3788 of SEQ ID NO: 916714
ccagguacucaggagucuu

SEQ ID NO: 1178407 - RNA, 19 nt, Artificial Sequence
  Description of Artificial Sequence: Synthetic oligonucleotide
  Antisense strand to SEQ ID NO: 1178406
aagacuccugaguaccugg

SEQ ID NO: 1178408 - RNA, 19 nt, Artificial Sequence
  Description of Artificial Sequence: Synthetic oligonucleotide
  Sense strand starting at position 3798 of SEQ ID NO: 916714
aggagucuuaggugggaga

SEQ ID NO: 1178409 - RNA, 19 nt, Artificial Sequence
  Description of Artificial Sequence: Synthetic oligonucleotide
  Antisense strand to SEQ ID NO: 1178408
ucucccaccuaagacuccu

SEQ ID NO: 1178410 - RNA, 19 nt, Artificial Sequence
  Description of Artificial Sequence: Synthetic oligonucleotide
  Sense strand starting at position 3885 of SEQ ID NO: 916714
cagugagacucuguguaaa

SEQ ID NO: 1178411 - RNA, 19 nt, Artificial Sequence
  Description of Artificial Sequence: Synthetic oligonucleotide
  Antisense strand to SEQ ID NO: 1178410
uuuacacagagucucacug

SEQ ID NO: 1178412 - RNA, 19 nt, Artificial Sequence
  Description of Artificial Sequence: Synthetic oligonucleotide
  Sense strand starting at position 65 of SEQ ID NO: 916715
ccggaaaguugauuccaca

SEQ ID NO: 1178413 - RNA, 19 nt, Artificial Sequence
  Description of Artificial Sequence: Synthetic oligonucleotide
  Antisense strand to SEQ ID NO: 1178412
uguggaaucaacuuuccgg

SEQ ID NO: 1178414 - RNA, 19 nt, Artificial Sequence
  Description of Artificial Sequence: Synthetic oligonucleotide
  Sense strand starting at position 805 of SEQ ID NO: 916715
gcuguuggccugugaauuu

SEQ ID NO: 1178415 - RNA, 19 nt, Artificial Sequence
  Description of Artificial Sequence: Synthetic oligonucleotide
  Antisense strand to SEQ ID NO: 1178414
aaauucacaggccaacagc

SEQ ID NO: 1178416 - RNA, 19 nt, Artificial Sequence
  Description of Artificial Sequence: Synthetic oligonucleotide
  Sense strand starting at position 880 of SEQ ID NO: 916715
ggcccauucccgggaugaa

SEQ ID NO: 1178417 - RNA, 19 nt, Artificial Sequence
  Description of Artificial Sequence: Synthetic oligonucleotide
  Antisense strand to SEQ ID NO: 1178416
uucaucccgggaaugggcc

SEQ ID NO: 1178418 - RNA, 19 nt, Artificial Sequence
  Description of Artificial Sequence: Synthetic oligonucleotide
  Sense strand starting at position 881 of SEQ ID NO: 916715
gcccauucccgggaugaac

SEQ ID NO: 1178419 - RNA, 19 nt, Artificial Sequence
  Description of Artificial Sequence: Synthetic oligonucleotide
  Antisense strand to SEQ ID NO: 1178418
guucaucccgggaaugggc

SEQ ID NO: 1178420 - RNA, 19 nt, Artificial Sequence
  Description of Artificial Sequence: Synthetic oligonucleotide
  Sense strand starting at position 1112 of SEQ ID NO: 916715
acucauggucgggagucua

SEQ ID NO: 1178421 - RNA, 19 nt, Artificial Sequence
  Description of Artificial Sequence: Synthetic oligonucleotide
  Antisense strand to SEQ ID NO: 1178420
uagacucccgaccaugagu

SEQ ID NO: 1178422 - RNA, 19 nt, Artificial Sequence
  Description of Artificial Sequence: Synthetic oligonucleotide
  Sense strand starting at position 1322 of SEQ ID NO: 916715
aagaaagacugcucggaau

SEQ ID NO: 1178423 - RNA, 19 nt, Artificial Sequence
  Description of Artificial Sequence: Synthetic oligonucleotide
  Antisense strand to SEQ ID NO: 1178422
auuccgagcagucuuucuu

SEQ ID NO: 1178424 - RNA, 19 nt, Artificial Sequence
  Description of Artificial Sequence: Synthetic oligonucleotide
  Sense strand starting at position 1324 of SEQ ID NO: 916715
gaaagacugcucggaauua

SEQ ID NO: 1178425 - RNA, 19 nt, Artificial Sequence
  Description of Artificial Sequence: Synthetic oligonucleotide
  Antisense strand to SEQ ID NO: 1178424
uaauuccgagcagucuuuc

SEQ ID NO: 1178426 - RNA, 19 nt, Artificial Sequence
  Description of Artificial Sequence: Synthetic oligonucleotide
  Sense strand starting at position 1334 of SEQ ID NO: 916715
ucggaauuacuggguagua

SEQ ID NO: 1178427 - RNA, 19 nt, Artificial Sequence
  Description of Artificial Sequence: Synthetic oligonucleotide
  Antisense strand to SEQ ID NO: 1178426
uacuacccaguaauuccga

SEQ ID NO: 1178428 - RNA, 19 nt, Artificial Sequence
  Description of Artificial Sequence: Synthetic oligonucleotide
  Sense strand starting at position 1335 of SEQ ID NO: 916715
cggaauuacuggguaguau

SEQ ID NO: 1178429 - RNA, 19 nt, Artificial Sequence
  Description of Artificial Sequence: Synthetic oligonucleotide
  Antisense strand to SEQ ID NO: 1178428
auacuacccaguaauuccg

SEQ ID NO: 1178430 - RNA, 19 nt, Artificial Sequence
  Description of Artificial Sequence: Synthetic oligonucleotide
  Sense strand starting at position 1336 of SEQ ID NO: 916715
ggaauuacuggguaguauc

SEQ ID NO: 1178431 - RNA, 19 nt, Artificial Sequence
  Description of Artificial Sequence: Synthetic oligonucleotide
  Antisense strand to SEQ ID NO: 1178430
gauacuacccaguaauucc

SEQ ID NO: 1178432 - RNA, 19 nt, Artificial Sequence
  Description of Artificial Sequence: Synthetic oligonucleotide
  Sense strand starting at position 1344 of SEQ ID NO: 916715
uggguaguaucaucuagga

SEQ ID NO: 1178433 - RNA, 19 nt, Artificial Sequence
  Description of Artificial Sequence: Synthetic oligonucleotide
  Antisense strand to SEQ ID NO: 1178432
uccuagaugauacuaccca

SEQ ID NO: 1178434 - RNA, 19 nt, Artificial Sequence
  Description of Artificial Sequence: Synthetic oligonucleotide
  Sense strand starting at position 1451 of SEQ ID NO: 916715
auuugucuucuaggcaauc

SEQ ID NO: 1178435 - RNA, 19 nt, Artificial Sequence
  Description of Artificial Sequence: Synthetic oligonucleotide
  Antisense strand to SEQ ID NO: 1178434
gauugccuagaagacaaau

SEQ ID NO: 1178436 - RNA, 19 nt, Artificial Sequence
  Description of Artificial Sequence: Synthetic oligonucleotide
  Sense strand starting at position 1508 of SEQ ID NO: 916715
gauuuagauucuugagaug

SEQ ID NO: 1178437 - RNA, 19 nt, Artificial Sequence
  Description of Artificial Sequence: Synthetic oligonucleotide
  Antisense strand to SEQ ID NO: 1178436
caucucaagaaucuaaauc

SEQ ID NO: 1178438 - RNA, 19 nt, Artificial Sequence
  Description of Artificial Sequence: Synthetic oligonucleotide
  Sense strand starting at position 1530 of SEQ ID NO: 916715
caaggaauguggccuuuau

SEQ ID NO: 1178439 - RNA, 19 nt, Artificial Sequence
  Description of Artificial Sequence: Synthetic oligonucleotide
  Antisense strand to SEQ ID NO: 1178438
auaaaggccacauuccuug

SEQ ID NO: 1178440 - RNA, 19 nt, Artificial Sequence
  Description of Artificial Sequence: Synthetic oligonucleotide
  Sense strand starting at position 1534 of SEQ ID NO: 916715
gaauguggccuuuaucaag

SEQ ID NO: 1178441 - RNA, 19 nt, Artificial Sequence
  Description of Artificial Sequence: Synthetic oligonucleotide
  Antisense strand to SEQ ID NO: 1178440
cuugauaaaggccacauuc

SEQ ID NO: 1178442 - RNA, 19 nt, Artificial Sequence
  Description of Artificial Sequence: Synthetic oligonucleotide
  Sense strand starting at position 1859 of SEQ ID NO: 916715
ucccuugaauguguaagga

SEQ ID NO: 1178443 - RNA, 19 nt, Artificial Sequence
  Description of Artificial Sequence: Synthetic oligonucleotide
  Antisense strand to SEQ ID NO: 1178442
uccuuacacauucaaggga

SEQ ID NO: 1178444 - RNA, 19 nt, Artificial Sequence
  Description of Artificial Sequence: Synthetic oligonucleotide
  Sense strand starting at position 1885 of SEQ ID NO: 916715
auguuagacuuguuuggau

SEQ ID NO: 1178445 - RNA, 19 nt, Artificial Sequence
  Description of Artificial Sequence: Synthetic oligonucleotide
  Antisense strand to SEQ ID NO: 1178444
auccaaacaagucuaacau

SEQ ID NO: 1178446 - RNA, 19 nt, Artificial Sequence
  Description of Artificial Sequence: Synthetic oligonucleotide
  Sense strand starting at position 2006 of SEQ ID NO: 916715
uaauguaaucguuagaucu

SEQ ID NO: 1178447 - RNA, 19 nt, Artificial Sequence
  Description of Artificial Sequence: Synthetic oligonucleotide
  Antisense strand to SEQ ID NO: 1178446
agaucuaacgauuacauua

SEQ ID NO: 1178448 - RNA, 19 nt, Artificial Sequence
  Description of Artificial Sequence: Synthetic oligonucleotide
  Sense strand starting at position 2095 of SEQ ID NO: 916715
uugcaaguuguuuaacauu

SEQ ID NO: 1178449 - RNA, 19 nt, Artificial Sequence
  Description of Artificial Sequence: Synthetic oligonucleotide
  Antisense strand to SEQ ID NO: 1178448
aauguuaaacaacuugcaa

SEQ ID NO: 1178450 - RNA, 19 nt, Artificial Sequence
  Description of Artificial Sequence: Synthetic oligonucleotide
  Sense strand starting at position 2101 of SEQ ID NO: 916715
guuguuuaacauugaaaug

SEQ ID NO: 1178451 - RNA, 19 nt, Artificial Sequence
  Description of Artificial Sequence: Synthetic oligonucleotide
  Antisense strand to SEQ ID NO: 1178450
cauuucaauguuaaacaac

SEQ ID NO: 1178452 - RNA, 19 nt, Artificial Sequence
  Description of Artificial Sequence: Synthetic oligonucleotide
  Sense strand starting at position 2305 of SEQ ID NO: 916715
ucaauagacugcuuugauu

SEQ ID NO: 1178453 - RNA, 19 nt, Artificial Sequence
  Description of Artificial Sequence: Synthetic oligonucleotide
  Antisense strand to SEQ ID NO: 1178452
aaucaaagcagucuauuga

SEQ ID NO: 1178454 - RNA, 19 nt, Artificial Sequence
  Description of Artificial Sequence: Synthetic oligonucleotide
  Sense strand starting at position 2490 of SEQ ID NO: 916715
gucuuuauauacucggaau

SEQ ID NO: 1178455 - RNA, 19 nt, Artificial Sequence
  Description of Artificial Sequence: Synthetic oligonucleotide
  Antisense strand to SEQ ID NO: 1178454
auuccgaguauauaaagac

SEQ ID NO: 1178456 - RNA, 19 nt, Artificial Sequence
  Description of Artificial Sequence: Synthetic oligonucleotide
  Sense strand starting at position 2492 of SEQ ID NO: 916715
cuuuauauacucggaauac

SEQ ID NO: 1178457 - RNA, 19 nt, Artificial Sequence
  Description of Artificial Sequence: Synthetic oligonucleotide
  Antisense strand to SEQ ID NO: 1178456
guauuccgaguauauaaag

SEQ ID NO: 1178458 - RNA, 19 nt, Artificial Sequence
  Description of Artificial Sequence: Synthetic oligonucleotide
  Sense strand starting at position 2568 of SEQ ID NO: 916715
gcucuucuggcugaaagag

SEQ ID NO: 1178459 - RNA, 19 nt, Artificial Sequence
  Description of Artificial Sequence: Synthetic oligonucleotide
  Antisense strand to SEQ ID NO: 1178458
cucuuucagccagaagagc

SEQ ID NO: 1178460 - RNA, 19 nt, Artificial Sequence
  Description of Artificial Sequence: Synthetic oligonucleotide
  Sense strand starting at position 2585 of SEQ ID NO: 916715
agggaaaucuucucagcag

SEQ ID NO: 1178461 - RNA, 19 nt, Artificial Sequence
  Description of Artificial Sequence: Synthetic oligonucleotide
  Antisense strand to SEQ ID NO: 1178460
cugcugagaagauuucccu

SEQ ID NO: 1178462 - RNA, 19 nt, Artificial Sequence
  Description of Artificial Sequence: Synthetic oligonucleotide
  Sense strand starting at position 2682 of SEQ ID NO: 916715
ggagacuucuguucccacu

SEQ ID NO: 1178463 - RNA, 19 nt, Artificial Sequence
  Description of Artificial Sequence: Synthetic oligonucleotide
  Antisense strand to SEQ ID NO: 1178462
agugggaacagaagucucc

SEQ ID NO: 1178464 - RNA, 19 nt, Artificial Sequence
  Description of Artificial Sequence: Synthetic oligonucleotide
  Sense strand starting at position 2746 of SEQ ID NO: 916715
uuauuacuuuccguagaaa

SEQ ID NO: 1178465 - RNA, 19 nt, Artificial Sequence
  Description of Artificial Sequence: Synthetic oligonucleotide
  Antisense strand to SEQ ID NO: 1178464
uuucuacggaaaguaauaa

SEQ ID NO: 1178466 - RNA, 19 nt, Artificial Sequence
  Description of Artificial Sequence: Synthetic oligonucleotide
  Sense strand starting at position 2749 of SEQ ID NO: 916715
uuacuuuccguagaaauuc

SEQ ID NO: 1178467 - RNA, 19 nt, Artificial Sequence
  Description of Artificial Sequence: Synthetic oligonucleotide
  Antisense strand to SEQ ID NO: 1178466
gaauuucuacggaaaguaa

SEQ ID NO: 1178468 - RNA, 19 nt, Artificial Sequence
  Description of Artificial Sequence: Synthetic oligonucleotide
  Sense strand starting at position 2757 of SEQ ID NO: 916715
cguagaaauucuccucaau

SEQ ID NO: 1178469 - RNA, 19 nt, Artificial Sequence
  Description of Artificial Sequence: Synthetic oligonucleotide
  Antisense strand to SEQ ID NO: 1178468
auugaggagaauuucuacg

SEQ ID NO: 1178470 - RNA, 19 nt, Artificial Sequence
  Description of Artificial Sequence: Synthetic oligonucleotide
  Sense strand starting at position 2879 of SEQ ID NO: 916715
gaggaugcaugacugcaaa

SEQ ID NO: 1178471 - RNA, 19 nt, Artificial Sequence
  Description of Artificial Sequence: Synthetic oligonucleotide
  Antisense strand to SEQ ID NO: 1178470
uuugcagucaugcauccuc

SEQ ID NO: 1178472 - RNA, 19 nt, Artificial Sequence
  Description of Artificial Sequence: Synthetic oligonucleotide
  Sense strand starting at position 2882 of SEQ ID NO: 916715
gaugcaugacugcaaauga

SEQ ID NO: 1178473 - RNA, 19 nt, Artificial Sequence
  Description of Artificial Sequence: Synthetic oligonucleotide
  Antisense strand to SEQ ID NO: 1178472
ucauuugcagucaugcauc

SEQ ID NO: 1178474 - RNA, 19 nt, Artificial Sequence
  Description of Artificial Sequence: Synthetic oligonucleotide
  Sense strand starting at position 3036 of SEQ ID NO: 916715
guaaaugcaccuuagcaaa

SEQ ID NO: 1178475 - RNA, 19 nt, Artificial Sequence
  Description of Artificial Sequence: Synthetic oligonucleotide
  Antisense strand to SEQ ID NO: 1178474
uuugcuaaggugcauuuac

SEQ ID NO: 1178476 - RNA, 19 nt, Artificial Sequence
  Description of Artificial Sequence: Synthetic oligonucleotide
  Sense strand starting at position 3080 of SEQ ID NO: 916715
guauuuccauguuuagcau

SEQ ID NO: 1178477 - RNA, 19 nt, Artificial Sequence
  Description of Artificial Sequence: Synthetic oligonucleotide
  Antisense strand to SEQ ID NO: 1178476
augcuaaacauggaaauac

SEQ ID NO: 1178478 - RNA, 19 nt, Artificial Sequence
  Description of Artificial Sequence: Synthetic oligonucleotide
  Sense strand starting at position 3234 of SEQ ID NO: 916715
ucaguugaauacccaguua

SEQ ID NO: 1178479 - RNA, 19 nt, Artificial Sequence
  Description of Artificial Sequence: Synthetic oligonucleotide
  Antisense strand to SEQ ID NO: 1178478
uaacuggguauucaacuga

SEQ ID NO: 1178480 - RNA, 19 nt, Artificial Sequence
  Description of Artificial Sequence: Synthetic oligonucleotide
  Sense strand starting at position 3559 of SEQ ID NO: 916715
gcauaaucagcucaaguaa

SEQ ID NO: 1178481 - RNA, 19 nt, Artificial Sequence
  Description of Artificial Sequence: Synthetic oligonucleotide
  Antisense strand to SEQ ID NO: 1178480
uuacuugagcugauuaugc

SEQ ID NO: 1178482 - RNA, 19 nt, Artificial Sequence
  Description of Artificial Sequence: Synthetic oligonucleotide
  Sense strand starting at position 3595 of SEQ ID NO: 916715
auuagaauguggcucucau

SEQ ID NO: 1178483 - RNA, 19 nt, Artificial Sequence
  Description of Artificial Sequence: Synthetic oligonucleotide
  Antisense strand to SEQ ID NO: 1178482
augagagccacauucuaau

SEQ ID NO: 1178484 - RNA, 19 nt, Artificial Sequence
  Description of Artificial Sequence: Synthetic oligonucleotide
  Sense strand starting at position 3714 of SEQ ID NO: 916715
uaggaaaggguguguuucu

SEQ ID NO: 1178485 - RNA, 19 nt, Artificial Sequence
  Description of Artificial Sequence: Synthetic oligonucleotide
  Antisense strand to SEQ ID NO: 1178484
agaaacacacccuuuccua

SEQ ID NO: 1178486 - RNA, 19 nt, Artificial Sequence
  Description of Artificial Sequence: Synthetic oligonucleotide
  Sense strand starting at position 3745 of SEQ ID NO: 916715
uuuguaguuaggugaggau

SEQ ID NO: 1178487 - RNA, 19 nt, Artificial Sequence
  Description of Artificial Sequence: Synthetic oligonucleotide
  Antisense strand to SEQ ID NO: 1178486
auccucaccuaacuacaaa

SEQ ID NO: 1178488 - RNA, 19 nt, Artificial Sequence
  Description of Artificial Sequence: Synthetic oligonucleotide
  Sense strand starting at position 3817 of SEQ ID NO: 916715
ggaggaguguauagauaug

SEQ ID NO: 1178489 - RNA, 19 nt, Artificial Sequence
  Description of Artificial Sequence: Synthetic oligonucleotide
  Antisense strand to SEQ ID NO: 1178488
cauaucuauacacuccucc

SEQ ID NO: 1178490 - RNA, 19 nt, Artificial Sequence
  Description of Artificial Sequence: Synthetic oligonucleotide
  Sense strand starting at position 3823 of SEQ ID NO: 916715
guguauagauaugcaucaa

SEQ ID NO: 1178491 - RNA, 19 nt, Artificial Sequence
  Description of Artificial Sequence: Synthetic oligonucleotide
  Antisense strand to SEQ ID NO: 1178490
uugaugcauaucuauacac

SEQ ID NO: 1178492 - RNA, 19 nt, Artificial Sequence
  Description of Artificial Sequence: Synthetic oligonucleotide
  Sense strand starting at position 8 of SEQ ID NO: 916716
ucuguuccaagguaguauu

SEQ ID NO: 1178493 - RNA, 19 nt, Artificial Sequence
  Description of Artificial Sequence: Synthetic oligonucleotide
  Antisense strand to SEQ ID NO: 1178492
aauacuaccuuggaacaga

SEQ ID NO: 1178494 - RNA, 19 nt, Artificial Sequence
  Description of Artificial Sequence: Synthetic oligonucleotide
  Sense strand starting at position 43 of SEQ ID NO: 916716
auaguauuuaagugugcuu

SEQ ID NO: 1178495 - RNA, 19 nt, Artificial Sequence
  Description of Artificial Sequence: Synthetic oligonucleotide
  Antisense strand to SEQ ID NO: 1178494
aagcacacuuaaauacuau

SEQ ID NO: 1178496 - RNA, 19 nt, Artificial Sequence
  Description of Artificial Sequence: Synthetic oligonucleotide
  Sense strand starting at position 157 of SEQ ID NO: 916716
ucagaaacacaucgguaaa

SEQ ID NO: 1178497 - RNA, 19 nt, Artificial Sequence
  Description of Artificial Sequence: Synthetic oligonucleotide
  Antisense strand to SEQ ID NO: 1178496
uuuaccgauguguuucuga

SEQ ID NO: 1178498 - RNA, 19 nt, Artificial Sequence
  Description of Artificial Sequence: Synthetic oligonucleotide
  Sense strand starting at position 202 of SEQ ID NO: 916716
ccuuaucuucgguauaaug

SEQ ID NO: 1178499 - RNA, 19 nt, Artificial Sequence
  Description of Artificial Sequence: Synthetic oligonucleotide
  Antisense strand to SEQ ID NO: 1178498
cauuauaccgaagauaagg

SEQ ID NO: 1178500 - RNA, 19 nt, Artificial Sequence
  Description of Artificial Sequence: Synthetic oligonucleotide
  Sense strand starting at position 204 of SEQ ID NO: 916716
uuaucuucgguauaauguu

SEQ ID NO: 1178501 - RNA, 19 nt, Artificial Sequence
  Description of Artificial Sequence: Synthetic oligonucleotide
  Antisense strand to SEQ ID NO: 1178500
aacauuauaccgaagauaa

SEQ ID NO: 1178502 - RNA, 19 nt, Artificial Sequence
  Description of Artificial Sequence: Synthetic oligonucleotide
  Sense strand starting at position 276 of SEQ ID NO: 916716
uuccgacaugucuaaagua

SEQ ID NO: 1178503 - RNA, 19 nt, Artificial Sequence
  Description of Artificial Sequence: Synthetic oligonucleotide
  Antisense strand to SEQ ID NO: 1178502
uacuuuagacaugucggaa

SEQ ID NO: 1178504 - RNA, 19 nt, Artificial Sequence
  Description of Artificial Sequence: Synthetic oligonucleotide
  Sense strand starting at position 360 of SEQ ID NO: 916716
uuuguacacccucgggaau

SEQ ID NO: 1178505 - RNA, 19 nt, Artificial Sequence
  Description of Artificial Sequence: Synthetic oligonucleotide
  Antisense strand to SEQ ID NO: 1178504
auucccgaggguguacaaa

SEQ ID NO: 1178506 - RNA, 19 nt, Artificial Sequence
  Description of Artificial Sequence: Synthetic oligonucleotide
  Sense strand starting at position 361 of SEQ ID NO: 916716
uuguacacccucgggaauu

SEQ ID NO: 1178507 - RNA, 19 nt, Artificial Sequence
  Description of Artificial Sequence: Synthetic oligonucleotide
  Antisense strand to SEQ ID NO: 1178506
aauucccgaggguguacaa

SEQ ID NO: 1178508 - RNA, 19 nt, Artificial Sequence
  Description of Artificial Sequence: Synthetic oligonucleotide
  Sense strand starting at position 479 of SEQ ID NO: 916716
aucucaguucucgaacuuu

SEQ ID NO: 1178509 - RNA, 19 nt, Artificial Sequence
  Description of Artificial Sequence: Synthetic oligonucleotide
  Antisense strand to SEQ ID NO: 1178508
aaaguucgagaacugagau

SEQ ID NO: 1178510 - RNA, 19 nt, Artificial Sequence
  Description of Artificial Sequence: Synthetic oligonucleotide
  Sense strand starting at position 485 of SEQ ID NO: 916716
guucucgaacuuuauaguu

SEQ ID NO: 1178511 - RNA, 19 nt, Artificial Sequence
  Description of Artificial Sequence: Synthetic oligonucleotide
  Antisense strand to SEQ ID NO: 1178510
aacuauaaaguucgagaac

SEQ ID NO: 1178512 - RNA, 19 nt, Artificial Sequence
  Description of Artificial Sequence: Synthetic oligonucleotide
  Sense strand starting at position 521 of SEQ ID NO: 916716
gagucugcaguuuaaagau

SEQ ID NO: 1178513 - RNA, 19 nt, Artificial Sequence
  Description of Artificial Sequence: Synthetic oligonucleotide
  Antisense strand to SEQ ID NO: 1178512
aucuuuaaacugcagacuc

SEQ ID NO: 1178514 - RNA, 19 nt, Artificial Sequence
  Description of Artificial Sequence: Synthetic oligonucleotide
  Sense strand starting at position 550 of SEQ ID NO: 916716
ugguguuauacacauuagu

SEQ ID NO: 1178515 - RNA, 19 nt, Artificial Sequence
  Description of Artificial Sequence: Synthetic oligonucleotide
  Antisense strand to SEQ ID NO: 1178514
acuaauguguauaacacca

SEQ ID NO: 1178516 - RNA, 19 nt, Artificial Sequence
  Description of Artificial Sequence: Synthetic oligonucleotide
  Sense strand starting at position 553 of SEQ ID NO: 916716
uguuauacacauuagugaa

SEQ ID NO: 1178517 - RNA, 19 nt, Artificial Sequence
  Description of Artificial Sequence: Synthetic oligonucleotide
  Antisense strand to SEQ ID NO: 1178516
uucacuaauguguauaaca

SEQ ID NO: 1178518 - RNA, 19 nt, Artificial Sequence
  Description of Artificial Sequence: Synthetic oligonucleotide
  Sense strand starting at position 595 of SEQ ID NO: 916716
agaucauguuacucuauca

SEQ ID NO: 1178519 - RNA, 19 nt, Artificial Sequence
  Description of Artificial Sequence: Synthetic oligonucleotide
  Antisense strand to SEQ ID NO: 1178518
ugauagaguaacaugaucu

SEQ ID NO: 1178520 - RNA, 19 nt, Artificial Sequence
  Description of Artificial Sequence: Synthetic oligonucleotide
  Sense strand starting at position 642 of SEQ ID NO: 916716
agugauauuucucuggugu

SEQ ID NO: 1178521 - RNA, 19 nt, Artificial Sequence
  Description of Artificial Sequence: Synthetic oligonucleotide
  Antisense strand to SEQ ID NO: 1178520
acaccagagaaauaucacu

SEQ ID NO: 1178522 - RNA, 19 nt, Artificial Sequence
  Description of Artificial Sequence: Synthetic oligonucleotide
  Sense strand starting at position 643 of SEQ ID NO: 916716
gugauauuucucuggugug

SEQ ID NO: 1178523 - RNA, 19 nt, Artificial Sequence
  Description of Artificial Sequence: Synthetic oligonucleotide
  Antisense strand to SEQ ID NO: 1178522
cacaccagagaaauaucac

SEQ ID NO: 1178524 - RNA, 19 nt, Artificial Sequence
  Description of Artificial Sequence: Synthetic oligonucleotide
  Sense strand starting at position 837 of SEQ ID NO: 916716
gcgcucuagcguuccugaa

SEQ ID NO: 1178525 - RNA, 19 nt, Artificial Sequence
  Description of Artificial Sequence: Synthetic oligonucleotide
  Antisense strand to SEQ ID NO: 1178524
uucaggaacgcuagagcgc

SEQ ID NO: 1178526 - RNA, 19 nt, Artificial Sequence
  Description of Artificial Sequence: Synthetic oligonucleotide
  Sense strand starting at position 847 of SEQ ID NO: 916716
guuccugaacuguaucaau

SEQ ID NO: 1178527 - RNA, 19 nt, Artificial Sequence
  Description of Artificial Sequence: Synthetic oligonucleotide
  Antisense strand to SEQ ID NO: 1178526
auugauacaguucaggaac

SEQ ID NO: 1178528 - RNA, 19 nt, Artificial Sequence
  Description of Artificial Sequence: Synthetic oligonucleotide
  Sense strand starting at position 1152 of SEQ ID NO: 916716
ggcagaggaucuuucccua

SEQ ID NO: 1178529 - RNA, 19 nt, Artificial Sequence
  Description of Artificial Sequence: Synthetic oligonucleotide
  Antisense strand to SEQ ID NO: 1178528
uagggaaagauccucugcc

SEQ ID NO: 1178530 - RNA, 19 nt, Artificial Sequence
  Description of Artificial Sequence: Synthetic oligonucleotide
  Sense strand starting at position 1876 of SEQ ID NO: 916716
acacgucucccauagcaau

SEQ ID NO: 1178531 - RNA, 19 nt, Artificial Sequence
  Description of Artificial Sequence: Synthetic oligonucleotide
  Antisense strand to SEQ ID NO: 1178530
auugcuaugggagacgugu

SEQ ID NO: 1178532 - RNA, 19 nt, Artificial Sequence
  Description of Artificial Sequence: Synthetic oligonucleotide
  Sense strand starting at position 1899 of SEQ ID NO: 916716
aauuaaucuggccagcagu

SEQ ID NO: 1178533 - RNA, 19 nt, Artificial Sequence
  Description of Artificial Sequence: Synthetic oligonucleotide
  Antisense strand to SEQ ID NO: 1178532
acugcuggccagauuaauu

SEQ ID NO: 1178534 - RNA, 19 nt, Artificial Sequence
  Description of Artificial Sequence: Synthetic oligonucleotide
  Sense strand starting at position 2087 of SEQ ID NO: 916716
ccggaaaguugauuccaca

SEQ ID NO: 1178535 - RNA, 19 nt, Artificial Sequence
  Description of Artificial Sequence: Synthetic oligonucleotide
  Antisense strand to SEQ ID NO: 1178534
uguggaaucaacuuuccgg

SEQ ID NO: 1178536 - RNA, 19 nt, Artificial Sequence
  Description of Artificial Sequence: Synthetic oligonucleotide
  Sense strand starting at position 2827 of SEQ ID NO: 916716
gcuguuggccugugaauuu

SEQ ID NO: 1178537 - RNA, 19 nt, Artificial Sequence
  Description of Artificial Sequence: Synthetic oligonucleotide
  Antisense strand to SEQ ID NO: 1178536
aaauucacaggccaacagc

SEQ ID NO: 1178538 - RNA, 19 nt, Artificial Sequence
  Description of Artificial Sequence: Synthetic oligonucleotide
  Sense strand starting at position 2902 of SEQ ID NO: 916716
ggcccauucccgggaugaa

SEQ ID NO: 1178539 - RNA, 19 nt, Artificial Sequence
  Description of Artificial Sequence: Synthetic oligonucleotide
  Antisense strand to SEQ ID NO: 1178538
uucaucccgggaaugggcc

SEQ ID NO: 1178540 - RNA, 19 nt, Artificial Sequence
  Description of Artificial Sequence: Synthetic oligonucleotide
  Sense strand starting at position 2903 of SEQ ID NO: 916716
gcccauucccgggaugaac

SEQ ID NO: 1178541 - RNA, 19 nt, Artificial Sequence
  Description of Artificial Sequence: Synthetic oligonucleotide
  Antisense strand to SEQ ID NO: 1178540
guucaucccgggaaugggc

SEQ ID NO: 1178542 - RNA, 19 nt, Artificial Sequence
  Description of Artificial Sequence: Synthetic oligonucleotide
  Sense strand starting at position 3134 of SEQ ID NO: 916716
acucauggucgggagucua

SEQ ID NO: 1178543 - RNA, 19 nt, Artificial Sequence
  Description of Artificial Sequence: Synthetic oligonucleotide
  Antisense strand to SEQ ID NO: 1178542
uagacucccgaccaugagu

SEQ ID NO: 1178544 - RNA, 19 nt, Artificial Sequence
  Description of Artificial Sequence: Synthetic oligonucleotide
  Sense strand starting at position 3344 of SEQ ID NO: 916716
aagaaagacugcucggaau

SEQ ID NO: 1178545 - RNA, 19 nt, Artificial Sequence
  Description of Artificial Sequence: Synthetic oligonucleotide
  Antisense strand to SEQ ID NO: 1178544
auuccgagcagucuuucuu

SEQ ID NO: 1178546 - RNA, 19 nt, Artificial Sequence
  Description of Artificial Sequence: Synthetic oligonucleotide
  Sense strand starting at position 3346 of SEQ ID NO: 916716
gaaagacugcucggaauua

SEQ ID NO: 1178547 - RNA, 19 nt, Artificial Sequence
  Description of Artificial Sequence: Synthetic oligonucleotide
  Antisense strand to SEQ ID NO: 1178546
uaauuccgagcagucuuuc

SEQ ID NO: 1178548 - RNA, 19 nt, Artificial Sequence
  Description of Artificial Sequence: Synthetic oligonucleotide
  Sense strand starting at position 3355 of SEQ ID NO: 916716
cucggaauuacuggguagu

SEQ ID NO: 1178549 - RNA, 19 nt, Artificial Sequence
  Description of Artificial Sequence: Synthetic oligonucleotide
  Antisense strand to SEQ ID NO: 1178548
acuacccaguaauuccgag

SEQ ID NO: 1178550 - RNA, 19 nt, Artificial Sequence
  Description of Artificial Sequence: Synthetic oligonucleotide
  Sense strand starting at position 3356 of SEQ ID NO: 916716
ucggaauuacuggguagua

SEQ ID NO: 1178551 - RNA, 19 nt, Artificial Sequence
  Description of Artificial Sequence: Synthetic oligonucleotide
  Antisense strand to SEQ ID NO: 1178550
uacuacccaguaauuccga

SEQ ID NO: 1178552 - RNA, 19 nt, Artificial Sequence
  Description of Artificial Sequence: Synthetic oligonucleotide
  Sense strand starting at position 3357 of SEQ ID NO: 916716
cggaauuacuggguaguau

SEQ ID NO: 1178553 - RNA, 19 nt, Artificial Sequence
  Description of Artificial Sequence: Synthetic oligonucleotide
  Antisense strand to SEQ ID NO: 1178552
auacuacccaguaauuccg

SEQ ID NO: 1178554 - RNA, 19 nt, Artificial Sequence
  Description of Artificial Sequence: Synthetic oligonucleotide
  Sense strand starting at position 3358 of SEQ ID NO: 916716
ggaauuacuggguaguauc

SEQ ID NO: 1178555 - RNA, 19 nt, Artificial Sequence
  Description of Artificial Sequence: Synthetic oligonucleotide
  Antisense strand to SEQ ID NO: 1178554
gauacuacccaguaauucc

SEQ ID NO: 1178556 - RNA, 19 nt, Artificial Sequence
  Description of Artificial Sequence: Synthetic oligonucleotide
  Sense strand starting at position 3366 of SEQ ID NO: 916716
uggguaguaucaucuagga

SEQ ID NO: 1178557 - RNA, 19 nt, Artificial Sequence
  Description of Artificial Sequence: Synthetic oligonucleotide
  Antisense strand to SEQ ID NO: 1178556
uccuagaugauacuaccca

SEQ ID NO: 1178558 - RNA, 19 nt, Artificial Sequence
  Description of Artificial Sequence: Synthetic oligonucleotide
  Sense strand starting at position 3473 of SEQ ID NO: 916716
auuugucuucuaggcaauc

SEQ ID NO: 1178559 - RNA, 19 nt, Artificial Sequence
  Description of Artificial Sequence: Synthetic oligonucleotide
  Antisense strand to SEQ ID NO: 1178558
gauugccuagaagacaaau

SEQ ID NO: 1178560 - RNA, 19 nt, Artificial Sequence
  Description of Artificial Sequence: Synthetic oligonucleotide
  Sense strand starting at position 3530 of SEQ ID NO: 916716
gauuuagauucuugagaug

SEQ ID NO: 1178561 - RNA, 19 nt, Artificial Sequence
  Description of Artificial Sequence: Synthetic oligonucleotide
  Antisense strand to SEQ ID NO: 1178560
caucucaagaaucuaaauc

SEQ ID NO: 1178562 - RNA, 19 nt, Artificial Sequence
  Description of Artificial Sequence: Synthetic oligonucleotide
  Sense strand starting at position 3552 of SEQ ID NO: 916716
caaggaauguggccuuuau

SEQ ID NO: 1178563 - RNA, 19 nt, Artificial Sequence
  Description of Artificial Sequence: Synthetic oligonucleotide
  Antisense strand to SEQ ID NO: 1178562
auaaaggccacauuccuug

SEQ ID NO: 1178564 - RNA, 19 nt, Artificial Sequence
  Description of Artificial Sequence: Synthetic oligonucleotide
  Sense strand starting at position 3556 of SEQ ID NO: 916716
gaauguggccuuuaucaag

SEQ ID NO: 1178565 - RNA, 19 nt, Artificial Sequence
  Description of Artificial Sequence: Synthetic oligonucleotide
  Antisense strand to SEQ ID NO: 1178564
cuugauaaaggccacauuc

SEQ ID NO: 1178566 - RNA, 19 nt, Artificial Sequence
  Description of Artificial Sequence: Synthetic oligonucleotide
  Sense strand starting at position 3881 of SEQ ID NO: 916716
ucccuugaauguguaagga

SEQ ID NO: 1178567 - RNA, 19 nt, Artificial Sequence
  Description of Artificial Sequence: Synthetic oligonucleotide
  Antisense strand to SEQ ID NO: 1178566
uccuuacacauucaaggga

SEQ ID NO: 1178568 - RNA, 19 nt, Artificial Sequence
  Description of Artificial Sequence: Synthetic oligonucleotide
  Sense strand starting at position 3907 of SEQ ID NO: 916716
auguuagacuuguuuggau

SEQ ID NO: 1178569 - RNA, 19 nt, Artificial Sequence
  Description of Artificial Sequence: Synthetic oligonucleotide
  Antisense strand to SEQ ID NO: 1178568
auccaaacaagucuaacau

SEQ ID NO: 1178570 - RNA, 19 nt, Artificial Sequence
  Description of Artificial Sequence: Synthetic oligonucleotide
  Sense strand starting at position 3976 of SEQ ID NO: 916716
cgaacacuuucugauuuau

SEQ ID NO: 1178571 - RNA, 19 nt, Artificial Sequence
  Description of Artificial Sequence: Synthetic oligonucleotide
  Antisense strand to SEQ ID NO: 1178570
auaaaucagaaaguguucg

SEQ ID NO: 1178572 - RNA, 19 nt, Artificial Sequence
  Description of Artificial Sequence: Synthetic oligonucleotide
  Sense strand starting at position 291 of SEQ ID NO: 916717
ggcccuaggucuucugcua

SEQ ID NO: 1178573 - RNA, 19 nt, Artificial Sequence
  Description of Artificial Sequence: Synthetic oligonucleotide
  Antisense strand to SEQ ID NO: 1178572
uagcagaagaccuagggcc

SEQ ID NO: 1178574 - RNA, 19 nt, Artificial Sequence
  Description of Artificial Sequence: Synthetic oligonucleotide
  Sense strand starting at position 439 of SEQ ID NO: 916717
gguccacacucuugagaca

SEQ ID NO: 1178575 - RNA, 19 nt, Artificial Sequence
  Description of Artificial Sequence: Synthetic oligonucleotide
  Antisense strand to SEQ ID NO: 1178574
ugucucaagaguguggacc

SEQ ID NO: 1178576 - RNA, 19 nt, Artificial Sequence
  Description of Artificial Sequence: Synthetic oligonucleotide
  Sense strand starting at position 590 of SEQ ID NO: 916717
gacaccuacucagugaagu

SEQ ID NO: 1178577 - RNA, 19 nt, Artificial Sequence
  Description of Artificial Sequence: Synthetic oligonucleotide
  Antisense strand to SEQ ID NO: 1178576
acuucacugaguagguguc

SEQ ID NO: 1178578 - RNA, 19 nt, Artificial Sequence
  Description of Artificial Sequence: Synthetic oligonucleotide
  Sense strand starting at position 1024 of SEQ ID NO: 916717
ucgagauucuuucagugug

SEQ ID NO: 1178579 - RNA, 19 nt, Artificial Sequence
  Description of Artificial Sequence: Synthetic oligonucleotide
  Antisense strand to SEQ ID NO: 1178578
cacacugaaagaaucucga

SEQ ID NO: 1178580 - RNA, 19 nt, Artificial Sequence
  Description of Artificial Sequence: Synthetic oligonucleotide
  Sense strand starting at position 1184 of SEQ ID NO: 916717
cagggagaguccuguuuac

SEQ ID NO: 1178581 - RNA, 19 nt, Artificial Sequence
  Description of Artificial Sequence: Synthetic oligonucleotide
  Antisense strand to SEQ ID NO: 1178580
guaaacaggacucucccug

SEQ ID NO: 1178582 - RNA, 19 nt, Artificial Sequence
  Description of Artificial Sequence: Synthetic oligonucleotide
  Sense strand starting at position 1188 of SEQ ID NO: 916717
gagaguccuguuuacacuu

SEQ ID NO: 1178583 - RNA, 19 nt, Artificial Sequence
  Description of Artificial Sequence: Synthetic oligonucleotide
  Antisense strand to SEQ ID NO: 1178582
aaguguaaacaggacucuc

SEQ ID NO: 1178584 - RNA, 19 nt, Artificial Sequence
  Description of Artificial Sequence: Synthetic oligonucleotide
  Sense strand starting at position 2437 of SEQ ID NO: 916717
gcagguauuugagaaacca

SEQ ID NO: 1178585 - RNA, 19 nt, Artificial Sequence
  Description of Artificial Sequence: Synthetic oligonucleotide
  Antisense strand to SEQ ID NO: 1178584
ugguuucucaaauaccugc

SEQ ID NO: 1178586 - RNA, 19 nt, Artificial Sequence
  Description of Artificial Sequence: Synthetic oligonucleotide
  Sense strand starting at position 2600 of SEQ ID NO: 916717
gauugacacuugugacccu

SEQ ID NO: 1178587 - RNA, 19 nt, Artificial Sequence
  Description of Artificial Sequence: Synthetic oligonucleotide
  Antisense strand to SEQ ID NO: 1178586
agggucacaagugucaauc

SEQ ID NO: 1178588 - RNA, 19 nt, Artificial Sequence
  Description of Artificial Sequence: Synthetic oligonucleotide
  Sense strand starting at position 2718 of SEQ ID NO: 916717
cucuuauucgcccgucuca

SEQ ID NO: 1178589 - RNA, 19 nt, Artificial Sequence
  Description of Artificial Sequence: Synthetic oligonucleotide
  Antisense strand to SEQ ID NO: 1178588
ugagacgggcgaauaagag

SEQ ID NO: 1178590 - RNA, 19 nt, Artificial Sequence
  Description of Artificial Sequence: Synthetic oligonucleotide
  Sense strand starting at position 2896 of SEQ ID NO: 916717
ggucucuuucccuaucuuu

SEQ ID NO: 1178591 - RNA, 19 nt, Artificial Sequence
  Description of Artificial Sequence: Synthetic oligonucleotide
  Antisense strand to SEQ ID NO: 1178590
aaagauagggaaagagacc

SEQ ID NO: 1178592 - RNA, 19 nt, Artificial Sequence
  Description of Artificial Sequence: Synthetic oligonucleotide
  Sense strand starting at position 2926 of SEQ ID NO: 916717
cugcucuugucuuaucuga

SEQ ID NO: 1178593 - RNA, 19 nt, Artificial Sequence
  Description of Artificial Sequence: Synthetic oligonucleotide
  Antisense strand to SEQ ID NO: 1178592
ucagauaagacaagagcag

SEQ ID NO: 1178594 - RNA, 19 nt, Artificial Sequence
  Description of Artificial Sequence: Synthetic oligonucleotide
  Sense strand starting at position 2928 of SEQ ID NO: 916717
gcucuugucuuaucugagu

SEQ ID NO: 1178595 - RNA, 19 nt, Artificial Sequence
  Description of Artificial Sequence: Synthetic oligonucleotide
  Antisense strand to SEQ ID NO: 1178594
acucagauaagacaagagc

SEQ ID NO: 1178596 - RNA, 19 nt, Artificial Sequence
  Description of Artificial Sequence: Synthetic oligonucleotide
  Sense strand starting at position 3057 of SEQ ID NO: 916717
cuagccuuucuggguuaua

SEQ ID NO: 1178597 - RNA, 19 nt, Artificial Sequence
  Description of Artificial Sequence: Synthetic oligonucleotide
  Antisense strand to SEQ ID NO: 1178596
uauaacccagaaaggcuag

SEQ ID NO: 1178598 - RNA, 19 nt, Artificial Sequence
  Description of Artificial Sequence: Synthetic oligonucleotide
  Sense strand starting at position 3058 of SEQ ID NO: 916717
uagccuuucuggguuauau

SEQ ID NO: 1178599 - RNA, 19 nt, Artificial Sequence
  Description of Artificial Sequence: Synthetic oligonucleotide
  Antisense strand to SEQ ID NO: 1178598
auauaacccagaaaggcua

SEQ ID NO: 1178600 - RNA, 19 nt, Artificial Sequence
  Description of Artificial Sequence: Synthetic oligonucleotide
  Sense strand starting at position 3068 of SEQ ID NO: 916717
ggguuauauuugccuccuu

SEQ ID NO: 1178601 - RNA, 19 nt, Artificial Sequence
  Description of Artificial Sequence: Synthetic oligonucleotide
  Antisense strand to SEQ ID NO: 1178600
aaggaggcaaauauaaccc

SEQ ID NO: 1178602 - RNA, 19 nt, Artificial Sequence
  Description of Artificial Sequence: Synthetic oligonucleotide
  Sense strand starting at position 3069 of SEQ ID NO: 916717
gguuauauuugccuccuuu

SEQ ID NO: 1178603 - RNA, 19 nt, Artificial Sequence
  Description of Artificial Sequence: Synthetic oligonucleotide
  Antisense strand to SEQ ID NO: 1178602
aaaggaggcaaauauaacc

SEQ ID NO: 1178604 - RNA, 19 nt, Artificial Sequence
  Description of Artificial Sequence: Synthetic oligonucleotide
  Sense strand starting at position 3156 of SEQ ID NO: 916717
cccucaaucucgguaucuu

SEQ ID NO: 1178605 - RNA, 19 nt, Artificial Sequence
  Description of Artificial Sequence: Synthetic oligonucleotide
  Antisense strand to SEQ ID NO: 1178604
aagauaccgagauugaggg

SEQ ID NO: 1178606 - RNA, 19 nt, Artificial Sequence
  Description of Artificial Sequence: Synthetic oligonucleotide
  Sense strand starting at position 3157 of SEQ ID NO: 916717
ccucaaucucgguaucuuu

SEQ ID NO: 1178607 - RNA, 19 nt, Artificial Sequence
  Description of Artificial Sequence: Synthetic oligonucleotide
  Antisense strand to SEQ ID NO: 1178606
aaagauaccgagauugagg

SEQ ID NO: 1178608 - RNA, 19 nt, Artificial Sequence
  Description of Artificial Sequence: Synthetic oligonucleotide
  Sense strand starting at position 3164 of SEQ ID NO: 916717
cucgguaucuuugagucau

SEQ ID NO: 1178609 - RNA, 19 nt, Artificial Sequence
  Description of Artificial Sequence: Synthetic oligonucleotide
  Antisense strand to SEQ ID NO: 1178608
augacucaaagauaccgag

SEQ ID NO: 1178610 - RNA, 19 nt, Artificial Sequence
  Description of Artificial Sequence: Synthetic oligonucleotide
  Sense strand starting at position 3166 of SEQ ID NO: 916717
cgguaucuuugagucauuu

SEQ ID NO: 1178611 - RNA, 19 nt, Artificial Sequence
  Description of Artificial Sequence: Synthetic oligonucleotide
  Antisense strand to SEQ ID NO: 1178610
aaaugacucaaagauaccg

SEQ ID NO: 1178612 - RNA, 19 nt, Artificial Sequence
  Description of Artificial Sequence: Synthetic oligonucleotide
  Sense strand starting at position 3219 of SEQ ID NO: 916717
uggguuguguauuaaaggu

SEQ ID NO: 1178613 - RNA, 19 nt, Artificial Sequence
  Description of Artificial Sequence: Synthetic oligonucleotide
  Antisense strand to SEQ ID NO: 1178612
accuuuaauacacaaccca

SEQ ID NO: 1178614 - RNA, 19 nt, Artificial Sequence
  Description of Artificial Sequence: Synthetic oligonucleotide
  Sense strand starting at position 3288 of SEQ ID NO: 916717
gugcgugcacucccauauu

SEQ ID NO: 1178615 - RNA, 19 nt, Artificial Sequence
  Description of Artificial Sequence: Synthetic oligonucleotide
  Antisense strand to SEQ ID NO: 1178614
aauaugggagugcacgcac

SEQ ID NO: 1178616 - RNA, 19 nt, Artificial Sequence
  Description of Artificial Sequence: Synthetic oligonucleotide
  Sense strand starting at position 3291 of SEQ ID NO: 916717
cgugcacucccauauuugu

SEQ ID NO: 1178617 - RNA, 19 nt, Artificial Sequence
  Description of Artificial Sequence: Synthetic oligonucleotide
  Antisense strand to SEQ ID NO: 1178616
acaaauaugggagugcacg

SEQ ID NO: 1178618 - RNA, 19 nt, Artificial Sequence
  Description of Artificial Sequence: Synthetic oligonucleotide
  Sense strand starting at position 3297 of SEQ ID NO: 916717
cucccauauuugucuguca

SEQ ID NO: 1178619 - RNA, 19 nt, Artificial Sequence
  Description of Artificial Sequence: Synthetic oligonucleotide
  Antisense strand to SEQ ID NO: 1178618
ugacagacaaauaugggag

SEQ ID NO: 1178620 - RNA, 19 nt, Artificial Sequence
  Description of Artificial Sequence: Synthetic oligonucleotide
  Sense strand starting at position 3298 of SEQ ID NO: 916717
ucccauauuugucugucau

SEQ ID NO: 1178621 - RNA, 19 nt, Artificial Sequence
  Description of Artificial Sequence: Synthetic oligonucleotide
  Antisense strand to SEQ ID NO: 1178620
augacagacaaauauggga

SEQ ID NO: 1178622 - RNA, 19 nt, Artificial Sequence
  Description of Artificial Sequence: Synthetic oligonucleotide
  Sense strand starting at position 3299 of SEQ ID NO: 916717
cccauauuugucugucauu

SEQ ID NO: 1178623 - RNA, 19 nt, Artificial Sequence
  Description of Artificial Sequence: Synthetic oligonucleotide
  Antisense strand to SEQ ID NO: 1178622
aaugacagacaaauauggg

SEQ ID NO: 1178624 - RNA, 19 nt, Artificial Sequence
  Description of Artificial Sequence: Synthetic oligonucleotide
  Sense strand starting at position 3302 of SEQ ID NO: 916717
auauuugucugucauuauc

SEQ ID NO: 1178625 - RNA, 19 nt, Artificial Sequence
  Description of Artificial Sequence: Synthetic oligonucleotide
  Antisense strand to SEQ ID NO: 1178624
gauaaugacagacaaauau

SEQ ID NO: 1178626 - RNA, 19 nt, Artificial Sequence
  Description of Artificial Sequence: Synthetic oligonucleotide
  Sense strand starting at position 3308 of SEQ ID NO: 916717
gucugucauuaucauuauu

SEQ ID NO: 1178627 - RNA, 19 nt, Artificial Sequence
  Description of Artificial Sequence: Synthetic oligonucleotide
  Antisense strand to SEQ ID NO: 1178626
aauaaugauaaugacagac

SEQ ID NO: 1178628 - RNA, 19 nt, Artificial Sequence
  Description of Artificial Sequence: Synthetic oligonucleotide
  Sense strand starting at position 3359 of SEQ ID NO: 916717
aaacuacguugaugaucau

SEQ ID NO: 1178629 - RNA, 19 nt, Artificial Sequence
  Description of Artificial Sequence: Synthetic oligonucleotide
  Antisense strand to SEQ ID NO: 1178628
augaucaucaacguaguuu

SEQ ID NO: 1178630 - RNA, 19 nt, Artificial Sequence
  Description of Artificial Sequence: Synthetic oligonucleotide
  Sense strand starting at position 3362 of SEQ ID NO: 916717
cuacguugaugaucauuau

SEQ ID NO: 1178631 - RNA, 19 nt, Artificial Sequence
  Description of Artificial Sequence: Synthetic oligonucleotide
  Antisense strand to SEQ ID NO: 1178630
auaaugaucaucaacguag

SEQ ID NO: 1178632 - RNA, 19 nt, Artificial Sequence
  Description of Artificial Sequence: Synthetic oligonucleotide
  Sense strand starting at position 3365 of SEQ ID NO: 916717
cguugaugaucauuaucau

SEQ ID NO: 1178633 - RNA, 19 nt, Artificial Sequence
  Description of Artificial Sequence: Synthetic oligonucleotide
  Antisense strand to SEQ ID NO: 1178632
augauaaugaucaucaacg

SEQ ID NO: 1178634 - RNA, 19 nt, Artificial Sequence
  Description of Artificial Sequence: Synthetic oligonucleotide
  Sense strand starting at position 3366 of SEQ ID NO: 916717
guugaugaucauuaucauu

SEQ ID NO: 1178635 - RNA, 19 nt, Artificial Sequence
  Description of Artificial Sequence: Synthetic oligonucleotide
  Antisense strand to SEQ ID NO: 1178634
aaugauaaugaucaucaac

SEQ ID NO: 1178636 - RNA, 19 nt, Artificial Sequence
  Description of Artificial Sequence: Synthetic oligonucleotide
  Sense strand starting at position 3390 of SEQ ID NO: 916717
guguuugagugcuuaaaua

SEQ ID NO: 1178637 - RNA, 19 nt, Artificial Sequence
  Description of Artificial Sequence: Synthetic oligonucleotide
  Antisense strand to SEQ ID NO: 1178636
uauuuaagcacucaaacac

SEQ ID NO: 1178638 - RNA, 19 nt, Artificial Sequence
  Description of Artificial Sequence: Synthetic oligonucleotide
  Sense strand starting at position 3594 of SEQ ID NO: 916717
ggcugaugucuucagccgu

SEQ ID NO: 1178639 - RNA, 19 nt, Artificial Sequence
  Description of Artificial Sequence: Synthetic oligonucleotide
  Antisense strand to SEQ ID NO: 1178638
acggcugaagacaucagcc

SEQ ID NO: 1178640 - RNA, 19 nt, Artificial Sequence
  Description of Artificial Sequence: Synthetic oligonucleotide
  Sense strand starting at position 45 of SEQ ID NO: 916718
gguguguuuggaggagaca

SEQ ID NO: 1178641 - RNA, 19 nt, Artificial Sequence
  Description of Artificial Sequence: Synthetic oligonucleotide
  Antisense strand to SEQ ID NO: 1178640
ugucuccuccaaacacacc

SEQ ID NO: 1178642 - RNA, 19 nt, Artificial Sequence
  Description of Artificial Sequence: Synthetic oligonucleotide
  Sense strand starting at position 46 of SEQ ID NO: 916718
guguguuuggaggagacau

SEQ ID NO: 1178643 - RNA, 19 nt, Artificial Sequence
  Description of Artificial Sequence: Synthetic oligonucleotide
  Antisense strand to SEQ ID NO: 1178642
augucuccuccaaacacac

SEQ ID NO: 1178644 - RNA, 19 nt, Artificial Sequence
  Description of Artificial Sequence: Synthetic oligonucleotide
  Sense strand starting at position 414 of SEQ ID NO: 916718
ccucaauagcuugaaucgu

SEQ ID NO: 1178645 - RNA, 19 nt, Artificial Sequence
  Description of Artificial Sequence: Synthetic oligonucleotide
  Antisense strand to SEQ ID NO: 1178644
acgauucaagcuauugagg

SEQ ID NO: 1178646 - RNA, 19 nt, Artificial Sequence
  Description of Artificial Sequence: Synthetic oligonucleotide
  Sense strand starting at position 444 of SEQ ID NO: 916718
cugagacagugaccauaau

SEQ ID NO: 1178647 - RNA, 19 nt, Artificial Sequence
  Description of Artificial Sequence: Synthetic oligonucleotide
  Antisense strand to SEQ ID NO: 1178646
auuauggucacugucucag

SEQ ID NO: 1178648 - RNA, 19 nt, Artificial Sequence
  Description of Artificial Sequence: Synthetic oligonucleotide
  Sense strand starting at position 493 of SEQ ID NO: 916718
gucuuaagugugaguggua

SEQ ID NO: 1178649 - RNA, 19 nt, Artificial Sequence
  Description of Artificial Sequence: Synthetic oligonucleotide
  Antisense strand to SEQ ID NO: 1178648
uaccacucacacuuaagac

SEQ ID NO: 1178650 - RNA, 19 nt, Artificial Sequence
  Description of Artificial Sequence: Synthetic oligonucleotide
  Sense strand starting at position 496 of SEQ ID NO: 916718
uuaagugugagugguauau

SEQ ID NO: 1178651 - RNA, 19 nt, Artificial Sequence
  Description of Artificial Sequence: Synthetic oligonucleotide
  Antisense strand to SEQ ID NO: 1178650
auauaccacucacacuuaa

SEQ ID NO: 1178652 - RNA, 19 nt, Artificial Sequence
  Description of Artificial Sequence: Synthetic oligonucleotide
  Sense strand starting at position 500 of SEQ ID NO: 916718
gugugagugguauauagag

SEQ ID NO: 1178653 - RNA, 19 nt, Artificial Sequence
  Description of Artificial Sequence: Synthetic oligonucleotide
  Antisense strand to SEQ ID NO: 1178652
cucuauauaccacucacac

SEQ ID NO: 1178654 - RNA, 19 nt, Artificial Sequence
  Description of Artificial Sequence: Synthetic oligonucleotide
  Sense strand starting at position 507 of SEQ ID NO: 916718
ugguauauagagugacuau

SEQ ID NO: 1178655 - RNA, 19 nt, Artificial Sequence
  Description of Artificial Sequence: Synthetic oligonucleotide
  Antisense strand to SEQ ID NO: 1178654
auagucacucuauauacca

SEQ ID NO: 1178656 - RNA, 19 nt, Artificial Sequence
  Description of Artificial Sequence: Synthetic oligonucleotide
  Sense strand starting at position 590 of SEQ ID NO: 916718
gcuuacaaaugguuagcaa

SEQ ID NO: 1178657 - RNA, 19 nt, Artificial Sequence
  Description of Artificial Sequence: Synthetic oligonucleotide
  Antisense strand to SEQ ID NO: 1178656
uugcuaaccauuuguaagc

SEQ ID NO: 1178658 - RNA, 19 nt, Artificial Sequence
  Description of Artificial Sequence: Synthetic oligonucleotide
  Sense strand starting at position 591 of SEQ ID NO: 916718
cuuacaaaugguuagcaau

SEQ ID NO: 1178659 - RNA, 19 nt, Artificial Sequence
  Description of Artificial Sequence: Synthetic oligonucleotide
  Antisense strand to SEQ ID NO: 1178658
auugcuaaccauuuguaag

SEQ ID NO: 1178660 - RNA, 19 nt, Artificial Sequence
  Description of Artificial Sequence: Synthetic oligonucleotide
  Sense strand starting at position 701 of SEQ ID NO: 916718
cucugaaacucgguuuacu

SEQ ID NO: 1178661 - RNA, 19 nt, Artificial Sequence
  Description of Artificial Sequence: Synthetic oligonucleotide
  Antisense strand to SEQ ID NO: 1178660
aguaaaccgaguuucagag

SEQ ID NO: 1178662 - RNA, 19 nt, Artificial Sequence
  Description of Artificial Sequence: Synthetic oligonucleotide
  Sense strand starting at position 704 of SEQ ID NO: 916718
ugaaacucgguuuacucau

SEQ ID NO: 1178663 - RNA, 19 nt, Artificial Sequence
  Description of Artificial Sequence: Synthetic oligonucleotide
  Antisense strand to SEQ ID NO: 1178662
augaguaaaccgaguuuca

SEQ ID NO: 1178664 - RNA, 19 nt, Artificial Sequence
  Description of Artificial Sequence: Synthetic oligonucleotide
  Sense strand starting at position 760 of SEQ ID NO: 916718
uguggucagaacuaagcaa

SEQ ID NO: 1178665 - RNA, 19 nt, Artificial Sequence
  Description of Artificial Sequence: Synthetic oligonucleotide
  Antisense strand to SEQ ID NO: 1178664
uugcuuaguucugaccaca

SEQ ID NO: 1178666 - RNA, 19 nt, Artificial Sequence
  Description of Artificial Sequence: Synthetic oligonucleotide
  Sense strand starting at position 774 of SEQ ID NO: 916718
agcaaauguuagcuauuag

SEQ ID NO: 1178667 - RNA, 19 nt, Artificial Sequence
  Description of Artificial Sequence: Synthetic oligonucleotide
  Antisense strand to SEQ ID NO: 1178666
cuaauagcuaacauuugcu

SEQ ID NO: 1178668 - RNA, 19 nt, Artificial Sequence
  Description of Artificial Sequence: Synthetic oligonucleotide
  Sense strand starting at position 795 of SEQ ID NO: 916718
guaguauuacccugaccuu

SEQ ID NO: 1178669 - RNA, 19 nt, Artificial Sequence
  Description of Artificial Sequence: Synthetic oligonucleotide
  Antisense strand to SEQ ID NO: 1178668
aaggucaggguaauacuac

SEQ ID NO: 1178670 - RNA, 19 nt, Artificial Sequence
  Description of Artificial Sequence: Synthetic oligonucleotide
  Sense strand starting at position 916 of SEQ ID NO: 916718
ccaguaaagugaccugacu

SEQ ID NO: 1178671 - RNA, 19 nt, Artificial Sequence
  Description of Artificial Sequence: Synthetic oligonucleotide
  Antisense strand to SEQ ID NO: 1178670
agucaggucacuuuacugg

SEQ ID NO: 1178672 - RNA, 19 nt, Artificial Sequence
  Description of Artificial Sequence: Synthetic oligonucleotide
  Sense strand starting at position 918 of SEQ ID NO: 916718
aguaaagugaccugacugu

SEQ ID NO: 1178673 - RNA, 19 nt, Artificial Sequence
  Description of Artificial Sequence: Synthetic oligonucleotide
  Antisense strand to SEQ ID NO: 1178672
acagucaggucacuuuacu

SEQ ID NO: 1178674 - RNA, 19 nt, Artificial Sequence
  Description of Artificial Sequence: Synthetic oligonucleotide
  Sense strand starting at position 922 of SEQ ID NO: 916718
aagugaccugacuguuaag

SEQ ID NO: 1178675 - RNA, 19 nt, Artificial Sequence
  Description of Artificial Sequence: Synthetic oligonucleotide
  Antisense strand to SEQ ID NO: 1178674
cuuaacagucaggucacuu

SEQ ID NO: 1178676 - RNA, 19 nt, Artificial Sequence
  Description of Artificial Sequence: Synthetic oligonucleotide
  Sense strand starting at position 937 of SEQ ID NO: 916718
uaagguugcagugaaggau

SEQ ID NO: 1178677 - RNA, 19 nt, Artificial Sequence
  Description of Artificial Sequence: Synthetic oligonucleotide
  Antisense strand to SEQ ID NO: 1178676
auccuucacugcaaccuua

SEQ ID NO: 1178678 - RNA, 19 nt, Artificial Sequence
  Description of Artificial Sequence: Synthetic oligonucleotide
  Sense strand starting at position 940 of SEQ ID NO: 916718
gguugcagugaaggauuaa

SEQ ID NO: 1178679 - RNA, 19 nt, Artificial Sequence
  Description of Artificial Sequence: Synthetic oligonucleotide
  Antisense strand to SEQ ID NO: 1178678
uuaauccuucacugcaacc

SEQ ID NO: 1178680 - RNA, 19 nt, Artificial Sequence
  Description of Artificial Sequence: Synthetic oligonucleotide
  Sense strand starting at position 941 of SEQ ID NO: 916718
guugcagugaaggauuaaa

SEQ ID NO: 1178681 - RNA, 19 nt, Artificial Sequence
  Description of Artificial Sequence: Synthetic oligonucleotide
  Antisense strand to SEQ ID NO: 1178680
uuuaauccuucacugcaac

SEQ ID NO: 1178682 - RNA, 19 nt, Artificial Sequence
  Description of Artificial Sequence: Synthetic oligonucleotide
  Sense strand starting at position 1228 of SEQ ID NO: 916718
ccaagugagcaggguuauu

SEQ ID NO: 1178683 - RNA, 19 nt, Artificial Sequence
  Description of Artificial Sequence: Synthetic oligonucleotide
  Antisense strand to SEQ ID NO: 1178682
aauaacccugcucacuugg

SEQ ID NO: 1178684 - RNA, 19 nt, Artificial Sequence
  Description of Artificial Sequence: Synthetic oligonucleotide
  Sense strand starting at position 1238 of SEQ ID NO: 916718
aggguuauuucggaaucac

SEQ ID NO: 1178685 - RNA, 19 nt, Artificial Sequence
  Description of Artificial Sequence: Synthetic oligonucleotide
  Antisense strand to SEQ ID NO: 1178684
gugauuccgaaauaacccu

SEQ ID NO: 1178686 - RNA, 19 nt, Artificial Sequence
  Description of Artificial Sequence: Synthetic oligonucleotide
  Sense strand starting at position 1262 of SEQ ID NO: 916718
ggcaauucucaugaggcaa

SEQ ID NO: 1178687 - RNA, 19 nt, Artificial Sequence
  Description of Artificial Sequence: Synthetic oligonucleotide
  Antisense strand to SEQ ID NO: 1178686
uugccucaugagaauugcc

SEQ ID NO: 1178688 - RNA, 19 nt, Artificial Sequence
  Description of Artificial Sequence: Synthetic oligonucleotide
  Sense strand starting at position 2238 of SEQ ID NO: 916718
gcggcaagagguucgcuua

SEQ ID NO: 1178689 - RNA, 19 nt, Artificial Sequence
  Description of Artificial Sequence: Synthetic oligonucleotide
  Antisense strand to SEQ ID NO: 1178688
uaagcgaaccucuugccgc

SEQ ID NO: 1178690 - RNA, 19 nt, Artificial Sequence
  Description of Artificial Sequence: Synthetic oligonucleotide
  Sense strand starting at position 2355 of SEQ ID NO: 916718
uaacuuaagcccgagaagu

SEQ ID NO: 1178691 - RNA, 19 nt, Artificial Sequence
  Description of Artificial Sequence: Synthetic oligonucleotide
  Antisense strand to SEQ ID NO: 1178690
acuucucgggcuuaaguua

SEQ ID NO: 1178692 - RNA, 19 nt, Artificial Sequence
  Description of Artificial Sequence: Synthetic oligonucleotide
  Sense strand starting at position 3183 of SEQ ID NO: 916718
gugguacggaaguauuacu

SEQ ID NO: 1178693 - RNA, 19 nt, Artificial Sequence
  Description of Artificial Sequence: Synthetic oligonucleotide
  Antisense strand to SEQ ID NO: 1178692
aguaauacuuccguaccac

SEQ ID NO: 1178694 - RNA, 19 nt, Artificial Sequence
  Description of Artificial Sequence: Synthetic oligonucleotide
  Sense strand starting at position 3191 of SEQ ID NO: 916718
gaaguauuacuuuggacac

SEQ ID NO: 1178695 - RNA, 19 nt, Artificial Sequence
  Description of Artificial Sequence: Synthetic oligonucleotide
  Antisense strand to SEQ ID NO: 1178694
guguccaaaguaauacuuc

SEQ ID NO: 1178696 - RNA, 19 nt, Artificial Sequence
  Description of Artificial Sequence: Synthetic oligonucleotide
  Sense strand starting at position 3263 of SEQ ID NO: 916718
uacggaauacuauaguauu

SEQ ID NO: 1178697 - RNA, 19 nt, Artificial Sequence
  Description of Artificial Sequence: Synthetic oligonucleotide
  Antisense strand to SEQ ID NO: 1178696
aauacuauaguauuccgua

SEQ ID NO: 1178698 - RNA, 19 nt, Artificial Sequence
  Description of Artificial Sequence: Synthetic oligonucleotide
  Sense strand starting at position 3276 of SEQ ID NO: 916718
aguauucuggucugggaau

SEQ ID NO: 1178699 - RNA, 19 nt, Artificial Sequence
  Description of Artificial Sequence: Synthetic oligonucleotide
  Antisense strand to SEQ ID NO: 1178698
auucccagaccagaauacu

SEQ ID NO: 1178700 - RNA, 19 nt, Artificial Sequence
  Description of Artificial Sequence: Synthetic oligonucleotide
  Sense strand starting at position 3278 of SEQ ID NO: 916718
uauucuggucugggaauaa

SEQ ID NO: 1178701 - RNA, 19 nt, Artificial Sequence
  Description of Artificial Sequence: Synthetic oligonucleotide
  Antisense strand to SEQ ID NO: 1178700
uuauucccagaccagaaua

SEQ ID NO: 1178702 - RNA, 19 nt, Artificial Sequence
  Description of Artificial Sequence: Synthetic oligonucleotide
  Sense strand starting at position 3306 of SEQ ID NO: 916718
agaccagauugagaagagu

SEQ ID NO: 1178703 - RNA, 19 nt, Artificial Sequence
  Description of Artificial Sequence: Synthetic oligonucleotide
  Antisense strand to SEQ ID NO: 1178702
acucuucucaaucuggucu

SEQ ID NO: 1178704 - RNA, 19 nt, Artificial Sequence
  Description of Artificial Sequence: Synthetic oligonucleotide
  Sense strand starting at position 3336 of SEQ ID NO: 916718
uugauugaugcgcauauga

SEQ ID NO: 1178705 - RNA, 19 nt, Artificial Sequence
  Description of Artificial Sequence: Synthetic oligonucleotide
  Antisense strand to SEQ ID NO: 1178704
ucauaugcgcaucaaucaa

SEQ ID NO: 1178706 - RNA, 19 nt, Artificial Sequence
  Description of Artificial Sequence: Synthetic oligonucleotide
  Sense strand starting at position 3338 of SEQ ID NO: 916718
gauugaugcgcauaugacu

SEQ ID NO: 1178707 - RNA, 19 nt, Artificial Sequence
  Description of Artificial Sequence: Synthetic oligonucleotide
  Antisense strand to SEQ ID NO: 1178706
agucauaugcgcaucaauc

SEQ ID NO: 1178708 - RNA, 19 nt, Artificial Sequence
  Description of Artificial Sequence: Synthetic oligonucleotide
  Sense strand starting at position 3345 of SEQ ID NO: 916718
gcgcauaugacucauugaa

SEQ ID NO: 1178709 - RNA, 19 nt, Artificial Sequence
  Description of Artificial Sequence: Synthetic oligonucleotide
  Antisense strand to SEQ ID NO: 1178708
uucaaugagucauaugcgc

SEQ ID NO: 1178710 - RNA, 19 nt, Artificial Sequence
  Description of Artificial Sequence: Synthetic oligonucleotide
  Sense strand starting at position 3347 of SEQ ID NO: 916718
gcauaugacucauugaagg

SEQ ID NO: 1178711 - RNA, 19 nt, Artificial Sequence
  Description of Artificial Sequence: Synthetic oligonucleotide
  Antisense strand to SEQ ID NO: 1178710
ccuucaaugagucauaugc

SEQ ID NO: 1178712 - RNA, 19 nt, Artificial Sequence
  Description of Artificial Sequence: Synthetic oligonucleotide
  Sense strand starting at position 3692 of SEQ ID NO: 916718
auggcagagccauaaguuu

SEQ ID NO: 1178713 - RNA, 19 nt, Artificial Sequence
  Description of Artificial Sequence: Synthetic oligonucleotide
  Antisense strand to SEQ ID NO: 1178712
aaacuuauggcucugccau

SEQ ID NO: 1178714 - RNA, 19 nt, Artificial Sequence
  Description of Artificial Sequence: Synthetic oligonucleotide
  Sense strand starting at position 3811 of SEQ ID NO: 916718
ucaugugcuccuuacaaag

SEQ ID NO: 1178715 - RNA, 19 nt, Artificial Sequence
  Description of Artificial Sequence: Synthetic oligonucleotide
  Antisense strand to SEQ ID NO: 1178714
cuuuguaaggagcacauga

SEQ ID NO: 1178716 - RNA, 19 nt, Artificial Sequence
  Description of Artificial Sequence: Synthetic oligonucleotide
  Sense strand starting at position 3881 of SEQ ID NO: 916718
aguugucccucucccuaaa

SEQ ID NO: 1178717 - RNA, 19 nt, Artificial Sequence
  Description of Artificial Sequence: Synthetic oligonucleotide
  Antisense strand to SEQ ID NO: 1178716
uuuagggagagggacaacu

SEQ ID NO: 1178718 - RNA, 19 nt, Artificial Sequence
  Description of Artificial Sequence: Synthetic oligonucleotide
  Sense strand starting at position 3894 of SEQ ID NO: 916718
ccuaaauccuggccagcua

SEQ ID NO: 1178719 - RNA, 19 nt, Artificial Sequence
  Description of Artificial Sequence: Synthetic oligonucleotide
  Antisense strand to SEQ ID NO: 1178718
uagcuggccaggauuuagg

SEQ ID NO: 1178720 - RNA, 19 nt, Artificial Sequence
  Description of Artificial Sequence: Synthetic oligonucleotide
  Sense strand starting at position 133 of SEQ ID NO: 916719
cgaauccagcucuaaguuu

SEQ ID NO: 1178721 - RNA, 19 nt, Artificial Sequence
  Description of Artificial Sequence: Synthetic oligonucleotide
  Antisense strand to SEQ ID NO: 1178720
aaacuuagagcuggauucg

SEQ ID NO: 1178722 - RNA, 19 nt, Artificial Sequence
  Description of Artificial Sequence: Synthetic oligonucleotide
  Sense strand starting at position 352 of SEQ ID NO: 916719
gggaucuggcauugagaug

SEQ ID NO: 1178723 - RNA, 19 nt, Artificial Sequence
  Description of Artificial Sequence: Synthetic oligonucleotide
  Antisense strand to SEQ ID NO: 1178722
caucucaaugccagauccc

SEQ ID NO: 1178724 - RNA, 19 nt, Artificial Sequence
  Description of Artificial Sequence: Synthetic oligonucleotide
  Sense strand starting at position 390 of SEQ ID NO: 916719
uggugucaugaggagcauu

SEQ ID NO: 1178725 - RNA, 19 nt, Artificial Sequence
  Description of Artificial Sequence: Synthetic oligonucleotide
  Antisense strand to SEQ ID NO: 1178724
aaugcuccucaugacacca

SEQ ID NO: 1178726 - RNA, 19 nt, Artificial Sequence
  Description of Artificial Sequence: Synthetic oligonucleotide
  Sense strand starting at position 426 of SEQ ID NO: 916719
agcccaugccuuugggaga

SEQ ID NO: 1178727 - RNA, 19 nt, Artificial Sequence
  Description of Artificial Sequence: Synthetic oligonucleotide
  Antisense strand to SEQ ID NO: 1178726
ucucccaaaggcaugggcu

SEQ ID NO: 1178728 - RNA, 19 nt, Artificial Sequence
  Description of Artificial Sequence: Synthetic oligonucleotide
  Sense strand starting at position 472 of SEQ ID NO: 916719
gaaggaaaugccuggagua

SEQ ID NO: 1178729 - RNA, 19 nt, Artificial Sequence
  Description of Artificial Sequence: Synthetic oligonucleotide
  Antisense strand to SEQ ID NO: 1178728
uacuccaggcauuuccuuc

SEQ ID NO: 1178730 - RNA, 19 nt, Artificial Sequence
  Description of Artificial Sequence: Synthetic oligonucleotide
  Sense strand starting at position 473 of SEQ ID NO: 916719
aaggaaaugccuggaguau

SEQ ID NO: 1178731 - RNA, 19 nt, Artificial Sequence
  Description of Artificial Sequence: Synthetic oligonucleotide
  Antisense strand to SEQ ID NO: 1178730
auacuccaggcauuuccuu

SEQ ID NO: 1178732 - RNA, 19 nt, Artificial Sequence
  Description of Artificial Sequence: Synthetic oligonucleotide
  Sense strand starting at position 632 of SEQ ID NO: 916719
ucaagugucuuggcaagca

SEQ ID NO: 1178733 - RNA, 19 nt, Artificial Sequence
  Description of Artificial Sequence: Synthetic oligonucleotide
  Antisense strand to SEQ ID NO: 1178732
ugcuugccaagacacuuga

SEQ ID NO: 1178734 - RNA, 19 nt, Artificial Sequence
  Description of Artificial Sequence: Synthetic oligonucleotide
  Sense strand starting at position 747 of SEQ ID NO: 916719
agaagagcuuucuaacaac

SEQ ID NO: 1178735 - RNA, 19 nt, Artificial Sequence
  Description of Artificial Sequence: Synthetic oligonucleotide
  Antisense strand to SEQ ID NO: 1178734
guuguuagaaagcucuucu

SEQ ID NO: 1178736 - RNA, 19 nt, Artificial Sequence
  Description of Artificial Sequence: Synthetic oligonucleotide
  Sense strand starting at position 750 of SEQ ID NO: 916719
agagcuuucuaacaacaga

SEQ ID NO: 1178737 - RNA, 19 nt, Artificial Sequence
  Description of Artificial Sequence: Synthetic oligonucleotide
  Antisense strand to SEQ ID NO: 1178736
ucuguuguuagaaagcucu

SEQ ID NO: 1178738 - RNA, 19 nt, Artificial Sequence
  Description of Artificial Sequence: Synthetic oligonucleotide
  Sense strand starting at position 905 of SEQ ID NO: 916719
uagguuaggcucugagaca

SEQ ID NO: 1178739 - RNA, 19 nt, Artificial Sequence
  Description of Artificial Sequence: Synthetic oligonucleotide
  Antisense strand to SEQ ID NO: 1178738
ugucucagagccuaaccua

SEQ ID NO: 1178740 - RNA, 19 nt, Artificial Sequence
  Description of Artificial Sequence: Synthetic oligonucleotide
  Sense strand starting at position 2086 of SEQ ID NO: 916719
ggagcauggcauugcacau

SEQ ID NO: 1178741 - RNA, 19 nt, Artificial Sequence
  Description of Artificial Sequence: Synthetic oligonucleotide
  Antisense strand to SEQ ID NO: 1178740
augugcaaugccaugcucc

SEQ ID NO: 1178742 - RNA, 19 nt, Artificial Sequence
  Description of Artificial Sequence: Synthetic oligonucleotide
  Sense strand starting at position 2099 of SEQ ID NO: 916719
gcacauaugugacaacaca

SEQ ID NO: 1178743 - RNA, 19 nt, Artificial Sequence
  Description of Artificial Sequence: Synthetic oligonucleotide
  Antisense strand to SEQ ID NO: 1178742
uguguugucacauaugugc

SEQ ID NO: 1178744 - RNA, 19 nt, Artificial Sequence
  Description of Artificial Sequence: Synthetic oligonucleotide
  Sense strand starting at position 2256 of SEQ ID NO: 916719
caaugauggcggugacaac

SEQ ID NO: 1178745 - RNA, 19 nt, Artificial Sequence
  Description of Artificial Sequence: Synthetic oligonucleotide
  Antisense strand to SEQ ID NO: 1178744
guugucaccgccaucauug

SEQ ID NO: 1178746 - RNA, 19 nt, Artificial Sequence
  Description of Artificial Sequence: Synthetic oligonucleotide
  Sense strand starting at position 2268 of SEQ ID NO: 916719
ugacaacugucaucgagug

SEQ ID NO: 1178747 - RNA, 19 nt, Artificial Sequence
  Description of Artificial Sequence: Synthetic oligonucleotide
  Antisense strand to SEQ ID NO: 1178746
cacucgaugacaguuguca

SEQ ID NO: 1178748 - RNA, 19 nt, Artificial Sequence
  Description of Artificial Sequence: Synthetic oligonucleotide
  Sense strand starting at position 2269 of SEQ ID NO: 916719
gacaacugucaucgaguga

SEQ ID NO: 1178749 - RNA, 19 nt, Artificial Sequence
  Description of Artificial Sequence: Synthetic oligonucleotide
  Antisense strand to SEQ ID NO: 1178748
ucacucgaugacaguuguc

SEQ ID NO: 1178750 - RNA, 19 nt, Artificial Sequence
  Description of Artificial Sequence: Synthetic oligonucleotide
  Sense strand starting at position 2325 of SEQ ID NO: 916719
ucacaugccuugucugauu

SEQ ID NO: 1178751 - RNA, 19 nt, Artificial Sequence
  Description of Artificial Sequence: Synthetic oligonucleotide
  Antisense strand to SEQ ID NO: 1178750
aaucagacaaggcauguga

SEQ ID NO: 1178752 - RNA, 19 nt, Artificial Sequence
  Description of Artificial Sequence: Synthetic oligonucleotide
  Sense strand starting at position 2330 of SEQ ID NO: 916719
ugccuugucugauugguuu

SEQ ID NO: 1178753 - RNA, 19 nt, Artificial Sequence
  Description of Artificial Sequence: Synthetic oligonucleotide
  Antisense strand to SEQ ID NO: 1178752
aaaccaaucagacaaggca

SEQ ID NO: 1178754 - RNA, 19 nt, Artificial Sequence
  Description of Artificial Sequence: Synthetic oligonucleotide
  Sense strand starting at position 2334 of SEQ ID NO: 916719
uugucugauugguuucuca

SEQ ID NO: 1178755 - RNA, 19 nt, Artificial Sequence
  Description of Artificial Sequence: Synthetic oligonucleotide
  Antisense strand to SEQ ID NO: 1178754
ugagaaaccaaucagacaa

SEQ ID NO: 1178756 - RNA, 19 nt, Artificial Sequence
  Description of Artificial Sequence: Synthetic oligonucleotide
  Sense strand starting at position 2430 of SEQ ID NO: 916719
gccugaguccaucagugag

SEQ ID NO: 1178757 - RNA, 19 nt, Artificial Sequence
  Description of Artificial Sequence: Synthetic oligonucleotide
  Antisense strand to SEQ ID NO: 1178756
cucacugauggacucaggc

SEQ ID NO: 1178758 - RNA, 19 nt, Artificial Sequence
  Description of Artificial Sequence: Synthetic oligonucleotide
  Sense strand starting at position 2583 of SEQ ID NO: 916719
gcaggagacuaauaguuaa

SEQ ID NO: 1178759 - RNA, 19 nt, Artificial Sequence
  Description of Artificial Sequence: Synthetic oligonucleotide
  Antisense strand to SEQ ID NO: 1178758
uuaacuauuagucuccugc

SEQ ID NO: 1178760 - RNA, 19 nt, Artificial Sequence
  Description of Artificial Sequence: Synthetic oligonucleotide
  Sense strand starting at position 2605 of SEQ ID NO: 916719
cuugccaaugcuugcaaga

SEQ ID NO: 1178761 - RNA, 19 nt, Artificial Sequence
  Description of Artificial Sequence: Synthetic oligonucleotide
  Antisense strand to SEQ ID NO: 1178760
ucuugcaagcauuggcaag

SEQ ID NO: 1178762 - RNA, 19 nt, Artificial Sequence
  Description of Artificial Sequence: Synthetic oligonucleotide
  Sense strand starting at position 2654 of SEQ ID NO: 916719
gcaguuuguccaugccacu

SEQ ID NO: 1178763 - RNA, 19 nt, Artificial Sequence
  Description of Artificial Sequence: Synthetic oligonucleotide
  Antisense strand to SEQ ID NO: 1178762
aguggcauggacaaacugc

SEQ ID NO: 1178764 - RNA, 19 nt, Artificial Sequence
  Description of Artificial Sequence: Synthetic oligonucleotide
  Sense strand starting at position 2799 of SEQ ID NO: 916719
gggacaagguccucaccau

SEQ ID NO: 1178765 - RNA, 19 nt, Artificial Sequence
  Description of Artificial Sequence: Synthetic oligonucleotide
  Antisense strand to SEQ ID NO: 1178764
auggugaggaccuuguccc

SEQ ID NO: 1178766 - RNA, 19 nt, Artificial Sequence
  Description of Artificial Sequence: Synthetic oligonucleotide
  Sense strand starting at position 2831 of SEQ ID NO: 916719
agggcugguugaucuuaga

SEQ ID NO: 1178767 - RNA, 19 nt, Artificial Sequence
  Description of Artificial Sequence: Synthetic oligonucleotide
  Antisense strand to SEQ ID NO: 1178766
ucuaagaucaaccagcccu

SEQ ID NO: 1178768 - RNA, 19 nt, Artificial Sequence
  Description of Artificial Sequence: Synthetic oligonucleotide
  Sense strand starting at position 2872 of SEQ ID NO: 916719
gaugcugccuaccuguaau

SEQ ID NO: 1178769 - RNA, 19 nt, Artificial Sequence
  Description of Artificial Sequence: Synthetic oligonucleotide
  Antisense strand to SEQ ID NO: 1178768
auuacagguaggcagcauc

SEQ ID NO: 1178770 - RNA, 19 nt, Artificial Sequence
  Description of Artificial Sequence: Synthetic oligonucleotide
  Sense strand starting at position 3023 of SEQ ID NO: 916719
acacuugguucucuacaua

SEQ ID NO: 1178771 - RNA, 19 nt, Artificial Sequence
  Description of Artificial Sequence: Synthetic oligonucleotide
  Antisense strand to SEQ ID NO: 1178770
uauguagagaaccaagugu

SEQ ID NO: 1178772 - RNA, 19 nt, Artificial Sequence
  Description of Artificial Sequence: Synthetic oligonucleotide
  Sense strand starting at position 3056 of SEQ ID NO: 916719
auaugaugggcaugcauua

SEQ ID NO: 1178773 - RNA, 19 nt, Artificial Sequence
  Description of Artificial Sequence: Synthetic oligonucleotide
  Antisense strand to SEQ ID NO: 1178772
uaaugcaugcccaucauau

SEQ ID NO: 1178774 - RNA, 19 nt, Artificial Sequence
  Description of Artificial Sequence: Synthetic oligonucleotide
  Sense strand starting at position 3101 of SEQ ID NO: 916719
gggaacaauuucugggaaa

SEQ ID NO: 1178775 - RNA, 19 nt, Artificial Sequence
  Description of Artificial Sequence: Synthetic oligonucleotide
  Antisense strand to SEQ ID NO: 1178774
uuucccagaaauuguuccc

SEQ ID NO: 1178776 - RNA, 19 nt, Artificial Sequence
  Description of Artificial Sequence: Synthetic oligonucleotide
  Sense strand starting at position 3102 of SEQ ID NO: 916719
ggaacaauuucugggaaac

SEQ ID NO: 1178777 - RNA, 19 nt, Artificial Sequence
  Description of Artificial Sequence: Synthetic oligonucleotide
  Antisense strand to SEQ ID NO: 1178776
guuucccagaaauuguucc

SEQ ID NO: 1178778 - RNA, 19 nt, Artificial Sequence
  Description of Artificial Sequence: Synthetic oligonucleotide
  Sense strand starting at position 3135 of SEQ ID NO: 916719
gaaggcucuuugucucuau

SEQ ID NO: 1178779 - RNA, 19 nt, Artificial Sequence
  Description of Artificial Sequence: Synthetic oligonucleotide
  Antisense strand to SEQ ID NO: 1178778
auagagacaaagagccuuc

SEQ ID NO: 1178780 - RNA, 19 nt, Artificial Sequence
  Description of Artificial Sequence: Synthetic oligonucleotide
  Sense strand starting at position 3164 of SEQ ID NO: 916719
uuugcauggguguguauaa

SEQ ID NO: 1178781 - RNA, 19 nt, Artificial Sequence
  Description of Artificial Sequence: Synthetic oligonucleotide
  Antisense strand to SEQ ID NO: 1178780
uuauacacacccaugcaaa

SEQ ID NO: 1178782 - RNA, 19 nt, Artificial Sequence
  Description of Artificial Sequence: Synthetic oligonucleotide
  Sense strand starting at position 3165 of SEQ ID NO: 916719
uugcauggguguguauaaa

SEQ ID NO: 1178783 - RNA, 19 nt, Artificial Sequence
  Description of Artificial Sequence: Synthetic oligonucleotide
  Antisense strand to SEQ ID NO: 1178782
uuuauacacacccaugcaa

SEQ ID NO: 1178784 - RNA, 19 nt, Artificial Sequence
  Description of Artificial Sequence: Synthetic oligonucleotide
  Sense strand starting at position 3174 of SEQ ID NO: 916719
uguguauaaacgugaaguu

SEQ ID NO: 1178785 - RNA, 19 nt, Artificial Sequence
  Description of Artificial Sequence: Synthetic oligonucleotide
  Antisense strand to SEQ ID NO: 1178784
aacuucacguuuauacaca

SEQ ID NO: 1178786 - RNA, 19 nt, Artificial Sequence
  Description of Artificial Sequence: Synthetic oligonucleotide
  Sense strand starting at position 3175 of SEQ ID NO: 916719
guguauaaacgugaaguug

SEQ ID NO: 1178787 - RNA, 19 nt, Artificial Sequence
  Description of Artificial Sequence: Synthetic oligonucleotide
  Antisense strand to SEQ ID NO: 1178786
caacuucacguuuauacac

SEQ ID NO: 1178788 - RNA, 19 nt, Artificial Sequence
  Description of Artificial Sequence: Synthetic oligonucleotide
  Sense strand starting at position 3471 of SEQ ID NO: 916719
caagaucaauggugauaca

SEQ ID NO: 1178789 - RNA, 19 nt, Artificial Sequence
  Description of Artificial Sequence: Synthetic oligonucleotide
  Antisense strand to SEQ ID NO: 1178788
uguaucaccauugaucuug

SEQ ID NO: 1178790 - RNA, 19 nt, Artificial Sequence
  Description of Artificial Sequence: Synthetic oligonucleotide
  Sense strand starting at position 3474 of SEQ ID NO: 916719
gaucaauggugauacaaga

SEQ ID NO: 1178791 - RNA, 19 nt, Artificial Sequence
  Description of Artificial Sequence: Synthetic oligonucleotide
  Antisense strand to SEQ ID NO: 1178790
ucuuguaucaccauugauc

SEQ ID NO: 1178792 - RNA, 19 nt, Artificial Sequence
  Description of Artificial Sequence: Synthetic oligonucleotide
  Sense strand starting at position 3533 of SEQ ID NO: 916719
guagaaaguucuggaacug

SEQ ID NO: 1178793 - RNA, 19 nt, Artificial Sequence
  Description of Artificial Sequence: Synthetic oligonucleotide
  Antisense strand to SEQ ID NO: 1178792
caguuccagaacuuucuac

SEQ ID NO: 1178794 - RNA, 19 nt, Artificial Sequence
  Description of Artificial Sequence: Synthetic oligonucleotide
  Sense strand starting at position 3599 of SEQ ID NO: 916719
cccaaauacugaugugaaa

SEQ ID NO: 1178795 - RNA, 19 nt, Artificial Sequence
  Description of Artificial Sequence: Synthetic oligonucleotide
  Antisense strand to SEQ ID NO: 1178794
uuucacaucaguauuuggg

SEQ ID NO: 1178796 - RNA, 19 nt, Artificial Sequence
  Description of Artificial Sequence: Synthetic oligonucleotide
  Sense strand starting at position 3684 of SEQ ID NO: 916719
ccuacuuaguagguguuau

SEQ ID NO: 1178797 - RNA, 19 nt, Artificial Sequence
  Description of Artificial Sequence: Synthetic oligonucleotide
  Antisense strand to SEQ ID NO: 1178796
auaacaccuacuaaguagg

SEQ ID NO: 1178798 - RNA, 19 nt, Artificial Sequence
  Description of Artificial Sequence: Synthetic oligonucleotide
  Sense strand starting at position 3685 of SEQ ID NO: 916719
cuacuuaguagguguuauu

SEQ ID NO: 1178799 - RNA, 19 nt, Artificial Sequence
  Description of Artificial Sequence: Synthetic oligonucleotide
  Antisense strand to SEQ ID NO: 1178798
aauaacaccuacuaaguag

SEQ ID NO: 1178800 - RNA, 19 nt, Artificial Sequence
  Description of Artificial Sequence: Synthetic oligonucleotide
  Sense strand starting at position 303 of SEQ ID NO: 916720
aguaguagucguagucgua

SEQ ID NO: 1178801 - RNA, 19 nt, Artificial Sequence
  Description of Artificial Sequence: Synthetic oligonucleotide
  Antisense strand to SEQ ID NO: 1178800
uacgacuacgacuacuacu

SEQ ID NO: 1178802 - RNA, 19 nt, Artificial Sequence
  Description of Artificial Sequence: Synthetic oligonucleotide
  Sense strand starting at position 310 of SEQ ID NO: 916720
gucguagucguaguagaga

SEQ ID NO: 1178803 - RNA, 19 nt, Artificial Sequence
  Description of Artificial Sequence: Synthetic oligonucleotide
  Antisense strand to SEQ ID NO: 1178802
ucucuacuacgacuacgac

SEQ ID NO: 1178804 - RNA, 19 nt, Artificial Sequence
  Description of Artificial Sequence: Synthetic oligonucleotide
  Sense strand starting at position 420 of SEQ ID NO: 916720
acaugcuugggccaucaua

SEQ ID NO: 1178805 - RNA, 19 nt, Artificial Sequence
  Description of Artificial Sequence: Synthetic oligonucleotide
  Antisense strand to SEQ ID NO: 1178804
uaugauggcccaagcaugu

SEQ ID NO: 1178806 - RNA, 19 nt, Artificial Sequence
  Description of Artificial Sequence: Synthetic oligonucleotide
  Sense strand starting at position 428 of SEQ ID NO: 916720
gggccaucauacccaguau

SEQ ID NO: 1178807 - RNA, 19 nt, Artificial Sequence
  Description of Artificial Sequence: Synthetic oligonucleotide
  Antisense strand to SEQ ID NO: 1178806
auacuggguaugauggccc

SEQ ID NO: 1178808 - RNA, 19 nt, Artificial Sequence
  Description of Artificial Sequence: Synthetic oligonucleotide
  Sense strand starting at position 561 of SEQ ID NO: 916720
caccucaucucgucagguu

SEQ ID NO: 1178809 - RNA, 19 nt, Artificial Sequence
  Description of Artificial Sequence: Synthetic oligonucleotide
  Antisense strand to SEQ ID NO: 1178808
aaccugacgagaugaggug

SEQ ID NO: 1178810 - RNA, 19 nt, Artificial Sequence
  Description of Artificial Sequence: Synthetic oligonucleotide
  Sense strand starting at position 562 of SEQ ID NO: 916720
accucaucucgucagguuu

SEQ ID NO: 1178811 - RNA, 19 nt, Artificial Sequence
  Description of Artificial Sequence: Synthetic oligonucleotide
  Antisense strand to SEQ ID NO: 1178810
aaaccugacgagaugaggu

SEQ ID NO: 1178812 - RNA, 19 nt, Artificial Sequence
  Description of Artificial Sequence: Synthetic oligonucleotide
  Sense strand starting at position 693 of SEQ ID NO: 916720
agggcuuugugcucaccau

SEQ ID NO: 1178813 - RNA, 19 nt, Artificial Sequence
  Description of Artificial Sequence: Synthetic oligonucleotide
  Antisense strand to SEQ ID NO: 1178812
auggugagcacaaagcccu

SEQ ID NO: 1178814 - RNA, 19 nt, Artificial Sequence
  Description of Artificial Sequence: Synthetic oligonucleotide
  Sense strand starting at position 710 of SEQ ID NO: 916720
aucuccucugcccagagau

SEQ ID NO: 1178815 - RNA, 19 nt, Artificial Sequence
  Description of Artificial Sequence: Synthetic oligonucleotide
  Antisense strand to SEQ ID NO: 1178814
aucucugggcagaggagau

SEQ ID NO: 1178816 - RNA, 19 nt, Artificial Sequence
  Description of Artificial Sequence: Synthetic oligonucleotide
  Sense strand starting at position 720 of SEQ ID NO: 916720
cccagagaugcuugacucu

SEQ ID NO: 1178817 - RNA, 19 nt, Artificial Sequence
  Description of Artificial Sequence: Synthetic oligonucleotide
  Antisense strand to SEQ ID NO: 1178816
agagucaagcaucucuggg

SEQ ID NO: 1178818 - RNA, 19 nt, Artificial Sequence
  Description of Artificial Sequence: Synthetic oligonucleotide
  Sense strand starting at position 723 of SEQ ID NO: 916720
agagaugcuugacucuuga

SEQ ID NO: 1178819 - RNA, 19 nt, Artificial Sequence
  Description of Artificial Sequence: Synthetic oligonucleotide
  Antisense strand to SEQ ID NO: 1178818
ucaagagucaagcaucucu

SEQ ID NO: 1178820 - RNA, 19 nt, Artificial Sequence
  Description of Artificial Sequence: Synthetic oligonucleotide
  Sense strand starting at position 734 of SEQ ID NO: 916720
acucuugaucacuacguca

SEQ ID NO: 1178821 - RNA, 19 nt, Artificial Sequence
  Description of Artificial Sequence: Synthetic oligonucleotide
  Antisense strand to SEQ ID NO: 1178820
ugacguagugaucaagagu

SEQ ID NO: 1178822 - RNA, 19 nt, Artificial Sequence
  Description of Artificial Sequence: Synthetic oligonucleotide
  Sense strand starting at position 736 of SEQ ID NO: 916720
ucuugaucacuacgucaca

SEQ ID NO: 1178823 - RNA, 19 nt, Artificial Sequence
  Description of Artificial Sequence: Synthetic oligonucleotide
  Antisense strand to SEQ ID NO: 1178822
ugugacguagugaucaaga

SEQ ID NO: 1178824 - RNA, 19 nt, Artificial Sequence
  Description of Artificial Sequence: Synthetic oligonucleotide
  Sense strand starting at position 1217 of SEQ ID NO: 916720
uucugagaaucugcaauga

SEQ ID NO: 1178825 - RNA, 19 nt, Artificial Sequence
  Description of Artificial Sequence: Synthetic oligonucleotide
  Antisense strand to SEQ ID NO: 1178824
ucauugcagauucucagaa

SEQ ID NO: 1178826 - RNA, 19 nt, Artificial Sequence
  Description of Artificial Sequence: Synthetic oligonucleotide
  Sense strand starting at position 1234 of SEQ ID NO: 916720
gauccaauuuauuggguua

SEQ ID NO: 1178827 - RNA, 19 nt, Artificial Sequence
  Description of Artificial Sequence: Synthetic oligonucleotide
  Antisense strand to SEQ ID NO: 1178826
uaacccaauaaauuggauc

SEQ ID NO: 1178828 - RNA, 19 nt, Artificial Sequence
  Description of Artificial Sequence: Synthetic oligonucleotide
  Sense strand starting at position 1246 of SEQ ID NO: 916720
uggguuauuuguucggucu

SEQ ID NO: 1178829 - RNA, 19 nt, Artificial Sequence
  Description of Artificial Sequence: Synthetic oligonucleotide
  Antisense strand to SEQ ID NO: 1178828
agaccgaacaaauaaccca

SEQ ID NO: 1178830 - RNA, 19 nt, Artificial Sequence
  Description of Artificial Sequence: Synthetic oligonucleotide
  Sense strand starting at position 1247 of SEQ ID NO: 916720
ggguuauuuguucggucug

SEQ ID NO: 1178831 - RNA, 19 nt, Artificial Sequence
  Description of Artificial Sequence: Synthetic oligonucleotide
  Antisense strand to SEQ ID NO: 1178830
cagaccgaacaaauaaccc

SEQ ID NO: 1178832 - RNA, 19 nt, Artificial Sequence
  Description of Artificial Sequence: Synthetic oligonucleotide
  Sense strand starting at position 1249 of SEQ ID NO: 916720
guuauuuguucggucugua

SEQ ID NO: 1178833 - RNA, 19 nt, Artificial Sequence
  Description of Artificial Sequence: Synthetic oligonucleotide
  Antisense strand to SEQ ID NO: 1178832
uacagaccgaacaaauaac

SEQ ID NO: 1178834 - RNA, 19 nt, Artificial Sequence
  Description of Artificial Sequence: Synthetic oligonucleotide
  Sense strand starting at position 1349 of SEQ ID NO: 916720
gcaccuggugcauaauaga

SEQ ID NO: 1178835 - RNA, 19 nt, Artificial Sequence
  Description of Artificial Sequence: Synthetic oligonucleotide
  Antisense strand to SEQ ID NO: 1178834
ucuauuaugcaccaggugc

SEQ ID NO: 1178836 - RNA, 19 nt, Artificial Sequence
  Description of Artificial Sequence: Synthetic oligonucleotide
  Sense strand starting at position 1375 of SEQ ID NO: 916720
cacguaccuguugaaugaa

SEQ ID NO: 1178837 - RNA, 19 nt, Artificial Sequence
  Description of Artificial Sequence: Synthetic oligonucleotide
  Antisense strand to SEQ ID NO: 1178836
uucauucaacagguacgug

SEQ ID NO: 1178838 - RNA, 19 nt, Artificial Sequence
  Description of Artificial Sequence: Synthetic oligonucleotide
  Sense strand starting at position 1434 of SEQ ID NO: 916720
gggaccaaagucugauguu

SEQ ID NO: 1178839 - RNA, 19 nt, Artificial Sequence
  Description of Artificial Sequence: Synthetic oligonucleotide
  Antisense strand to SEQ ID NO: 1178838
aacaucagacuuugguccc

SEQ ID NO: 1178840 - RNA, 19 nt, Artificial Sequence
  Description of Artificial Sequence: Synthetic oligonucleotide
  Sense strand starting at position 1441 of SEQ ID NO: 916720
aagucugauguugggaagu

SEQ ID NO: 1178841 - RNA, 19 nt, Artificial Sequence
  Description of Artificial Sequence: Synthetic oligonucleotide
  Antisense strand to SEQ ID NO: 1178840
acuucccaacaucagacuu

SEQ ID NO: 1178842 - RNA, 19 nt, Artificial Sequence
  Description of Artificial Sequence: Synthetic oligonucleotide
  Sense strand starting at position 1502 of SEQ ID NO: 916720
cucugacugcuauguuuga

SEQ ID NO: 1178843 - RNA, 19 nt, Artificial Sequence
  Description of Artificial Sequence: Synthetic oligonucleotide
  Antisense strand to SEQ ID NO: 1178842
ucaaacauagcagucagag

SEQ ID NO: 1178844 - RNA, 19 nt, Artificial Sequence
  Description of Artificial Sequence: Synthetic oligonucleotide
  Sense strand starting at position 1733 of SEQ ID NO: 916720
ggcagaucgcacucacguu

SEQ ID NO: 1178845 - RNA, 19 nt, Artificial Sequence
  Description of Artificial Sequence: Synthetic oligonucleotide
  Antisense strand to SEQ ID NO: 1178844
aacgugagugcgaucugcc

SEQ ID NO: 1178846 - RNA, 19 nt, Artificial Sequence
  Description of Artificial Sequence: Synthetic oligonucleotide
  Sense strand starting at position 1761 of SEQ ID NO: 916720
cggagugagcaucaacaaa

SEQ ID NO: 1178847 - RNA, 19 nt, Artificial Sequence
  Description of Artificial Sequence: Synthetic oligonucleotide
  Antisense strand to SEQ ID NO: 1178846
uuuguugaugcucacuccg

SEQ ID NO: 1178848 - RNA, 19 nt, Artificial Sequence
  Description of Artificial Sequence: Synthetic oligonucleotide
  Sense strand starting at position 1830 of SEQ ID NO: 916720
gggacuuacccacgggaca

SEQ ID NO: 1178849 - RNA, 19 nt, Artificial Sequence
  Description of Artificial Sequence: Synthetic oligonucleotide
  Antisense strand to SEQ ID NO: 1178848
ugucccguggguaaguccc

SEQ ID NO: 1178850 - RNA, 19 nt, Artificial Sequence
  Description of Artificial Sequence: Synthetic oligonucleotide
  Sense strand starting at position 2024 of SEQ ID NO: 916720
gacuaauagucuccaggaa

SEQ ID NO: 1178851 - RNA, 19 nt, Artificial Sequence
  Description of Artificial Sequence: Synthetic oligonucleotide
  Antisense strand to SEQ ID NO: 1178850
uuccuggagacuauuaguc

SEQ ID NO: 1178852 - RNA, 19 nt, Artificial Sequence
  Description of Artificial Sequence: Synthetic oligonucleotide
  Sense strand starting at position 2320 of SEQ ID NO: 916720
cagcccaguuccucagaga

SEQ ID NO: 1178853 - RNA, 19 nt, Artificial Sequence
  Description of Artificial Sequence: Synthetic oligonucleotide
  Antisense strand to SEQ ID NO: 1178852
ucucugaggaacugggcug

SEQ ID NO: 1178854 - RNA, 19 nt, Artificial Sequence
  Description of Artificial Sequence: Synthetic oligonucleotide
  Sense strand starting at position 2321 of SEQ ID NO: 916720
agcccaguuccucagagaa

SEQ ID NO: 1178855 - RNA, 19 nt, Artificial Sequence
  Description of Artificial Sequence: Synthetic oligonucleotide
  Antisense strand to SEQ ID NO: 1178854
uucucugaggaacugggcu

SEQ ID NO: 1178856 - RNA, 19 nt, Artificial Sequence
  Description of Artificial Sequence: Synthetic oligonucleotide
  Sense strand starting at position 2544 of SEQ ID NO: 916720
uugucagguccgcaagaga

SEQ ID NO: 1178857 - RNA, 19 nt, Artificial Sequence
  Description of Artificial Sequence: Synthetic oligonucleotide
  Antisense strand to SEQ ID NO: 1178856
ucucuugcggaccugacaa

SEQ ID NO: 1178858 - RNA, 19 nt, Artificial Sequence
  Description of Artificial Sequence: Synthetic oligonucleotide
  Sense strand starting at position 2874 of SEQ ID NO: 916720
gugguagucuaagcaugaa

SEQ ID NO: 1178859 - RNA, 19 nt, Artificial Sequence
  Description of Artificial Sequence: Synthetic oligonucleotide
  Antisense strand to SEQ ID NO: 1178858
uucaugcuuagacuaccac

SEQ ID NO: 1178860 - RNA, 19 nt, Artificial Sequence
  Description of Artificial Sequence: Synthetic oligonucleotide
  Sense strand starting at position 2954 of SEQ ID NO: 916720
ugugguuuggaugaugaca

SEQ ID NO: 1178861 - RNA, 19 nt, Artificial Sequence
  Description of Artificial Sequence: Synthetic oligonucleotide
  Antisense strand to SEQ ID NO: 1178860
ugucaucauccaaaccaca

SEQ ID NO: 1178862 - RNA, 19 nt, Artificial Sequence
  Description of Artificial Sequence: Synthetic oligonucleotide
  Sense strand starting at position 3063 of SEQ ID NO: 916720
gcaguuuagucacuggaac

SEQ ID NO: 1178863 - RNA, 19 nt, Artificial Sequence
  Description of Artificial Sequence: Synthetic oligonucleotide
  Antisense strand to SEQ ID NO: 1178862
guuccagugacuaaacugc

SEQ ID NO: 1178864 - RNA, 19 nt, Artificial Sequence
  Description of Artificial Sequence: Synthetic oligonucleotide
  Sense strand starting at position 3143 of SEQ ID NO: 916720
agagcugaaucagucaaca

SEQ ID NO: 1178865 - RNA, 19 nt, Artificial Sequence
  Description of Artificial Sequence: Synthetic oligonucleotide
  Antisense strand to SEQ ID NO: 1178864
uguugacugauucagcucu

SEQ ID NO: 1178866 - RNA, 19 nt, Artificial Sequence
  Description of Artificial Sequence: Synthetic oligonucleotide
  Sense strand starting at position 3319 of SEQ ID NO: 916720
gagagucugcaccauuaga

SEQ ID NO: 1178867 - RNA, 19 nt, Artificial Sequence
  Description of Artificial Sequence: Synthetic oligonucleotide
  Antisense strand to SEQ ID NO: 1178866
ucuaauggugcagacucuc

SEQ ID NO: 1178868 - RNA, 19 nt, Artificial Sequence
  Description of Artificial Sequence: Synthetic oligonucleotide
  Sense strand starting at position 3332 of SEQ ID NO: 916720
auuagaguuugcuuccuca

SEQ ID NO: 1178869 - RNA, 19 nt, Artificial Sequence
  Description of Artificial Sequence: Synthetic oligonucleotide
  Antisense strand to SEQ ID NO: 1178868
ugaggaagcaaacucuaau

SEQ ID NO: 1178870 - RNA, 19 nt, Artificial Sequence
  Description of Artificial Sequence: Synthetic oligonucleotide
  Sense strand starting at position 3335 of SEQ ID NO: 916720
agaguuugcuuccucauca

SEQ ID NO: 1178871 - RNA, 19 nt, Artificial Sequence
  Description of Artificial Sequence: Synthetic oligonucleotide
  Antisense strand to SEQ ID NO: 1178870
ugaugaggaagcaaacucu

SEQ ID NO: 1178872 - RNA, 19 nt, Artificial Sequence
  Description of Artificial Sequence: Synthetic oligonucleotide
  Sense strand starting at position 3370 of SEQ ID NO: 916720
ugugauuaacaguacaggu

SEQ ID NO: 1178873 - RNA, 19 nt, Artificial Sequence
  Description of Artificial Sequence: Synthetic oligonucleotide
  Antisense strand to SEQ ID NO: 1178872
accuguacuguuaaucaca

SEQ ID NO: 1178874 - RNA, 19 nt, Artificial Sequence
  Description of Artificial Sequence: Synthetic oligonucleotide
  Sense strand starting at position 3419 of SEQ ID NO: 916720
ugaaauuaugagugccagu

SEQ ID NO: 1178875 - RNA, 19 nt, Artificial Sequence
  Description of Artificial Sequence: Synthetic oligonucleotide
  Antisense strand to SEQ ID NO: 1178874
acuggcacucauaauuuca

SEQ ID NO: 1178876 - RNA, 19 nt, Artificial Sequence
  Description of Artificial Sequence: Synthetic oligonucleotide
  Sense strand starting at position 3786 of SEQ ID NO: 916720
ccaagaauguuagucagau

SEQ ID NO: 1178877 - RNA, 19 nt, Artificial Sequence
  Description of Artificial Sequence: Synthetic oligonucleotide
  Antisense strand to SEQ ID NO: 1178876
aucugacuaacauucuugg

SEQ ID NO: 1178878 - RNA, 19 nt, Artificial Sequence
  Description of Artificial Sequence: Synthetic oligonucleotide
  Sense strand starting at position 3787 of SEQ ID NO: 916720
caagaauguuagucagauu

SEQ ID NO: 1178879 - RNA, 19 nt, Artificial Sequence
  Description of Artificial Sequence: Synthetic oligonucleotide
  Antisense strand to SEQ ID NO: 1178878
aaucugacuaacauucuug

SEQ ID NO: 1178880 - RNA, 19 nt, Artificial Sequence
  Description of Artificial Sequence: Synthetic oligonucleotide
  Sense strand starting at position 90 of SEQ ID NO: 916721
gcuuaugaaucuuccauag

SEQ ID NO: 1178881 - RNA, 19 nt, Artificial Sequence
  Description of Artificial Sequence: Synthetic oligonucleotide
  Antisense strand to SEQ ID NO: 1178880
cuauggaagauucauaagc

SEQ ID NO: 1178882 - RNA, 19 nt, Artificial Sequence
  Description of Artificial Sequence: Synthetic oligonucleotide
  Sense strand starting at position 126 of SEQ ID NO: 916721
guggacuucccuuaaaugu

SEQ ID NO: 1178883 - RNA, 19 nt, Artificial Sequence
  Description of Artificial Sequence: Synthetic oligonucleotide
  Antisense strand to SEQ ID NO: 1178882
acauuuaagggaaguccac

SEQ ID NO: 1178884 - RNA, 19 nt, Artificial Sequence
  Description of Artificial Sequence: Synthetic oligonucleotide
  Sense strand starting at position 178 of SEQ ID NO: 916721
caagauauuuaguagaaag

SEQ ID NO: 1178885 - RNA, 19 nt, Artificial Sequence
  Description of Artificial Sequence: Synthetic oligonucleotide
  Antisense strand to SEQ ID NO: 1178884
cuuucuacuaaauaucuug

SEQ ID NO: 1178886 - RNA, 19 nt, Artificial Sequence
  Description of Artificial Sequence: Synthetic oligonucleotide
  Sense strand starting at position 203 of SEQ ID NO: 916721
aggauuugcucugaaagga

SEQ ID NO: 1178887 - RNA, 19 nt, Artificial Sequence
  Description of Artificial Sequence: Synthetic oligonucleotide
  Antisense strand to SEQ ID NO: 1178886
uccuuucagagcaaauccu

SEQ ID NO: 1178888 - RNA, 19 nt, Artificial Sequence
  Description of Artificial Sequence: Synthetic oligonucleotide
  Sense strand starting at position 301 of SEQ ID NO: 916721
gagguauuuccuggccuuc

SEQ ID NO: 1178889 - RNA, 19 nt, Artificial Sequence
  Description of Artificial Sequence: Synthetic oligonucleotide
  Antisense strand to SEQ ID NO: 1178888
gaaggccaggaaauaccuc

SEQ ID NO: 1178890 - RNA, 19 nt, Artificial Sequence
  Description of Artificial Sequence: Synthetic oligonucleotide
  Sense strand starting at position 334 of SEQ ID NO: 916721
ggagccuuguuucuggaga

SEQ ID NO: 1178891 - RNA, 19 nt, Artificial Sequence
  Description of Artificial Sequence: Synthetic oligonucleotide
  Antisense strand to SEQ ID NO: 1178890
ucuccagaaacaaggcucc

SEQ ID NO: 1178892 - RNA, 19 nt, Artificial Sequence
  Description of Artificial Sequence: Synthetic oligonucleotide
  Sense strand starting at position 378 of SEQ ID NO: 916721
ggaagccuuccugaucaua

SEQ ID NO: 1178893 - RNA, 19 nt, Artificial Sequence
  Description of Artificial Sequence: Synthetic oligonucleotide
  Antisense strand to SEQ ID NO: 1178892
uaugaucaggaaggcuucc

SEQ ID NO: 1178894 - RNA, 19 nt, Artificial Sequence
  Description of Artificial Sequence: Synthetic oligonucleotide
  Sense strand starting at position 797 of SEQ ID NO: 916721
uccaaagcugacgauauaa

SEQ ID NO: 1178895 - RNA, 19 nt, Artificial Sequence
  Description of Artificial Sequence: Synthetic oligonucleotide
  Antisense strand to SEQ ID NO: 1178894
uuauaucgucagcuuugga

SEQ ID NO: 1178896 - RNA, 19 nt, Artificial Sequence
  Description of Artificial Sequence: Synthetic oligonucleotide
  Sense strand starting at position 888 of SEQ ID NO: 916721
gcacaccucuuauuggaaa

SEQ ID NO: 1178897 - RNA, 19 nt, Artificial Sequence
  Description of Artificial Sequence: Synthetic oligonucleotide
  Antisense strand to SEQ ID NO: 1178896
uuuccaauaagaggugugc

SEQ ID NO: 1178898 - RNA, 19 nt, Artificial Sequence
  Description of Artificial Sequence: Synthetic oligonucleotide
  Sense strand starting at position 970 of SEQ ID NO: 916721
guuagauaugcugaaguua

SEQ ID NO: 1178899 - RNA, 19 nt, Artificial Sequence
  Description of Artificial Sequence: Synthetic oligonucleotide
  Antisense strand to SEQ ID NO: 1178898
uaacuucagcauaucuaac

SEQ ID NO: 1178900 - RNA, 19 nt, Artificial Sequence
  Description of Artificial Sequence: Synthetic oligonucleotide
  Sense strand starting at position 1018 of SEQ ID NO: 916721
ugacauauucgauauaagc

SEQ ID NO: 1178901 - RNA, 19 nt, Artificial Sequence
  Description of Artificial Sequence: Synthetic oligonucleotide
  Antisense strand to SEQ ID NO: 1178900
gcuuauaucgaauauguca

SEQ ID NO: 1178902 - RNA, 19 nt, Artificial Sequence
  Description of Artificial Sequence: Synthetic oligonucleotide
  Sense strand starting at position 1243 of SEQ ID NO: 916721
ccuuuagucguggagagga

SEQ ID NO: 1178903 - RNA, 19 nt, Artificial Sequence
  Description of Artificial Sequence: Synthetic oligonucleotide
  Antisense strand to SEQ ID NO: 1178902
uccucuccacgacuaaagg

SEQ ID NO: 1178904 - RNA, 19 nt, Artificial Sequence
  Description of Artificial Sequence: Synthetic oligonucleotide
  Sense strand starting at position 1840 of SEQ ID NO: 916721
cagggacuccuuggcuaga

SEQ ID NO: 1178905 - RNA, 19 nt, Artificial Sequence
  Description of Artificial Sequence: Synthetic oligonucleotide
  Antisense strand to SEQ ID NO: 1178904
ucuagccaaggagucccug

SEQ ID NO: 1178906 - RNA, 19 nt, Artificial Sequence
  Description of Artificial Sequence: Synthetic oligonucleotide
  Sense strand starting at position 1841 of SEQ ID NO: 916721
agggacuccuuggcuagau

SEQ ID NO: 1178907 - RNA, 19 nt, Artificial Sequence
  Description of Artificial Sequence: Synthetic oligonucleotide
  Antisense strand to SEQ ID NO: 1178906
aucuagccaaggagucccu

SEQ ID NO: 1178908 - RNA, 19 nt, Artificial Sequence
  Description of Artificial Sequence: Synthetic oligonucleotide
  Sense strand starting at position 1897 of SEQ ID NO: 916721
ucaccugaguuccugaaga

SEQ ID NO: 1178909 - RNA, 19 nt, Artificial Sequence
  Description of Artificial Sequence: Synthetic oligonucleotide
  Antisense strand to SEQ ID NO: 1178908
ucuucaggaacucagguga

SEQ ID NO: 1178910 - RNA, 19 nt, Artificial Sequence
  Description of Artificial Sequence: Synthetic oligonucleotide
  Sense strand starting at position 1922 of SEQ ID NO: 916721
agguaagaaucaccaugua

SEQ ID NO: 1178911 - RNA, 19 nt, Artificial Sequence
  Description of Artificial Sequence: Synthetic oligonucleotide
  Antisense strand to SEQ ID NO: 1178910
uacauggugauucuuaccu

SEQ ID NO: 1178912 - RNA, 19 nt, Artificial Sequence
  Description of Artificial Sequence: Synthetic oligonucleotide
  Sense strand starting at position 2122 of SEQ ID NO: 916721
uugucuguuuccuuagaaa

SEQ ID NO: 1178913 - RNA, 19 nt, Artificial Sequence
  Description of Artificial Sequence: Synthetic oligonucleotide
  Antisense strand to SEQ ID NO: 1178912
uuucuaaggaaacagacaa

SEQ ID NO: 1178914 - RNA, 19 nt, Artificial Sequence
  Description of Artificial Sequence: Synthetic oligonucleotide
  Sense strand starting at position 2145 of SEQ ID NO: 916721
ggauuaugauuaccucuuu

SEQ ID NO: 1178915 - RNA, 19 nt, Artificial Sequence
  Description of Artificial Sequence: Synthetic oligonucleotide
  Antisense strand to SEQ ID NO: 1178914
aaagagguaaucauaaucc

SEQ ID NO: 1178916 - RNA, 19 nt, Artificial Sequence
  Description of Artificial Sequence: Synthetic oligonucleotide
  Sense strand starting at position 2200 of SEQ ID NO: 916721
gaguaaaucucguuaagac

SEQ ID NO: 1178917 - RNA, 19 nt, Artificial Sequence
  Description of Artificial Sequence: Synthetic oligonucleotide
  Antisense strand to SEQ ID NO: 1178916
gucuuaacgagauuuacuc

SEQ ID NO: 1178918 - RNA, 19 nt, Artificial Sequence
  Description of Artificial Sequence: Synthetic oligonucleotide
  Sense strand starting at position 2201 of SEQ ID NO: 916721
aguaaaucucguuaagacc

SEQ ID NO: 1178919 - RNA, 19 nt, Artificial Sequence
  Description of Artificial Sequence: Synthetic oligonucleotide
  Antisense strand to SEQ ID NO: 1178918
ggucuuaacgagauuuacu

SEQ ID NO: 1178920 - RNA, 19 nt, Artificial Sequence
  Description of Artificial Sequence: Synthetic oligonucleotide
  Sense strand starting at position 2248 of SEQ ID NO: 916721
gcuucuuaaccucaagaag

SEQ ID NO: 1178921 - RNA, 19 nt, Artificial Sequence
  Description of Artificial Sequence: Synthetic oligonucleotide
  Antisense strand to SEQ ID NO: 1178920
cuucuugagguuaagaagc

SEQ ID NO: 1178922 - RNA, 19 nt, Artificial Sequence
  Description of Artificial Sequence: Synthetic oligonucleotide
  Sense strand starting at position 2290 of SEQ ID NO: 916721
auaauugaauguuccugaa

SEQ ID NO: 1178923 - RNA, 19 nt, Artificial Sequence
  Description of Artificial Sequence: Synthetic oligonucleotide
  Antisense strand to SEQ ID NO: 1178922
uucaggaacauucaauuau

SEQ ID NO: 1178924 - RNA, 19 nt, Artificial Sequence
  Description of Artificial Sequence: Synthetic oligonucleotide
  Sense strand starting at position 2327 of SEQ ID NO: 916721
ugaugugauucugcugaau

SEQ ID NO: 1178925 - RNA, 19 nt, Artificial Sequence
  Description of Artificial Sequence: Synthetic oligonucleotide
  Antisense strand to SEQ ID NO: 1178924
auucagcagaaucacauca

SEQ ID NO: 1178926 - RNA, 19 nt, Artificial Sequence
  Description of Artificial Sequence: Synthetic oligonucleotide
  Sense strand starting at position 2351 of SEQ ID NO: 916721
uaagccauguaauugauga

SEQ ID NO: 1178927 - RNA, 19 nt, Artificial Sequence
  Description of Artificial Sequence: Synthetic oligonucleotide
  Antisense strand to SEQ ID NO: 1178926
ucaucaauuacauggcuua

SEQ ID NO: 1178928 - RNA, 19 nt, Artificial Sequence
  Description of Artificial Sequence: Synthetic oligonucleotide
  Sense strand starting at position 2359 of SEQ ID NO: 916721
guaauugaugagggucuau

SEQ ID NO: 1178929 - RNA, 19 nt, Artificial Sequence
  Description of Artificial Sequence: Synthetic oligonucleotide
  Antisense strand to SEQ ID NO: 1178928
auagacccucaucaauuac

SEQ ID NO: 1178930 - RNA, 19 nt, Artificial Sequence
  Description of Artificial Sequence: Synthetic oligonucleotide
  Sense strand starting at position 2457 of SEQ ID NO: 916721
auggcacuucuagaucauu

SEQ ID NO: 1178931 - RNA, 19 nt, Artificial Sequence
  Description of Artificial Sequence: Synthetic oligonucleotide
  Antisense strand to SEQ ID NO: 1178930
aaugaucuagaagugccau

SEQ ID NO: 1178932 - RNA, 19 nt, Artificial Sequence
  Description of Artificial Sequence: Synthetic oligonucleotide
  Sense strand starting at position 2648 of SEQ ID NO: 916721
aagaguuuauuggcaguau

SEQ ID NO: 1178933 - RNA, 19 nt, Artificial Sequence
  Description of Artificial Sequence: Synthetic oligonucleotide
  Antisense strand to SEQ ID NO: 1178932
auacugccaauaaacucuu

SEQ ID NO: 1178934 - RNA, 19 nt, Artificial Sequence
  Description of Artificial Sequence: Synthetic oligonucleotide
  Sense strand starting at position 2652 of SEQ ID NO: 916721
guuuauuggcaguaugaaa

SEQ ID NO: 1178935 - RNA, 19 nt, Artificial Sequence
  Description of Artificial Sequence: Synthetic oligonucleotide
  Antisense strand to SEQ ID NO: 1178934
uuucauacugccaauaaac

SEQ ID NO: 1178936 - RNA, 19 nt, Artificial Sequence
  Description of Artificial Sequence: Synthetic oligonucleotide
  Sense strand starting at position 2796 of SEQ ID NO: 916721
auggaaauguccuuauaag

SEQ ID NO: 1178937 - RNA, 19 nt, Artificial Sequence
  Description of Artificial Sequence: Synthetic oligonucleotide
  Antisense strand to SEQ ID NO: 1178936
cuuauaaggacauuuccau

SEQ ID NO: 1178938 - RNA, 19 nt, Artificial Sequence
  Description of Artificial Sequence: Synthetic oligonucleotide
  Sense strand starting at position 2840 of SEQ ID NO: 916721
aucauuccugaaggcauau

SEQ ID NO: 1178939 - RNA, 19 nt, Artificial Sequence
  Description of Artificial Sequence: Synthetic oligonucleotide
  Antisense strand to SEQ ID NO: 1178938
auaugccuucaggaaugau

SEQ ID NO: 1178940 - RNA, 19 nt, Artificial Sequence
  Description of Artificial Sequence: Synthetic oligonucleotide
  Sense strand starting at position 2990 of SEQ ID NO: 916721
aaugacucacgauguggaa

SEQ ID NO: 1178941 - RNA, 19 nt, Artificial Sequence
  Description of Artificial Sequence: Synthetic oligonucleotide
  Antisense strand to SEQ ID NO: 1178940
uuccacaucgugagucauu

SEQ ID NO: 1178942 - RNA, 19 nt, Artificial Sequence
  Description of Artificial Sequence: Synthetic oligonucleotide
  Sense strand starting at position 2992 of SEQ ID NO: 916721
ugacucacgauguggaaau

SEQ ID NO: 1178943 - RNA, 19 nt, Artificial Sequence
  Description of Artificial Sequence: Synthetic oligonucleotide
  Antisense strand to SEQ ID NO: 1178942
auuuccacaucgugaguca

SEQ ID NO: 1178944 - RNA, 19 nt, Artificial Sequence
  Description of Artificial Sequence: Synthetic oligonucleotide
  Sense strand starting at position 3098 of SEQ ID NO: 916721
ucuguaauuguuugauagg

SEQ ID NO: 1178945 - RNA, 19 nt, Artificial Sequence
  Description of Artificial Sequence: Synthetic oligonucleotide
  Antisense strand to SEQ ID NO: 1178944
ccuaucaaacaauuacaga

SEQ ID NO: 1178946 - RNA, 19 nt, Artificial Sequence
  Description of Artificial Sequence: Synthetic oligonucleotide
  Sense strand starting at position 3107 of SEQ ID NO: 916721
guuugauaggagggacuau

SEQ ID NO: 1178947 - RNA, 19 nt, Artificial Sequence
  Description of Artificial Sequence: Synthetic oligonucleotide
  Antisense strand to SEQ ID NO: 1178946
auagucccuccuaucaaac

SEQ ID NO: 1178948 - RNA, 19 nt, Artificial Sequence
  Description of Artificial Sequence: Synthetic oligonucleotide
  Sense strand starting at position 3449 of SEQ ID NO: 916721
ggcagauagagucaguaca

SEQ ID NO: 1178949 - RNA, 19 nt, Artificial Sequence
  Description of Artificial Sequence: Synthetic oligonucleotide
  Antisense strand to SEQ ID NO: 1178948
uguacugacucuaucugcc

SEQ ID NO: 1178950 - RNA, 19 nt, Artificial Sequence
  Description of Artificial Sequence: Synthetic oligonucleotide
  Sense strand starting at position 3451 of SEQ ID NO: 916721
cagauagagucaguacaga

SEQ ID NO: 1178951 - RNA, 19 nt, Artificial Sequence
  Description of Artificial Sequence: Synthetic oligonucleotide
  Antisense strand to SEQ ID NO: 1178950
ucuguacugacucuaucug

SEQ ID NO: 1178952 - RNA, 19 nt, Artificial Sequence
  Description of Artificial Sequence: Synthetic oligonucleotide
  Sense strand starting at position 3660 of SEQ ID NO: 916721
gcaggaagcuccuucuaga

SEQ ID NO: 1178953 - RNA, 19 nt, Artificial Sequence
  Description of Artificial Sequence: Synthetic oligonucleotide
  Antisense strand to SEQ ID NO: 1178952
ucuagaaggagcuuccugc

SEQ ID NO: 1178954 - RNA, 19 nt, Artificial Sequence
  Description of Artificial Sequence: Synthetic oligonucleotide
  Sense strand starting at position 3677 of SEQ ID NO: 916721
gaagccuuggguggguaau

SEQ ID NO: 1178955 - RNA, 19 nt, Artificial Sequence
  Description of Artificial Sequence: Synthetic oligonucleotide
  Antisense strand to SEQ ID NO: 1178954
auuacccacccaaggcuuc

SEQ ID NO: 1178956 - RNA, 19 nt, Artificial Sequence
  Description of Artificial Sequence: Synthetic oligonucleotide
  Sense strand starting at position 3679 of SEQ ID NO: 916721
agccuuggguggguaauuu

SEQ ID NO: 1178957 - RNA, 19 nt, Artificial Sequence
  Description of Artificial Sequence: Synthetic oligonucleotide
  Antisense strand to SEQ ID NO: 1178956
aaauuacccacccaaggcu

SEQ ID NO: 1178958 - RNA, 19 nt, Artificial Sequence
  Description of Artificial Sequence: Synthetic oligonucleotide
  Sense strand starting at position 3748 of SEQ ID NO: 916721
uggacagucucugcugaaa

SEQ ID NO: 1178959 - RNA, 19 nt, Artificial Sequence
  Description of Artificial Sequence: Synthetic oligonucleotide
  Antisense strand to SEQ ID NO: 1178958
uuucagcagagacugucca

SEQ ID NO: 1178960 - RNA, 19 nt, Artificial Sequence
  Description of Artificial Sequence: Synthetic oligonucleotide
  Sense strand starting at position 93 of SEQ ID NO: 916722
gaaguaaguuaagugaugu

SEQ ID NO: 1178961 - RNA, 19 nt, Artificial Sequence
  Description of Artificial Sequence: Synthetic oligonucleotide
  Antisense strand to SEQ ID NO: 1178960
acaucacuuaacuuacuuc

SEQ ID NO: 1178962 - RNA, 19 nt, Artificial Sequence
  Description of Artificial Sequence: Synthetic oligonucleotide
  Sense strand starting at position 104 of SEQ ID NO: 916722
agugauguaauugggcauu

SEQ ID NO: 1178963 - RNA, 19 nt, Artificial Sequence
  Description of Artificial Sequence: Synthetic oligonucleotide
  Antisense strand to SEQ ID NO: 1178962
aaugcccaauuacaucacu

SEQ ID NO: 1178964 - RNA, 19 nt, Artificial Sequence
  Description of Artificial Sequence: Synthetic oligonucleotide
  Sense strand starting at position 152 of SEQ ID NO: 916722
auaucuaguugacuuacua

SEQ ID NO: 1178965 - RNA, 19 nt, Artificial Sequence
  Description of Artificial Sequence: Synthetic oligonucleotide
  Antisense strand to SEQ ID NO: 1178964
uaguaagucaacuagauau

SEQ ID NO: 1178966 - RNA, 19 nt, Artificial Sequence
  Description of Artificial Sequence: Synthetic oligonucleotide
  Sense strand starting at position 167 of SEQ ID NO: 916722
acuacaugagcccaguuaa

SEQ ID NO: 1178967 - RNA, 19 nt, Artificial Sequence
  Description of Artificial Sequence: Synthetic oligonucleotide
  Antisense strand to SEQ ID NO: 1178966
uuaacugggcucauguagu

SEQ ID NO: 1178968 - RNA, 19 nt, Artificial Sequence
  Description of Artificial Sequence: Synthetic oligonucleotide
  Sense strand starting at position 208 of SEQ ID NO: 916722
gccuuuagagcugaaaguu

SEQ ID NO: 1178969 - RNA, 19 nt, Artificial Sequence
  Description of Artificial Sequence: Synthetic oligonucleotide
  Antisense strand to SEQ ID NO: 1178968
aacuuucagcucuaaaggc

SEQ ID NO: 1178970 - RNA, 19 nt, Artificial Sequence
  Description of Artificial Sequence: Synthetic oligonucleotide
  Sense strand starting at position 341 of SEQ ID NO: 916722
auuugaaucucuggaugaa

SEQ ID NO: 1178971 - RNA, 19 nt, Artificial Sequence
  Description of Artificial Sequence: Synthetic oligonucleotide
  Antisense strand to SEQ ID NO: 1178970
uucauccagagauucaaau

SEQ ID NO: 1178972 - RNA, 19 nt, Artificial Sequence
  Description of Artificial Sequence: Synthetic oligonucleotide
  Sense strand starting at position 344 of SEQ ID NO: 916722
ugaaucucuggaugaaggu

SEQ ID NO: 1178973 - RNA, 19 nt, Artificial Sequence
  Description of Artificial Sequence: Synthetic oligonucleotide
  Antisense strand to SEQ ID NO: 1178972
accuucauccagagauuca

SEQ ID NO: 1178974 - RNA, 19 nt, Artificial Sequence
  Description of Artificial Sequence: Synthetic oligonucleotide
  Sense strand starting at position 491 of SEQ ID NO: 916722
gcccauaccuaaguguuga

SEQ ID NO: 1178975 - RNA, 19 nt, Artificial Sequence
  Description of Artificial Sequence: Synthetic oligonucleotide
  Antisense strand to SEQ ID NO: 1178974
ucaacacuuagguaugggc

SEQ ID NO: 1178976 - RNA, 19 nt, Artificial Sequence
  Description of Artificial Sequence: Synthetic oligonucleotide
  Sense strand starting at position 514 of SEQ ID NO: 916722
uugguaagaacuuggacuu

SEQ ID NO: 1178977 - RNA, 19 nt, Artificial Sequence
  Description of Artificial Sequence: Synthetic oligonucleotide
  Antisense strand to SEQ ID NO: 1178976
aaguccaaguucuuaccaa

SEQ ID NO: 1178978 - RNA, 19 nt, Artificial Sequence
  Description of Artificial Sequence: Synthetic oligonucleotide
  Sense strand starting at position 527 of SEQ ID NO: 916722
ggacuugaaugaccuaagu

SEQ ID NO: 1178979 - RNA, 19 nt, Artificial Sequence
  Description of Artificial Sequence: Synthetic oligonucleotide
  Antisense strand to SEQ ID NO: 1178978
acuuaggucauucaagucc

SEQ ID NO: 1178980 - RNA, 19 nt, Artificial Sequence
  Description of Artificial Sequence: Synthetic oligonucleotide
  Sense strand starting at position 661 of SEQ ID NO: 916722
aaggacguucucugauacu

SEQ ID NO: 1178981 - RNA, 19 nt, Artificial Sequence
  Description of Artificial Sequence: Synthetic oligonucleotide
  Antisense strand to SEQ ID NO: 1178980
aguaucagagaacguccuu

SEQ ID NO: 1178982 - RNA, 19 nt, Artificial Sequence
  Description of Artificial Sequence: Synthetic oligonucleotide
  Sense strand starting at position 681 of SEQ ID NO: 916722
ugcuguuuggguuauuacu

SEQ ID NO: 1178983 - RNA, 19 nt, Artificial Sequence
  Description of Artificial Sequence: Synthetic oligonucleotide
  Antisense strand to SEQ ID NO: 1178982
aguaauaacccaaacagca

SEQ ID NO: 1178984 - RNA, 19 nt, Artificial Sequence
  Description of Artificial Sequence: Synthetic oligonucleotide
  Sense strand starting at position 683 of SEQ ID NO: 916722
cuguuuggguuauuacuca

SEQ ID NO: 1178985 - RNA, 19 nt, Artificial Sequence
  Description of Artificial Sequence: Synthetic oligonucleotide
  Antisense strand to SEQ ID NO: 1178984
ugaguaauaacccaaacag

SEQ ID NO: 1178986 - RNA, 19 nt, Artificial Sequence
  Description of Artificial Sequence: Synthetic oligonucleotide
  Sense strand starting at position 687 of SEQ ID NO: 916722
uuggguuauuacucaagag

SEQ ID NO: 1178987 - RNA, 19 nt, Artificial Sequence
  Description of Artificial Sequence: Synthetic oligonucleotide
  Antisense strand to SEQ ID NO: 1178986
cucuugaguaauaacccaa

SEQ ID NO: 1178988 - RNA, 19 nt, Artificial Sequence
  Description of Artificial Sequence: Synthetic oligonucleotide
  Sense strand starting at position 755 of SEQ ID NO: 916722
ccugaugaauggcuccauu

SEQ ID NO: 1178989 - RNA, 19 nt, Artificial Sequence
  Description of Artificial Sequence: Synthetic oligonucleotide
  Antisense strand to SEQ ID NO: 1178988
aauggagccauucaucagg

SEQ ID NO: 1178990 - RNA, 19 nt, Artificial Sequence
  Description of Artificial Sequence: Synthetic oligonucleotide
  Sense strand starting at position 879 of SEQ ID NO: 916722
aaauuauuccaggguuuga

SEQ ID NO: 1178991 - RNA, 19 nt, Artificial Sequence
  Description of Artificial Sequence: Synthetic oligonucleotide
  Antisense strand to SEQ ID NO: 1178990
ucaaacccuggaauaauuu

SEQ ID NO: 1178992 - RNA, 19 nt, Artificial Sequence
  Description of Artificial Sequence: Synthetic oligonucleotide
  Sense strand starting at position 883 of SEQ ID NO: 916722
uauuccaggguuugacaau

SEQ ID NO: 1178993 - RNA, 19 nt, Artificial Sequence
  Description of Artificial Sequence: Synthetic oligonucleotide
  Antisense strand to SEQ ID NO: 1178992
auugucaaacccuggaaua

SEQ ID NO: 1178994 - RNA, 19 nt, Artificial Sequence
  Description of Artificial Sequence: Synthetic oligonucleotide
  Sense strand starting at position 1130 of SEQ ID NO: 916722
uuuguaucccuggaacuca

SEQ ID NO: 1178995 - RNA, 19 nt, Artificial Sequence
  Description of Artificial Sequence: Synthetic oligonucleotide
  Antisense strand to SEQ ID NO: 1178994
ugaguuccagggauacaaa

SEQ ID NO: 1178996 - RNA, 19 nt, Artificial Sequence
  Description of Artificial Sequence: Synthetic oligonucleotide
  Sense strand starting at position 1268 of SEQ ID NO: 916722
ccugaaguuauagaugguu

SEQ ID NO: 1178997 - RNA, 19 nt, Artificial Sequence
  Description of Artificial Sequence: Synthetic oligonucleotide
  Antisense strand to SEQ ID NO: 1178996
aaccaucuauaacuucagg

SEQ ID NO: 1178998 - RNA, 19 nt, Artificial Sequence
  Description of Artificial Sequence: Synthetic oligonucleotide
  Sense strand starting at position 1291 of SEQ ID NO: 916722
cuuguaaaucuugaagguu

SEQ ID NO: 1178999 - RNA, 19 nt, Artificial Sequence
  Description of Artificial Sequence: Synthetic oligonucleotide
  Antisense strand to SEQ ID NO: 1178998
aaccuucaagauuuacaag

SEQ ID NO: 1179000 - RNA, 19 nt, Artificial Sequence
  Description of Artificial Sequence: Synthetic oligonucleotide
  Sense strand starting at position 1294 of SEQ ID NO: 916722
guaaaucuugaagguuaca

SEQ ID NO: 1179001 - RNA, 19 nt, Artificial Sequence
  Description of Artificial Sequence: Synthetic oligonucleotide
  Antisense strand to SEQ ID NO: 1179000
uguaaccuucaagauuuac

SEQ ID NO: 1179002 - RNA, 19 nt, Artificial Sequence
  Description of Artificial Sequence: Synthetic oligonucleotide
  Sense strand starting at position 1314 of SEQ ID NO: 916722
ccguaugugguguugucua

SEQ ID NO: 1179003 - RNA, 19 nt, Artificial Sequence
  Description of Artificial Sequence: Synthetic oligonucleotide
  Antisense strand to SEQ ID NO: 1179002
uagacaacaccacauacgg

SEQ ID NO: 1179004 - RNA, 19 nt, Artificial Sequence
  Description of Artificial Sequence: Synthetic oligonucleotide
  Sense strand starting at position 1365 of SEQ ID NO: 916722
gugucacugcuauagauga

SEQ ID NO: 1179005 - RNA, 19 nt, Artificial Sequence
  Description of Artificial Sequence: Synthetic oligonucleotide
  Antisense strand to SEQ ID NO: 1179004
ucaucuauagcagugacac

SEQ ID NO: 1179006 - RNA, 19 nt, Artificial Sequence
  Description of Artificial Sequence: Synthetic oligonucleotide
  Sense strand starting at position 1724 of SEQ ID NO: 916722
ugcuuugacagcuggauaa

SEQ ID NO: 1179007 - RNA, 19 nt, Artificial Sequence
  Description of Artificial Sequence: Synthetic oligonucleotide
  Antisense strand to SEQ ID NO: 1179006
uuauccagcugucaaagca

SEQ ID NO: 1179008 - RNA, 19 nt, Artificial Sequence
  Description of Artificial Sequence: Synthetic oligonucleotide
  Sense strand starting at position 1963 of SEQ ID NO: 916722
cucagcauugcgcucagua

SEQ ID NO: 1179009 - RNA, 19 nt, Artificial Sequence
  Description of Artificial Sequence: Synthetic oligonucleotide
  Antisense strand to SEQ ID NO: 1179008
uacugagcgcaaugcugag

SEQ ID NO: 1179010 - RNA, 19 nt, Artificial Sequence
  Description of Artificial Sequence: Synthetic oligonucleotide
  Sense strand starting at position 2516 of SEQ ID NO: 916722
gcuugcucccugucacuuu

SEQ ID NO: 1179011 - RNA, 19 nt, Artificial Sequence
  Description of Artificial Sequence: Synthetic oligonucleotide
  Antisense strand to SEQ ID NO: 1179010
aaagugacagggagcaagc

SEQ ID NO: 1179012 - RNA, 19 nt, Artificial Sequence
  Description of Artificial Sequence: Synthetic oligonucleotide
  Sense strand starting at position 2681 of SEQ ID NO: 916722
gcacucuuuccugaagucu

SEQ ID NO: 1179013 - RNA, 19 nt, Artificial Sequence
  Description of Artificial Sequence: Synthetic oligonucleotide
  Antisense strand to SEQ ID NO: 1179012
agacuucaggaaagagugc

SEQ ID NO: 1179014 - RNA, 19 nt, Artificial Sequence
  Description of Artificial Sequence: Synthetic oligonucleotide
  Sense strand starting at position 2737 of SEQ ID NO: 916722
uucauuugucccgguggca

SEQ ID NO: 1179015 - RNA, 19 nt, Artificial Sequence
  Description of Artificial Sequence: Synthetic oligonucleotide
  Antisense strand to SEQ ID NO: 1179014
ugccaccgggacaaaugaa

SEQ ID NO: 1179016 - RNA, 19 nt, Artificial Sequence
  Description of Artificial Sequence: Synthetic oligonucleotide
  Sense strand starting at position 2788 of SEQ ID NO: 916722
aaaggauugucagcuugac

SEQ ID NO: 1179017 - RNA, 19 nt, Artificial Sequence
  Description of Artificial Sequence: Synthetic oligonucleotide
  Antisense strand to SEQ ID NO: 1179016
gucaagcugacaauccuuu

SEQ ID NO: 1179018 - RNA, 19 nt, Artificial Sequence
  Description of Artificial Sequence: Synthetic oligonucleotide
  Sense strand starting at position 2792 of SEQ ID NO: 916722
gauugucagcuugaccauu

SEQ ID NO: 1179019 - RNA, 19 nt, Artificial Sequence
  Description of Artificial Sequence: Synthetic oligonucleotide
  Antisense strand to SEQ ID NO: 1179018
aauggucaagcugacaauc

SEQ ID NO: 1179020 - RNA, 19 nt, Artificial Sequence
  Description of Artificial Sequence: Synthetic oligonucleotide
  Sense strand starting at position 2846 of SEQ ID NO: 916722
agguuuguauccucccuaa

SEQ ID NO: 1179021 - RNA, 19 nt, Artificial Sequence
  Description of Artificial Sequence: Synthetic oligonucleotide
  Antisense strand to SEQ ID NO: 1179020
uuagggaggauacaaaccu

SEQ ID NO: 1179022 - RNA, 19 nt, Artificial Sequence
  Description of Artificial Sequence: Synthetic oligonucleotide
  Sense strand starting at position 2877 of SEQ ID NO: 916722
uagcgcuaacgacaaauau

SEQ ID NO: 1179023 - RNA, 19 nt, Artificial Sequence
  Description of Artificial Sequence: Synthetic oligonucleotide
  Antisense strand to SEQ ID NO: 1179022
auauuugucguuagcgcua

SEQ ID NO: 1179024 - RNA, 19 nt, Artificial Sequence
  Description of Artificial Sequence: Synthetic oligonucleotide
  Sense strand starting at position 2931 of SEQ ID NO: 916722
uuuaucauccaguaguuaa

SEQ ID NO: 1179025 - RNA, 19 nt, Artificial Sequence
  Description of Artificial Sequence: Synthetic oligonucleotide
  Antisense strand to SEQ ID NO: 1179024
uuaacuacuggaugauaaa

SEQ ID NO: 1179026 - RNA, 19 nt, Artificial Sequence
  Description of Artificial Sequence: Synthetic oligonucleotide
  Sense strand starting at position 2980 of SEQ ID NO: 916722
agaagacagccauguaaac

SEQ ID NO: 1179027 - RNA, 19 nt, Artificial Sequence
  Description of Artificial Sequence: Synthetic oligonucleotide
  Antisense strand to SEQ ID NO: 1179026
guuuacauggcugucuucu

SEQ ID NO: 1179028 - RNA, 19 nt, Artificial Sequence
  Description of Artificial Sequence: Synthetic oligonucleotide
  Sense strand starting at position 3026 of SEQ ID NO: 916722
gucagcucuccacaaguua

SEQ ID NO: 1179029 - RNA, 19 nt, Artificial Sequence
  Description of Artificial Sequence: Synthetic oligonucleotide
  Antisense strand to SEQ ID NO: 1179028
uaacuuguggagagcugac

SEQ ID NO: 1179030 - RNA, 19 nt, Artificial Sequence
  Description of Artificial Sequence: Synthetic oligonucleotide
  Sense strand starting at position 3353 of SEQ ID NO: 916722
cuauguuauugucuacuau

SEQ ID NO: 1179031 - RNA, 19 nt, Artificial Sequence
  Description of Artificial Sequence: Synthetic oligonucleotide
  Antisense strand to SEQ ID NO: 1179030
auaguagacaauaacauag

SEQ ID NO: 1179032 - RNA, 19 nt, Artificial Sequence
  Description of Artificial Sequence: Synthetic oligonucleotide
  Sense strand starting at position 3377 of SEQ ID NO: 916722
cugugucuacuuugaggaa

SEQ ID NO: 1179033 - RNA, 19 nt, Artificial Sequence
  Description of Artificial Sequence: Synthetic oligonucleotide
  Antisense strand to SEQ ID NO: 1179032
uuccucaaaguagacacag

SEQ ID NO: 1179034 - RNA, 19 nt, Artificial Sequence
  Description of Artificial Sequence: Synthetic oligonucleotide
  Sense strand starting at position 3381 of SEQ ID NO: 916722
gucuacuuugaggaaaguu

SEQ ID NO: 1179035 - RNA, 19 nt, Artificial Sequence
  Description of Artificial Sequence: Synthetic oligonucleotide
  Antisense strand to SEQ ID NO: 1179034
aacuuuccucaaaguagac

SEQ ID NO: 1179036 - RNA, 19 nt, Artificial Sequence
  Description of Artificial Sequence: Synthetic oligonucleotide
  Sense strand starting at position 3910 of SEQ ID NO: 916722
ccuagaacaucuguguauu

SEQ ID NO: 1179037 - RNA, 19 nt, Artificial Sequence
  Description of Artificial Sequence: Synthetic oligonucleotide
  Antisense strand to SEQ ID NO: 1179036
aauacacagauguucuagg

SEQ ID NO: 1179038 - RNA, 19 nt, Artificial Sequence
  Description of Artificial Sequence: Synthetic oligonucleotide
  Sense strand starting at position 3922 of SEQ ID NO: 916722
guguauuucugggaacaaa

SEQ ID NO: 1179039 - RNA, 19 nt, Artificial Sequence
  Description of Artificial Sequence: Synthetic oligonucleotide
  Antisense strand to SEQ ID NO: 1179038
uuuguucccagaaauacac

SEQ ID NO: 1179040 - RNA, 19 nt, Artificial Sequence
  Description of Artificial Sequence: Synthetic oligonucleotide
  Sense strand starting at position 22 of SEQ ID NO: 916723
cauagugacuugguuucua

SEQ ID NO: 1179041 - RNA, 19 nt, Artificial Sequence
  Description of Artificial Sequence: Synthetic oligonucleotide
  Antisense strand to SEQ ID NO: 1179040
uagaaaccaagucacuaug

SEQ ID NO: 1179042 - RNA, 19 nt, Artificial Sequence
  Description of Artificial Sequence: Synthetic oligonucleotide
  Sense strand starting at position 141 of SEQ ID NO: 916723
uuaugauguguaugaaaga

SEQ ID NO: 1179043 - RNA, 19 nt, Artificial Sequence
  Description of Artificial Sequence: Synthetic oligonucleotide
  Antisense strand to SEQ ID NO: 1179042
ucuuucauacacaucauaa

SEQ ID NO: 1179044 - RNA, 19 nt, Artificial Sequence
  Description of Artificial Sequence: Synthetic oligonucleotide
  Sense strand starting at position 294 of SEQ ID NO: 916723
gcuguuucucccugaauuu

SEQ ID NO: 1179045 - RNA, 19 nt, Artificial Sequence
  Description of Artificial Sequence: Synthetic oligonucleotide
  Antisense strand to SEQ ID NO: 1179044
aaauucagggagaaacagc

SEQ ID NO: 1179046 - RNA, 19 nt, Artificial Sequence
  Description of Artificial Sequence: Synthetic oligonucleotide
  Sense strand starting at position 427 of SEQ ID NO: 916723
gcauauaagcaagaaguga

SEQ ID NO: 1179047 - RNA, 19 nt, Artificial Sequence
  Description of Artificial Sequence: Synthetic oligonucleotide
  Antisense strand to SEQ ID NO: 1179046
ucacuucuugcuuauaugc

SEQ ID NO: 1179048 - RNA, 19 nt, Artificial Sequence
  Description of Artificial Sequence: Synthetic oligonucleotide
  Sense strand starting at position 481 of SEQ ID NO: 916723
ggcauccauuucuagggaa

SEQ ID NO: 1179049 - RNA, 19 nt, Artificial Sequence
  Description of Artificial Sequence: Synthetic oligonucleotide
  Antisense strand to SEQ ID NO: 1179048
uucccuagaaauggaugcc

SEQ ID NO: 1179050 - RNA, 19 nt, Artificial Sequence
  Description of Artificial Sequence: Synthetic oligonucleotide
  Sense strand starting at position 505 of SEQ ID NO: 916723
cacugugguccugaaagga

SEQ ID NO: 1179051 - RNA, 19 nt, Artificial Sequence
  Description of Artificial Sequence: Synthetic oligonucleotide
  Antisense strand to SEQ ID NO: 1179050
uccuuucaggaccacagug

SEQ ID NO: 1179052 - RNA, 19 nt, Artificial Sequence
  Description of Artificial Sequence: Synthetic oligonucleotide
  Sense strand starting at position 697 of SEQ ID NO: 916723
acaguauaguugucaaacu

SEQ ID NO: 1179053 - RNA, 19 nt, Artificial Sequence
  Description of Artificial Sequence: Synthetic oligonucleotide
  Antisense strand to SEQ ID NO: 1179052
aguuugacaacuauacugu

SEQ ID NO: 1179054 - RNA, 19 nt, Artificial Sequence
  Description of Artificial Sequence: Synthetic oligonucleotide
  Sense strand starting at position 992 of SEQ ID NO: 916723
guccauuuguguccaggga

SEQ ID NO: 1179055 - RNA, 19 nt, Artificial Sequence
  Description of Artificial Sequence: Synthetic oligonucleotide
  Antisense strand to SEQ ID NO: 1179054
ucccuggacacaaauggac

SEQ ID NO: 1179056 - RNA, 19 nt, Artificial Sequence
  Description of Artificial Sequence: Synthetic oligonucleotide
  Sense strand starting at position 1023 of SEQ ID NO: 916723
uccacucuccaguguauaa

SEQ ID NO: 1179057 - RNA, 19 nt, Artificial Sequence
  Description of Artificial Sequence: Synthetic oligonucleotide
  Antisense strand to SEQ ID NO: 1179056
uuauacacuggagagugga

SEQ ID NO: 1179058 - RNA, 19 nt, Artificial Sequence
  Description of Artificial Sequence: Synthetic oligonucleotide
  Sense strand starting at position 1036 of SEQ ID NO: 916723
guauaauuccagcaguaag

SEQ ID NO: 1179059 - RNA, 19 nt, Artificial Sequence
  Description of Artificial Sequence: Synthetic oligonucleotide
  Antisense strand to SEQ ID NO: 1179058
cuuacugcuggaauuauac

SEQ ID NO: 1179060 - RNA, 19 nt, Artificial Sequence
  Description of Artificial Sequence: Synthetic oligonucleotide
  Sense strand starting at position 1233 of SEQ ID NO: 916723
ggagcaaacuucccuuauu

SEQ ID NO: 1179061 - RNA, 19 nt, Artificial Sequence
  Description of Artificial Sequence: Synthetic oligonucleotide
  Antisense strand to SEQ ID NO: 1179060
aauaagggaaguuugcucc

SEQ ID NO: 1179062 - RNA, 19 nt, Artificial Sequence
  Description of Artificial Sequence: Synthetic oligonucleotide
  Sense strand starting at position 2051 of SEQ ID NO: 916723
cugaccucucuugagcaau

SEQ ID NO: 1179063 - RNA, 19 nt, Artificial Sequence
  Description of Artificial Sequence: Synthetic oligonucleotide
  Antisense strand to SEQ ID NO: 1179062
auugcucaagagaggucag

SEQ ID NO: 1179064 - RNA, 19 nt, Artificial Sequence
  Description of Artificial Sequence: Synthetic oligonucleotide
  Sense strand starting at position 2149 of SEQ ID NO: 916723
gguaguugugacuguagaa

SEQ ID NO: 1179065 - RNA, 19 nt, Artificial Sequence
  Description of Artificial Sequence: Synthetic oligonucleotide
  Antisense strand to SEQ ID NO: 1179064
uucuacagucacaacuacc

SEQ ID NO: 1179066 - RNA, 19 nt, Artificial Sequence
  Description of Artificial Sequence: Synthetic oligonucleotide
  Sense strand starting at position 2196 of SEQ ID NO: 916723
gugugauaggaaggguauu

SEQ ID NO: 1179067 - RNA, 19 nt, Artificial Sequence
  Description of Artificial Sequence: Synthetic oligonucleotide
  Antisense strand to SEQ ID NO: 1179066
aauacccuuccuaucacac

SEQ ID NO: 1179068 - RNA, 19 nt, Artificial Sequence
  Description of Artificial Sequence: Synthetic oligonucleotide
  Sense strand starting at position 2428 of SEQ ID NO: 916723
auguaugacccuugaacaa

SEQ ID NO: 1179069 - RNA, 19 nt, Artificial Sequence
  Description of Artificial Sequence: Synthetic oligonucleotide
  Antisense strand to SEQ ID NO: 1179068
uuguucaagggucauacau

SEQ ID NO: 1179070 - RNA, 19 nt, Artificial Sequence
  Description of Artificial Sequence: Synthetic oligonucleotide
  Sense strand starting at position 2457 of SEQ ID NO: 916723
aacuguuggguccaguuau

SEQ ID NO: 1179071 - RNA, 19 nt, Artificial Sequence
  Description of Artificial Sequence: Synthetic oligonucleotide
  Antisense strand to SEQ ID NO: 1179070
auaacuggacccaacaguu

SEQ ID NO: 1179072 - RNA, 19 nt, Artificial Sequence
  Description of Artificial Sequence: Synthetic oligonucleotide
  Sense strand starting at position 2983 of SEQ ID NO: 916723
uaaagauaagucugucgaa

SEQ ID NO: 1179073 - RNA, 19 nt, Artificial Sequence
  Description of Artificial Sequence: Synthetic oligonucleotide
  Antisense strand to SEQ ID NO: 1179072
uucgacagacuuaucuuua

SEQ ID NO: 1179074 - RNA, 19 nt, Artificial Sequence
  Description of Artificial Sequence: Synthetic oligonucleotide
  Sense strand starting at position 2998 of SEQ ID NO: 916723
cgaaaucaacucugguaug

SEQ ID NO: 1179075 - RNA, 19 nt, Artificial Sequence
  Description of Artificial Sequence: Synthetic oligonucleotide
  Antisense strand to SEQ ID NO: 1179074
cauaccagaguugauuucg

SEQ ID NO: 1179076 - RNA, 19 nt, Artificial Sequence
  Description of Artificial Sequence: Synthetic oligonucleotide
  Sense strand starting at position 3063 of SEQ ID NO: 916723
ugcugugcccugucaguau

SEQ ID NO: 1179077 - RNA, 19 nt, Artificial Sequence
  Description of Artificial Sequence: Synthetic oligonucleotide
  Antisense strand to SEQ ID NO: 1179076
auacugacagggcacagca

SEQ ID NO: 1179078 - RNA, 19 nt, Artificial Sequence
  Description of Artificial Sequence: Synthetic oligonucleotide
  Sense strand starting at position 3083 of SEQ ID NO: 916723
ggaacuuauuuauaccuga

SEQ ID NO: 1179079 - RNA, 19 nt, Artificial Sequence
  Description of Artificial Sequence: Synthetic oligonucleotide
  Antisense strand to SEQ ID NO: 1179078
ucagguauaaauaaguucc

SEQ ID NO: 1179080 - RNA, 19 nt, Artificial Sequence
  Description of Artificial Sequence: Synthetic oligonucleotide
  Sense strand starting at position 3098 of SEQ ID NO: 916723
cugagacaugcuugggcaa

SEQ ID NO: 1179081 - RNA, 19 nt, Artificial Sequence
  Description of Artificial Sequence: Synthetic oligonucleotide
  Antisense strand to SEQ ID NO: 1179080
uugcccaagcaugucucag

SEQ ID NO: 1179082 - RNA, 19 nt, Artificial Sequence
  Description of Artificial Sequence: Synthetic oligonucleotide
  Sense strand starting at position 3134 of SEQ ID NO: 916723
cacccuggucaugaaugua

SEQ ID NO: 1179083 - RNA, 19 nt, Artificial Sequence
  Description of Artificial Sequence: Synthetic oligonucleotide
  Antisense strand to SEQ ID NO: 1179082
uacauucaugaccagggug

SEQ ID NO: 1179084 - RNA, 19 nt, Artificial Sequence
  Description of Artificial Sequence: Synthetic oligonucleotide
  Sense strand starting at position 3153 of SEQ ID NO: 916723
gguguucaggcauagacuu

SEQ ID NO: 1179085 - RNA, 19 nt, Artificial Sequence
  Description of Artificial Sequence: Synthetic oligonucleotide
  Antisense strand to SEQ ID NO: 1179084
aagucuaugccugaacacc

SEQ ID NO: 1179086 - RNA, 19 nt, Artificial Sequence
  Description of Artificial Sequence: Synthetic oligonucleotide
  Sense strand starting at position 3190 of SEQ ID NO: 916723
ggagugguggccugagaaa

SEQ ID NO: 1179087 - RNA, 19 nt, Artificial Sequence
  Description of Artificial Sequence: Synthetic oligonucleotide
  Antisense strand to SEQ ID NO: 1179086
uuucucaggccaccacucc

SEQ ID NO: 1179088 - RNA, 19 nt, Artificial Sequence
  Description of Artificial Sequence: Synthetic oligonucleotide
  Sense strand starting at position 3263 of SEQ ID NO: 916723
uaaucauuugguuguuguu

SEQ ID NO: 1179089 - RNA, 19 nt, Artificial Sequence
  Description of Artificial Sequence: Synthetic oligonucleotide
  Antisense strand to SEQ ID NO: 1179088
aacaacaaccaaaugauua

SEQ ID NO: 1179090 - RNA, 19 nt, Artificial Sequence
  Description of Artificial Sequence: Synthetic oligonucleotide
  Sense strand starting at position 3285 of SEQ ID NO: 916723
augugucuuaaggaagcuu

SEQ ID NO: 1179091 - RNA, 19 nt, Artificial Sequence
  Description of Artificial Sequence: Synthetic oligonucleotide
  Antisense strand to SEQ ID NO: 1179090
aagcuuccuuaagacacau

SEQ ID NO: 1179092 - RNA, 19 nt, Artificial Sequence
  Description of Artificial Sequence: Synthetic oligonucleotide
  Sense strand starting at position 3314 of SEQ ID NO: 916723
auguuuacauaagugugaa

SEQ ID NO: 1179093 - RNA, 19 nt, Artificial Sequence
  Description of Artificial Sequence: Synthetic oligonucleotide
  Antisense strand to SEQ ID NO: 1179092
uucacacuuauguaaacau

SEQ ID NO: 1179094 - RNA, 19 nt, Artificial Sequence
  Description of Artificial Sequence: Synthetic oligonucleotide
  Sense strand starting at position 3475 of SEQ ID NO: 916723
gauacauauguguaugcau

SEQ ID NO: 1179095 - RNA, 19 nt, Artificial Sequence
  Description of Artificial Sequence: Synthetic oligonucleotide
  Antisense strand to SEQ ID NO: 1179094
augcauacacauauguauc

SEQ ID NO: 1179096 - RNA, 19 nt, Artificial Sequence
  Description of Artificial Sequence: Synthetic oligonucleotide
  Sense strand starting at position 3515 of SEQ ID NO: 916723
uauguauaugcaugguaca

SEQ ID NO: 1179097 - RNA, 19 nt, Artificial Sequence
  Description of Artificial Sequence: Synthetic oligonucleotide
  Antisense strand to SEQ ID NO: 1179096
uguaccaugcauauacaua

SEQ ID NO: 1179098 - RNA, 19 nt, Artificial Sequence
  Description of Artificial Sequence: Synthetic oligonucleotide
  Sense strand starting at position 3516 of SEQ ID NO: 916723
auguauaugcaugguacau

SEQ ID NO: 1179099 - RNA, 19 nt, Artificial Sequence
  Description of Artificial Sequence: Synthetic oligonucleotide
  Antisense strand to SEQ ID NO: 1179098
auguaccaugcauauacau

SEQ ID NO: 1179100 - RNA, 19 nt, Artificial Sequence
  Description of Artificial Sequence: Synthetic oligonucleotide
  Sense strand starting at position 3624 of SEQ ID NO: 916723
ugagaauauuauccuuggu

SEQ ID NO: 1179101 - RNA, 19 nt, Artificial Sequence
  Description of Artificial Sequence: Synthetic oligonucleotide
  Antisense strand to SEQ ID NO: 1179100
accaaggauaauauucuca

SEQ ID NO: 1179102 - RNA, 19 nt, Artificial Sequence
  Description of Artificial Sequence: Synthetic oligonucleotide
  Sense strand starting at position 3626 of SEQ ID NO: 916723
agaauauuauccuuggugu

SEQ ID NO: 1179103 - RNA, 19 nt, Artificial Sequence
  Description of Artificial Sequence: Synthetic oligonucleotide
  Antisense strand to SEQ ID NO: 1179102
acaccaaggauaauauucu

SEQ ID NO: 1179104 - RNA, 19 nt, Artificial Sequence
  Description of Artificial Sequence: Synthetic oligonucleotide
  Sense strand starting at position 3627 of SEQ ID NO: 916723
gaauauuauccuugguguc

SEQ ID NO: 1179105 - RNA, 19 nt, Artificial Sequence
  Description of Artificial Sequence: Synthetic oligonucleotide
  Antisense strand to SEQ ID NO: 1179104
gacaccaaggauaauauuc

SEQ ID NO: 1179106 - RNA, 19 nt, Artificial Sequence
  Description of Artificial Sequence: Synthetic oligonucleotide
  Sense strand starting at position 3713 of SEQ ID NO: 916723
ucaucauugguuuggacau

SEQ ID NO: 1179107 - RNA, 19 nt, Artificial Sequence
  Description of Artificial Sequence: Synthetic oligonucleotide
  Antisense strand to SEQ ID NO: 1179106
auguccaaaccaaugauga

SEQ ID NO: 1179108 - RNA, 19 nt, Artificial Sequence
  Description of Artificial Sequence: Synthetic oligonucleotide
  Sense strand starting at position 3780 of SEQ ID NO: 916723
agacuuacgggcuaucuga

SEQ ID NO: 1179109 - RNA, 19 nt, Artificial Sequence
  Description of Artificial Sequence: Synthetic oligonucleotide
  Antisense strand to SEQ ID NO: 1179108
ucagauagcccguaagucu

SEQ ID NO: 1179110 - RNA, 19 nt, Artificial Sequence
  Description of Artificial Sequence: Synthetic oligonucleotide
  Sense strand starting at position 3824 of SEQ ID NO: 916723
auaggaacuuugguuuaau

SEQ ID NO: 1179111 - RNA, 19 nt, Artificial Sequence
  Description of Artificial Sequence: Synthetic oligonucleotide
  Antisense strand to SEQ ID NO: 1179110
auuaaaccaaaguuccuau

SEQ ID NO: 1179112 - RNA, 19 nt, Artificial Sequence
  Description of Artificial Sequence: Synthetic oligonucleotide
  Sense strand starting at position 3825 of SEQ ID NO: 916723
uaggaacuuugguuuaaua

SEQ ID NO: 1179113 - RNA, 19 nt, Artificial Sequence
  Description of Artificial Sequence: Synthetic oligonucleotide
  Antisense strand to SEQ ID NO: 1179112
uauuaaaccaaaguuccua

SEQ ID NO: 1179114 - RNA, 19 nt, Artificial Sequence
  Description of Artificial Sequence: Synthetic oligonucleotide
  Sense strand starting at position 3896 of SEQ ID NO: 916723
cucagaaguggcuguaaag

SEQ ID NO: 1179115 - RNA, 19 nt, Artificial Sequence
  Description of Artificial Sequence: Synthetic oligonucleotide
  Antisense strand to SEQ ID NO: 1179114
cuuuacagccacuucugag

SEQ ID NO: 1179116 - RNA, 19 nt, Artificial Sequence
  Description of Artificial Sequence: Synthetic oligonucleotide
  Sense strand starting at position 3906 of SEQ ID NO: 916723
gcuguaaagugaucuaauc

SEQ ID NO: 1179117 - RNA, 19 nt, Artificial Sequence
  Description of Artificial Sequence: Synthetic oligonucleotide
  Antisense strand to SEQ ID NO: 1179116
gauuagaucacuuuacagc

SEQ ID NO: 1179118 - RNA, 19 nt, Artificial Sequence
  Description of Artificial Sequence: Synthetic oligonucleotide
  Sense strand starting at position 3914 of SEQ ID NO: 916723
gugaucuaaucucuagaac

SEQ ID NO: 1179119 - RNA, 19 nt, Artificial Sequence
  Description of Artificial Sequence: Synthetic oligonucleotide
  Antisense strand to SEQ ID NO: 1179118
guucuagagauuagaucac

SEQ ID NO: 1179120 - RNA, 19 nt, Artificial Sequence
  Description of Artificial Sequence: Synthetic oligonucleotide
  Sense strand starting at position 86 of SEQ ID NO: 916724
uucccauuauuacuaguga

SEQ ID NO: 1179121 - RNA, 19 nt, Artificial Sequence
  Description of Artificial Sequence: Synthetic oligonucleotide
  Antisense strand to SEQ ID NO: 1179120
ucacuaguaauaaugggaa

SEQ ID NO: 1179122 - RNA, 19 nt, Artificial Sequence
  Description of Artificial Sequence: Synthetic oligonucleotide
  Sense strand starting at position 176 of SEQ ID NO: 916724
ucaagagauuucuguauuu

SEQ ID NO: 1179123 - RNA, 19 nt, Artificial Sequence
  Description of Artificial Sequence: Synthetic oligonucleotide
  Antisense strand to SEQ ID NO: 1179122
aaauacagaaaucucuuga

SEQ ID NO: 1179124 - RNA, 19 nt, Artificial Sequence
  Description of Artificial Sequence: Synthetic oligonucleotide
  Sense strand starting at position 349 of SEQ ID NO: 916724
guauuaacuuauucuugag

SEQ ID NO: 1179125 - RNA, 19 nt, Artificial Sequence
  Description of Artificial Sequence: Synthetic oligonucleotide
  Antisense strand to SEQ ID NO: 1179124
cucaagaauaaguuaauac

SEQ ID NO: 1179126 - RNA, 19 nt, Artificial Sequence
  Description of Artificial Sequence: Synthetic oligonucleotide
  Sense strand starting at position 355 of SEQ ID NO: 916724
acuuauucuugagucaaag

SEQ ID NO: 1179127 - RNA, 19 nt, Artificial Sequence
  Description of Artificial Sequence: Synthetic oligonucleotide
  Antisense strand to SEQ ID NO: 1179126
cuuugacucaagaauaagu

SEQ ID NO: 1179128 - RNA, 19 nt, Artificial Sequence
  Description of Artificial Sequence: Synthetic oligonucleotide
  Sense strand starting at position 573 of SEQ ID NO: 916724
acaggacucaguuguagua

SEQ ID NO: 1179129 - RNA, 19 nt, Artificial Sequence
  Description of Artificial Sequence: Synthetic oligonucleotide
  Antisense strand to SEQ ID NO: 1179128
uacuacaacugaguccugu

SEQ ID NO: 1179130 - RNA, 19 nt, Artificial Sequence
  Description of Artificial Sequence: Synthetic oligonucleotide
  Sense strand starting at position 623 of SEQ ID NO: 916724
aaggcaucacuguaguuau

SEQ ID NO: 1179131 - RNA, 19 nt, Artificial Sequence
  Description of Artificial Sequence: Synthetic oligonucleotide
  Antisense strand to SEQ ID NO: 1179130
auaacuacagugaugccuu

SEQ ID NO: 1179132 - RNA, 19 nt, Artificial Sequence
  Description of Artificial Sequence: Synthetic oligonucleotide
  Sense strand starting at position 654 of SEQ ID NO: 916724
ccauuauuggcagagcagu

SEQ ID NO: 1179133 - RNA, 19 nt, Artificial Sequence
  Description of Artificial Sequence: Synthetic oligonucleotide
  Antisense strand to SEQ ID NO: 1179132
acugcucugccaauaaugg

SEQ ID NO: 1179134 - RNA, 19 nt, Artificial Sequence
  Description of Artificial Sequence: Synthetic oligonucleotide
  Sense strand starting at position 886 of SEQ ID NO: 916724
gcaguauuagucuacacac

SEQ ID NO: 1179135 - RNA, 19 nt, Artificial Sequence
  Description of Artificial Sequence: Synthetic oligonucleotide
  Antisense strand to SEQ ID NO: 1179134
guguguagacuaauacugc

SEQ ID NO: 1179136 - RNA, 19 nt, Artificial Sequence
  Description of Artificial Sequence: Synthetic oligonucleotide
  Sense strand starting at position 888 of SEQ ID NO: 916724
aguauuagucuacacacua

SEQ ID NO: 1179137 - RNA, 19 nt, Artificial Sequence
  Description of Artificial Sequence: Synthetic oligonucleotide
  Antisense strand to SEQ ID NO: 1179136
uaguguguagacuaauacu

SEQ ID NO: 1179138 - RNA, 19 nt, Artificial Sequence
  Description of Artificial Sequence: Synthetic oligonucleotide
  Sense strand starting at position 1022 of SEQ ID NO: 916724
ucauucugaccuggugaau

SEQ ID NO: 1179139 - RNA, 19 nt, Artificial Sequence
  Description of Artificial Sequence: Synthetic oligonucleotide
  Antisense strand to SEQ ID NO: 1179138
auucaccaggucagaauga

SEQ ID NO: 1179140 - RNA, 19 nt, Artificial Sequence
  Description of Artificial Sequence: Synthetic oligonucleotide
  Sense strand starting at position 1034 of SEQ ID NO: 916724
ggugaauaacucuguuuau

SEQ ID NO: 1179141 - RNA, 19 nt, Artificial Sequence
  Description of Artificial Sequence: Synthetic oligonucleotide
  Antisense strand to SEQ ID NO: 1179140
auaaacagaguuauucacc

SEQ ID NO: 1179142 - RNA, 19 nt, Artificial Sequence
  Description of Artificial Sequence: Synthetic oligonucleotide
  Sense strand starting at position 1035 of SEQ ID NO: 916724
gugaauaacucuguuuauc

SEQ ID NO: 1179143 - RNA, 19 nt, Artificial Sequence
  Description of Artificial Sequence: Synthetic oligonucleotide
  Antisense strand to SEQ ID NO: 1179142
gauaaacagaguuauucac

SEQ ID NO: 1179144 - RNA, 19 nt, Artificial Sequence
  Description of Artificial Sequence: Synthetic oligonucleotide
  Sense strand starting at position 1064 of SEQ ID NO: 916724
uuuguaauucuagagcuuu

SEQ ID NO: 1179145 - RNA, 19 nt, Artificial Sequence
  Description of Artificial Sequence: Synthetic oligonucleotide
  Antisense strand to SEQ ID NO: 1179144
aaagcucuagaauuacaaa

SEQ ID NO: 1179146 - RNA, 19 nt, Artificial Sequence
  Description of Artificial Sequence: Synthetic oligonucleotide
  Sense strand starting at position 1070 of SEQ ID NO: 916724
auucuagagcuuuagcaau

SEQ ID NO: 1179147 - RNA, 19 nt, Artificial Sequence
  Description of Artificial Sequence: Synthetic oligonucleotide
  Antisense strand to SEQ ID NO: 1179146
auugcuaaagcucuagaau

SEQ ID NO: 1179148 - RNA, 19 nt, Artificial Sequence
  Description of Artificial Sequence: Synthetic oligonucleotide
  Sense strand starting at position 1072 of SEQ ID NO: 916724
ucuagagcuuuagcaauaa

SEQ ID NO: 1179149 - RNA, 19 nt, Artificial Sequence
  Description of Artificial Sequence: Synthetic oligonucleotide
  Antisense strand to SEQ ID NO: 1179148
uuauugcuaaagcucuaga

SEQ ID NO: 1179150 - RNA, 19 nt, Artificial Sequence
  Description of Artificial Sequence: Synthetic oligonucleotide
  Sense strand starting at position 1157 of SEQ ID NO: 916724
uaaauucucuuggucgaau

SEQ ID NO: 1179151 - RNA, 19 nt, Artificial Sequence
  Description of Artificial Sequence: Synthetic oligonucleotide
  Antisense strand to SEQ ID NO: 1179150
auucgaccaagagaauuua

SEQ ID NO: 1179152 - RNA, 19 nt, Artificial Sequence
  Description of Artificial Sequence: Synthetic oligonucleotide
  Sense strand starting at position 1158 of SEQ ID NO: 916724
aaauucucuuggucgaaug

SEQ ID NO: 1179153 - RNA, 19 nt, Artificial Sequence
  Description of Artificial Sequence: Synthetic oligonucleotide
  Antisense strand to SEQ ID NO: 1179152
cauucgaccaagagaauuu

SEQ ID NO: 1179154 - RNA, 19 nt, Artificial Sequence
  Description of Artificial Sequence: Synthetic oligonucleotide
  Sense strand starting at position 1258 of SEQ ID NO: 916724
ggcaaauauugauucuauc

SEQ ID NO: 1179155 - RNA, 19 nt, Artificial Sequence
  Description of Artificial Sequence: Synthetic oligonucleotide
  Antisense strand to SEQ ID NO: 1179154
gauagaaucaauauuugcc

SEQ ID NO: 1179156 - RNA, 19 nt, Artificial Sequence
  Description of Artificial Sequence: Synthetic oligonucleotide
  Sense strand starting at position 1298 of SEQ ID NO: 916724
uuuauauacuuggcaaaug

SEQ ID NO: 1179157 - RNA, 19 nt, Artificial Sequence
  Description of Artificial Sequence: Synthetic oligonucleotide
  Antisense strand to SEQ ID NO: 1179156
cauuugccaaguauauaaa

SEQ ID NO: 1179158 - RNA, 19 nt, Artificial Sequence
  Description of Artificial Sequence: Synthetic oligonucleotide
  Sense strand starting at position 1486 of SEQ ID NO: 916724
gccugcuguuaauuucuau

SEQ ID NO: 1179159 - RNA, 19 nt, Artificial Sequence
  Description of Artificial Sequence: Synthetic oligonucleotide
  Antisense strand to SEQ ID NO: 1179158
auagaaauuaacagcaggc

SEQ ID NO: 1179160 - RNA, 19 nt, Artificial Sequence
  Description of Artificial Sequence: Synthetic oligonucleotide
  Sense strand starting at position 1627 of SEQ ID NO: 916724
gguacaguaccugaaguuu

SEQ ID NO: 1179161 - RNA, 19 nt, Artificial Sequence
  Description of Artificial Sequence: Synthetic oligonucleotide
  Antisense strand to SEQ ID NO: 1179160
aaacuucagguacuguacc

SEQ ID NO: 1179162 - RNA, 19 nt, Artificial Sequence
  Description of Artificial Sequence: Synthetic oligonucleotide
  Sense strand starting at position 2054 of SEQ ID NO: 916724
guuucugugucauuuauac

SEQ ID NO: 1179163 - RNA, 19 nt, Artificial Sequence
  Description of Artificial Sequence: Synthetic oligonucleotide
  Antisense strand to SEQ ID NO: 1179162
guauaaaugacacagaaac

SEQ ID NO: 1179164 - RNA, 19 nt, Artificial Sequence
  Description of Artificial Sequence: Synthetic oligonucleotide
  Sense strand starting at position 2186 of SEQ ID NO: 916724
gcaguuugguauuuagcca

SEQ ID NO: 1179165 - RNA, 19 nt, Artificial Sequence
  Description of Artificial Sequence: Synthetic oligonucleotide
  Antisense strand to SEQ ID NO: 1179164
uggcuaaauaccaaacugc

SEQ ID NO: 1179166 - RNA, 19 nt, Artificial Sequence
  Description of Artificial Sequence: Synthetic oligonucleotide
  Sense strand starting at position 3207 of SEQ ID NO: 916724
acacaucuuuguguggaaa

SEQ ID NO: 1179167 - RNA, 19 nt, Artificial Sequence
  Description of Artificial Sequence: Synthetic oligonucleotide
  Antisense strand to SEQ ID NO: 1179166
uuuccacacaaagaugugu

SEQ ID NO: 1179168 - RNA, 19 nt, Artificial Sequence
  Description of Artificial Sequence: Synthetic oligonucleotide
  Sense strand starting at position 3208 of SEQ ID NO: 916724
cacaucuuuguguggaaag

SEQ ID NO: 1179169 - RNA, 19 nt, Artificial Sequence
  Description of Artificial Sequence: Synthetic oligonucleotide
  Antisense strand to SEQ ID NO: 1179168
cuuuccacacaaagaugug

SEQ ID NO: 1179170 - RNA, 19 nt, Artificial Sequence
  Description of Artificial Sequence: Synthetic oligonucleotide
  Sense strand starting at position 3210 of SEQ ID NO: 916724
caucuuuguguggaaagau

SEQ ID NO: 1179171 - RNA, 19 nt, Artificial Sequence
  Description of Artificial Sequence: Synthetic oligonucleotide
  Antisense strand to SEQ ID NO: 1179170
aucuuuccacacaaagaug

SEQ ID NO: 1179172 - RNA, 19 nt, Artificial Sequence
  Description of Artificial Sequence: Synthetic oligonucleotide
  Sense strand starting at position 3219 of SEQ ID NO: 916724
guggaaagauuugaaccuu

SEQ ID NO: 1179173 - RNA, 19 nt, Artificial Sequence
  Description of Artificial Sequence: Synthetic oligonucleotide
  Antisense strand to SEQ ID NO: 1179172
aagguucaaaucuuuccac

SEQ ID NO: 1179174 - RNA, 19 nt, Artificial Sequence
  Description of Artificial Sequence: Synthetic oligonucleotide
  Sense strand starting at position 3228 of SEQ ID NO: 916724
uuugaaccuuguuucuaga

SEQ ID NO: 1179175 - RNA, 19 nt, Artificial Sequence
  Description of Artificial Sequence: Synthetic oligonucleotide
  Antisense strand to SEQ ID NO: 1179174
ucuagaaacaagguucaaa

SEQ ID NO: 1179176 - RNA, 19 nt, Artificial Sequence
  Description of Artificial Sequence: Synthetic oligonucleotide
  Sense strand starting at position 3230 of SEQ ID NO: 916724
ugaaccuuguuucuagaau

SEQ ID NO: 1179177 - RNA, 19 nt, Artificial Sequence
  Description of Artificial Sequence: Synthetic oligonucleotide
  Antisense strand to SEQ ID NO: 1179176
auucuagaaacaagguuca

SEQ ID NO: 1179178 - RNA, 19 nt, Artificial Sequence
  Description of Artificial Sequence: Synthetic oligonucleotide
  Sense strand starting at position 3244 of SEQ ID NO: 916724
agaauaucaucauugugac

SEQ ID NO: 1179179 - RNA, 19 nt, Artificial Sequence
  Description of Artificial Sequence: Synthetic oligonucleotide
  Antisense strand to SEQ ID NO: 1179178
gucacaaugaugauauucu

SEQ ID NO: 1179180 - RNA, 19 nt, Artificial Sequence
  Description of Artificial Sequence: Synthetic oligonucleotide
  Sense strand starting at position 3322 of SEQ ID NO: 916724
cuaaacuuguguccaacua

SEQ ID NO: 1179181 - RNA, 19 nt, Artificial Sequence
  Description of Artificial Sequence: Synthetic oligonucleotide
  Antisense strand to SEQ ID NO: 1179180
uaguuggacacaaguuuag

SEQ ID NO: 1179182 - RNA, 19 nt, Artificial Sequence
  Description of Artificial Sequence: Synthetic oligonucleotide
  Sense strand starting at position 3375 of SEQ ID NO: 916724
caagguuaggcagaagagu

SEQ ID NO: 1179183 - RNA, 19 nt, Artificial Sequence
  Description of Artificial Sequence: Synthetic oligonucleotide
  Antisense strand to SEQ ID NO: 1179182
acucuucugccuaaccuug

SEQ ID NO: 1179184 - RNA, 19 nt, Artificial Sequence
  Description of Artificial Sequence: Synthetic oligonucleotide
  Sense strand starting at position 3405 of SEQ ID NO: 916724
agagaugaguucuucuuag

SEQ ID NO: 1179185 - RNA, 19 nt, Artificial Sequence
  Description of Artificial Sequence: Synthetic oligonucleotide
  Antisense strand to SEQ ID NO: 1179184
cuaagaagaacucaucucu

SEQ ID NO: 1179186 - RNA, 19 nt, Artificial Sequence
  Description of Artificial Sequence: Synthetic oligonucleotide
  Sense strand starting at position 3504 of SEQ ID NO: 916724
ccacuucugcucugaggaa

SEQ ID NO: 1179187 - RNA, 19 nt, Artificial Sequence
  Description of Artificial Sequence: Synthetic oligonucleotide
  Antisense strand to SEQ ID NO: 1179186
uuccucagagcagaagugg

SEQ ID NO: 1179188 - RNA, 19 nt, Artificial Sequence
  Description of Artificial Sequence: Synthetic oligonucleotide
  Sense strand starting at position 3586 of SEQ ID NO: 916724
auaggauuauguccuuuag

SEQ ID NO: 1179189 - RNA, 19 nt, Artificial Sequence
  Description of Artificial Sequence: Synthetic oligonucleotide
  Antisense strand to SEQ ID NO: 1179188
cuaaaggacauaauccuau

SEQ ID NO: 1179190 - RNA, 19 nt, Artificial Sequence
  Description of Artificial Sequence: Synthetic oligonucleotide
  Sense strand starting at position 3602 of SEQ ID NO: 916724
uagggauucugacucaugu

SEQ ID NO: 1179191 - RNA, 19 nt, Artificial Sequence
  Description of Artificial Sequence: Synthetic oligonucleotide
  Antisense strand to SEQ ID NO: 1179190
acaugagucagaaucccua

SEQ ID NO: 1179192 - RNA, 19 nt, Artificial Sequence
  Description of Artificial Sequence: Synthetic oligonucleotide
  Sense strand starting at position 3675 of SEQ ID NO: 916724
auuaguuaggcugagccua

SEQ ID NO: 1179193 - RNA, 19 nt, Artificial Sequence
  Description of Artificial Sequence: Synthetic oligonucleotide
  Antisense strand to SEQ ID NO: 1179192
uaggcucagccuaacuaau

SEQ ID NO: 1179194 - RNA, 19 nt, Artificial Sequence
  Description of Artificial Sequence: Synthetic oligonucleotide
  Sense strand starting at position 3721 of SEQ ID NO: 916724
acagaauuguuccucaguc

SEQ ID NO: 1179195 - RNA, 19 nt, Artificial Sequence
  Description of Artificial Sequence: Synthetic oligonucleotide
  Antisense strand to SEQ ID NO: 1179194
gacugaggaacaauucugu

SEQ ID NO: 1179196 - RNA, 19 nt, Artificial Sequence
  Description of Artificial Sequence: Synthetic oligonucleotide
  Sense strand starting at position 3723 of SEQ ID NO: 916724
agaauuguuccucagucac

SEQ ID NO: 1179197 - RNA, 19 nt, Artificial Sequence
  Description of Artificial Sequence: Synthetic oligonucleotide
  Antisense strand to SEQ ID NO: 1179196
gugacugaggaacaauucu

SEQ ID NO: 1179198 - RNA, 19 nt, Artificial Sequence
  Description of Artificial Sequence: Synthetic oligonucleotide
  Sense strand starting at position 3747 of SEQ ID NO: 916724
ugaggcucuucccuuauuu

SEQ ID NO: 1179199 - RNA, 19 nt, Artificial Sequence
  Description of Artificial Sequence: Synthetic oligonucleotide
  Antisense strand to SEQ ID NO: 1179198
aaauaagggaagagccuca

SEQ ID NO: 1179200 - RNA, 19 nt, Artificial Sequence
  Description of Artificial Sequence: Synthetic oligonucleotide
  Sense strand starting at position 78 of SEQ ID NO: 916725
cgaagacuuucuuuccagu

SEQ ID NO: 1179201 - RNA, 19 nt, Artificial Sequence
  Description of Artificial Sequence: Synthetic oligonucleotide
  Antisense strand to SEQ ID NO: 1179200
acuggaaagaaagucuucg

SEQ ID NO: 1179202 - RNA, 19 nt, Artificial Sequence
  Description of Artificial Sequence: Synthetic oligonucleotide
  Sense strand starting at position 158 of SEQ ID NO: 916725
acguaaauuguauaacaga

SEQ ID NO: 1179203 - RNA, 19 nt, Artificial Sequence
  Description of Artificial Sequence: Synthetic oligonucleotide
  Antisense strand to SEQ ID NO: 1179202
ucuguuauacaauuuacgu

SEQ ID NO: 1179204 - RNA, 19 nt, Artificial Sequence
  Description of Artificial Sequence: Synthetic oligonucleotide
  Sense strand starting at position 213 of SEQ ID NO: 916725
gagaauaaaguuugcaagu

SEQ ID NO: 1179205 - RNA, 19 nt, Artificial Sequence
  Description of Artificial Sequence: Synthetic oligonucleotide
  Antisense strand to SEQ ID NO: 1179204
acuugcaaacuuuauucuc

SEQ ID NO: 1179206 - RNA, 19 nt, Artificial Sequence
  Description of Artificial Sequence: Synthetic oligonucleotide
  Sense strand starting at position 537 of SEQ ID NO: 916725
gcuguaaaggcuugacaag

SEQ ID NO: 1179207 - RNA, 19 nt, Artificial Sequence
  Description of Artificial Sequence: Synthetic oligonucleotide
  Antisense strand to SEQ ID NO: 1179206
cuugucaagccuuuacagc

SEQ ID NO: 1179208 - RNA, 19 nt, Artificial Sequence
  Description of Artificial Sequence: Synthetic oligonucleotide
  Sense strand starting at position 543 of SEQ ID NO: 916725
aaggcuugacaaggugaga

SEQ ID NO: 1179209 - RNA, 19 nt, Artificial Sequence
  Description of Artificial Sequence: Synthetic oligonucleotide
  Antisense strand to SEQ ID NO: 1179208
ucucaccuugucaagccuu

SEQ ID NO: 1179210 - RNA, 19 nt, Artificial Sequence
  Description of Artificial Sequence: Synthetic oligonucleotide
  Sense strand starting at position 1073 of SEQ ID NO: 916725
auacuacaugccgaauaua

SEQ ID NO: 1179211 - RNA, 19 nt, Artificial Sequence
  Description of Artificial Sequence: Synthetic oligonucleotide
  Antisense strand to SEQ ID NO: 1179210
uauauucggcauguaguau

SEQ ID NO: 1179212 - RNA, 19 nt, Artificial Sequence
  Description of Artificial Sequence: Synthetic oligonucleotide
  Sense strand starting at position 1076 of SEQ ID NO: 916725
cuacaugccgaauauacuu

SEQ ID NO: 1179213 - RNA, 19 nt, Artificial Sequence
  Description of Artificial Sequence: Synthetic oligonucleotide
  Antisense strand to SEQ ID NO: 1179212
aaguauauucggcauguag

SEQ ID NO: 1179214 - RNA, 19 nt, Artificial Sequence
  Description of Artificial Sequence: Synthetic oligonucleotide
  Sense strand starting at position 1293 of SEQ ID NO: 916725
aucuuugcacuuugaaagu

SEQ ID NO: 1179215 - RNA, 19 nt, Artificial Sequence
  Description of Artificial Sequence: Synthetic oligonucleotide
  Antisense strand to SEQ ID NO: 1179214
acuuucaaagugcaaagau

SEQ ID NO: 1179216 - RNA, 19 nt, Artificial Sequence
  Description of Artificial Sequence: Synthetic oligonucleotide
  Sense strand starting at position 1338 of SEQ ID NO: 916725
gcagguucuaagcagauca

SEQ ID NO: 1179217 - RNA, 19 nt, Artificial Sequence
  Description of Artificial Sequence: Synthetic oligonucleotide
  Antisense strand to SEQ ID NO: 1179216
ugaucugcuuagaaccugc

SEQ ID NO: 1179218 - RNA, 19 nt, Artificial Sequence
  Description of Artificial Sequence: Synthetic oligonucleotide
  Sense strand starting at position 1374 of SEQ ID NO: 916725
ugccuuauucuacacuguu

SEQ ID NO: 1179219 - RNA, 19 nt, Artificial Sequence
  Description of Artificial Sequence: Synthetic oligonucleotide
  Antisense strand to SEQ ID NO: 1179218
aacaguguagaauaaggca

SEQ ID NO: 1179220 - RNA, 19 nt, Artificial Sequence
  Description of Artificial Sequence: Synthetic oligonucleotide
  Sense strand starting at position 1409 of SEQ ID NO: 916725
acauguugccaguauaagu

SEQ ID NO: 1179221 - RNA, 19 nt, Artificial Sequence
  Description of Artificial Sequence: Synthetic oligonucleotide
  Antisense strand to SEQ ID NO: 1179220
acuuauacuggcaacaugu

SEQ ID NO: 1179222 - RNA, 19 nt, Artificial Sequence
  Description of Artificial Sequence: Synthetic oligonucleotide
  Sense strand starting at position 1819 of SEQ ID NO: 916725
gcguuaucacagccuaagu

SEQ ID NO: 1179223 - RNA, 19 nt, Artificial Sequence
  Description of Artificial Sequence: Synthetic oligonucleotide
  Antisense strand to SEQ ID NO: 1179222
acuuaggcugugauaacgc

SEQ ID NO: 1179224 - RNA, 19 nt, Artificial Sequence
  Description of Artificial Sequence: Synthetic oligonucleotide
  Sense strand starting at position 2029 of SEQ ID NO: 916725
ucacauugauggcucuaga

SEQ ID NO: 1179225 - RNA, 19 nt, Artificial Sequence
  Description of Artificial Sequence: Synthetic oligonucleotide
  Antisense strand to SEQ ID NO: 1179224
ucuagagccaucaauguga

SEQ ID NO: 1179226 - RNA, 19 nt, Artificial Sequence
  Description of Artificial Sequence: Synthetic oligonucleotide
  Sense strand starting at position 2047 of SEQ ID NO: 916725
agagaaauguugccugcau

SEQ ID NO: 1179227 - RNA, 19 nt, Artificial Sequence
  Description of Artificial Sequence: Synthetic oligonucleotide
  Antisense strand to SEQ ID NO: 1179226
augcaggcaacauuucucu

SEQ ID NO: 1179228 - RNA, 19 nt, Artificial Sequence
  Description of Artificial Sequence: Synthetic oligonucleotide
  Sense strand starting at position 2054 of SEQ ID NO: 916725
uguugccugcauuaaugau

SEQ ID NO: 1179229 - RNA, 19 nt, Artificial Sequence
  Description of Artificial Sequence: Synthetic oligonucleotide
  Antisense strand to SEQ ID NO: 1179228
aucauuaaugcaggcaaca

SEQ ID NO: 1179230 - RNA, 19 nt, Artificial Sequence
  Description of Artificial Sequence: Synthetic oligonucleotide
  Sense strand starting at position 2178 of SEQ ID NO: 916725
guagguucagggugaacuu

SEQ ID NO: 1179231 - RNA, 19 nt, Artificial Sequence
  Description of Artificial Sequence: Synthetic oligonucleotide
  Antisense strand to SEQ ID NO: 1179230
aaguucacccugaaccuac

SEQ ID NO: 1179232 - RNA, 19 nt, Artificial Sequence
  Description of Artificial Sequence: Synthetic oligonucleotide
  Sense strand starting at position 2340 of SEQ ID NO: 916725
ugugguagauggguuucau

SEQ ID NO: 1179233 - RNA, 19 nt, Artificial Sequence
  Description of Artificial Sequence: Synthetic oligonucleotide
  Antisense strand to SEQ ID NO: 1179232
augaaacccaucuaccaca

SEQ ID NO: 1179234 - RNA, 19 nt, Artificial Sequence
  Description of Artificial Sequence: Synthetic oligonucleotide
  Sense strand starting at position 2408 of SEQ ID NO: 916725
cggcaaguacaauaaugaa

SEQ ID NO: 1179235 - RNA, 19 nt, Artificial Sequence
  Description of Artificial Sequence: Synthetic oligonucleotide
  Antisense strand to SEQ ID NO: 1179234
uucauuauuguacuugccg

SEQ ID NO: 1179236 - RNA, 19 nt, Artificial Sequence
  Description of Artificial Sequence: Synthetic oligonucleotide
  Sense strand starting at position 2448 of SEQ ID NO: 916725
ccuccaagaucucugauag

SEQ ID NO: 1179237 - RNA, 19 nt, Artificial Sequence
  Description of Artificial Sequence: Synthetic oligonucleotide
  Antisense strand to SEQ ID NO: 1179236
cuaucagagaucuuggagg

SEQ ID NO: 1179238 - RNA, 19 nt, Artificial Sequence
  Description of Artificial Sequence: Synthetic oligonucleotide
  Sense strand starting at position 2449 of SEQ ID NO: 916725
cuccaagaucucugauagu

SEQ ID NO: 1179239 - RNA, 19 nt, Artificial Sequence
  Description of Artificial Sequence: Synthetic oligonucleotide
  Antisense strand to SEQ ID NO: 1179238
acuaucagagaucuuggag

SEQ ID NO: 1179240 - RNA, 19 nt, Artificial Sequence
  Description of Artificial Sequence: Synthetic oligonucleotide
  Sense strand starting at position 2555 of SEQ ID NO: 916725
ggaaauauugaaggcucua

SEQ ID NO: 1179241 - RNA, 19 nt, Artificial Sequence
  Description of Artificial Sequence: Synthetic oligonucleotide
  Antisense strand to SEQ ID NO: 1179240
uagagccuucaauauuucc

SEQ ID NO: 1179242 - RNA, 19 nt, Artificial Sequence
  Description of Artificial Sequence: Synthetic oligonucleotide
  Sense strand starting at position 2560 of SEQ ID NO: 916725
uauugaaggcucuaaguuu

SEQ ID NO: 1179243 - RNA, 19 nt, Artificial Sequence
  Description of Artificial Sequence: Synthetic oligonucleotide
  Antisense strand to SEQ ID NO: 1179242
aaacuuagagccuucaaua

SEQ ID NO: 1179244 - RNA, 19 nt, Artificial Sequence
  Description of Artificial Sequence: Synthetic oligonucleotide
  Sense strand starting at position 2696 of SEQ ID NO: 916725
guuagaaaucacugaguac

SEQ ID NO: 1179245 - RNA, 19 nt, Artificial Sequence
  Description of Artificial Sequence: Synthetic oligonucleotide
  Antisense strand to SEQ ID NO: 1179244
guacucagugauuucuaac

SEQ ID NO: 1179246 - RNA, 19 nt, Artificial Sequence
  Description of Artificial Sequence: Synthetic oligonucleotide
  Sense strand starting at position 2729 of SEQ ID NO: 916725
aaguauacuuggguguuaa

SEQ ID NO: 1179247 - RNA, 19 nt, Artificial Sequence
  Description of Artificial Sequence: Synthetic oligonucleotide
  Antisense strand to SEQ ID NO: 1179246
uuaacacccaaguauacuu

SEQ ID NO: 1179248 - RNA, 19 nt, Artificial Sequence
  Description of Artificial Sequence: Synthetic oligonucleotide
  Sense strand starting at position 2730 of SEQ ID NO: 916725
aguauacuuggguguuaaa

SEQ ID NO: 1179249 - RNA, 19 nt, Artificial Sequence
  Description of Artificial Sequence: Synthetic oligonucleotide
  Antisense strand to SEQ ID NO: 1179248
uuuaacacccaaguauacu

SEQ ID NO: 1179250 - RNA, 19 nt, Artificial Sequence
  Description of Artificial Sequence: Synthetic oligonucleotide
  Sense strand starting at position 2737 of SEQ ID NO: 916725
uuggguguuaaacauguaa

SEQ ID NO: 1179251 - RNA, 19 nt, Artificial Sequence
  Description of Artificial Sequence: Synthetic oligonucleotide
  Antisense strand to SEQ ID NO: 1179250
uuacauguuuaacacccaa

SEQ ID NO: 1179252 - RNA, 19 nt, Artificial Sequence
  Description of Artificial Sequence: Synthetic oligonucleotide
  Sense strand starting at position 2739 of SEQ ID NO: 916725
ggguguuaaacauguaaau

SEQ ID NO: 1179253 - RNA, 19 nt, Artificial Sequence
  Description of Artificial Sequence: Synthetic oligonucleotide
  Antisense strand to SEQ ID NO: 1179252
auuuacauguuuaacaccc

SEQ ID NO: 1179254 - RNA, 19 nt, Artificial Sequence
  Description of Artificial Sequence: Synthetic oligonucleotide
  Sense strand starting at position 2848 of SEQ ID NO: 916725
ucugcuaguugaccagauu

SEQ ID NO: 1179255 - RNA, 19 nt, Artificial Sequence
  Description of Artificial Sequence: Synthetic oligonucleotide
  Antisense strand to SEQ ID NO: 1179254
aaucuggucaacuagcaga

SEQ ID NO: 1179256 - RNA, 19 nt, Artificial Sequence
  Description of Artificial Sequence: Synthetic oligonucleotide
  Sense strand starting at position 2851 of SEQ ID NO: 916725
gcuaguugaccagauuguu

SEQ ID NO: 1179257 - RNA, 19 nt, Artificial Sequence
  Description of Artificial Sequence: Synthetic oligonucleotide
  Antisense strand to SEQ ID NO: 1179256
aacaaucuggucaacuagc

SEQ ID NO: 1179258 - RNA, 19 nt, Artificial Sequence
  Description of Artificial Sequence: Synthetic oligonucleotide
  Sense strand starting at position 2871 of SEQ ID NO: 916725
uugaaagcuuaugcucuaa

SEQ ID NO: 1179259 - RNA, 19 nt, Artificial Sequence
  Description of Artificial Sequence: Synthetic oligonucleotide
  Antisense strand to SEQ ID NO: 1179258
uuagagcauaagcuuucaa

SEQ ID NO: 1179260 - RNA, 19 nt, Artificial Sequence
  Description of Artificial Sequence: Synthetic oligonucleotide
  Sense strand starting at position 3286 of SEQ ID NO: 916725
ucugauugguugccaauga

SEQ ID NO: 1179261 - RNA, 19 nt, Artificial Sequence
  Description of Artificial Sequence: Synthetic oligonucleotide
  Antisense strand to SEQ ID NO: 1179260
ucauuggcaaccaaucaga

SEQ ID NO: 1179262 - RNA, 19 nt, Artificial Sequence
  Description of Artificial Sequence: Synthetic oligonucleotide
  Sense strand starting at position 3295 of SEQ ID NO: 916725
uugccaaugagucagguuu

SEQ ID NO: 1179263 - RNA, 19 nt, Artificial Sequence
  Description of Artificial Sequence: Synthetic oligonucleotide
  Antisense strand to SEQ ID NO: 1179262
aaaccugacucauuggcaa

SEQ ID NO: 1179264 - RNA, 19 nt, Artificial Sequence
  Description of Artificial Sequence: Synthetic oligonucleotide
  Sense strand starting at position 3547 of SEQ ID NO: 916725
gggcacauugcauauaaca

SEQ ID NO: 1179265 - RNA, 19 nt, Artificial Sequence
  Description of Artificial Sequence: Synthetic oligonucleotide
  Antisense strand to SEQ ID NO: 1179264
uguuauaugcaaugugccc

SEQ ID NO: 1179266 - RNA, 19 nt, Artificial Sequence
  Description of Artificial Sequence: Synthetic oligonucleotide
  Sense strand starting at position 3605 of SEQ ID NO: 916725
ggaagagcguuucugaaau

SEQ ID NO: 1179267 - RNA, 19 nt, Artificial Sequence
  Description of Artificial Sequence: Synthetic oligonucleotide
  Antisense strand to SEQ ID NO: 1179266
auuucagaaacgcucuucc

SEQ ID NO: 1179268 - RNA, 19 nt, Artificial Sequence
  Description of Artificial Sequence: Synthetic oligonucleotide
  Sense strand starting at position 3672 of SEQ ID NO: 916725
cguuguccuccauacccaa

SEQ ID NO: 1179269 - RNA, 19 nt, Artificial Sequence
  Description of Artificial Sequence: Synthetic oligonucleotide
  Antisense strand to SEQ ID NO: 1179268
uuggguauggaggacaacg

SEQ ID NO: 1179270 - RNA, 19 nt, Artificial Sequence
  Description of Artificial Sequence: Synthetic oligonucleotide
  Sense strand starting at position 3758 of SEQ ID NO: 916725
ccgcuaauuguccacuaua

SEQ ID NO: 1179271 - RNA, 19 nt, Artificial Sequence
  Description of Artificial Sequence: Synthetic oligonucleotide
  Antisense strand to SEQ ID NO: 1179270
uauaguggacaauuagcgg

SEQ ID NO: 1179272 - RNA, 19 nt, Artificial Sequence
  Description of Artificial Sequence: Synthetic oligonucleotide
  Sense strand starting at position 3761 of SEQ ID NO: 916725
cuaauuguccacuauaguu

SEQ ID NO: 1179273 - RNA, 19 nt, Artificial Sequence
  Description of Artificial Sequence: Synthetic oligonucleotide
  Antisense strand to SEQ ID NO: 1179272
aacuauaguggacaauuag

SEQ ID NO: 1179274 - RNA, 19 nt, Artificial Sequence
  Description of Artificial Sequence: Synthetic oligonucleotide
  Sense strand starting at position 3782 of SEQ ID NO: 916725
cugguaacucuaggaauac

SEQ ID NO: 1179275 - RNA, 19 nt, Artificial Sequence
  Description of Artificial Sequence: Synthetic oligonucleotide
  Antisense strand to SEQ ID NO: 1179274
guauuccuagaguuaccag

SEQ ID NO: 1179276 - RNA, 19 nt, Artificial Sequence
  Description of Artificial Sequence: Synthetic oligonucleotide
  Sense strand starting at position 3881 of SEQ ID NO: 916725
caagguaagccagaccuau

SEQ ID NO: 1179277 - RNA, 19 nt, Artificial Sequence
  Description of Artificial Sequence: Synthetic oligonucleotide
  Antisense strand to SEQ ID NO: 1179276
auaggucuggcuuaccuug

SEQ ID NO: 1179278 - RNA, 19 nt, Artificial Sequence
  Description of Artificial Sequence: Synthetic oligonucleotide
  Sense strand starting at position 3980 of SEQ ID NO: 916725
gacugauccgucuaaccaa

SEQ ID NO: 1179279 - RNA, 19 nt, Artificial Sequence
  Description of Artificial Sequence: Synthetic oligonucleotide
  Antisense strand to SEQ ID NO: 1179278
uugguuagacggaucaguc

SEQ ID NO: 1179280 - RNA, 19 nt, Artificial Sequence
  Description of Artificial Sequence: Synthetic oligonucleotide
  Sense strand starting at position 2 of SEQ ID NO: 916726
cagaguguggaauaaguuu

SEQ ID NO: 1179281 - RNA, 19 nt, Artificial Sequence
  Description of Artificial Sequence: Synthetic oligonucleotide
  Antisense strand to SEQ ID NO: 1179280
aaacuuauuccacacucug

SEQ ID NO: 1179282 - RNA, 19 nt, Artificial Sequence
  Description of Artificial Sequence: Synthetic oligonucleotide
  Sense strand starting at position 109 of SEQ ID NO: 916726
ugauuagcaccuugagaac

SEQ ID NO: 1179283 - RNA, 19 nt, Artificial Sequence
  Description of Artificial Sequence: Synthetic oligonucleotide
  Antisense strand to SEQ ID NO: 1179282
guucucaaggugcuaauca

SEQ ID NO: 1179284 - RNA, 19 nt, Artificial Sequence
  Description of Artificial Sequence: Synthetic oligonucleotide
  Sense strand starting at position 146 of SEQ ID NO: 916726
gaaagauucugagugaugu

SEQ ID NO: 1179285 - RNA, 19 nt, Artificial Sequence
  Description of Artificial Sequence: Synthetic oligonucleotide
  Antisense strand to SEQ ID NO: 1179284
acaucacucagaaucuuuc

SEQ ID NO: 1179286 - RNA, 19 nt, Artificial Sequence
  Description of Artificial Sequence: Synthetic oligonucleotide
  Sense strand starting at position 147 of SEQ ID NO: 916726
aaagauucugagugauguu

SEQ ID NO: 1179287 - RNA, 19 nt, Artificial Sequence
  Description of Artificial Sequence: Synthetic oligonucleotide
  Antisense strand to SEQ ID NO: 1179286
aacaucacucagaaucuuu

SEQ ID NO: 1179288 - RNA, 19 nt, Artificial Sequence
  Description of Artificial Sequence: Synthetic oligonucleotide
  Sense strand starting at position 148 of SEQ ID NO: 916726
aagauucugagugauguug

SEQ ID NO: 1179289 - RNA, 19 nt, Artificial Sequence
  Description of Artificial Sequence: Synthetic oligonucleotide
  Antisense strand to SEQ ID NO: 1179288
caacaucacucagaaucuu

SEQ ID NO: 1179290 - RNA, 19 nt, Artificial Sequence
  Description of Artificial Sequence: Synthetic oligonucleotide
  Sense strand starting at position 353 of SEQ ID NO: 916726
ggaaacuauuuauagcuua

SEQ ID NO: 1179291 - RNA, 19 nt, Artificial Sequence
  Description of Artificial Sequence: Synthetic oligonucleotide
  Antisense strand to SEQ ID NO: 1179290
uaagcuauaaauaguuucc

SEQ ID NO: 1179292 - RNA, 19 nt, Artificial Sequence
  Description of Artificial Sequence: Synthetic oligonucleotide
  Sense strand starting at position 401 of SEQ ID NO: 916726
uggcuaauuugauacaaca

SEQ ID NO: 1179293 - RNA, 19 nt, Artificial Sequence
  Description of Artificial Sequence: Synthetic oligonucleotide
  Antisense strand to SEQ ID NO: 1179292
uguuguaucaaauuagcca

SEQ ID NO: 1179294 - RNA, 19 nt, Artificial Sequence
  Description of Artificial Sequence: Synthetic oligonucleotide
  Sense strand starting at position 579 of SEQ ID NO: 916726
guuaguccuccucauauua

SEQ ID NO: 1179295 - RNA, 19 nt, Artificial Sequence
  Description of Artificial Sequence: Synthetic oligonucleotide
  Antisense strand to SEQ ID NO: 1179294
uaauaugaggaggacuaac

SEQ ID NO: 1179296 - RNA, 19 nt, Artificial Sequence
  Description of Artificial Sequence: Synthetic oligonucleotide
  Sense strand starting at position 808 of SEQ ID NO: 916726
gcuugacuucuugaaucaa

SEQ ID NO: 1179297 - RNA, 19 nt, Artificial Sequence
  Description of Artificial Sequence: Synthetic oligonucleotide
  Antisense strand to SEQ ID NO: 1179296
uugauucaagaagucaagc

SEQ ID NO: 1179298 - RNA, 19 nt, Artificial Sequence
  Description of Artificial Sequence: Synthetic oligonucleotide
  Sense strand starting at position 911 of SEQ ID NO: 916726
auguaaacaccagaugcau

SEQ ID NO: 1179299 - RNA, 19 nt, Artificial Sequence
  Description of Artificial Sequence: Synthetic oligonucleotide
  Antisense strand to SEQ ID NO: 1179298
augcaucugguguuuacau

SEQ ID NO: 1179300 - RNA, 19 nt, Artificial Sequence
  Description of Artificial Sequence: Synthetic oligonucleotide
  Sense strand starting at position 1053 of SEQ ID NO: 916726
aucuuuguuguccagaacu

SEQ ID NO: 1179301 - RNA, 19 nt, Artificial Sequence
  Description of Artificial Sequence: Synthetic oligonucleotide
  Antisense strand to SEQ ID NO: 1179300
aguucuggacaacaaagau

SEQ ID NO: 1179302 - RNA, 19 nt, Artificial Sequence
  Description of Artificial Sequence: Synthetic oligonucleotide
  Sense strand starting at position 1072 of SEQ ID NO: 916726
ucguacaaugccuagaaca

SEQ ID NO: 1179303 - RNA, 19 nt, Artificial Sequence
  Description of Artificial Sequence: Synthetic oligonucleotide
  Antisense strand to SEQ ID NO: 1179302
uguucuaggcauuguacga

SEQ ID NO: 1179304 - RNA, 19 nt, Artificial Sequence
  Description of Artificial Sequence: Synthetic oligonucleotide
  Sense strand starting at position 1074 of SEQ ID NO: 916726
guacaaugccuagaacaca

SEQ ID NO: 1179305 - RNA, 19 nt, Artificial Sequence
  Description of Artificial Sequence: Synthetic oligonucleotide
  Antisense strand to SEQ ID NO: 1179304
uguguucuaggcauuguac

SEQ ID NO: 1179306 - RNA, 19 nt, Artificial Sequence
  Description of Artificial Sequence: Synthetic oligonucleotide
  Sense strand starting at position 1136 of SEQ ID NO: 916726
uaaacauugggcgagguuu

SEQ ID NO: 1179307 - RNA, 19 nt, Artificial Sequence
  Description of Artificial Sequence: Synthetic oligonucleotide
  Antisense strand to SEQ ID NO: 1179306
aaaccucgcccaauguuua

SEQ ID NO: 1179308 - RNA, 19 nt, Artificial Sequence
  Description of Artificial Sequence: Synthetic oligonucleotide
  Sense strand starting at position 1244 of SEQ ID NO: 916726
agguucuugguuuacugau

SEQ ID NO: 1179309 - RNA, 19 nt, Artificial Sequence
  Description of Artificial Sequence: Synthetic oligonucleotide
  Antisense strand to SEQ ID NO: 1179308
aucaguaaaccaagaaccu

SEQ ID NO: 1179310 - RNA, 19 nt, Artificial Sequence
  Description of Artificial Sequence: Synthetic oligonucleotide
  Sense strand starting at position 1359 of SEQ ID NO: 916726
agaagauacugacuagucu

SEQ ID NO: 1179311 - RNA, 19 nt, Artificial Sequence
  Description of Artificial Sequence: Synthetic oligonucleotide
  Antisense strand to SEQ ID NO: 1179310
agacuagucaguaucuucu

SEQ ID NO: 1179312 - RNA, 19 nt, Artificial Sequence
  Description of Artificial Sequence: Synthetic oligonucleotide
  Sense strand starting at position 1380 of SEQ ID NO: 916726
uagugaagucugcacacaa

SEQ ID NO: 1179313 - RNA, 19 nt, Artificial Sequence
  Description of Artificial Sequence: Synthetic oligonucleotide
  Antisense strand to SEQ ID NO: 1179312
uugugugcagacuucacua

SEQ ID NO: 1179314 - RNA, 19 nt, Artificial Sequence
  Description of Artificial Sequence: Synthetic oligonucleotide
  Sense strand starting at position 1402 of SEQ ID NO: 916726
caggguauccgagauguca

SEQ ID NO: 1179315 - RNA, 19 nt, Artificial Sequence
  Description of Artificial Sequence: Synthetic oligonucleotide
  Antisense strand to SEQ ID NO: 1179314
ugacaucucggauacccug

SEQ ID NO: 1179316 - RNA, 19 nt, Artificial Sequence
  Description of Artificial Sequence: Synthetic oligonucleotide
  Sense strand starting at position 1410 of SEQ ID NO: 916726
ccgagaugucauuauuaua

SEQ ID NO: 1179317 - RNA, 19 nt, Artificial Sequence
  Description of Artificial Sequence: Synthetic oligonucleotide
  Antisense strand to SEQ ID NO: 1179316
uauaauaaugacaucucgg

SEQ ID NO: 1179318 - RNA, 19 nt, Artificial Sequence
  Description of Artificial Sequence: Synthetic oligonucleotide
  Sense strand starting at position 1478 of SEQ ID NO: 916726
ucguuucuaguuguaguca

SEQ ID NO: 1179319 - RNA, 19 nt, Artificial Sequence
  Description of Artificial Sequence: Synthetic oligonucleotide
  Antisense strand to SEQ ID NO: 1179318
ugacuacaacuagaaacga

SEQ ID NO: 1179320 - RNA, 19 nt, Artificial Sequence
  Description of Artificial Sequence: Synthetic oligonucleotide
  Sense strand starting at position 1615 of SEQ ID NO: 916726
cucuccuuaggaugauuau

SEQ ID NO: 1179321 - RNA, 19 nt, Artificial Sequence
  Description of Artificial Sequence: Synthetic oligonucleotide
  Antisense strand to SEQ ID NO: 1179320
auaaucauccuaaggagag

SEQ ID NO: 1179322 - RNA, 19 nt, Artificial Sequence
  Description of Artificial Sequence: Synthetic oligonucleotide
  Sense strand starting at position 1648 of SEQ ID NO: 916726
acuccuuaugauuauggua

SEQ ID NO: 1179323 - RNA, 19 nt, Artificial Sequence
  Description of Artificial Sequence: Synthetic oligonucleotide
  Antisense strand to SEQ ID NO: 1179322
uaccauaaucauaaggagu

SEQ ID NO: 1179324 - RNA, 19 nt, Artificial Sequence
  Description of Artificial Sequence: Synthetic oligonucleotide
  Sense strand starting at position 1761 of SEQ ID NO: 916726
guucuaugcugacucauuu

SEQ ID NO: 1179325 - RNA, 19 nt, Artificial Sequence
  Description of Artificial Sequence: Synthetic oligonucleotide
  Antisense strand to SEQ ID NO: 1179324
aaaugagucagcauagaac

SEQ ID NO: 1179326 - RNA, 19 nt, Artificial Sequence
  Description of Artificial Sequence: Synthetic oligonucleotide
  Sense strand starting at position 1859 of SEQ ID NO: 916726
ucugccuaucaugagagau

SEQ ID NO: 1179327 - RNA, 19 nt, Artificial Sequence
  Description of Artificial Sequence: Synthetic oligonucleotide
  Antisense strand to SEQ ID NO: 1179326
aucucucaugauaggcaga

SEQ ID NO: 1179328 - RNA, 19 nt, Artificial Sequence
  Description of Artificial Sequence: Synthetic oligonucleotide
  Sense strand starting at position 1879 of SEQ ID NO: 916726
aucucaccuguuuggaaau

SEQ ID NO: 1179329 - RNA, 19 nt, Artificial Sequence
  Description of Artificial Sequence: Synthetic oligonucleotide
  Antisense strand to SEQ ID NO: 1179328
auuuccaaacaggugagau

SEQ ID NO: 1179330 - RNA, 19 nt, Artificial Sequence
  Description of Artificial Sequence: Synthetic oligonucleotide
  Sense strand starting at position 1934 of SEQ ID NO: 916726
acucuucuuuguguuauuu

SEQ ID NO: 1179331 - RNA, 19 nt, Artificial Sequence
  Description of Artificial Sequence: Synthetic oligonucleotide
  Antisense strand to SEQ ID NO: 1179330
aaauaacacaaagaagagu

SEQ ID NO: 1179332 - RNA, 19 nt, Artificial Sequence
  Description of Artificial Sequence: Synthetic oligonucleotide
  Sense strand starting at position 1942 of SEQ ID NO: 916726
uuguguuauuuccuuacca

SEQ ID NO: 1179333 - RNA, 19 nt, Artificial Sequence
  Description of Artificial Sequence: Synthetic oligonucleotide
  Antisense strand to SEQ ID NO: 1179332
ugguaaggaaauaacacaa

SEQ ID NO: 1179334 - RNA, 19 nt, Artificial Sequence
  Description of Artificial Sequence: Synthetic oligonucleotide
  Sense strand starting at position 1943 of SEQ ID NO: 916726
uguguuauuuccuuaccau

SEQ ID NO: 1179335 - RNA, 19 nt, Artificial Sequence
  Description of Artificial Sequence: Synthetic oligonucleotide
  Antisense strand to SEQ ID NO: 1179334
augguaaggaaauaacaca

SEQ ID NO: 1179336 - RNA, 19 nt, Artificial Sequence
  Description of Artificial Sequence: Synthetic oligonucleotide
  Sense strand starting at position 2018 of SEQ ID NO: 916726
uuuagucaccuggagguaa

SEQ ID NO: 1179337 - RNA, 19 nt, Artificial Sequence
  Description of Artificial Sequence: Synthetic oligonucleotide
  Antisense strand to SEQ ID NO: 1179336
uuaccuccaggugacuaaa

SEQ ID NO: 1179338 - RNA, 19 nt, Artificial Sequence
  Description of Artificial Sequence: Synthetic oligonucleotide
  Sense strand starting at position 2092 of SEQ ID NO: 916726
gugcuuucccaagagauau

SEQ ID NO: 1179339 - RNA, 19 nt, Artificial Sequence
  Description of Artificial Sequence: Synthetic oligonucleotide
  Antisense strand to SEQ ID NO: 1179338
auaucucuugggaaagcac

SEQ ID NO: 1179340 - RNA, 19 nt, Artificial Sequence
  Description of Artificial Sequence: Synthetic oligonucleotide
  Sense strand starting at position 2468 of SEQ ID NO: 916726
cagucagcaugacuuagaa

SEQ ID NO: 1179341 - RNA, 19 nt, Artificial Sequence
  Description of Artificial Sequence: Synthetic oligonucleotide
  Antisense strand to SEQ ID NO: 1179340
uucuaagucaugcugacug

SEQ ID NO: 1179342 - RNA, 19 nt, Artificial Sequence
  Description of Artificial Sequence: Synthetic oligonucleotide
  Sense strand starting at position 2747 of SEQ ID NO: 916726
agaagcuaauagucugaua

SEQ ID NO: 1179343 - RNA, 19 nt, Artificial Sequence
  Description of Artificial Sequence: Synthetic oligonucleotide
  Antisense strand to SEQ ID NO: 1179342
uaucagacuauuagcuucu

SEQ ID NO: 1179344 - RNA, 19 nt, Artificial Sequence
  Description of Artificial Sequence: Synthetic oligonucleotide
  Sense strand starting at position 2749 of SEQ ID NO: 916726
aagcuaauagucugauaga

SEQ ID NO: 1179345 - RNA, 19 nt, Artificial Sequence
  Description of Artificial Sequence: Synthetic oligonucleotide
  Antisense strand to SEQ ID NO: 1179344
ucuaucagacuauuagcuu

SEQ ID NO: 1179346 - RNA, 19 nt, Artificial Sequence
  Description of Artificial Sequence: Synthetic oligonucleotide
  Sense strand starting at position 2813 of SEQ ID NO: 916726
aguuauauggcauaacucu

SEQ ID NO: 1179347 - RNA, 19 nt, Artificial Sequence
  Description of Artificial Sequence: Synthetic oligonucleotide
  Antisense strand to SEQ ID NO: 1179346
agaguuaugccauauaacu

SEQ ID NO: 1179348 - RNA, 19 nt, Artificial Sequence
  Description of Artificial Sequence: Synthetic oligonucleotide
  Sense strand starting at position 2821 of SEQ ID NO: 916726
ggcauaacucuaggaaggu

SEQ ID NO: 1179349 - RNA, 19 nt, Artificial Sequence
  Description of Artificial Sequence: Synthetic oligonucleotide
  Antisense strand to SEQ ID NO: 1179348
accuuccuagaguuaugcc

SEQ ID NO: 1179350 - RNA, 19 nt, Artificial Sequence
  Description of Artificial Sequence: Synthetic oligonucleotide
  Sense strand starting at position 2901 of SEQ ID NO: 916726
caguguuaaggguauuaaa

SEQ ID NO: 1179351 - RNA, 19 nt, Artificial Sequence
  Description of Artificial Sequence: Synthetic oligonucleotide
  Antisense strand to SEQ ID NO: 1179350
uuuaauacccuuaacacug

SEQ ID NO: 1179352 - RNA, 19 nt, Artificial Sequence
  Description of Artificial Sequence: Synthetic oligonucleotide
  Sense strand starting at position 3092 of SEQ ID NO: 916726
aggagauaauuguugucua

SEQ ID NO: 1179353 - RNA, 19 nt, Artificial Sequence
  Description of Artificial Sequence: Synthetic oligonucleotide
  Antisense strand to SEQ ID NO: 1179352
uagacaacaauuaucuccu

SEQ ID NO: 1179354 - RNA, 19 nt, Artificial Sequence
  Description of Artificial Sequence: Synthetic oligonucleotide
  Sense strand starting at position 3363 of SEQ ID NO: 916726
ccaggauugcuacauccaa

SEQ ID NO: 1179355 - RNA, 19 nt, Artificial Sequence
  Description of Artificial Sequence: Synthetic oligonucleotide
  Antisense strand to SEQ ID NO: 1179354
uuggauguagcaauccugg

SEQ ID NO: 1179356 - RNA, 19 nt, Artificial Sequence
  Description of Artificial Sequence: Synthetic oligonucleotide
  Sense strand starting at position 3533 of SEQ ID NO: 916726
gcuuauuuguccucaucuu

SEQ ID NO: 1179357 - RNA, 19 nt, Artificial Sequence
  Description of Artificial Sequence: Synthetic oligonucleotide
  Antisense strand to SEQ ID NO: 1179356
aagaugaggacaaauaagc

SEQ ID NO: 1179358 - RNA, 19 nt, Artificial Sequence
  Description of Artificial Sequence: Synthetic oligonucleotide
  Sense strand starting at position 3697 of SEQ ID NO: 916726
acuggaucuuguccacacu

SEQ ID NO: 1179359 - RNA, 19 nt, Artificial Sequence
  Description of Artificial Sequence: Synthetic oligonucleotide
  Antisense strand to SEQ ID NO: 1179358
aguguggacaagauccagu

SEQ ID NO: 1179360 - RNA, 19 nt, Artificial Sequence
  Description of Artificial Sequence: Synthetic oligonucleotide
  Sense strand starting at position 2 of SEQ ID NO: 916727
cccuaauugugacugacaa

SEQ ID NO: 1179361 - RNA, 19 nt, Artificial Sequence
  Description of Artificial Sequence: Synthetic oligonucleotide
  Antisense strand to SEQ ID NO: 1179360
uugucagucacaauuaggg

SEQ ID NO: 1179362 - RNA, 19 nt, Artificial Sequence
  Description of Artificial Sequence: Synthetic oligonucleotide
  Sense strand starting at position 3 of SEQ ID NO: 916727
ccuaauugugacugacaag

SEQ ID NO: 1179363 - RNA, 19 nt, Artificial Sequence
  Description of Artificial Sequence: Synthetic oligonucleotide
  Antisense strand to SEQ ID NO: 1179362
cuugucagucacaauuagg

SEQ ID NO: 1179364 - RNA, 19 nt, Artificial Sequence
  Description of Artificial Sequence: Synthetic oligonucleotide
  Sense strand starting at position 25 of SEQ ID NO: 916727
gggaacagcacuugagauu

SEQ ID NO: 1179365 - RNA, 19 nt, Artificial Sequence
  Description of Artificial Sequence: Synthetic oligonucleotide
  Antisense strand to SEQ ID NO: 1179364
aaucucaagugcuguuccc

SEQ ID NO: 1179366 - RNA, 19 nt, Artificial Sequence
  Description of Artificial Sequence: Synthetic oligonucleotide
  Sense strand starting at position 242 of SEQ ID NO: 916727
uuuguuuauugagucacaa

SEQ ID NO: 1179367 - RNA, 19 nt, Artificial Sequence
  Description of Artificial Sequence: Synthetic oligonucleotide
  Antisense strand to SEQ ID NO: 1179366
uugugacucaauaaacaaa

SEQ ID NO: 1179368 - RNA, 19 nt, Artificial Sequence
  Description of Artificial Sequence: Synthetic oligonucleotide
  Sense strand starting at position 298 of SEQ ID NO: 916727
aggagcuaccucugaauuc

SEQ ID NO: 1179369 - RNA, 19 nt, Artificial Sequence
  Description of Artificial Sequence: Synthetic oligonucleotide
  Antisense strand to SEQ ID NO: 1179368
gaauucagagguagcuccu

SEQ ID NO: 1179370 - RNA, 19 nt, Artificial Sequence
  Description of Artificial Sequence: Synthetic oligonucleotide
  Sense strand starting at position 919 of SEQ ID NO: 916727
uuaguagucuaccuaacuu

SEQ ID NO: 1179371 - RNA, 19 nt, Artificial Sequence
  Description of Artificial Sequence: Synthetic oligonucleotide
  Antisense strand to SEQ ID NO: 1179370
aaguuagguagacuacuaa

SEQ ID NO: 1179372 - RNA, 19 nt, Artificial Sequence
  Description of Artificial Sequence: Synthetic oligonucleotide
  Sense strand starting at position 932 of SEQ ID NO: 916727
uaacuuagccuuugagggu

SEQ ID NO: 1179373 - RNA, 19 nt, Artificial Sequence
  Description of Artificial Sequence: Synthetic oligonucleotide
  Antisense strand to SEQ ID NO: 1179372
acccucaaaggcuaaguua

SEQ ID NO: 1179374 - RNA, 19 nt, Artificial Sequence
  Description of Artificial Sequence: Synthetic oligonucleotide
  Sense strand starting at position 936 of SEQ ID NO: 916727
uuagccuuugaggguauaa

SEQ ID NO: 1179375 - RNA, 19 nt, Artificial Sequence
  Description of Artificial Sequence: Synthetic oligonucleotide
  Antisense strand to SEQ ID NO: 1179374
uuauacccucaaaggcuaa

SEQ ID NO: 1179376 - RNA, 19 nt, Artificial Sequence
  Description of Artificial Sequence: Synthetic oligonucleotide
  Sense strand starting at position 938 of SEQ ID NO: 916727
agccuuugaggguauaauc

SEQ ID NO: 1179377 - RNA, 19 nt, Artificial Sequence
  Description of Artificial Sequence: Synthetic oligonucleotide
  Antisense strand to SEQ ID NO: 1179376
gauuauacccucaaaggcu

SEQ ID NO: 1179378 - RNA, 19 nt, Artificial Sequence
  Description of Artificial Sequence: Synthetic oligonucleotide
  Sense strand starting at position 946 of SEQ ID NO: 916727
aggguauaaucaucuccuu

SEQ ID NO: 1179379 - RNA, 19 nt, Artificial Sequence
  Description of Artificial Sequence: Synthetic oligonucleotide
  Antisense strand to SEQ ID NO: 1179378
aaggagaugauuauacccu

SEQ ID NO: 1179380 - RNA, 19 nt, Artificial Sequence
  Description of Artificial Sequence: Synthetic oligonucleotide
  Sense strand starting at position 1011 of SEQ ID NO: 916727
uuccuuagggaguaaucuu

SEQ ID NO: 1179381 - RNA, 19 nt, Artificial Sequence
  Description of Artificial Sequence: Synthetic oligonucleotide
  Antisense strand to SEQ ID NO: 1179380
aagauuacucccuaaggaa

SEQ ID NO: 1179382 - RNA, 19 nt, Artificial Sequence
  Description of Artificial Sequence: Synthetic oligonucleotide
  Sense strand starting at position 1019 of SEQ ID NO: 916727
ggaguaaucuugucucaaa

SEQ ID NO: 1179383 - RNA, 19 nt, Artificial Sequence
  Description of Artificial Sequence: Synthetic oligonucleotide
  Antisense strand to SEQ ID NO: 1179382
uuugagacaagauuacucc

SEQ ID NO: 1179384 - RNA, 19 nt, Artificial Sequence
  Description of Artificial Sequence: Synthetic oligonucleotide
  Sense strand starting at position 1020 of SEQ ID NO: 916727
gaguaaucuugucucaaag

SEQ ID NO: 1179385 - RNA, 19 nt, Artificial Sequence
  Description of Artificial Sequence: Synthetic oligonucleotide
  Antisense strand to SEQ ID NO: 1179384
cuuugagacaagauuacuc

SEQ ID NO: 1179386 - RNA, 19 nt, Artificial Sequence
  Description of Artificial Sequence: Synthetic oligonucleotide
  Sense strand starting at position 1153 of SEQ ID NO: 916727
cucaguaaaucacugucua

SEQ ID NO: 1179387 - RNA, 19 nt, Artificial Sequence
  Description of Artificial Sequence: Synthetic oligonucleotide
  Antisense strand to SEQ ID NO: 1179386
uagacagugauuuacugag

SEQ ID NO: 1179388 - RNA, 19 nt, Artificial Sequence
  Description of Artificial Sequence: Synthetic oligonucleotide
  Sense strand starting at position 1154 of SEQ ID NO: 916727
ucaguaaaucacugucuaa

SEQ ID NO: 1179389 - RNA, 19 nt, Artificial Sequence
  Description of Artificial Sequence: Synthetic oligonucleotide
  Antisense strand to SEQ ID NO: 1179388
uuagacagugauuuacuga

SEQ ID NO: 1179390 - RNA, 19 nt, Artificial Sequence
  Description of Artificial Sequence: Synthetic oligonucleotide
  Sense strand starting at position 1182 of SEQ ID NO: 916727
cucagaguugaucaaguua

SEQ ID NO: 1179391 - RNA, 19 nt, Artificial Sequence
  Description of Artificial Sequence: Synthetic oligonucleotide
  Antisense strand to SEQ ID NO: 1179390
uaacuugaucaacucugag

SEQ ID NO: 1179392 - RNA, 19 nt, Artificial Sequence
  Description of Artificial Sequence: Synthetic oligonucleotide
  Sense strand starting at position 1302 of SEQ ID NO: 916727
ccuaaucuagcaggaucau

SEQ ID NO: 1179393 - RNA, 19 nt, Artificial Sequence
  Description of Artificial Sequence: Synthetic oligonucleotide
  Antisense strand to SEQ ID NO: 1179392
augauccugcuagauuagg

SEQ ID NO: 1179394 - RNA, 19 nt, Artificial Sequence
  Description of Artificial Sequence: Synthetic oligonucleotide
  Sense strand starting at position 1314 of SEQ ID NO: 916727
ggaucauagucuuccuucu

SEQ ID NO: 1179395 - RNA, 19 nt, Artificial Sequence
  Description of Artificial Sequence: Synthetic oligonucleotide
  Antisense strand to SEQ ID NO: 1179394
agaaggaagacuaugaucc

SEQ ID NO: 1179396 - RNA, 19 nt, Artificial Sequence
  Description of Artificial Sequence: Synthetic oligonucleotide
  Sense strand starting at position 1557 of SEQ ID NO: 916727
cagaaaguccgacguuaaa

SEQ ID NO: 1179397 - RNA, 19 nt, Artificial Sequence
  Description of Artificial Sequence: Synthetic oligonucleotide
  Antisense strand to SEQ ID NO: 1179396
uuuaacgucggacuuucug

SEQ ID NO: 1179398 - RNA, 19 nt, Artificial Sequence
  Description of Artificial Sequence: Synthetic oligonucleotide
  Sense strand starting at position 1864 of SEQ ID NO: 916727
ggaggaaauuguuucugau

SEQ ID NO: 1179399 - RNA, 19 nt, Artificial Sequence
  Description of Artificial Sequence: Synthetic oligonucleotide
  Antisense strand to SEQ ID NO: 1179398
aucagaaacaauuuccucc

SEQ ID NO: 1179400 - RNA, 19 nt, Artificial Sequence
  Description of Artificial Sequence: Synthetic oligonucleotide
  Sense strand starting at position 2267 of SEQ ID NO: 916727
augaauaaagugugcauga

SEQ ID NO: 1179401 - RNA, 19 nt, Artificial Sequence
  Description of Artificial Sequence: Synthetic oligonucleotide
  Antisense strand to SEQ ID NO: 1179400
ucaugcacacuuuauucau

SEQ ID NO: 1179402 - RNA, 19 nt, Artificial Sequence
  Description of Artificial Sequence: Synthetic oligonucleotide
  Sense strand starting at position 2269 of SEQ ID NO: 916727
gaauaaagugugcaugacu

SEQ ID NO: 1179403 - RNA, 19 nt, Artificial Sequence
  Description of Artificial Sequence: Synthetic oligonucleotide
  Antisense strand to SEQ ID NO: 1179402
agucaugcacacuuuauuc

SEQ ID NO: 1179404 - RNA, 19 nt, Artificial Sequence
  Description of Artificial Sequence: Synthetic oligonucleotide
  Sense strand starting at position 2272 of SEQ ID NO: 916727
uaaagugugcaugacucua

SEQ ID NO: 1179405 - RNA, 19 nt, Artificial Sequence
  Description of Artificial Sequence: Synthetic oligonucleotide
  Antisense strand to SEQ ID NO: 1179404
uagagucaugcacacuuua

SEQ ID NO: 1179406 - RNA, 19 nt, Artificial Sequence
  Description of Artificial Sequence: Synthetic oligonucleotide
  Sense strand starting at position 2277 of SEQ ID NO: 916727
ugugcaugacucuauuaau

SEQ ID NO: 1179407 - RNA, 19 nt, Artificial Sequence
  Description of Artificial Sequence: Synthetic oligonucleotide
  Antisense strand to SEQ ID NO: 1179406
auuaauagagucaugcaca

SEQ ID NO: 1179408 - RNA, 19 nt, Artificial Sequence
  Description of Artificial Sequence: Synthetic oligonucleotide
  Sense strand starting at position 2558 of SEQ ID NO: 916727
uuaagaaggccuggaguaa

SEQ ID NO: 1179409 - RNA, 19 nt, Artificial Sequence
  Description of Artificial Sequence: Synthetic oligonucleotide
  Antisense strand to SEQ ID NO: 1179408
uuacuccaggccuucuuaa

SEQ ID NO: 1179410 - RNA, 19 nt, Artificial Sequence
  Description of Artificial Sequence: Synthetic oligonucleotide
  Sense strand starting at position 2591 of SEQ ID NO: 916727
gugucugaacuuugaaauc

SEQ ID NO: 1179411 - RNA, 19 nt, Artificial Sequence
  Description of Artificial Sequence: Synthetic oligonucleotide
  Antisense strand to SEQ ID NO: 1179410
gauuucaaaguucagacac

SEQ ID NO: 1179412 - RNA, 19 nt, Artificial Sequence
  Description of Artificial Sequence: Synthetic oligonucleotide
  Sense strand starting at position 2818 of SEQ ID NO: 916727
augcuaacguaaucaggau

SEQ ID NO: 1179413 - RNA, 19 nt, Artificial Sequence
  Description of Artificial Sequence: Synthetic oligonucleotide
  Antisense strand to SEQ ID NO: 1179412
auccugauuacguuagcau

SEQ ID NO: 1179414 - RNA, 19 nt, Artificial Sequence
  Description of Artificial Sequence: Synthetic oligonucleotide
  Sense strand starting at position 2819 of SEQ ID NO: 916727
ugcuaacguaaucaggauu

SEQ ID NO: 1179415 - RNA, 19 nt, Artificial Sequence
  Description of Artificial Sequence: Synthetic oligonucleotide
  Antisense strand to SEQ ID NO: 1179414
aauccugauuacguuagca

SEQ ID NO: 1179416 - RNA, 19 nt, Artificial Sequence
  Description of Artificial Sequence: Synthetic oligonucleotide
  Sense strand starting at position 2822 of SEQ ID NO: 916727
uaacguaaucaggauucua

SEQ ID NO: 1179417 - RNA, 19 nt, Artificial Sequence
  Description of Artificial Sequence: Synthetic oligonucleotide
  Antisense strand to SEQ ID NO: 1179416
uagaauccugauuacguua

SEQ ID NO: 1179418 - RNA, 19 nt, Artificial Sequence
  Description of Artificial Sequence: Synthetic oligonucleotide
  Sense strand starting at position 2862 of SEQ ID NO: 916727
cgaugugcucacuaauuau

SEQ ID NO: 1179419 - RNA, 19 nt, Artificial Sequence
  Description of Artificial Sequence: Synthetic oligonucleotide
  Antisense strand to SEQ ID NO: 1179418
auaauuagugagcacaucg

SEQ ID NO: 1179420 - RNA, 19 nt, Artificial Sequence
  Description of Artificial Sequence: Synthetic oligonucleotide
  Sense strand starting at position 3244 of SEQ ID NO: 916727
ucaaguaggcagcauaaau

SEQ ID NO: 1179421 - RNA, 19 nt, Artificial Sequence
  Description of Artificial Sequence: Synthetic oligonucleotide
  Antisense strand to SEQ ID NO: 1179420
auuuaugcugccuacuuga

SEQ ID NO: 1179422 - RNA, 19 nt, Artificial Sequence
  Description of Artificial Sequence: Synthetic oligonucleotide
  Sense strand starting at position 3275 of SEQ ID NO: 916727
aguauaaggaguugagcuu

SEQ ID NO: 1179423 - RNA, 19 nt, Artificial Sequence
  Description of Artificial Sequence: Synthetic oligonucleotide
  Antisense strand to SEQ ID NO: 1179422
aagcucaacuccuuauacu

SEQ ID NO: 1179424 - RNA, 19 nt, Artificial Sequence
  Description of Artificial Sequence: Synthetic oligonucleotide
  Sense strand starting at position 3276 of SEQ ID NO: 916727
guauaaggaguugagcuua

SEQ ID NO: 1179425 - RNA, 19 nt, Artificial Sequence
  Description of Artificial Sequence: Synthetic oligonucleotide
  Antisense strand to SEQ ID NO: 1179424
uaagcucaacuccuuauac

SEQ ID NO: 1179426 - RNA, 19 nt, Artificial Sequence
  Description of Artificial Sequence: Synthetic oligonucleotide
  Sense strand starting at position 3287 of SEQ ID NO: 916727
ugagcuuaagcccauguaa

SEQ ID NO: 1179427 - RNA, 19 nt, Artificial Sequence
  Description of Artificial Sequence: Synthetic oligonucleotide
  Antisense strand to SEQ ID NO: 1179426
uuacaugggcuuaagcuca

SEQ ID NO: 1179428 - RNA, 19 nt, Artificial Sequence
  Description of Artificial Sequence: Synthetic oligonucleotide
  Sense strand starting at position 3610 of SEQ ID NO: 916727
cuacuauauuuguacagag

SEQ ID NO: 1179429 - RNA, 19 nt, Artificial Sequence
  Description of Artificial Sequence: Synthetic oligonucleotide
  Antisense strand to SEQ ID NO: 1179428
cucuguacaaauauaguag

SEQ ID NO: 1179430 - RNA, 19 nt, Artificial Sequence
  Description of Artificial Sequence: Synthetic oligonucleotide
  Sense strand starting at position 3640 of SEQ ID NO: 916727
uugauaagggcaggguaau

SEQ ID NO: 1179431 - RNA, 19 nt, Artificial Sequence
  Description of Artificial Sequence: Synthetic oligonucleotide
  Antisense strand to SEQ ID NO: 1179430
auuacccugcccuuaucaa

SEQ ID NO: 1179432 - RNA, 19 nt, Artificial Sequence
  Description of Artificial Sequence: Synthetic oligonucleotide
  Sense strand starting at position 3641 of SEQ ID NO: 916727
ugauaagggcaggguaaua

SEQ ID NO: 1179433 - RNA, 19 nt, Artificial Sequence
  Description of Artificial Sequence: Synthetic oligonucleotide
  Antisense strand to SEQ ID NO: 1179432
uauuacccugcccuuauca

SEQ ID NO: 1179434 - RNA, 19 nt, Artificial Sequence
  Description of Artificial Sequence: Synthetic oligonucleotide
  Sense strand starting at position 3661 of SEQ ID NO: 916727
auggacaaguuuguaguua

SEQ ID NO: 1179435 - RNA, 19 nt, Artificial Sequence
  Description of Artificial Sequence: Synthetic oligonucleotide
  Antisense strand to SEQ ID NO: 1179434
uaacuacaaacuuguccau

SEQ ID NO: 1179436 - RNA, 19 nt, Artificial Sequence
  Description of Artificial Sequence: Synthetic oligonucleotide
  Sense strand starting at position 3665 of SEQ ID NO: 916727
acaaguuuguaguuaagag

SEQ ID NO: 1179437 - RNA, 19 nt, Artificial Sequence
  Description of Artificial Sequence: Synthetic oligonucleotide
  Antisense strand to SEQ ID NO: 1179436
cucuuaacuacaaacuugu

SEQ ID NO: 1179438 - RNA, 19 nt, Artificial Sequence
  Description of Artificial Sequence: Synthetic oligonucleotide
  Sense strand starting at position 3877 of SEQ ID NO: 916727
cuuaguugcagugaaagaa

SEQ ID NO: 1179439 - RNA, 19 nt, Artificial Sequence
  Description of Artificial Sequence: Synthetic oligonucleotide
  Antisense strand to SEQ ID NO: 1179438
uucuuucacugcaacuaag

SEQ ID NO: 1179440 - RNA, 19 nt, Artificial Sequence
  Description of Artificial Sequence: Synthetic oligonucleotide
  Sense strand starting at position 69 of SEQ ID NO: 916728
ugaagaauuguauguggua

SEQ ID NO: 1179441 - RNA, 19 nt, Artificial Sequence
  Description of Artificial Sequence: Synthetic oligonucleotide
  Antisense strand to SEQ ID NO: 1179440
uaccacauacaauucuuca

SEQ ID NO: 1179442 - RNA, 19 nt, Artificial Sequence
  Description of Artificial Sequence: Synthetic oligonucleotide
  Sense strand starting at position 70 of SEQ ID NO: 916728
gaagaauuguaugugguaa

SEQ ID NO: 1179443 - RNA, 19 nt, Artificial Sequence
  Description of Artificial Sequence: Synthetic oligonucleotide
  Antisense strand to SEQ ID NO: 1179442
uuaccacauacaauucuuc

SEQ ID NO: 1179444 - RNA, 19 nt, Artificial Sequence
  Description of Artificial Sequence: Synthetic oligonucleotide
  Sense strand starting at position 78 of SEQ ID NO: 916728
guaugugguaacgaaauaa

SEQ ID NO: 1179445 - RNA, 19 nt, Artificial Sequence
  Description of Artificial Sequence: Synthetic oligonucleotide
  Antisense strand to SEQ ID NO: 1179444
uuauuucguuaccacauac

SEQ ID NO: 1179446 - RNA, 19 nt, Artificial Sequence
  Description of Artificial Sequence: Synthetic oligonucleotide
  Sense strand starting at position 375 of SEQ ID NO: 916728
uacugcaaggauuguaauu

SEQ ID NO: 1179447 - RNA, 19 nt, Artificial Sequence
  Description of Artificial Sequence: Synthetic oligonucleotide
  Antisense strand to SEQ ID NO: 1179446
aauuacaauccuugcagua

SEQ ID NO: 1179448 - RNA, 19 nt, Artificial Sequence
  Description of Artificial Sequence: Synthetic oligonucleotide
  Sense strand starting at position 432 of SEQ ID NO: 916728
guauacacucagcaaaugu

SEQ ID NO: 1179449 - RNA, 19 nt, Artificial Sequence
  Description of Artificial Sequence: Synthetic oligonucleotide
  Antisense strand to SEQ ID NO: 1179448
acauuugcugaguguauac

SEQ ID NO: 1179450 - RNA, 19 nt, Artificial Sequence
  Description of Artificial Sequence: Synthetic oligonucleotide
  Sense strand starting at position 468 of SEQ ID NO: 916728
ggauaugugugauuggaug

SEQ ID NO: 1179451 - RNA, 19 nt, Artificial Sequence
  Description of Artificial Sequence: Synthetic oligonucleotide
  Antisense strand to SEQ ID NO: 1179450
cauccaaucacacauaucc

SEQ ID NO: 1179452 - RNA, 19 nt, Artificial Sequence
  Description of Artificial Sequence: Synthetic oligonucleotide
  Sense strand starting at position 470 of SEQ ID NO: 916728
auaugugugauuggaugag

SEQ ID NO: 1179453 - RNA, 19 nt, Artificial Sequence
  Description of Artificial Sequence: Synthetic oligonucleotide
  Antisense strand to SEQ ID NO: 1179452
cucauccaaucacacauau

SEQ ID NO: 1179454 - RNA, 19 nt, Artificial Sequence
  Description of Artificial Sequence: Synthetic oligonucleotide
  Sense strand starting at position 528 of SEQ ID NO: 916728
aggacuacugcauggacaa

SEQ ID NO: 1179455 - RNA, 19 nt, Artificial Sequence
  Description of Artificial Sequence: Synthetic oligonucleotide
  Antisense strand to SEQ ID NO: 1179454
uuguccaugcaguaguccu

SEQ ID NO: 1179456 - RNA, 19 nt, Artificial Sequence
  Description of Artificial Sequence: Synthetic oligonucleotide
  Sense strand starting at position 638 of SEQ ID NO: 916728
gucugucugcauuaaauag

SEQ ID NO: 1179457 - RNA, 19 nt, Artificial Sequence
  Description of Artificial Sequence: Synthetic oligonucleotide
  Antisense strand to SEQ ID NO: 1179456
cuauuuaaugcagacagac

SEQ ID NO: 1179458 - RNA, 19 nt, Artificial Sequence
  Description of Artificial Sequence: Synthetic oligonucleotide
  Sense strand starting at position 648 of SEQ ID NO: 916728
auuaaauagaggugcuaug

SEQ ID NO: 1179459 - RNA, 19 nt, Artificial Sequence
  Description of Artificial Sequence: Synthetic oligonucleotide
  Antisense strand to SEQ ID NO: 1179458
cauagcaccucuauuuaau

SEQ ID NO: 1179460 - RNA, 19 nt, Artificial Sequence
  Description of Artificial Sequence: Synthetic oligonucleotide
  Sense strand starting at position 735 of SEQ ID NO: 916728
acuugauauugauucuggu

SEQ ID NO: 1179461 - RNA, 19 nt, Artificial Sequence
  Description of Artificial Sequence: Synthetic oligonucleotide
  Antisense strand to SEQ ID NO: 1179460
accagaaucaauaucaagu

SEQ ID NO: 1179462 - RNA, 19 nt, Artificial Sequence
  Description of Artificial Sequence: Synthetic oligonucleotide
  Sense strand starting at position 763 of SEQ ID NO: 916728
cuauuuauauuugggagca

SEQ ID NO: 1179463 - RNA, 19 nt, Artificial Sequence
  Description of Artificial Sequence: Synthetic oligonucleotide
  Antisense strand to SEQ ID NO: 1179462
ugcucccaaauauaaauag

SEQ ID NO: 1179464 - RNA, 19 nt, Artificial Sequence
  Description of Artificial Sequence: Synthetic oligonucleotide
  Sense strand starting at position 765 of SEQ ID NO: 916728
auuuauauuugggagcagu

SEQ ID NO: 1179465 - RNA, 19 nt, Artificial Sequence
  Description of Artificial Sequence: Synthetic oligonucleotide
  Antisense strand to SEQ ID NO: 1179464
acugcucccaaauauaaau

SEQ ID NO: 1179466 - RNA, 19 nt, Artificial Sequence
  Description of Artificial Sequence: Synthetic oligonucleotide
  Sense strand starting at position 810 of SEQ ID NO: 916728
aucaaaucuguccgaggga

SEQ ID NO: 1179467 - RNA, 19 nt, Artificial Sequence
  Description of Artificial Sequence: Synthetic oligonucleotide
  Antisense strand to SEQ ID NO: 1179466
ucccucggacagauuugau

SEQ ID NO: 1179468 - RNA, 19 nt, Artificial Sequence
  Description of Artificial Sequence: Synthetic oligonucleotide
  Sense strand starting at position 939 of SEQ ID NO: 916728
acaagaggauucuauuuga

SEQ ID NO: 1179469 - RNA, 19 nt, Artificial Sequence
  Description of Artificial Sequence: Synthetic oligonucleotide
  Antisense strand to SEQ ID NO: 1179468
ucaaauagaauccucuugu

SEQ ID NO: 1179470 - RNA, 19 nt, Artificial Sequence
  Description of Artificial Sequence: Synthetic oligonucleotide
  Sense strand starting at position 944 of SEQ ID NO: 916728
aggauucuauuugaaaccu

SEQ ID NO: 1179471 - RNA, 19 nt, Artificial Sequence
  Description of Artificial Sequence: Synthetic oligonucleotide
  Antisense strand to SEQ ID NO: 1179470
agguuucaaauagaauccu

SEQ ID NO: 1179472 - RNA, 19 nt, Artificial Sequence
  Description of Artificial Sequence: Synthetic oligonucleotide
  Sense strand starting at position 968 of SEQ ID NO: 916728
uccucuuauuggcuuagaa

SEQ ID NO: 1179473 - RNA, 19 nt, Artificial Sequence
  Description of Artificial Sequence: Synthetic oligonucleotide
  Antisense strand to SEQ ID NO: 1179472
uucuaagccaauaagagga

SEQ ID NO: 1179474 - RNA, 19 nt, Artificial Sequence
  Description of Artificial Sequence: Synthetic oligonucleotide
  Sense strand starting at position 1213 of SEQ ID NO: 916728
gugcauagccuagaaacaa

SEQ ID NO: 1179475 - RNA, 19 nt, Artificial Sequence
  Description of Artificial Sequence: Synthetic oligonucleotide
  Antisense strand to SEQ ID NO: 1179474
uuguuucuaggcuaugcac

SEQ ID NO: 1179476 - RNA, 19 nt, Artificial Sequence
  Description of Artificial Sequence: Synthetic oligonucleotide
  Sense strand starting at position 2191 of SEQ ID NO: 916728
agcugaugacauugucaac

SEQ ID NO: 1179477 - RNA, 19 nt, Artificial Sequence
  Description of Artificial Sequence: Synthetic oligonucleotide
  Antisense strand to SEQ ID NO: 1179476
guugacaaugucaucagcu

SEQ ID NO: 1179478 - RNA, 19 nt, Artificial Sequence
  Description of Artificial Sequence: Synthetic oligonucleotide
  Sense strand starting at position 2316 of SEQ ID NO: 916728
caggaauagaggugucuuc

SEQ ID NO: 1179479 - RNA, 19 nt, Artificial Sequence
  Description of Artificial Sequence: Synthetic oligonucleotide
  Antisense strand to SEQ ID NO: 1179478
gaagacaccucuauuccug

SEQ ID NO: 1179480 - RNA, 19 nt, Artificial Sequence
  Description of Artificial Sequence: Synthetic oligonucleotide
  Sense strand starting at position 2387 of SEQ ID NO: 916728
ugguguaagcaguaaccau

SEQ ID NO: 1179481 - RNA, 19 nt, Artificial Sequence
  Description of Artificial Sequence: Synthetic oligonucleotide
  Antisense strand to SEQ ID NO: 1179480
augguuacugcuuacacca

SEQ ID NO: 1179482 - RNA, 19 nt, Artificial Sequence
  Description of Artificial Sequence: Synthetic oligonucleotide
  Sense strand starting at position 2507 of SEQ ID NO: 916728
aaguccucacagugacaga

SEQ ID NO: 1179483 - RNA, 19 nt, Artificial Sequence
  Description of Artificial Sequence: Synthetic oligonucleotide
  Antisense strand to SEQ ID NO: 1179482
ucugucacugugaggacuu

SEQ ID NO: 1179484 - RNA, 19 nt, Artificial Sequence
  Description of Artificial Sequence: Synthetic oligonucleotide
  Sense strand starting at position 2552 of SEQ ID NO: 916728
aguagaauauauccaugua

SEQ ID NO: 1179485 - RNA, 19 nt, Artificial Sequence
  Description of Artificial Sequence: Synthetic oligonucleotide
  Antisense strand to SEQ ID NO: 1179484
uacauggauauauucuacu

SEQ ID NO: 1179486 - RNA, 19 nt, Artificial Sequence
  Description of Artificial Sequence: Synthetic oligonucleotide
  Sense strand starting at position 2601 of SEQ ID NO: 916728
cguggagguaauuaacuuu

SEQ ID NO: 1179487 - RNA, 19 nt, Artificial Sequence
  Description of Artificial Sequence: Synthetic oligonucleotide
  Antisense strand to SEQ ID NO: 1179486
aaaguuaauuaccuccacg

SEQ ID NO: 1179488 - RNA, 19 nt, Artificial Sequence
  Description of Artificial Sequence: Synthetic oligonucleotide
  Sense strand starting at position 2604 of SEQ ID NO: 916728
ggagguaauuaacuuuagu

SEQ ID NO: 1179489 - RNA, 19 nt, Artificial Sequence
  Description of Artificial Sequence: Synthetic oligonucleotide
  Antisense strand to SEQ ID NO: 1179488
acuaaaguuaauuaccucc

SEQ ID NO: 1179490 - RNA, 19 nt, Artificial Sequence
  Description of Artificial Sequence: Synthetic oligonucleotide
  Sense strand starting at position 2744 of SEQ ID NO: 916728
caucuaagucuuuggagug

SEQ ID NO: 1179491 - RNA, 19 nt, Artificial Sequence
  Description of Artificial Sequence: Synthetic oligonucleotide
  Antisense strand to SEQ ID NO: 1179490
cacuccaaagacuuagaug

SEQ ID NO: 1179492 - RNA, 19 nt, Artificial Sequence
  Description of Artificial Sequence: Synthetic oligonucleotide
  Sense strand starting at position 2749 of SEQ ID NO: 916728
aagucuuuggaguguggaa

SEQ ID NO: 1179493 - RNA, 19 nt, Artificial Sequence
  Description of Artificial Sequence: Synthetic oligonucleotide
  Antisense strand to SEQ ID NO: 1179492
uuccacacuccaaagacuu

SEQ ID NO: 1179494 - RNA, 19 nt, Artificial Sequence
  Description of Artificial Sequence: Synthetic oligonucleotide
  Sense strand starting at position 2761 of SEQ ID NO: 916728
uguggaaagccuuauuagu

SEQ ID NO: 1179495 - RNA, 19 nt, Artificial Sequence
  Description of Artificial Sequence: Synthetic oligonucleotide
  Antisense strand to SEQ ID NO: 1179494
acuaauaaggcuuuccaca

SEQ ID NO: 1179496 - RNA, 19 nt, Artificial Sequence
  Description of Artificial Sequence: Synthetic oligonucleotide
  Sense strand starting at position 2763 of SEQ ID NO: 916728
uggaaagccuuauuaguca

SEQ ID NO: 1179497 - RNA, 19 nt, Artificial Sequence
  Description of Artificial Sequence: Synthetic oligonucleotide
  Antisense strand to SEQ ID NO: 1179496
ugacuaauaaggcuuucca

SEQ ID NO: 1179498 - RNA, 19 nt, Artificial Sequence
  Description of Artificial Sequence: Synthetic oligonucleotide
  Sense strand starting at position 2987 of SEQ ID NO: 916728
ucuagauuacagugaucuu

SEQ ID NO: 1179499 - RNA, 19 nt, Artificial Sequence
  Description of Artificial Sequence: Synthetic oligonucleotide
  Antisense strand to SEQ ID NO: 1179498
aagaucacuguaaucuaga

SEQ ID NO: 1179500 - RNA, 19 nt, Artificial Sequence
  Description of Artificial Sequence: Synthetic oligonucleotide
  Sense strand starting at position 2990 of SEQ ID NO: 916728
agauuacagugaucuuucu

SEQ ID NO: 1179501 - RNA, 19 nt, Artificial Sequence
  Description of Artificial Sequence: Synthetic oligonucleotide
  Antisense strand to SEQ ID NO: 1179500
agaaagaucacuguaaucu

SEQ ID NO: 1179502 - RNA, 19 nt, Artificial Sequence
  Description of Artificial Sequence: Synthetic oligonucleotide
  Sense strand starting at position 3022 of SEQ ID NO: 916728
uguuuagccgugccucaua

SEQ ID NO: 1179503 - RNA, 19 nt, Artificial Sequence
  Description of Artificial Sequence: Synthetic oligonucleotide
  Antisense strand to SEQ ID NO: 1179502
uaugaggcacggcuaaaca

SEQ ID NO: 1179504 - RNA, 19 nt, Artificial Sequence
  Description of Artificial Sequence: Synthetic oligonucleotide
  Sense strand starting at position 3024 of SEQ ID NO: 916728
uuuagccgugccucauauu

SEQ ID NO: 1179505 - RNA, 19 nt, Artificial Sequence
  Description of Artificial Sequence: Synthetic oligonucleotide
  Antisense strand to SEQ ID NO: 1179504
aauaugaggcacggcuaaa

SEQ ID NO: 1179506 - RNA, 19 nt, Artificial Sequence
  Description of Artificial Sequence: Synthetic oligonucleotide
  Sense strand starting at position 3253 of SEQ ID NO: 916728
ggcuauccaccagagcuua

SEQ ID NO: 1179507 - RNA, 19 nt, Artificial Sequence
  Description of Artificial Sequence: Synthetic oligonucleotide
  Antisense strand to SEQ ID NO: 1179506
uaagcucugguggauagcc

SEQ ID NO: 1179508 - RNA, 19 nt, Artificial Sequence
  Description of Artificial Sequence: Synthetic oligonucleotide
  Sense strand starting at position 3516 of SEQ ID NO: 916728
acuccauuucuguggcacu

SEQ ID NO: 1179509 - RNA, 19 nt, Artificial Sequence
  Description of Artificial Sequence: Synthetic oligonucleotide
  Antisense strand to SEQ ID NO: 1179508
agugccacagaaauggagu

SEQ ID NO: 1179510 - RNA, 19 nt, Artificial Sequence
  Description of Artificial Sequence: Synthetic oligonucleotide
  Sense strand starting at position 3711 of SEQ ID NO: 916728
guugaagaacuuugaugac

SEQ ID NO: 1179511 - RNA, 19 nt, Artificial Sequence
  Description of Artificial Sequence: Synthetic oligonucleotide
  Antisense strand to SEQ ID NO: 1179510
gucaucaaaguucuucaac

SEQ ID NO: 1179512 - RNA, 19 nt, Artificial Sequence
  Description of Artificial Sequence: Synthetic oligonucleotide
  Sense strand starting at position 3754 of SEQ ID NO: 916728
agagcaaugccucaugcaa

SEQ ID NO: 1179513 - RNA, 19 nt, Artificial Sequence
  Description of Artificial Sequence: Synthetic oligonucleotide
  Antisense strand to SEQ ID NO: 1179512
uugcaugaggcauugcucu

SEQ ID NO: 1179514 - RNA, 19 nt, Artificial Sequence
  Description of Artificial Sequence: Synthetic oligonucleotide
  Sense strand starting at position 3840 of SEQ ID NO: 916728
uugaaauucuuacugaguc

SEQ ID NO: 1179515 - RNA, 19 nt, Artificial Sequence
  Description of Artificial Sequence: Synthetic oligonucleotide
  Antisense strand to SEQ ID NO: 1179514
gacucaguaagaauuucaa

SEQ ID NO: 1179516 - RNA, 19 nt, Artificial Sequence
  Description of Artificial Sequence: Synthetic oligonucleotide
  Sense strand starting at position 3853 of SEQ ID NO: 916728
ugagucaaccuuugagaua

SEQ ID NO: 1179517 - RNA, 19 nt, Artificial Sequence
  Description of Artificial Sequence: Synthetic oligonucleotide
  Antisense strand to SEQ ID NO: 1179516
uaucucaaagguugacuca

SEQ ID NO: 1179518 - RNA, 19 nt, Artificial Sequence
  Description of Artificial Sequence: Synthetic oligonucleotide
  Sense strand starting at position 3884 of SEQ ID NO: 916728
uucuguaaagcuuagaaga

SEQ ID NO: 1179519 - RNA, 19 nt, Artificial Sequence
  Description of Artificial Sequence: Synthetic oligonucleotide
  Antisense strand to SEQ ID NO: 1179518
ucuucuaagcuuuacagaa

SEQ ID NO: 1179520 - RNA, 19 nt, Artificial Sequence
  Description of Artificial Sequence: Synthetic oligonucleotide
  Sense strand starting at position 153 of SEQ ID NO: 916729
cccuaauugugacugacaa

SEQ ID NO: 1179521 - RNA, 19 nt, Artificial Sequence
  Description of Artificial Sequence: Synthetic oligonucleotide
  Antisense strand to SEQ ID NO: 1179520
uugucagucacaauuaggg

SEQ ID NO: 1179522 - RNA, 19 nt, Artificial Sequence
  Description of Artificial Sequence: Synthetic oligonucleotide
  Sense strand starting at position 154 of SEQ ID NO: 916729
ccuaauugugacugacaag

SEQ ID NO: 1179523 - RNA, 19 nt, Artificial Sequence
  Description of Artificial Sequence: Synthetic oligonucleotide
  Antisense strand to SEQ ID NO: 1179522
cuugucagucacaauuagg

SEQ ID NO: 1179524 - RNA, 19 nt, Artificial Sequence
  Description of Artificial Sequence: Synthetic oligonucleotide
  Sense strand starting at position 176 of SEQ ID NO: 916729
gggaacagcacuugagauu

SEQ ID NO: 1179525 - RNA, 19 nt, Artificial Sequence
  Description of Artificial Sequence: Synthetic oligonucleotide
  Antisense strand to SEQ ID NO: 1179524
aaucucaagugcuguuccc

SEQ ID NO: 1179526 - RNA, 19 nt, Artificial Sequence
  Description of Artificial Sequence: Synthetic oligonucleotide
  Sense strand starting at position 393 of SEQ ID NO: 916729
uuuguuuauugagucacaa

SEQ ID NO: 1179527 - RNA, 19 nt, Artificial Sequence
  Description of Artificial Sequence: Synthetic oligonucleotide
  Antisense strand to SEQ ID NO: 1179526
uugugacucaauaaacaaa

SEQ ID NO: 1179528 - RNA, 19 nt, Artificial Sequence
  Description of Artificial Sequence: Synthetic oligonucleotide
  Sense strand starting at position 449 of SEQ ID NO: 916729
aggagcuaccucugaauuc

SEQ ID NO: 1179529 - RNA, 19 nt, Artificial Sequence
  Description of Artificial Sequence: Synthetic oligonucleotide
  Antisense strand to SEQ ID NO: 1179528
gaauucagagguagcuccu

SEQ ID NO: 1179530 - RNA, 19 nt, Artificial Sequence
  Description of Artificial Sequence: Synthetic oligonucleotide
  Sense strand starting at position 1070 of SEQ ID NO: 916729
uuaguagucuaccuaacuu

SEQ ID NO: 1179531 - RNA, 19 nt, Artificial Sequence
  Description of Artificial Sequence: Synthetic oligonucleotide
  Antisense strand to SEQ ID NO: 1179530
aaguuagguagacuacuaa

SEQ ID NO: 1179532 - RNA, 19 nt, Artificial Sequence
  Description of Artificial Sequence: Synthetic oligonucleotide
  Sense strand starting at position 1083 of SEQ ID NO: 916729
uaacuuagccuuugagggu

SEQ ID NO: 1179533 - RNA, 19 nt, Artificial Sequence
  Description of Artificial Sequence: Synthetic oligonucleotide
  Antisense strand to SEQ ID NO: 1179532
acccucaaaggcuaaguua

SEQ ID NO: 1179534 - RNA, 19 nt, Artificial Sequence
  Description of Artificial Sequence: Synthetic oligonucleotide
  Sense strand starting at position 1087 of SEQ ID NO: 916729
uuagccuuugaggguauaa

SEQ ID NO: 1179535 - RNA, 19 nt, Artificial Sequence
  Description of Artificial Sequence: Synthetic oligonucleotide
  Antisense strand to SEQ ID NO: 1179534
uuauacccucaaaggcuaa

SEQ ID NO: 1179536 - RNA, 19 nt, Artificial Sequence
  Description of Artificial Sequence: Synthetic oligonucleotide
  Sense strand starting at position 1089 of SEQ ID NO: 916729
agccuuugaggguauaauc

SEQ ID NO: 1179537 - RNA, 19 nt, Artificial Sequence
  Description of Artificial Sequence: Synthetic oligonucleotide
  Antisense strand to SEQ ID NO: 1179536
gauuauacccucaaaggcu

SEQ ID NO: 1179538 - RNA, 19 nt, Artificial Sequence
  Description of Artificial Sequence: Synthetic oligonucleotide
  Sense strand starting at position 1097 of SEQ ID NO: 916729
aggguauaaucaucuccuu

SEQ ID NO: 1179539 - RNA, 19 nt, Artificial Sequence
  Description of Artificial Sequence: Synthetic oligonucleotide
  Antisense strand to SEQ ID NO: 1179538
aaggagaugauuauacccu

SEQ ID NO: 1179540 - RNA, 19 nt, Artificial Sequence
  Description of Artificial Sequence: Synthetic oligonucleotide
  Sense strand starting at position 1162 of SEQ ID NO: 916729
uuccuuagggaguaaucuu

SEQ ID NO: 1179541 - RNA, 19 nt, Artificial Sequence
  Description of Artificial Sequence: Synthetic oligonucleotide
  Antisense strand to SEQ ID NO: 1179540
aagauuacucccuaaggaa

SEQ ID NO: 1179542 - RNA, 19 nt, Artificial Sequence
  Description of Artificial Sequence: Synthetic oligonucleotide
  Sense strand starting at position 1170 of SEQ ID NO: 916729
ggaguaaucuugucucaaa

SEQ ID NO: 1179543 - RNA, 19 nt, Artificial Sequence
  Description of Artificial Sequence: Synthetic oligonucleotide
  Antisense strand to SEQ ID NO: 1179542
uuugagacaagauuacucc

SEQ ID NO: 1179544 - RNA, 19 nt, Artificial Sequence
  Description of Artificial Sequence: Synthetic oligonucleotide
  Sense strand starting at position 1171 of SEQ ID NO: 916729
gaguaaucuugucucaaag

SEQ ID NO: 1179545 - RNA, 19 nt, Artificial Sequence
  Description of Artificial Sequence: Synthetic oligonucleotide
  Antisense strand to SEQ ID NO: 1179544
cuuugagacaagauuacuc

SEQ ID NO: 1179546 - RNA, 19 nt, Artificial Sequence
  Description of Artificial Sequence: Synthetic oligonucleotide
  Sense strand starting at position 1304 of SEQ ID NO: 916729
cucaguaaaucacugucua

SEQ ID NO: 1179547 - RNA, 19 nt, Artificial Sequence
  Description of Artificial Sequence: Synthetic oligonucleotide
  Antisense strand to SEQ ID NO: 1179546
uagacagugauuuacugag

SEQ ID NO: 1179548 - RNA, 19 nt, Artificial Sequence
  Description of Artificial Sequence: Synthetic oligonucleotide
  Sense strand starting at position 1305 of SEQ ID NO: 916729
ucaguaaaucacugucuaa

SEQ ID NO: 1179549 - RNA, 19 nt, Artificial Sequence
  Description of Artificial Sequence: Synthetic oligonucleotide
  Antisense strand to SEQ ID NO: 1179548
uuagacagugauuuacuga

SEQ ID NO: 1179550 - RNA, 19 nt, Artificial Sequence
  Description of Artificial Sequence: Synthetic oligonucleotide
  Sense strand starting at position 1333 of SEQ ID NO: 916729
cucagaguugaucaaguua

SEQ ID NO: 1179551 - RNA, 19 nt, Artificial Sequence
  Description of Artificial Sequence: Synthetic oligonucleotide
  Antisense strand to SEQ ID NO: 1179550
uaacuugaucaacucugag

SEQ ID NO: 1179552 - RNA, 19 nt, Artificial Sequence
  Description of Artificial Sequence: Synthetic oligonucleotide
  Sense strand starting at position 1453 of SEQ ID NO: 916729
ccuaaucuagcaggaucau

SEQ ID NO: 1179553 - RNA, 19 nt, Artificial Sequence
  Description of Artificial Sequence: Synthetic oligonucleotide
  Antisense strand to SEQ ID NO: 1179552
augauccugcuagauuagg

SEQ ID NO: 1179554 - RNA, 19 nt, Artificial Sequence
  Description of Artificial Sequence: Synthetic oligonucleotide
  Sense strand starting at position 1465 of SEQ ID NO: 916729
ggaucauagucuuccuucu

SEQ ID NO: 1179555 - RNA, 19 nt, Artificial Sequence
  Description of Artificial Sequence: Synthetic oligonucleotide
  Antisense strand to SEQ ID NO: 1179554
agaaggaagacuaugaucc

SEQ ID NO: 1179556 - RNA, 19 nt, Artificial Sequence
  Description of Artificial Sequence: Synthetic oligonucleotide
  Sense strand starting at position 1708 of SEQ ID NO: 916729
cagaaaguccgacguuaaa

SEQ ID NO: 1179557 - RNA, 19 nt, Artificial Sequence
  Description of Artificial Sequence: Synthetic oligonucleotide
  Antisense strand to SEQ ID NO: 1179556
uuuaacgucggacuuucug

SEQ ID NO: 1179558 - RNA, 19 nt, Artificial Sequence
  Description of Artificial Sequence: Synthetic oligonucleotide
  Sense strand starting at position 1931 of SEQ ID NO: 916729
gucccaggcuuucuaaaca

SEQ ID NO: 1179559 - RNA, 19 nt, Artificial Sequence
  Description of Artificial Sequence: Synthetic oligonucleotide
  Antisense strand to SEQ ID NO: 1179558
uguuuagaaagccugggac

SEQ ID NO: 1179560 - RNA, 19 nt, Artificial Sequence
  Description of Artificial Sequence: Synthetic oligonucleotide
  Sense strand starting at position 2015 of SEQ ID NO: 916729
ggaggaaauuguuucugau

SEQ ID NO: 1179561 - RNA, 19 nt, Artificial Sequence
  Description of Artificial Sequence: Synthetic oligonucleotide
  Antisense strand to SEQ ID NO: 1179560
aucagaaacaauuuccucc

SEQ ID NO: 1179562 - RNA, 19 nt, Artificial Sequence
  Description of Artificial Sequence: Synthetic oligonucleotide
  Sense strand starting at position 2418 of SEQ ID NO: 916729
augaauaaagugugcauga

SEQ ID NO: 1179563 - RNA, 19 nt, Artificial Sequence
  Description of Artificial Sequence: Synthetic oligonucleotide
  Antisense strand to SEQ ID NO: 1179562
ucaugcacacuuuauucau

SEQ ID NO: 1179564 - RNA, 19 nt, Artificial Sequence
  Description of Artificial Sequence: Synthetic oligonucleotide
  Sense strand starting at position 2420 of SEQ ID NO: 916729
gaauaaagugugcaugacu

SEQ ID NO: 1179565 - RNA, 19 nt, Artificial Sequence
  Description of Artificial Sequence: Synthetic oligonucleotide
  Antisense strand to SEQ ID NO: 1179564
agucaugcacacuuuauuc

SEQ ID NO: 1179566 - RNA, 19 nt, Artificial Sequence
  Description of Artificial Sequence: Synthetic oligonucleotide
  Sense strand starting at position 2423 of SEQ ID NO: 916729
uaaagugugcaugacucua

SEQ ID NO: 1179567 - RNA, 19 nt, Artificial Sequence
  Description of Artificial Sequence: Synthetic oligonucleotide
  Antisense strand to SEQ ID NO: 1179566
uagagucaugcacacuuua

SEQ ID NO: 1179568 - RNA, 19 nt, Artificial Sequence
  Description of Artificial Sequence: Synthetic oligonucleotide
  Sense strand starting at position 2428 of SEQ ID NO: 916729
ugugcaugacucuauuaau

SEQ ID NO: 1179569 - RNA, 19 nt, Artificial Sequence
  Description of Artificial Sequence: Synthetic oligonucleotide
  Antisense strand to SEQ ID NO: 1179568
auuaauagagucaugcaca

SEQ ID NO: 1179570 - RNA, 19 nt, Artificial Sequence
  Description of Artificial Sequence: Synthetic oligonucleotide
  Sense strand starting at position 2709 of SEQ ID NO: 916729
uuaagaaggccuggaguaa

SEQ ID NO: 1179571 - RNA, 19 nt, Artificial Sequence
  Description of Artificial Sequence: Synthetic oligonucleotide
  Antisense strand to SEQ ID NO: 1179570
uuacuccaggccuucuuaa

SEQ ID NO: 1179572 - RNA, 19 nt, Artificial Sequence
  Description of Artificial Sequence: Synthetic oligonucleotide
  Sense strand starting at position 2742 of SEQ ID NO: 916729
gugucugaacuuugaaauc

SEQ ID NO: 1179573 - RNA, 19 nt, Artificial Sequence
  Description of Artificial Sequence: Synthetic oligonucleotide
  Antisense strand to SEQ ID NO: 1179572
gauuucaaaguucagacac

SEQ ID NO: 1179574 - RNA, 19 nt, Artificial Sequence
  Description of Artificial Sequence: Synthetic oligonucleotide
  Sense strand starting at position 2969 of SEQ ID NO: 916729
augcuaacguaaucaggau

SEQ ID NO: 1179575 - RNA, 19 nt, Artificial Sequence
  Description of Artificial Sequence: Synthetic oligonucleotide
  Antisense strand to SEQ ID NO: 1179574
auccugauuacguuagcau

SEQ ID NO: 1179576 - RNA, 19 nt, Artificial Sequence
  Description of Artificial Sequence: Synthetic oligonucleotide
  Sense strand starting at position 2970 of SEQ ID NO: 916729
ugcuaacguaaucaggauu

SEQ ID NO: 1179577 - RNA, 19 nt, Artificial Sequence
  Description of Artificial Sequence: Synthetic oligonucleotide
  Antisense strand to SEQ ID NO: 1179576
aauccugauuacguuagca

SEQ ID NO: 1179578 - RNA, 19 nt, Artificial Sequence
  Description of Artificial Sequence: Synthetic oligonucleotide
  Sense strand starting at position 2973 of SEQ ID NO: 916729
uaacguaaucaggauucua

SEQ ID NO: 1179579 - RNA, 19 nt, Artificial Sequence
  Description of Artificial Sequence: Synthetic oligonucleotide
  Antisense strand to SEQ ID NO: 1179578
uagaauccugauuacguua

SEQ ID NO: 1179580 - RNA, 19 nt, Artificial Sequence
  Description of Artificial Sequence: Synthetic oligonucleotide
  Sense strand starting at position 3013 of SEQ ID NO: 916729
cgaugugcucacuaauuau

SEQ ID NO: 1179581 - RNA, 19 nt, Artificial Sequence
  Description of Artificial Sequence: Synthetic oligonucleotide
  Antisense strand to SEQ ID NO: 1179580
auaauuagugagcacaucg

SEQ ID NO: 1179582 - RNA, 19 nt, Artificial Sequence
  Description of Artificial Sequence: Synthetic oligonucleotide
  Sense strand starting at position 3395 of SEQ ID NO: 916729
ucaaguaggcagcauaaau

SEQ ID NO: 1179583 - RNA, 19 nt, Artificial Sequence
  Description of Artificial Sequence: Synthetic oligonucleotide
  Antisense strand to SEQ ID NO: 1179582
auuuaugcugccuacuuga

SEQ ID NO: 1179584 - RNA, 19 nt, Artificial Sequence
  Description of Artificial Sequence: Synthetic oligonucleotide
  Sense strand starting at position 3426 of SEQ ID NO: 916729
aguauaaggaguugagcuu

SEQ ID NO: 1179585 - RNA, 19 nt, Artificial Sequence
  Description of Artificial Sequence: Synthetic oligonucleotide
  Antisense strand to SEQ ID NO: 1179584
aagcucaacuccuuauacu

SEQ ID NO: 1179586 - RNA, 19 nt, Artificial Sequence
  Description of Artificial Sequence: Synthetic oligonucleotide
  Sense strand starting at position 3427 of SEQ ID NO: 916729
guauaaggaguugagcuua

SEQ ID NO: 1179587 - RNA, 19 nt, Artificial Sequence
  Description of Artificial Sequence: Synthetic oligonucleotide
  Antisense strand to SEQ ID NO: 1179586
uaagcucaacuccuuauac

SEQ ID NO: 1179588 - RNA, 19 nt, Artificial Sequence
  Description of Artificial Sequence: Synthetic oligonucleotide
  Sense strand starting at position 3438 of SEQ ID NO: 916729
ugagcuuaagcccauguaa

SEQ ID NO: 1179589 - RNA, 19 nt, Artificial Sequence
  Description of Artificial Sequence: Synthetic oligonucleotide
  Antisense strand to SEQ ID NO: 1179588
uuacaugggcuuaagcuca

SEQ ID NO: 1179590 - RNA, 19 nt, Artificial Sequence
  Description of Artificial Sequence: Synthetic oligonucleotide
  Sense strand starting at position 3761 of SEQ ID NO: 916729
cuacuauauuuguacagag

SEQ ID NO: 1179591 - RNA, 19 nt, Artificial Sequence
  Description of Artificial Sequence: Synthetic oligonucleotide
  Antisense strand to SEQ ID NO: 1179590
cucuguacaaauauaguag

SEQ ID NO: 1179592 - RNA, 19 nt, Artificial Sequence
  Description of Artificial Sequence: Synthetic oligonucleotide
  Sense strand starting at position 3791 of SEQ ID NO: 916729
uugauaagggcaggguaau

SEQ ID NO: 1179593 - RNA, 19 nt, Artificial Sequence
  Description of Artificial Sequence: Synthetic oligonucleotide
  Antisense strand to SEQ ID NO: 1179592
auuacccugcccuuaucaa

SEQ ID NO: 1179594 - RNA, 19 nt, Artificial Sequence
  Description of Artificial Sequence: Synthetic oligonucleotide
  Sense strand starting at position 3792 of SEQ ID NO: 916729
ugauaagggcaggguaaua

SEQ ID NO: 1179595 - RNA, 19 nt, Artificial Sequence
  Description of Artificial Sequence: Synthetic oligonucleotide
  Antisense strand to SEQ ID NO: 1179594
uauuacccugcccuuauca

SEQ ID NO: 1179596 - RNA, 19 nt, Artificial Sequence
  Description of Artificial Sequence: Synthetic oligonucleotide
  Sense strand starting at position 3812 of SEQ ID NO: 916729
auggacaaguuuguaguua

SEQ ID NO: 1179597 - RNA, 19 nt, Artificial Sequence
  Description of Artificial Sequence: Synthetic oligonucleotide
  Antisense strand to SEQ ID NO: 1179596
uaacuacaaacuuguccau

SEQ ID NO: 1179598 - RNA, 19 nt, Artificial Sequence
  Description of Artificial Sequence: Synthetic oligonucleotide
  Sense strand starting at position 3816 of SEQ ID NO: 916729
acaaguuuguaguuaagag

SEQ ID NO: 1179599 - RNA, 19 nt, Artificial Sequence
  Description of Artificial Sequence: Synthetic oligonucleotide
  Antisense strand to SEQ ID NO: 1179598
cucuuaacuacaaacuugu

SEQ ID NO: 1179600 - RNA, 19 nt, Artificial Sequence
  Description of Artificial Sequence: Synthetic oligonucleotide
  Sense strand starting at position 134 of SEQ ID NO: 916730
ugccgaaguuaagcauuau

SEQ ID NO: 1179601 - RNA, 19 nt, Artificial Sequence
  Description of Artificial Sequence: Synthetic oligonucleotide
  Antisense strand to SEQ ID NO: 1179600
auaaugcuuaacuucggca

SEQ ID NO: 1179602 - RNA, 19 nt, Artificial Sequence
  Description of Artificial Sequence: Synthetic oligonucleotide
  Sense strand starting at position 135 of SEQ ID NO: 916730
gccgaaguuaagcauuauu

SEQ ID NO: 1179603 - RNA, 19 nt, Artificial Sequence
  Description of Artificial Sequence: Synthetic oligonucleotide
  Antisense strand to SEQ ID NO: 1179602
aauaaugcuuaacuucggc

SEQ ID NO: 1179604 - RNA, 19 nt, Artificial Sequence
  Description of Artificial Sequence: Synthetic oligonucleotide
  Sense strand starting at position 192 of SEQ ID NO: 916730
gcaugaacuucuguggaaa

SEQ ID NO: 1179605 - RNA, 19 nt, Artificial Sequence
  Description of Artificial Sequence: Synthetic oligonucleotide
  Antisense strand to SEQ ID NO: 1179604
uuuccacagaaguucaugc

SEQ ID NO: 1179606 - RNA, 19 nt, Artificial Sequence
  Description of Artificial Sequence: Synthetic oligonucleotide
  Sense strand starting at position 193 of SEQ ID NO: 916730
caugaacuucuguggaaau

SEQ ID NO: 1179607 - RNA, 19 nt, Artificial Sequence
  Description of Artificial Sequence: Synthetic oligonucleotide
  Antisense strand to SEQ ID NO: 1179606
auuuccacagaaguucaug

SEQ ID NO: 1179608 - RNA, 19 nt, Artificial Sequence
  Description of Artificial Sequence: Synthetic oligonucleotide
  Sense strand starting at position 194 of SEQ ID NO: 916730
augaacuucuguggaaaug

SEQ ID NO: 1179609 - RNA, 19 nt, Artificial Sequence
  Description of Artificial Sequence: Synthetic oligonucleotide
  Antisense strand to SEQ ID NO: 1179608
cauuuccacagaaguucau

SEQ ID NO: 1179610 - RNA, 19 nt, Artificial Sequence
  Description of Artificial Sequence: Synthetic oligonucleotide
  Sense strand starting at position 195 of SEQ ID NO: 916730
ugaacuucuguggaaaugu

SEQ ID NO: 1179611 - RNA, 19 nt, Artificial Sequence
  Description of Artificial Sequence: Synthetic oligonucleotide
  Antisense strand to SEQ ID NO: 1179610
acauuuccacagaaguuca

SEQ ID NO: 1179612 - RNA, 19 nt, Artificial Sequence
  Description of Artificial Sequence: Synthetic oligonucleotide
  Sense strand starting at position 1448 of SEQ ID NO: 916730
cggucauuaccaggacgga

SEQ ID NO: 1179613 - RNA, 19 nt, Artificial Sequence
  Description of Artificial Sequence: Synthetic oligonucleotide
  Antisense strand to SEQ ID NO: 1179612
uccguccugguaaugaccg

SEQ ID NO: 1179614 - RNA, 19 nt, Artificial Sequence
  Description of Artificial Sequence: Synthetic oligonucleotide
  Sense strand starting at position 2643 of SEQ ID NO: 916730
gcgcgaucucggcucggaa

SEQ ID NO: 1179615 - RNA, 19 nt, Artificial Sequence
  Description of Artificial Sequence: Synthetic oligonucleotide
  Antisense strand to SEQ ID NO: 1179614
uuccgagccgagaucgcgc

SEQ ID NO: 1179616 - RNA, 19 nt, Artificial Sequence
  Description of Artificial Sequence: Synthetic oligonucleotide
  Sense strand starting at position 2644 of SEQ ID NO: 916730
cgcgaucucggcucggaau

SEQ ID NO: 1179617 - RNA, 19 nt, Artificial Sequence
  Description of Artificial Sequence: Synthetic oligonucleotide
  Antisense strand to SEQ ID NO: 1179616
auuccgagccgagaucgcg

SEQ ID NO: 1179618 - RNA, 19 nt, Artificial Sequence
  Description of Artificial Sequence: Synthetic oligonucleotide
  Sense strand starting at position 3089 of SEQ ID NO: 916730
cgcagauaaucuggcauaa

SEQ ID NO: 1179619 - RNA, 19 nt, Artificial Sequence
  Description of Artificial Sequence: Synthetic oligonucleotide
  Antisense strand to SEQ ID NO: 1179618
uuaugccagauuaucugcg

SEQ ID NO: 1179620 - RNA, 19 nt, Artificial Sequence
  Description of Artificial Sequence: Synthetic oligonucleotide
  Sense strand starting at position 3169 of SEQ ID NO: 916730
gggaaugagccauggaggu

SEQ ID NO: 1179621 - RNA, 19 nt, Artificial Sequence
  Description of Artificial Sequence: Synthetic oligonucleotide
  Antisense strand to SEQ ID NO: 1179620
accuccauggcucauuccc

SEQ ID NO: 1179622 - RNA, 19 nt, Artificial Sequence
  Description of Artificial Sequence: Synthetic oligonucleotide
  Sense strand starting at position 3443 of SEQ ID NO: 916730
cuuggcauuggcuaugagu

SEQ ID NO: 1179623 - RNA, 19 nt, Artificial Sequence
  Description of Artificial Sequence: Synthetic oligonucleotide
  Antisense strand to SEQ ID NO: 1179622
acucauagccaaugccaag

SEQ ID NO: 1179624 - RNA, 19 nt, Artificial Sequence
  Description of Artificial Sequence: Synthetic oligonucleotide
  Sense strand starting at position 3445 of SEQ ID NO: 916730
uggcauuggcuaugaguga

SEQ ID NO: 1179625 - RNA, 19 nt, Artificial Sequence
  Description of Artificial Sequence: Synthetic oligonucleotide
  Antisense strand to SEQ ID NO: 1179624
ucacucauagccaaugcca

SEQ ID NO: 1179626 - RNA, 19 nt, Artificial Sequence
  Description of Artificial Sequence: Synthetic oligonucleotide
  Sense strand starting at position 3452 of SEQ ID NO: 916730
ggcuaugagugagauggga

SEQ ID NO: 1179627 - RNA, 19 nt, Artificial Sequence
  Description of Artificial Sequence: Synthetic oligonucleotide
  Antisense strand to SEQ ID NO: 1179626
ucccaucucacucauagcc

SEQ ID NO: 1179628 - RNA, 19 nt, Artificial Sequence
  Description of Artificial Sequence: Synthetic oligonucleotide
  Sense strand starting at position 3571 of SEQ ID NO: 916730
gggagaugcaauuguccag

SEQ ID NO: 1179629 - RNA, 19 nt, Artificial Sequence
  Description of Artificial Sequence: Synthetic oligonucleotide
  Antisense strand to SEQ ID NO: 1179628
cuggacaauugcaucuccc

SEQ ID NO: 1179630 - RNA, 19 nt, Artificial Sequence
  Description of Artificial Sequence: Synthetic oligonucleotide
  Sense strand starting at position 3598 of SEQ ID NO: 916730
guggcucagcuguauaagu

SEQ ID NO: 1179631 - RNA, 19 nt, Artificial Sequence
  Description of Artificial Sequence: Synthetic oligonucleotide
  Antisense strand to SEQ ID NO: 1179630
acuuauacagcugagccac

SEQ ID NO: 1179632 - RNA, 19 nt, Artificial Sequence
  Description of Artificial Sequence: Synthetic oligonucleotide
  Sense strand starting at position 3600 of SEQ ID NO: 916730
ggcucagcuguauaaguga

SEQ ID NO: 1179633 - RNA, 19 nt, Artificial Sequence
  Description of Artificial Sequence: Synthetic oligonucleotide
  Antisense strand to SEQ ID NO: 1179632
ucacuuauacagcugagcc

SEQ ID NO: 1179634 - RNA, 19 nt, Artificial Sequence
  Description of Artificial Sequence: Synthetic oligonucleotide
  Sense strand starting at position 3695 of SEQ ID NO: 916730
gccacaguucuguggcagu

SEQ ID NO: 1179635 - RNA, 19 nt, Artificial Sequence
  Description of Artificial Sequence: Synthetic oligonucleotide
  Antisense strand to SEQ ID NO: 1179634
acugccacagaacuguggc

SEQ ID NO: 1179636 - RNA, 19 nt, Artificial Sequence
  Description of Artificial Sequence: Synthetic oligonucleotide
  Sense strand starting at position 3882 of SEQ ID NO: 916730
gcagaaacaaccgauaugu

SEQ ID NO: 1179637 - RNA, 19 nt, Artificial Sequence
  Description of Artificial Sequence: Synthetic oligonucleotide
  Antisense strand to SEQ ID NO: 1179636
acauaucgguuguuucugc

SEQ ID NO: 1179638 - RNA, 19 nt, Artificial Sequence
  Description of Artificial Sequence: Synthetic oligonucleotide
  Sense strand starting at position 3892 of SEQ ID NO: 916730
ccgauaugucggcagguga

SEQ ID NO: 1179639 - RNA, 19 nt, Artificial Sequence
  Description of Artificial Sequence: Synthetic oligonucleotide
  Antisense strand to SEQ ID NO: 1179638
ucaccugccgacauaucgg

SEQ ID NO: 1179640 - RNA, 19 nt, Artificial Sequence
  Description of Artificial Sequence: Synthetic oligonucleotide
  Sense strand starting at position 3893 of SEQ ID NO: 916730
cgauaugucggcaggugaa

SEQ ID NO: 1179641 - RNA, 19 nt, Artificial Sequence
  Description of Artificial Sequence: Synthetic oligonucleotide
  Antisense strand to SEQ ID NO: 1179640
uucaccugccgacauaucg

SEQ ID NO: 1179642 - RNA, 19 nt, Artificial Sequence
  Description of Artificial Sequence: Synthetic oligonucleotide
  Sense strand starting at position 81 of SEQ ID NO: 916731
ugccgaaguuaagcauuau

SEQ ID NO: 1179643 - RNA, 19 nt, Artificial Sequence
  Description of Artificial Sequence: Synthetic oligonucleotide
  Antisense strand to SEQ ID NO: 1179642
auaaugcuuaacuucggca

SEQ ID NO: 1179644 - RNA, 19 nt, Artificial Sequence
  Description of Artificial Sequence: Synthetic oligonucleotide
  Sense strand starting at position 82 of SEQ ID NO: 916731
gccgaaguuaagcauuauu

SEQ ID NO: 1179645 - RNA, 19 nt, Artificial Sequence
  Description of Artificial Sequence: Synthetic oligonucleotide
  Antisense strand to SEQ ID NO: 1179644
aauaaugcuuaacuucggc

SEQ ID NO: 1179646 - RNA, 19 nt, Artificial Sequence
  Description of Artificial Sequence: Synthetic oligonucleotide
  Sense strand starting at position 139 of SEQ ID NO: 916731
gcaugaacuucuguggaaa

SEQ ID NO: 1179647 - RNA, 19 nt, Artificial Sequence
  Description of Artificial Sequence: Synthetic oligonucleotide
  Antisense strand to SEQ ID NO: 1179646
uuuccacagaaguucaugc

SEQ ID NO: 1179648 - RNA, 19 nt, Artificial Sequence
  Description of Artificial Sequence: Synthetic oligonucleotide
  Sense strand starting at position 140 of SEQ ID NO: 916731
caugaacuucuguggaaau

SEQ ID NO: 1179649 - RNA, 19 nt, Artificial Sequence
  Description of Artificial Sequence: Synthetic oligonucleotide
  Antisense strand to SEQ ID NO: 1179648
auuuccacagaaguucaug

SEQ ID NO: 1179650 - RNA, 19 nt, Artificial Sequence
  Description of Artificial Sequence: Synthetic oligonucleotide
  Sense strand starting at position 141 of SEQ ID NO: 916731
augaacuucuguggaaaug

SEQ ID NO: 1179651 - RNA, 19 nt, Artificial Sequence
  Description of Artificial Sequence: Synthetic oligonucleotide
  Antisense strand to SEQ ID NO: 1179650
cauuuccacagaaguucau

SEQ ID NO: 1179652 - RNA, 19 nt, Artificial Sequence
  Description of Artificial Sequence: Synthetic oligonucleotide
  Sense strand starting at position 142 of SEQ ID NO: 916731
ugaacuucuguggaaaugu

SEQ ID NO: 1179653 - RNA, 19 nt, Artificial Sequence
  Description of Artificial Sequence: Synthetic oligonucleotide
  Antisense strand to SEQ ID NO: 1179652
acauuuccacagaaguuca

SEQ ID NO: 1179654 - RNA, 19 nt, Artificial Sequence
  Description of Artificial Sequence: Synthetic oligonucleotide
  Sense strand starting at position 1395 of SEQ ID NO: 916731
cggucauuaccaggacgga

SEQ ID NO: 1179655 - RNA, 19 nt, Artificial Sequence
  Description of Artificial Sequence: Synthetic oligonucleotide
  Antisense strand to SEQ ID NO: 1179654
uccguccugguaaugaccg

SEQ ID NO: 1179656 - RNA, 19 nt, Artificial Sequence
  Description of Artificial Sequence: Synthetic oligonucleotide
  Sense strand starting at position 2590 of SEQ ID NO: 916731
gcgcgaucucggcucggaa

SEQ ID NO: 1179657 - RNA, 19 nt, Artificial Sequence
  Description of Artificial Sequence: Synthetic oligonucleotide
  Antisense strand to SEQ ID NO: 1179656
uuccgagccgagaucgcgc

SEQ ID NO: 1179658 - RNA, 19 nt, Artificial Sequence
  Description of Artificial Sequence: Synthetic oligonucleotide
  Sense strand starting at position 2591 of SEQ ID NO: 916731
cgcgaucucggcucggaau

SEQ ID NO: 1179659 - RNA, 19 nt, Artificial Sequence
  Description of Artificial Sequence: Synthetic oligonucleotide
  Antisense strand to SEQ ID NO: 1179658
auuccgagccgagaucgcg

SEQ ID NO: 1179660 - RNA, 19 nt, Artificial Sequence
  Description of Artificial Sequence: Synthetic oligonucleotide
  Sense strand starting at position 3036 of SEQ ID NO: 916731
cgcagauaaucuggcauaa

SEQ ID NO: 1179661 - RNA, 19 nt, Artificial Sequence
  Description of Artificial Sequence: Synthetic oligonucleotide
  Antisense strand to SEQ ID NO: 1179660
uuaugccagauuaucugcg

SEQ ID NO: 1179662 - RNA, 19 nt, Artificial Sequence
  Description of Artificial Sequence: Synthetic oligonucleotide
  Sense strand starting at position 3116 of SEQ ID NO: 916731
gggaaugagccauggaggu

SEQ ID NO: 1179663 - RNA, 19 nt, Artificial Sequence
  Description of Artificial Sequence: Synthetic oligonucleotide
  Antisense strand to SEQ ID NO: 1179662
accuccauggcucauuccc

SEQ ID NO: 1179664 - RNA, 19 nt, Artificial Sequence
  Description of Artificial Sequence: Synthetic oligonucleotide
  Sense strand starting at position 3390 of SEQ ID NO: 916731
cuuggcauuggcuaugagu

SEQ ID NO: 1179665 - RNA, 19 nt, Artificial Sequence
  Description of Artificial Sequence: Synthetic oligonucleotide
  Antisense strand to SEQ ID NO: 1179664
acucauagccaaugccaag

SEQ ID NO: 1179666 - RNA, 19 nt, Artificial Sequence
  Description of Artificial Sequence: Synthetic oligonucleotide
  Sense strand starting at position 3392 of SEQ ID NO: 916731
uggcauuggcuaugaguga

SEQ ID NO: 1179667 - RNA, 19 nt, Artificial Sequence
  Description of Artificial Sequence: Synthetic oligonucleotide
  Antisense strand to SEQ ID NO: 1179666
ucacucauagccaaugcca

SEQ ID NO: 1179668 - RNA, 19 nt, Artificial Sequence
  Description of Artificial Sequence: Synthetic oligonucleotide
  Sense strand starting at position 3399 of SEQ ID NO: 916731
ggcuaugagugagauggga

SEQ ID NO: 1179669 - RNA, 19 nt, Artificial Sequence
  Description of Artificial Sequence: Synthetic oligonucleotide
  Antisense strand to SEQ ID NO: 1179668
ucccaucucacucauagcc

SEQ ID NO: 1179670 - RNA, 19 nt, Artificial Sequence
  Description of Artificial Sequence: Synthetic oligonucleotide
  Sense strand starting at position 3518 of SEQ ID NO: 916731
gggagaugcaauuguccag

SEQ ID NO: 1179671 - RNA, 19 nt, Artificial Sequence
  Description of Artificial Sequence: Synthetic oligonucleotide
  Antisense strand to SEQ ID NO: 1179670
cuggacaauugcaucuccc

SEQ ID NO: 1179672 - RNA, 19 nt, Artificial Sequence
  Description of Artificial Sequence: Synthetic oligonucleotide
  Sense strand starting at position 3545 of SEQ ID NO: 916731
guggcucagcuguauaagu

SEQ ID NO: 1179673 - RNA, 19 nt, Artificial Sequence
  Description of Artificial Sequence: Synthetic oligonucleotide
  Antisense strand to SEQ ID NO: 1179672
acuuauacagcugagccac

SEQ ID NO: 1179674 - RNA, 19 nt, Artificial Sequence
  Description of Artificial Sequence: Synthetic oligonucleotide
  Sense strand starting at position 3547 of SEQ ID NO: 916731
ggcucagcuguauaaguga

SEQ ID NO: 1179675 - RNA, 19 nt, Artificial Sequence
  Description of Artificial Sequence: Synthetic oligonucleotide
  Antisense strand to SEQ ID NO: 1179674
ucacuuauacagcugagcc

SEQ ID NO: 1179676 - RNA, 19 nt, Artificial Sequence
  Description of Artificial Sequence: Synthetic oligonucleotide
  Sense strand starting at position 3642 of SEQ ID NO: 916731
gccacaguucuguggcagu

SEQ ID NO: 1179677 - RNA, 19 nt, Artificial Sequence
  Description of Artificial Sequence: Synthetic oligonucleotide
  Antisense strand to SEQ ID NO: 1179676
acugccacagaacuguggc

SEQ ID NO: 1179678 - RNA, 19 nt, Artificial Sequence
  Description of Artificial Sequence: Synthetic oligonucleotide
  Sense strand starting at position 3829 of SEQ ID NO: 916731
gcagaaacaaccgauaugu

SEQ ID NO: 1179679 - RNA, 19 nt, Artificial Sequence
  Description of Artificial Sequence: Synthetic oligonucleotide
  Antisense strand to SEQ ID NO: 1179678
acauaucgguuguuucugc

SEQ ID NO: 1179680 - RNA, 19 nt, Artificial Sequence
  Description of Artificial Sequence: Synthetic oligonucleotide
  Sense strand starting at position 3839 of SEQ ID NO: 916731
ccgauaugucggcagguga

SEQ ID NO: 1179681 - RNA, 19 nt, Artificial Sequence
  Description of Artificial Sequence: Synthetic oligonucleotide
  Antisense strand to SEQ ID NO: 1179680
ucaccugccgacauaucgg

SEQ ID NO: 1179682 - RNA, 19 nt, Artificial Sequence
  Description of Artificial Sequence: Synthetic oligonucleotide
  Sense strand starting at position 3840 of SEQ ID NO: 916731
cgauaugucggcaggugaa

SEQ ID NO: 1179683 - RNA, 19 nt, Artificial Sequence
  Description of Artificial Sequence: Synthetic oligonucleotide
  Antisense strand to SEQ ID NO: 1179682
uucaccugccgacauaucg

SEQ ID NO: 1179684 - RNA, 19 nt, Artificial Sequence
  Description of Artificial Sequence: Synthetic oligonucleotide
  Sense strand starting at position 149 of SEQ ID NO: 916732
ugccgaaguuaagcauuau

SEQ ID NO: 1179685 - RNA, 19 nt, Artificial Sequence
  Description of Artificial Sequence: Synthetic oligonucleotide
  Antisense strand to SEQ ID NO: 1179684
auaaugcuuaacuucggca

SEQ ID NO: 1179686 - RNA, 19 nt, Artificial Sequence
  Description of Artificial Sequence: Synthetic oligonucleotide
  Sense strand starting at position 150 of SEQ ID NO: 916732
gccgaaguuaagcauuauu

SEQ ID NO: 1179687 - RNA, 19 nt, Artificial Sequence
  Description of Artificial Sequence: Synthetic oligonucleotide
  Antisense strand to SEQ ID NO: 1179686
aauaaugcuuaacuucggc

SEQ ID NO: 1179688 - RNA, 19 nt, Artificial Sequence
  Description of Artificial Sequence: Synthetic oligonucleotide
  Sense strand starting at position 207 of SEQ ID NO: 916732
gcaugaacuucuguggaaa

SEQ ID NO: 1179689 - RNA, 19 nt, Artificial Sequence
  Description of Artificial Sequence: Synthetic oligonucleotide
  Antisense strand to SEQ ID NO: 1179688
uuuccacagaaguucaugc

SEQ ID NO: 1179690 - RNA, 19 nt, Artificial Sequence
  Description of Artificial Sequence: Synthetic oligonucleotide
  Sense strand starting at position 208 of SEQ ID NO: 916732
caugaacuucuguggaaau

SEQ ID NO: 1179691 - RNA, 19 nt, Artificial Sequence
  Description of Artificial Sequence: Synthetic oligonucleotide
  Antisense strand to SEQ ID NO: 1179690
auuuccacagaaguucaug

SEQ ID NO: 1179692 - RNA, 19 nt, Artificial Sequence
  Description of Artificial Sequence: Synthetic oligonucleotide
  Sense strand starting at position 209 of SEQ ID NO: 916732
augaacuucuguggaaaug

SEQ ID NO: 1179693 - RNA, 19 nt, Artificial Sequence
  Description of Artificial Sequence: Synthetic oligonucleotide
  Antisense strand to SEQ ID NO: 1179692
cauuuccacagaaguucau

SEQ ID NO: 1179694 - RNA, 19 nt, Artificial Sequence
  Description of Artificial Sequence: Synthetic oligonucleotide
  Sense strand starting at position 210 of SEQ ID NO: 916732
ugaacuucuguggaaaugu

SEQ ID NO: 1179695 - RNA, 19 nt, Artificial Sequence
  Description of Artificial Sequence: Synthetic oligonucleotide
  Antisense strand to SEQ ID NO: 1179694
acauuuccacagaaguuca

SEQ ID NO: 1179696 - RNA, 19 nt, Artificial Sequence
  Description of Artificial Sequence: Synthetic oligonucleotide
  Sense strand starting at position 1463 of SEQ ID NO: 916732
cggucauuaccaggacgga

SEQ ID NO: 1179697 - RNA, 19 nt, Artificial Sequence
  Description of Artificial Sequence: Synthetic oligonucleotide
  Antisense strand to SEQ ID NO: 1179696
uccguccugguaaugaccg

SEQ ID NO: 1179698 - RNA, 19 nt, Artificial Sequence
  Description of Artificial Sequence: Synthetic oligonucleotide
  Sense strand starting at position 2658 of SEQ ID NO: 916732
gcgcgaucucggcucggaa

SEQ ID NO: 1179699 - RNA, 19 nt, Artificial Sequence
  Description of Artificial Sequence: Synthetic oligonucleotide
  Antisense strand to SEQ ID NO: 1179698
uuccgagccgagaucgcgc

SEQ ID NO: 1179700 - RNA, 19 nt, Artificial Sequence
  Description of Artificial Sequence: Synthetic oligonucleotide
  Sense strand starting at position 2659 of SEQ ID NO: 916732
cgcgaucucggcucggaau

SEQ ID NO: 1179701 - RNA, 19 nt, Artificial Sequence
  Description of Artificial Sequence: Synthetic oligonucleotide
  Antisense strand to SEQ ID NO: 1179700
auuccgagccgagaucgcg

SEQ ID NO: 1179702 - RNA, 19 nt, Artificial Sequence
  Description of Artificial Sequence: Synthetic oligonucleotide
  Sense strand starting at position 3104 of SEQ ID NO: 916732
cgcagauaaucuggcauaa

SEQ ID NO: 1179703 - RNA, 19 nt, Artificial Sequence
  Description of Artificial Sequence: Synthetic oligonucleotide
  Antisense strand to SEQ ID NO: 1179702
uuaugccagauuaucugcg

SEQ ID NO: 1179704 - RNA, 19 nt, Artificial Sequence
  Description of Artificial Sequence: Synthetic oligonucleotide
  Sense strand starting at position 3184 of SEQ ID NO: 916732
gggaaugagccauggaggu

SEQ ID NO: 1179705 - RNA, 19 nt, Artificial Sequence
  Description of Artificial Sequence: Synthetic oligonucleotide
  Antisense strand to SEQ ID NO: 1179704
accuccauggcucauuccc

SEQ ID NO: 1179706 - RNA, 19 nt, Artificial Sequence
  Description of Artificial Sequence: Synthetic oligonucleotide
  Sense strand starting at position 3458 of SEQ ID NO: 916732
cuuggcauuggcuaugagu

SEQ ID NO: 1179707 - RNA, 19 nt, Artificial Sequence
  Description of Artificial Sequence: Synthetic oligonucleotide
  Antisense strand to SEQ ID NO: 1179706
acucauagccaaugccaag

SEQ ID NO: 1179708 - RNA, 19 nt, Artificial Sequence
  Description of Artificial Sequence: Synthetic oligonucleotide
  Sense strand starting at position 3460 of SEQ ID NO: 916732
uggcauuggcuaugaguga

SEQ ID NO: 1179709 - RNA, 19 nt, Artificial Sequence
  Description of Artificial Sequence: Synthetic oligonucleotide
  Antisense strand to SEQ ID NO: 1179708
ucacucauagccaaugcca

SEQ ID NO: 1179710 - RNA, 19 nt, Artificial Sequence
  Description of Artificial Sequence: Synthetic oligonucleotide
  Sense strand starting at position 3467 of SEQ ID NO: 916732
ggcuaugagugagauggga

SEQ ID NO: 1179711 - RNA, 19 nt, Artificial Sequence
  Description of Artificial Sequence: Synthetic oligonucleotide
  Antisense strand to SEQ ID NO: 1179710
ucccaucucacucauagcc

SEQ ID NO: 1179712 - RNA, 19 nt, Artificial Sequence
  Description of Artificial Sequence: Synthetic oligonucleotide
  Sense strand starting at position 3586 of SEQ ID NO: 916732
gggagaugcaauuguccag

SEQ ID NO: 1179713 - RNA, 19 nt, Artificial Sequence
  Description of Artificial Sequence: Synthetic oligonucleotide
  Antisense strand to SEQ ID NO: 1179712
cuggacaauugcaucuccc

SEQ ID NO: 1179714 - RNA, 19 nt, Artificial Sequence
  Description of Artificial Sequence: Synthetic oligonucleotide
  Sense strand starting at position 3613 of SEQ ID NO: 916732
guggcucagcuguauaagu

SEQ ID NO: 1179715 - RNA, 19 nt, Artificial Sequence
  Description of Artificial Sequence: Synthetic oligonucleotide
  Antisense strand to SEQ ID NO: 1179714
acuuauacagcugagccac

SEQ ID NO: 1179716 - RNA, 19 nt, Artificial Sequence
  Description of Artificial Sequence: Synthetic oligonucleotide
  Sense strand starting at position 3615 of SEQ ID NO: 916732
ggcucagcuguauaaguga

SEQ ID NO: 1179717 - RNA, 19 nt, Artificial Sequence
  Description of Artificial Sequence: Synthetic oligonucleotide
  Antisense strand to SEQ ID NO: 1179716
ucacuuauacagcugagcc

SEQ ID NO: 1179718 - RNA, 19 nt, Artificial Sequence
  Description of Artificial Sequence: Synthetic oligonucleotide
  Sense strand starting at position 3710 of SEQ ID NO: 916732
gccacaguucuguggcagu

SEQ ID NO: 1179719 - RNA, 19 nt, Artificial Sequence
  Description of Artificial Sequence: Synthetic oligonucleotide
  Antisense strand to SEQ ID NO: 1179718
acugccacagaacuguggc

SEQ ID NO: 1179720 - RNA, 19 nt, Artificial Sequence
  Description of Artificial Sequence: Synthetic oligonucleotide
  Sense strand starting at position 3897 of SEQ ID NO: 916732
gcagaaacaaccgauaugu

SEQ ID NO: 1179721 - RNA, 19 nt, Artificial Sequence
  Description of Artificial Sequence: Synthetic oligonucleotide
  Antisense strand to SEQ ID NO: 1179720
acauaucgguuguuucugc

SEQ ID NO: 1179722 - RNA, 19 nt, Artificial Sequence
  Description of Artificial Sequence: Synthetic oligonucleotide
  Sense strand starting at position 3907 of SEQ ID NO: 916732
ccgauaugucggcagguga

SEQ ID NO: 1179723 - RNA, 19 nt, Artificial Sequence
  Description of Artificial Sequence: Synthetic oligonucleotide
  Antisense strand to SEQ ID NO: 1179722
ucaccugccgacauaucgg

SEQ ID NO: 1179724 - RNA, 19 nt, Artificial Sequence
  Description of Artificial Sequence: Synthetic oligonucleotide
  Sense strand starting at position 3908 of SEQ ID NO: 916732
cgauaugucggcaggugaa

SEQ ID NO: 1179725 - RNA, 19 nt, Artificial Sequence
  Description of Artificial Sequence: Synthetic oligonucleotide
  Antisense strand to SEQ ID NO: 1179724
uucaccugccgacauaucg

SEQ ID NO: 1179726 - RNA, 19 nt, Artificial Sequence
  Description of Artificial Sequence: Synthetic oligonucleotide
  Sense strand starting at position 76 of SEQ ID NO: 916733
cagccagaauggucuuaaa

SEQ ID NO: 1179727 - RNA, 19 nt, Artificial Sequence
  Description of Artificial Sequence: Synthetic oligonucleotide
  Antisense strand to SEQ ID NO: 1179726
uuuaagaccauucuggcug

SEQ ID NO: 1179728 - RNA, 19 nt, Artificial Sequence
  Description of Artificial Sequence: Synthetic oligonucleotide
  Sense strand starting at position 387 of SEQ ID NO: 916733
ggaaccugcaagugauucu

SEQ ID NO: 1179729 - RNA, 19 nt, Artificial Sequence
  Description of Artificial Sequence: Synthetic oligonucleotide
  Antisense strand to SEQ ID NO: 1179728
agaaucacuugcagguucc

SEQ ID NO: 1179730 - RNA, 19 nt, Artificial Sequence
  Description of Artificial Sequence: Synthetic oligonucleotide
  Sense strand starting at position 736 of SEQ ID NO: 916733
auagcaguucuagguaaag

SEQ ID NO: 1179731 - RNA, 19 nt, Artificial Sequence
  Description of Artificial Sequence: Synthetic oligonucleotide
  Antisense strand to SEQ ID NO: 1179730
cuuuaccuagaacugcuau

SEQ ID NO: 1179732 - RNA, 19 nt, Artificial Sequence
  Description of Artificial Sequence: Synthetic oligonucleotide
  Sense strand starting at position 738 of SEQ ID NO: 916733
agcaguucuagguaaaguu

SEQ ID NO: 1179733 - RNA, 19 nt, Artificial Sequence
  Description of Artificial Sequence: Synthetic oligonucleotide
  Antisense strand to SEQ ID NO: 1179732
aacuuuaccuagaacugcu

SEQ ID NO: 1179734 - RNA, 19 nt, Artificial Sequence
  Description of Artificial Sequence: Synthetic oligonucleotide
  Sense strand starting at position 783 of SEQ ID NO: 916733
cuccaaagagaauguuagu

SEQ ID NO: 1179735 - RNA, 19 nt, Artificial Sequence
  Description of Artificial Sequence: Synthetic oligonucleotide
  Antisense strand to SEQ ID NO: 1179734
acuaacauucucuuuggag

SEQ ID NO: 1179736 - RNA, 19 nt, Artificial Sequence
  Description of Artificial Sequence: Synthetic oligonucleotide
  Sense strand starting at position 818 of SEQ ID NO: 916733
ccuugucugccuuauuuac

SEQ ID NO: 1179737 - RNA, 19 nt, Artificial Sequence
  Description of Artificial Sequence: Synthetic oligonucleotide
  Antisense strand to SEQ ID NO: 1179736
guaaauaaggcagacaagg

SEQ ID NO: 1179738 - RNA, 19 nt, Artificial Sequence
  Description of Artificial Sequence: Synthetic oligonucleotide
  Sense strand starting at position 820 of SEQ ID NO: 916733
uugucugccuuauuuacua

SEQ ID NO: 1179739 - RNA, 19 nt, Artificial Sequence
  Description of Artificial Sequence: Synthetic oligonucleotide
  Antisense strand to SEQ ID NO: 1179738
uaguaaauaaggcagacaa

SEQ ID NO: 1179740 - RNA, 19 nt, Artificial Sequence
  Description of Artificial Sequence: Synthetic oligonucleotide
  Sense strand starting at position 872 of SEQ ID NO: 916733
caugguaggucugcaauaa

SEQ ID NO: 1179741 - RNA, 19 nt, Artificial Sequence
  Description of Artificial Sequence: Synthetic oligonucleotide
  Antisense strand to SEQ ID NO: 1179740
uuauugcagaccuaccaug

SEQ ID NO: 1179742 - RNA, 19 nt, Artificial Sequence
  Description of Artificial Sequence: Synthetic oligonucleotide
  Sense strand starting at position 873 of SEQ ID NO: 916733
augguaggucugcaauaaa

SEQ ID NO: 1179743 - RNA, 19 nt, Artificial Sequence
  Description of Artificial Sequence: Synthetic oligonucleotide
  Antisense strand to SEQ ID NO: 1179742
uuuauugcagaccuaccau

SEQ ID NO: 1179744 - RNA, 19 nt, Artificial Sequence
  Description of Artificial Sequence: Synthetic oligonucleotide
  Sense strand starting at position 876 of SEQ ID NO: 916733
guaggucugcaauaaauac

SEQ ID NO: 1179745 - RNA, 19 nt, Artificial Sequence
  Description of Artificial Sequence: Synthetic oligonucleotide
  Antisense strand to SEQ ID NO: 1179744
guauuuauugcagaccuac

SEQ ID NO: 1179746 - RNA, 19 nt, Artificial Sequence
  Description of Artificial Sequence: Synthetic oligonucleotide
  Sense strand starting at position 974 of SEQ ID NO: 916733
gcaagaaguggccaucuaa

SEQ ID NO: 1179747 - RNA, 19 nt, Artificial Sequence
  Description of Artificial Sequence: Synthetic oligonucleotide
  Antisense strand to SEQ ID NO: 1179746
uuagauggccacuucuugc

SEQ ID NO: 1179748 - RNA, 19 nt, Artificial Sequence
  Description of Artificial Sequence: Synthetic oligonucleotide
  Sense strand starting at position 987 of SEQ ID NO: 916733
aucuaaguccuccauaguu

SEQ ID NO: 1179749 - RNA, 19 nt, Artificial Sequence
  Description of Artificial Sequence: Synthetic oligonucleotide
  Antisense strand to SEQ ID NO: 1179748
aacuauggaggacuuagau

SEQ ID NO: 1179750 - RNA, 19 nt, Artificial Sequence
  Description of Artificial Sequence: Synthetic oligonucleotide
  Sense strand starting at position 1056 of SEQ ID NO: 916733
augcaaugugugcaagaaa

SEQ ID NO: 1179751 - RNA, 19 nt, Artificial Sequence
  Description of Artificial Sequence: Synthetic oligonucleotide
  Antisense strand to SEQ ID NO: 1179750
uuucuugcacacauugcau

SEQ ID NO: 1179752 - RNA, 19 nt, Artificial Sequence
  Description of Artificial Sequence: Synthetic oligonucleotide
  Sense strand starting at position 1135 of SEQ ID NO: 916733
aaauguagcugaguuagua

SEQ ID NO: 1179753 - RNA, 19 nt, Artificial Sequence
  Description of Artificial Sequence: Synthetic oligonucleotide
  Antisense strand to SEQ ID NO: 1179752
uacuaacucagcuacauuu

SEQ ID NO: 1179754 - RNA, 19 nt, Artificial Sequence
  Description of Artificial Sequence: Synthetic oligonucleotide
  Sense strand starting at position 1167 of SEQ ID NO: 916733
gauguugaaugcccugaca

SEQ ID NO: 1179755 - RNA, 19 nt, Artificial Sequence
  Description of Artificial Sequence: Synthetic oligonucleotide
  Antisense strand to SEQ ID NO: 1179754
ugucagggcauucaacauc

SEQ ID NO: 1179756 - RNA, 19 nt, Artificial Sequence
  Description of Artificial Sequence: Synthetic oligonucleotide
  Sense strand starting at position 1169 of SEQ ID NO: 916733
uguugaaugcccugacaag

SEQ ID NO: 1179757 - RNA, 19 nt, Artificial Sequence
  Description of Artificial Sequence: Synthetic oligonucleotide
  Antisense strand to SEQ ID NO: 1179756
cuugucagggcauucaaca

SEQ ID NO: 1179758 - RNA, 19 nt, Artificial Sequence
  Description of Artificial Sequence: Synthetic oligonucleotide
  Sense strand starting at position 1194 of SEQ ID NO: 916733
gaaucuauuggguggucaa

SEQ ID NO: 1179759 - RNA, 19 nt, Artificial Sequence
  Description of Artificial Sequence: Synthetic oligonucleotide
  Antisense strand to SEQ ID NO: 1179758
uugaccacccaauagauuc

SEQ ID NO: 1179760 - RNA, 19 nt, Artificial Sequence
  Description of Artificial Sequence: Synthetic oligonucleotide
  Sense strand starting at position 1195 of SEQ ID NO: 916733
aaucuauuggguggucaau

SEQ ID NO: 1179761 - RNA, 19 nt, Artificial Sequence
  Description of Artificial Sequence: Synthetic oligonucleotide
  Antisense strand to SEQ ID NO: 1179760
auugaccacccaauagauu

SEQ ID NO: 1179762 - RNA, 19 nt, Artificial Sequence
  Description of Artificial Sequence: Synthetic oligonucleotide
  Sense strand starting at position 1225 of SEQ ID NO: 916733
guuaguguuugaguagaaa

SEQ ID NO: 1179763 - RNA, 19 nt, Artificial Sequence
  Description of Artificial Sequence: Synthetic oligonucleotide
  Antisense strand to SEQ ID NO: 1179762
uuucuacucaaacacuaac

SEQ ID NO: 1179764 - RNA, 19 nt, Artificial Sequence
  Description of Artificial Sequence: Synthetic oligonucleotide
  Sense strand starting at position 1271 of SEQ ID NO: 916733
ggaauuguaagaugauucu

SEQ ID NO: 1179765 - RNA, 19 nt, Artificial Sequence
  Description of Artificial Sequence: Synthetic oligonucleotide
  Antisense strand to SEQ ID NO: 1179764
agaaucaucuuacaauucc

SEQ ID NO: 1179766 - RNA, 19 nt, Artificial Sequence
  Description of Artificial Sequence: Synthetic oligonucleotide
  Sense strand starting at position 1301 of SEQ ID NO: 916733
gcaagauguauccgaugga

SEQ ID NO: 1179767 - RNA, 19 nt, Artificial Sequence
  Description of Artificial Sequence: Synthetic oligonucleotide
  Antisense strand to SEQ ID NO: 1179766
uccaucggauacaucuugc

SEQ ID NO: 1179768 - RNA, 19 nt, Artificial Sequence
  Description of Artificial Sequence: Synthetic oligonucleotide
  Sense strand starting at position 1304 of SEQ ID NO: 916733
agauguauccgauggagua

SEQ ID NO: 1179769 - RNA, 19 nt, Artificial Sequence
  Description of Artificial Sequence: Synthetic oligonucleotide
  Antisense strand to SEQ ID NO: 1179768
uacuccaucggauacaucu

SEQ ID NO: 1179770 - RNA, 19 nt, Artificial Sequence
  Description of Artificial Sequence: Synthetic oligonucleotide
  Sense strand starting at position 1305 of SEQ ID NO: 916733
gauguauccgauggaguaa

SEQ ID NO: 1179771 - RNA, 19 nt, Artificial Sequence
  Description of Artificial Sequence: Synthetic oligonucleotide
  Antisense strand to SEQ ID NO: 1179770
uuacuccaucggauacauc

SEQ ID NO: 1179772 - RNA, 19 nt, Artificial Sequence
  Description of Artificial Sequence: Synthetic oligonucleotide
  Sense strand starting at position 1373 of SEQ ID NO: 916733
agggauuggcccugaaaga

SEQ ID NO: 1179773 - RNA, 19 nt, Artificial Sequence
  Description of Artificial Sequence: Synthetic oligonucleotide
  Antisense strand to SEQ ID NO: 1179772
ucuuucagggccaaucccu

SEQ ID NO: 1179774 - RNA, 19 nt, Artificial Sequence
  Description of Artificial Sequence: Synthetic oligonucleotide
  Sense strand starting at position 1686 of SEQ ID NO: 916733
ugcagaagcuacuuaacuu

SEQ ID NO: 1179775 - RNA, 19 nt, Artificial Sequence
  Description of Artificial Sequence: Synthetic oligonucleotide
  Antisense strand to SEQ ID NO: 1179774
aaguuaaguagcuucugca

SEQ ID NO: 1179776 - RNA, 19 nt, Artificial Sequence
  Description of Artificial Sequence: Synthetic oligonucleotide
  Sense strand starting at position 2257 of SEQ ID NO: 916733
cgccuuaaugccucgguca

SEQ ID NO: 1179777 - RNA, 19 nt, Artificial Sequence
  Description of Artificial Sequence: Synthetic oligonucleotide
  Antisense strand to SEQ ID NO: 1179776
ugaccgaggcauuaaggcg

SEQ ID NO: 1179778 - RNA, 19 nt, Artificial Sequence
  Description of Artificial Sequence: Synthetic oligonucleotide
  Sense strand starting at position 2344 of SEQ ID NO: 916733
acggaaaucucuuuaucau

SEQ ID NO: 1179779 - RNA, 19 nt, Artificial Sequence
  Description of Artificial Sequence: Synthetic oligonucleotide
  Antisense strand to SEQ ID NO: 1179778
augauaaagagauuuccgu

SEQ ID NO: 1179780 - RNA, 19 nt, Artificial Sequence
  Description of Artificial Sequence: Synthetic oligonucleotide
  Sense strand starting at position 2345 of SEQ ID NO: 916733
cggaaaucucuuuaucauc

SEQ ID NO: 1179781 - RNA, 19 nt, Artificial Sequence
  Description of Artificial Sequence: Synthetic oligonucleotide
  Antisense strand to SEQ ID NO: 1179780
gaugauaaagagauuuccg

SEQ ID NO: 1179782 - RNA, 19 nt, Artificial Sequence
  Description of Artificial Sequence: Synthetic oligonucleotide
  Sense strand starting at position 2353 of SEQ ID NO: 916733
ucuuuaucauccgugagaa

SEQ ID NO: 1179783 - RNA, 19 nt, Artificial Sequence
  Description of Artificial Sequence: Synthetic oligonucleotide
  Antisense strand to SEQ ID NO: 1179782
uucucacggaugauaaaga

SEQ ID NO: 1179784 - RNA, 19 nt, Artificial Sequence
  Description of Artificial Sequence: Synthetic oligonucleotide
  Sense strand starting at position 2354 of SEQ ID NO: 916733
cuuuaucauccgugagaaa

SEQ ID NO: 1179785 - RNA, 19 nt, Artificial Sequence
  Description of Artificial Sequence: Synthetic oligonucleotide
  Antisense strand to SEQ ID NO: 1179784
uuucucacggaugauaaag

SEQ ID NO: 1179786 - RNA, 19 nt, Artificial Sequence
  Description of Artificial Sequence: Synthetic oligonucleotide
  Sense strand starting at position 2648 of SEQ ID NO: 916733
ccuccacacgauuguaauu

SEQ ID NO: 1179787 - RNA, 19 nt, Artificial Sequence
  Description of Artificial Sequence: Synthetic oligonucleotide
  Antisense strand to SEQ ID NO: 1179786
aauuacaaucguguggagg

SEQ ID NO: 1179788 - RNA, 19 nt, Artificial Sequence
  Description of Artificial Sequence: Synthetic oligonucleotide
  Sense strand starting at position 2685 of SEQ ID NO: 916733
ccaagcuuccagggaauua

SEQ ID NO: 1179789 - RNA, 19 nt, Artificial Sequence
  Description of Artificial Sequence: Synthetic oligonucleotide
  Antisense strand to SEQ ID NO: 1179788
uaauucccuggaagcuugg

SEQ ID NO: 1179790 - RNA, 19 nt, Artificial Sequence
  Description of Artificial Sequence: Synthetic oligonucleotide
  Sense strand starting at position 3252 of SEQ ID NO: 916733
uggagugguccuugaagag

SEQ ID NO: 1179791 - RNA, 19 nt, Artificial Sequence
  Description of Artificial Sequence: Synthetic oligonucleotide
  Antisense strand to SEQ ID NO: 1179790
cucuucaaggaccacucca

SEQ ID NO: 1179792 - RNA, 19 nt, Artificial Sequence
  Description of Artificial Sequence: Synthetic oligonucleotide
  Sense strand starting at position 3317 of SEQ ID NO: 916733
auuugaaguuugcuuucua

SEQ ID NO: 1179793 - RNA, 19 nt, Artificial Sequence
  Description of Artificial Sequence: Synthetic oligonucleotide
  Antisense strand to SEQ ID NO: 1179792
uagaaagcaaacuucaaau

SEQ ID NO: 1179794 - RNA, 19 nt, Artificial Sequence
  Description of Artificial Sequence: Synthetic oligonucleotide
  Sense strand starting at position 3353 of SEQ ID NO: 916733
ucugauauuccaggccaaa

SEQ ID NO: 1179795 - RNA, 19 nt, Artificial Sequence
  Description of Artificial Sequence: Synthetic oligonucleotide
  Antisense strand to SEQ ID NO: 1179794
uuuggccuggaauaucaga

SEQ ID NO: 1179796 - RNA, 19 nt, Artificial Sequence
  Description of Artificial Sequence: Synthetic oligonucleotide
  Sense strand starting at position 3400 of SEQ ID NO: 916733
caguaaauaucgguaaacu

SEQ ID NO: 1179797 - RNA, 19 nt, Artificial Sequence
  Description of Artificial Sequence: Synthetic oligonucleotide
  Antisense strand to SEQ ID NO: 1179796
aguuuaccgauauuuacug

SEQ ID NO: 1179798 - RNA, 19 nt, Artificial Sequence
  Description of Artificial Sequence: Synthetic oligonucleotide
  Sense strand starting at position 3401 of SEQ ID NO: 916733
aguaaauaucgguaaacuu

SEQ ID NO: 1179799 - RNA, 19 nt, Artificial Sequence
  Description of Artificial Sequence: Synthetic oligonucleotide
  Antisense strand to SEQ ID NO: 1179798
aaguuuaccgauauuuacu

SEQ ID NO: 1179800 - RNA, 19 nt, Artificial Sequence
  Description of Artificial Sequence: Synthetic oligonucleotide
  Sense strand starting at position 3475 of SEQ ID NO: 916733
cucagaauccuaggacuuc

SEQ ID NO: 1179801 - RNA, 19 nt, Artificial Sequence
  Description of Artificial Sequence: Synthetic oligonucleotide
  Antisense strand to SEQ ID NO: 1179800
gaaguccuaggauucugag

SEQ ID NO: 1179802 - RNA, 19 nt, Artificial Sequence
  Description of Artificial Sequence: Synthetic oligonucleotide
  Sense strand starting at position 3550 of SEQ ID NO: 916733
uugguaggcucuccuaaau

SEQ ID NO: 1179803 - RNA, 19 nt, Artificial Sequence
  Description of Artificial Sequence: Synthetic oligonucleotide
  Antisense strand to SEQ ID NO: 1179802
auuuaggagagccuaccaa

SEQ ID NO: 1179804 - RNA, 19 nt, Artificial Sequence
  Description of Artificial Sequence: Synthetic oligonucleotide
  Sense strand starting at position 3946 of SEQ ID NO: 916733
gcuuccugugacuaccaua

SEQ ID NO: 1179805 - RNA, 19 nt, Artificial Sequence
  Description of Artificial Sequence: Synthetic oligonucleotide
  Antisense strand to SEQ ID NO: 1179804
uaugguagucacaggaagc

SEQ ID NO: 1179806 - RNA, 19 nt, Artificial Sequence
  Description of Artificial Sequence: Synthetic oligonucleotide
  Sense strand starting at position 91 of SEQ ID NO: 916734
cagccagaauggucuuaaa

SEQ ID NO: 1179807 - RNA, 19 nt, Artificial Sequence
  Description of Artificial Sequence: Synthetic oligonucleotide
  Antisense strand to SEQ ID NO: 1179806
uuuaagaccauucuggcug

SEQ ID NO: 1179808 - RNA, 19 nt, Artificial Sequence
  Description of Artificial Sequence: Synthetic oligonucleotide
  Sense strand starting at position 402 of SEQ ID NO: 916734
ggaaccugcaagugauucu

SEQ ID NO: 1179809 - RNA, 19 nt, Artificial Sequence
  Description of Artificial Sequence: Synthetic oligonucleotide
  Antisense strand to SEQ ID NO: 1179808
agaaucacuugcagguucc

SEQ ID NO: 1179810 - RNA, 19 nt, Artificial Sequence
  Description of Artificial Sequence: Synthetic oligonucleotide
  Sense strand starting at position 751 of SEQ ID NO: 916734
auagcaguucuagguaaag

SEQ ID NO: 1179811 - RNA, 19 nt, Artificial Sequence
  Description of Artificial Sequence: Synthetic oligonucleotide
  Antisense strand to SEQ ID NO: 1179810
cuuuaccuagaacugcuau

SEQ ID NO: 1179812 - RNA, 19 nt, Artificial Sequence
  Description of Artificial Sequence: Synthetic oligonucleotide
  Sense strand starting at position 753 of SEQ ID NO: 916734
agcaguucuagguaaaguu

SEQ ID NO: 1179813 - RNA, 19 nt, Artificial Sequence
  Description of Artificial Sequence: Synthetic oligonucleotide
  Antisense strand to SEQ ID NO: 1179812
aacuuuaccuagaacugcu

SEQ ID NO: 1179814 - RNA, 19 nt, Artificial Sequence
  Description of Artificial Sequence: Synthetic oligonucleotide
  Sense strand starting at position 798 of SEQ ID NO: 916734
cuccaaagagaauguuagu

SEQ ID NO: 1179815 - RNA, 19 nt, Artificial Sequence
  Description of Artificial Sequence: Synthetic oligonucleotide
  Antisense strand to SEQ ID NO: 1179814
acuaacauucucuuuggag

SEQ ID NO: 1179816 - RNA, 19 nt, Artificial Sequence
  Description of Artificial Sequence: Synthetic oligonucleotide
  Sense strand starting at position 833 of SEQ ID NO: 916734
ccuugucugccuuauuuac

SEQ ID NO: 1179817 - RNA, 19 nt, Artificial Sequence
  Description of Artificial Sequence: Synthetic oligonucleotide
  Antisense strand to SEQ ID NO: 1179816
guaaauaaggcagacaagg

SEQ ID NO: 1179818 - RNA, 19 nt, Artificial Sequence
  Description of Artificial Sequence: Synthetic oligonucleotide
  Sense strand starting at position 835 of SEQ ID NO: 916734
uugucugccuuauuuacua

SEQ ID NO: 1179819 - RNA, 19 nt, Artificial Sequence
  Description of Artificial Sequence: Synthetic oligonucleotide
  Antisense strand to SEQ ID NO: 1179818
uaguaaauaaggcagacaa

SEQ ID NO: 1179820 - RNA, 19 nt, Artificial Sequence
  Description of Artificial Sequence: Synthetic oligonucleotide
  Sense strand starting at position 887 of SEQ ID NO: 916734
caugguaggucugcaauaa

SEQ ID NO: 1179821 - RNA, 19 nt, Artificial Sequence
  Description of Artificial Sequence: Synthetic oligonucleotide
  Antisense strand to SEQ ID NO: 1179820
uuauugcagaccuaccaug

SEQ ID NO: 1179822 - RNA, 19 nt, Artificial Sequence
  Description of Artificial Sequence: Synthetic oligonucleotide
  Sense strand starting at position 888 of SEQ ID NO: 916734
augguaggucugcaauaaa

SEQ ID NO: 1179823 - RNA, 19 nt, Artificial Sequence
  Description of Artificial Sequence: Synthetic oligonucleotide
  Antisense strand to SEQ ID NO: 1179822
uuuauugcagaccuaccau

SEQ ID NO: 1179824 - RNA, 19 nt, Artificial Sequence
  Description of Artificial Sequence: Synthetic oligonucleotide
  Sense strand starting at position 891 of SEQ ID NO: 916734
guaggucugcaauaaauac

SEQ ID NO: 1179825 - RNA, 19 nt, Artificial Sequence
  Description of Artificial Sequence: Synthetic oligonucleotide
  Antisense strand to SEQ ID NO: 1179824
guauuuauugcagaccuac

SEQ ID NO: 1179826 - RNA, 19 nt, Artificial Sequence
  Description of Artificial Sequence: Synthetic oligonucleotide
  Sense strand starting at position 989 of SEQ ID NO: 916734
gcaagaaguggccaucuaa

SEQ ID NO: 1179827 - RNA, 19 nt, Artificial Sequence
  Description of Artificial Sequence: Synthetic oligonucleotide
  Antisense strand to SEQ ID NO: 1179826
uuagauggccacuucuugc

SEQ ID NO: 1179828 - RNA, 19 nt, Artificial Sequence
  Description of Artificial Sequence: Synthetic oligonucleotide
  Sense strand starting at position 1002 of SEQ ID NO: 916734
aucuaaguccuccauaguu

SEQ ID NO: 1179829 - RNA, 19 nt, Artificial Sequence
  Description of Artificial Sequence: Synthetic oligonucleotide
  Antisense strand to SEQ ID NO: 1179828
aacuauggaggacuuagau

SEQ ID NO: 1179830 - RNA, 19 nt, Artificial Sequence
  Description of Artificial Sequence: Synthetic oligonucleotide
  Sense strand starting at position 1071 of SEQ ID NO: 916734
augcaaugugugcaagaaa

SEQ ID NO: 1179831 - RNA, 19 nt, Artificial Sequence
  Description of Artificial Sequence: Synthetic oligonucleotide
  Antisense strand to SEQ ID NO: 1179830
uuucuugcacacauugcau

SEQ ID NO: 1179832 - RNA, 19 nt, Artificial Sequence
  Description of Artificial Sequence: Synthetic oligonucleotide
  Sense strand starting at position 1150 of SEQ ID NO: 916734
aaauguagcugaguuagua

SEQ ID NO: 1179833 - RNA, 19 nt, Artificial Sequence
  Description of Artificial Sequence: Synthetic oligonucleotide
  Antisense strand to SEQ ID NO: 1179832
uacuaacucagcuacauuu

SEQ ID NO: 1179834 - RNA, 19 nt, Artificial Sequence
  Description of Artificial Sequence: Synthetic oligonucleotide
  Sense strand starting at position 1182 of SEQ ID NO: 916734
gauguugaaugcccugaca

SEQ ID NO: 1179835 - RNA, 19 nt, Artificial Sequence
  Description of Artificial Sequence: Synthetic oligonucleotide
  Antisense strand to SEQ ID NO: 1179834
ugucagggcauucaacauc

SEQ ID NO: 1179836 - RNA, 19 nt, Artificial Sequence
  Description of Artificial Sequence: Synthetic oligonucleotide
  Sense strand starting at position 1184 of SEQ ID NO: 916734
uguugaaugcccugacaag

SEQ ID NO: 1179837 - RNA, 19 nt, Artificial Sequence
  Description of Artificial Sequence: Synthetic oligonucleotide
  Antisense strand to SEQ ID NO: 1179836
cuugucagggcauucaaca

SEQ ID NO: 1179838 - RNA, 19 nt, Artificial Sequence
  Description of Artificial Sequence: Synthetic oligonucleotide
  Sense strand starting at position 1209 of SEQ ID NO: 916734
gaaucuauuggguggucaa

SEQ ID NO: 1179839 - RNA, 19 nt, Artificial Sequence
  Description of Artificial Sequence: Synthetic oligonucleotide
  Antisense strand to SEQ ID NO: 1179838
uugaccacccaauagauuc

SEQ ID NO: 1179840 - RNA, 19 nt, Artificial Sequence
  Description of Artificial Sequence: Synthetic oligonucleotide
  Sense strand starting at position 1210 of SEQ ID NO: 916734
aaucuauuggguggucaau

SEQ ID NO: 1179841 - RNA, 19 nt, Artificial Sequence
  Description of Artificial Sequence: Synthetic oligonucleotide
  Antisense strand to SEQ ID NO: 1179840
auugaccacccaauagauu

SEQ ID NO: 1179842 - RNA, 19 nt, Artificial Sequence
  Description of Artificial Sequence: Synthetic oligonucleotide
  Sense strand starting at position 1240 of SEQ ID NO: 916734
guuaguguuugaguagaaa

SEQ ID NO: 1179843 - RNA, 19 nt, Artificial Sequence
  Description of Artificial Sequence: Synthetic oligonucleotide
  Antisense strand to SEQ ID NO: 1179842
uuucuacucaaacacuaac

SEQ ID NO: 1179844 - RNA, 19 nt, Artificial Sequence
  Description of Artificial Sequence: Synthetic oligonucleotide
  Sense strand starting at position 1286 of SEQ ID NO: 916734
ggaauuguaagaugauucu

SEQ ID NO: 1179845 - RNA, 19 nt, Artificial Sequence
  Description of Artificial Sequence: Synthetic oligonucleotide
  Antisense strand to SEQ ID NO: 1179844
agaaucaucuuacaauucc

SEQ ID NO: 1179846 - RNA, 19 nt, Artificial Sequence
  Description of Artificial Sequence: Synthetic oligonucleotide
  Sense strand starting at position 1316 of SEQ ID NO: 916734
gcaagauguauccgaugga

SEQ ID NO: 1179847 - RNA, 19 nt, Artificial Sequence
  Description of Artificial Sequence: Synthetic oligonucleotide
  Antisense strand to SEQ ID NO: 1179846
uccaucggauacaucuugc

SEQ ID NO: 1179848 - RNA, 19 nt, Artificial Sequence
  Description of Artificial Sequence: Synthetic oligonucleotide
  Sense strand starting at position 1319 of SEQ ID NO: 916734
agauguauccgauggagua

SEQ ID NO: 1179849 - RNA, 19 nt, Artificial Sequence
  Description of Artificial Sequence: Synthetic oligonucleotide
  Antisense strand to SEQ ID NO: 1179848
uacuccaucggauacaucu

SEQ ID NO: 1179850 - RNA, 19 nt, Artificial Sequence
  Description of Artificial Sequence: Synthetic oligonucleotide
  Sense strand starting at position 1320 of SEQ ID NO: 916734
gauguauccgauggaguaa

SEQ ID NO: 1179851 - RNA, 19 nt, Artificial Sequence
  Description of Artificial Sequence: Synthetic oligonucleotide
  Antisense strand to SEQ ID NO: 1179850
uuacuccaucggauacauc

SEQ ID NO: 1179852 - RNA, 19 nt, Artificial Sequence
  Description of Artificial Sequence: Synthetic oligonucleotide
  Sense strand starting at position 1388 of SEQ ID NO: 916734
agggauuggcccugaaaga

SEQ ID NO: 1179853 - RNA, 19 nt, Artificial Sequence
  Description of Artificial Sequence: Synthetic oligonucleotide
  Antisense strand to SEQ ID NO: 1179852
ucuuucagggccaaucccu

SEQ ID NO: 1179854 - RNA, 19 nt, Artificial Sequence
  Description of Artificial Sequence: Synthetic oligonucleotide
  Sense strand starting at position 1701 of SEQ ID NO: 916734
ugcagaagcuacuuaacuu

SEQ ID NO: 1179855 - RNA, 19 nt, Artificial Sequence
  Description of Artificial Sequence: Synthetic oligonucleotide
  Antisense strand to SEQ ID NO: 1179854
aaguuaaguagcuucugca

SEQ ID NO: 1179856 - RNA, 19 nt, Artificial Sequence
  Description of Artificial Sequence: Synthetic oligonucleotide
  Sense strand starting at position 2272 of SEQ ID NO: 916734
cgccuuaaugccucgguca

SEQ ID NO: 1179857 - RNA, 19 nt, Artificial Sequence
  Description of Artificial Sequence: Synthetic oligonucleotide
  Antisense strand to SEQ ID NO: 1179856
ugaccgaggcauuaaggcg

SEQ ID NO: 1179858 - RNA, 19 nt, Artificial Sequence
  Description of Artificial Sequence: Synthetic oligonucleotide
  Sense strand starting at position 2359 of SEQ ID NO: 916734
acggaaaucucuuuaucau

SEQ ID NO: 1179859 - RNA, 19 nt, Artificial Sequence
  Description of Artificial Sequence: Synthetic oligonucleotide
  Antisense strand to SEQ ID NO: 1179858
augauaaagagauuuccgu

SEQ ID NO: 1179860 - RNA, 19 nt, Artificial Sequence
  Description of Artificial Sequence: Synthetic oligonucleotide
  Sense strand starting at position 2360 of SEQ ID NO: 916734
cggaaaucucuuuaucauc

SEQ ID NO: 1179861 - RNA, 19 nt, Artificial Sequence
  Description of Artificial Sequence: Synthetic oligonucleotide
  Antisense strand to SEQ ID NO: 1179860
gaugauaaagagauuuccg

SEQ ID NO: 1179862 - RNA, 19 nt, Artificial Sequence
  Description of Artificial Sequence: Synthetic oligonucleotide
  Sense strand starting at position 2368 of SEQ ID NO: 916734
ucuuuaucauccgugagaa

SEQ ID NO: 1179863 - RNA, 19 nt, Artificial Sequence
  Description of Artificial Sequence: Synthetic oligonucleotide
  Antisense strand to SEQ ID NO: 1179862
uucucacggaugauaaaga

SEQ ID NO: 1179864 - RNA, 19 nt, Artificial Sequence
  Description of Artificial Sequence: Synthetic oligonucleotide
  Sense strand starting at position 2369 of SEQ ID NO: 916734
cuuuaucauccgugagaaa

SEQ ID NO: 1179865 - RNA, 19 nt, Artificial Sequence
  Description of Artificial Sequence: Synthetic oligonucleotide
  Antisense strand to SEQ ID NO: 1179864
uuucucacggaugauaaag

SEQ ID NO: 1179866 - RNA, 19 nt, Artificial Sequence
  Description of Artificial Sequence: Synthetic oligonucleotide
  Sense strand starting at position 2663 of SEQ ID NO: 916734
ccuccacacgauuguaauu

SEQ ID NO: 1179867 - RNA, 19 nt, Artificial Sequence
  Description of Artificial Sequence: Synthetic oligonucleotide
  Antisense strand to SEQ ID NO: 1179866
aauuacaaucguguggagg

SEQ ID NO: 1179868 - RNA, 19 nt, Artificial Sequence
  Description of Artificial Sequence: Synthetic oligonucleotide
  Sense strand starting at position 2700 of SEQ ID NO: 916734
ccaagcuuccagggaauua

SEQ ID NO: 1179869 - RNA, 19 nt, Artificial Sequence
  Description of Artificial Sequence: Synthetic oligonucleotide
  Antisense strand to SEQ ID NO: 1179868
uaauucccuggaagcuugg

SEQ ID NO: 1179870 - RNA, 19 nt, Artificial Sequence
  Description of Artificial Sequence: Synthetic oligonucleotide
  Sense strand starting at position 3267 of SEQ ID NO: 916734
uggagugguccuugaagag

SEQ ID NO: 1179871 - RNA, 19 nt, Artificial Sequence
  Description of Artificial Sequence: Synthetic oligonucleotide
  Antisense strand to SEQ ID NO: 1179870
cucuucaaggaccacucca

SEQ ID NO: 1179872 - RNA, 19 nt, Artificial Sequence
  Description of Artificial Sequence: Synthetic oligonucleotide
  Sense strand starting at position 3332 of SEQ ID NO: 916734
auuugaaguuugcuuucua

SEQ ID NO: 1179873 - RNA, 19 nt, Artificial Sequence
  Description of Artificial Sequence: Synthetic oligonucleotide
  Antisense strand to SEQ ID NO: 1179872
uagaaagcaaacuucaaau

SEQ ID NO: 1179874 - RNA, 19 nt, Artificial Sequence
  Description of Artificial Sequence: Synthetic oligonucleotide
  Sense strand starting at position 3368 of SEQ ID NO: 916734
ucugauauuccaggccaaa

SEQ ID NO: 1179875 - RNA, 19 nt, Artificial Sequence
  Description of Artificial Sequence: Synthetic oligonucleotide
  Antisense strand to SEQ ID NO: 1179874
uuuggccuggaauaucaga

SEQ ID NO: 1179876 - RNA, 19 nt, Artificial Sequence
  Description of Artificial Sequence: Synthetic oligonucleotide
  Sense strand starting at position 3415 of SEQ ID NO: 916734
caguaaauaucgguaaacu

SEQ ID NO: 1179877 - RNA, 19 nt, Artificial Sequence
  Description of Artificial Sequence: Synthetic oligonucleotide
  Antisense strand to SEQ ID NO: 1179876
aguuuaccgauauuuacug

SEQ ID NO: 1179878 - RNA, 19 nt, Artificial Sequence
  Description of Artificial Sequence: Synthetic oligonucleotide
  Sense strand starting at position 3416 of SEQ ID NO: 916734
aguaaauaucgguaaacuu

SEQ ID NO: 1179879 - RNA, 19 nt, Artificial Sequence
  Description of Artificial Sequence: Synthetic oligonucleotide
  Antisense strand to SEQ ID NO: 1179878
aaguuuaccgauauuuacu

SEQ ID NO: 1179880 - RNA, 19 nt, Artificial Sequence
  Description of Artificial Sequence: Synthetic oligonucleotide
  Sense strand starting at position 3490 of SEQ ID NO: 916734
cucagaauccuaggacuuc

SEQ ID NO: 1179881 - RNA, 19 nt, Artificial Sequence
  Description of Artificial Sequence: Synthetic oligonucleotide
  Antisense strand to SEQ ID NO: 1179880
gaaguccuaggauucugag

SEQ ID NO: 1179882 - RNA, 19 nt, Artificial Sequence
  Description of Artificial Sequence: Synthetic oligonucleotide
  Sense strand starting at position 3565 of SEQ ID NO: 916734
uugguaggcucuccuaaau

SEQ ID NO: 1179883 - RNA, 19 nt, Artificial Sequence
  Description of Artificial Sequence: Synthetic oligonucleotide
  Antisense strand to SEQ ID NO: 1179882
auuuaggagagccuaccaa

SEQ ID NO: 1179884 - RNA, 19 nt, Artificial Sequence
  Description of Artificial Sequence: Synthetic oligonucleotide
  Sense strand starting at position 3961 of SEQ ID NO: 916734
gcuuccugugacuaccaua

SEQ ID NO: 1179885 - RNA, 19 nt, Artificial Sequence
  Description of Artificial Sequence: Synthetic oligonucleotide
  Antisense strand to SEQ ID NO: 1179884
uaugguagucacaggaagc

SEQ ID NO: 1179886 - RNA, 19 nt, Artificial Sequence
  Description of Artificial Sequence: Synthetic oligonucleotide
  Sense strand starting at position 32 of SEQ ID NO: 916735
cagccagaauggucuuaaa

SEQ ID NO: 1179887 - RNA, 19 nt, Artificial Sequence
  Description of Artificial Sequence: Synthetic oligonucleotide
  Antisense strand to SEQ ID NO: 1179886
uuuaagaccauucuggcug

SEQ ID NO: 1179888 - RNA, 19 nt, Artificial Sequence
  Description of Artificial Sequence: Synthetic oligonucleotide
  Sense strand starting at position 343 of SEQ ID NO: 916735
ggaaccugcaagugauucu

SEQ ID NO: 1179889 - RNA, 19 nt, Artificial Sequence
  Description of Artificial Sequence: Synthetic oligonucleotide
  Antisense strand to SEQ ID NO: 1179888
agaaucacuugcagguucc

SEQ ID NO: 1179890 - RNA, 19 nt, Artificial Sequence
  Description of Artificial Sequence: Synthetic oligonucleotide
  Sense strand starting at position 692 of SEQ ID NO: 916735
auagcaguucuagguaaag

SEQ ID NO: 1179891 - RNA, 19 nt, Artificial Sequence
  Description of Artificial Sequence: Synthetic oligonucleotide
  Antisense strand to SEQ ID NO: 1179890
cuuuaccuagaacugcuau

SEQ ID NO: 1179892 - RNA, 19 nt, Artificial Sequence
  Description of Artificial Sequence: Synthetic oligonucleotide
  Sense strand starting at position 694 of SEQ ID NO: 916735
agcaguucuagguaaaguu

SEQ ID NO: 1179893 - RNA, 19 nt, Artificial Sequence
  Description of Artificial Sequence: Synthetic oligonucleotide
  Antisense strand to SEQ ID NO: 1179892
aacuuuaccuagaacugcu

SEQ ID NO: 1179894 - RNA, 19 nt, Artificial Sequence
  Description of Artificial Sequence: Synthetic oligonucleotide
  Sense strand starting at position 739 of SEQ ID NO: 916735
cuccaaagagaauguuagu

SEQ ID NO: 1179895 - RNA, 19 nt, Artificial Sequence
  Description of Artificial Sequence: Synthetic oligonucleotide
  Antisense strand to SEQ ID NO: 1179894
acuaacauucucuuuggag

SEQ ID NO: 1179896 - RNA, 19 nt, Artificial Sequence
  Description of Artificial Sequence: Synthetic oligonucleotide
  Sense strand starting at position 774 of SEQ ID NO: 916735
ccuugucugccuuauuuac

SEQ ID NO: 1179897 - RNA, 19 nt, Artificial Sequence
  Description of Artificial Sequence: Synthetic oligonucleotide
  Antisense strand to SEQ ID NO: 1179896
guaaauaaggcagacaagg

SEQ ID NO: 1179898 - RNA, 19 nt, Artificial Sequence
  Description of Artificial Sequence: Synthetic oligonucleotide
  Sense strand starting at position 776 of SEQ ID NO: 916735
uugucugccuuauuuacua

SEQ ID NO: 1179899 - RNA, 19 nt, Artificial Sequence
  Description of Artificial Sequence: Synthetic oligonucleotide
  Antisense strand to SEQ ID NO: 1179898
uaguaaauaaggcagacaa

SEQ ID NO: 1179900 - RNA, 19 nt, Artificial Sequence
  Description of Artificial Sequence: Synthetic oligonucleotide
  Sense strand starting at position 828 of SEQ ID NO: 916735
caugguaggucugcaauaa

SEQ ID NO: 1179901 - RNA, 19 nt, Artificial Sequence
  Description of Artificial Sequence: Synthetic oligonucleotide
  Antisense strand to SEQ ID NO: 1179900
uuauugcagaccuaccaug

SEQ ID NO: 1179902 - RNA, 19 nt, Artificial Sequence
  Description of Artificial Sequence: Synthetic oligonucleotide
  Sense strand starting at position 829 of SEQ ID NO: 916735
augguaggucugcaauaaa

SEQ ID NO: 1179903 - RNA, 19 nt, Artificial Sequence
  Description of Artificial Sequence: Synthetic oligonucleotide
  Antisense strand to SEQ ID NO: 1179902
uuuauugcagaccuaccau

SEQ ID NO: 1179904 - RNA, 19 nt, Artificial Sequence
  Description of Artificial Sequence: Synthetic oligonucleotide
  Sense strand starting at position 832 of SEQ ID NO: 916735
guaggucugcaauaaauac

SEQ ID NO: 1179905 - RNA, 19 nt, Artificial Sequence
  Description of Artificial Sequence: Synthetic oligonucleotide
  Antisense strand to SEQ ID NO: 1179904
guauuuauugcagaccuac

SEQ ID NO: 1179906 - RNA, 19 nt, Artificial Sequence
  Description of Artificial Sequence: Synthetic oligonucleotide
  Sense strand starting at position 930 of SEQ ID NO: 916735
gcaagaaguggccaucuaa

SEQ ID NO: 1179907 - RNA, 19 nt, Artificial Sequence
  Description of Artificial Sequence: Synthetic oligonucleotide
  Antisense strand to SEQ ID NO: 1179906
uuagauggccacuucuugc

SEQ ID NO: 1179908 - RNA, 19 nt, Artificial Sequence
  Description of Artificial Sequence: Synthetic oligonucleotide
  Sense strand starting at position 943 of SEQ ID NO: 916735
aucuaaguccuccauaguu

SEQ ID NO: 1179909 - RNA, 19 nt, Artificial Sequence
  Description of Artificial Sequence: Synthetic oligonucleotide
  Antisense strand to SEQ ID NO: 1179908
aacuauggaggacuuagau

SEQ ID NO: 1179910 - RNA, 19 nt, Artificial Sequence
  Description of Artificial Sequence: Synthetic oligonucleotide
  Sense strand starting at position 1012 of SEQ ID NO: 916735
augcaaugugugcaagaaa

SEQ ID NO: 1179911 - RNA, 19 nt, Artificial Sequence
  Description of Artificial Sequence: Synthetic oligonucleotide
  Antisense strand to SEQ ID NO: 1179910
uuucuugcacacauugcau

SEQ ID NO: 1179912 - RNA, 19 nt, Artificial Sequence
  Description of Artificial Sequence: Synthetic oligonucleotide
  Sense strand starting at position 1091 of SEQ ID NO: 916735
aaauguagcugaguuagua

SEQ ID NO: 1179913 - RNA, 19 nt, Artificial Sequence
  Description of Artificial Sequence: Synthetic oligonucleotide
  Antisense strand to SEQ ID NO: 1179912
uacuaacucagcuacauuu

SEQ ID NO: 1179914 - RNA, 19 nt, Artificial Sequence
  Description of Artificial Sequence: Synthetic oligonucleotide
  Sense strand starting at position 1123 of SEQ ID NO: 916735
gauguugaaugcccugaca

SEQ ID NO: 1179915 - RNA, 19 nt, Artificial Sequence
  Description of Artificial Sequence: Synthetic oligonucleotide
  Antisense strand to SEQ ID NO: 1179914
ugucagggcauucaacauc

SEQ ID NO: 1179916 - RNA, 19 nt, Artificial Sequence
  Description of Artificial Sequence: Synthetic oligonucleotide
  Sense strand starting at position 1125 of SEQ ID NO: 916735
uguugaaugcccugacaag

SEQ ID NO: 1179917 - RNA, 19 nt, Artificial Sequence
  Description of Artificial Sequence: Synthetic oligonucleotide
  Antisense strand to SEQ ID NO: 1179916
cuugucagggcauucaaca

SEQ ID NO: 1179918 - RNA, 19 nt, Artificial Sequence
  Description of Artificial Sequence: Synthetic oligonucleotide
  Sense strand starting at position 1150 of SEQ ID NO: 916735
gaaucuauuggguggucaa

SEQ ID NO: 1179919 - RNA, 19 nt, Artificial Sequence
  Description of Artificial Sequence: Synthetic oligonucleotide
  Antisense strand to SEQ ID NO: 1179918
uugaccacccaauagauuc

SEQ ID NO: 1179920 - RNA, 19 nt, Artificial Sequence
  Description of Artificial Sequence: Synthetic oligonucleotide
  Sense strand starting at position 1151 of SEQ ID NO: 916735
aaucuauuggguggucaau

SEQ ID NO: 1179921 - RNA, 19 nt, Artificial Sequence
  Description of Artificial Sequence: Synthetic oligonucleotide
  Antisense strand to SEQ ID NO: 1179920
auugaccacccaauagauu

SEQ ID NO: 1179922 - RNA, 19 nt, Artificial Sequence
  Description of Artificial Sequence: Synthetic oligonucleotide
  Sense strand starting at position 1181 of SEQ ID NO: 916735
guuaguguuugaguagaaa

SEQ ID NO: 1179923 - RNA, 19 nt, Artificial Sequence
  Description of Artificial Sequence: Synthetic oligonucleotide
  Antisense strand to SEQ ID NO: 1179922
uuucuacucaaacacuaac

SEQ ID NO: 1179924 - RNA, 19 nt, Artificial Sequence
  Description of Artificial Sequence: Synthetic oligonucleotide
  Sense strand starting at position 1227 of SEQ ID NO: 916735
ggaauuguaagaugauucu

SEQ ID NO: 1179925 - RNA, 19 nt, Artificial Sequence
  Description of Artificial Sequence: Synthetic oligonucleotide
  Antisense strand to SEQ ID NO: 1179924
agaaucaucuuacaauucc

SEQ ID NO: 1179926 - RNA, 19 nt, Artificial Sequence
  Description of Artificial Sequence: Synthetic oligonucleotide
  Sense strand starting at position 1257 of SEQ ID NO: 916735
gcaagauguauccgaugga

SEQ ID NO: 1179927 - RNA, 19 nt, Artificial Sequence
  Description of Artificial Sequence: Synthetic oligonucleotide
  Antisense strand to SEQ ID NO: 1179926
uccaucggauacaucuugc

SEQ ID NO: 1179928 - RNA, 19 nt, Artificial Sequence
  Description of Artificial Sequence: Synthetic oligonucleotide
  Sense strand starting at position 1260 of SEQ ID NO: 916735
agauguauccgauggagua

SEQ ID NO: 1179929 - RNA, 19 nt, Artificial Sequence
  Description of Artificial Sequence: Synthetic oligonucleotide
  Antisense strand to SEQ ID NO: 1179928
uacuccaucggauacaucu

SEQ ID NO: 1179930 - RNA, 19 nt, Artificial Sequence
  Description of Artificial Sequence: Synthetic oligonucleotide
  Sense strand starting at position 1261 of SEQ ID NO: 916735
gauguauccgauggaguaa

SEQ ID NO: 1179931 - RNA, 19 nt, Artificial Sequence
  Description of Artificial Sequence: Synthetic oligonucleotide
  Antisense strand to SEQ ID NO: 1179930
uuacuccaucggauacauc

SEQ ID NO: 1179932 - RNA, 19 nt, Artificial Sequence
  Description of Artificial Sequence: Synthetic oligonucleotide
  Sense strand starting at position 1329 of SEQ ID NO: 916735
agggauuggcccugaaaga

SEQ ID NO: 1179933 - RNA, 19 nt, Artificial Sequence
  Description of Artificial Sequence: Synthetic oligonucleotide
  Antisense strand to SEQ ID NO: 1179932
ucuuucagggccaaucccu

SEQ ID NO: 1179934 - RNA, 19 nt, Artificial Sequence
  Description of Artificial Sequence: Synthetic oligonucleotide
  Sense strand starting at position 1642 of SEQ ID NO: 916735
ugcagaagcuacuuaacuu

SEQ ID NO: 1179935 - RNA, 19 nt, Artificial Sequence
  Description of Artificial Sequence: Synthetic oligonucleotide
  Antisense strand to SEQ ID NO: 1179934
aaguuaaguagcuucugca

SEQ ID NO: 1179936 - RNA, 19 nt, Artificial Sequence
  Description of Artificial Sequence: Synthetic oligonucleotide
  Sense strand starting at position 2213 of SEQ ID NO: 916735
cgccuuaaugccucgguca

SEQ ID NO: 1179937 - RNA, 19 nt, Artificial Sequence
  Description of Artificial Sequence: Synthetic oligonucleotide
  Antisense strand to SEQ ID NO: 1179936
ugaccgaggcauuaaggcg

SEQ ID NO: 1179938 - RNA, 19 nt, Artificial Sequence
  Description of Artificial Sequence: Synthetic oligonucleotide
  Sense strand starting at position 2300 of SEQ ID NO: 916735
acggaaaucucuuuaucau

SEQ ID NO: 1179939 - RNA, 19 nt, Artificial Sequence
  Description of Artificial Sequence: Synthetic oligonucleotide
  Antisense strand to SEQ ID NO: 1179938
augauaaagagauuuccgu

SEQ ID NO: 1179940 - RNA, 19 nt, Artificial Sequence
  Description of Artificial Sequence: Synthetic oligonucleotide
  Sense strand starting at position 2301 of SEQ ID NO: 916735
cggaaaucucuuuaucauc

SEQ ID NO: 1179941 - RNA, 19 nt, Artificial Sequence
  Description of Artificial Sequence: Synthetic oligonucleotide
  Antisense strand to SEQ ID NO: 1179940
gaugauaaagagauuuccg

SEQ ID NO: 1179942 - RNA, 19 nt, Artificial Sequence
  Description of Artificial Sequence: Synthetic oligonucleotide
  Sense strand starting at position 2309 of SEQ ID NO: 916735
ucuuuaucauccgugagaa

SEQ ID NO: 1179943 - RNA, 19 nt, Artificial Sequence
  Description of Artificial Sequence: Synthetic oligonucleotide
  Antisense strand to SEQ ID NO: 1179942
uucucacggaugauaaaga

SEQ ID NO: 1179944 - RNA, 19 nt, Artificial Sequence
  Description of Artificial Sequence: Synthetic oligonucleotide
  Sense strand starting at position 2310 of SEQ ID NO: 916735
cuuuaucauccgugagaaa

SEQ ID NO: 1179945 - RNA, 19 nt, Artificial Sequence
  Description of Artificial Sequence: Synthetic oligonucleotide
  Antisense strand to SEQ ID NO: 1179944
uuucucacggaugauaaag

SEQ ID NO: 1179946 - RNA, 19 nt, Artificial Sequence
  Description of Artificial Sequence: Synthetic oligonucleotide
  Sense strand starting at position 2604 of SEQ ID NO: 916735
ccuccacacgauuguaauu

SEQ ID NO: 1179947 - RNA, 19 nt, Artificial Sequence
  Description of Artificial Sequence: Synthetic oligonucleotide
  Antisense strand to SEQ ID NO: 1179946
aauuacaaucguguggagg

SEQ ID NO: 1179948 - RNA, 19 nt, Artificial Sequence
  Description of Artificial Sequence: Synthetic oligonucleotide
  Sense strand starting at position 2641 of SEQ ID NO: 916735
ccaagcuuccagggaauua

SEQ ID NO: 1179949 - RNA, 19 nt, Artificial Sequence
  Description of Artificial Sequence: Synthetic oligonucleotide
  Antisense strand to SEQ ID NO: 1179948
uaauucccuggaagcuugg

SEQ ID NO: 1179950 - RNA, 19 nt, Artificial Sequence
  Description of Artificial Sequence: Synthetic oligonucleotide
  Sense strand starting at position 3208 of SEQ ID NO: 916735
uggagugguccuugaagag

SEQ ID NO: 1179951 - RNA, 19 nt, Artificial Sequence
  Description of Artificial Sequence: Synthetic oligonucleotide
  Antisense strand to SEQ ID NO: 1179950
cucuucaaggaccacucca

SEQ ID NO: 1179952 - RNA, 19 nt, Artificial Sequence
  Description of Artificial Sequence: Synthetic oligonucleotide
  Sense strand starting at position 3273 of SEQ ID NO: 916735
auuugaaguuugcuuucua

SEQ ID NO: 1179953 - RNA, 19 nt, Artificial Sequence
  Description of Artificial Sequence: Synthetic oligonucleotide
  Antisense strand to SEQ ID NO: 1179952
uagaaagcaaacuucaaau

SEQ ID NO: 1179954 - RNA, 19 nt, Artificial Sequence
  Description of Artificial Sequence: Synthetic oligonucleotide
  Sense strand starting at position 3309 of SEQ ID NO: 916735
ucugauauuccaggccaaa

SEQ ID NO: 1179955 - RNA, 19 nt, Artificial Sequence
  Description of Artificial Sequence: Synthetic oligonucleotide
  Antisense strand to SEQ ID NO: 1179954
uuuggccuggaauaucaga

SEQ ID NO: 1179956 - RNA, 19 nt, Artificial Sequence
  Description of Artificial Sequence: Synthetic oligonucleotide
  Sense strand starting at position 3356 of SEQ ID NO: 916735
caguaaauaucgguaaacu

SEQ ID NO: 1179957 - RNA, 19 nt, Artificial Sequence
  Description of Artificial Sequence: Synthetic oligonucleotide
  Antisense strand to SEQ ID NO: 1179956
aguuuaccgauauuuacug

SEQ ID NO: 1179958 - RNA, 19 nt, Artificial Sequence
  Description of Artificial Sequence: Synthetic oligonucleotide
  Sense strand starting at position 3357 of SEQ ID NO: 916735
aguaaauaucgguaaacuu

SEQ ID NO: 1179959 - RNA, 19 nt, Artificial Sequence
  Description of Artificial Sequence: Synthetic oligonucleotide
  Antisense strand to SEQ ID NO: 1179958
aaguuuaccgauauuuacu

SEQ ID NO: 1179960 - RNA, 19 nt, Artificial Sequence
  Description of Artificial Sequence: Synthetic oligonucleotide
  Sense strand starting at position 3431 of SEQ ID NO: 916735
cucagaauccuaggacuuc

SEQ ID NO: 1179961 - RNA, 19 nt, Artificial Sequence
  Description of Artificial Sequence: Synthetic oligonucleotide
  Antisense strand to SEQ ID NO: 1179960
gaaguccuaggauucugag

SEQ ID NO: 1179962 - RNA, 19 nt, Artificial Sequence
  Description of Artificial Sequence: Synthetic oligonucleotide
  Sense strand starting at position 3506 of SEQ ID NO: 916735
uugguaggcucuccuaaau

SEQ ID NO: 1179963 - RNA, 19 nt, Artificial Sequence
  Description of Artificial Sequence: Synthetic oligonucleotide
  Antisense strand to SEQ ID NO: 1179962
auuuaggagagccuaccaa

SEQ ID NO: 1179964 - RNA, 19 nt, Artificial Sequence
  Description of Artificial Sequence: Synthetic oligonucleotide
  Sense strand starting at position 3902 of SEQ ID NO: 916735
gcuuccugugacuaccaua

SEQ ID NO: 1179965 - RNA, 19 nt, Artificial Sequence
  Description of Artificial Sequence: Synthetic oligonucleotide
  Antisense strand to SEQ ID NO: 1179964
uaugguagucacaggaagc

SEQ ID NO: 1179966 - RNA, 19 nt, Artificial Sequence
  Description of Artificial Sequence: Synthetic oligonucleotide
  Sense strand starting at position 287 of SEQ ID NO: 916736
ccagacuuaucuguacauc

SEQ ID NO: 1179967 - RNA, 19 nt, Artificial Sequence
  Description of Artificial Sequence: Synthetic oligonucleotide
  Antisense strand to SEQ ID NO: 1179966
gauguacagauaagucugg

SEQ ID NO: 1179968 - RNA, 19 nt, Artificial Sequence
  Description of Artificial Sequence: Synthetic oligonucleotide
  Sense strand starting at position 529 of SEQ ID NO: 916736
gucccuauucuauaaaugu

SEQ ID NO: 1179969 - RNA, 19 nt, Artificial Sequence
  Description of Artificial Sequence: Synthetic oligonucleotide
  Antisense strand to SEQ ID NO: 1179968
acauuuauagaauagggac

SEQ ID NO: 1179970 - RNA, 19 nt, Artificial Sequence
  Description of Artificial Sequence: Synthetic oligonucleotide
  Sense strand starting at position 653 of SEQ ID NO: 916736
cuguuaacuccauguccaa

SEQ ID NO: 1179971 - RNA, 19 nt, Artificial Sequence
  Description of Artificial Sequence: Synthetic oligonucleotide
  Antisense strand to SEQ ID NO: 1179970
uuggacauggaguuaacag

SEQ ID NO: 1179972 - RNA, 19 nt, Artificial Sequence
  Description of Artificial Sequence: Synthetic oligonucleotide
  Sense strand starting at position 696 of SEQ ID NO: 916736
aucauuaucuuggucaagu

SEQ ID NO: 1179973 - RNA, 19 nt, Artificial Sequence
  Description of Artificial Sequence: Synthetic oligonucleotide
  Antisense strand to SEQ ID NO: 1179972
acuugaccaagauaaugau

SEQ ID NO: 1179974 - RNA, 19 nt, Artificial Sequence
  Description of Artificial Sequence: Synthetic oligonucleotide
  Sense strand starting at position 697 of SEQ ID NO: 916736
ucauuaucuuggucaagua

SEQ ID NO: 1179975 - RNA, 19 nt, Artificial Sequence
  Description of Artificial Sequence: Synthetic oligonucleotide
  Antisense strand to SEQ ID NO: 1179974
uacuugaccaagauaauga

SEQ ID NO: 1179976 - RNA, 19 nt, Artificial Sequence
  Description of Artificial Sequence: Synthetic oligonucleotide
  Sense strand starting at position 735 of SEQ ID NO: 916736
uacuguuugguagaacuua

SEQ ID NO: 1179977 - RNA, 19 nt, Artificial Sequence
  Description of Artificial Sequence: Synthetic oligonucleotide
  Antisense strand to SEQ ID NO: 1179976
uaaguucuaccaaacagua

SEQ ID NO: 1179978 - RNA, 19 nt, Artificial Sequence
  Description of Artificial Sequence: Synthetic oligonucleotide
  Sense strand starting at position 1191 of SEQ ID NO: 916736
agcacuuaguauccaauga

SEQ ID NO: 1179979 - RNA, 19 nt, Artificial Sequence
  Description of Artificial Sequence: Synthetic oligonucleotide
  Antisense strand to SEQ ID NO: 1179978
ucauuggauacuaagugcu

SEQ ID NO: 1179980 - RNA, 19 nt, Artificial Sequence
  Description of Artificial Sequence: Synthetic oligonucleotide
  Sense strand starting at position 1195 of SEQ ID NO: 916736
cuuaguauccaaugaggaa

SEQ ID NO: 1179981 - RNA, 19 nt, Artificial Sequence
  Description of Artificial Sequence: Synthetic oligonucleotide
  Antisense strand to SEQ ID NO: 1179980
uuccucauuggauacuaag

SEQ ID NO: 1179982 - RNA, 19 nt, Artificial Sequence
  Description of Artificial Sequence: Synthetic oligonucleotide
  Sense strand starting at position 1219 of SEQ ID NO: 916736
uuaaguaaucgucaccucu

SEQ ID NO: 1179983 - RNA, 19 nt, Artificial Sequence
  Description of Artificial Sequence: Synthetic oligonucleotide
  Antisense strand to SEQ ID NO: 1179982
agaggugacgauuacuuaa

SEQ ID NO: 1179984 - RNA, 19 nt, Artificial Sequence
  Description of Artificial Sequence: Synthetic oligonucleotide
  Sense strand starting at position 1580 of SEQ ID NO: 916736
guccaugugcgugcgaauu

SEQ ID NO: 1179985 - RNA, 19 nt, Artificial Sequence
  Description of Artificial Sequence: Synthetic oligonucleotide
  Antisense strand to SEQ ID NO: 1179984
aauucgcacgcacauggac

SEQ ID NO: 1179986 - RNA, 19 nt, Artificial Sequence
  Description of Artificial Sequence: Synthetic oligonucleotide
  Sense strand starting at position 2161 of SEQ ID NO: 916736
ggcugugugaaguauagag

SEQ ID NO: 1179987 - RNA, 19 nt, Artificial Sequence
  Description of Artificial Sequence: Synthetic oligonucleotide
  Antisense strand to SEQ ID NO: 1179986
cucuauacuucacacagcc

SEQ ID NO: 1179988 - RNA, 19 nt, Artificial Sequence
  Description of Artificial Sequence: Synthetic oligonucleotide
  Sense strand starting at position 2256 of SEQ ID NO: 916736
gucagucagaagcaaaguu

SEQ ID NO: 1179989 - RNA, 19 nt, Artificial Sequence
  Description of Artificial Sequence: Synthetic oligonucleotide
  Antisense strand to SEQ ID NO: 1179988
aacuuugcuucugacugac

SEQ ID NO: 1179990 - RNA, 19 nt, Artificial Sequence
  Description of Artificial Sequence: Synthetic oligonucleotide
  Sense strand starting at position 2497 of SEQ ID NO: 916736
cuaacuaugcaguagugau

SEQ ID NO: 1179991 - RNA, 19 nt, Artificial Sequence
  Description of Artificial Sequence: Synthetic oligonucleotide
  Antisense strand to SEQ ID NO: 1179990
aucacuacugcauaguuag

SEQ ID NO: 1179992 - RNA, 19 nt, Artificial Sequence
  Description of Artificial Sequence: Synthetic oligonucleotide
  Sense strand starting at position 2505 of SEQ ID NO: 916736
gcaguagugauuuagucuu

SEQ ID NO: 1179993 - RNA, 19 nt, Artificial Sequence
  Description of Artificial Sequence: Synthetic oligonucleotide
  Antisense strand to SEQ ID NO: 1179992
aagacuaaaucacuacugc

SEQ ID NO: 1179994 - RNA, 19 nt, Artificial Sequence
  Description of Artificial Sequence: Synthetic oligonucleotide
  Sense strand starting at position 2536 of SEQ ID NO: 916736
gggcuuacuuauguugaag

SEQ ID NO: 1179995 - RNA, 19 nt, Artificial Sequence
  Description of Artificial Sequence: Synthetic oligonucleotide
  Antisense strand to SEQ ID NO: 1179994
cuucaacauaaguaagccc

SEQ ID NO: 1179996 - RNA, 19 nt, Artificial Sequence
  Description of Artificial Sequence: Synthetic oligonucleotide
  Sense strand starting at position 2591 of SEQ ID NO: 916736
cccuuugugggaggucuua

SEQ ID NO: 1179997 - RNA, 19 nt, Artificial Sequence
  Description of Artificial Sequence: Synthetic oligonucleotide
  Antisense strand to SEQ ID NO: 1179996
uaagaccucccacaaaggg

SEQ ID NO: 1179998 - RNA, 19 nt, Artificial Sequence
  Description of Artificial Sequence: Synthetic oligonucleotide
  Sense strand starting at position 2717 of SEQ ID NO: 916736
ucaugcuucucagcuaaga

SEQ ID NO: 1179999 - RNA, 19 nt, Artificial Sequence
  Description of Artificial Sequence: Synthetic oligonucleotide
  Antisense strand to SEQ ID NO: 1179998
ucuuagcugagaagcauga

SEQ ID NO: 1180000 - RNA, 19 nt, Artificial Sequence
  Description of Artificial Sequence: Synthetic oligonucleotide
  Sense strand starting at position 2766 of SEQ ID NO: 916736
ggacguuuguagaauggaa

SEQ ID NO: 1180001 - RNA, 19 nt, Artificial Sequence
  Description of Artificial Sequence: Synthetic oligonucleotide
  Antisense strand to SEQ ID NO: 1180000
uuccauucuacaaacgucc

SEQ ID NO: 1180002 - RNA, 19 nt, Artificial Sequence
  Description of Artificial Sequence: Synthetic oligonucleotide
  Sense strand starting at position 2864 of SEQ ID NO: 916736
ugcaucuaccucugagaga

SEQ ID NO: 1180003 - RNA, 19 nt, Artificial Sequence
  Description of Artificial Sequence: Synthetic oligonucleotide
  Antisense strand to SEQ ID NO: 1180002
ucucucagagguagaugca

SEQ ID NO: 1180004 - RNA, 19 nt, Artificial Sequence
  Description of Artificial Sequence: Synthetic oligonucleotide
  Sense strand starting at position 3098 of SEQ ID NO: 916736
guagucaaauacuuuccua

SEQ ID NO: 1180005 - RNA, 19 nt, Artificial Sequence
  Description of Artificial Sequence: Synthetic oligonucleotide
  Antisense strand to SEQ ID NO: 1180004
uaggaaaguauuugacuac

SEQ ID NO: 1180006 - RNA, 19 nt, Artificial Sequence
  Description of Artificial Sequence: Synthetic oligonucleotide
  Sense strand starting at position 3138 of SEQ ID NO: 916736
cugauacaacuaugaguuc

SEQ ID NO: 1180007 - RNA, 19 nt, Artificial Sequence
  Description of Artificial Sequence: Synthetic oligonucleotide
  Antisense strand to SEQ ID NO: 1180006
gaacucauaguuguaucag

SEQ ID NO: 1180008 - RNA, 19 nt, Artificial Sequence
  Description of Artificial Sequence: Synthetic oligonucleotide
  Sense strand starting at position 3150 of SEQ ID NO: 916736
ugaguucugucaccaacuc

SEQ ID NO: 1180009 - RNA, 19 nt, Artificial Sequence
  Description of Artificial Sequence: Synthetic oligonucleotide
  Antisense strand to SEQ ID NO: 1180008
gaguuggugacagaacuca

SEQ ID NO: 1180010 - RNA, 19 nt, Artificial Sequence
  Description of Artificial Sequence: Synthetic oligonucleotide
  Sense strand starting at position 3174 of SEQ ID NO: 916736
agccuaaugcgcuuggcaa

SEQ ID NO: 1180011 - RNA, 19 nt, Artificial Sequence
  Description of Artificial Sequence: Synthetic oligonucleotide
  Antisense strand to SEQ ID NO: 1180010
uugccaagcgcauuaggcu

SEQ ID NO: 1180012 - RNA, 19 nt, Artificial Sequence
  Description of Artificial Sequence: Synthetic oligonucleotide
  Sense strand starting at position 3221 of SEQ ID NO: 916736
gaaguaaauugcucauugu

SEQ ID NO: 1180013 - RNA, 19 nt, Artificial Sequence
  Description of Artificial Sequence: Synthetic oligonucleotide
  Antisense strand to SEQ ID NO: 1180012
acaaugagcaauuuacuuc

SEQ ID NO: 1180014 - RNA, 19 nt, Artificial Sequence
  Description of Artificial Sequence: Synthetic oligonucleotide
  Sense strand starting at position 3289 of SEQ ID NO: 916736
ucuguaagaugauucuucu

SEQ ID NO: 1180015 - RNA, 19 nt, Artificial Sequence
  Description of Artificial Sequence: Synthetic oligonucleotide
  Antisense strand to SEQ ID NO: 1180014
agaagaaucaucuuacaga

SEQ ID NO: 1180016 - RNA, 19 nt, Artificial Sequence
  Description of Artificial Sequence: Synthetic oligonucleotide
  Sense strand starting at position 3292 of SEQ ID NO: 916736
guaagaugauucuucugug

SEQ ID NO: 1180017 - RNA, 19 nt, Artificial Sequence
  Description of Artificial Sequence: Synthetic oligonucleotide
  Antisense strand to SEQ ID NO: 1180016
cacagaagaaucaucuuac

SEQ ID NO: 1180018 - RNA, 19 nt, Artificial Sequence
  Description of Artificial Sequence: Synthetic oligonucleotide
  Sense strand starting at position 3296 of SEQ ID NO: 916736
gaugauucuucugugguuu

SEQ ID NO: 1180019 - RNA, 19 nt, Artificial Sequence
  Description of Artificial Sequence: Synthetic oligonucleotide
  Antisense strand to SEQ ID NO: 1180018
aaaccacagaagaaucauc

SEQ ID NO: 1180020 - RNA, 19 nt, Artificial Sequence
  Description of Artificial Sequence: Synthetic oligonucleotide
  Sense strand starting at position 3364 of SEQ ID NO: 916736
caaggauggcugcaacaau

SEQ ID NO: 1180021 - RNA, 19 nt, Artificial Sequence
  Description of Artificial Sequence: Synthetic oligonucleotide
  Antisense strand to SEQ ID NO: 1180020
auuguugcagccauccuug

SEQ ID NO: 1180022 - RNA, 19 nt, Artificial Sequence
  Description of Artificial Sequence: Synthetic oligonucleotide
  Sense strand starting at position 3408 of SEQ ID NO: 916736
caacgugaucuugauauuc

SEQ ID NO: 1180023 - RNA, 19 nt, Artificial Sequence
  Description of Artificial Sequence: Synthetic oligonucleotide
  Antisense strand to SEQ ID NO: 1180022
gaauaucaagaucacguug

SEQ ID NO: 1180024 - RNA, 19 nt, Artificial Sequence
  Description of Artificial Sequence: Synthetic oligonucleotide
  Sense strand starting at position 3459 of SEQ ID NO: 916736
acuugaaucuggguaguug

SEQ ID NO: 1180025 - RNA, 19 nt, Artificial Sequence
  Description of Artificial Sequence: Synthetic oligonucleotide
  Antisense strand to SEQ ID NO: 1180024
caacuacccagauucaagu

SEQ ID NO: 1180026 - RNA, 19 nt, Artificial Sequence
  Description of Artificial Sequence: Synthetic oligonucleotide
  Sense strand starting at position 3460 of SEQ ID NO: 916736
cuugaaucuggguaguugu

SEQ ID NO: 1180027 - RNA, 19 nt, Artificial Sequence
  Description of Artificial Sequence: Synthetic oligonucleotide
  Antisense strand to SEQ ID NO: 1180026
acaacuacccagauucaag

SEQ ID NO: 1180028 - RNA, 19 nt, Artificial Sequence
  Description of Artificial Sequence: Synthetic oligonucleotide
  Sense strand starting at position 3470 of SEQ ID NO: 916736
gguaguuguaggucugcuu

SEQ ID NO: 1180029 - RNA, 19 nt, Artificial Sequence
  Description of Artificial Sequence: Synthetic oligonucleotide
  Antisense strand to SEQ ID NO: 1180028
aagcagaccuacaacuacc

SEQ ID NO: 1180030 - RNA, 19 nt, Artificial Sequence
  Description of Artificial Sequence: Synthetic oligonucleotide
  Sense strand starting at position 3481 of SEQ ID NO: 916736
gucugcuuuggccaauaaa

SEQ ID NO: 1180031 - RNA, 19 nt, Artificial Sequence
  Description of Artificial Sequence: Synthetic oligonucleotide
  Antisense strand to SEQ ID NO: 1180030
uuuauuggccaaagcagac

SEQ ID NO: 1180032 - RNA, 19 nt, Artificial Sequence
  Description of Artificial Sequence: Synthetic oligonucleotide
  Sense strand starting at position 3484 of SEQ ID NO: 916736
ugcuuuggccaauaaagua

SEQ ID NO: 1180033 - RNA, 19 nt, Artificial Sequence
  Description of Artificial Sequence: Synthetic oligonucleotide
  Antisense strand to SEQ ID NO: 1180032
uacuuuauuggccaaagca

SEQ ID NO: 1180034 - RNA, 19 nt, Artificial Sequence
  Description of Artificial Sequence: Synthetic oligonucleotide
  Sense strand starting at position 3491 of SEQ ID NO: 916736
gccaauaaaguaugacaga

SEQ ID NO: 1180035 - RNA, 19 nt, Artificial Sequence
  Description of Artificial Sequence: Synthetic oligonucleotide
  Antisense strand to SEQ ID NO: 1180034
ucugucauacuuuauuggc

SEQ ID NO: 1180036 - RNA, 19 nt, Artificial Sequence
  Description of Artificial Sequence: Synthetic oligonucleotide
  Sense strand starting at position 3500 of SEQ ID NO: 916736
guaugacagaaaugauguu

SEQ ID NO: 1180037 - RNA, 19 nt, Artificial Sequence
  Description of Artificial Sequence: Synthetic oligonucleotide
  Antisense strand to SEQ ID NO: 1180036
aacaucauuucugucauac

SEQ ID NO: 1180038 - RNA, 19 nt, Artificial Sequence
  Description of Artificial Sequence: Synthetic oligonucleotide
  Sense strand starting at position 3512 of SEQ ID NO: 916736
ugauguuuccaagguuaag

SEQ ID NO: 1180039 - RNA, 19 nt, Artificial Sequence
  Description of Artificial Sequence: Synthetic oligonucleotide
  Antisense strand to SEQ ID NO: 1180038
cuuaaccuuggaaacauca

SEQ ID NO: 1180040 - RNA, 19 nt, Artificial Sequence
  Description of Artificial Sequence: Synthetic oligonucleotide
  Sense strand starting at position 3518 of SEQ ID NO: 916736
uuccaagguuaagucauaa

SEQ ID NO: 1180041 - RNA, 19 nt, Artificial Sequence
  Description of Artificial Sequence: Synthetic oligonucleotide
  Antisense strand to SEQ ID NO: 1180040
uuaugacuuaaccuuggaa

SEQ ID NO: 1180042 - RNA, 19 nt, Artificial Sequence
  Description of Artificial Sequence: Synthetic oligonucleotide
  Sense strand starting at position 3616 of SEQ ID NO: 916736
ccaguagaacacuaauguu

SEQ ID NO: 1180043 - RNA, 19 nt, Artificial Sequence
  Description of Artificial Sequence: Synthetic oligonucleotide
  Antisense strand to SEQ ID NO: 1180042
aacauuaguguucuacugg

SEQ ID NO: 1180044 - RNA, 19 nt, Artificial Sequence
  Description of Artificial Sequence: Synthetic oligonucleotide
  Sense strand starting at position 3801 of SEQ ID NO: 916736
agaagaaaggcaugucuua

SEQ ID NO: 1180045 - RNA, 19 nt, Artificial Sequence
  Description of Artificial Sequence: Synthetic oligonucleotide
  Antisense strand to SEQ ID NO: 1180044
uaagacaugccuuucuucu

SEQ ID NO: 1180046 - RNA, 19 nt, Artificial Sequence
  Description of Artificial Sequence: Synthetic oligonucleotide
  Sense strand starting at position 35 of SEQ ID NO: 916737
cgaucagaucccuggcgau

SEQ ID NO: 1180047 - RNA, 19 nt, Artificial Sequence
  Description of Artificial Sequence: Synthetic oligonucleotide
  Antisense strand to SEQ ID NO: 1180046
aucgccagggaucugaucg

SEQ ID NO: 1180048 - RNA, 19 nt, Artificial Sequence
  Description of Artificial Sequence: Synthetic oligonucleotide
  Sense strand starting at position 2239 of SEQ ID NO: 916737
gugggagcgcgccaaauuu

SEQ ID NO: 1180049 - RNA, 19 nt, Artificial Sequence
  Description of Artificial Sequence: Synthetic oligonucleotide
  Antisense strand to SEQ ID NO: 1180048
aaauuuggcgcgcucccac

SEQ ID NO: 1180050 - RNA, 19 nt, Artificial Sequence
  Description of Artificial Sequence: Synthetic oligonucleotide
  Sense strand starting at position 2805 of SEQ ID NO: 916737
ccaggauccuguucuagau

SEQ ID NO: 1180051 - RNA, 19 nt, Artificial Sequence
  Description of Artificial Sequence: Synthetic oligonucleotide
  Antisense strand to SEQ ID NO: 1180050
aucuagaacaggauccugg

SEQ ID NO: 1180052 - RNA, 19 nt, Artificial Sequence
  Description of Artificial Sequence: Synthetic oligonucleotide
  Sense strand starting at position 2807 of SEQ ID NO: 916737
aggauccuguucuagauca

SEQ ID NO: 1180053 - RNA, 19 nt, Artificial Sequence
  Description of Artificial Sequence: Synthetic oligonucleotide
  Antisense strand to SEQ ID NO: 1180052
ugaucuagaacaggauccu

SEQ ID NO: 1180054 - RNA, 19 nt, Artificial Sequence
  Description of Artificial Sequence: Synthetic oligonucleotide
  Sense strand starting at position 3203 of SEQ ID NO: 916737
cgaggucccagcuauuaau

SEQ ID NO: 1180055 - RNA, 19 nt, Artificial Sequence
  Description of Artificial Sequence: Synthetic oligonucleotide
  Antisense strand to SEQ ID NO: 1180054
auuaauagcugggaccucg

SEQ ID NO: 1180056 - RNA, 19 nt, Artificial Sequence
  Description of Artificial Sequence: Synthetic oligonucleotide
  Sense strand starting at position 3212 of SEQ ID NO: 916737
agcuauuaauacucccgaa

SEQ ID NO: 1180057 - RNA, 19 nt, Artificial Sequence
  Description of Artificial Sequence: Synthetic oligonucleotide
  Antisense strand to SEQ ID NO: 1180056
uucgggaguauuaauagcu

SEQ ID NO: 1180058 - RNA, 19 nt, Artificial Sequence
  Description of Artificial Sequence: Synthetic oligonucleotide
  Sense strand starting at position 3396 of SEQ ID NO: 916737
ggaggacuggccugccaua

SEQ ID NO: 1180059 - RNA, 19 nt, Artificial Sequence
  Description of Artificial Sequence: Synthetic oligonucleotide
  Antisense strand to SEQ ID NO: 1180058
uauggcaggccaguccucc

SEQ ID NO: 1180060 - RNA, 19 nt, Artificial Sequence
  Description of Artificial Sequence: Synthetic oligonucleotide
  Sense strand starting at position 3739 of SEQ ID NO: 916737
gugugagaacgugaagcuu

SEQ ID NO: 1180061 - RNA, 19 nt, Artificial Sequence
  Description of Artificial Sequence: Synthetic oligonucleotide
  Antisense strand to SEQ ID NO: 1180060
aagcuucacguucucacac

SEQ ID NO: 1180062 - RNA, 19 nt, Artificial Sequence
  Description of Artificial Sequence: Synthetic oligonucleotide
  Sense strand starting at position 3797 of SEQ ID NO: 916737
gaaaccaagugguaaggau

SEQ ID NO: 1180063 - RNA, 19 nt, Artificial Sequence
  Description of Artificial Sequence: Synthetic oligonucleotide
  Antisense strand to SEQ ID NO: 1180062
auccuuaccacuugguuuc

SEQ ID NO: 1180064 - RNA, 19 nt, Artificial Sequence
  Description of Artificial Sequence: Synthetic oligonucleotide
  Sense strand starting at position 3888 of SEQ ID NO: 916737
ucuacaugguguguuggaa

SEQ ID NO: 1180065 - RNA, 19 nt, Artificial Sequence
  Description of Artificial Sequence: Synthetic oligonucleotide
  Antisense strand to SEQ ID NO: 1180064
uuccaacacaccauguaga

SEQ ID NO: 1180066 - RNA, 19 nt, Artificial Sequence
  Description of Artificial Sequence: Synthetic oligonucleotide
  Sense strand starting at position 11 of SEQ ID NO: 916738
ucaguuuccuggcccuaaa

SEQ ID NO: 1180067 - RNA, 19 nt, Artificial Sequence
  Description of Artificial Sequence: Synthetic oligonucleotide
  Antisense strand to SEQ ID NO: 1180066
uuuagggccaggaaacuga

SEQ ID NO: 1180068 - RNA, 19 nt, Artificial Sequence
  Description of Artificial Sequence: Synthetic oligonucleotide
  Sense strand starting at position 31 of SEQ ID NO: 916738
ggaagacugucagaagaca

SEQ ID NO: 1180069 - RNA, 19 nt, Artificial Sequence
  Description of Artificial Sequence: Synthetic oligonucleotide
  Antisense strand to SEQ ID NO: 1180068
ugucuucugacagucuucc

SEQ ID NO: 1180070 - RNA, 19 nt, Artificial Sequence
  Description of Artificial Sequence: Synthetic oligonucleotide
  Sense strand starting at position 55 of SEQ ID NO: 916738
uccagauuucgauggcgag

SEQ ID NO: 1180071 - RNA, 19 nt, Artificial Sequence
  Description of Artificial Sequence: Synthetic oligonucleotide
  Antisense strand to SEQ ID NO: 1180070
cucgccaucgaaaucugga

SEQ ID NO: 1180072 - RNA, 19 nt, Artificial Sequence
  Description of Artificial Sequence: Synthetic oligonucleotide
  Sense strand starting at position 87 of SEQ ID NO: 916738
uucucaguccuugaaacag

SEQ ID NO: 1180073 - RNA, 19 nt, Artificial Sequence
  Description of Artificial Sequence: Synthetic oligonucleotide
  Antisense strand to SEQ ID NO: 1180072
cuguuucaaggacugagaa

SEQ ID NO: 1180074 - RNA, 19 nt, Artificial Sequence
  Description of Artificial Sequence: Synthetic oligonucleotide
  Sense strand starting at position 166 of SEQ ID NO: 916738
cccaguucccacugggaaa

SEQ ID NO: 1180075 - RNA, 19 nt, Artificial Sequence
  Description of Artificial Sequence: Synthetic oligonucleotide
  Antisense strand to SEQ ID NO: 1180074
uuucccagugggaacuggg

SEQ ID NO: 1180076 - RNA, 19 nt, Artificial Sequence
  Description of Artificial Sequence: Synthetic oligonucleotide
  Sense strand starting at position 499 of SEQ ID NO: 916738
uugguagagguccaucagu

SEQ ID NO: 1180077 - RNA, 19 nt, Artificial Sequence
  Description of Artificial Sequence: Synthetic oligonucleotide
  Antisense strand to SEQ ID NO: 1180076
acugauggaccucuaccaa

SEQ ID NO: 1180078 - RNA, 19 nt, Artificial Sequence
  Description of Artificial Sequence: Synthetic oligonucleotide
  Sense strand starting at position 556 of SEQ ID NO: 916738
ggaagcaucaguggucaca

SEQ ID NO: 1180079 - RNA, 19 nt, Artificial Sequence
  Description of Artificial Sequence: Synthetic oligonucleotide
  Antisense strand to SEQ ID NO: 1180078
ugugaccacugaugcuucc

SEQ ID NO: 1180080 - RNA, 19 nt, Artificial Sequence
  Description of Artificial Sequence: Synthetic oligonucleotide
  Sense strand starting at position 773 of SEQ ID NO: 916738
cggcuuccaggagauacuu

SEQ ID NO: 1180081 - RNA, 19 nt, Artificial Sequence
  Description of Artificial Sequence: Synthetic oligonucleotide
  Antisense strand to SEQ ID NO: 1180080
aaguaucuccuggaagccg

SEQ ID NO: 1180082 - RNA, 19 nt, Artificial Sequence
  Description of Artificial Sequence: Synthetic oligonucleotide
  Sense strand starting at position 959 of SEQ ID NO: 916738
acguucagggauggucaua

SEQ ID NO: 1180083 - RNA, 19 nt, Artificial Sequence
  Description of Artificial Sequence: Synthetic oligonucleotide
  Antisense strand to SEQ ID NO: 1180082
uaugaccaucccugaacgu

SEQ ID NO: 1180084 - RNA, 19 nt, Artificial Sequence
  Description of Artificial Sequence: Synthetic oligonucleotide
  Sense strand starting at position 1086 of SEQ ID NO: 916738
gacggacuggucugugaau

SEQ ID NO: 1180085 - RNA, 19 nt, Artificial Sequence
  Description of Artificial Sequence: Synthetic oligonucleotide
  Antisense strand to SEQ ID NO: 1180084
auucacagaccaguccguc

SEQ ID NO: 1180086 - RNA, 19 nt, Artificial Sequence
  Description of Artificial Sequence: Synthetic oligonucleotide
  Sense strand starting at position 1087 of SEQ ID NO: 916738
acggacuggucugugaauu

SEQ ID NO: 1180087 - RNA, 19 nt, Artificial Sequence
  Description of Artificial Sequence: Synthetic oligonucleotide
  Antisense strand to SEQ ID NO: 1180086
aauucacagaccaguccgu

SEQ ID NO: 1180088 - RNA, 19 nt, Artificial Sequence
  Description of Artificial Sequence: Synthetic oligonucleotide
  Sense strand starting at position 1088 of SEQ ID NO: 916738
cggacuggucugugaauug

SEQ ID NO: 1180089 - RNA, 19 nt, Artificial Sequence
  Description of Artificial Sequence: Synthetic oligonucleotide
  Antisense strand to SEQ ID NO: 1180088
caauucacagaccaguccg

SEQ ID NO: 1180090 - RNA, 19 nt, Artificial Sequence
  Description of Artificial Sequence: Synthetic oligonucleotide
  Sense strand starting at position 1144 of SEQ ID NO: 916738
aaaugagugauggguccuu

SEQ ID NO: 1180091 - RNA, 19 nt, Artificial Sequence
  Description of Artificial Sequence: Synthetic oligonucleotide
  Antisense strand to SEQ ID NO: 1180090
aaggacccaucacucauuu

SEQ ID NO: 1180092 - RNA, 19 nt, Artificial Sequence
  Description of Artificial Sequence: Synthetic oligonucleotide
  Sense strand starting at position 1149 of SEQ ID NO: 916738
agugauggguccuugaaac

SEQ ID NO: 1180093 - RNA, 19 nt, Artificial Sequence
  Description of Artificial Sequence: Synthetic oligonucleotide
  Antisense strand to SEQ ID NO: 1180092
guuucaaggacccaucacu

SEQ ID NO: 1180094 - RNA, 19 nt, Artificial Sequence
  Description of Artificial Sequence: Synthetic oligonucleotide
  Sense strand starting at position 1211 of SEQ ID NO: 916738
cugggaaacuugucuuuga

SEQ ID NO: 1180095 - RNA, 19 nt, Artificial Sequence
  Description of Artificial Sequence: Synthetic oligonucleotide
  Antisense strand to SEQ ID NO: 1180094
ucaaagacaaguuucccag

SEQ ID NO: 1180096 - RNA, 19 nt, Artificial Sequence
  Description of Artificial Sequence: Synthetic oligonucleotide
  Sense strand starting at position 1212 of SEQ ID NO: 916738
ugggaaacuugucuuugaa

SEQ ID NO: 1180097 - RNA, 19 nt, Artificial Sequence
  Description of Artificial Sequence: Synthetic oligonucleotide
  Antisense strand to SEQ ID NO: 1180096
uucaaagacaaguuuccca

SEQ ID NO: 1180098 - RNA, 19 nt, Artificial Sequence
  Description of Artificial Sequence: Synthetic oligonucleotide
  Sense strand starting at position 1214 of SEQ ID NO: 916738
ggaaacuugucuuugaaau

SEQ ID NO: 1180099 - RNA, 19 nt, Artificial Sequence
  Description of Artificial Sequence: Synthetic oligonucleotide
  Antisense strand to SEQ ID NO: 1180098
auuucaaagacaaguuucc

SEQ ID NO: 1180100 - RNA, 19 nt, Artificial Sequence
  Description of Artificial Sequence: Synthetic oligonucleotide
  Sense strand starting at position 1215 of SEQ ID NO: 916738
gaaacuugucuuugaaaug

SEQ ID NO: 1180101 - RNA, 19 nt, Artificial Sequence
  Description of Artificial Sequence: Synthetic oligonucleotide
  Antisense strand to SEQ ID NO: 1180100
cauuucaaagacaaguuuc

SEQ ID NO: 1180102 - RNA, 19 nt, Artificial Sequence
  Description of Artificial Sequence: Synthetic oligonucleotide
  Sense strand starting at position 1364 of SEQ ID NO: 916738
gggagcaggucgaggaaau

SEQ ID NO: 1180103 - RNA, 19 nt, Artificial Sequence
  Description of Artificial Sequence: Synthetic oligonucleotide
  Antisense strand to SEQ ID NO: 1180102
auuuccucgaccugcuccc

SEQ ID NO: 1180104 - RNA, 19 nt, Artificial Sequence
  Description of Artificial Sequence: Synthetic oligonucleotide
  Sense strand starting at position 2429 of SEQ ID NO: 916738
ggucguccucuggaucaau

SEQ ID NO: 1180105 - RNA, 19 nt, Artificial Sequence
  Description of Artificial Sequence: Synthetic oligonucleotide
  Antisense strand to SEQ ID NO: 1180104
auugauccagaggacgacc

SEQ ID NO: 1180106 - RNA, 19 nt, Artificial Sequence
  Description of Artificial Sequence: Synthetic oligonucleotide
  Sense strand starting at position 2497 of SEQ ID NO: 916738
gugguuccaucucucuuaa

SEQ ID NO: 1180107 - RNA, 19 nt, Artificial Sequence
  Description of Artificial Sequence: Synthetic oligonucleotide
  Antisense strand to SEQ ID NO: 1180106
uuaagagagauggaaccac

SEQ ID NO: 1180108 - RNA, 19 nt, Artificial Sequence
  Description of Artificial Sequence: Synthetic oligonucleotide
  Sense strand starting at position 2637 of SEQ ID NO: 916738
cucggaaauuggguaauaa

SEQ ID NO: 1180109 - RNA, 19 nt, Artificial Sequence
  Description of Artificial Sequence: Synthetic oligonucleotide
  Antisense strand to SEQ ID NO: 1180108
uuauuacccaauuuccgag

SEQ ID NO: 1180110 - RNA, 19 nt, Artificial Sequence
  Description of Artificial Sequence: Synthetic oligonucleotide
  Sense strand starting at position 2668 of SEQ ID NO: 916738
uuuauugagugucugaaua

SEQ ID NO: 1180111 - RNA, 19 nt, Artificial Sequence
  Description of Artificial Sequence: Synthetic oligonucleotide
  Antisense strand to SEQ ID NO: 1180110
uauucagacacucaauaaa

SEQ ID NO: 1180112 - RNA, 19 nt, Artificial Sequence
  Description of Artificial Sequence: Synthetic oligonucleotide
  Sense strand starting at position 2830 of SEQ ID NO: 916738
caggccuucugggucagau

SEQ ID NO: 1180113 - RNA, 19 nt, Artificial Sequence
  Description of Artificial Sequence: Synthetic oligonucleotide
  Antisense strand to SEQ ID NO: 1180112
aucugacccagaaggccug

SEQ ID NO: 1180114 - RNA, 19 nt, Artificial Sequence
  Description of Artificial Sequence: Synthetic oligonucleotide
  Sense strand starting at position 2832 of SEQ ID NO: 916738
ggccuucugggucagauca

SEQ ID NO: 1180115 - RNA, 19 nt, Artificial Sequence
  Description of Artificial Sequence: Synthetic oligonucleotide
  Antisense strand to SEQ ID NO: 1180114
ugaucugacccagaaggcc

SEQ ID NO: 1180116 - RNA, 19 nt, Artificial Sequence
  Description of Artificial Sequence: Synthetic oligonucleotide
  Sense strand starting at position 2844 of SEQ ID NO: 916738
cagaucagguccuccagaa

SEQ ID NO: 1180117 - RNA, 19 nt, Artificial Sequence
  Description of Artificial Sequence: Synthetic oligonucleotide
  Antisense strand to SEQ ID NO: 1180116
uucuggaggaccugaucug

SEQ ID NO: 1180118 - RNA, 19 nt, Artificial Sequence
  Description of Artificial Sequence: Synthetic oligonucleotide
  Sense strand starting at position 2934 of SEQ ID NO: 916738
caaggagacucagaucuga

SEQ ID NO: 1180119 - RNA, 19 nt, Artificial Sequence
  Description of Artificial Sequence: Synthetic oligonucleotide
  Antisense strand to SEQ ID NO: 1180118
ucagaucugagucuccuug

SEQ ID NO: 1180120 - RNA, 19 nt, Artificial Sequence
  Description of Artificial Sequence: Synthetic oligonucleotide
  Sense strand starting at position 2994 of SEQ ID NO: 916738
ugagaagucuccuugggca

SEQ ID NO: 1180121 - RNA, 19 nt, Artificial Sequence
  Description of Artificial Sequence: Synthetic oligonucleotide
  Antisense strand to SEQ ID NO: 1180120
ugcccaaggagacuucuca

SEQ ID NO: 1180122 - RNA, 19 nt, Artificial Sequence
  Description of Artificial Sequence: Synthetic oligonucleotide
  Sense strand starting at position 2996 of SEQ ID NO: 916738
agaagucuccuugggcaga

SEQ ID NO: 1180123 - RNA, 19 nt, Artificial Sequence
  Description of Artificial Sequence: Synthetic oligonucleotide
  Antisense strand to SEQ ID NO: 1180122
ucugcccaaggagacuucu

SEQ ID NO: 1180124 - RNA, 19 nt, Artificial Sequence
  Description of Artificial Sequence: Synthetic oligonucleotide
  Sense strand starting at position 3001 of SEQ ID NO: 916738
ucuccuugggcagaaguau

SEQ ID NO: 1180125 - RNA, 19 nt, Artificial Sequence
  Description of Artificial Sequence: Synthetic oligonucleotide
  Antisense strand to SEQ ID NO: 1180124
auacuucugcccaaggaga

SEQ ID NO: 1180126 - RNA, 19 nt, Artificial Sequence
  Description of Artificial Sequence: Synthetic oligonucleotide
  Sense strand starting at position 3708 of SEQ ID NO: 916738
agagcaaagugguuagcau

SEQ ID NO: 1180127 - RNA, 19 nt, Artificial Sequence
  Description of Artificial Sequence: Synthetic oligonucleotide
  Antisense strand to SEQ ID NO: 1180126
augcuaaccacuuugcucu

SEQ ID NO: 1180128 - RNA, 19 nt, Artificial Sequence
  Description of Artificial Sequence: Synthetic oligonucleotide
  Sense strand starting at position 3715 of SEQ ID NO: 916738
agugguuagcaugaaggau

SEQ ID NO: 1180129 - RNA, 19 nt, Artificial Sequence
  Description of Artificial Sequence: Synthetic oligonucleotide
  Antisense strand to SEQ ID NO: 1180128
auccuucaugcuaaccacu

SEQ ID NO: 1180130 - RNA, 19 nt, Artificial Sequence
  Description of Artificial Sequence: Synthetic oligonucleotide
  Sense strand starting at position 3773 of SEQ ID NO: 916738
gugcaaaggucuguagaca

SEQ ID NO: 1180131 - RNA, 19 nt, Artificial Sequence
  Description of Artificial Sequence: Synthetic oligonucleotide
  Antisense strand to SEQ ID NO: 1180130
ugucuacagaccuuugcac

SEQ ID NO: 1180132 - RNA, 19 nt, Artificial Sequence
  Description of Artificial Sequence: Synthetic oligonucleotide
  Sense strand starting at position 3774 of SEQ ID NO: 916738
ugcaaaggucuguagacaa

SEQ ID NO: 1180133 - RNA, 19 nt, Artificial Sequence
  Description of Artificial Sequence: Synthetic oligonucleotide
  Antisense strand to SEQ ID NO: 1180132
uugucuacagaccuuugca

SEQ ID NO: 1180134 - RNA, 19 nt, Artificial Sequence
  Description of Artificial Sequence: Synthetic oligonucleotide
  Sense strand starting at position 3858 of SEQ ID NO: 916738
uugagagucagagguugaa

SEQ ID NO: 1180135 - RNA, 19 nt, Artificial Sequence
  Description of Artificial Sequence: Synthetic oligonucleotide
  Antisense strand to SEQ ID NO: 1180134
uucaaccucugacucucaa

SEQ ID NO: 1180136 - RNA, 19 nt, Artificial Sequence
  Description of Artificial Sequence: Synthetic oligonucleotide
  Sense strand starting at position 3861 of SEQ ID NO: 916738
agagucagagguugaauua

SEQ ID NO: 1180137 - RNA, 19 nt, Artificial Sequence
  Description of Artificial Sequence: Synthetic oligonucleotide
  Antisense strand to SEQ ID NO: 1180136
uaauucaaccucugacucu

SEQ ID NO: 1180138 - RNA, 19 nt, Artificial Sequence
  Description of Artificial Sequence: Synthetic oligonucleotide
  Sense strand starting at position 3871 of SEQ ID NO: 916738
guugaauuacuccagguca

SEQ ID NO: 1180139 - RNA, 19 nt, Artificial Sequence
  Description of Artificial Sequence: Synthetic oligonucleotide
  Antisense strand to SEQ ID NO: 1180138
ugaccuggaguaauucaac

SEQ ID NO: 1180140 - RNA, 19 nt, Artificial Sequence
  Description of Artificial Sequence: Synthetic oligonucleotide
  Sense strand starting at position 3873 of SEQ ID NO: 916738
ugaauuacuccaggucaua

SEQ ID NO: 1180141 - RNA, 19 nt, Artificial Sequence
  Description of Artificial Sequence: Synthetic oligonucleotide
  Antisense strand to SEQ ID NO: 1180140
uaugaccuggaguaauuca

SEQ ID NO: 1180142 - RNA, 19 nt, Artificial Sequence
  Description of Artificial Sequence: Synthetic oligonucleotide
  Sense strand starting at position 3946 of SEQ ID NO: 916738
cugguuaugaaacggcuaa

SEQ ID NO: 1180143 - RNA, 19 nt, Artificial Sequence
  Description of Artificial Sequence: Synthetic oligonucleotide
  Antisense strand to SEQ ID NO: 1180142
uuagccguuucauaaccag

SEQ ID NO: 1180144 - RNA, 19 nt, Artificial Sequence
  Description of Artificial Sequence: Synthetic oligonucleotide
  Sense strand starting at position 3950 of SEQ ID NO: 916738
uuaugaaacggcuaaguga

SEQ ID NO: 1180145 - RNA, 19 nt, Artificial Sequence
  Description of Artificial Sequence: Synthetic oligonucleotide
  Antisense strand to SEQ ID NO: 1180144
ucacuuagccguuucauaa

SEQ ID NO: 1180146 - RNA, 19 nt, Artificial Sequence
  Description of Artificial Sequence: Synthetic oligonucleotide
  Sense strand starting at position 68 of SEQ ID NO: 916739
cuuugcucacgguagaaga

SEQ ID NO: 1180147 - RNA, 19 nt, Artificial Sequence
  Description of Artificial Sequence: Synthetic oligonucleotide
  Antisense strand to SEQ ID NO: 1180146
ucuucuaccgugagcaaag

SEQ ID NO: 1180148 - RNA, 19 nt, Artificial Sequence
  Description of Artificial Sequence: Synthetic oligonucleotide
  Sense strand starting at position 206 of SEQ ID NO: 916739
cccugauaacccuggauag

SEQ ID NO: 1180149 - RNA, 19 nt, Artificial Sequence
  Description of Artificial Sequence: Synthetic oligonucleotide
  Antisense strand to SEQ ID NO: 1180148
cuauccaggguuaucaggg

SEQ ID NO: 1180150 - RNA, 19 nt, Artificial Sequence
  Description of Artificial Sequence: Synthetic oligonucleotide
  Sense strand starting at position 257 of SEQ ID NO: 916739
gcagacaccugguugacua

SEQ ID NO: 1180151 - RNA, 19 nt, Artificial Sequence
  Description of Artificial Sequence: Synthetic oligonucleotide
  Antisense strand to SEQ ID NO: 1180150
uagucaaccaggugucugc

SEQ ID NO: 1180152 - RNA, 19 nt, Artificial Sequence
  Description of Artificial Sequence: Synthetic oligonucleotide
  Sense strand starting at position 258 of SEQ ID NO: 916739
cagacaccugguugacuau

SEQ ID NO: 1180153 - RNA, 19 nt, Artificial Sequence
  Description of Artificial Sequence: Synthetic oligonucleotide
  Antisense strand to SEQ ID NO: 1180152
auagucaaccaggugucug

SEQ ID NO: 1180154 - RNA, 19 nt, Artificial Sequence
  Description of Artificial Sequence: Synthetic oligonucleotide
  Sense strand starting at position 432 of SEQ ID NO: 916739
cucauuggcgagcaggaau

SEQ ID NO: 1180155 - RNA, 19 nt, Artificial Sequence
  Description of Artificial Sequence: Synthetic oligonucleotide
  Antisense strand to SEQ ID NO: 1180154
auuccugcucgccaaugag

SEQ ID NO: 1180156 - RNA, 19 nt, Artificial Sequence
  Description of Artificial Sequence: Synthetic oligonucleotide
  Sense strand starting at position 568 of SEQ ID NO: 916739
agugucgucagcuagaaua

SEQ ID NO: 1180157 - RNA, 19 nt, Artificial Sequence
  Description of Artificial Sequence: Synthetic oligonucleotide
  Antisense strand to SEQ ID NO: 1180156
uauucuagcugacgacacu

SEQ ID NO: 1180158 - RNA, 19 nt, Artificial Sequence
  Description of Artificial Sequence: Synthetic oligonucleotide
  Sense strand starting at position 673 of SEQ ID NO: 916739
uauauuaaugcuggcaguu

SEQ ID NO: 1180159 - RNA, 19 nt, Artificial Sequence
  Description of Artificial Sequence: Synthetic oligonucleotide
  Antisense strand to SEQ ID NO: 1180158
aacugccagcauuaauaua

SEQ ID NO: 1180160 - RNA, 19 nt, Artificial Sequence
  Description of Artificial Sequence: Synthetic oligonucleotide
  Sense strand starting at position 826 of SEQ ID NO: 916739
cuuagucagauaugguguu

SEQ ID NO: 1180161 - RNA, 19 nt, Artificial Sequence
  Description of Artificial Sequence: Synthetic oligonucleotide
  Antisense strand to SEQ ID NO: 1180160
aacaccauaucugacuaag

SEQ ID NO: 1180162 - RNA, 19 nt, Artificial Sequence
  Description of Artificial Sequence: Synthetic oligonucleotide
  Sense strand starting at position 1025 of SEQ ID NO: 916739
uuguaauuguggucuuaga

SEQ ID NO: 1180163 - RNA, 19 nt, Artificial Sequence
  Description of Artificial Sequence: Synthetic oligonucleotide
  Antisense strand to SEQ ID NO: 1180162
ucuaagaccacaauuacaa

SEQ ID NO: 1180164 - RNA, 19 nt, Artificial Sequence
  Description of Artificial Sequence: Synthetic oligonucleotide
  Sense strand starting at position 1075 of SEQ ID NO: 916739
agcagcucugacugaagaa

SEQ ID NO: 1180165 - RNA, 19 nt, Artificial Sequence
  Description of Artificial Sequence: Synthetic oligonucleotide
  Antisense strand to SEQ ID NO: 1180164
uucuucagucagagcugcu

SEQ ID NO: 1180166 - RNA, 19 nt, Artificial Sequence
  Description of Artificial Sequence: Synthetic oligonucleotide
  Sense strand starting at position 1076 of SEQ ID NO: 916739
gcagcucugacugaagaag

SEQ ID NO: 1180167 - RNA, 19 nt, Artificial Sequence
  Description of Artificial Sequence: Synthetic oligonucleotide
  Antisense strand to SEQ ID NO: 1180166
cuucuucagucagagcugc

SEQ ID NO: 1180168 - RNA, 19 nt, Artificial Sequence
  Description of Artificial Sequence: Synthetic oligonucleotide
  Sense strand starting at position 1165 of SEQ ID NO: 916739
agaggacucuaagaaagaa

SEQ ID NO: 1180169 - RNA, 19 nt, Artificial Sequence
  Description of Artificial Sequence: Synthetic oligonucleotide
  Antisense strand to SEQ ID NO: 1180168
uucuuucuuagaguccucu

SEQ ID NO: 1180170 - RNA, 19 nt, Artificial Sequence
  Description of Artificial Sequence: Synthetic oligonucleotide
  Sense strand starting at position 1208 of SEQ ID NO: 916739
gggagugcagacugauaau

SEQ ID NO: 1180171 - RNA, 19 nt, Artificial Sequence
  Description of Artificial Sequence: Synthetic oligonucleotide
  Antisense strand to SEQ ID NO: 1180170
auuaucagucugcacuccc

SEQ ID NO: 1180172 - RNA, 19 nt, Artificial Sequence
  Description of Artificial Sequence: Synthetic oligonucleotide
  Sense strand starting at position 1297 of SEQ ID NO: 916739
gccaguggugcccaaagga

SEQ ID NO: 1180173 - RNA, 19 nt, Artificial Sequence
  Description of Artificial Sequence: Synthetic oligonucleotide
  Antisense strand to SEQ ID NO: 1180172
uccuuugggcaccacuggc

SEQ ID NO: 1180174 - RNA, 19 nt, Artificial Sequence
  Description of Artificial Sequence: Synthetic oligonucleotide
  Sense strand starting at position 1334 of SEQ ID NO: 916739
cucaauugccagugaucag

SEQ ID NO: 1180175 - RNA, 19 nt, Artificial Sequence
  Description of Artificial Sequence: Synthetic oligonucleotide
  Antisense strand to SEQ ID NO: 1180174
cugaucacuggcaauugag

SEQ ID NO: 1180176 - RNA, 19 nt, Artificial Sequence
  Description of Artificial Sequence: Synthetic oligonucleotide
  Sense strand starting at position 1401 of SEQ ID NO: 916739
gccaaagucaggcagauaa

SEQ ID NO: 1180177 - RNA, 19 nt, Artificial Sequence
  Description of Artificial Sequence: Synthetic oligonucleotide
  Antisense strand to SEQ ID NO: 1180176
uuaucugccugacuuuggc

SEQ ID NO: 1180178 - RNA, 19 nt, Artificial Sequence
  Description of Artificial Sequence: Synthetic oligonucleotide
  Sense strand starting at position 1620 of SEQ ID NO: 916739
ggaggaguucuuggaaagu

SEQ ID NO: 1180179 - RNA, 19 nt, Artificial Sequence
  Description of Artificial Sequence: Synthetic oligonucleotide
  Antisense strand to SEQ ID NO: 1180178
acuuuccaagaacuccucc

SEQ ID NO: 1180180 - RNA, 19 nt, Artificial Sequence
  Description of Artificial Sequence: Synthetic oligonucleotide
  Sense strand starting at position 1729 of SEQ ID NO: 916739
acgcauugugccugaugaa

SEQ ID NO: 1180181 - RNA, 19 nt, Artificial Sequence
  Description of Artificial Sequence: Synthetic oligonucleotide
  Antisense strand to SEQ ID NO: 1180180
uucaucaggcacaaugcgu

SEQ ID NO: 1180182 - RNA, 19 nt, Artificial Sequence
  Description of Artificial Sequence: Synthetic oligonucleotide
  Sense strand starting at position 1730 of SEQ ID NO: 916739
cgcauugugccugaugaag

SEQ ID NO: 1180183 - RNA, 19 nt, Artificial Sequence
  Description of Artificial Sequence: Synthetic oligonucleotide
  Antisense strand to SEQ ID NO: 1180182
cuucaucaggcacaaugcg

SEQ ID NO: 1180184 - RNA, 19 nt, Artificial Sequence
  Description of Artificial Sequence: Synthetic oligonucleotide
  Sense strand starting at position 1840 of SEQ ID NO: 916739
ugccaagucgugucucuga

SEQ ID NO: 1180185 - RNA, 19 nt, Artificial Sequence
  Description of Artificial Sequence: Synthetic oligonucleotide
  Antisense strand to SEQ ID NO: 1180184
ucagagacacgacuuggca

SEQ ID NO: 1180186 - RNA, 19 nt, Artificial Sequence
  Description of Artificial Sequence: Synthetic oligonucleotide
  Sense strand starting at position 1860 of SEQ ID NO: 916739
gagugacugcaguguucca

SEQ ID NO: 1180187 - RNA, 19 nt, Artificial Sequence
  Description of Artificial Sequence: Synthetic oligonucleotide
  Antisense strand to SEQ ID NO: 1180186
uggaacacugcagucacuc

SEQ ID NO: 1180188 - RNA, 19 nt, Artificial Sequence
  Description of Artificial Sequence: Synthetic oligonucleotide
  Sense strand starting at position 1935 of SEQ ID NO: 916739
cccagagcacaucagugau

SEQ ID NO: 1180189 - RNA, 19 nt, Artificial Sequence
  Description of Artificial Sequence: Synthetic oligonucleotide
  Antisense strand to SEQ ID NO: 1180188
aucacugaugugcucuggg

SEQ ID NO: 1180190 - RNA, 19 nt, Artificial Sequence
  Description of Artificial Sequence: Synthetic oligonucleotide
  Sense strand starting at position 2207 of SEQ ID NO: 916739
guguccacucaguguacaa

SEQ ID NO: 1180191 - RNA, 19 nt, Artificial Sequence
  Description of Artificial Sequence: Synthetic oligonucleotide
  Antisense strand to SEQ ID NO: 1180190
uuguacacugaguggacac

SEQ ID NO: 1180192 - RNA, 19 nt, Artificial Sequence
  Description of Artificial Sequence: Synthetic oligonucleotide
  Sense strand starting at position 2301 of SEQ ID NO: 916739
ccaugaggcuuucuggaug

SEQ ID NO: 1180193 - RNA, 19 nt, Artificial Sequence
  Description of Artificial Sequence: Synthetic oligonucleotide
  Antisense strand to SEQ ID NO: 1180192
cauccagaaagccucaugg

SEQ ID NO: 1180194 - RNA, 19 nt, Artificial Sequence
  Description of Artificial Sequence: Synthetic oligonucleotide
  Sense strand starting at position 2320 of SEQ ID NO: 916739
ccuagagugcuaggagaag

SEQ ID NO: 1180195 - RNA, 19 nt, Artificial Sequence
  Description of Artificial Sequence: Synthetic oligonucleotide
  Antisense strand to SEQ ID NO: 1180194
cuucuccuagcacucuagg

SEQ ID NO: 1180196 - RNA, 19 nt, Artificial Sequence
  Description of Artificial Sequence: Synthetic oligonucleotide
  Sense strand starting at position 2381 of SEQ ID NO: 916739
ggcagcucucacuaauauu

SEQ ID NO: 1180197 - RNA, 19 nt, Artificial Sequence
  Description of Artificial Sequence: Synthetic oligonucleotide
  Antisense strand to SEQ ID NO: 1180196
aauauuagugagagcugcc

SEQ ID NO: 1180198 - RNA, 19 nt, Artificial Sequence
  Description of Artificial Sequence: Synthetic oligonucleotide
  Sense strand starting at position 2397 of SEQ ID NO: 916739
auuaguguuagaugagcga

SEQ ID NO: 1180199 - RNA, 19 nt, Artificial Sequence
  Description of Artificial Sequence: Synthetic oligonucleotide
  Antisense strand to SEQ ID NO: 1180198
ucgcucaucuaacacuaau

SEQ ID NO: 1180200 - RNA, 19 nt, Artificial Sequence
  Description of Artificial Sequence: Synthetic oligonucleotide
  Sense strand starting at position 2400 of SEQ ID NO: 916739
aguguuagaugagcgauua

SEQ ID NO: 1180201 - RNA, 19 nt, Artificial Sequence
  Description of Artificial Sequence: Synthetic oligonucleotide
  Antisense strand to SEQ ID NO: 1180200
uaaucgcucaucuaacacu

SEQ ID NO: 1180202 - RNA, 19 nt, Artificial Sequence
  Description of Artificial Sequence: Synthetic oligonucleotide
  Sense strand starting at position 2401 of SEQ ID NO: 916739
guguuagaugagcgauuag

SEQ ID NO: 1180203 - RNA, 19 nt, Artificial Sequence
  Description of Artificial Sequence: Synthetic oligonucleotide
  Antisense strand to SEQ ID NO: 1180202
cuaaucgcucaucuaacac

SEQ ID NO: 1180204 - RNA, 19 nt, Artificial Sequence
  Description of Artificial Sequence: Synthetic oligonucleotide
  Sense strand starting at position 2410 of SEQ ID NO: 916739
gagcgauuaguauaaacca

SEQ ID NO: 1180205 - RNA, 19 nt, Artificial Sequence
  Description of Artificial Sequence: Synthetic oligonucleotide
  Antisense strand to SEQ ID NO: 1180204
ugguuuauacuaaucgcuc

SEQ ID NO: 1180206 - RNA, 19 nt, Artificial Sequence
  Description of Artificial Sequence: Synthetic oligonucleotide
  Sense strand starting at position 3687 of SEQ ID NO: 916739
ccaagagaaugauaccaaa

SEQ ID NO: 1180207 - RNA, 19 nt, Artificial Sequence
  Description of Artificial Sequence: Synthetic oligonucleotide
  Antisense strand to SEQ ID NO: 1180206
uuugguaucauucucuugg

SEQ ID NO: 1180208 - RNA, 19 nt, Artificial Sequence
  Description of Artificial Sequence: Synthetic oligonucleotide
  Sense strand starting at position 3730 of SEQ ID NO: 916739
ugucaagauuaucccaaga

SEQ ID NO: 1180209 - RNA, 19 nt, Artificial Sequence
  Description of Artificial Sequence: Synthetic oligonucleotide
  Antisense strand to SEQ ID NO: 1180208
ucuugggauaaucuugaca

SEQ ID NO: 1180210 - RNA, 19 nt, Artificial Sequence
  Description of Artificial Sequence: Synthetic oligonucleotide
  Sense strand starting at position 3754 of SEQ ID NO: 916739
cgauaaccaucaccaguua

SEQ ID NO: 1180211 - RNA, 19 nt, Artificial Sequence
  Description of Artificial Sequence: Synthetic oligonucleotide
  Antisense strand to SEQ ID NO: 1180210
uaacuggugaugguuaucg

SEQ ID NO: 1180212 - RNA, 19 nt, Artificial Sequence
  Description of Artificial Sequence: Synthetic oligonucleotide
  Sense strand starting at position 3771 of SEQ ID NO: 916739
uacugagcacuuugaaagu

SEQ ID NO: 1180213 - RNA, 19 nt, Artificial Sequence
  Description of Artificial Sequence: Synthetic oligonucleotide
  Antisense strand to SEQ ID NO: 1180212
acuuucaaagugcucagua

SEQ ID NO: 1180214 - RNA, 19 nt, Artificial Sequence
  Description of Artificial Sequence: Synthetic oligonucleotide
  Sense strand starting at position 3782 of SEQ ID NO: 916739
uugaaaguauuucgggaaa

SEQ ID NO: 1180215 - RNA, 19 nt, Artificial Sequence
  Description of Artificial Sequence: Synthetic oligonucleotide
  Antisense strand to SEQ ID NO: 1180214
uuucccgaaauacuuucaa

SEQ ID NO: 1180216 - RNA, 19 nt, Artificial Sequence
  Description of Artificial Sequence: Synthetic oligonucleotide
  Sense strand starting at position 3784 of SEQ ID NO: 916739
gaaaguauuucgggaaagu

SEQ ID NO: 1180217 - RNA, 19 nt, Artificial Sequence
  Description of Artificial Sequence: Synthetic oligonucleotide
  Antisense strand to SEQ ID NO: 1180216
acuuucccgaaauacuuuc

SEQ ID NO: 1180218 - RNA, 19 nt, Artificial Sequence
  Description of Artificial Sequence: Synthetic oligonucleotide
  Sense strand starting at position 3850 of SEQ ID NO: 916739
aguguaaagugaucugcca

SEQ ID NO: 1180219 - RNA, 19 nt, Artificial Sequence
  Description of Artificial Sequence: Synthetic oligonucleotide
  Antisense strand to SEQ ID NO: 1180218
uggcagaucacuuuacacu

SEQ ID NO: 1180220 - RNA, 19 nt, Artificial Sequence
  Description of Artificial Sequence: Synthetic oligonucleotide
  Sense strand starting at position 3858 of SEQ ID NO: 916739
gugaucugccagggucaca

SEQ ID NO: 1180221 - RNA, 19 nt, Artificial Sequence
  Description of Artificial Sequence: Synthetic oligonucleotide
  Antisense strand to SEQ ID NO: 1180220
ugugacccuggcagaucac

SEQ ID NO: 1180222 - RNA, 19 nt, Artificial Sequence
  Description of Artificial Sequence: Synthetic oligonucleotide
  Sense strand starting at position 3885 of SEQ ID NO: 916739
aggcaacagcauugauaca

SEQ ID NO: 1180223 - RNA, 19 nt, Artificial Sequence
  Description of Artificial Sequence: Synthetic oligonucleotide
  Antisense strand to SEQ ID NO: 1180222
uguaucaaugcuguugccu

SEQ ID NO: 1180224 - RNA, 19 nt, Artificial Sequence
  Description of Artificial Sequence: Synthetic oligonucleotide
  Sense strand starting at position 3922 of SEQ ID NO: 916739
gucagaggcuggguucuau

SEQ ID NO: 1180225 - RNA, 19 nt, Artificial Sequence
  Description of Artificial Sequence: Synthetic oligonucleotide
  Antisense strand to SEQ ID NO: 1180224
auagaacccagccucugac

SEQ ID NO: 1180226 - RNA, 19 nt, Artificial Sequence
  Description of Artificial Sequence: Synthetic oligonucleotide
  Sense strand starting at position 273 of SEQ ID NO: 916740
ugaaaucaccuucgaauug

SEQ ID NO: 1180227 - RNA, 19 nt, Artificial Sequence
  Description of Artificial Sequence: Synthetic oligonucleotide
  Antisense strand to SEQ ID NO: 1180226
caauucgaaggugauuuca

SEQ ID NO: 1180228 - RNA, 19 nt, Artificial Sequence
  Description of Artificial Sequence: Synthetic oligonucleotide
  Sense strand starting at position 435 of SEQ ID NO: 916740
ugcuaagacuccuuaugau

SEQ ID NO: 1180229 - RNA, 19 nt, Artificial Sequence
  Description of Artificial Sequence: Synthetic oligonucleotide
  Antisense strand to SEQ ID NO: 1180228
aucauaaggagucuuagca

SEQ ID NO: 1180230 - RNA, 19 nt, Artificial Sequence
  Description of Artificial Sequence: Synthetic oligonucleotide
  Sense strand starting at position 515 of SEQ ID NO: 916740
uuucuugaauacuugguaa

SEQ ID NO: 1180231 - RNA, 19 nt, Artificial Sequence
  Description of Artificial Sequence: Synthetic oligonucleotide
  Antisense strand to SEQ ID NO: 1180230
uuaccaaguauucaagaaa

SEQ ID NO: 1180232 - RNA, 19 nt, Artificial Sequence
  Description of Artificial Sequence: Synthetic oligonucleotide
  Sense strand starting at position 517 of SEQ ID NO: 916740
ucuugaauacuugguaaac

SEQ ID NO: 1180233 - RNA, 19 nt, Artificial Sequence
  Description of Artificial Sequence: Synthetic oligonucleotide
  Antisense strand to SEQ ID NO: 1180232
guuuaccaaguauucaaga

SEQ ID NO: 1180234 - RNA, 19 nt, Artificial Sequence
  Description of Artificial Sequence: Synthetic oligonucleotide
  Sense strand starting at position 518 of SEQ ID NO: 916740
cuugaauacuugguaaacu

SEQ ID NO: 1180235 - RNA, 19 nt, Artificial Sequence
  Description of Artificial Sequence: Synthetic oligonucleotide
  Antisense strand to SEQ ID NO: 1180234
aguuuaccaaguauucaag

SEQ ID NO: 1180236 - RNA, 19 nt, Artificial Sequence
  Description of Artificial Sequence: Synthetic oligonucleotide
  Sense strand starting at position 636 of SEQ ID NO: 916740
uaagauaaccguugauauc

SEQ ID NO: 1180237 - RNA, 19 nt, Artificial Sequence
  Description of Artificial Sequence: Synthetic oligonucleotide
  Antisense strand to SEQ ID NO: 1180236
gauaucaacgguuaucuua

SEQ ID NO: 1180238 - RNA, 19 nt, Artificial Sequence
  Description of Artificial Sequence: Synthetic oligonucleotide
  Sense strand starting at position 637 of SEQ ID NO: 916740
aagauaaccguugauaucu

SEQ ID NO: 1180239 - RNA, 19 nt, Artificial Sequence
  Description of Artificial Sequence: Synthetic oligonucleotide
  Antisense strand to SEQ ID NO: 1180238
agauaucaacgguuaucuu

SEQ ID NO: 1180240 - RNA, 19 nt, Artificial Sequence
  Description of Artificial Sequence: Synthetic oligonucleotide
  Sense strand starting at position 820 of SEQ ID NO: 916740
ggaaacacuugaguuucuu

SEQ ID NO: 1180241 - RNA, 19 nt, Artificial Sequence
  Description of Artificial Sequence: Synthetic oligonucleotide
  Antisense strand to SEQ ID NO: 1180240
aagaaacucaaguguuucc

SEQ ID NO: 1180242 - RNA, 19 nt, Artificial Sequence
  Description of Artificial Sequence: Synthetic oligonucleotide
  Sense strand starting at position 826 of SEQ ID NO: 916740
acuugaguuucuuccacua

SEQ ID NO: 1180243 - RNA, 19 nt, Artificial Sequence
  Description of Artificial Sequence: Synthetic oligonucleotide
  Antisense strand to SEQ ID NO: 1180242
uaguggaagaaacucaagu

SEQ ID NO: 1180244 - RNA, 19 nt, Artificial Sequence
  Description of Artificial Sequence: Synthetic oligonucleotide
  Sense strand starting at position 981 of SEQ ID NO: 916740
auuuaauccuucgcugauu

SEQ ID NO: 1180245 - RNA, 19 nt, Artificial Sequence
  Description of Artificial Sequence: Synthetic oligonucleotide
  Antisense strand to SEQ ID NO: 1180244
aaucagcgaaggauuaaau

SEQ ID NO: 1180246 - RNA, 19 nt, Artificial Sequence
  Description of Artificial Sequence: Synthetic oligonucleotide
  Sense strand starting at position 1026 of SEQ ID NO: 916740
aguuucuucuaucuuggga

SEQ ID NO: 1180247 - RNA, 19 nt, Artificial Sequence
  Description of Artificial Sequence: Synthetic oligonucleotide
  Antisense strand to SEQ ID NO: 1180246
ucccaagauagaagaaacu

SEQ ID NO: 1180248 - RNA, 19 nt, Artificial Sequence
  Description of Artificial Sequence: Synthetic oligonucleotide
  Sense strand starting at position 1099 of SEQ ID NO: 916740
acuaaagacuuggcaacua

SEQ ID NO: 1180249 - RNA, 19 nt, Artificial Sequence
  Description of Artificial Sequence: Synthetic oligonucleotide
  Antisense strand to SEQ ID NO: 1180248
uaguugccaagucuuuagu

SEQ ID NO: 1180250 - RNA, 19 nt, Artificial Sequence
  Description of Artificial Sequence: Synthetic oligonucleotide
  Sense strand starting at position 1107 of SEQ ID NO: 916740
cuuggcaacuaucuggaaa

SEQ ID NO: 1180251 - RNA, 19 nt, Artificial Sequence
  Description of Artificial Sequence: Synthetic oligonucleotide
  Antisense strand to SEQ ID NO: 1180250
uuuccagauaguugccaag

SEQ ID NO: 1180252 - RNA, 19 nt, Artificial Sequence
  Description of Artificial Sequence: Synthetic oligonucleotide
  Sense strand starting at position 1498 of SEQ ID NO: 916740
auacaaaguccucaugucu

SEQ ID NO: 1180253 - RNA, 19 nt, Artificial Sequence
  Description of Artificial Sequence: Synthetic oligonucleotide
  Antisense strand to SEQ ID NO: 1180252
agacaugaggacuuuguau

SEQ ID NO: 1180254 - RNA, 19 nt, Artificial Sequence
  Description of Artificial Sequence: Synthetic oligonucleotide
  Sense strand starting at position 1567 of SEQ ID NO: 916740
ggcuauaauuugccuccca

SEQ ID NO: 1180255 - RNA, 19 nt, Artificial Sequence
  Description of Artificial Sequence: Synthetic oligonucleotide
  Antisense strand to SEQ ID NO: 1180254
ugggaggcaaauuauagcc

SEQ ID NO: 1180256 - RNA, 19 nt, Artificial Sequence
  Description of Artificial Sequence: Synthetic oligonucleotide
  Sense strand starting at position 2003 of SEQ ID NO: 916740
gggagcucacacuacucau

SEQ ID NO: 1180257 - RNA, 19 nt, Artificial Sequence
  Description of Artificial Sequence: Synthetic oligonucleotide
  Antisense strand to SEQ ID NO: 1180256
augaguagugugagcuccc

SEQ ID NO: 1180258 - RNA, 19 nt, Artificial Sequence
  Description of Artificial Sequence: Synthetic oligonucleotide
  Sense strand starting at position 2057 of SEQ ID NO: 916740
acgaauugucucguggugu

SEQ ID NO: 1180259 - RNA, 19 nt, Artificial Sequence
  Description of Artificial Sequence: Synthetic oligonucleotide
  Antisense strand to SEQ ID NO: 1180258
acaccacgagacaauucgu

SEQ ID NO: 1180260 - RNA, 19 nt, Artificial Sequence
  Description of Artificial Sequence: Synthetic oligonucleotide
  Sense strand starting at position 2062 of SEQ ID NO: 916740
uugucucgugguguucaga

SEQ ID NO: 1180261 - RNA, 19 nt, Artificial Sequence
  Description of Artificial Sequence: Synthetic oligonucleotide
  Antisense strand to SEQ ID NO: 1180260
ucugaacaccacgagacaa

SEQ ID NO: 1180262 - RNA, 19 nt, Artificial Sequence
  Description of Artificial Sequence: Synthetic oligonucleotide
  Sense strand starting at position 2106 of SEQ ID NO: 916740
gaauguaguuauuccauga

SEQ ID NO: 1180263 - RNA, 19 nt, Artificial Sequence
  Description of Artificial Sequence: Synthetic oligonucleotide
  Antisense strand to SEQ ID NO: 1180262
ucauggaauaacuacauuc

SEQ ID NO: 1180264 - RNA, 19 nt, Artificial Sequence
  Description of Artificial Sequence: Synthetic oligonucleotide
  Sense strand starting at position 2213 of SEQ ID NO: 916740
aagauagaccaguguucuc

SEQ ID NO: 1180265 - RNA, 19 nt, Artificial Sequence
  Description of Artificial Sequence: Synthetic oligonucleotide
  Antisense strand to SEQ ID NO: 1180264
gagaacacuggucuaucuu

SEQ ID NO: 1180266 - RNA, 19 nt, Artificial Sequence
  Description of Artificial Sequence: Synthetic oligonucleotide
  Sense strand starting at position 2223 of SEQ ID NO: 916740
aguguucucacgggacaaa

SEQ ID NO: 1180267 - RNA, 19 nt, Artificial Sequence
  Description of Artificial Sequence: Synthetic oligonucleotide
  Antisense strand to SEQ ID NO: 1180266
uuugucccgugagaacacu

SEQ ID NO: 1180268 - RNA, 19 nt, Artificial Sequence
  Description of Artificial Sequence: Synthetic oligonucleotide
  Sense strand starting at position 2253 of SEQ ID NO: 916740
auaaaugaauuggugugaa

SEQ ID NO: 1180269 - RNA, 19 nt, Artificial Sequence
  Description of Artificial Sequence: Synthetic oligonucleotide
  Antisense strand to SEQ ID NO: 1180268
uucacaccaauucauuuau

SEQ ID NO: 1180270 - RNA, 19 nt, Artificial Sequence
  Description of Artificial Sequence: Synthetic oligonucleotide
  Sense strand starting at position 2256 of SEQ ID NO: 916740
aaugaauuggugugaaguu

SEQ ID NO: 1180271 - RNA, 19 nt, Artificial Sequence
  Description of Artificial Sequence: Synthetic oligonucleotide
  Antisense strand to SEQ ID NO: 1180270
aacuucacaccaauucauu

SEQ ID NO: 1180272 - RNA, 19 nt, Artificial Sequence
  Description of Artificial Sequence: Synthetic oligonucleotide
  Sense strand starting at position 2279 of SEQ ID NO: 916740
uuauuuguuucugcgagaa

SEQ ID NO: 1180273 - RNA, 19 nt, Artificial Sequence
  Description of Artificial Sequence: Synthetic oligonucleotide
  Antisense strand to SEQ ID NO: 1180272
uucucgcagaaacaaauaa

SEQ ID NO: 1180274 - RNA, 19 nt, Artificial Sequence
  Description of Artificial Sequence: Synthetic oligonucleotide
  Sense strand starting at position 2283 of SEQ ID NO: 916740
uuguuucugcgagaaauua

SEQ ID NO: 1180275 - RNA, 19 nt, Artificial Sequence
  Description of Artificial Sequence: Synthetic oligonucleotide
  Antisense strand to SEQ ID NO: 1180274
uaauuucucgcagaaacaa

SEQ ID NO: 1180276 - RNA, 19 nt, Artificial Sequence
  Description of Artificial Sequence: Synthetic oligonucleotide
  Sense strand starting at position 2381 of SEQ ID NO: 916740
gaagaaacuugagucuucu

SEQ ID NO: 1180277 - RNA, 19 nt, Artificial Sequence
  Description of Artificial Sequence: Synthetic oligonucleotide
  Antisense strand to SEQ ID NO: 1180276
agaagacucaaguuucuuc

SEQ ID NO: 1180278 - RNA, 19 nt, Artificial Sequence
  Description of Artificial Sequence: Synthetic oligonucleotide
  Sense strand starting at position 2541 of SEQ ID NO: 916740
cagcuaaaguuuccaggaa

SEQ ID NO: 1180279 - RNA, 19 nt, Artificial Sequence
  Description of Artificial Sequence: Synthetic oligonucleotide
  Antisense strand to SEQ ID NO: 1180278
uuccuggaaacuuuagcug

SEQ ID NO: 1180280 - RNA, 19 nt, Artificial Sequence
  Description of Artificial Sequence: Synthetic oligonucleotide
  Sense strand starting at position 2628 of SEQ ID NO: 916740
augugugaggguugaauga

SEQ ID NO: 1180281 - RNA, 19 nt, Artificial Sequence
  Description of Artificial Sequence: Synthetic oligonucleotide
  Antisense strand to SEQ ID NO: 1180280
ucauucaacccucacacau

SEQ ID NO: 1180282 - RNA, 19 nt, Artificial Sequence
  Description of Artificial Sequence: Synthetic oligonucleotide
  Sense strand starting at position 2630 of SEQ ID NO: 916740
gugugaggguugaaugaaa

SEQ ID NO: 1180283 - RNA, 19 nt, Artificial Sequence
  Description of Artificial Sequence: Synthetic oligonucleotide
  Antisense strand to SEQ ID NO: 1180282
uuucauucaacccucacac

SEQ ID NO: 1180284 - RNA, 19 nt, Artificial Sequence
  Description of Artificial Sequence: Synthetic oligonucleotide
  Sense strand starting at position 2791 of SEQ ID NO: 916740
uaacuuucccuaggaguug

SEQ ID NO: 1180285 - RNA, 19 nt, Artificial Sequence
  Description of Artificial Sequence: Synthetic oligonucleotide
  Antisense strand to SEQ ID NO: 1180284
caacuccuagggaaaguua

SEQ ID NO: 1180286 - RNA, 19 nt, Artificial Sequence
  Description of Artificial Sequence: Synthetic oligonucleotide
  Sense strand starting at position 2996 of SEQ ID NO: 916740
ugguaagcgguuuaauaaa

SEQ ID NO: 1180287 - RNA, 19 nt, Artificial Sequence
  Description of Artificial Sequence: Synthetic oligonucleotide
  Antisense strand to SEQ ID NO: 1180286
uuuauuaaaccgcuuacca

SEQ ID NO: 1180288 - RNA, 19 nt, Artificial Sequence
  Description of Artificial Sequence: Synthetic oligonucleotide
  Sense strand starting at position 3471 of SEQ ID NO: 916740
caauguuuaguagggagua

SEQ ID NO: 1180289 - RNA, 19 nt, Artificial Sequence
  Description of Artificial Sequence: Synthetic oligonucleotide
  Antisense strand to SEQ ID NO: 1180288
uacucccuacuaaacauug

SEQ ID NO: 1180290 - RNA, 19 nt, Artificial Sequence
  Description of Artificial Sequence: Synthetic oligonucleotide
  Sense strand starting at position 3476 of SEQ ID NO: 916740
uuuaguagggaguauguau

SEQ ID NO: 1180291 - RNA, 19 nt, Artificial Sequence
  Description of Artificial Sequence: Synthetic oligonucleotide
  Antisense strand to SEQ ID NO: 1180290
auacauacucccuacuaaa

SEQ ID NO: 1180292 - RNA, 19 nt, Artificial Sequence
  Description of Artificial Sequence: Synthetic oligonucleotide
  Sense strand starting at position 3614 of SEQ ID NO: 916740
ggguuuccucuuuauggaa

SEQ ID NO: 1180293 - RNA, 19 nt, Artificial Sequence
  Description of Artificial Sequence: Synthetic oligonucleotide
  Antisense strand to SEQ ID NO: 1180292
uuccauaaagaggaaaccc

SEQ ID NO: 1180294 - RNA, 19 nt, Artificial Sequence
  Description of Artificial Sequence: Synthetic oligonucleotide
  Sense strand starting at position 3715 of SEQ ID NO: 916740
guaggaggcuccucaaaug

SEQ ID NO: 1180295 - RNA, 19 nt, Artificial Sequence
  Description of Artificial Sequence: Synthetic oligonucleotide
  Antisense strand to SEQ ID NO: 1180294
cauuugaggagccuccuac

SEQ ID NO: 1180296 - RNA, 19 nt, Artificial Sequence
  Description of Artificial Sequence: Synthetic oligonucleotide
  Sense strand starting at position 3836 of SEQ ID NO: 916740
uggcaugaauauccaacuu

SEQ ID NO: 1180297 - RNA, 19 nt, Artificial Sequence
  Description of Artificial Sequence: Synthetic oligonucleotide
  Antisense strand to SEQ ID NO: 1180296
aaguuggauauucaugcca

SEQ ID NO: 1180298 - RNA, 19 nt, Artificial Sequence
  Description of Artificial Sequence: Synthetic oligonucleotide
  Sense strand starting at position 3928 of SEQ ID NO: 916740
ggauguaaaguggguuaaa

SEQ ID NO: 1180299 - RNA, 19 nt, Artificial Sequence
  Description of Artificial Sequence: Synthetic oligonucleotide
  Antisense strand to SEQ ID NO: 1180298
uuuaacccacuuuacaucc

SEQ ID NO: 1180300 - RNA, 19 nt, Artificial Sequence
  Description of Artificial Sequence: Synthetic oligonucleotide
  Sense strand starting at position 3946 of SEQ ID NO: 916740
aaguaagauguagguaacu

SEQ ID NO: 1180301 - RNA, 19 nt, Artificial Sequence
  Description of Artificial Sequence: Synthetic oligonucleotide
  Antisense strand to SEQ ID NO: 1180300
aguuaccuacaucuuacuu

SEQ ID NO: 1180302 - RNA, 19 nt, Artificial Sequence
  Description of Artificial Sequence: Synthetic oligonucleotide
  Sense strand starting at position 3948 of SEQ ID NO: 916740
guaagauguagguaacuug

SEQ ID NO: 1180303 - RNA, 19 nt, Artificial Sequence
  Description of Artificial Sequence: Synthetic oligonucleotide
  Antisense strand to SEQ ID NO: 1180302
caaguuaccuacaucuuac

SEQ ID NO: 1180304 - RNA, 19 nt, Artificial Sequence
  Description of Artificial Sequence: Synthetic oligonucleotide
  Sense strand starting at position 3951 of SEQ ID NO: 916740
agauguagguaacuugaaa

SEQ ID NO: 1180305 - RNA, 19 nt, Artificial Sequence
  Description of Artificial Sequence: Synthetic oligonucleotide
  Antisense strand to SEQ ID NO: 1180304
uuucaaguuaccuacaucu

SEQ ID NO: 1180306 - RNA, 19 nt, Artificial Sequence
  Description of Artificial Sequence: Synthetic oligonucleotide
  Sense strand starting at position 47 of SEQ ID NO: 916741
ugacaaacuugcccaagau

SEQ ID NO: 1180307 - RNA, 19 nt, Artificial Sequence
  Description of Artificial Sequence: Synthetic oligonucleotide
  Antisense strand to SEQ ID NO: 1180306
aucuugggcaaguuuguca

SEQ ID NO: 1180308 - RNA, 19 nt, Artificial Sequence
  Description of Artificial Sequence: Synthetic oligonucleotide
  Sense strand starting at position 296 of SEQ ID NO: 916741
uuaucacaucaaggguuaa

SEQ ID NO: 1180309 - RNA, 19 nt, Artificial Sequence
  Description of Artificial Sequence: Synthetic oligonucleotide
  Antisense strand to SEQ ID NO: 1180308
uuaacccuugaugugauaa

SEQ ID NO: 1180310 - RNA, 19 nt, Artificial Sequence
  Description of Artificial Sequence: Synthetic oligonucleotide
  Sense strand starting at position 310 of SEQ ID NO: 916741
guuaauucuggagggauga

SEQ ID NO: 1180311 - RNA, 19 nt, Artificial Sequence
  Description of Artificial Sequence: Synthetic oligonucleotide
  Antisense strand to SEQ ID NO: 1180310
ucaucccuccagaauuaac

SEQ ID NO: 1180312 - RNA, 19 nt, Artificial Sequence
  Description of Artificial Sequence: Synthetic oligonucleotide
  Sense strand starting at position 455 of SEQ ID NO: 916741
uccaauguaguguaggaau

SEQ ID NO: 1180313 - RNA, 19 nt, Artificial Sequence
  Description of Artificial Sequence: Synthetic oligonucleotide
  Antisense strand to SEQ ID NO: 1180312
auuccuacacuacauugga

SEQ ID NO: 1180314 - RNA, 19 nt, Artificial Sequence
  Description of Artificial Sequence: Synthetic oligonucleotide
  Sense strand starting at position 580 of SEQ ID NO: 916741
augcuuucuggauggagag

SEQ ID NO: 1180315 - RNA, 19 nt, Artificial Sequence
  Description of Artificial Sequence: Synthetic oligonucleotide
  Antisense strand to SEQ ID NO: 1180314
cucuccauccagaaagcau

SEQ ID NO: 1180316 - RNA, 19 nt, Artificial Sequence
  Description of Artificial Sequence: Synthetic oligonucleotide
  Sense strand starting at position 675 of SEQ ID NO: 916741
ccaggaaauugugcaagga

SEQ ID NO: 1180317 - RNA, 19 nt, Artificial Sequence
  Description of Artificial Sequence: Synthetic oligonucleotide
  Antisense strand to SEQ ID NO: 1180316
uccuugcacaauuuccugg

SEQ ID NO: 1180318 - RNA, 19 nt, Artificial Sequence
  Description of Artificial Sequence: Synthetic oligonucleotide
  Sense strand starting at position 709 of SEQ ID NO: 916741
gcaggagacuuacuggauu

SEQ ID NO: 1180319 - RNA, 19 nt, Artificial Sequence
  Description of Artificial Sequence: Synthetic oligonucleotide
  Antisense strand to SEQ ID NO: 1180318
aauccaguaagucuccugc

SEQ ID NO: 1180320 - RNA, 19 nt, Artificial Sequence
  Description of Artificial Sequence: Synthetic oligonucleotide
  Sense strand starting at position 776 of SEQ ID NO: 916741
guguuagauggauaagggu

SEQ ID NO: 1180321 - RNA, 19 nt, Artificial Sequence
  Description of Artificial Sequence: Synthetic oligonucleotide
  Antisense strand to SEQ ID NO: 1180320
acccuuauccaucuaacac

SEQ ID NO: 1180322 - RNA, 19 nt, Artificial Sequence
  Description of Artificial Sequence: Synthetic oligonucleotide
  Sense strand starting at position 855 of SEQ ID NO: 916741
uguaucagucuggaauaca

SEQ ID NO: 1180323 - RNA, 19 nt, Artificial Sequence
  Description of Artificial Sequence: Synthetic oligonucleotide
  Antisense strand to SEQ ID NO: 1180322
uguauuccagacugauaca

SEQ ID NO: 1180324 - RNA, 19 nt, Artificial Sequence
  Description of Artificial Sequence: Synthetic oligonucleotide
  Sense strand starting at position 880 of SEQ ID NO: 916741
acgauaggcaucuagaagu

SEQ ID NO: 1180325 - RNA, 19 nt, Artificial Sequence
  Description of Artificial Sequence: Synthetic oligonucleotide
  Antisense strand to SEQ ID NO: 1180324
acuucuagaugccuaucgu

SEQ ID NO: 1180326 - RNA, 19 nt, Artificial Sequence
  Description of Artificial Sequence: Synthetic oligonucleotide
  Sense strand starting at position 929 of SEQ ID NO: 916741
guuuaaccucuccaggaca

SEQ ID NO: 1180327 - RNA, 19 nt, Artificial Sequence
  Description of Artificial Sequence: Synthetic oligonucleotide
  Antisense strand to SEQ ID NO: 1180326
uguccuggagagguuaaac

SEQ ID NO: 1180328 - RNA, 19 nt, Artificial Sequence
  Description of Artificial Sequence: Synthetic oligonucleotide
  Sense strand starting at position 985 of SEQ ID NO: 916741
cucaccauucucuggaaga

SEQ ID NO: 1180329 - RNA, 19 nt, Artificial Sequence
  Description of Artificial Sequence: Synthetic oligonucleotide
  Antisense strand to SEQ ID NO: 1180328
ucuuccagagaauggugag

SEQ ID NO: 1180330 - RNA, 19 nt, Artificial Sequence
  Description of Artificial Sequence: Synthetic oligonucleotide
  Sense strand starting at position 1128 of SEQ ID NO: 916741
guaggaguucuaugggaua

SEQ ID NO: 1180331 - RNA, 19 nt, Artificial Sequence
  Description of Artificial Sequence: Synthetic oligonucleotide
  Antisense strand to SEQ ID NO: 1180330
uaucccauagaacuccuac

SEQ ID NO: 1180332 - RNA, 19 nt, Artificial Sequence
  Description of Artificial Sequence: Synthetic oligonucleotide
  Sense strand starting at position 1130 of SEQ ID NO: 916741
aggaguucuaugggauaug

SEQ ID NO: 1180333 - RNA, 19 nt, Artificial Sequence
  Description of Artificial Sequence: Synthetic oligonucleotide
  Antisense strand to SEQ ID NO: 1180332
cauaucccauagaacuccu

SEQ ID NO: 1180334 - RNA, 19 nt, Artificial Sequence
  Description of Artificial Sequence: Synthetic oligonucleotide
  Sense strand starting at position 1295 of SEQ ID NO: 916741
gaccaaggacucugacagu

SEQ ID NO: 1180335 - RNA, 19 nt, Artificial Sequence
  Description of Artificial Sequence: Synthetic oligonucleotide
  Antisense strand to SEQ ID NO: 1180334
acugucagaguccuugguc

SEQ ID NO: 1180336 - RNA, 19 nt, Artificial Sequence
  Description of Artificial Sequence: Synthetic oligonucleotide
  Sense strand starting at position 1627 of SEQ ID NO: 916741
gaaguugggaucuaguguu

SEQ ID NO: 1180337 - RNA, 19 nt, Artificial Sequence
  Description of Artificial Sequence: Synthetic oligonucleotide
  Antisense strand to SEQ ID NO: 1180336
aacacuagaucccaacuuc

SEQ ID NO: 1180338 - RNA, 19 nt, Artificial Sequence
  Description of Artificial Sequence: Synthetic oligonucleotide
  Sense strand starting at position 1781 of SEQ ID NO: 916741
agguauuguaaugagugga

SEQ ID NO: 1180339 - RNA, 19 nt, Artificial Sequence
  Description of Artificial Sequence: Synthetic oligonucleotide
  Antisense strand to SEQ ID NO: 1180338
uccacucauuacaauaccu

SEQ ID NO: 1180340 - RNA, 19 nt, Artificial Sequence
  Description of Artificial Sequence: Synthetic oligonucleotide
  Sense strand starting at position 1784 of SEQ ID NO: 916741
uauuguaaugaguggaaag

SEQ ID NO: 1180341 - RNA, 19 nt, Artificial Sequence
  Description of Artificial Sequence: Synthetic oligonucleotide
  Antisense strand to SEQ ID NO: 1180340
cuuuccacucauuacaaua

SEQ ID NO: 1180342 - RNA, 19 nt, Artificial Sequence
  Description of Artificial Sequence: Synthetic oligonucleotide
  Sense strand starting at position 1786 of SEQ ID NO: 916741
uuguaaugaguggaaaggu

SEQ ID NO: 1180343 - RNA, 19 nt, Artificial Sequence
  Description of Artificial Sequence: Synthetic oligonucleotide
  Antisense strand to SEQ ID NO: 1180342
accuuuccacucauuacaa

SEQ ID NO: 1180344 - RNA, 19 nt, Artificial Sequence
  Description of Artificial Sequence: Synthetic oligonucleotide
  Sense strand starting at position 1967 of SEQ ID NO: 916741
cgcauugugagggauaaau

SEQ ID NO: 1180345 - RNA, 19 nt, Artificial Sequence
  Description of Artificial Sequence: Synthetic oligonucleotide
  Antisense strand to SEQ ID NO: 1180344
auuuaucccucacaaugcg

SEQ ID NO: 1180346 - RNA, 19 nt, Artificial Sequence
  Description of Artificial Sequence: Synthetic oligonucleotide
  Sense strand starting at position 2335 of SEQ ID NO: 916741
agggacauguuaccaugau

SEQ ID NO: 1180347 - RNA, 19 nt, Artificial Sequence
  Description of Artificial Sequence: Synthetic oligonucleotide
  Antisense strand to SEQ ID NO: 1180346
aucaugguaacaugucccu

SEQ ID NO: 1180348 - RNA, 19 nt, Artificial Sequence
  Description of Artificial Sequence: Synthetic oligonucleotide
  Sense strand starting at position 2339 of SEQ ID NO: 916741
acauguuaccaugauagua

SEQ ID NO: 1180349 - RNA, 19 nt, Artificial Sequence
  Description of Artificial Sequence: Synthetic oligonucleotide
  Antisense strand to SEQ ID NO: 1180348
uacuaucaugguaacaugu

SEQ ID NO: 1180350 - RNA, 19 nt, Artificial Sequence
  Description of Artificial Sequence: Synthetic oligonucleotide
  Sense strand starting at position 2381 of SEQ ID NO: 916741
cugggacugagugaguuau

SEQ ID NO: 1180351 - RNA, 19 nt, Artificial Sequence
  Description of Artificial Sequence: Synthetic oligonucleotide
  Antisense strand to SEQ ID NO: 1180350
auaacucacucagucccag

SEQ ID NO: 1180352 - RNA, 19 nt, Artificial Sequence
  Description of Artificial Sequence: Synthetic oligonucleotide
  Sense strand starting at position 2383 of SEQ ID NO: 916741
gggacugagugaguuauaa

SEQ ID NO: 1180353 - RNA, 19 nt, Artificial Sequence
  Description of Artificial Sequence: Synthetic oligonucleotide
  Antisense strand to SEQ ID NO: 1180352
uuauaacucacucaguccc

SEQ ID NO: 1180354 - RNA, 19 nt, Artificial Sequence
  Description of Artificial Sequence: Synthetic oligonucleotide
  Sense strand starting at position 2449 of SEQ ID NO: 916741
guacaugguccuggaagaa

SEQ ID NO: 1180355 - RNA, 19 nt, Artificial Sequence
  Description of Artificial Sequence: Synthetic oligonucleotide
  Antisense strand to SEQ ID NO: 1180354
uucuuccaggaccauguac

SEQ ID NO: 1180356 - RNA, 19 nt, Artificial Sequence
  Description of Artificial Sequence: Synthetic oligonucleotide
  Sense strand starting at position 2595 of SEQ ID NO: 916741
agauucuuaguugauccua

SEQ ID NO: 1180357 - RNA, 19 nt, Artificial Sequence
  Description of Artificial Sequence: Synthetic oligonucleotide
  Antisense strand to SEQ ID NO: 1180356
uaggaucaacuaagaaucu

SEQ ID NO: 1180358 - RNA, 19 nt, Artificial Sequence
  Description of Artificial Sequence: Synthetic oligonucleotide
  Sense strand starting at position 2645 of SEQ ID NO: 916741
guuugagucccuuaaacca

SEQ ID NO: 1180359 - RNA, 19 nt, Artificial Sequence
  Description of Artificial Sequence: Synthetic oligonucleotide
  Antisense strand to SEQ ID NO: 1180358
ugguuuaagggacucaaac

SEQ ID NO: 1180360 - RNA, 19 nt, Artificial Sequence
  Description of Artificial Sequence: Synthetic oligonucleotide
  Sense strand starting at position 2664 of SEQ ID NO: 916741
ugucauugacuuuaucuga

SEQ ID NO: 1180361 - RNA, 19 nt, Artificial Sequence
  Description of Artificial Sequence: Synthetic oligonucleotide
  Antisense strand to SEQ ID NO: 1180360
ucagauaaagucaaugaca

SEQ ID NO: 1180362 - RNA, 19 nt, Artificial Sequence
  Description of Artificial Sequence: Synthetic oligonucleotide
  Sense strand starting at position 2715 of SEQ ID NO: 916741
ugcuauucuggugaugaaa

SEQ ID NO: 1180363 - RNA, 19 nt, Artificial Sequence
  Description of Artificial Sequence: Synthetic oligonucleotide
  Antisense strand to SEQ ID NO: 1180362
uuucaucaccagaauagca

SEQ ID NO: 1180364 - RNA, 19 nt, Artificial Sequence
  Description of Artificial Sequence: Synthetic oligonucleotide
  Sense strand starting at position 2827 of SEQ ID NO: 916741
auccuuagacugcagacau

SEQ ID NO: 1180365 - RNA, 19 nt, Artificial Sequence
  Description of Artificial Sequence: Synthetic oligonucleotide
  Antisense strand to SEQ ID NO: 1180364
augucugcagucuaaggau

SEQ ID NO: 1180366 - RNA, 19 nt, Artificial Sequence
  Description of Artificial Sequence: Synthetic oligonucleotide
  Sense strand starting at position 2927 of SEQ ID NO: 916741
cccuucuuuggagagcaaa

SEQ ID NO: 1180367 - RNA, 19 nt, Artificial Sequence
  Description of Artificial Sequence: Synthetic oligonucleotide
  Antisense strand to SEQ ID NO: 1180366
uuugcucuccaaagaaggg

SEQ ID NO: 1180368 - RNA, 19 nt, Artificial Sequence
  Description of Artificial Sequence: Synthetic oligonucleotide
  Sense strand starting at position 2963 of SEQ ID NO: 916741
gaaaguggauuccuuccua

SEQ ID NO: 1180369 - RNA, 19 nt, Artificial Sequence
  Description of Artificial Sequence: Synthetic oligonucleotide
  Antisense strand to SEQ ID NO: 1180368
uaggaaggaauccacuuuc

SEQ ID NO: 1180370 - RNA, 19 nt, Artificial Sequence
  Description of Artificial Sequence: Synthetic oligonucleotide
  Sense strand starting at position 3010 of SEQ ID NO: 916741
uuugucacauuaucauaga

SEQ ID NO: 1180371 - RNA, 19 nt, Artificial Sequence
  Description of Artificial Sequence: Synthetic oligonucleotide
  Antisense strand to SEQ ID NO: 1180370
ucuaugauaaugugacaaa

SEQ ID NO: 1180372 - RNA, 19 nt, Artificial Sequence
  Description of Artificial Sequence: Synthetic oligonucleotide
  Sense strand starting at position 3276 of SEQ ID NO: 916741
agacaaauaugguuggagu

SEQ ID NO: 1180373 - RNA, 19 nt, Artificial Sequence
  Description of Artificial Sequence: Synthetic oligonucleotide
  Antisense strand to SEQ ID NO: 1180372
acuccaaccauauuugucu

SEQ ID NO: 1180374 - RNA, 19 nt, Artificial Sequence
  Description of Artificial Sequence: Synthetic oligonucleotide
  Sense strand starting at position 3277 of SEQ ID NO: 916741
gacaaauaugguuggaguu

SEQ ID NO: 1180375 - RNA, 19 nt, Artificial Sequence
  Description of Artificial Sequence: Synthetic oligonucleotide
  Antisense strand to SEQ ID NO: 1180374
aacuccaaccauauuuguc

SEQ ID NO: 1180376 - RNA, 19 nt, Artificial Sequence
  Description of Artificial Sequence: Synthetic oligonucleotide
  Sense strand starting at position 3684 of SEQ ID NO: 916741
agacuuucucuaggguaua

SEQ ID NO: 1180377 - RNA, 19 nt, Artificial Sequence
  Description of Artificial Sequence: Synthetic oligonucleotide
  Antisense strand to SEQ ID NO: 1180376
uauacccuagagaaagucu

SEQ ID NO: 1180378 - RNA, 19 nt, Artificial Sequence
  Description of Artificial Sequence: Synthetic oligonucleotide
  Sense strand starting at position 3704 of SEQ ID NO: 916741
agcagagauuggguuauag

SEQ ID NO: 1180379 - RNA, 19 nt, Artificial Sequence
  Description of Artificial Sequence: Synthetic oligonucleotide
  Antisense strand to SEQ ID NO: 1180378
cuauaacccaaucucugcu

SEQ ID NO: 1180380 - RNA, 19 nt, Artificial Sequence
  Description of Artificial Sequence: Synthetic oligonucleotide
  Sense strand starting at position 3713 of SEQ ID NO: 916741
uggguuauaggcuauauau

SEQ ID NO: 1180381 - RNA, 19 nt, Artificial Sequence
  Description of Artificial Sequence: Synthetic oligonucleotide
  Antisense strand to SEQ ID NO: 1180380
auauauagccuauaaccca

SEQ ID NO: 1180382 - RNA, 19 nt, Artificial Sequence
  Description of Artificial Sequence: Synthetic oligonucleotide
  Sense strand starting at position 3749 of SEQ ID NO: 916741
ucuaucagauugguaaauu

SEQ ID NO: 1180383 - RNA, 19 nt, Artificial Sequence
  Description of Artificial Sequence: Synthetic oligonucleotide
  Antisense strand to SEQ ID NO: 1180382
aauuuaccaaucugauaga

SEQ ID NO: 1180384 - RNA, 19 nt, Artificial Sequence
  Description of Artificial Sequence: Synthetic oligonucleotide
  Sense strand starting at position 3876 of SEQ ID NO: 916741
caaucugaugagugaagca

SEQ ID NO: 1180385 - RNA, 19 nt, Artificial Sequence
  Description of Artificial Sequence: Synthetic oligonucleotide
  Antisense strand to SEQ ID NO: 1180384
ugcuucacucaucagauug

SEQ ID NO: 1180386 - RNA, 19 nt, Artificial Sequence
  Description of Artificial Sequence: Synthetic oligonucleotide
  Sense strand starting at position 473 of SEQ ID NO: 916742
ggcagauugucuccacaag

SEQ ID NO: 1180387 - RNA, 19 nt, Artificial Sequence
  Description of Artificial Sequence: Synthetic oligonucleotide
  Antisense strand to SEQ ID NO: 1180386
cuuguggagacaaucugcc

SEQ ID NO: 1180388 - RNA, 19 nt, Artificial Sequence
  Description of Artificial Sequence: Synthetic oligonucleotide
  Sense strand starting at position 551 of SEQ ID NO: 916742
agggcagagacuggugaau

SEQ ID NO: 1180389 - RNA, 19 nt, Artificial Sequence
  Description of Artificial Sequence: Synthetic oligonucleotide
  Antisense strand to SEQ ID NO: 1180388
auucaccagucucugcccu

SEQ ID NO: 1180390 - RNA, 19 nt, Artificial Sequence
  Description of Artificial Sequence: Synthetic oligonucleotide
  Sense strand starting at position 692 of SEQ ID NO: 916742
ugugaauugaauugucuag

SEQ ID NO: 1180391 - RNA, 19 nt, Artificial Sequence
  Description of Artificial Sequence: Synthetic oligonucleotide
  Antisense strand to SEQ ID NO: 1180390
cuagacaauucaauucaca

SEQ ID NO: 1180392 - RNA, 19 nt, Artificial Sequence
  Description of Artificial Sequence: Synthetic oligonucleotide
  Sense strand starting at position 694 of SEQ ID NO: 916742
ugaauugaauugucuagaa

SEQ ID NO: 1180393 - RNA, 19 nt, Artificial Sequence
  Description of Artificial Sequence: Synthetic oligonucleotide
  Antisense strand to SEQ ID NO: 1180392
uucuagacaauucaauuca

SEQ ID NO: 1180394 - RNA, 19 nt, Artificial Sequence
  Description of Artificial Sequence: Synthetic oligonucleotide
  Sense strand starting at position 848 of SEQ ID NO: 916742
auuuguugggcuuggguaa

SEQ ID NO: 1180395 - RNA, 19 nt, Artificial Sequence
  Description of Artificial Sequence: Synthetic oligonucleotide
  Antisense strand to SEQ ID NO: 1180394
uuacccaagcccaacaaau

SEQ ID NO: 1180396 - RNA, 19 nt, Artificial Sequence
  Description of Artificial Sequence: Synthetic oligonucleotide
  Sense strand starting at position 896 of SEQ ID NO: 916742
agggcucuaacagguagau

SEQ ID NO: 1180397 - RNA, 19 nt, Artificial Sequence
  Description of Artificial Sequence: Synthetic oligonucleotide
  Antisense strand to SEQ ID NO: 1180396
aucuaccuguuagagcccu

SEQ ID NO: 1180398 - RNA, 19 nt, Artificial Sequence
  Description of Artificial Sequence: Synthetic oligonucleotide
  Sense strand starting at position 968 of SEQ ID NO: 916742
caaggaaguuuggcuaacu

SEQ ID NO: 1180399 - RNA, 19 nt, Artificial Sequence
  Description of Artificial Sequence: Synthetic oligonucleotide
  Antisense strand to SEQ ID NO: 1180398
aguuagccaaacuuccuug

SEQ ID NO: 1180400 - RNA, 19 nt, Artificial Sequence
  Description of Artificial Sequence: Synthetic oligonucleotide
  Sense strand starting at position 969 of SEQ ID NO: 916742
aaggaaguuuggcuaacua

SEQ ID NO: 1180401 - RNA, 19 nt, Artificial Sequence
  Description of Artificial Sequence: Synthetic oligonucleotide
  Antisense strand to SEQ ID NO: 1180400
uaguuagccaaacuuccuu

SEQ ID NO: 1180402 - RNA, 19 nt, Artificial Sequence
  Description of Artificial Sequence: Synthetic oligonucleotide
  Sense strand starting at position 1003 of SEQ ID NO: 916742
ucuguacuacaguacgaau

SEQ ID NO: 1180403 - RNA, 19 nt, Artificial Sequence
  Description of Artificial Sequence: Synthetic oligonucleotide
  Antisense strand to SEQ ID NO: 1180402
auucguacuguaguacaga

SEQ ID NO: 1180404 - RNA, 19 nt, Artificial Sequence
  Description of Artificial Sequence: Synthetic oligonucleotide
  Sense strand starting at position 1114 of SEQ ID NO: 916742
ugcugacugcuuuaacaca

SEQ ID NO: 1180405 - RNA, 19 nt, Artificial Sequence
  Description of Artificial Sequence: Synthetic oligonucleotide
  Antisense strand to SEQ ID NO: 1180404
uguguuaaagcagucagca

SEQ ID NO: 1180406 - RNA, 19 nt, Artificial Sequence
  Description of Artificial Sequence: Synthetic oligonucleotide
  Sense strand starting at position 1294 of SEQ ID NO: 916742
ccaaauagauuagggauuu

SEQ ID NO: 1180407 - RNA, 19 nt, Artificial Sequence
  Description of Artificial Sequence: Synthetic oligonucleotide
  Antisense strand to SEQ ID NO: 1180406
aaaucccuaaucuauuugg

SEQ ID NO: 1180408 - RNA, 19 nt, Artificial Sequence
  Description of Artificial Sequence: Synthetic oligonucleotide
  Sense strand starting at position 1398 of SEQ ID NO: 916742
agaaucaaguguuucuaaa

SEQ ID NO: 1180409 - RNA, 19 nt, Artificial Sequence
  Description of Artificial Sequence: Synthetic oligonucleotide
  Antisense strand to SEQ ID NO: 1180408
uuuagaaacacuugauucu

SEQ ID NO: 1180410 - RNA, 19 nt, Artificial Sequence
  Description of Artificial Sequence: Synthetic oligonucleotide
  Sense strand starting at position 1417 of SEQ ID NO: 916742
agugacugauucuuacaca

SEQ ID NO: 1180411 - RNA, 19 nt, Artificial Sequence
  Description of Artificial Sequence: Synthetic oligonucleotide
  Antisense strand to SEQ ID NO: 1180410
uguguaagaaucagucacu

SEQ ID NO: 1180412 - RNA, 19 nt, Artificial Sequence
  Description of Artificial Sequence: Synthetic oligonucleotide
  Sense strand starting at position 1739 of SEQ ID NO: 916742
ggguaacccugucucuaaa

SEQ ID NO: 1180413 - RNA, 19 nt, Artificial Sequence
  Description of Artificial Sequence: Synthetic oligonucleotide
  Antisense strand to SEQ ID NO: 1180412
uuuagagacaggguuaccc

SEQ ID NO: 1180414 - RNA, 19 nt, Artificial Sequence
  Description of Artificial Sequence: Synthetic oligonucleotide
  Sense strand starting at position 2016 of SEQ ID NO: 916742
augcauuaagcaggaggua

SEQ ID NO: 1180415 - RNA, 19 nt, Artificial Sequence
  Description of Artificial Sequence: Synthetic oligonucleotide
  Antisense strand to SEQ ID NO: 1180414
uaccuccugcuuaaugcau

SEQ ID NO: 1180416 - RNA, 19 nt, Artificial Sequence
  Description of Artificial Sequence: Synthetic oligonucleotide
  Sense strand starting at position 2017 of SEQ ID NO: 916742
ugcauuaagcaggagguau

SEQ ID NO: 1180417 - RNA, 19 nt, Artificial Sequence
  Description of Artificial Sequence: Synthetic oligonucleotide
  Antisense strand to SEQ ID NO: 1180416
auaccuccugcuuaaugca

SEQ ID NO: 1180418 - RNA, 19 nt, Artificial Sequence
  Description of Artificial Sequence: Synthetic oligonucleotide
  Sense strand starting at position 2025 of SEQ ID NO: 916742
gcaggagguauguauccau

SEQ ID NO: 1180419 - RNA, 19 nt, Artificial Sequence
  Description of Artificial Sequence: Synthetic oligonucleotide
  Antisense strand to SEQ ID NO: 1180418
auggauacauaccuccugc

SEQ ID NO: 1180420 - RNA, 19 nt, Artificial Sequence
  Description of Artificial Sequence: Synthetic oligonucleotide
  Sense strand starting at position 2028 of SEQ ID NO: 916742
ggagguauguauccauacu

SEQ ID NO: 1180421 - RNA, 19 nt, Artificial Sequence
  Description of Artificial Sequence: Synthetic oligonucleotide
  Antisense strand to SEQ ID NO: 1180420
aguauggauacauaccucc

SEQ ID NO: 1180422 - RNA, 19 nt, Artificial Sequence
  Description of Artificial Sequence: Synthetic oligonucleotide
  Sense strand starting at position 2065 of SEQ ID NO: 916742
cguauuucacacggguaca

SEQ ID NO: 1180423 - RNA, 19 nt, Artificial Sequence
  Description of Artificial Sequence: Synthetic oligonucleotide
  Antisense strand to SEQ ID NO: 1180422
uguacccgugugaaauacg

SEQ ID NO: 1180424 - RNA, 19 nt, Artificial Sequence
  Description of Artificial Sequence: Synthetic oligonucleotide
  Sense strand starting at position 2357 of SEQ ID NO: 916742
ucuguucugucacuacaga

SEQ ID NO: 1180425 - RNA, 19 nt, Artificial Sequence
  Description of Artificial Sequence: Synthetic oligonucleotide
  Antisense strand to SEQ ID NO: 1180424
ucuguagugacagaacaga

SEQ ID NO: 1180426 - RNA, 19 nt, Artificial Sequence
  Description of Artificial Sequence: Synthetic oligonucleotide
  Sense strand starting at position 2358 of SEQ ID NO: 916742
cuguucugucacuacagau

SEQ ID NO: 1180427 - RNA, 19 nt, Artificial Sequence
  Description of Artificial Sequence: Synthetic oligonucleotide
  Antisense strand to SEQ ID NO: 1180426
aucuguagugacagaacag

SEQ ID NO: 1180428 - RNA, 19 nt, Artificial Sequence
  Description of Artificial Sequence: Synthetic oligonucleotide
  Sense strand starting at position 2368 of SEQ ID NO: 916742
acuacagauuagucuguau

SEQ ID NO: 1180429 - RNA, 19 nt, Artificial Sequence
  Description of Artificial Sequence: Synthetic oligonucleotide
  Antisense strand to SEQ ID NO: 1180428
auacagacuaaucuguagu

SEQ ID NO: 1180430 - RNA, 19 nt, Artificial Sequence
  Description of Artificial Sequence: Synthetic oligonucleotide
  Sense strand starting at position 2540 of SEQ ID NO: 916742
gcacauuucuggcucaauc

SEQ ID NO: 1180431 - RNA, 19 nt, Artificial Sequence
  Description of Artificial Sequence: Synthetic oligonucleotide
  Antisense strand to SEQ ID NO: 1180430
gauugagccagaaaugugc

SEQ ID NO: 1180432 - RNA, 19 nt, Artificial Sequence
  Description of Artificial Sequence: Synthetic oligonucleotide
  Sense strand starting at position 2601 of SEQ ID NO: 916742
agcuccauugacuacuaga

SEQ ID NO: 1180433 - RNA, 19 nt, Artificial Sequence
  Description of Artificial Sequence: Synthetic oligonucleotide
  Antisense strand to SEQ ID NO: 1180432
ucuaguagucaauggagcu

SEQ ID NO: 1180434 - RNA, 19 nt, Artificial Sequence
  Description of Artificial Sequence: Synthetic oligonucleotide
  Sense strand starting at position 2630 of SEQ ID NO: 916742
cuccuuucccaaggaagaa

SEQ ID NO: 1180435 - RNA, 19 nt, Artificial Sequence
  Description of Artificial Sequence: Synthetic oligonucleotide
  Antisense strand to SEQ ID NO: 1180434
uucuuccuugggaaaggag

SEQ ID NO: 1180436 - RNA, 19 nt, Artificial Sequence
  Description of Artificial Sequence: Synthetic oligonucleotide
  Sense strand starting at position 2729 of SEQ ID NO: 916742
aagcuuaaaugguuauaga

SEQ ID NO: 1180437 - RNA, 19 nt, Artificial Sequence
  Description of Artificial Sequence: Synthetic oligonucleotide
  Antisense strand to SEQ ID NO: 1180436
ucuauaaccauuuaagcuu

SEQ ID NO: 1180438 - RNA, 19 nt, Artificial Sequence
  Description of Artificial Sequence: Synthetic oligonucleotide
  Sense strand starting at position 3105 of SEQ ID NO: 916742
uugguauauugcccaaacu

SEQ ID NO: 1180439 - RNA, 19 nt, Artificial Sequence
  Description of Artificial Sequence: Synthetic oligonucleotide
  Antisense strand to SEQ ID NO: 1180438
aguuugggcaauauaccaa

SEQ ID NO: 1180440 - RNA, 19 nt, Artificial Sequence
  Description of Artificial Sequence: Synthetic oligonucleotide
  Sense strand starting at position 3106 of SEQ ID NO: 916742
ugguauauugcccaaacug

SEQ ID NO: 1180441 - RNA, 19 nt, Artificial Sequence
  Description of Artificial Sequence: Synthetic oligonucleotide
  Antisense strand to SEQ ID NO: 1180440
caguuugggcaauauacca

SEQ ID NO: 1180442 - RNA, 19 nt, Artificial Sequence
  Description of Artificial Sequence: Synthetic oligonucleotide
  Sense strand starting at position 3349 of SEQ ID NO: 916742
acugucucccagugaugga

SEQ ID NO: 1180443 - RNA, 19 nt, Artificial Sequence
  Description of Artificial Sequence: Synthetic oligonucleotide
  Antisense strand to SEQ ID NO: 1180442
uccaucacugggagacagu

SEQ ID NO: 1180444 - RNA, 19 nt, Artificial Sequence
  Description of Artificial Sequence: Synthetic oligonucleotide
  Sense strand starting at position 3381 of SEQ ID NO: 916742
agggauggcugcuucuuua

SEQ ID NO: 1180445 - RNA, 19 nt, Artificial Sequence
  Description of Artificial Sequence: Synthetic oligonucleotide
  Antisense strand to SEQ ID NO: 1180444
uaaagaagcagccaucccu

SEQ ID NO: 1180446 - RNA, 19 nt, Artificial Sequence
  Description of Artificial Sequence: Synthetic oligonucleotide
  Sense strand starting at position 3407 of SEQ ID NO: 916742
cuaucacuaccugggaaau

SEQ ID NO: 1180447 - RNA, 19 nt, Artificial Sequence
  Description of Artificial Sequence: Synthetic oligonucleotide
  Antisense strand to SEQ ID NO: 1180446
auuucccagguagugauag

SEQ ID NO: 1180448 - RNA, 19 nt, Artificial Sequence
  Description of Artificial Sequence: Synthetic oligonucleotide
  Sense strand starting at position 3501 of SEQ ID NO: 916742
uccucaauugccgaaguca

SEQ ID NO: 1180449 - RNA, 19 nt, Artificial Sequence
  Description of Artificial Sequence: Synthetic oligonucleotide
  Antisense strand to SEQ ID NO: 1180448
ugacuucggcaauugagga

SEQ ID NO: 1180450 - RNA, 19 nt, Artificial Sequence
  Description of Artificial Sequence: Synthetic oligonucleotide
  Sense strand starting at position 3510 of SEQ ID NO: 916742
gccgaagucaaacauguuu

SEQ ID NO: 1180451 - RNA, 19 nt, Artificial Sequence
  Description of Artificial Sequence: Synthetic oligonucleotide
  Antisense strand to SEQ ID NO: 1180450
aaacauguuugacuucggc

SEQ ID NO: 1180452 - RNA, 19 nt, Artificial Sequence
  Description of Artificial Sequence: Synthetic oligonucleotide
  Sense strand starting at position 3515 of SEQ ID NO: 916742
agucaaacauguuuagcua

SEQ ID NO: 1180453 - RNA, 19 nt, Artificial Sequence
  Description of Artificial Sequence: Synthetic oligonucleotide
  Antisense strand to SEQ ID NO: 1180452
uagcuaaacauguuugacu

SEQ ID NO: 1180454 - RNA, 19 nt, Artificial Sequence
  Description of Artificial Sequence: Synthetic oligonucleotide
  Sense strand starting at position 3548 of SEQ ID NO: 916742
agagguuucuccuuauaca

SEQ ID NO: 1180455 - RNA, 19 nt, Artificial Sequence
  Description of Artificial Sequence: Synthetic oligonucleotide
  Antisense strand to SEQ ID NO: 1180454
uguauaaggagaaaccucu

SEQ ID NO: 1180456 - RNA, 19 nt, Artificial Sequence
  Description of Artificial Sequence: Synthetic oligonucleotide
  Sense strand starting at position 3549 of SEQ ID NO: 916742
gagguuucuccuuauacag

SEQ ID NO: 1180457 - RNA, 19 nt, Artificial Sequence
  Description of Artificial Sequence: Synthetic oligonucleotide
  Antisense strand to SEQ ID NO: 1180456
cuguauaaggagaaaccuc

SEQ ID NO: 1180458 - RNA, 19 nt, Artificial Sequence
  Description of Artificial Sequence: Synthetic oligonucleotide
  Sense strand starting at position 3738 of SEQ ID NO: 916742
aucaguuuaaaggguaaga

SEQ ID NO: 1180459 - RNA, 19 nt, Artificial Sequence
  Description of Artificial Sequence: Synthetic oligonucleotide
  Antisense strand to SEQ ID NO: 1180458
ucuuacccuuuaaacugau

SEQ ID NO: 1180460 - RNA, 19 nt, Artificial Sequence
  Description of Artificial Sequence: Synthetic oligonucleotide
  Sense strand starting at position 3808 of SEQ ID NO: 916742
uaaguuagauggucugcca

SEQ ID NO: 1180461 - RNA, 19 nt, Artificial Sequence
  Description of Artificial Sequence: Synthetic oligonucleotide
  Antisense strand to SEQ ID NO: 1180460
uggcagaccaucuaacuua

SEQ ID NO: 1180462 - RNA, 19 nt, Artificial Sequence
  Description of Artificial Sequence: Synthetic oligonucleotide
  Sense strand starting at position 3827 of SEQ ID NO: 916742
ggcuacugcuuugugauuu

SEQ ID NO: 1180463 - RNA, 19 nt, Artificial Sequence
  Description of Artificial Sequence: Synthetic oligonucleotide
  Antisense strand to SEQ ID NO: 1180462
aaaucacaaagcaguagcc

SEQ ID NO: 1180464 - RNA, 19 nt, Artificial Sequence
  Description of Artificial Sequence: Synthetic oligonucleotide
  Sense strand starting at position 3982 of SEQ ID NO: 916742
gaaggcugugguuagagua

SEQ ID NO: 1180465 - RNA, 19 nt, Artificial Sequence
  Description of Artificial Sequence: Synthetic oligonucleotide
  Antisense strand to SEQ ID NO: 1180464
uacucuaaccacagccuuc

SEQ ID NO: 1180466 - RNA, 19 nt, Artificial Sequence
  Description of Artificial Sequence: Synthetic oligonucleotide
  Sense strand starting at position 233 of SEQ ID NO: 916743
aguguucugguacaaggau

SEQ ID NO: 1180467 - RNA, 19 nt, Artificial Sequence
  Description of Artificial Sequence: Synthetic oligonucleotide
  Antisense strand to SEQ ID NO: 1180466
auccuuguaccagaacacu

SEQ ID NO: 1180468 - RNA, 19 nt, Artificial Sequence
  Description of Artificial Sequence: Synthetic oligonucleotide
  Sense strand starting at position 362 of SEQ ID NO: 916743
auucuagacucaguaguuu

SEQ ID NO: 1180469 - RNA, 19 nt, Artificial Sequence
  Description of Artificial Sequence: Synthetic oligonucleotide
  Antisense strand to SEQ ID NO: 1180468
aaacuacugagucuagaau

SEQ ID NO: 1180470 - RNA, 19 nt, Artificial Sequence
  Description of Artificial Sequence: Synthetic oligonucleotide
  Sense strand starting at position 564 of SEQ ID NO: 916743
cugacaacccuaugagcua

SEQ ID NO: 1180471 - RNA, 19 nt, Artificial Sequence
  Description of Artificial Sequence: Synthetic oligonucleotide
  Antisense strand to SEQ ID NO: 1180470
uagcucauaggguugucag

SEQ ID NO: 1180472 - RNA, 19 nt, Artificial Sequence
  Description of Artificial Sequence: Synthetic oligonucleotide
  Sense strand starting at position 734 of SEQ ID NO: 916743
ccaaauugguaagucaaau

SEQ ID NO: 1180473 - RNA, 19 nt, Artificial Sequence
  Description of Artificial Sequence: Synthetic oligonucleotide
  Antisense strand to SEQ ID NO: 1180472
auuugacuuaccaauuugg

SEQ ID NO: 1180474 - RNA, 19 nt, Artificial Sequence
  Description of Artificial Sequence: Synthetic oligonucleotide
  Sense strand starting at position 746 of SEQ ID NO: 916743
gucaaauuaguaggauaaa

SEQ ID NO: 1180475 - RNA, 19 nt, Artificial Sequence
  Description of Artificial Sequence: Synthetic oligonucleotide
  Antisense strand to SEQ ID NO: 1180474
uuuauccuacuaauuugac

SEQ ID NO: 1180476 - RNA, 19 nt, Artificial Sequence
  Description of Artificial Sequence: Synthetic oligonucleotide
  Sense strand starting at position 785 of SEQ ID NO: 916743
acugauuucucugggagag

SEQ ID NO: 1180477 - RNA, 19 nt, Artificial Sequence
  Description of Artificial Sequence: Synthetic oligonucleotide
  Antisense strand to SEQ ID NO: 1180476
cucucccagagaaaucagu

SEQ ID NO: 1180478 - RNA, 19 nt, Artificial Sequence
  Description of Artificial Sequence: Synthetic oligonucleotide
  Sense strand starting at position 787 of SEQ ID NO: 916743
ugauuucucugggagaggu

SEQ ID NO: 1180479 - RNA, 19 nt, Artificial Sequence
  Description of Artificial Sequence: Synthetic oligonucleotide
  Antisense strand to SEQ ID NO: 1180478
accucucccagagaaauca

SEQ ID NO: 1180480 - RNA, 19 nt, Artificial Sequence
  Description of Artificial Sequence: Synthetic oligonucleotide
  Sense strand starting at position 955 of SEQ ID NO: 916743
ccaauuguuggccaguauu

SEQ ID NO: 1180481 - RNA, 19 nt, Artificial Sequence
  Description of Artificial Sequence: Synthetic oligonucleotide
  Antisense strand to SEQ ID NO: 1180480
aauacuggccaacaauugg

SEQ ID NO: 1180482 - RNA, 19 nt, Artificial Sequence
  Description of Artificial Sequence: Synthetic oligonucleotide
  Sense strand starting at position 1010 of SEQ ID NO: 916743
gaauaugagugacccgcaa

SEQ ID NO: 1180483 - RNA, 19 nt, Artificial Sequence
  Description of Artificial Sequence: Synthetic oligonucleotide
  Antisense strand to SEQ ID NO: 1180482
uugcgggucacucauauuc

SEQ ID NO: 1180484 - RNA, 19 nt, Artificial Sequence
  Description of Artificial Sequence: Synthetic oligonucleotide
  Sense strand starting at position 1014 of SEQ ID NO: 916743
augagugacccgcaaguca

SEQ ID NO: 1180485 - RNA, 19 nt, Artificial Sequence
  Description of Artificial Sequence: Synthetic oligonucleotide
  Antisense strand to SEQ ID NO: 1180484
ugacuugcgggucacucau

SEQ ID NO: 1180486 - RNA, 19 nt, Artificial Sequence
  Description of Artificial Sequence: Synthetic oligonucleotide
  Sense strand starting at position 1153 of SEQ ID NO: 916743
acacuuagucaucaguaag

SEQ ID NO: 1180487 - RNA, 19 nt, Artificial Sequence
  Description of Artificial Sequence: Synthetic oligonucleotide
  Antisense strand to SEQ ID NO: 1180486
cuuacugaugacuaagugu

SEQ ID NO: 1180488 - RNA, 19 nt, Artificial Sequence
  Description of Artificial Sequence: Synthetic oligonucleotide
  Sense strand starting at position 1446 of SEQ ID NO: 916743
cgaauucggaaagguaaac

SEQ ID NO: 1180489 - RNA, 19 nt, Artificial Sequence
  Description of Artificial Sequence: Synthetic oligonucleotide
  Antisense strand to SEQ ID NO: 1180488
guuuaccuuuccgaauucg

SEQ ID NO: 1180490 - RNA, 19 nt, Artificial Sequence
  Description of Artificial Sequence: Synthetic oligonucleotide
  Sense strand starting at position 1474 of SEQ ID NO: 916743
agaugacaggccugagauu

SEQ ID NO: 1180491 - RNA, 19 nt, Artificial Sequence
  Description of Artificial Sequence: Synthetic oligonucleotide
  Antisense strand to SEQ ID NO: 1180490
aaucucaggccugucaucu

SEQ ID NO: 1180492 - RNA, 19 nt, Artificial Sequence
  Description of Artificial Sequence: Synthetic oligonucleotide
  Sense strand starting at position 1483 of SEQ ID NO: 916743
gccugagauuugccagccu

SEQ ID NO: 1180493 - RNA, 19 nt, Artificial Sequence
  Description of Artificial Sequence: Synthetic oligonucleotide
  Antisense strand to SEQ ID NO: 1180492
aggcuggcaaaucucaggc

SEQ ID NO: 1180494 - RNA, 19 nt, Artificial Sequence
  Description of Artificial Sequence: Synthetic oligonucleotide
  Sense strand starting at position 2246 of SEQ ID NO: 916743
cccagcucuggugaaauga

SEQ ID NO: 1180495 - RNA, 19 nt, Artificial Sequence
  Description of Artificial Sequence: Synthetic oligonucleotide
  Antisense strand to SEQ ID NO: 1180494
ucauuucaccagagcuggg

SEQ ID NO: 1180496 - RNA, 19 nt, Artificial Sequence
  Description of Artificial Sequence: Synthetic oligonucleotide
  Sense strand starting at position 2316 of SEQ ID NO: 916743
accagaggucacuguaaac

SEQ ID NO: 1180497 - RNA, 19 nt, Artificial Sequence
  Description of Artificial Sequence: Synthetic oligonucleotide
  Antisense strand to SEQ ID NO: 1180496
guuuacagugaccucuggu

SEQ ID NO: 1180498 - RNA, 19 nt, Artificial Sequence
  Description of Artificial Sequence: Synthetic oligonucleotide
  Sense strand starting at position 2596 of SEQ ID NO: 916743
cucucauuagacuauaggu

SEQ ID NO: 1180499 - RNA, 19 nt, Artificial Sequence
  Description of Artificial Sequence: Synthetic oligonucleotide
  Antisense strand to SEQ ID NO: 1180498
accuauagucuaaugagag

SEQ ID NO: 1180500 - RNA, 19 nt, Artificial Sequence
  Description of Artificial Sequence: Synthetic oligonucleotide
  Sense strand starting at position 2598 of SEQ ID NO: 916743
cucauuagacuauagguuu

SEQ ID NO: 1180501 - RNA, 19 nt, Artificial Sequence
  Description of Artificial Sequence: Synthetic oligonucleotide
  Antisense strand to SEQ ID NO: 1180500
aaaccuauagucuaaugag

SEQ ID NO: 1180502 - RNA, 19 nt, Artificial Sequence
  Description of Artificial Sequence: Synthetic oligonucleotide
  Sense strand starting at position 2604 of SEQ ID NO: 916743
agacuauagguuuguugag

SEQ ID NO: 1180503 - RNA, 19 nt, Artificial Sequence
  Description of Artificial Sequence: Synthetic oligonucleotide
  Antisense strand to SEQ ID NO: 1180502
cucaacaaaccuauagucu

SEQ ID NO: 1180504 - RNA, 19 nt, Artificial Sequence
  Description of Artificial Sequence: Synthetic oligonucleotide
  Sense strand starting at position 2620 of SEQ ID NO: 916743
gagggcaaggucuguauaa

SEQ ID NO: 1180505 - RNA, 19 nt, Artificial Sequence
  Description of Artificial Sequence: Synthetic oligonucleotide
  Antisense strand to SEQ ID NO: 1180504
uuauacagaccuugcccuc

SEQ ID NO: 1180506 - RNA, 19 nt, Artificial Sequence
  Description of Artificial Sequence: Synthetic oligonucleotide
  Sense strand starting at position 2621 of SEQ ID NO: 916743
agggcaaggucuguauaag

SEQ ID NO: 1180507 - RNA, 19 nt, Artificial Sequence
  Description of Artificial Sequence: Synthetic oligonucleotide
  Antisense strand to SEQ ID NO: 1180506
cuuauacagaccuugcccu

SEQ ID NO: 1180508 - RNA, 19 nt, Artificial Sequence
  Description of Artificial Sequence: Synthetic oligonucleotide
  Sense strand starting at position 2622 of SEQ ID NO: 916743
gggcaaggucuguauaaga

SEQ ID NO: 1180509 - RNA, 19 nt, Artificial Sequence
  Description of Artificial Sequence: Synthetic oligonucleotide
  Antisense strand to SEQ ID NO: 1180508
ucuuauacagaccuugccc

SEQ ID NO: 1180510 - RNA, 19 nt, Artificial Sequence
  Description of Artificial Sequence: Synthetic oligonucleotide
  Sense strand starting at position 2732 of SEQ ID NO: 916743
guggcuuguucgaugauug

SEQ ID NO: 1180511 - RNA, 19 nt, Artificial Sequence
  Description of Artificial Sequence: Synthetic oligonucleotide
  Antisense strand to SEQ ID NO: 1180510
caaucaucgaacaagccac

SEQ ID NO: 1180512 - RNA, 19 nt, Artificial Sequence
  Description of Artificial Sequence: Synthetic oligonucleotide
  Sense strand starting at position 3082 of SEQ ID NO: 916743
ccggccugccuccaagaaa

SEQ ID NO: 1180513 - RNA, 19 nt, Artificial Sequence
  Description of Artificial Sequence: Synthetic oligonucleotide
  Antisense strand to SEQ ID NO: 1180512
uuucuuggaggcaggccgg

SEQ ID NO: 1180514 - RNA, 19 nt, Artificial Sequence
  Description of Artificial Sequence: Synthetic oligonucleotide
  Sense strand starting at position 3151 of SEQ ID NO: 916743
ccuggugucagguaaacau

SEQ ID NO: 1180515 - RNA, 19 nt, Artificial Sequence
  Description of Artificial Sequence: Synthetic oligonucleotide
  Antisense strand to SEQ ID NO: 1180514
auguuuaccugacaccagg

SEQ ID NO: 1180516 - RNA, 19 nt, Artificial Sequence
  Description of Artificial Sequence: Synthetic oligonucleotide
  Sense strand starting at position 3576 of SEQ ID NO: 916743
caggcacugugaucaacaa

SEQ ID NO: 1180517 - RNA, 19 nt, Artificial Sequence
  Description of Artificial Sequence: Synthetic oligonucleotide
  Antisense strand to SEQ ID NO: 1180516
uuguugaucacagugccug

SEQ ID NO: 1180518 - RNA, 19 nt, Artificial Sequence
  Description of Artificial Sequence: Synthetic oligonucleotide
  Sense strand starting at position 3738 of SEQ ID NO: 916743
uagagaagcuuucccugga

SEQ ID NO: 1180519 - RNA, 19 nt, Artificial Sequence
  Description of Artificial Sequence: Synthetic oligonucleotide
  Antisense strand to SEQ ID NO: 1180518
uccagggaaagcuucucua

SEQ ID NO: 1180520 - RNA, 19 nt, Artificial Sequence
  Description of Artificial Sequence: Synthetic oligonucleotide
  Sense strand starting at position 3741 of SEQ ID NO: 916743
agaagcuuucccuggagaa

SEQ ID NO: 1180521 - RNA, 19 nt, Artificial Sequence
  Description of Artificial Sequence: Synthetic oligonucleotide
  Antisense strand to SEQ ID NO: 1180520
uucuccagggaaagcuucu

SEQ ID NO: 1180522 - RNA, 19 nt, Artificial Sequence
  Description of Artificial Sequence: Synthetic oligonucleotide
  Sense strand starting at position 3742 of SEQ ID NO: 916743
gaagcuuucccuggagaaa

SEQ ID NO: 1180523 - RNA, 19 nt, Artificial Sequence
  Description of Artificial Sequence: Synthetic oligonucleotide
  Antisense strand to SEQ ID NO: 1180522
uuucuccagggaaagcuuc

SEQ ID NO: 1180524 - RNA, 19 nt, Artificial Sequence
  Description of Artificial Sequence: Synthetic oligonucleotide
  Sense strand starting at position 3745 of SEQ ID NO: 916743
gcuuucccuggagaaaguu

SEQ ID NO: 1180525 - RNA, 19 nt, Artificial Sequence
  Description of Artificial Sequence: Synthetic oligonucleotide
  Antisense strand to SEQ ID NO: 1180524
aacuuucuccagggaaagc

SEQ ID NO: 1180526 - RNA, 19 nt, Artificial Sequence
  Description of Artificial Sequence: Synthetic oligonucleotide
  Sense strand starting at position 3757 of SEQ ID NO: 916743
gaaaguuaucuuuggguaa

SEQ ID NO: 1180527 - RNA, 19 nt, Artificial Sequence
  Description of Artificial Sequence: Synthetic oligonucleotide
  Antisense strand to SEQ ID NO: 1180526
uuacccaaagauaacuuuc

SEQ ID NO: 1180528 - RNA, 19 nt, Artificial Sequence
  Description of Artificial Sequence: Synthetic oligonucleotide
  Sense strand starting at position 3760 of SEQ ID NO: 916743
aguuaucuuuggguaagag

SEQ ID NO: 1180529 - RNA, 19 nt, Artificial Sequence
  Description of Artificial Sequence: Synthetic oligonucleotide
  Antisense strand to SEQ ID NO: 1180528
cucuuacccaaagauaacu

SEQ ID NO: 1180530 - RNA, 19 nt, Artificial Sequence
  Description of Artificial Sequence: Synthetic oligonucleotide
  Sense strand starting at position 3761 of SEQ ID NO: 916743
guuaucuuuggguaagagu

SEQ ID NO: 1180531 - RNA, 19 nt, Artificial Sequence
  Description of Artificial Sequence: Synthetic oligonucleotide
  Antisense strand to SEQ ID NO: 1180530
acucuuacccaaagauaac

SEQ ID NO: 1180532 - RNA, 19 nt, Artificial Sequence
  Description of Artificial Sequence: Synthetic oligonucleotide
  Sense strand starting at position 3772 of SEQ ID NO: 916743
guaagaguaaccuagucag

SEQ ID NO: 1180533 - RNA, 19 nt, Artificial Sequence
  Description of Artificial Sequence: Synthetic oligonucleotide
  Antisense strand to SEQ ID NO: 1180532
cugacuagguuacucuuac

SEQ ID NO: 1180534 - RNA, 19 nt, Artificial Sequence
  Description of Artificial Sequence: Synthetic oligonucleotide
  Sense strand starting at position 3775 of SEQ ID NO: 916743
agaguaaccuagucaggaa

SEQ ID NO: 1180535 - RNA, 19 nt, Artificial Sequence
  Description of Artificial Sequence: Synthetic oligonucleotide
  Antisense strand to SEQ ID NO: 1180534
uuccugacuagguuacucu

SEQ ID NO: 1180536 - RNA, 19 nt, Artificial Sequence
  Description of Artificial Sequence: Synthetic oligonucleotide
  Sense strand starting at position 3835 of SEQ ID NO: 916743
uggcuuuagauaggaagga

SEQ ID NO: 1180537 - RNA, 19 nt, Artificial Sequence
  Description of Artificial Sequence: Synthetic oligonucleotide
  Antisense strand to SEQ ID NO: 1180536
uccuuccuaucuaaagcca

SEQ ID NO: 1180538 - RNA, 19 nt, Artificial Sequence
  Description of Artificial Sequence: Synthetic oligonucleotide
  Sense strand starting at position 3872 of SEQ ID NO: 916743
cuguaaaugugacuagaau

SEQ ID NO: 1180539 - RNA, 19 nt, Artificial Sequence
  Description of Artificial Sequence: Synthetic oligonucleotide
  Antisense strand to SEQ ID NO: 1180538
auucuagucacauuuacag

SEQ ID NO: 1180540 - RNA, 19 nt, Artificial Sequence
  Description of Artificial Sequence: Synthetic oligonucleotide
  Sense strand starting at position 3945 of SEQ ID NO: 916743
cugaaagggucuuuaagca

SEQ ID NO: 1180541 - RNA, 19 nt, Artificial Sequence
  Description of Artificial Sequence: Synthetic oligonucleotide
  Antisense strand to SEQ ID NO: 1180540
ugcuuaaagacccuuucag

SEQ ID NO: 1180542 - RNA, 19 nt, Artificial Sequence
  Description of Artificial Sequence: Synthetic oligonucleotide
  Sense strand starting at position 3975 of SEQ ID NO: 916743
uucguaagaugacugacau

SEQ ID NO: 1180543 - RNA, 19 nt, Artificial Sequence
  Description of Artificial Sequence: Synthetic oligonucleotide
  Antisense strand to SEQ ID NO: 1180542
augucagucaucuuacgaa

SEQ ID NO: 1180544 - RNA, 19 nt, Artificial Sequence
  Description of Artificial Sequence: Synthetic oligonucleotide
  Sense strand starting at position 3976 of SEQ ID NO: 916743
ucguaagaugacugacaua

SEQ ID NO: 1180545 - RNA, 19 nt, Artificial Sequence
  Description of Artificial Sequence: Synthetic oligonucleotide
  Antisense strand to SEQ ID NO: 1180544
uaugucagucaucuuacga

SEQ ID NO: 1180546 - RNA, 19 nt, Artificial Sequence
  Description of Artificial Sequence: Synthetic oligonucleotide
  Sense strand starting at position 5 of SEQ ID NO: 916744
uggauaucaacgcagaggu

SEQ ID NO: 1180547 - RNA, 19 nt, Artificial Sequence
  Description of Artificial Sequence: Synthetic oligonucleotide
  Antisense strand to SEQ ID NO: 1180546
accucugcguugauaucca

SEQ ID NO: 1180548 - RNA, 19 nt, Artificial Sequence
  Description of Artificial Sequence: Synthetic oligonucleotide
  Sense strand starting at position 26 of SEQ ID NO: 916744
agaugucuugcagagggau

SEQ ID NO: 1180549 - RNA, 19 nt, Artificial Sequence
  Description of Artificial Sequence: Synthetic oligonucleotide
  Antisense strand to SEQ ID NO: 1180548
aucccucugcaagacaucu

SEQ ID NO: 1180550 - RNA, 19 nt, Artificial Sequence
  Description of Artificial Sequence: Synthetic oligonucleotide
  Sense strand starting at position 28 of SEQ ID NO: 916744
augucuugcagagggauaa

SEQ ID NO: 1180551 - RNA, 19 nt, Artificial Sequence
  Description of Artificial Sequence: Synthetic oligonucleotide
  Antisense strand to SEQ ID NO: 1180550
uuaucccucugcaagacau

SEQ ID NO: 1180552 - RNA, 19 nt, Artificial Sequence
  Description of Artificial Sequence: Synthetic oligonucleotide
  Sense strand starting at position 29 of SEQ ID NO: 916744
ugucuugcagagggauaaa

SEQ ID NO: 1180553 - RNA, 19 nt, Artificial Sequence
  Description of Artificial Sequence: Synthetic oligonucleotide
  Antisense strand to SEQ ID NO: 1180552
uuuaucccucugcaagaca

SEQ ID NO: 1180554 - RNA, 19 nt, Artificial Sequence
  Description of Artificial Sequence: Synthetic oligonucleotide
  Sense strand starting at position 443 of SEQ ID NO: 916744
cucugacaucgcuacccaa

SEQ ID NO: 1180555 - RNA, 19 nt, Artificial Sequence
  Description of Artificial Sequence: Synthetic oligonucleotide
  Antisense strand to SEQ ID NO: 1180554
uuggguagcgaugucagag

SEQ ID NO: 1180556 - RNA, 19 nt, Artificial Sequence
  Description of Artificial Sequence: Synthetic oligonucleotide
  Sense strand starting at position 477 of SEQ ID NO: 916744
agucauaccgcucacuuga

SEQ ID NO: 1180557 - RNA, 19 nt, Artificial Sequence
  Description of Artificial Sequence: Synthetic oligonucleotide
  Antisense strand to SEQ ID NO: 1180556
ucaagugagcgguaugacu

SEQ ID NO: 1180558 - RNA, 19 nt, Artificial Sequence
  Description of Artificial Sequence: Synthetic oligonucleotide
  Sense strand starting at position 541 of SEQ ID NO: 916744
ggccucugccuccaaucau

SEQ ID NO: 1180559 - RNA, 19 nt, Artificial Sequence
  Description of Artificial Sequence: Synthetic oligonucleotide
  Antisense strand to SEQ ID NO: 1180558
augauuggaggcagaggcc

SEQ ID NO: 1180560 - RNA, 19 nt, Artificial Sequence
  Description of Artificial Sequence: Synthetic oligonucleotide
  Sense strand starting at position 693 of SEQ ID NO: 916744
accucuuggucacuccaua

SEQ ID NO: 1180561 - RNA, 19 nt, Artificial Sequence
  Description of Artificial Sequence: Synthetic oligonucleotide
  Antisense strand to SEQ ID NO: 1180560
uauggagugaccaagaggu

SEQ ID NO: 1180562 - RNA, 19 nt, Artificial Sequence
  Description of Artificial Sequence: Synthetic oligonucleotide
  Sense strand starting at position 1267 of SEQ ID NO: 916744
ugaugauaaugacaauagu

SEQ ID NO: 1180563 - RNA, 19 nt, Artificial Sequence
  Description of Artificial Sequence: Synthetic oligonucleotide
  Antisense strand to SEQ ID NO: 1180562
acuauugucauuaucauca

SEQ ID NO: 1180564 - RNA, 19 nt, Artificial Sequence
  Description of Artificial Sequence: Synthetic oligonucleotide
  Sense strand starting at position 1292 of SEQ ID NO: 916744
uuacuucgagcuuacuuua

SEQ ID NO: 1180565 - RNA, 19 nt, Artificial Sequence
  Description of Artificial Sequence: Synthetic oligonucleotide
  Antisense strand to SEQ ID NO: 1180564
uaaaguaagcucgaaguaa

SEQ ID NO: 1180566 - RNA, 19 nt, Artificial Sequence
  Description of Artificial Sequence: Synthetic oligonucleotide
  Sense strand starting at position 1299 of SEQ ID NO: 916744
gagcuuacuuuaccgggua

SEQ ID NO: 1180567 - RNA, 19 nt, Artificial Sequence
  Description of Artificial Sequence: Synthetic oligonucleotide
  Antisense strand to SEQ ID NO: 1180566
uacccgguaaaguaagcuc

SEQ ID NO: 1180568 - RNA, 19 nt, Artificial Sequence
  Description of Artificial Sequence: Synthetic oligonucleotide
  Sense strand starting at position 1450 of SEQ ID NO: 916744
ggugguaguccugagacuc

SEQ ID NO: 1180569 - RNA, 19 nt, Artificial Sequence
  Description of Artificial Sequence: Synthetic oligonucleotide
  Antisense strand to SEQ ID NO: 1180568
gagucucaggacuaccacc

SEQ ID NO: 1180570 - RNA, 19 nt, Artificial Sequence
  Description of Artificial Sequence: Synthetic oligonucleotide
  Sense strand starting at position 1488 of SEQ ID NO: 916744
uccagagaucgcgcgacuu

SEQ ID NO: 1180571 - RNA, 19 nt, Artificial Sequence
  Description of Artificial Sequence: Synthetic oligonucleotide
  Antisense strand to SEQ ID NO: 1180570
aagucgcgcgaucucugga

SEQ ID NO: 1180572 - RNA, 19 nt, Artificial Sequence
  Description of Artificial Sequence: Synthetic oligonucleotide
  Sense strand starting at position 1490 of SEQ ID NO: 916744
cagagaucgcgcgacuuga

SEQ ID NO: 1180573 - RNA, 19 nt, Artificial Sequence
  Description of Artificial Sequence: Synthetic oligonucleotide
  Antisense strand to SEQ ID NO: 1180572
ucaagucgcgcgaucucug

SEQ ID NO: 1180574 - RNA, 19 nt, Artificial Sequence
  Description of Artificial Sequence: Synthetic oligonucleotide
  Sense strand starting at position 1501 of SEQ ID NO: 916744
cgacuugaccaaggucaca

SEQ ID NO: 1180575 - RNA, 19 nt, Artificial Sequence
  Description of Artificial Sequence: Synthetic oligonucleotide
  Antisense strand to SEQ ID NO: 1180574
ugugaccuuggucaagucg

SEQ ID NO: 1180576 - RNA, 19 nt, Artificial Sequence
  Description of Artificial Sequence: Synthetic oligonucleotide
  Sense strand starting at position 1781 of SEQ ID NO: 916744
gcuugaagagguggucgua

SEQ ID NO: 1180577 - RNA, 19 nt, Artificial Sequence
  Description of Artificial Sequence: Synthetic oligonucleotide
  Antisense strand to SEQ ID NO: 1180576
uacgaccaccucuucaagc

SEQ ID NO: 1180578 - RNA, 19 nt, Artificial Sequence
  Description of Artificial Sequence: Synthetic oligonucleotide
  Sense strand starting at position 2782 of SEQ ID NO: 916744
aagcuaaacgugugcauuu

SEQ ID NO: 1180579 - RNA, 19 nt, Artificial Sequence
  Description of Artificial Sequence: Synthetic oligonucleotide
  Antisense strand to SEQ ID NO: 1180578
aaaugcacacguuuagcuu

SEQ ID NO: 1180580 - RNA, 19 nt, Artificial Sequence
  Description of Artificial Sequence: Synthetic oligonucleotide
  Sense strand starting at position 2953 of SEQ ID NO: 916744
ucccuuuccaggcgaguau

SEQ ID NO: 1180581 - RNA, 19 nt, Artificial Sequence
  Description of Artificial Sequence: Synthetic oligonucleotide
  Antisense strand to SEQ ID NO: 1180580
auacucgccuggaaaggga

SEQ ID NO: 1180582 - RNA, 19 nt, Artificial Sequence
  Description of Artificial Sequence: Synthetic oligonucleotide
  Sense strand starting at position 2965 of SEQ ID NO: 916744
cgaguauuuaucggauagu

SEQ ID NO: 1180583 - RNA, 19 nt, Artificial Sequence
  Description of Artificial Sequence: Synthetic oligonucleotide
  Antisense strand to SEQ ID NO: 1180582
acuauccgauaaauacucg

SEQ ID NO: 1180584 - RNA, 19 nt, Artificial Sequence
  Description of Artificial Sequence: Synthetic oligonucleotide
  Sense strand starting at position 2966 of SEQ ID NO: 916744
gaguauuuaucggauaguu

SEQ ID NO: 1180585 - RNA, 19 nt, Artificial Sequence
  Description of Artificial Sequence: Synthetic oligonucleotide
  Antisense strand to SEQ ID NO: 1180584
aacuauccgauaaauacuc

SEQ ID NO: 1180586 - RNA, 19 nt, Artificial Sequence
  Description of Artificial Sequence: Synthetic oligonucleotide
  Sense strand starting at position 3172 of SEQ ID NO: 916744
aaauuaugugcagaaguuu

SEQ ID NO: 1180587 - RNA, 19 nt, Artificial Sequence
  Description of Artificial Sequence: Synthetic oligonucleotide
  Antisense strand to SEQ ID NO: 1180586
aaacuucugcacauaauuu

SEQ ID NO: 1180588 - RNA, 19 nt, Artificial Sequence
  Description of Artificial Sequence: Synthetic oligonucleotide
  Sense strand starting at position 3178 of SEQ ID NO: 916744
ugugcagaaguuuacugaa

SEQ ID NO: 1180589 - RNA, 19 nt, Artificial Sequence
  Description of Artificial Sequence: Synthetic oligonucleotide
  Antisense strand to SEQ ID NO: 1180588
uucaguaaacuucugcaca

SEQ ID NO: 1180590 - RNA, 19 nt, Artificial Sequence
  Description of Artificial Sequence: Synthetic oligonucleotide
  Sense strand starting at position 3312 of SEQ ID NO: 916744
gugaauuuccuuugccugu

SEQ ID NO: 1180591 - RNA, 19 nt, Artificial Sequence
  Description of Artificial Sequence: Synthetic oligonucleotide
  Antisense strand to SEQ ID NO: 1180590
acaggcaaaggaaauucac

SEQ ID NO: 1180592 - RNA, 19 nt, Artificial Sequence
  Description of Artificial Sequence: Synthetic oligonucleotide
  Sense strand starting at position 3313 of SEQ ID NO: 916744
ugaauuuccuuugccugua

SEQ ID NO: 1180593 - RNA, 19 nt, Artificial Sequence
  Description of Artificial Sequence: Synthetic oligonucleotide
  Antisense strand to SEQ ID NO: 1180592
uacaggcaaaggaaauuca

SEQ ID NO: 1180594 - RNA, 19 nt, Artificial Sequence
  Description of Artificial Sequence: Synthetic oligonucleotide
  Sense strand starting at position 3384 of SEQ ID NO: 916744
auuuaacaucugcguggua

SEQ ID NO: 1180595 - RNA, 19 nt, Artificial Sequence
  Description of Artificial Sequence: Synthetic oligonucleotide
  Antisense strand to SEQ ID NO: 1180594
uaccacgcagauguuaaau

SEQ ID NO: 1180596 - RNA, 19 nt, Artificial Sequence
  Description of Artificial Sequence: Synthetic oligonucleotide
  Sense strand starting at position 3386 of SEQ ID NO: 916744
uuaacaucugcgugguaug

SEQ ID NO: 1180597 - RNA, 19 nt, Artificial Sequence
  Description of Artificial Sequence: Synthetic oligonucleotide
  Antisense strand to SEQ ID NO: 1180596
cauaccacgcagauguuaa

SEQ ID NO: 1180598 - RNA, 19 nt, Artificial Sequence
  Description of Artificial Sequence: Synthetic oligonucleotide
  Sense strand starting at position 3414 of SEQ ID NO: 916744
ccgauaaccaucggaugua

SEQ ID NO: 1180599 - RNA, 19 nt, Artificial Sequence
  Description of Artificial Sequence: Synthetic oligonucleotide
  Antisense strand to SEQ ID NO: 1180598
uacauccgaugguuaucgg

SEQ ID NO: 1180600 - RNA, 19 nt, Artificial Sequence
  Description of Artificial Sequence: Synthetic oligonucleotide
  Sense strand starting at position 3417 of SEQ ID NO: 916744
auaaccaucggauguacua

SEQ ID NO: 1180601 - RNA, 19 nt, Artificial Sequence
  Description of Artificial Sequence: Synthetic oligonucleotide
  Antisense strand to SEQ ID NO: 1180600
uaguacauccgaugguuau

SEQ ID NO: 1180602 - RNA, 19 nt, Artificial Sequence
  Description of Artificial Sequence: Synthetic oligonucleotide
  Sense strand starting at position 3540 of SEQ ID NO: 916744
gacucaagccuugaguugu

SEQ ID NO: 1180603 - RNA, 19 nt, Artificial Sequence
  Description of Artificial Sequence: Synthetic oligonucleotide
  Antisense strand to SEQ ID NO: 1180602
acaacucaaggcuugaguc

SEQ ID NO: 1180604 - RNA, 19 nt, Artificial Sequence
  Description of Artificial Sequence: Synthetic oligonucleotide
  Sense strand starting at position 3571 of SEQ ID NO: 916744
ugagaaucaguguggugau

SEQ ID NO: 1180605 - RNA, 19 nt, Artificial Sequence
  Description of Artificial Sequence: Synthetic oligonucleotide
  Antisense strand to SEQ ID NO: 1180604
aucaccacacugauucuca

SEQ ID NO: 1180606 - RNA, 19 nt, Artificial Sequence
  Description of Artificial Sequence: Synthetic oligonucleotide
  Sense strand starting at position 3581 of SEQ ID NO: 916744
uguggugauaucgaaauaa

SEQ ID NO: 1180607 - RNA, 19 nt, Artificial Sequence
  Description of Artificial Sequence: Synthetic oligonucleotide
  Antisense strand to SEQ ID NO: 1180606
uuauuucgauaucaccaca

SEQ ID NO: 1180608 - RNA, 19 nt, Artificial Sequence
  Description of Artificial Sequence: Synthetic oligonucleotide
  Sense strand starting at position 3596 of SEQ ID NO: 916744
auaacaugagcuuggaauc

SEQ ID NO: 1180609 - RNA, 19 nt, Artificial Sequence
  Description of Artificial Sequence: Synthetic oligonucleotide
  Antisense strand to SEQ ID NO: 1180608
gauuccaagcucauguuau

SEQ ID NO: 1180610 - RNA, 19 nt, Artificial Sequence
  Description of Artificial Sequence: Synthetic oligonucleotide
  Sense strand starting at position 3641 of SEQ ID NO: 916744
ugcucaugugcucccgaua

SEQ ID NO: 1180611 - RNA, 19 nt, Artificial Sequence
  Description of Artificial Sequence: Synthetic oligonucleotide
  Antisense strand to SEQ ID NO: 1180610
uaucgggagcacaugagca

SEQ ID NO: 1180612 - RNA, 19 nt, Artificial Sequence
  Description of Artificial Sequence: Synthetic oligonucleotide
  Sense strand starting at position 3644 of SEQ ID NO: 916744
ucaugugcucccgauagaa

SEQ ID NO: 1180613 - RNA, 19 nt, Artificial Sequence
  Description of Artificial Sequence: Synthetic oligonucleotide
  Antisense strand to SEQ ID NO: 1180612
uucuaucgggagcacauga

SEQ ID NO: 1180614 - RNA, 19 nt, Artificial Sequence
  Description of Artificial Sequence: Synthetic oligonucleotide
  Sense strand starting at position 3646 of SEQ ID NO: 916744
augugcucccgauagaaag

SEQ ID NO: 1180615 - RNA, 19 nt, Artificial Sequence
  Description of Artificial Sequence: Synthetic oligonucleotide
  Antisense strand to SEQ ID NO: 1180614
cuuucuaucgggagcacau

SEQ ID NO: 1180616 - RNA, 19 nt, Artificial Sequence
  Description of Artificial Sequence: Synthetic oligonucleotide
  Sense strand starting at position 3733 of SEQ ID NO: 916744
gaagguauguaccuuccuu

SEQ ID NO: 1180617 - RNA, 19 nt, Artificial Sequence
  Description of Artificial Sequence: Synthetic oligonucleotide
  Antisense strand to SEQ ID NO: 1180616
aaggaagguacauaccuuc

SEQ ID NO: 1180618 - RNA, 19 nt, Artificial Sequence
  Description of Artificial Sequence: Synthetic oligonucleotide
  Sense strand starting at position 3825 of SEQ ID NO: 916744
ggcuggugucgggaagacu

SEQ ID NO: 1180619 - RNA, 19 nt, Artificial Sequence
  Description of Artificial Sequence: Synthetic oligonucleotide
  Antisense strand to SEQ ID NO: 1180618
agucuucccgacaccagcc

SEQ ID NO: 1180620 - RNA, 19 nt, Artificial Sequence
  Description of Artificial Sequence: Synthetic oligonucleotide
  Sense strand starting at position 3836 of SEQ ID NO: 916744
ggaagacuuucguuccaau

SEQ ID NO: 1180621 - RNA, 19 nt, Artificial Sequence
  Description of Artificial Sequence: Synthetic oligonucleotide
  Antisense strand to SEQ ID NO: 1180620
auuggaacgaaagucuucc

SEQ ID NO: 1180622 - RNA, 19 nt, Artificial Sequence
  Description of Artificial Sequence: Synthetic oligonucleotide
  Sense strand starting at position 3862 of SEQ ID NO: 916744
uuggaauccuggccuccau

SEQ ID NO: 1180623 - RNA, 19 nt, Artificial Sequence
  Description of Artificial Sequence: Synthetic oligonucleotide
  Antisense strand to SEQ ID NO: 1180622
auggaggccaggauuccaa

SEQ ID NO: 1180624 - RNA, 19 nt, Artificial Sequence
  Description of Artificial Sequence: Synthetic oligonucleotide
  Sense strand starting at position 3893 of SEQ ID NO: 916744
uugugaucuuagguaaguc

SEQ ID NO: 1180625 - RNA, 19 nt, Artificial Sequence
  Description of Artificial Sequence: Synthetic oligonucleotide
  Antisense strand to SEQ ID NO: 1180624
gacuuaccuaagaucacaa

SEQ ID NO: 1180626 - RNA, 19 nt, Artificial Sequence
  Description of Artificial Sequence: Synthetic oligonucleotide
  Sense strand starting at position 12 of SEQ ID NO: 916745
gagacaguuuaguauuguu

SEQ ID NO: 1180627 - RNA, 19 nt, Artificial Sequence
  Description of Artificial Sequence: Synthetic oligonucleotide
  Antisense strand to SEQ ID NO: 1180626
aacaauacuaaacugucuc

SEQ ID NO: 1180628 - RNA, 19 nt, Artificial Sequence
  Description of Artificial Sequence: Synthetic oligonucleotide
  Sense strand starting at position 22 of SEQ ID NO: 916745
aguauuguuuauggcagga

SEQ ID NO: 1180629 - RNA, 19 nt, Artificial Sequence
  Description of Artificial Sequence: Synthetic oligonucleotide
  Antisense strand to SEQ ID NO: 1180628
uccugccauaaacaauacu

SEQ ID NO: 1180630 - RNA, 19 nt, Artificial Sequence
  Description of Artificial Sequence: Synthetic oligonucleotide
  Sense strand starting at position 26 of SEQ ID NO: 916745
uuguuuauggcaggaaaca

SEQ ID NO: 1180631 - RNA, 19 nt, Artificial Sequence
  Description of Artificial Sequence: Synthetic oligonucleotide
  Antisense strand to SEQ ID NO: 1180630
uguuuccugccauaaacaa

SEQ ID NO: 1180632 - RNA, 19 nt, Artificial Sequence
  Description of Artificial Sequence: Synthetic oligonucleotide
  Sense strand starting at position 213 of SEQ ID NO: 916745
ggcagcagaccugaaaguu

SEQ ID NO: 1180633 - RNA, 19 nt, Artificial Sequence
  Description of Artificial Sequence: Synthetic oligonucleotide
  Antisense strand to SEQ ID NO: 1180632
aacuuucaggucugcugcc

SEQ ID NO: 1180634 - RNA, 19 nt, Artificial Sequence
  Description of Artificial Sequence: Synthetic oligonucleotide
  Sense strand starting at position 221 of SEQ ID NO: 916745
accugaaaguuacccugua

SEQ ID NO: 1180635 - RNA, 19 nt, Artificial Sequence
  Description of Artificial Sequence: Synthetic oligonucleotide
  Antisense strand to SEQ ID NO: 1180634
uacaggguaacuuucaggu

SEQ ID NO: 1180636 - RNA, 19 nt, Artificial Sequence
  Description of Artificial Sequence: Synthetic oligonucleotide
  Sense strand starting at position 222 of SEQ ID NO: 916745
ccugaaaguuacccuguaa

SEQ ID NO: 1180637 - RNA, 19 nt, Artificial Sequence
  Description of Artificial Sequence: Synthetic oligonucleotide
  Antisense strand to SEQ ID NO: 1180636
uuacaggguaacuuucagg

SEQ ID NO: 1180638 - RNA, 19 nt, Artificial Sequence
  Description of Artificial Sequence: Synthetic oligonucleotide
  Sense strand starting at position 279 of SEQ ID NO: 916745
guuuauuacugcuugcaca

SEQ ID NO: 1180639 - RNA, 19 nt, Artificial Sequence
  Description of Artificial Sequence: Synthetic oligonucleotide
  Antisense strand to SEQ ID NO: 1180638
ugugcaagcaguaauaaac

SEQ ID NO: 1180640 - RNA, 19 nt, Artificial Sequence
  Description of Artificial Sequence: Synthetic oligonucleotide
  Sense strand starting at position 430 of SEQ ID NO: 916745
ucacuacagucagggaaau

SEQ ID NO: 1180641 - RNA, 19 nt, Artificial Sequence
  Description of Artificial Sequence: Synthetic oligonucleotide
  Antisense strand to SEQ ID NO: 1180640
auuucccugacuguaguga

SEQ ID NO: 1180642 - RNA, 19 nt, Artificial Sequence
  Description of Artificial Sequence: Synthetic oligonucleotide
  Sense strand starting at position 575 of SEQ ID NO: 916745
gguaaacugucccauccau

SEQ ID NO: 1180643 - RNA, 19 nt, Artificial Sequence
  Description of Artificial Sequence: Synthetic oligonucleotide
  Antisense strand to SEQ ID NO: 1180642
auggaugggacaguuuacc

SEQ ID NO: 1180644 - RNA, 19 nt, Artificial Sequence
  Description of Artificial Sequence: Synthetic oligonucleotide
  Sense strand starting at position 585 of SEQ ID NO: 916745
cccauccaugcaggaaauu

SEQ ID NO: 1180645 - RNA, 19 nt, Artificial Sequence
  Description of Artificial Sequence: Synthetic oligonucleotide
  Antisense strand to SEQ ID NO: 1180644
aauuuccugcauggauggg

SEQ ID NO: 1180646 - RNA, 19 nt, Artificial Sequence
  Description of Artificial Sequence: Synthetic oligonucleotide
  Sense strand starting at position 597 of SEQ ID NO: 916745
ggaaauuacugggaagcau

SEQ ID NO: 1180647 - RNA, 19 nt, Artificial Sequence
  Description of Artificial Sequence: Synthetic oligonucleotide
  Antisense strand to SEQ ID NO: 1180646
augcuucccaguaauuucc

SEQ ID NO: 1180648 - RNA, 19 nt, Artificial Sequence
  Description of Artificial Sequence: Synthetic oligonucleotide
  Sense strand starting at position 719 of SEQ ID NO: 916745
cccaucugugcagggaauu

SEQ ID NO: 1180649 - RNA, 19 nt, Artificial Sequence
  Description of Artificial Sequence: Synthetic oligonucleotide
  Antisense strand to SEQ ID NO: 1180648
aauucccugcacagauggg

SEQ ID NO: 1180650 - RNA, 19 nt, Artificial Sequence
  Description of Artificial Sequence: Synthetic oligonucleotide
  Sense strand starting at position 746 of SEQ ID NO: 916745
acaugcaucugucuaagca

SEQ ID NO: 1180651 - RNA, 19 nt, Artificial Sequence
  Description of Artificial Sequence: Synthetic oligonucleotide
  Antisense strand to SEQ ID NO: 1180650
ugcuuagacagaugcaugu

SEQ ID NO: 1180652 - RNA, 19 nt, Artificial Sequence
  Description of Artificial Sequence: Synthetic oligonucleotide
  Sense strand starting at position 750 of SEQ ID NO: 916745
gcaucugucuaagcaaaug

SEQ ID NO: 1180653 - RNA, 19 nt, Artificial Sequence
  Description of Artificial Sequence: Synthetic oligonucleotide
  Antisense strand to SEQ ID NO: 1180652
cauuugcuuagacagaugc

SEQ ID NO: 1180654 - RNA, 19 nt, Artificial Sequence
  Description of Artificial Sequence: Synthetic oligonucleotide
  Sense strand starting at position 828 of SEQ ID NO: 916745
uugagucaucauuagguau

SEQ ID NO: 1180655 - RNA, 19 nt, Artificial Sequence
  Description of Artificial Sequence: Synthetic oligonucleotide
  Antisense strand to SEQ ID NO: 1180654
auaccuaaugaugacucaa

SEQ ID NO: 1180656 - RNA, 19 nt, Artificial Sequence
  Description of Artificial Sequence: Synthetic oligonucleotide
  Sense strand starting at position 830 of SEQ ID NO: 916745
gagucaucauuagguauau

SEQ ID NO: 1180657 - RNA, 19 nt, Artificial Sequence
  Description of Artificial Sequence: Synthetic oligonucleotide
  Antisense strand to SEQ ID NO: 1180656
auauaccuaaugaugacuc

SEQ ID NO: 1180658 - RNA, 19 nt, Artificial Sequence
  Description of Artificial Sequence: Synthetic oligonucleotide
  Sense strand starting at position 840 of SEQ ID NO: 916745
uagguauauccuggcugga

SEQ ID NO: 1180659 - RNA, 19 nt, Artificial Sequence
  Description of Artificial Sequence: Synthetic oligonucleotide
  Antisense strand to SEQ ID NO: 1180658
uccagccaggauauaccua

SEQ ID NO: 1180660 - RNA, 19 nt, Artificial Sequence
  Description of Artificial Sequence: Synthetic oligonucleotide
  Sense strand starting at position 862 of SEQ ID NO: 916745
ccaugucaucuucguggua

SEQ ID NO: 1180661 - RNA, 19 nt, Artificial Sequence
  Description of Artificial Sequence: Synthetic oligonucleotide
  Antisense strand to SEQ ID NO: 1180660
uaccacgaagaugacaugg

SEQ ID NO: 1180662 - RNA, 19 nt, Artificial Sequence
  Description of Artificial Sequence: Synthetic oligonucleotide
  Sense strand starting at position 863 of SEQ ID NO: 916745
caugucaucuucgugguaa

SEQ ID NO: 1180663 - RNA, 19 nt, Artificial Sequence
  Description of Artificial Sequence: Synthetic oligonucleotide
  Antisense strand to SEQ ID NO: 1180662
uuaccacgaagaugacaug

SEQ ID NO: 1180664 - RNA, 19 nt, Artificial Sequence
  Description of Artificial Sequence: Synthetic oligonucleotide
  Sense strand starting at position 897 of SEQ ID NO: 916745
gcccucuaccgcugaaaug

SEQ ID NO: 1180665 - RNA, 19 nt, Artificial Sequence
  Description of Artificial Sequence: Synthetic oligonucleotide
  Antisense strand to SEQ ID NO: 1180664
cauuucagcgguagagggc

SEQ ID NO: 1180666 - RNA, 19 nt, Artificial Sequence
  Description of Artificial Sequence: Synthetic oligonucleotide
  Sense strand starting at position 946 of SEQ ID NO: 916745
agucuuagaucucuagaua

SEQ ID NO: 1180667 - RNA, 19 nt, Artificial Sequence
  Description of Artificial Sequence: Synthetic oligonucleotide
  Antisense strand to SEQ ID NO: 1180666
uaucuagagaucuaagacu

SEQ ID NO: 1180668 - RNA, 19 nt, Artificial Sequence
  Description of Artificial Sequence: Synthetic oligonucleotide
  Sense strand starting at position 1020 of SEQ ID NO: 916745
auucguuaauaagcagaca

SEQ ID NO: 1180669 - RNA, 19 nt, Artificial Sequence
  Description of Artificial Sequence: Synthetic oligonucleotide
  Antisense strand to SEQ ID NO: 1180668
ugucugcuuauuaacgaau

SEQ ID NO: 1180670 - RNA, 19 nt, Artificial Sequence
  Description of Artificial Sequence: Synthetic oligonucleotide
  Sense strand starting at position 1023 of SEQ ID NO: 916745
cguuaauaagcagacauca

SEQ ID NO: 1180671 - RNA, 19 nt, Artificial Sequence
  Description of Artificial Sequence: Synthetic oligonucleotide
  Antisense strand to SEQ ID NO: 1180670
ugaugucugcuuauuaacg

SEQ ID NO: 1180672 - RNA, 19 nt, Artificial Sequence
  Description of Artificial Sequence: Synthetic oligonucleotide
  Sense strand starting at position 1031 of SEQ ID NO: 916745
agcagacaucaguguacau

SEQ ID NO: 1180673 - RNA, 19 nt, Artificial Sequence
  Description of Artificial Sequence: Synthetic oligonucleotide
  Antisense strand to SEQ ID NO: 1180672
auguacacugaugucugcu

SEQ ID NO: 1180674 - RNA, 19 nt, Artificial Sequence
  Description of Artificial Sequence: Synthetic oligonucleotide
  Sense strand starting at position 1041 of SEQ ID NO: 916745
aguguacauccacaagcau

SEQ ID NO: 1180675 - RNA, 19 nt, Artificial Sequence
  Description of Artificial Sequence: Synthetic oligonucleotide
  Antisense strand to SEQ ID NO: 1180674
augcuuguggauguacacu

SEQ ID NO: 1180676 - RNA, 19 nt, Artificial Sequence
  Description of Artificial Sequence: Synthetic oligonucleotide
  Sense strand starting at position 1132 of SEQ ID NO: 916745
ggagaugugugaucuguca

SEQ ID NO: 1180677 - RNA, 19 nt, Artificial Sequence
  Description of Artificial Sequence: Synthetic oligonucleotide
  Antisense strand to SEQ ID NO: 1180676
ugacagaucacacaucucc

SEQ ID NO: 1180678 - RNA, 19 nt, Artificial Sequence
  Description of Artificial Sequence: Synthetic oligonucleotide
  Sense strand starting at position 1134 of SEQ ID NO: 916745
agaugugugaucugucaga

SEQ ID NO: 1180679 - RNA, 19 nt, Artificial Sequence
  Description of Artificial Sequence: Synthetic oligonucleotide
  Antisense strand to SEQ ID NO: 1180678
ucugacagaucacacaucu

SEQ ID NO: 1180680 - RNA, 19 nt, Artificial Sequence
  Description of Artificial Sequence: Synthetic oligonucleotide
  Sense strand starting at position 1139 of SEQ ID NO: 916745
ugugaucugucagaauaaa

SEQ ID NO: 1180681 - RNA, 19 nt, Artificial Sequence
  Description of Artificial Sequence: Synthetic oligonucleotide
  Antisense strand to SEQ ID NO: 1180680
uuuauucugacagaucaca

SEQ ID NO: 1180682 - RNA, 19 nt, Artificial Sequence
  Description of Artificial Sequence: Synthetic oligonucleotide
  Sense strand starting at position 1167 of SEQ ID NO: 916745
agcuguguuaaggaucauc

SEQ ID NO: 1180683 - RNA, 19 nt, Artificial Sequence
  Description of Artificial Sequence: Synthetic oligonucleotide
  Antisense strand to SEQ ID NO: 1180682
gaugauccuuaacacagcu

SEQ ID NO: 1180684 - RNA, 19 nt, Artificial Sequence
  Description of Artificial Sequence: Synthetic oligonucleotide
  Sense strand starting at position 1170 of SEQ ID NO: 916745
uguguuaaggaucaucagu

SEQ ID NO: 1180685 - RNA, 19 nt, Artificial Sequence
  Description of Artificial Sequence: Synthetic oligonucleotide
  Antisense strand to SEQ ID NO: 1180684
acugaugauccuuaacaca

SEQ ID NO: 1180686 - RNA, 19 nt, Artificial Sequence
  Description of Artificial Sequence: Synthetic oligonucleotide
  Sense strand starting at position 1172 of SEQ ID NO: 916745
uguuaaggaucaucaguga

SEQ ID NO: 1180687 - RNA, 19 nt, Artificial Sequence
  Description of Artificial Sequence: Synthetic oligonucleotide
  Antisense strand to SEQ ID NO: 1180686
ucacugaugauccuuaaca

SEQ ID NO: 1180688 - RNA, 19 nt, Artificial Sequence
  Description of Artificial Sequence: Synthetic oligonucleotide
  Sense strand starting at position 1175 of SEQ ID NO: 916745
uaaggaucaucagugaacu

SEQ ID NO: 1180689 - RNA, 19 nt, Artificial Sequence
  Description of Artificial Sequence: Synthetic oligonucleotide
  Antisense strand to SEQ ID NO: 1180688
aguucacugaugauccuua

SEQ ID NO: 1180690 - RNA, 19 nt, Artificial Sequence
  Description of Artificial Sequence: Synthetic oligonucleotide
  Sense strand starting at position 1176 of SEQ ID NO: 916745
aaggaucaucagugaacuu

SEQ ID NO: 1180691 - RNA, 19 nt, Artificial Sequence
  Description of Artificial Sequence: Synthetic oligonucleotide
  Antisense strand to SEQ ID NO: 1180690
aaguucacugaugauccuu

SEQ ID NO: 1180692 - RNA, 19 nt, Artificial Sequence
  Description of Artificial Sequence: Synthetic oligonucleotide
  Sense strand starting at position 1345 of SEQ ID NO: 916745
aacgaugagugagcucaaa

SEQ ID NO: 1180693 - RNA, 19 nt, Artificial Sequence
  Description of Artificial Sequence: Synthetic oligonucleotide
  Antisense strand to SEQ ID NO: 1180692
uuugagcucacucaucguu

SEQ ID NO: 1180694 - RNA, 19 nt, Artificial Sequence
  Description of Artificial Sequence: Synthetic oligonucleotide
  Sense strand starting at position 1357 of SEQ ID NO: 916745
gcucaaaggcaggauaagu

SEQ ID NO: 1180695 - RNA, 19 nt, Artificial Sequence
  Description of Artificial Sequence: Synthetic oligonucleotide
  Antisense strand to SEQ ID NO: 1180694
acuuauccugccuuugagc

SEQ ID NO: 1180696 - RNA, 19 nt, Artificial Sequence
  Description of Artificial Sequence: Synthetic oligonucleotide
  Sense strand starting at position 1435 of SEQ ID NO: 916745
caagaucuaugggauagca

SEQ ID NO: 1180697 - RNA, 19 nt, Artificial Sequence
  Description of Artificial Sequence: Synthetic oligonucleotide
  Antisense strand to SEQ ID NO: 1180696
ugcuaucccauagaucuug

SEQ ID NO: 1180698 - RNA, 19 nt, Artificial Sequence
  Description of Artificial Sequence: Synthetic oligonucleotide
  Sense strand starting at position 1466 of SEQ ID NO: 916745
auguucgaguaauuggagu

SEQ ID NO: 1180699 - RNA, 19 nt, Artificial Sequence
  Description of Artificial Sequence: Synthetic oligonucleotide
  Antisense strand to SEQ ID NO: 1180698
acuccaauuacucgaacau

SEQ ID NO: 1180700 - RNA, 19 nt, Artificial Sequence
  Description of Artificial Sequence: Synthetic oligonucleotide
  Sense strand starting at position 1468 of SEQ ID NO: 916745
guucgaguaauuggaguuc

SEQ ID NO: 1180701 - RNA, 19 nt, Artificial Sequence
  Description of Artificial Sequence: Synthetic oligonucleotide
  Antisense strand to SEQ ID NO: 1180700
gaacuccaauuacucgaac

SEQ ID NO: 1180702 - RNA, 19 nt, Artificial Sequence
  Description of Artificial Sequence: Synthetic oligonucleotide
  Sense strand starting at position 74 of SEQ ID NO: 916746
aauggccauccuggugaaa

SEQ ID NO: 1180703 - RNA, 19 nt, Artificial Sequence
  Description of Artificial Sequence: Synthetic oligonucleotide
  Antisense strand to SEQ ID NO: 1180702
uuucaccaggauggccauu

SEQ ID NO: 1180704 - RNA, 19 nt, Artificial Sequence
  Description of Artificial Sequence: Synthetic oligonucleotide
  Sense strand starting at position 77 of SEQ ID NO: 916746
ggccauccuggugaaagau

SEQ ID NO: 1180705 - RNA, 19 nt, Artificial Sequence
  Description of Artificial Sequence: Synthetic oligonucleotide
  Antisense strand to SEQ ID NO: 1180704
aucuuucaccaggauggcc

SEQ ID NO: 1180706 - RNA, 19 nt, Artificial Sequence
  Description of Artificial Sequence: Synthetic oligonucleotide
  Sense strand starting at position 117 of SEQ ID NO: 916746
augaguuguuuaccaaaca

SEQ ID NO: 1180707 - RNA, 19 nt, Artificial Sequence
  Description of Artificial Sequence: Synthetic oligonucleotide
  Antisense strand to SEQ ID NO: 1180706
uguuugguaaacaacucau

SEQ ID NO: 1180708 - RNA, 19 nt, Artificial Sequence
  Description of Artificial Sequence: Synthetic oligonucleotide
  Sense strand starting at position 245 of SEQ ID NO: 916746
uggacuacuuaauuguaua

SEQ ID NO: 1180709 - RNA, 19 nt, Artificial Sequence
  Description of Artificial Sequence: Synthetic oligonucleotide
  Antisense strand to SEQ ID NO: 1180708
uauacaauuaaguagucca

SEQ ID NO: 1180710 - RNA, 19 nt, Artificial Sequence
  Description of Artificial Sequence: Synthetic oligonucleotide
  Sense strand starting at position 448 of SEQ ID NO: 916746
uacuacgauuggucuacaa

SEQ ID NO: 1180711 - RNA, 19 nt, Artificial Sequence
  Description of Artificial Sequence: Synthetic oligonucleotide
  Antisense strand to SEQ ID NO: 1180710
uuguagaccaaucguagua

SEQ ID NO: 1180712 - RNA, 19 nt, Artificial Sequence
  Description of Artificial Sequence: Synthetic oligonucleotide
  Sense strand starting at position 557 of SEQ ID NO: 916746
gaacaagaacugggucuuu

SEQ ID NO: 1180713 - RNA, 19 nt, Artificial Sequence
  Description of Artificial Sequence: Synthetic oligonucleotide
  Antisense strand to SEQ ID NO: 1180712
aaagacccaguucuuguuc

SEQ ID NO: 1180714 - RNA, 19 nt, Artificial Sequence
  Description of Artificial Sequence: Synthetic oligonucleotide
  Sense strand starting at position 575 of SEQ ID NO: 916746
ucaacugauuuacaaugga

SEQ ID NO: 1180715 - RNA, 19 nt, Artificial Sequence
  Description of Artificial Sequence: Synthetic oligonucleotide
  Antisense strand to SEQ ID NO: 1180714
uccauuguaaaucaguuga

SEQ ID NO: 1180716 - RNA, 19 nt, Artificial Sequence
  Description of Artificial Sequence: Synthetic oligonucleotide
  Sense strand starting at position 737 of SEQ ID NO: 916746
aggcaacauuuccaugaaa

SEQ ID NO: 1180717 - RNA, 19 nt, Artificial Sequence
  Description of Artificial Sequence: Synthetic oligonucleotide
  Antisense strand to SEQ ID NO: 1180716
uuucauggaaauguugccu

SEQ ID NO: 1180718 - RNA, 19 nt, Artificial Sequence
  Description of Artificial Sequence: Synthetic oligonucleotide
  Sense strand starting at position 767 of SEQ ID NO: 916746
cucaguaaucaguacuaac

SEQ ID NO: 1180719 - RNA, 19 nt, Artificial Sequence
  Description of Artificial Sequence: Synthetic oligonucleotide
  Antisense strand to SEQ ID NO: 1180718
guuaguacugauuacugag

SEQ ID NO: 1180720 - RNA, 19 nt, Artificial Sequence
  Description of Artificial Sequence: Synthetic oligonucleotide
  Sense strand starting at position 2397 of SEQ ID NO: 916746
uuaggucuuccagguagga

SEQ ID NO: 1180721 - RNA, 19 nt, Artificial Sequence
  Description of Artificial Sequence: Synthetic oligonucleotide
  Antisense strand to SEQ ID NO: 1180720
uccuaccuggaagaccuaa

SEQ ID NO: 1180722 - RNA, 19 nt, Artificial Sequence
  Description of Artificial Sequence: Synthetic oligonucleotide
  Sense strand starting at position 2485 of SEQ ID NO: 916746
ugucucuauguuuagcaaa

SEQ ID NO: 1180723 - RNA, 19 nt, Artificial Sequence
  Description of Artificial Sequence: Synthetic oligonucleotide
  Antisense strand to SEQ ID NO: 1180722
uuugcuaaacauagagaca

SEQ ID NO: 1180724 - RNA, 19 nt, Artificial Sequence
  Description of Artificial Sequence: Synthetic oligonucleotide
  Sense strand starting at position 2511 of SEQ ID NO: 916746
cgugcauuugugugauaca

SEQ ID NO: 1180725 - RNA, 19 nt, Artificial Sequence
  Description of Artificial Sequence: Synthetic oligonucleotide
  Antisense strand to SEQ ID NO: 1180724
uguaucacacaaaugcacg

SEQ ID NO: 1180726 - RNA, 19 nt, Artificial Sequence
  Description of Artificial Sequence: Synthetic oligonucleotide
  Sense strand starting at position 2522 of SEQ ID NO: 916746
gugauacacuuauugaaua

SEQ ID NO: 1180727 - RNA, 19 nt, Artificial Sequence
  Description of Artificial Sequence: Synthetic oligonucleotide
  Antisense strand to SEQ ID NO: 1180726
uauucaauaaguguaucac

SEQ ID NO: 1180728 - RNA, 19 nt, Artificial Sequence
  Description of Artificial Sequence: Synthetic oligonucleotide
  Sense strand starting at position 2543 of SEQ ID NO: 916746
accaucauucuggguauua

SEQ ID NO: 1180729 - RNA, 19 nt, Artificial Sequence
  Description of Artificial Sequence: Synthetic oligonucleotide
  Antisense strand to SEQ ID NO: 1180728
uaauacccagaaugauggu

SEQ ID NO: 1180730 - RNA, 19 nt, Artificial Sequence
  Description of Artificial Sequence: Synthetic oligonucleotide
  Sense strand starting at position 2544 of SEQ ID NO: 916746
ccaucauucuggguauuaa

SEQ ID NO: 1180731 - RNA, 19 nt, Artificial Sequence
  Description of Artificial Sequence: Synthetic oligonucleotide
  Antisense strand to SEQ ID NO: 1180730
uuaauacccagaaugaugg

SEQ ID NO: 1180732 - RNA, 19 nt, Artificial Sequence
  Description of Artificial Sequence: Synthetic oligonucleotide
  Sense strand starting at position 2591 of SEQ ID NO: 916746
guagacuauauguaugguu

SEQ ID NO: 1180733 - RNA, 19 nt, Artificial Sequence
  Description of Artificial Sequence: Synthetic oligonucleotide
  Antisense strand to SEQ ID NO: 1180732
aaccauacauauagucuac

SEQ ID NO: 1180734 - RNA, 19 nt, Artificial Sequence
  Description of Artificial Sequence: Synthetic oligonucleotide
  Sense strand starting at position 2606 of SEQ ID NO: 916746
gguuguuggagucagaauu

SEQ ID NO: 1180735 - RNA, 19 nt, Artificial Sequence
  Description of Artificial Sequence: Synthetic oligonucleotide
  Antisense strand to SEQ ID NO: 1180734
aauucugacuccaacaacc

SEQ ID NO: 1180736 - RNA, 19 nt, Artificial Sequence
  Description of Artificial Sequence: Synthetic oligonucleotide
  Sense strand starting at position 2616 of SEQ ID NO: 916746
gucagaauuacugggcuug

SEQ ID NO: 1180737 - RNA, 19 nt, Artificial Sequence
  Description of Artificial Sequence: Synthetic oligonucleotide
  Antisense strand to SEQ ID NO: 1180736
caagcccaguaauucugac

SEQ ID NO: 1180738 - RNA, 19 nt, Artificial Sequence
  Description of Artificial Sequence: Synthetic oligonucleotide
  Sense strand starting at position 2617 of SEQ ID NO: 916746
ucagaauuacugggcuuga

SEQ ID NO: 1180739 - RNA, 19 nt, Artificial Sequence
  Description of Artificial Sequence: Synthetic oligonucleotide
  Antisense strand to SEQ ID NO: 1180738
ucaagcccaguaauucuga

SEQ ID NO: 1180740 - RNA, 19 nt, Artificial Sequence
  Description of Artificial Sequence: Synthetic oligonucleotide
  Sense strand starting at position 2694 of SEQ ID NO: 916746
cucaucagugaaugaguau

SEQ ID NO: 1180741 - RNA, 19 nt, Artificial Sequence
  Description of Artificial Sequence: Synthetic oligonucleotide
  Antisense strand to SEQ ID NO: 1180740
auacucauucacugaugag

SEQ ID NO: 1180742 - RNA, 19 nt, Artificial Sequence
  Description of Artificial Sequence: Synthetic oligonucleotide
  Sense strand starting at position 2697 of SEQ ID NO: 916746
aucagugaaugaguauaca

SEQ ID NO: 1180743 - RNA, 19 nt, Artificial Sequence
  Description of Artificial Sequence: Synthetic oligonucleotide
  Antisense strand to SEQ ID NO: 1180742
uguauacucauucacugau

SEQ ID NO: 1180744 - RNA, 19 nt, Artificial Sequence
  Description of Artificial Sequence: Synthetic oligonucleotide
  Sense strand starting at position 2724 of SEQ ID NO: 916746
cucacugagucauuaagag

SEQ ID NO: 1180745 - RNA, 19 nt, Artificial Sequence
  Description of Artificial Sequence: Synthetic oligonucleotide
  Antisense strand to SEQ ID NO: 1180744
cucuuaaugacucagugag

SEQ ID NO: 1180746 - RNA, 19 nt, Artificial Sequence
  Description of Artificial Sequence: Synthetic oligonucleotide
  Sense strand starting at position 2740 of SEQ ID NO: 916746
gaguuuaaauggcuuaauu

SEQ ID NO: 1180747 - RNA, 19 nt, Artificial Sequence
  Description of Artificial Sequence: Synthetic oligonucleotide
  Antisense strand to SEQ ID NO: 1180746
aauuaagccauuuaaacuc

SEQ ID NO: 1180748 - RNA, 19 nt, Artificial Sequence
  Description of Artificial Sequence: Synthetic oligonucleotide
  Sense strand starting at position 2841 of SEQ ID NO: 916746
augcaucuguaauccagaa

SEQ ID NO: 1180749 - RNA, 19 nt, Artificial Sequence
  Description of Artificial Sequence: Synthetic oligonucleotide
  Antisense strand to SEQ ID NO: 1180748
uucuggauuacagaugcau

SEQ ID NO: 1180750 - RNA, 19 nt, Artificial Sequence
  Description of Artificial Sequence: Synthetic oligonucleotide
  Sense strand starting at position 3019 of SEQ ID NO: 916746
ccucauagcuggucauuua

SEQ ID NO: 1180751 - RNA, 19 nt, Artificial Sequence
  Description of Artificial Sequence: Synthetic oligonucleotide
  Antisense strand to SEQ ID NO: 1180750
uaaaugaccagcuaugagg

SEQ ID NO: 1180752 - RNA, 19 nt, Artificial Sequence
  Description of Artificial Sequence: Synthetic oligonucleotide
  Sense strand starting at position 3063 of SEQ ID NO: 916746
aucugugugccuccuguua

SEQ ID NO: 1180753 - RNA, 19 nt, Artificial Sequence
  Description of Artificial Sequence: Synthetic oligonucleotide
  Antisense strand to SEQ ID NO: 1180752
uaacaggaggcacacagau

SEQ ID NO: 1180754 - RNA, 19 nt, Artificial Sequence
  Description of Artificial Sequence: Synthetic oligonucleotide
  Sense strand starting at position 3142 of SEQ ID NO: 916746
gggagacaaguaugucaau

SEQ ID NO: 1180755 - RNA, 19 nt, Artificial Sequence
  Description of Artificial Sequence: Synthetic oligonucleotide
  Antisense strand to SEQ ID NO: 1180754
auugacauacuugucuccc

SEQ ID NO: 1180756 - RNA, 19 nt, Artificial Sequence
  Description of Artificial Sequence: Synthetic oligonucleotide
  Sense strand starting at position 3143 of SEQ ID NO: 916746
ggagacaaguaugucaaua

SEQ ID NO: 1180757 - RNA, 19 nt, Artificial Sequence
  Description of Artificial Sequence: Synthetic oligonucleotide
  Antisense strand to SEQ ID NO: 1180756
uauugacauacuugucucc

SEQ ID NO: 1180758 - RNA, 19 nt, Artificial Sequence
  Description of Artificial Sequence: Synthetic oligonucleotide
  Sense strand starting at position 3164 of SEQ ID NO: 916746
agcuacgugaaaugaauaa

SEQ ID NO: 1180759 - RNA, 19 nt, Artificial Sequence
  Description of Artificial Sequence: Synthetic oligonucleotide
  Antisense strand to SEQ ID NO: 1180758
uuauucauuucacguagcu

SEQ ID NO: 1180760 - RNA, 19 nt, Artificial Sequence
  Description of Artificial Sequence: Synthetic oligonucleotide
  Sense strand starting at position 3470 of SEQ ID NO: 916746
guaucuguauuucuccauu

SEQ ID NO: 1180761 - RNA, 19 nt, Artificial Sequence
  Description of Artificial Sequence: Synthetic oligonucleotide
  Antisense strand to SEQ ID NO: 1180760
aauggagaaauacagauac

SEQ ID NO: 1180762 - RNA, 19 nt, Artificial Sequence
  Description of Artificial Sequence: Synthetic oligonucleotide
  Sense strand starting at position 3551 of SEQ ID NO: 916746
guaaaugcagaaugaguga

SEQ ID NO: 1180763 - RNA, 19 nt, Artificial Sequence
  Description of Artificial Sequence: Synthetic oligonucleotide
  Antisense strand to SEQ ID NO: 1180762
ucacucauucugcauuuac

SEQ ID NO: 1180764 - RNA, 19 nt, Artificial Sequence
  Description of Artificial Sequence: Synthetic oligonucleotide
  Sense strand starting at position 3614 of SEQ ID NO: 916746
ggacaaguccuaugauaua

SEQ ID NO: 1180765 - RNA, 19 nt, Artificial Sequence
  Description of Artificial Sequence: Synthetic oligonucleotide
  Antisense strand to SEQ ID NO: 1180764
uauaucauaggacuugucc

SEQ ID NO: 1180766 - RNA, 19 nt, Artificial Sequence
  Description of Artificial Sequence: Synthetic oligonucleotide
  Sense strand starting at position 3665 of SEQ ID NO: 916746
aggaaauaguaagcaguaa

SEQ ID NO: 1180767 - RNA, 19 nt, Artificial Sequence
  Description of Artificial Sequence: Synthetic oligonucleotide
  Antisense strand to SEQ ID NO: 1180766
uuacugcuuacuauuuccu

SEQ ID NO: 1180768 - RNA, 19 nt, Artificial Sequence
  Description of Artificial Sequence: Synthetic oligonucleotide
  Sense strand starting at position 3684 of SEQ ID NO: 916746
ccauauaugccugaguccu

SEQ ID NO: 1180769 - RNA, 19 nt, Artificial Sequence
  Description of Artificial Sequence: Synthetic oligonucleotide
  Antisense strand to SEQ ID NO: 1180768
aggacucaggcauauaugg

SEQ ID NO: 1180770 - RNA, 19 nt, Artificial Sequence
  Description of Artificial Sequence: Synthetic oligonucleotide
  Sense strand starting at position 3757 of SEQ ID NO: 916746
gaaagauguuccucuugaa

SEQ ID NO: 1180771 - RNA, 19 nt, Artificial Sequence
  Description of Artificial Sequence: Synthetic oligonucleotide
  Antisense strand to SEQ ID NO: 1180770
uucaagaggaacaucuuuc

SEQ ID NO: 1180772 - RNA, 19 nt, Artificial Sequence
  Description of Artificial Sequence: Synthetic oligonucleotide
  Sense strand starting at position 3784 of SEQ ID NO: 916746
cuguuagcgcuguuugaga

SEQ ID NO: 1180773 - RNA, 19 nt, Artificial Sequence
  Description of Artificial Sequence: Synthetic oligonucleotide
  Antisense strand to SEQ ID NO: 1180772
ucucaaacagcgcuaacag

SEQ ID NO: 1180774 - RNA, 19 nt, Artificial Sequence
  Description of Artificial Sequence: Synthetic oligonucleotide
  Sense strand starting at position 3792 of SEQ ID NO: 916746
gcuguuugagaagagugau

SEQ ID NO: 1180775 - RNA, 19 nt, Artificial Sequence
  Description of Artificial Sequence: Synthetic oligonucleotide
  Antisense strand to SEQ ID NO: 1180774
aucacucuucucaaacagc

SEQ ID NO: 1180776 - RNA, 19 nt, Artificial Sequence
  Description of Artificial Sequence: Synthetic oligonucleotide
  Sense strand starting at position 3795 of SEQ ID NO: 916746
guuugagaagagugauaua

SEQ ID NO: 1180777 - RNA, 19 nt, Artificial Sequence
  Description of Artificial Sequence: Synthetic oligonucleotide
  Antisense strand to SEQ ID NO: 1180776
uauaucacucuucucaaac

SEQ ID NO: 1180778 - RNA, 19 nt, Artificial Sequence
  Description of Artificial Sequence: Synthetic oligonucleotide
  Sense strand starting at position 3807 of SEQ ID NO: 916746
ugauauagauuguuaccua

SEQ ID NO: 1180779 - RNA, 19 nt, Artificial Sequence
  Description of Artificial Sequence: Synthetic oligonucleotide
  Antisense strand to SEQ ID NO: 1180778
uagguaacaaucuauauca

SEQ ID NO: 1180780 - RNA, 19 nt, Artificial Sequence
  Description of Artificial Sequence: Synthetic oligonucleotide
  Sense strand starting at position 3922 of SEQ ID NO: 916746
ugagcaucuuaaguuugau

SEQ ID NO: 1180781 - RNA, 19 nt, Artificial Sequence
  Description of Artificial Sequence: Synthetic oligonucleotide
  Antisense strand to SEQ ID NO: 1180780
aucaaacuuaagaugcuca

SEQ ID NO: 1180782 - RNA, 19 nt, Artificial Sequence
  Description of Artificial Sequence: Synthetic oligonucleotide
  Sense strand starting at position 142 of SEQ ID NO: 916747
caccuauaucccgggaaug

SEQ ID NO: 1180783 - RNA, 19 nt, Artificial Sequence
  Description of Artificial Sequence: Synthetic oligonucleotide
  Antisense strand to SEQ ID NO: 1180782
cauucccgggauauaggug

SEQ ID NO: 1180784 - RNA, 19 nt, Artificial Sequence
  Description of Artificial Sequence: Synthetic oligonucleotide
  Sense strand starting at position 143 of SEQ ID NO: 916747
accuauaucccgggaaugu

SEQ ID NO: 1180785 - RNA, 19 nt, Artificial Sequence
  Description of Artificial Sequence: Synthetic oligonucleotide
  Antisense strand to SEQ ID NO: 1180784
acauucccgggauauaggu

SEQ ID NO: 1180786 - RNA, 19 nt, Artificial Sequence
  Description of Artificial Sequence: Synthetic oligonucleotide
  Sense strand starting at position 256 of SEQ ID NO: 916747
ucucuaauggaguauguua

SEQ ID NO: 1180787 - RNA, 19 nt, Artificial Sequence
  Description of Artificial Sequence: Synthetic oligonucleotide
  Antisense strand to SEQ ID NO: 1180786
uaacauacuccauuagaga

SEQ ID NO: 1180788 - RNA, 19 nt, Artificial Sequence
  Description of Artificial Sequence: Synthetic oligonucleotide
  Sense strand starting at position 258 of SEQ ID NO: 916747
ucuaauggaguauguuauu

SEQ ID NO: 1180789 - RNA, 19 nt, Artificial Sequence
  Description of Artificial Sequence: Synthetic oligonucleotide
  Antisense strand to SEQ ID NO: 1180788
aauaacauacuccauuaga

SEQ ID NO: 1180790 - RNA, 19 nt, Artificial Sequence
  Description of Artificial Sequence: Synthetic oligonucleotide
  Sense strand starting at position 263 of SEQ ID NO: 916747
uggaguauguuauuaaauc

SEQ ID NO: 1180791 - RNA, 19 nt, Artificial Sequence
  Description of Artificial Sequence: Synthetic oligonucleotide
  Antisense strand to SEQ ID NO: 1180790
gauuuaauaacauacucca

SEQ ID NO: 1180792 - RNA, 19 nt, Artificial Sequence
  Description of Artificial Sequence: Synthetic oligonucleotide
  Sense strand starting at position 387 of SEQ ID NO: 916747
gcucaaacagguuaaaugu

SEQ ID NO: 1180793 - RNA, 19 nt, Artificial Sequence
  Description of Artificial Sequence: Synthetic oligonucleotide
  Antisense strand to SEQ ID NO: 1180792
acauuuaaccuguuugagc

SEQ ID NO: 1180794 - RNA, 19 nt, Artificial Sequence
  Description of Artificial Sequence: Synthetic oligonucleotide
  Sense strand starting at position 593 of SEQ ID NO: 916747
gugaaacauuucuaagaac

SEQ ID NO: 1180795 - RNA, 19 nt, Artificial Sequence
  Description of Artificial Sequence: Synthetic oligonucleotide
  Antisense strand to SEQ ID NO: 1180794
guucuuagaaauguuucac

SEQ ID NO: 1180796 - RNA, 19 nt, Artificial Sequence
  Description of Artificial Sequence: Synthetic oligonucleotide
  Sense strand starting at position 683 of SEQ ID NO: 916747
gguaaagaauauuaaagga

SEQ ID NO: 1180797 - RNA, 19 nt, Artificial Sequence
  Description of Artificial Sequence: Synthetic oligonucleotide
  Antisense strand to SEQ ID NO: 1180796
uccuuuaauauucuuuacc

SEQ ID NO: 1180798 - RNA, 19 nt, Artificial Sequence
  Description of Artificial Sequence: Synthetic oligonucleotide
  Sense strand starting at position 778 of SEQ ID NO: 916747
aauggccauccuggugaaa

SEQ ID NO: 1180799 - RNA, 19 nt, Artificial Sequence
  Description of Artificial Sequence: Synthetic oligonucleotide
  Antisense strand to SEQ ID NO: 1180798
uuucaccaggauggccauu

SEQ ID NO: 1180800 - RNA, 19 nt, Artificial Sequence
  Description of Artificial Sequence: Synthetic oligonucleotide
  Sense strand starting at position 781 of SEQ ID NO: 916747
ggccauccuggugaaagau

SEQ ID NO: 1180801 - RNA, 19 nt, Artificial Sequence
  Description of Artificial Sequence: Synthetic oligonucleotide
  Antisense strand to SEQ ID NO: 1180800
aucuuucaccaggauggcc

SEQ ID NO: 1180802 - RNA, 19 nt, Artificial Sequence
  Description of Artificial Sequence: Synthetic oligonucleotide
  Sense strand starting at position 821 of SEQ ID NO: 916747
augaguuguuuaccaaaca

SEQ ID NO: 1180803 - RNA, 19 nt, Artificial Sequence
  Description of Artificial Sequence: Synthetic oligonucleotide
  Antisense strand to SEQ ID NO: 1180802
uguuugguaaacaacucau

SEQ ID NO: 1180804 - RNA, 19 nt, Artificial Sequence
  Description of Artificial Sequence: Synthetic oligonucleotide
  Sense strand starting at position 949 of SEQ ID NO: 916747
uggacuacuuaauuguaua

SEQ ID NO: 1180805 - RNA, 19 nt, Artificial Sequence
  Description of Artificial Sequence: Synthetic oligonucleotide
  Antisense strand to SEQ ID NO: 1180804
uauacaauuaaguagucca

SEQ ID NO: 1180806 - RNA, 19 nt, Artificial Sequence
  Description of Artificial Sequence: Synthetic oligonucleotide
  Sense strand starting at position 1152 of SEQ ID NO: 916747
uacuacgauuggucuacaa

SEQ ID NO: 1180807 - RNA, 19 nt, Artificial Sequence
  Description of Artificial Sequence: Synthetic oligonucleotide
  Antisense strand to SEQ ID NO: 1180806
uuguagaccaaucguagua

SEQ ID NO: 1180808 - RNA, 19 nt, Artificial Sequence
  Description of Artificial Sequence: Synthetic oligonucleotide
  Sense strand starting at position 1261 of SEQ ID NO: 916747
gaacaagaacugggucuuu

SEQ ID NO: 1180809 - RNA, 19 nt, Artificial Sequence
  Description of Artificial Sequence: Synthetic oligonucleotide
  Antisense strand to SEQ ID NO: 1180808
aaagacccaguucuuguuc

SEQ ID NO: 1180810 - RNA, 19 nt, Artificial Sequence
  Description of Artificial Sequence: Synthetic oligonucleotide
  Sense strand starting at position 1279 of SEQ ID NO: 916747
ucaacugauuuacaaugga

SEQ ID NO: 1180811 - RNA, 19 nt, Artificial Sequence
  Description of Artificial Sequence: Synthetic oligonucleotide
  Antisense strand to SEQ ID NO: 1180810
uccauuguaaaucaguuga

SEQ ID NO: 1180812 - RNA, 19 nt, Artificial Sequence
  Description of Artificial Sequence: Synthetic oligonucleotide
  Sense strand starting at position 1441 of SEQ ID NO: 916747
aggcaacauuuccaugaaa

SEQ ID NO: 1180813 - RNA, 19 nt, Artificial Sequence
  Description of Artificial Sequence: Synthetic oligonucleotide
  Antisense strand to SEQ ID NO: 1180812
uuucauggaaauguugccu

SEQ ID NO: 1180814 - RNA, 19 nt, Artificial Sequence
  Description of Artificial Sequence: Synthetic oligonucleotide
  Sense strand starting at position 1471 of SEQ ID NO: 916747
cucaguaaucaguacuaac

SEQ ID NO: 1180815 - RNA, 19 nt, Artificial Sequence
  Description of Artificial Sequence: Synthetic oligonucleotide
  Antisense strand to SEQ ID NO: 1180814
guuaguacugauuacugag

SEQ ID NO: 1180816 - RNA, 19 nt, Artificial Sequence
  Description of Artificial Sequence: Synthetic oligonucleotide
  Sense strand starting at position 3101 of SEQ ID NO: 916747
uuaggucuuccagguagga

SEQ ID NO: 1180817 - RNA, 19 nt, Artificial Sequence
  Description of Artificial Sequence: Synthetic oligonucleotide
  Antisense strand to SEQ ID NO: 1180816
uccuaccuggaagaccuaa

SEQ ID NO: 1180818 - RNA, 19 nt, Artificial Sequence
  Description of Artificial Sequence: Synthetic oligonucleotide
  Sense strand starting at position 3189 of SEQ ID NO: 916747
ugucucuauguuuagcaaa

SEQ ID NO: 1180819 - RNA, 19 nt, Artificial Sequence
  Description of Artificial Sequence: Synthetic oligonucleotide
  Antisense strand to SEQ ID NO: 1180818
uuugcuaaacauagagaca

SEQ ID NO: 1180820 - RNA, 19 nt, Artificial Sequence
  Description of Artificial Sequence: Synthetic oligonucleotide
  Sense strand starting at position 3215 of SEQ ID NO: 916747
cgugcauuugugugauaca

SEQ ID NO: 1180821 - RNA, 19 nt, Artificial Sequence
  Description of Artificial Sequence: Synthetic oligonucleotide
  Antisense strand to SEQ ID NO: 1180820
uguaucacacaaaugcacg

SEQ ID NO: 1180822 - RNA, 19 nt, Artificial Sequence
  Description of Artificial Sequence: Synthetic oligonucleotide
  Sense strand starting at position 3226 of SEQ ID NO: 916747
gugauacacuuauugaaua

SEQ ID NO: 1180823 - RNA, 19 nt, Artificial Sequence
  Description of Artificial Sequence: Synthetic oligonucleotide
  Antisense strand to SEQ ID NO: 1180822
uauucaauaaguguaucac

SEQ ID NO: 1180824 - RNA, 19 nt, Artificial Sequence
  Description of Artificial Sequence: Synthetic oligonucleotide
  Sense strand starting at position 3247 of SEQ ID NO: 916747
accaucauucuggguauua

SEQ ID NO: 1180825 - RNA, 19 nt, Artificial Sequence
  Description of Artificial Sequence: Synthetic oligonucleotide
  Antisense strand to SEQ ID NO: 1180824
uaauacccagaaugauggu

SEQ ID NO: 1180826 - RNA, 19 nt, Artificial Sequence
  Description of Artificial Sequence: Synthetic oligonucleotide
  Sense strand starting at position 3248 of SEQ ID NO: 916747
ccaucauucuggguauuaa

SEQ ID NO: 1180827 - RNA, 19 nt, Artificial Sequence
  Description of Artificial Sequence: Synthetic oligonucleotide
  Antisense strand to SEQ ID NO: 1180826
uuaauacccagaaugaugg

SEQ ID NO: 1180828 - RNA, 19 nt, Artificial Sequence
  Description of Artificial Sequence: Synthetic oligonucleotide
  Sense strand starting at position 3295 of SEQ ID NO: 916747
guagacuauauguaugguu

SEQ ID NO: 1180829 - RNA, 19 nt, Artificial Sequence
  Description of Artificial Sequence: Synthetic oligonucleotide
  Antisense strand to SEQ ID NO: 1180828
aaccauacauauagucuac

SEQ ID NO: 1180830 - RNA, 19 nt, Artificial Sequence
  Description of Artificial Sequence: Synthetic oligonucleotide
  Sense strand starting at position 3297 of SEQ ID NO: 916747
agacuauauguaugguugu

SEQ ID NO: 1180831 - RNA, 19 nt, Artificial Sequence
  Description of Artificial Sequence: Synthetic oligonucleotide
  Antisense strand to SEQ ID NO: 1180830
acaaccauacauauagucu

SEQ ID NO: 1180832 - RNA, 19 nt, Artificial Sequence
  Description of Artificial Sequence: Synthetic oligonucleotide
  Sense strand starting at position 3310 of SEQ ID NO: 916747
gguuguuggagucagaauu

SEQ ID NO: 1180833 - RNA, 19 nt, Artificial Sequence
  Description of Artificial Sequence: Synthetic oligonucleotide
  Antisense strand to SEQ ID NO: 1180832
aauucugacuccaacaacc

SEQ ID NO: 1180834 - RNA, 19 nt, Artificial Sequence
  Description of Artificial Sequence: Synthetic oligonucleotide
  Sense strand starting at position 3320 of SEQ ID NO: 916747
gucagaauuacugggcuug

SEQ ID NO: 1180835 - RNA, 19 nt, Artificial Sequence
  Description of Artificial Sequence: Synthetic oligonucleotide
  Antisense strand to SEQ ID NO: 1180834
caagcccaguaauucugac

SEQ ID NO: 1180836 - RNA, 19 nt, Artificial Sequence
  Description of Artificial Sequence: Synthetic oligonucleotide
  Sense strand starting at position 3321 of SEQ ID NO: 916747
ucagaauuacugggcuuga

SEQ ID NO: 1180837 - RNA, 19 nt, Artificial Sequence
  Description of Artificial Sequence: Synthetic oligonucleotide
  Antisense strand to SEQ ID NO: 1180836
ucaagcccaguaauucuga

SEQ ID NO: 1180838 - RNA, 19 nt, Artificial Sequence
  Description of Artificial Sequence: Synthetic oligonucleotide
  Sense strand starting at position 3398 of SEQ ID NO: 916747
cucaucagugaaugaguau

SEQ ID NO: 1180839 - RNA, 19 nt, Artificial Sequence
  Description of Artificial Sequence: Synthetic oligonucleotide
  Antisense strand to SEQ ID NO: 1180838
auacucauucacugaugag

SEQ ID NO: 1180840 - RNA, 19 nt, Artificial Sequence
  Description of Artificial Sequence: Synthetic oligonucleotide
  Sense strand starting at position 3401 of SEQ ID NO: 916747
aucagugaaugaguauaca

SEQ ID NO: 1180841 - RNA, 19 nt, Artificial Sequence
  Description of Artificial Sequence: Synthetic oligonucleotide
  Antisense strand to SEQ ID NO: 1180840
uguauacucauucacugau

SEQ ID NO: 1180842 - RNA, 19 nt, Artificial Sequence
  Description of Artificial Sequence: Synthetic oligonucleotide
  Sense strand starting at position 3428 of SEQ ID NO: 916747
cucacugagucauuaagag

SEQ ID NO: 1180843 - RNA, 19 nt, Artificial Sequence
  Description of Artificial Sequence: Synthetic oligonucleotide
  Antisense strand to SEQ ID NO: 1180842
cucuuaaugacucagugag

SEQ ID NO: 1180844 - RNA, 19 nt, Artificial Sequence
  Description of Artificial Sequence: Synthetic oligonucleotide
  Sense strand starting at position 3444 of SEQ ID NO: 916747
gaguuuaaauggcuuaauu

SEQ ID NO: 1180845 - RNA, 19 nt, Artificial Sequence
  Description of Artificial Sequence: Synthetic oligonucleotide
  Antisense strand to SEQ ID NO: 1180844
aauuaagccauuuaaacuc

SEQ ID NO: 1180846 - RNA, 19 nt, Artificial Sequence
  Description of Artificial Sequence: Synthetic oligonucleotide
  Sense strand starting at position 3545 of SEQ ID NO: 916747
augcaucuguaauccagaa

SEQ ID NO: 1180847 - RNA, 19 nt, Artificial Sequence
  Description of Artificial Sequence: Synthetic oligonucleotide
  Antisense strand to SEQ ID NO: 1180846
uucuggauuacagaugcau

SEQ ID NO: 1180848 - RNA, 19 nt, Artificial Sequence
  Description of Artificial Sequence: Synthetic oligonucleotide
  Sense strand starting at position 3723 of SEQ ID NO: 916747
ccucauagcuggucauuua

SEQ ID NO: 1180849 - RNA, 19 nt, Artificial Sequence
  Description of Artificial Sequence: Synthetic oligonucleotide
  Antisense strand to SEQ ID NO: 1180848
uaaaugaccagcuaugagg

SEQ ID NO: 1180850 - RNA, 19 nt, Artificial Sequence
  Description of Artificial Sequence: Synthetic oligonucleotide
  Sense strand starting at position 3767 of SEQ ID NO: 916747
aucugugugccuccuguua

SEQ ID NO: 1180851 - RNA, 19 nt, Artificial Sequence
  Description of Artificial Sequence: Synthetic oligonucleotide
  Antisense strand to SEQ ID NO: 1180850
uaacaggaggcacacagau

SEQ ID NO: 1180852 - RNA, 19 nt, Artificial Sequence
  Description of Artificial Sequence: Synthetic oligonucleotide
  Sense strand starting at position 3846 of SEQ ID NO: 916747
gggagacaaguaugucaau

SEQ ID NO: 1180853 - RNA, 19 nt, Artificial Sequence
  Description of Artificial Sequence: Synthetic oligonucleotide
  Antisense strand to SEQ ID NO: 1180852
auugacauacuugucuccc

SEQ ID NO: 1180854 - RNA, 19 nt, Artificial Sequence
  Description of Artificial Sequence: Synthetic oligonucleotide
  Sense strand starting at position 3847 of SEQ ID NO: 916747
ggagacaaguaugucaaua

SEQ ID NO: 1180855 - RNA, 19 nt, Artificial Sequence
  Description of Artificial Sequence: Synthetic oligonucleotide
  Antisense strand to SEQ ID NO: 1180854
uauugacauacuugucucc

SEQ ID NO: 1180856 - RNA, 19 nt, Artificial Sequence
  Description of Artificial Sequence: Synthetic oligonucleotide
  Sense strand starting at position 3862 of SEQ ID NO: 916747
aauaguagcuacgugaaau

SEQ ID NO: 1180857 - RNA, 19 nt, Artificial Sequence
  Description of Artificial Sequence: Synthetic oligonucleotide
  Antisense strand to SEQ ID NO: 1180856
auuucacguagcuacuauu

SEQ ID NO: 1180858 - RNA, 19 nt, Artificial Sequence
  Description of Artificial Sequence: Synthetic oligonucleotide
  Sense strand starting at position 3863 of SEQ ID NO: 916747
auaguagcuacgugaaaug

SEQ ID NO: 1180859 - RNA, 19 nt, Artificial Sequence
  Description of Artificial Sequence: Synthetic oligonucleotide
  Antisense strand to SEQ ID NO: 1180858
cauuucacguagcuacuau

SEQ ID NO: 1180860 - RNA, 19 nt, Artificial Sequence
  Description of Artificial Sequence: Synthetic oligonucleotide
  Sense strand starting at position 3868 of SEQ ID NO: 916747
agcuacgugaaaugaauaa

SEQ ID NO: 1180861 - RNA, 19 nt, Artificial Sequence
  Description of Artificial Sequence: Synthetic oligonucleotide
  Antisense strand to SEQ ID NO: 1180860
uuauucauuucacguagcu

SEQ ID NO: 1180862 - RNA, 19 nt, Artificial Sequence
  Description of Artificial Sequence: Synthetic oligonucleotide
  Sense strand starting at position 194 of SEQ ID NO: 916748
ggcuccaaucuaugaggga

SEQ ID NO: 1180863 - RNA, 19 nt, Artificial Sequence
  Description of Artificial Sequence: Synthetic oligonucleotide
  Antisense strand to SEQ ID NO: 1180862
ucccucauagauuggagcc

SEQ ID NO: 1180864 - RNA, 19 nt, Artificial Sequence
  Description of Artificial Sequence: Synthetic oligonucleotide
  Sense strand starting at position 197 of SEQ ID NO: 916748
uccaaucuaugagggacua

SEQ ID NO: 1180865 - RNA, 19 nt, Artificial Sequence
  Description of Artificial Sequence: Synthetic oligonucleotide
  Antisense strand to SEQ ID NO: 1180864
uagucccucauagauugga

SEQ ID NO: 1180866 - RNA, 19 nt, Artificial Sequence
  Description of Artificial Sequence: Synthetic oligonucleotide
  Sense strand starting at position 219 of SEQ ID NO: 916748
aggcuagcagaccauuaaa

SEQ ID NO: 1180867 - RNA, 19 nt, Artificial Sequence
  Description of Artificial Sequence: Synthetic oligonucleotide
  Antisense strand to SEQ ID NO: 1180866
uuuaauggucugcuagccu

SEQ ID NO: 1180868 - RNA, 19 nt, Artificial Sequence
  Description of Artificial Sequence: Synthetic oligonucleotide
  Sense strand starting at position 262 of SEQ ID NO: 916748
acuccucugcuuuggcaau

SEQ ID NO: 1180869 - RNA, 19 nt, Artificial Sequence
  Description of Artificial Sequence: Synthetic oligonucleotide
  Antisense strand to SEQ ID NO: 1180868
auugccaaagcagaggagu

SEQ ID NO: 1180870 - RNA, 19 nt, Artificial Sequence
  Description of Artificial Sequence: Synthetic oligonucleotide
  Sense strand starting at position 593 of SEQ ID NO: 916748
aucucuuccucagugauau

SEQ ID NO: 1180871 - RNA, 19 nt, Artificial Sequence
  Description of Artificial Sequence: Synthetic oligonucleotide
  Antisense strand to SEQ ID NO: 1180870
auaucacugaggaagagau

SEQ ID NO: 1180872 - RNA, 19 nt, Artificial Sequence
  Description of Artificial Sequence: Synthetic oligonucleotide
  Sense strand starting at position 594 of SEQ ID NO: 916748
ucucuuccucagugauauc

SEQ ID NO: 1180873 - RNA, 19 nt, Artificial Sequence
  Description of Artificial Sequence: Synthetic oligonucleotide
  Antisense strand to SEQ ID NO: 1180872
gauaucacugaggaagaga

SEQ ID NO: 1180874 - RNA, 19 nt, Artificial Sequence
  Description of Artificial Sequence: Synthetic oligonucleotide
  Sense strand starting at position 603 of SEQ ID NO: 916748
cagugauaucaccgcauag

SEQ ID NO: 1180875 - RNA, 19 nt, Artificial Sequence
  Description of Artificial Sequence: Synthetic oligonucleotide
  Antisense strand to SEQ ID NO: 1180874
cuaugcggugauaucacug

SEQ ID NO: 1180876 - RNA, 19 nt, Artificial Sequence
  Description of Artificial Sequence: Synthetic oligonucleotide
  Sense strand starting at position 605 of SEQ ID NO: 916748
gugauaucaccgcauaguu

SEQ ID NO: 1180877 - RNA, 19 nt, Artificial Sequence
  Description of Artificial Sequence: Synthetic oligonucleotide
  Antisense strand to SEQ ID NO: 1180876
aacuaugcggugauaucac

SEQ ID NO: 1180878 - RNA, 19 nt, Artificial Sequence
  Description of Artificial Sequence: Synthetic oligonucleotide
  Sense strand starting at position 638 of SEQ ID NO: 916748
uccauuaccugccugggaa

SEQ ID NO: 1180879 - RNA, 19 nt, Artificial Sequence
  Description of Artificial Sequence: Synthetic oligonucleotide
  Antisense strand to SEQ ID NO: 1180878
uucccaggcagguaaugga

SEQ ID NO: 1180880 - RNA, 19 nt, Artificial Sequence
  Description of Artificial Sequence: Synthetic oligonucleotide
  Sense strand starting at position 639 of SEQ ID NO: 916748
ccauuaccugccugggaaa

SEQ ID NO: 1180881 - RNA, 19 nt, Artificial Sequence
  Description of Artificial Sequence: Synthetic oligonucleotide
  Antisense strand to SEQ ID NO: 1180880
uuucccaggcagguaaugg

SEQ ID NO: 1180882 - RNA, 19 nt, Artificial Sequence
  Description of Artificial Sequence: Synthetic oligonucleotide
  Sense strand starting at position 641 of SEQ ID NO: 916748
auuaccugccugggaaaua

SEQ ID NO: 1180883 - RNA, 19 nt, Artificial Sequence
  Description of Artificial Sequence: Synthetic oligonucleotide
  Antisense strand to SEQ ID NO: 1180882
uauuucccaggcagguaau

SEQ ID NO: 1180884 - RNA, 19 nt, Artificial Sequence
  Description of Artificial Sequence: Synthetic oligonucleotide
  Sense strand starting at position 711 of SEQ ID NO: 916748
ucuccugauggcugaggau

SEQ ID NO: 1180885 - RNA, 19 nt, Artificial Sequence
  Description of Artificial Sequence: Synthetic oligonucleotide
  Antisense strand to SEQ ID NO: 1180884
auccucagccaucaggaga

SEQ ID NO: 1180886 - RNA, 19 nt, Artificial Sequence
  Description of Artificial Sequence: Synthetic oligonucleotide
  Sense strand starting at position 745 of SEQ ID NO: 916748
ccauguagauaaugaaaua

SEQ ID NO: 1180887 - RNA, 19 nt, Artificial Sequence
  Description of Artificial Sequence: Synthetic oligonucleotide
  Antisense strand to SEQ ID NO: 1180886
uauuucauuaucuacaugg

SEQ ID NO: 1180888 - RNA, 19 nt, Artificial Sequence
  Description of Artificial Sequence: Synthetic oligonucleotide
  Sense strand starting at position 768 of SEQ ID NO: 916748
ugaaauagauucucaguuc

SEQ ID NO: 1180889 - RNA, 19 nt, Artificial Sequence
  Description of Artificial Sequence: Synthetic oligonucleotide
  Antisense strand to SEQ ID NO: 1180888
gaacugagaaucuauuuca

SEQ ID NO: 1180890 - RNA, 19 nt, Artificial Sequence
  Description of Artificial Sequence: Synthetic oligonucleotide
  Sense strand starting at position 775 of SEQ ID NO: 916748
gauucucaguucuaggaga

SEQ ID NO: 1180891 - RNA, 19 nt, Artificial Sequence
  Description of Artificial Sequence: Synthetic oligonucleotide
  Antisense strand to SEQ ID NO: 1180890
ucuccuagaacugagaauc

SEQ ID NO: 1180892 - RNA, 19 nt, Artificial Sequence
  Description of Artificial Sequence: Synthetic oligonucleotide
  Sense strand starting at position 777 of SEQ ID NO: 916748
uucucaguucuaggagaca

SEQ ID NO: 1180893 - RNA, 19 nt, Artificial Sequence
  Description of Artificial Sequence: Synthetic oligonucleotide
  Antisense strand to SEQ ID NO: 1180892
ugucuccuagaacugagaa

SEQ ID NO: 1180894 - RNA, 19 nt, Artificial Sequence
  Description of Artificial Sequence: Synthetic oligonucleotide
  Sense strand starting at position 794 of SEQ ID NO: 916748
caugguauuugcuauagac

SEQ ID NO: 1180895 - RNA, 19 nt, Artificial Sequence
  Description of Artificial Sequence: Synthetic oligonucleotide
  Antisense strand to SEQ ID NO: 1180894
gucuauagcaaauaccaug

SEQ ID NO: 1180896 - RNA, 19 nt, Artificial Sequence
  Description of Artificial Sequence: Synthetic oligonucleotide
  Sense strand starting at position 812 of SEQ ID NO: 916748
ccacauuauuaagugggaa

SEQ ID NO: 1180897 - RNA, 19 nt, Artificial Sequence
  Description of Artificial Sequence: Synthetic oligonucleotide
  Antisense strand to SEQ ID NO: 1180896
uucccacuuaauaaugugg

SEQ ID NO: 1180898 - RNA, 19 nt, Artificial Sequence
  Description of Artificial Sequence: Synthetic oligonucleotide
  Sense strand starting at position 816 of SEQ ID NO: 916748
auuauuaagugggaaagaa

SEQ ID NO: 1180899 - RNA, 19 nt, Artificial Sequence
  Description of Artificial Sequence: Synthetic oligonucleotide
  Antisense strand to SEQ ID NO: 1180898
uucuuucccacuuaauaau

SEQ ID NO: 1180900 - RNA, 19 nt, Artificial Sequence
  Description of Artificial Sequence: Synthetic oligonucleotide
  Sense strand starting at position 921 of SEQ ID NO: 916748
cagcuaugaggccaacaga

SEQ ID NO: 1180901 - RNA, 19 nt, Artificial Sequence
  Description of Artificial Sequence: Synthetic oligonucleotide
  Antisense strand to SEQ ID NO: 1180900
ucuguuggccucauagcug

SEQ ID NO: 1180902 - RNA, 19 nt, Artificial Sequence
  Description of Artificial Sequence: Synthetic oligonucleotide
  Sense strand starting at position 1108 of SEQ ID NO: 916748
ucagcauucccagaaguuc

SEQ ID NO: 1180903 - RNA, 19 nt, Artificial Sequence
  Description of Artificial Sequence: Synthetic oligonucleotide
  Antisense strand to SEQ ID NO: 1180902
gaacuucugggaaugcuga

SEQ ID NO: 1180904 - RNA, 19 nt, Artificial Sequence
  Description of Artificial Sequence: Synthetic oligonucleotide
  Sense strand starting at position 1164 of SEQ ID NO: 916748
cuaccuuagucuucuagau

SEQ ID NO: 1180905 - RNA, 19 nt, Artificial Sequence
  Description of Artificial Sequence: Synthetic oligonucleotide
  Antisense strand to SEQ ID NO: 1180904
aucuagaagacuaagguag

SEQ ID NO: 1180906 - RNA, 19 nt, Artificial Sequence
  Description of Artificial Sequence: Synthetic oligonucleotide
  Sense strand starting at position 1274 of SEQ ID NO: 916748
auaggcacuuucccugaaa

SEQ ID NO: 1180907 - RNA, 19 nt, Artificial Sequence
  Description of Artificial Sequence: Synthetic oligonucleotide
  Antisense strand to SEQ ID NO: 1180906
uuucagggaaagugccuau

SEQ ID NO: 1180908 - RNA, 19 nt, Artificial Sequence
  Description of Artificial Sequence: Synthetic oligonucleotide
  Sense strand starting at position 2080 of SEQ ID NO: 916748
gagcaagcuccugaagaca

SEQ ID NO: 1180909 - RNA, 19 nt, Artificial Sequence
  Description of Artificial Sequence: Synthetic oligonucleotide
  Antisense strand to SEQ ID NO: 1180908
ugucuucaggagcuugcuc

SEQ ID NO: 1180910 - RNA, 19 nt, Artificial Sequence
  Description of Artificial Sequence: Synthetic oligonucleotide
  Sense strand starting at position 2112 of SEQ ID NO: 916748
ugccgacaggcguauguau

SEQ ID NO: 1180911 - RNA, 19 nt, Artificial Sequence
  Description of Artificial Sequence: Synthetic oligonucleotide
  Antisense strand to SEQ ID NO: 1180910
auacauacgccugucggca

SEQ ID NO: 1180912 - RNA, 19 nt, Artificial Sequence
  Description of Artificial Sequence: Synthetic oligonucleotide
  Sense strand starting at position 2119 of SEQ ID NO: 916748
aggcguauguauccaccaa

SEQ ID NO: 1180913 - RNA, 19 nt, Artificial Sequence
  Description of Artificial Sequence: Synthetic oligonucleotide
  Antisense strand to SEQ ID NO: 1180912
uugguggauacauacgccu

SEQ ID NO: 1180914 - RNA, 19 nt, Artificial Sequence
  Description of Artificial Sequence: Synthetic oligonucleotide
  Sense strand starting at position 2120 of SEQ ID NO: 916748
ggcguauguauccaccaau

SEQ ID NO: 1180915 - RNA, 19 nt, Artificial Sequence
  Description of Artificial Sequence: Synthetic oligonucleotide
  Antisense strand to SEQ ID NO: 1180914
auugguggauacauacgcc

SEQ ID NO: 1180916 - RNA, 19 nt, Artificial Sequence
  Description of Artificial Sequence: Synthetic oligonucleotide
  Sense strand starting at position 2204 of SEQ ID NO: 916748
gcgggucaaagugaaacuu

SEQ ID NO: 1180917 - RNA, 19 nt, Artificial Sequence
  Description of Artificial Sequence: Synthetic oligonucleotide
  Antisense strand to SEQ ID NO: 1180916
aaguuucacuuugacccgc

SEQ ID NO: 1180918 - RNA, 19 nt, Artificial Sequence
  Description of Artificial Sequence: Synthetic oligonucleotide
  Sense strand starting at position 2214 of SEQ ID NO: 916748
gugaaacuuuaaccaguac

SEQ ID NO: 1180919 - RNA, 19 nt, Artificial Sequence
  Description of Artificial Sequence: Synthetic oligonucleotide
  Antisense strand to SEQ ID NO: 1180918
guacugguuaaaguuucac

SEQ ID NO: 1180920 - RNA, 19 nt, Artificial Sequence
  Description of Artificial Sequence: Synthetic oligonucleotide
  Sense strand starting at position 2399 of SEQ ID NO: 916748
uccggagccugggaauuua

SEQ ID NO: 1180921 - RNA, 19 nt, Artificial Sequence
  Description of Artificial Sequence: Synthetic oligonucleotide
  Antisense strand to SEQ ID NO: 1180920
uaaauucccaggcuccgga

SEQ ID NO: 1180922 - RNA, 19 nt, Artificial Sequence
  Description of Artificial Sequence: Synthetic oligonucleotide
  Sense strand starting at position 2486 of SEQ ID NO: 916748
gcgggcggucugagauguu

SEQ ID NO: 1180923 - RNA, 19 nt, Artificial Sequence
  Description of Artificial Sequence: Synthetic oligonucleotide
  Antisense strand to SEQ ID NO: 1180922
aacaucucagaccgcccgc

SEQ ID NO: 1180924 - RNA, 19 nt, Artificial Sequence
  Description of Artificial Sequence: Synthetic oligonucleotide
  Sense strand starting at position 2561 of SEQ ID NO: 916748
ucagaaucguauguaaaug

SEQ ID NO: 1180925 - RNA, 19 nt, Artificial Sequence
  Description of Artificial Sequence: Synthetic oligonucleotide
  Antisense strand to SEQ ID NO: 1180924
cauuuacauacgauucuga

SEQ ID NO: 1180926 - RNA, 19 nt, Artificial Sequence
  Description of Artificial Sequence: Synthetic oligonucleotide
  Sense strand starting at position 2650 of SEQ ID NO: 916748
ugggaaaugcagugucgaa

SEQ ID NO: 1180927 - RNA, 19 nt, Artificial Sequence
  Description of Artificial Sequence: Synthetic oligonucleotide
  Antisense strand to SEQ ID NO: 1180926
uucgacacugcauuuccca

SEQ ID NO: 1180928 - RNA, 19 nt, Artificial Sequence
  Description of Artificial Sequence: Synthetic oligonucleotide
  Sense strand starting at position 2742 of SEQ ID NO: 916748
gcauauaugguguguaugu

SEQ ID NO: 1180929 - RNA, 19 nt, Artificial Sequence
  Description of Artificial Sequence: Synthetic oligonucleotide
  Antisense strand to SEQ ID NO: 1180928
acauacacaccauauaugc

SEQ ID NO: 1180930 - RNA, 19 nt, Artificial Sequence
  Description of Artificial Sequence: Synthetic oligonucleotide
  Sense strand starting at position 2797 of SEQ ID NO: 916748
ugugguauauguguguaua

SEQ ID NO: 1180931 - RNA, 19 nt, Artificial Sequence
  Description of Artificial Sequence: Synthetic oligonucleotide
  Antisense strand to SEQ ID NO: 1180930
uauacacacauauaccaca

SEQ ID NO: 1180932 - RNA, 19 nt, Artificial Sequence
  Description of Artificial Sequence: Synthetic oligonucleotide
  Sense strand starting at position 2798 of SEQ ID NO: 916748
gugguauauguguguauau

SEQ ID NO: 1180933 - RNA, 19 nt, Artificial Sequence
  Description of Artificial Sequence: Synthetic oligonucleotide
  Antisense strand to SEQ ID NO: 1180932
auauacacacauauaccac

SEQ ID NO: 1180934 - RNA, 19 nt, Artificial Sequence
  Description of Artificial Sequence: Synthetic oligonucleotide
  Sense strand starting at position 2800 of SEQ ID NO: 916748
gguauauguguguauauga

SEQ ID NO: 1180935 - RNA, 19 nt, Artificial Sequence
  Description of Artificial Sequence: Synthetic oligonucleotide
  Antisense strand to SEQ ID NO: 1180934
ucauauacacacauauacc

SEQ ID NO: 1180936 - RNA, 19 nt, Artificial Sequence
  Description of Artificial Sequence: Synthetic oligonucleotide
  Sense strand starting at position 2893 of SEQ ID NO: 916748
uuugcugguguguggagaa

SEQ ID NO: 1180937 - RNA, 19 nt, Artificial Sequence
  Description of Artificial Sequence: Synthetic oligonucleotide
  Antisense strand to SEQ ID NO: 1180936
uucuccacacaccagcaaa

SEQ ID NO: 1180938 - RNA, 19 nt, Artificial Sequence
  Description of Artificial Sequence: Synthetic oligonucleotide
  Sense strand starting at position 2918 of SEQ ID NO: 916748
guaggaaguauauaggcuu

SEQ ID NO: 1180939 - RNA, 19 nt, Artificial Sequence
  Description of Artificial Sequence: Synthetic oligonucleotide
  Antisense strand to SEQ ID NO: 1180938
aagccuauauacuuccuac

SEQ ID NO: 1180940 - RNA, 19 nt, Artificial Sequence
  Description of Artificial Sequence: Synthetic oligonucleotide
  Sense strand starting at position 3046 of SEQ ID NO: 916748
gucugaaaucaaugaucac

SEQ ID NO: 1180941 - RNA, 19 nt, Artificial Sequence
  Description of Artificial Sequence: Synthetic oligonucleotide
  Antisense strand to SEQ ID NO: 1180940
gugaucauugauuucagac

SEQ ID NO: 1180942 - RNA, 19 nt, Artificial Sequence
  Description of Artificial Sequence: Synthetic oligonucleotide
  Sense strand starting at position 292 of SEQ ID NO: 916749
ggcuccaaucuaugaggga

SEQ ID NO: 1180943 - RNA, 19 nt, Artificial Sequence
  Description of Artificial Sequence: Synthetic oligonucleotide
  Antisense strand to SEQ ID NO: 1180942
ucccucauagauuggagcc

SEQ ID NO: 1180944 - RNA, 19 nt, Artificial Sequence
  Description of Artificial Sequence: Synthetic oligonucleotide
  Sense strand starting at position 295 of SEQ ID NO: 916749
uccaaucuaugagggacua

SEQ ID NO: 1180945 - RNA, 19 nt, Artificial Sequence
  Description of Artificial Sequence: Synthetic oligonucleotide
  Antisense strand to SEQ ID NO: 1180944
uagucccucauagauugga

SEQ ID NO: 1180946 - RNA, 19 nt, Artificial Sequence
  Description of Artificial Sequence: Synthetic oligonucleotide
  Sense strand starting at position 317 of SEQ ID NO: 916749
aggcuagcagaccauuaaa

SEQ ID NO: 1180947 - RNA, 19 nt, Artificial Sequence
  Description of Artificial Sequence: Synthetic oligonucleotide
  Antisense strand to SEQ ID NO: 1180946
uuuaauggucugcuagccu

SEQ ID NO: 1180948 - RNA, 19 nt, Artificial Sequence
  Description of Artificial Sequence: Synthetic oligonucleotide
  Sense strand starting at position 360 of SEQ ID NO: 916749
acuccucugcuuuggcaau

SEQ ID NO: 1180949 - RNA, 19 nt, Artificial Sequence
  Description of Artificial Sequence: Synthetic oligonucleotide
  Antisense strand to SEQ ID NO: 1180948
auugccaaagcagaggagu

SEQ ID NO: 1180950 - RNA, 19 nt, Artificial Sequence
  Description of Artificial Sequence: Synthetic oligonucleotide
  Sense strand starting at position 691 of SEQ ID NO: 916749
aucucuuccucagugauau

SEQ ID NO: 1180951 - RNA, 19 nt, Artificial Sequence
  Description of Artificial Sequence: Synthetic oligonucleotide
  Antisense strand to SEQ ID NO: 1180950
auaucacugaggaagagau

SEQ ID NO: 1180952 - RNA, 19 nt, Artificial Sequence
  Description of Artificial Sequence: Synthetic oligonucleotide
  Sense strand starting at position 692 of SEQ ID NO: 916749
ucucuuccucagugauauc

SEQ ID NO: 1180953 - RNA, 19 nt, Artificial Sequence
  Description of Artificial Sequence: Synthetic oligonucleotide
  Antisense strand to SEQ ID NO: 1180952
gauaucacugaggaagaga

SEQ ID NO: 1180954 - RNA, 19 nt, Artificial Sequence
  Description of Artificial Sequence: Synthetic oligonucleotide
  Sense strand starting at position 701 of SEQ ID NO: 916749
cagugauaucaccgcauag

SEQ ID NO: 1180955 - RNA, 19 nt, Artificial Sequence
  Description of Artificial Sequence: Synthetic oligonucleotide
  Antisense strand to SEQ ID NO: 1180954
cuaugcggugauaucacug

SEQ ID NO: 1180956 - RNA, 19 nt, Artificial Sequence
  Description of Artificial Sequence: Synthetic oligonucleotide
  Sense strand starting at position 703 of SEQ ID NO: 916749
gugauaucaccgcauaguu

SEQ ID NO: 1180957 - RNA, 19 nt, Artificial Sequence
  Description of Artificial Sequence: Synthetic oligonucleotide
  Antisense strand to SEQ ID NO: 1180956
aacuaugcggugauaucac

SEQ ID NO: 1180958 - RNA, 19 nt, Artificial Sequence
  Description of Artificial Sequence: Synthetic oligonucleotide
  Sense strand starting at position 736 of SEQ ID NO: 916749
uccauuaccugccugggaa

SEQ ID NO: 1180959 - RNA, 19 nt, Artificial Sequence
  Description of Artificial Sequence: Synthetic oligonucleotide
  Antisense strand to SEQ ID NO: 1180958
uucccaggcagguaaugga

SEQ ID NO: 1180960 - RNA, 19 nt, Artificial Sequence
  Description of Artificial Sequence: Synthetic oligonucleotide
  Sense strand starting at position 737 of SEQ ID NO: 916749
ccauuaccugccugggaaa

SEQ ID NO: 1180961 - RNA, 19 nt, Artificial Sequence
  Description of Artificial Sequence: Synthetic oligonucleotide
  Antisense strand to SEQ ID NO: 1180960
uuucccaggcagguaaugg

SEQ ID NO: 1180962 - RNA, 19 nt, Artificial Sequence
  Description of Artificial Sequence: Synthetic oligonucleotide
  Sense strand starting at position 739 of SEQ ID NO: 916749
auuaccugccugggaaaua

SEQ ID NO: 1180963 - RNA, 19 nt, Artificial Sequence
  Description of Artificial Sequence: Synthetic oligonucleotide
  Antisense strand to SEQ ID NO: 1180962
uauuucccaggcagguaau

SEQ ID NO: 1180964 - RNA, 19 nt, Artificial Sequence
  Description of Artificial Sequence: Synthetic oligonucleotide
  Sense strand starting at position 809 of SEQ ID NO: 916749
ucuccugauggcugaggau

SEQ ID NO: 1180965 - RNA, 19 nt, Artificial Sequence
  Description of Artificial Sequence: Synthetic oligonucleotide
  Antisense strand to SEQ ID NO: 1180964
auccucagccaucaggaga

SEQ ID NO: 1180966 - RNA, 19 nt, Artificial Sequence
  Description of Artificial Sequence: Synthetic oligonucleotide
  Sense strand starting at position 843 of SEQ ID NO: 916749
ccauguagauaaugaaaua

SEQ ID NO: 1180967 - RNA, 19 nt, Artificial Sequence
  Description of Artificial Sequence: Synthetic oligonucleotide
  Antisense strand to SEQ ID NO: 1180966
uauuucauuaucuacaugg

SEQ ID NO: 1180968 - RNA, 19 nt, Artificial Sequence
  Description of Artificial Sequence: Synthetic oligonucleotide
  Sense strand starting at position 866 of SEQ ID NO: 916749
ugaaauagauucucaguuc

SEQ ID NO: 1180969 - RNA, 19 nt, Artificial Sequence
  Description of Artificial Sequence: Synthetic oligonucleotide
  Antisense strand to SEQ ID NO: 1180968
gaacugagaaucuauuuca

SEQ ID NO: 1180970 - RNA, 19 nt, Artificial Sequence
  Description of Artificial Sequence: Synthetic oligonucleotide
  Sense strand starting at position 873 of SEQ ID NO: 916749
gauucucaguucuaggaga

SEQ ID NO: 1180971 - RNA, 19 nt, Artificial Sequence
  Description of Artificial Sequence: Synthetic oligonucleotide
  Antisense strand to SEQ ID NO: 1180970
ucuccuagaacugagaauc

SEQ ID NO: 1180972 - RNA, 19 nt, Artificial Sequence
  Description of Artificial Sequence: Synthetic oligonucleotide
  Sense strand starting at position 875 of SEQ ID NO: 916749
uucucaguucuaggagaca

SEQ ID NO: 1180973 - RNA, 19 nt, Artificial Sequence
  Description of Artificial Sequence: Synthetic oligonucleotide
  Antisense strand to SEQ ID NO: 1180972
ugucuccuagaacugagaa

SEQ ID NO: 1180974 - RNA, 19 nt, Artificial Sequence
  Description of Artificial Sequence: Synthetic oligonucleotide
  Sense strand starting at position 892 of SEQ ID NO: 916749
caugguauuugcuauagac

SEQ ID NO: 1180975 - RNA, 19 nt, Artificial Sequence
  Description of Artificial Sequence: Synthetic oligonucleotide
  Antisense strand to SEQ ID NO: 1180974
gucuauagcaaauaccaug

SEQ ID NO: 1180976 - RNA, 19 nt, Artificial Sequence
  Description of Artificial Sequence: Synthetic oligonucleotide
  Sense strand starting at position 910 of SEQ ID NO: 916749
ccacauuauuaagugggaa

SEQ ID NO: 1180977 - RNA, 19 nt, Artificial Sequence
  Description of Artificial Sequence: Synthetic oligonucleotide
  Antisense strand to SEQ ID NO: 1180976
uucccacuuaauaaugugg

SEQ ID NO: 1180978 - RNA, 19 nt, Artificial Sequence
  Description of Artificial Sequence: Synthetic oligonucleotide
  Sense strand starting at position 914 of SEQ ID NO: 916749
auuauuaagugggaaagaa

SEQ ID NO: 1180979 - RNA, 19 nt, Artificial Sequence
  Description of Artificial Sequence: Synthetic oligonucleotide
  Antisense strand to SEQ ID NO: 1180978
uucuuucccacuuaauaau

SEQ ID NO: 1180980 - RNA, 19 nt, Artificial Sequence
  Description of Artificial Sequence: Synthetic oligonucleotide
  Sense strand starting at position 1019 of SEQ ID NO: 916749
cagcuaugaggccaacaga

SEQ ID NO: 1180981 - RNA, 19 nt, Artificial Sequence
  Description of Artificial Sequence: Synthetic oligonucleotide
  Antisense strand to SEQ ID NO: 1180980
ucuguuggccucauagcug

SEQ ID NO: 1180982 - RNA, 19 nt, Artificial Sequence
  Description of Artificial Sequence: Synthetic oligonucleotide
  Sense strand starting at position 1206 of SEQ ID NO: 916749
ucagcauucccagaaguuc

SEQ ID NO: 1180983 - RNA, 19 nt, Artificial Sequence
  Description of Artificial Sequence: Synthetic oligonucleotide
  Antisense strand to SEQ ID NO: 1180982
gaacuucugggaaugcuga

SEQ ID NO: 1180984 - RNA, 19 nt, Artificial Sequence
  Description of Artificial Sequence: Synthetic oligonucleotide
  Sense strand starting at position 1262 of SEQ ID NO: 916749
cuaccuuagucuucuagau

SEQ ID NO: 1180985 - RNA, 19 nt, Artificial Sequence
  Description of Artificial Sequence: Synthetic oligonucleotide
  Antisense strand to SEQ ID NO: 1180984
aucuagaagacuaagguag

SEQ ID NO: 1180986 - RNA, 19 nt, Artificial Sequence
  Description of Artificial Sequence: Synthetic oligonucleotide
  Sense strand starting at position 1372 of SEQ ID NO: 916749
auaggcacuuucccugaaa

SEQ ID NO: 1180987 - RNA, 19 nt, Artificial Sequence
  Description of Artificial Sequence: Synthetic oligonucleotide
  Antisense strand to SEQ ID NO: 1180986
uuucagggaaagugccuau

SEQ ID NO: 1180988 - RNA, 19 nt, Artificial Sequence
  Description of Artificial Sequence: Synthetic oligonucleotide
  Sense strand starting at position 2178 of SEQ ID NO: 916749
gagcaagcuccugaagaca

SEQ ID NO: 1180989 - RNA, 19 nt, Artificial Sequence
  Description of Artificial Sequence: Synthetic oligonucleotide
  Antisense strand to SEQ ID NO: 1180988
ugucuucaggagcuugcuc

SEQ ID NO: 1180990 - RNA, 19 nt, Artificial Sequence
  Description of Artificial Sequence: Synthetic oligonucleotide
  Sense strand starting at position 2210 of SEQ ID NO: 916749
ugccgacaggcguauguau

SEQ ID NO: 1180991 - RNA, 19 nt, Artificial Sequence
  Description of Artificial Sequence: Synthetic oligonucleotide
  Antisense strand to SEQ ID NO: 1180990
auacauacgccugucggca

SEQ ID NO: 1180992 - RNA, 19 nt, Artificial Sequence
  Description of Artificial Sequence: Synthetic oligonucleotide
  Sense strand starting at position 2217 of SEQ ID NO: 916749
aggcguauguauccaccaa

SEQ ID NO: 1180993 - RNA, 19 nt, Artificial Sequence
  Description of Artificial Sequence: Synthetic oligonucleotide
  Antisense strand to SEQ ID NO: 1180992
uugguggauacauacgccu

SEQ ID NO: 1180994 - RNA, 19 nt, Artificial Sequence
  Description of Artificial Sequence: Synthetic oligonucleotide
  Sense strand starting at position 2218 of SEQ ID NO: 916749
ggcguauguauccaccaau

SEQ ID NO: 1180995 - RNA, 19 nt, Artificial Sequence
  Description of Artificial Sequence: Synthetic oligonucleotide
  Antisense strand to SEQ ID NO: 1180994
auugguggauacauacgcc

SEQ ID NO: 1180996 - RNA, 19 nt, Artificial Sequence
  Description of Artificial Sequence: Synthetic oligonucleotide
  Sense strand starting at position 2302 of SEQ ID NO: 916749
gcgggucaaagugaaacuu

SEQ ID NO: 1180997 - RNA, 19 nt, Artificial Sequence
  Description of Artificial Sequence: Synthetic oligonucleotide
  Antisense strand to SEQ ID NO: 1180996
aaguuucacuuugacccgc

SEQ ID NO: 1180998 - RNA, 19 nt, Artificial Sequence
  Description of Artificial Sequence: Synthetic oligonucleotide
  Sense strand starting at position 2312 of SEQ ID NO: 916749
gugaaacuuuaaccaguac

SEQ ID NO: 1180999 - RNA, 19 nt, Artificial Sequence
  Description of Artificial Sequence: Synthetic oligonucleotide
  Antisense strand to SEQ ID NO: 1180998
guacugguuaaaguuucac

SEQ ID NO: 1181000 - RNA, 19 nt, Artificial Sequence
  Description of Artificial Sequence: Synthetic oligonucleotide
  Sense strand starting at position 2497 of SEQ ID NO: 916749
uccggagccugggaauuua

SEQ ID NO: 1181001 - RNA, 19 nt, Artificial Sequence
  Description of Artificial Sequence: Synthetic oligonucleotide
  Antisense strand to SEQ ID NO: 1181000
uaaauucccaggcuccgga

SEQ ID NO: 1181002 - RNA, 19 nt, Artificial Sequence
  Description of Artificial Sequence: Synthetic oligonucleotide
  Sense strand starting at position 2584 of SEQ ID NO: 916749
gcgggcggucugagauguu

SEQ ID NO: 1181003 - RNA, 19 nt, Artificial Sequence
  Description of Artificial Sequence: Synthetic oligonucleotide
  Antisense strand to SEQ ID NO: 1181002
aacaucucagaccgcccgc

SEQ ID NO: 1181004 - RNA, 19 nt, Artificial Sequence
  Description of Artificial Sequence: Synthetic oligonucleotide
  Sense strand starting at position 2659 of SEQ ID NO: 916749
ucagaaucguauguaaaug

SEQ ID NO: 1181005 - RNA, 19 nt, Artificial Sequence
  Description of Artificial Sequence: Synthetic oligonucleotide
  Antisense strand to SEQ ID NO: 1181004
cauuuacauacgauucuga

SEQ ID NO: 1181006 - RNA, 19 nt, Artificial Sequence
  Description of Artificial Sequence: Synthetic oligonucleotide
  Sense strand starting at position 2748 of SEQ ID NO: 916749
ugggaaaugcagugucgaa

SEQ ID NO: 1181007 - RNA, 19 nt, Artificial Sequence
  Description of Artificial Sequence: Synthetic oligonucleotide
  Antisense strand to SEQ ID NO: 1181006
uucgacacugcauuuccca

SEQ ID NO: 1181008 - RNA, 19 nt, Artificial Sequence
  Description of Artificial Sequence: Synthetic oligonucleotide
  Sense strand starting at position 2840 of SEQ ID NO: 916749
gcauauaugguguguaugu

SEQ ID NO: 1181009 - RNA, 19 nt, Artificial Sequence
  Description of Artificial Sequence: Synthetic oligonucleotide
  Antisense strand to SEQ ID NO: 1181008
acauacacaccauauaugc

SEQ ID NO: 1181010 - RNA, 19 nt, Artificial Sequence
  Description of Artificial Sequence: Synthetic oligonucleotide
  Sense strand starting at position 2895 of SEQ ID NO: 916749
ugugguauauguguguaua

SEQ ID NO: 1181011 - RNA, 19 nt, Artificial Sequence
  Description of Artificial Sequence: Synthetic oligonucleotide
  Antisense strand to SEQ ID NO: 1181010
uauacacacauauaccaca

SEQ ID NO: 1181012 - RNA, 19 nt, Artificial Sequence
  Description of Artificial Sequence: Synthetic oligonucleotide
  Sense strand starting at position 2896 of SEQ ID NO: 916749
gugguauauguguguauau

SEQ ID NO: 1181013 - RNA, 19 nt, Artificial Sequence
  Description of Artificial Sequence: Synthetic oligonucleotide
  Antisense strand to SEQ ID NO: 1181012
auauacacacauauaccac

SEQ ID NO: 1181014 - RNA, 19 nt, Artificial Sequence
  Description of Artificial Sequence: Synthetic oligonucleotide
  Sense strand starting at position 2898 of SEQ ID NO: 916749
gguauauguguguauauga

SEQ ID NO: 1181015 - RNA, 19 nt, Artificial Sequence
  Description of Artificial Sequence: Synthetic oligonucleotide
  Antisense strand to SEQ ID NO: 1181014
ucauauacacacauauacc

SEQ ID NO: 1181016 - RNA, 19 nt, Artificial Sequence
  Description of Artificial Sequence: Synthetic oligonucleotide
  Sense strand starting at position 2991 of SEQ ID NO: 916749
uuugcugguguguggagaa

SEQ ID NO: 1181017 - RNA, 19 nt, Artificial Sequence
  Description of Artificial Sequence: Synthetic oligonucleotide
  Antisense strand to SEQ ID NO: 1181016
uucuccacacaccagcaaa

SEQ ID NO: 1181018 - RNA, 19 nt, Artificial Sequence
  Description of Artificial Sequence: Synthetic oligonucleotide
  Sense strand starting at position 3016 of SEQ ID NO: 916749
guaggaaguauauaggcuu

SEQ ID NO: 1181019 - RNA, 19 nt, Artificial Sequence
  Description of Artificial Sequence: Synthetic oligonucleotide
  Antisense strand to SEQ ID NO: 1181018
aagccuauauacuuccuac

SEQ ID NO: 1181020 - RNA, 19 nt, Artificial Sequence
  Description of Artificial Sequence: Synthetic oligonucleotide
  Sense strand starting at position 3144 of SEQ ID NO: 916749
gucugaaaucaaugaucac

SEQ ID NO: 1181021 - RNA, 19 nt, Artificial Sequence
  Description of Artificial Sequence: Synthetic oligonucleotide
  Antisense strand to SEQ ID NO: 1181020
gugaucauugauuucagac

SEQ ID NO: 1181022 - RNA, 19 nt, Artificial Sequence
  Description of Artificial Sequence: Synthetic oligonucleotide
  Sense strand starting at position 338 of SEQ ID NO: 916750
guaagaaaucaguauaucg

SEQ ID NO: 1181023 - RNA, 19 nt, Artificial Sequence
  Description of Artificial Sequence: Synthetic oligonucleotide
  Antisense strand to SEQ ID NO: 1181022
cgauauacugauuucuuac

SEQ ID NO: 1181024 - RNA, 19 nt, Artificial Sequence
  Description of Artificial Sequence: Synthetic oligonucleotide
  Sense strand starting at position 718 of SEQ ID NO: 916750
acgguaucaaccuaagugu

SEQ ID NO: 1181025 - RNA, 19 nt, Artificial Sequence
  Description of Artificial Sequence: Synthetic oligonucleotide
  Antisense strand to SEQ ID NO: 1181024
acacuuagguugauaccgu

SEQ ID NO: 1181026 - RNA, 19 nt, Artificial Sequence
  Description of Artificial Sequence: Synthetic oligonucleotide
  Sense strand starting at position 732 of SEQ ID NO: 916750
aguguucaucaacgaagga

SEQ ID NO: 1181027 - RNA, 19 nt, Artificial Sequence
  Description of Artificial Sequence: Synthetic oligonucleotide
  Antisense strand to SEQ ID NO: 1181026
uccuucguugaugaacacu

SEQ ID NO: 1181028 - RNA, 19 nt, Artificial Sequence
  Description of Artificial Sequence: Synthetic oligonucleotide
  Sense strand starting at position 1082 of SEQ ID NO: 916750
acgcgauauaugcauguaa

SEQ ID NO: 1181029 - RNA, 19 nt, Artificial Sequence
  Description of Artificial Sequence: Synthetic oligonucleotide
  Antisense strand to SEQ ID NO: 1181028
uuacaugcauauaucgcgu

SEQ ID NO: 1181030 - RNA, 19 nt, Artificial Sequence
  Description of Artificial Sequence: Synthetic oligonucleotide
  Sense strand starting at position 1166 of SEQ ID NO: 916750
cuuauugaaugauuaagcu

SEQ ID NO: 1181031 - RNA, 19 nt, Artificial Sequence
  Description of Artificial Sequence: Synthetic oligonucleotide
  Antisense strand to SEQ ID NO: 1181030
agcuuaaucauucaauaag

SEQ ID NO: 1181032 - RNA, 19 nt, Artificial Sequence
  Description of Artificial Sequence: Synthetic oligonucleotide
  Sense strand starting at position 1278 of SEQ ID NO: 916750
gggcuuaucuacccaccua

SEQ ID NO: 1181033 - RNA, 19 nt, Artificial Sequence
  Description of Artificial Sequence: Synthetic oligonucleotide
  Antisense strand to SEQ ID NO: 1181032
uagguggguagauaagccc

SEQ ID NO: 1181034 - RNA, 19 nt, Artificial Sequence
  Description of Artificial Sequence: Synthetic oligonucleotide
  Sense strand starting at position 1332 of SEQ ID NO: 916750
augaaauccugugaagaga

SEQ ID NO: 1181035 - RNA, 19 nt, Artificial Sequence
  Description of Artificial Sequence: Synthetic oligonucleotide
  Antisense strand to SEQ ID NO: 1181034
ucucuucacaggauuucau

SEQ ID NO: 1181036 - RNA, 19 nt, Artificial Sequence
  Description of Artificial Sequence: Synthetic oligonucleotide
  Sense strand starting at position 1345 of SEQ ID NO: 916750
aagagaaauguacgugaaa

SEQ ID NO: 1181037 - RNA, 19 nt, Artificial Sequence
  Description of Artificial Sequence: Synthetic oligonucleotide
  Antisense strand to SEQ ID NO: 1181036
uuucacguacauuucucuu

SEQ ID NO: 1181038 - RNA, 19 nt, Artificial Sequence
  Description of Artificial Sequence: Synthetic oligonucleotide
  Sense strand starting at position 1346 of SEQ ID NO: 916750
agagaaauguacgugaaag

SEQ ID NO: 1181039 - RNA, 19 nt, Artificial Sequence
  Description of Artificial Sequence: Synthetic oligonucleotide
  Antisense strand to SEQ ID NO: 1181038
cuuucacguacauuucucu

SEQ ID NO: 1181040 - RNA, 19 nt, Artificial Sequence
  Description of Artificial Sequence: Synthetic oligonucleotide
  Sense strand starting at position 1347 of SEQ ID NO: 916750
gagaaauguacgugaaagu

SEQ ID NO: 1181041 - RNA, 19 nt, Artificial Sequence
  Description of Artificial Sequence: Synthetic oligonucleotide
  Antisense strand to SEQ ID NO: 1181040
acuuucacguacauuucuc

SEQ ID NO: 1181042 - RNA, 19 nt, Artificial Sequence
  Description of Artificial Sequence: Synthetic oligonucleotide
  Sense strand starting at position 1348 of SEQ ID NO: 916750
agaaauguacgugaaagug

SEQ ID NO: 1181043 - RNA, 19 nt, Artificial Sequence
  Description of Artificial Sequence: Synthetic oligonucleotide
  Antisense strand to SEQ ID NO: 1181042
cacuuucacguacauuucu

SEQ ID NO: 1181044 - RNA, 19 nt, Artificial Sequence
  Description of Artificial Sequence: Synthetic oligonucleotide
  Sense strand starting at position 1357 of SEQ ID NO: 916750
cgugaaaguguacaaguaa

SEQ ID NO: 1181045 - RNA, 19 nt, Artificial Sequence
  Description of Artificial Sequence: Synthetic oligonucleotide
  Antisense strand to SEQ ID NO: 1181044
uuacuuguacacuuucacg

SEQ ID NO: 1181046 - RNA, 19 nt, Artificial Sequence
  Description of Artificial Sequence: Synthetic oligonucleotide
  Sense strand starting at position 1379 of SEQ ID NO: 916750
cucguuguuacugagggua

SEQ ID NO: 1181047 - RNA, 19 nt, Artificial Sequence
  Description of Artificial Sequence: Synthetic oligonucleotide
  Antisense strand to SEQ ID NO: 1181046
uacccucaguaacaacgag

SEQ ID NO: 1181048 - RNA, 19 nt, Artificial Sequence
  Description of Artificial Sequence: Synthetic oligonucleotide
  Sense strand starting at position 1382 of SEQ ID NO: 916750
guuguuacugaggguaaga

SEQ ID NO: 1181049 - RNA, 19 nt, Artificial Sequence
  Description of Artificial Sequence: Synthetic oligonucleotide
  Antisense strand to SEQ ID NO: 1181048
ucuuacccucaguaacaac

SEQ ID NO: 1181050 - RNA, 19 nt, Artificial Sequence
  Description of Artificial Sequence: Synthetic oligonucleotide
  Sense strand starting at position 1416 of SEQ ID NO: 916750
acaagaugucauugccuug

SEQ ID NO: 1181051 - RNA, 19 nt, Artificial Sequence
  Description of Artificial Sequence: Synthetic oligonucleotide
  Antisense strand to SEQ ID NO: 1181050
caaggcaaugacaucuugu

SEQ ID NO: 1181052 - RNA, 19 nt, Artificial Sequence
  Description of Artificial Sequence: Synthetic oligonucleotide
  Sense strand starting at position 1559 of SEQ ID NO: 916750
acucguaucugacugagag

SEQ ID NO: 1181053 - RNA, 19 nt, Artificial Sequence
  Description of Artificial Sequence: Synthetic oligonucleotide
  Antisense strand to SEQ ID NO: 1181052
cucucagucagauacgagu

SEQ ID NO: 1181054 - RNA, 19 nt, Artificial Sequence
  Description of Artificial Sequence: Synthetic oligonucleotide
  Sense strand starting at position 1560 of SEQ ID NO: 916750
cucguaucugacugagaga

SEQ ID NO: 1181055 - RNA, 19 nt, Artificial Sequence
  Description of Artificial Sequence: Synthetic oligonucleotide
  Antisense strand to SEQ ID NO: 1181054
ucucucagucagauacgag

SEQ ID NO: 1181056 - RNA, 19 nt, Artificial Sequence
  Description of Artificial Sequence: Synthetic oligonucleotide
  Sense strand starting at position 1573 of SEQ ID NO: 916750
gagagacucuuguuuagga

SEQ ID NO: 1181057 - RNA, 19 nt, Artificial Sequence
  Description of Artificial Sequence: Synthetic oligonucleotide
  Antisense strand to SEQ ID NO: 1181056
uccuaaacaagagucucuc

SEQ ID NO: 1181058 - RNA, 19 nt, Artificial Sequence
  Description of Artificial Sequence: Synthetic oligonucleotide
  Sense strand starting at position 1574 of SEQ ID NO: 916750
agagacucuuguuuaggau

SEQ ID NO: 1181059 - RNA, 19 nt, Artificial Sequence
  Description of Artificial Sequence: Synthetic oligonucleotide
  Antisense strand to SEQ ID NO: 1181058
auccuaaacaagagucucu

SEQ ID NO: 1181060 - RNA, 19 nt, Artificial Sequence
  Description of Artificial Sequence: Synthetic oligonucleotide
  Sense strand starting at position 1808 of SEQ ID NO: 916750
cgaacacucugcuuccuau

SEQ ID NO: 1181061 - RNA, 19 nt, Artificial Sequence
  Description of Artificial Sequence: Synthetic oligonucleotide
  Antisense strand to SEQ ID NO: 1181060
auaggaagcagaguguucg

SEQ ID NO: 1181062 - RNA, 19 nt, Artificial Sequence
  Description of Artificial Sequence: Synthetic oligonucleotide
  Sense strand starting at position 2208 of SEQ ID NO: 916750
guacuuccugaaugcgaau

SEQ ID NO: 1181063 - RNA, 19 nt, Artificial Sequence
  Description of Artificial Sequence: Synthetic oligonucleotide
  Antisense strand to SEQ ID NO: 1181062
auucgcauucaggaaguac

SEQ ID NO: 1181064 - RNA, 19 nt, Artificial Sequence
  Description of Artificial Sequence: Synthetic oligonucleotide
  Sense strand starting at position 2222 of SEQ ID NO: 916750
cgaauuauucuuggucuca

SEQ ID NO: 1181065 - RNA, 19 nt, Artificial Sequence
  Description of Artificial Sequence: Synthetic oligonucleotide
  Antisense strand to SEQ ID NO: 1181064
ugagaccaagaauaauucg

SEQ ID NO: 1181066 - RNA, 19 nt, Artificial Sequence
  Description of Artificial Sequence: Synthetic oligonucleotide
  Sense strand starting at position 2257 of SEQ ID NO: 916750
ggcccuuggaaacgauuaa

SEQ ID NO: 1181067 - RNA, 19 nt, Artificial Sequence
  Description of Artificial Sequence: Synthetic oligonucleotide
  Antisense strand to SEQ ID NO: 1181066
uuaaucguuuccaagggcc

SEQ ID NO: 1181068 - RNA, 19 nt, Artificial Sequence
  Description of Artificial Sequence: Synthetic oligonucleotide
  Sense strand starting at position 2277 of SEQ ID NO: 916750
ugaacaaugucagcucuca

SEQ ID NO: 1181069 - RNA, 19 nt, Artificial Sequence
  Description of Artificial Sequence: Synthetic oligonucleotide
  Antisense strand to SEQ ID NO: 1181068
ugagagcugacauuguuca

SEQ ID NO: 1181070 - RNA, 19 nt, Artificial Sequence
  Description of Artificial Sequence: Synthetic oligonucleotide
  Sense strand starting at position 2463 of SEQ ID NO: 916750
augguauggucucuacugu

SEQ ID NO: 1181071 - RNA, 19 nt, Artificial Sequence
  Description of Artificial Sequence: Synthetic oligonucleotide
  Antisense strand to SEQ ID NO: 1181070
acaguagagaccauaccau

SEQ ID NO: 1181072 - RNA, 19 nt, Artificial Sequence
  Description of Artificial Sequence: Synthetic oligonucleotide
  Sense strand starting at position 2576 of SEQ ID NO: 916750
agaacuuggcauugugcua

SEQ ID NO: 1181073 - RNA, 19 nt, Artificial Sequence
  Description of Artificial Sequence: Synthetic oligonucleotide
  Antisense strand to SEQ ID NO: 1181072
uagcacaaugccaaguucu

SEQ ID NO: 1181074 - RNA, 19 nt, Artificial Sequence
  Description of Artificial Sequence: Synthetic oligonucleotide
  Sense strand starting at position 2654 of SEQ ID NO: 916750
guugcaaccggguaaugaa

SEQ ID NO: 1181075 - RNA, 19 nt, Artificial Sequence
  Description of Artificial Sequence: Synthetic oligonucleotide
  Antisense strand to SEQ ID NO: 1181074
uucauuacccgguugcaac

SEQ ID NO: 1181076 - RNA, 19 nt, Artificial Sequence
  Description of Artificial Sequence: Synthetic oligonucleotide
  Sense strand starting at position 2774 of SEQ ID NO: 916750
agcgcugugguuuaaagga

SEQ ID NO: 1181077 - RNA, 19 nt, Artificial Sequence
  Description of Artificial Sequence: Synthetic oligonucleotide
  Antisense strand to SEQ ID NO: 1181076
uccuuuaaaccacagcgcu

SEQ ID NO: 1181078 - RNA, 19 nt, Artificial Sequence
  Description of Artificial Sequence: Synthetic oligonucleotide
  Sense strand starting at position 2804 of SEQ ID NO: 916750
cugucacauugguccuuaa

SEQ ID NO: 1181079 - RNA, 19 nt, Artificial Sequence
  Description of Artificial Sequence: Synthetic oligonucleotide
  Antisense strand to SEQ ID NO: 1181078
uuaaggaccaaugugacag

SEQ ID NO: 1181080 - RNA, 19 nt, Artificial Sequence
  Description of Artificial Sequence: Synthetic oligonucleotide
  Sense strand starting at position 2875 of SEQ ID NO: 916750
gggagauguuggucaagag

SEQ ID NO: 1181081 - RNA, 19 nt, Artificial Sequence
  Description of Artificial Sequence: Synthetic oligonucleotide
  Antisense strand to SEQ ID NO: 1181080
cucuugaccaacaucuccc

SEQ ID NO: 1181082 - RNA, 19 nt, Artificial Sequence
  Description of Artificial Sequence: Synthetic oligonucleotide
  Sense strand starting at position 3294 of SEQ ID NO: 916750
gcacaugaucaagguaauu

SEQ ID NO: 1181083 - RNA, 19 nt, Artificial Sequence
  Description of Artificial Sequence: Synthetic oligonucleotide
  Antisense strand to SEQ ID NO: 1181082
aauuaccuugaucaugugc

SEQ ID NO: 1181084 - RNA, 19 nt, Artificial Sequence
  Description of Artificial Sequence: Synthetic oligonucleotide
  Sense strand starting at position 3444 of SEQ ID NO: 916750
ccaccuggccuugaacaau

SEQ ID NO: 1181085 - RNA, 19 nt, Artificial Sequence
  Description of Artificial Sequence: Synthetic oligonucleotide
  Antisense strand to SEQ ID NO: 1181084
auuguucaaggccaggugg

SEQ ID NO: 1181086 - RNA, 19 nt, Artificial Sequence
  Description of Artificial Sequence: Synthetic oligonucleotide
  Sense strand starting at position 3564 of SEQ ID NO: 916750
acagguuuauucccagauc

SEQ ID NO: 1181087 - RNA, 19 nt, Artificial Sequence
  Description of Artificial Sequence: Synthetic oligonucleotide
  Antisense strand to SEQ ID NO: 1181086
gaucugggaauaaaccugu

SEQ ID NO: 1181088 - RNA, 19 nt, Artificial Sequence
  Description of Artificial Sequence: Synthetic oligonucleotide
  Sense strand starting at position 3567 of SEQ ID NO: 916750
gguuuauucccagaucgac

SEQ ID NO: 1181089 - RNA, 19 nt, Artificial Sequence
  Description of Artificial Sequence: Synthetic oligonucleotide
  Antisense strand to SEQ ID NO: 1181088
gucgaucugggaauaaacc

SEQ ID NO: 1181090 - RNA, 19 nt, Artificial Sequence
  Description of Artificial Sequence: Synthetic oligonucleotide
  Sense strand starting at position 3612 of SEQ ID NO: 916750
aguuuauacuugguaaacu

SEQ ID NO: 1181091 - RNA, 19 nt, Artificial Sequence
  Description of Artificial Sequence: Synthetic oligonucleotide
  Antisense strand to SEQ ID NO: 1181090
aguuuaccaaguauaaacu

SEQ ID NO: 1181092 - RNA, 19 nt, Artificial Sequence
  Description of Artificial Sequence: Synthetic oligonucleotide
  Sense strand starting at position 3689 of SEQ ID NO: 916750
gugcauuuguuaucccauu

SEQ ID NO: 1181093 - RNA, 19 nt, Artificial Sequence
  Description of Artificial Sequence: Synthetic oligonucleotide
  Antisense strand to SEQ ID NO: 1181092
aaugggauaacaaaugcac

SEQ ID NO: 1181094 - RNA, 19 nt, Artificial Sequence
  Description of Artificial Sequence: Synthetic oligonucleotide
  Sense strand starting at position 3814 of SEQ ID NO: 916750
uguauaaaguacuuuagga

SEQ ID NO: 1181095 - RNA, 19 nt, Artificial Sequence
  Description of Artificial Sequence: Synthetic oligonucleotide
  Antisense strand to SEQ ID NO: 1181094
uccuaaaguacuuuauaca

SEQ ID NO: 1181096 - RNA, 19 nt, Artificial Sequence
  Description of Artificial Sequence: Synthetic oligonucleotide
  Sense strand starting at position 3906 of SEQ ID NO: 916750
cugggucuugugugaauag

SEQ ID NO: 1181097 - RNA, 19 nt, Artificial Sequence
  Description of Artificial Sequence: Synthetic oligonucleotide
  Antisense strand to SEQ ID NO: 1181096
cuauucacacaagacccag

SEQ ID NO: 1181098 - RNA, 19 nt, Artificial Sequence
  Description of Artificial Sequence: Synthetic oligonucleotide
  Sense strand starting at position 3913 of SEQ ID NO: 916750
uugugugaauaggaauuua

SEQ ID NO: 1181099 - RNA, 19 nt, Artificial Sequence
  Description of Artificial Sequence: Synthetic oligonucleotide
  Antisense strand to SEQ ID NO: 1181098
uaaauuccuauucacacaa

SEQ ID NO: 1181100 - RNA, 19 nt, Artificial Sequence
  Description of Artificial Sequence: Synthetic oligonucleotide
  Sense strand starting at position 3972 of SEQ ID NO: 916750
ucaugugaccucugaagaa

SEQ ID NO: 1181101 - RNA, 19 nt, Artificial Sequence
  Description of Artificial Sequence: Synthetic oligonucleotide
  Antisense strand to SEQ ID NO: 1181100
uucuucagaggucacauga

SEQ ID NO: 1181102 - RNA, 19 nt, Artificial Sequence
  Description of Artificial Sequence: Synthetic oligonucleotide
  Sense strand starting at position 49 of SEQ ID NO: 916751
agaaguuagagcugaauaa

SEQ ID NO: 1181103 - RNA, 19 nt, Artificial Sequence
  Description of Artificial Sequence: Synthetic oligonucleotide
  Antisense strand to SEQ ID NO: 1181102
uuauucagcucuaacuucu

SEQ ID NO: 1181104 - RNA, 19 nt, Artificial Sequence
  Description of Artificial Sequence: Synthetic oligonucleotide
  Sense strand starting at position 139 of SEQ ID NO: 916751
aguauacuuaaggguuaag

SEQ ID NO: 1181105 - RNA, 19 nt, Artificial Sequence
  Description of Artificial Sequence: Synthetic oligonucleotide
  Antisense strand to SEQ ID NO: 1181104
cuuaacccuuaaguauacu

SEQ ID NO: 1181106 - RNA, 19 nt, Artificial Sequence
  Description of Artificial Sequence: Synthetic oligonucleotide
  Sense strand starting at position 142 of SEQ ID NO: 916751
auacuuaaggguuaagcua

SEQ ID NO: 1181107 - RNA, 19 nt, Artificial Sequence
  Description of Artificial Sequence: Synthetic oligonucleotide
  Antisense strand to SEQ ID NO: 1181106
uagcuuaacccuuaaguau

SEQ ID NO: 1181108 - RNA, 19 nt, Artificial Sequence
  Description of Artificial Sequence: Synthetic oligonucleotide
  Sense strand starting at position 149 of SEQ ID NO: 916751
aggguuaagcuaugaugaa

SEQ ID NO: 1181109 - RNA, 19 nt, Artificial Sequence
  Description of Artificial Sequence: Synthetic oligonucleotide
  Antisense strand to SEQ ID NO: 1181108
uucaucauagcuuaacccu

SEQ ID NO: 1181110 - RNA, 19 nt, Artificial Sequence
  Description of Artificial Sequence: Synthetic oligonucleotide
  Sense strand starting at position 239 of SEQ ID NO: 916751
agaguauggcaguaaacau

SEQ ID NO: 1181111 - RNA, 19 nt, Artificial Sequence
  Description of Artificial Sequence: Synthetic oligonucleotide
  Antisense strand to SEQ ID NO: 1181110
auguuuacugccauacucu

SEQ ID NO: 1181112 - RNA, 19 nt, Artificial Sequence
  Description of Artificial Sequence: Synthetic oligonucleotide
  Sense strand starting at position 379 of SEQ ID NO: 916751
auuguuaugaaaggaguuu

SEQ ID NO: 1181113 - RNA, 19 nt, Artificial Sequence
  Description of Artificial Sequence: Synthetic oligonucleotide
  Antisense strand to SEQ ID NO: 1181112
aaacuccuuucauaacaau

SEQ ID NO: 1181114 - RNA, 19 nt, Artificial Sequence
  Description of Artificial Sequence: Synthetic oligonucleotide
  Sense strand starting at position 417 of SEQ ID NO: 916751
agaaguuuccagggaccca

SEQ ID NO: 1181115 - RNA, 19 nt, Artificial Sequence
  Description of Artificial Sequence: Synthetic oligonucleotide
  Antisense strand to SEQ ID NO: 1181114
ugggucccuggaaacuucu

SEQ ID NO: 1181116 - RNA, 19 nt, Artificial Sequence
  Description of Artificial Sequence: Synthetic oligonucleotide
  Sense strand starting at position 441 of SEQ ID NO: 916751
gucuguagaccauacuuua

SEQ ID NO: 1181117 - RNA, 19 nt, Artificial Sequence
  Description of Artificial Sequence: Synthetic oligonucleotide
  Antisense strand to SEQ ID NO: 1181116
uaaaguauggucuacagac

SEQ ID NO: 1181118 - RNA, 19 nt, Artificial Sequence
  Description of Artificial Sequence: Synthetic oligonucleotide
  Sense strand starting at position 463 of SEQ ID NO: 916751
acugcuguuccuuacaaag

SEQ ID NO: 1181119 - RNA, 19 nt, Artificial Sequence
  Description of Artificial Sequence: Synthetic oligonucleotide
  Antisense strand to SEQ ID NO: 1181118
cuuuguaaggaacagcagu

SEQ ID NO: 1181120 - RNA, 19 nt, Artificial Sequence
  Description of Artificial Sequence: Synthetic oligonucleotide
  Sense strand starting at position 529 of SEQ ID NO: 916751
gcauguucgaaacagaaau

SEQ ID NO: 1181121 - RNA, 19 nt, Artificial Sequence
  Description of Artificial Sequence: Synthetic oligonucleotide
  Antisense strand to SEQ ID NO: 1181120
auuucuguuucgaacaugc

SEQ ID NO: 1181122 - RNA, 19 nt, Artificial Sequence
  Description of Artificial Sequence: Synthetic oligonucleotide
  Sense strand starting at position 985 of SEQ ID NO: 916751
ugccuauuucucuggccua

SEQ ID NO: 1181123 - RNA, 19 nt, Artificial Sequence
  Description of Artificial Sequence: Synthetic oligonucleotide
  Antisense strand to SEQ ID NO: 1181122
uaggccagagaaauaggca

SEQ ID NO: 1181124 - RNA, 19 nt, Artificial Sequence
  Description of Artificial Sequence: Synthetic oligonucleotide
  Sense strand starting at position 1168 of SEQ ID NO: 916751
agugcuuuccucuuucgca

SEQ ID NO: 1181125 - RNA, 19 nt, Artificial Sequence
  Description of Artificial Sequence: Synthetic oligonucleotide
  Antisense strand to SEQ ID NO: 1181124
ugcgaaagaggaaagcacu

SEQ ID NO: 1181126 - RNA, 19 nt, Artificial Sequence
  Description of Artificial Sequence: Synthetic oligonucleotide
  Sense strand starting at position 1189 of SEQ ID NO: 916751
cucauauuucgaggcuuau

SEQ ID NO: 1181127 - RNA, 19 nt, Artificial Sequence
  Description of Artificial Sequence: Synthetic oligonucleotide
  Antisense strand to SEQ ID NO: 1181126
auaagccucgaaauaugag

SEQ ID NO: 1181128 - RNA, 19 nt, Artificial Sequence
  Description of Artificial Sequence: Synthetic oligonucleotide
  Sense strand starting at position 1340 of SEQ ID NO: 916751
auagaagaaucguuucuaa

SEQ ID NO: 1181129 - RNA, 19 nt, Artificial Sequence
  Description of Artificial Sequence: Synthetic oligonucleotide
  Antisense strand to SEQ ID NO: 1181128
uuagaaacgauucuucuau

SEQ ID NO: 1181130 - RNA, 19 nt, Artificial Sequence
  Description of Artificial Sequence: Synthetic oligonucleotide
  Sense strand starting at position 1352 of SEQ ID NO: 916751
uuucuaauaccacgaugga

SEQ ID NO: 1181131 - RNA, 19 nt, Artificial Sequence
  Description of Artificial Sequence: Synthetic oligonucleotide
  Antisense strand to SEQ ID NO: 1181130
uccaucgugguauuagaaa

SEQ ID NO: 1181132 - RNA, 19 nt, Artificial Sequence
  Description of Artificial Sequence: Synthetic oligonucleotide
  Sense strand starting at position 1383 of SEQ ID NO: 916751
ucuugagugagaugacuua

SEQ ID NO: 1181133 - RNA, 19 nt, Artificial Sequence
  Description of Artificial Sequence: Synthetic oligonucleotide
  Antisense strand to SEQ ID NO: 1181132
uaagucaucucacucaaga

SEQ ID NO: 1181134 - RNA, 19 nt, Artificial Sequence
  Description of Artificial Sequence: Synthetic oligonucleotide
  Sense strand starting at position 1430 of SEQ ID NO: 916751
ggcuguaugacucagauaa

SEQ ID NO: 1181135 - RNA, 19 nt, Artificial Sequence
  Description of Artificial Sequence: Synthetic oligonucleotide
  Antisense strand to SEQ ID NO: 1181134
uuaucugagucauacagcc

SEQ ID NO: 1181136 - RNA, 19 nt, Artificial Sequence
  Description of Artificial Sequence: Synthetic oligonucleotide
  Sense strand starting at position 1551 of SEQ ID NO: 916751
gggcgcucggugaaaugua

SEQ ID NO: 1181137 - RNA, 19 nt, Artificial Sequence
  Description of Artificial Sequence: Synthetic oligonucleotide
  Antisense strand to SEQ ID NO: 1181136
uacauuucaccgagcgccc

SEQ ID NO: 1181138 - RNA, 19 nt, Artificial Sequence
  Description of Artificial Sequence: Synthetic oligonucleotide
  Sense strand starting at position 1692 of SEQ ID NO: 916751
gagacuggguucuugauaa

SEQ ID NO: 1181139 - RNA, 19 nt, Artificial Sequence
  Description of Artificial Sequence: Synthetic oligonucleotide
  Antisense strand to SEQ ID NO: 1181138
uuaucaagaacccagucuc

SEQ ID NO: 1181140 - RNA, 19 nt, Artificial Sequence
  Description of Artificial Sequence: Synthetic oligonucleotide
  Sense strand starting at position 1704 of SEQ ID NO: 916751
uugauaaccguccauccua

SEQ ID NO: 1181141 - RNA, 19 nt, Artificial Sequence
  Description of Artificial Sequence: Synthetic oligonucleotide
  Antisense strand to SEQ ID NO: 1181140
uaggauggacgguuaucaa

SEQ ID NO: 1181142 - RNA, 19 nt, Artificial Sequence
  Description of Artificial Sequence: Synthetic oligonucleotide
  Sense strand starting at position 2198 of SEQ ID NO: 916751
gggcacuuggacugagaaa

SEQ ID NO: 1181143 - RNA, 19 nt, Artificial Sequence
  Description of Artificial Sequence: Synthetic oligonucleotide
  Antisense strand to SEQ ID NO: 1181142
uuucucaguccaagugccc

SEQ ID NO: 1181144 - RNA, 19 nt, Artificial Sequence
  Description of Artificial Sequence: Synthetic oligonucleotide
  Sense strand starting at position 2243 of SEQ ID NO: 916751
aaaggauguggcgaaucua

SEQ ID NO: 1181145 - RNA, 19 nt, Artificial Sequence
  Description of Artificial Sequence: Synthetic oligonucleotide
  Antisense strand to SEQ ID NO: 1181144
uagauucgccacauccuuu

SEQ ID NO: 1181146 - RNA, 19 nt, Artificial Sequence
  Description of Artificial Sequence: Synthetic oligonucleotide
  Sense strand starting at position 2419 of SEQ ID NO: 916751
ccguuacagagggauuagu

SEQ ID NO: 1181147 - RNA, 19 nt, Artificial Sequence
  Description of Artificial Sequence: Synthetic oligonucleotide
  Antisense strand to SEQ ID NO: 1181146
acuaaucccucuguaacgg

SEQ ID NO: 1181148 - RNA, 19 nt, Artificial Sequence
  Description of Artificial Sequence: Synthetic oligonucleotide
  Sense strand starting at position 2565 of SEQ ID NO: 916751
ugggaaaccuuccuggauu

SEQ ID NO: 1181149 - RNA, 19 nt, Artificial Sequence
  Description of Artificial Sequence: Synthetic oligonucleotide
  Antisense strand to SEQ ID NO: 1181148
aauccaggaagguuuccca

SEQ ID NO: 1181150 - RNA, 19 nt, Artificial Sequence
  Description of Artificial Sequence: Synthetic oligonucleotide
  Sense strand starting at position 2690 of SEQ ID NO: 916751
aauguugaaccagagcuuu

SEQ ID NO: 1181151 - RNA, 19 nt, Artificial Sequence
  Description of Artificial Sequence: Synthetic oligonucleotide
  Antisense strand to SEQ ID NO: 1181150
aaagcucugguucaacauu

SEQ ID NO: 1181152 - RNA, 19 nt, Artificial Sequence
  Description of Artificial Sequence: Synthetic oligonucleotide
  Sense strand starting at position 2760 of SEQ ID NO: 916751
ugcauuuaucagugguuga

SEQ ID NO: 1181153 - RNA, 19 nt, Artificial Sequence
  Description of Artificial Sequence: Synthetic oligonucleotide
  Antisense strand to SEQ ID NO: 1181152
ucaaccacugauaaaugca

SEQ ID NO: 1181154 - RNA, 19 nt, Artificial Sequence
  Description of Artificial Sequence: Synthetic oligonucleotide
  Sense strand starting at position 2761 of SEQ ID NO: 916751
gcauuuaucagugguugau

SEQ ID NO: 1181155 - RNA, 19 nt, Artificial Sequence
  Description of Artificial Sequence: Synthetic oligonucleotide
  Antisense strand to SEQ ID NO: 1181154
aucaaccacugauaaaugc

SEQ ID NO: 1181156 - RNA, 19 nt, Artificial Sequence
  Description of Artificial Sequence: Synthetic oligonucleotide
  Sense strand starting at position 3083 of SEQ ID NO: 916751
uugcauuauggugaaauag

SEQ ID NO: 1181157 - RNA, 19 nt, Artificial Sequence
  Description of Artificial Sequence: Synthetic oligonucleotide
  Antisense strand to SEQ ID NO: 1181156
cuauuucaccauaaugcaa

SEQ ID NO: 1181158 - RNA, 19 nt, Artificial Sequence
  Description of Artificial Sequence: Synthetic oligonucleotide
  Sense strand starting at position 3311 of SEQ ID NO: 916751
auuuauuaguucuugccau

SEQ ID NO: 1181159 - RNA, 19 nt, Artificial Sequence
  Description of Artificial Sequence: Synthetic oligonucleotide
  Antisense strand to SEQ ID NO: 1181158
auggcaagaacuaauaaau

SEQ ID NO: 1181160 - RNA, 19 nt, Artificial Sequence
  Description of Artificial Sequence: Synthetic oligonucleotide
  Sense strand starting at position 3407 of SEQ ID NO: 916751
uaagaaauagagcgugaua

SEQ ID NO: 1181161 - RNA, 19 nt, Artificial Sequence
  Description of Artificial Sequence: Synthetic oligonucleotide
  Antisense strand to SEQ ID NO: 1181160
uaucacgcucuauuucuua

SEQ ID NO: 1181162 - RNA, 19 nt, Artificial Sequence
  Description of Artificial Sequence: Synthetic oligonucleotide
  Sense strand starting at position 3409 of SEQ ID NO: 916751
agaaauagagcgugauaag

SEQ ID NO: 1181163 - RNA, 19 nt, Artificial Sequence
  Description of Artificial Sequence: Synthetic oligonucleotide
  Antisense strand to SEQ ID NO: 1181162
cuuaucacgcucuauuucu

SEQ ID NO: 1181164 - RNA, 19 nt, Artificial Sequence
  Description of Artificial Sequence: Synthetic oligonucleotide
  Sense strand starting at position 3410 of SEQ ID NO: 916751
gaaauagagcgugauaagu

SEQ ID NO: 1181165 - RNA, 19 nt, Artificial Sequence
  Description of Artificial Sequence: Synthetic oligonucleotide
  Antisense strand to SEQ ID NO: 1181164
acuuaucacgcucuauuuc

SEQ ID NO: 1181166 - RNA, 19 nt, Artificial Sequence
  Description of Artificial Sequence: Synthetic oligonucleotide
  Sense strand starting at position 3494 of SEQ ID NO: 916751
uuggauaagucuuccuaga

SEQ ID NO: 1181167 - RNA, 19 nt, Artificial Sequence
  Description of Artificial Sequence: Synthetic oligonucleotide
  Antisense strand to SEQ ID NO: 1181166
ucuaggaagacuuauccaa

SEQ ID NO: 1181168 - RNA, 19 nt, Artificial Sequence
  Description of Artificial Sequence: Synthetic oligonucleotide
  Sense strand starting at position 3496 of SEQ ID NO: 916751
ggauaagucuuccuagagg

SEQ ID NO: 1181169 - RNA, 19 nt, Artificial Sequence
  Description of Artificial Sequence: Synthetic oligonucleotide
  Antisense strand to SEQ ID NO: 1181168
ccucuaggaagacuuaucc

SEQ ID NO: 1181170 - RNA, 19 nt, Artificial Sequence
  Description of Artificial Sequence: Synthetic oligonucleotide
  Sense strand starting at position 3505 of SEQ ID NO: 916751
uuccuagaggcuuaacuga

SEQ ID NO: 1181171 - RNA, 19 nt, Artificial Sequence
  Description of Artificial Sequence: Synthetic oligonucleotide
  Antisense strand to SEQ ID NO: 1181170
ucaguuaagccucuaggaa

SEQ ID NO: 1181172 - RNA, 19 nt, Artificial Sequence
  Description of Artificial Sequence: Synthetic oligonucleotide
  Sense strand starting at position 3571 of SEQ ID NO: 916751
gagugcucuaggcaaagga

SEQ ID NO: 1181173 - RNA, 19 nt, Artificial Sequence
  Description of Artificial Sequence: Synthetic oligonucleotide
  Antisense strand to SEQ ID NO: 1181172
uccuuugccuagagcacuc

SEQ ID NO: 1181174 - RNA, 19 nt, Artificial Sequence
  Description of Artificial Sequence: Synthetic oligonucleotide
  Sense strand starting at position 3623 of SEQ ID NO: 916751
aaguuugguguugacagaa

SEQ ID NO: 1181175 - RNA, 19 nt, Artificial Sequence
  Description of Artificial Sequence: Synthetic oligonucleotide
  Antisense strand to SEQ ID NO: 1181174
uucugucaacaccaaacuu

SEQ ID NO: 1181176 - RNA, 19 nt, Artificial Sequence
  Description of Artificial Sequence: Synthetic oligonucleotide
  Sense strand starting at position 3734 of SEQ ID NO: 916751
uguuguaaacugggauaaa

SEQ ID NO: 1181177 - RNA, 19 nt, Artificial Sequence
  Description of Artificial Sequence: Synthetic oligonucleotide
  Antisense strand to SEQ ID NO: 1181176
uuuaucccaguuuacaaca

SEQ ID NO: 1181178 - RNA, 19 nt, Artificial Sequence
  Description of Artificial Sequence: Synthetic oligonucleotide
  Sense strand starting at position 3767 of SEQ ID NO: 916751
uccugagagcaauggaaug

SEQ ID NO: 1181179 - RNA, 19 nt, Artificial Sequence
  Description of Artificial Sequence: Synthetic oligonucleotide
  Antisense strand to SEQ ID NO: 1181178
cauuccauugcucucagga

SEQ ID NO: 1181180 - RNA, 19 nt, Artificial Sequence
  Description of Artificial Sequence: Synthetic oligonucleotide
  Sense strand starting at position 3925 of SEQ ID NO: 916751
caguuacaaggcugaugaa

SEQ ID NO: 1181181 - RNA, 19 nt, Artificial Sequence
  Description of Artificial Sequence: Synthetic oligonucleotide
  Antisense strand to SEQ ID NO: 1181180
uucaucagccuuguaacug

SEQ ID NO: 1181182 - RNA, 19 nt, Artificial Sequence
  Description of Artificial Sequence: Synthetic oligonucleotide
  Sense strand starting at position 263 of SEQ ID NO: 916752
ucaucugaguauccuagua

SEQ ID NO: 1181183 - RNA, 19 nt, Artificial Sequence
  Description of Artificial Sequence: Synthetic oligonucleotide
  Antisense strand to SEQ ID NO: 1181182
uacuaggauacucagauga

SEQ ID NO: 1181184 - RNA, 19 nt, Artificial Sequence
  Description of Artificial Sequence: Synthetic oligonucleotide
  Sense strand starting at position 276 of SEQ ID NO: 916752
cuaguauacuaauuagguu

SEQ ID NO: 1181185 - RNA, 19 nt, Artificial Sequence
  Description of Artificial Sequence: Synthetic oligonucleotide
  Antisense strand to SEQ ID NO: 1181184
aaccuaauuaguauacuag

SEQ ID NO: 1181186 - RNA, 19 nt, Artificial Sequence
  Description of Artificial Sequence: Synthetic oligonucleotide
  Sense strand starting at position 431 of SEQ ID NO: 916752
gaacuugggaggugucuua

SEQ ID NO: 1181187 - RNA, 19 nt, Artificial Sequence
  Description of Artificial Sequence: Synthetic oligonucleotide
  Antisense strand to SEQ ID NO: 1181186
uaagacaccucccaaguuc

SEQ ID NO: 1181188 - RNA, 19 nt, Artificial Sequence
  Description of Artificial Sequence: Synthetic oligonucleotide
  Sense strand starting at position 564 of SEQ ID NO: 916752
cucaguucuggugaggguu

SEQ ID NO: 1181189 - RNA, 19 nt, Artificial Sequence
  Description of Artificial Sequence: Synthetic oligonucleotide
  Antisense strand to SEQ ID NO: 1181188
aacccucaccagaacugag

SEQ ID NO: 1181190 - RNA, 19 nt, Artificial Sequence
  Description of Artificial Sequence: Synthetic oligonucleotide
  Sense strand starting at position 662 of SEQ ID NO: 916752
gaguccuggcuuuacaaca

SEQ ID NO: 1181191 - RNA, 19 nt, Artificial Sequence
  Description of Artificial Sequence: Synthetic oligonucleotide
  Antisense strand to SEQ ID NO: 1181190
uguuguaaagccaggacuc

SEQ ID NO: 1181192 - RNA, 19 nt, Artificial Sequence
  Description of Artificial Sequence: Synthetic oligonucleotide
  Sense strand starting at position 737 of SEQ ID NO: 916752
gugagaacucacuacugua

SEQ ID NO: 1181193 - RNA, 19 nt, Artificial Sequence
  Description of Artificial Sequence: Synthetic oligonucleotide
  Antisense strand to SEQ ID NO: 1181192
uacaguagugaguucucac

SEQ ID NO: 1181194 - RNA, 19 nt, Artificial Sequence
  Description of Artificial Sequence: Synthetic oligonucleotide
  Sense strand starting at position 958 of SEQ ID NO: 916752
gcuauugugcuagaauaaa

SEQ ID NO: 1181195 - RNA, 19 nt, Artificial Sequence
  Description of Artificial Sequence: Synthetic oligonucleotide
  Antisense strand to SEQ ID NO: 1181194
uuuauucuagcacaauagc

SEQ ID NO: 1181196 - RNA, 19 nt, Artificial Sequence
  Description of Artificial Sequence: Synthetic oligonucleotide
  Sense strand starting at position 1027 of SEQ ID NO: 916752
agauuaucagagugcuuaa

SEQ ID NO: 1181197 - RNA, 19 nt, Artificial Sequence
  Description of Artificial Sequence: Synthetic oligonucleotide
  Antisense strand to SEQ ID NO: 1181196
uuaagcacucugauaaucu

SEQ ID NO: 1181198 - RNA, 19 nt, Artificial Sequence
  Description of Artificial Sequence: Synthetic oligonucleotide
  Sense strand starting at position 1053 of SEQ ID NO: 916752
cuggauaaaugccuagaua

SEQ ID NO: 1181199 - RNA, 19 nt, Artificial Sequence
  Description of Artificial Sequence: Synthetic oligonucleotide
  Antisense strand to SEQ ID NO: 1181198
uaucuaggcauuuauccag

SEQ ID NO: 1181200 - RNA, 19 nt, Artificial Sequence
  Description of Artificial Sequence: Synthetic oligonucleotide
  Sense strand starting at position 1066 of SEQ ID NO: 916752
uagauauuguaucugagau

SEQ ID NO: 1181201 - RNA, 19 nt, Artificial Sequence
  Description of Artificial Sequence: Synthetic oligonucleotide
  Antisense strand to SEQ ID NO: 1181200
aucucagauacaauaucua

SEQ ID NO: 1181202 - RNA, 19 nt, Artificial Sequence
  Description of Artificial Sequence: Synthetic oligonucleotide
  Sense strand starting at position 1165 of SEQ ID NO: 916752
ucugguaguuaucuccaaa

SEQ ID NO: 1181203 - RNA, 19 nt, Artificial Sequence
  Description of Artificial Sequence: Synthetic oligonucleotide
  Antisense strand to SEQ ID NO: 1181202
uuuggagauaacuaccaga

SEQ ID NO: 1181204 - RNA, 19 nt, Artificial Sequence
  Description of Artificial Sequence: Synthetic oligonucleotide
  Sense strand starting at position 1168 of SEQ ID NO: 916752
gguaguuaucuccaaaucu

SEQ ID NO: 1181205 - RNA, 19 nt, Artificial Sequence
  Description of Artificial Sequence: Synthetic oligonucleotide
  Antisense strand to SEQ ID NO: 1181204
agauuuggagauaacuacc

SEQ ID NO: 1181206 - RNA, 19 nt, Artificial Sequence
  Description of Artificial Sequence: Synthetic oligonucleotide
  Sense strand starting at position 1416 of SEQ ID NO: 916752
acaugugcucgguuagcua

SEQ ID NO: 1181207 - RNA, 19 nt, Artificial Sequence
  Description of Artificial Sequence: Synthetic oligonucleotide
  Antisense strand to SEQ ID NO: 1181206
uagcuaaccgagcacaugu

SEQ ID NO: 1181208 - RNA, 19 nt, Artificial Sequence
  Description of Artificial Sequence: Synthetic oligonucleotide
  Sense strand starting at position 1538 of SEQ ID NO: 916752
aucugaaucuguguuagga

SEQ ID NO: 1181209 - RNA, 19 nt, Artificial Sequence
  Description of Artificial Sequence: Synthetic oligonucleotide
  Antisense strand to SEQ ID NO: 1181208
uccuaacacagauucagau

SEQ ID NO: 1181210 - RNA, 19 nt, Artificial Sequence
  Description of Artificial Sequence: Synthetic oligonucleotide
  Sense strand starting at position 1553 of SEQ ID NO: 916752
aggacaguauuuccgugua

SEQ ID NO: 1181211 - RNA, 19 nt, Artificial Sequence
  Description of Artificial Sequence: Synthetic oligonucleotide
  Antisense strand to SEQ ID NO: 1181210
uacacggaaauacuguccu

SEQ ID NO: 1181212 - RNA, 19 nt, Artificial Sequence
  Description of Artificial Sequence: Synthetic oligonucleotide
  Sense strand starting at position 1555 of SEQ ID NO: 916752
gacaguauuuccguguaua

SEQ ID NO: 1181213 - RNA, 19 nt, Artificial Sequence
  Description of Artificial Sequence: Synthetic oligonucleotide
  Antisense strand to SEQ ID NO: 1181212
uauacacggaaauacuguc

SEQ ID NO: 1181214 - RNA, 19 nt, Artificial Sequence
  Description of Artificial Sequence: Synthetic oligonucleotide
  Sense strand starting at position 1556 of SEQ ID NO: 916752
acaguauuuccguguauaa

SEQ ID NO: 1181215 - RNA, 19 nt, Artificial Sequence
  Description of Artificial Sequence: Synthetic oligonucleotide
  Antisense strand to SEQ ID NO: 1181214
uuauacacggaaauacugu

SEQ ID NO: 1181216 - RNA, 19 nt, Artificial Sequence
  Description of Artificial Sequence: Synthetic oligonucleotide
  Sense strand starting at position 1678 of SEQ ID NO: 916752
aguagaaugaauugccuga

SEQ ID NO: 1181217 - RNA, 19 nt, Artificial Sequence
  Description of Artificial Sequence: Synthetic oligonucleotide
  Antisense strand to SEQ ID NO: 1181216
ucaggcaauucauucuacu

SEQ ID NO: 1181218 - RNA, 19 nt, Artificial Sequence
  Description of Artificial Sequence: Synthetic oligonucleotide
  Sense strand starting at position 1740 of SEQ ID NO: 916752
auugacuccuaguugaauu

SEQ ID NO: 1181219 - RNA, 19 nt, Artificial Sequence
  Description of Artificial Sequence: Synthetic oligonucleotide
  Antisense strand to SEQ ID NO: 1181218
aauucaacuaggagucaau

SEQ ID NO: 1181220 - RNA, 19 nt, Artificial Sequence
  Description of Artificial Sequence: Synthetic oligonucleotide
  Sense strand starting at position 1804 of SEQ ID NO: 916752
ucacgagucagaugagaaa

SEQ ID NO: 1181221 - RNA, 19 nt, Artificial Sequence
  Description of Artificial Sequence: Synthetic oligonucleotide
  Antisense strand to SEQ ID NO: 1181220
uuucucaucugacucguga

SEQ ID NO: 1181222 - RNA, 19 nt, Artificial Sequence
  Description of Artificial Sequence: Synthetic oligonucleotide
  Sense strand starting at position 1915 of SEQ ID NO: 916752
aacaguugguagucauaug

SEQ ID NO: 1181223 - RNA, 19 nt, Artificial Sequence
  Description of Artificial Sequence: Synthetic oligonucleotide
  Antisense strand to SEQ ID NO: 1181222
cauaugacuaccaacuguu

SEQ ID NO: 1181224 - RNA, 19 nt, Artificial Sequence
  Description of Artificial Sequence: Synthetic oligonucleotide
  Sense strand starting at position 1916 of SEQ ID NO: 916752
acaguugguagucauaugu

SEQ ID NO: 1181225 - RNA, 19 nt, Artificial Sequence
  Description of Artificial Sequence: Synthetic oligonucleotide
  Antisense strand to SEQ ID NO: 1181224
acauaugacuaccaacugu

SEQ ID NO: 1181226 - RNA, 19 nt, Artificial Sequence
  Description of Artificial Sequence: Synthetic oligonucleotide
  Sense strand starting at position 1922 of SEQ ID NO: 916752
gguagucauaugugggaag

SEQ ID NO: 1181227 - RNA, 19 nt, Artificial Sequence
  Description of Artificial Sequence: Synthetic oligonucleotide
  Antisense strand to SEQ ID NO: 1181226
cuucccacauaugacuacc

SEQ ID NO: 1181228 - RNA, 19 nt, Artificial Sequence
  Description of Artificial Sequence: Synthetic oligonucleotide
  Sense strand starting at position 1924 of SEQ ID NO: 916752
uagucauaugugggaagua

SEQ ID NO: 1181229 - RNA, 19 nt, Artificial Sequence
  Description of Artificial Sequence: Synthetic oligonucleotide
  Antisense strand to SEQ ID NO: 1181228
uacuucccacauaugacua

SEQ ID NO: 1181230 - RNA, 19 nt, Artificial Sequence
  Description of Artificial Sequence: Synthetic oligonucleotide
  Sense strand starting at position 2043 of SEQ ID NO: 916752
gaaacuggugagugaauga

SEQ ID NO: 1181231 - RNA, 19 nt, Artificial Sequence
  Description of Artificial Sequence: Synthetic oligonucleotide
  Antisense strand to SEQ ID NO: 1181230
ucauucacucaccaguuuc

SEQ ID NO: 1181232 - RNA, 19 nt, Artificial Sequence
  Description of Artificial Sequence: Synthetic oligonucleotide
  Sense strand starting at position 2078 of SEQ ID NO: 916752
gcgacugcaauuuguuaau

SEQ ID NO: 1181233 - RNA, 19 nt, Artificial Sequence
  Description of Artificial Sequence: Synthetic oligonucleotide
  Antisense strand to SEQ ID NO: 1181232
auuaacaaauugcagucgc

SEQ ID NO: 1181234 - RNA, 19 nt, Artificial Sequence
  Description of Artificial Sequence: Synthetic oligonucleotide
  Sense strand starting at position 2111 of SEQ ID NO: 916752
guauaaagugguuaauuac

SEQ ID NO: 1181235 - RNA, 19 nt, Artificial Sequence
  Description of Artificial Sequence: Synthetic oligonucleotide
  Antisense strand to SEQ ID NO: 1181234
guaauuaaccacuuuauac

SEQ ID NO: 1181236 - RNA, 19 nt, Artificial Sequence
  Description of Artificial Sequence: Synthetic oligonucleotide
  Sense strand starting at position 2241 of SEQ ID NO: 916752
cuuacuuucuugguuuaga

SEQ ID NO: 1181237 - RNA, 19 nt, Artificial Sequence
  Description of Artificial Sequence: Synthetic oligonucleotide
  Antisense strand to SEQ ID NO: 1181236
ucuaaaccaagaaaguaag

SEQ ID NO: 1181238 - RNA, 19 nt, Artificial Sequence
  Description of Artificial Sequence: Synthetic oligonucleotide
  Sense strand starting at position 2242 of SEQ ID NO: 916752
uuacuuucuugguuuagag

SEQ ID NO: 1181239 - RNA, 19 nt, Artificial Sequence
  Description of Artificial Sequence: Synthetic oligonucleotide
  Antisense strand to SEQ ID NO: 1181238
cucuaaaccaagaaaguaa

SEQ ID NO: 1181240 - RNA, 19 nt, Artificial Sequence
  Description of Artificial Sequence: Synthetic oligonucleotide
  Sense strand starting at position 2244 of SEQ ID NO: 916752
acuuucuugguuuagagau

SEQ ID NO: 1181241 - RNA, 19 nt, Artificial Sequence
  Description of Artificial Sequence: Synthetic oligonucleotide
  Antisense strand to SEQ ID NO: 1181240
aucucuaaaccaagaaagu

SEQ ID NO: 1181242 - RNA, 19 nt, Artificial Sequence
  Description of Artificial Sequence: Synthetic oligonucleotide
  Sense strand starting at position 2250 of SEQ ID NO: 916752
uugguuuagagauagcuua

SEQ ID NO: 1181243 - RNA, 19 nt, Artificial Sequence
  Description of Artificial Sequence: Synthetic oligonucleotide
  Antisense strand to SEQ ID NO: 1181242
uaagcuaucucuaaaccaa

SEQ ID NO: 1181244 - RNA, 19 nt, Artificial Sequence
  Description of Artificial Sequence: Synthetic oligonucleotide
  Sense strand starting at position 2257 of SEQ ID NO: 916752
agagauagcuuaucuacau

SEQ ID NO: 1181245 - RNA, 19 nt, Artificial Sequence
  Description of Artificial Sequence: Synthetic oligonucleotide
  Antisense strand to SEQ ID NO: 1181244
auguagauaagcuaucucu

SEQ ID NO: 1181246 - RNA, 19 nt, Artificial Sequence
  Description of Artificial Sequence: Synthetic oligonucleotide
  Sense strand starting at position 2354 of SEQ ID NO: 916752
cugcgagucugcacgagaa

SEQ ID NO: 1181247 - RNA, 19 nt, Artificial Sequence
  Description of Artificial Sequence: Synthetic oligonucleotide
  Antisense strand to SEQ ID NO: 1181246
uucucgugcagacucgcag

SEQ ID NO: 1181248 - RNA, 19 nt, Artificial Sequence
  Description of Artificial Sequence: Synthetic oligonucleotide
  Sense strand starting at position 2415 of SEQ ID NO: 916752
gcugucggaggcuaaauaa

SEQ ID NO: 1181249 - RNA, 19 nt, Artificial Sequence
  Description of Artificial Sequence: Synthetic oligonucleotide
  Antisense strand to SEQ ID NO: 1181248
uuauuuagccuccgacagc

SEQ ID NO: 1181250 - RNA, 19 nt, Artificial Sequence
  Description of Artificial Sequence: Synthetic oligonucleotide
  Sense strand starting at position 2579 of SEQ ID NO: 916752
cgagucucaggucagaaga

SEQ ID NO: 1181251 - RNA, 19 nt, Artificial Sequence
  Description of Artificial Sequence: Synthetic oligonucleotide
  Antisense strand to SEQ ID NO: 1181250
ucuucugaccugagacucg

SEQ ID NO: 1181252 - RNA, 19 nt, Artificial Sequence
  Description of Artificial Sequence: Synthetic oligonucleotide
  Sense strand starting at position 2642 of SEQ ID NO: 916752
accagcuuucuugggacaa

SEQ ID NO: 1181253 - RNA, 19 nt, Artificial Sequence
  Description of Artificial Sequence: Synthetic oligonucleotide
  Antisense strand to SEQ ID NO: 1181252
uugucccaagaaagcuggu

SEQ ID NO: 1181254 - RNA, 19 nt, Artificial Sequence
  Description of Artificial Sequence: Synthetic oligonucleotide
  Sense strand starting at position 2949 of SEQ ID NO: 916752
cucuguuucggugcuaauc

SEQ ID NO: 1181255 - RNA, 19 nt, Artificial Sequence
  Description of Artificial Sequence: Synthetic oligonucleotide
  Antisense strand to SEQ ID NO: 1181254
gauuagcaccgaaacagag

SEQ ID NO: 1181256 - RNA, 19 nt, Artificial Sequence
  Description of Artificial Sequence: Synthetic oligonucleotide
  Sense strand starting at position 3740 of SEQ ID NO: 916752
ggaucuuuggguuagguga

SEQ ID NO: 1181257 - RNA, 19 nt, Artificial Sequence
  Description of Artificial Sequence: Synthetic oligonucleotide
  Antisense strand to SEQ ID NO: 1181256
ucaccuaacccaaagaucc

SEQ ID NO: 1181258 - RNA, 19 nt, Artificial Sequence
  Description of Artificial Sequence: Synthetic oligonucleotide
  Sense strand starting at position 3791 of SEQ ID NO: 916752
uuucgaugaaauggugaga

SEQ ID NO: 1181259 - RNA, 19 nt, Artificial Sequence
  Description of Artificial Sequence: Synthetic oligonucleotide
  Antisense strand to SEQ ID NO: 1181258
ucucaccauuucaucgaaa

SEQ ID NO: 1181260 - RNA, 19 nt, Artificial Sequence
  Description of Artificial Sequence: Synthetic oligonucleotide
  Sense strand starting at position 3973 of SEQ ID NO: 916752
cuuacuuuggcucagguaa

SEQ ID NO: 1181261 - RNA, 19 nt, Artificial Sequence
  Description of Artificial Sequence: Synthetic oligonucleotide
  Antisense strand to SEQ ID NO: 1181260
uuaccugagccaaaguaag

SEQ ID NO: 1181262 - RNA, 19 nt, Artificial Sequence
  Description of Artificial Sequence: Synthetic oligonucleotide
  Sense strand starting at position 94 of SEQ ID NO: 916753
cggagucugcgguauggau

SEQ ID NO: 1181263 - RNA, 19 nt, Artificial Sequence
  Description of Artificial Sequence: Synthetic oligonucleotide
  Antisense strand to SEQ ID NO: 1181262
auccauaccgcagacuccg

SEQ ID NO: 1181264 - RNA, 19 nt, Artificial Sequence
  Description of Artificial Sequence: Synthetic oligonucleotide
  Sense strand starting at position 117 of SEQ ID NO: 916753
gcuuuccaggcacaugaau

SEQ ID NO: 1181265 - RNA, 19 nt, Artificial Sequence
  Description of Artificial Sequence: Synthetic oligonucleotide
  Antisense strand to SEQ ID NO: 1181264
auucaugugccuggaaagc

SEQ ID NO: 1181266 - RNA, 19 nt, Artificial Sequence
  Description of Artificial Sequence: Synthetic oligonucleotide
  Sense strand starting at position 345 of SEQ ID NO: 916753
cccagaaccuuuguuuaug

SEQ ID NO: 1181267 - RNA, 19 nt, Artificial Sequence
  Description of Artificial Sequence: Synthetic oligonucleotide
  Antisense strand to SEQ ID NO: 1181266
cauaaacaaagguucuggg

SEQ ID NO: 1181268 - RNA, 19 nt, Artificial Sequence
  Description of Artificial Sequence: Synthetic oligonucleotide
  Sense strand starting at position 346 of SEQ ID NO: 916753
ccagaaccuuuguuuaugu

SEQ ID NO: 1181269 - RNA, 19 nt, Artificial Sequence
  Description of Artificial Sequence: Synthetic oligonucleotide
  Antisense strand to SEQ ID NO: 1181268
acauaaacaaagguucugg

SEQ ID NO: 1181270 - RNA, 19 nt, Artificial Sequence
  Description of Artificial Sequence: Synthetic oligonucleotide
  Sense strand starting at position 355 of SEQ ID NO: 916753
uuguuuauguggguucuau

SEQ ID NO: 1181271 - RNA, 19 nt, Artificial Sequence
  Description of Artificial Sequence: Synthetic oligonucleotide
  Antisense strand to SEQ ID NO: 1181270
auagaacccacauaaacaa

SEQ ID NO: 1181272 - RNA, 19 nt, Artificial Sequence
  Description of Artificial Sequence: Synthetic oligonucleotide
  Sense strand starting at position 363 of SEQ ID NO: 916753
guggguucuauguauccua

SEQ ID NO: 1181273 - RNA, 19 nt, Artificial Sequence
  Description of Artificial Sequence: Synthetic oligonucleotide
  Antisense strand to SEQ ID NO: 1181272
uaggauacauagaacccac

SEQ ID NO: 1181274 - RNA, 19 nt, Artificial Sequence
  Description of Artificial Sequence: Synthetic oligonucleotide
  Sense strand starting at position 366 of SEQ ID NO: 916753
gguucuauguauccuauua

SEQ ID NO: 1181275 - RNA, 19 nt, Artificial Sequence
  Description of Artificial Sequence: Synthetic oligonucleotide
  Antisense strand to SEQ ID NO: 1181274
uaauaggauacauagaacc

SEQ ID NO: 1181276 - RNA, 19 nt, Artificial Sequence
  Description of Artificial Sequence: Synthetic oligonucleotide
  Sense strand starting at position 419 of SEQ ID NO: 916753
gccauuaggcaucauagca

SEQ ID NO: 1181277 - RNA, 19 nt, Artificial Sequence
  Description of Artificial Sequence: Synthetic oligonucleotide
  Antisense strand to SEQ ID NO: 1181276
ugcuaugaugccuaauggc

SEQ ID NO: 1181278 - RNA, 19 nt, Artificial Sequence
  Description of Artificial Sequence: Synthetic oligonucleotide
  Sense strand starting at position 427 of SEQ ID NO: 916753
gcaucauagcagugacauc

SEQ ID NO: 1181279 - RNA, 19 nt, Artificial Sequence
  Description of Artificial Sequence: Synthetic oligonucleotide
  Antisense strand to SEQ ID NO: 1181278
gaugucacugcuaugaugc

SEQ ID NO: 1181280 - RNA, 19 nt, Artificial Sequence
  Description of Artificial Sequence: Synthetic oligonucleotide
  Sense strand starting at position 668 of SEQ ID NO: 916753
gccuccagaucuguaaaug

SEQ ID NO: 1181281 - RNA, 19 nt, Artificial Sequence
  Description of Artificial Sequence: Synthetic oligonucleotide
  Antisense strand to SEQ ID NO: 1181280
cauuuacagaucuggaggc

SEQ ID NO: 1181282 - RNA, 19 nt, Artificial Sequence
  Description of Artificial Sequence: Synthetic oligonucleotide
  Sense strand starting at position 679 of SEQ ID NO: 916753
uguaaaugacgucagcaca

SEQ ID NO: 1181283 - RNA, 19 nt, Artificial Sequence
  Description of Artificial Sequence: Synthetic oligonucleotide
  Antisense strand to SEQ ID NO: 1181282
ugugcugacgucauuuaca

SEQ ID NO: 1181284 - RNA, 19 nt, Artificial Sequence
  Description of Artificial Sequence: Synthetic oligonucleotide
  Sense strand starting at position 743 of SEQ ID NO: 916753
auuuguccuuuccagagau

SEQ ID NO: 1181285 - RNA, 19 nt, Artificial Sequence
  Description of Artificial Sequence: Synthetic oligonucleotide
  Antisense strand to SEQ ID NO: 1181284
aucucuggaaaggacaaau

SEQ ID NO: 1181286 - RNA, 19 nt, Artificial Sequence
  Description of Artificial Sequence: Synthetic oligonucleotide
  Sense strand starting at position 745 of SEQ ID NO: 916753
uuguccuuuccagagauug

SEQ ID NO: 1181287 - RNA, 19 nt, Artificial Sequence
  Description of Artificial Sequence: Synthetic oligonucleotide
  Antisense strand to SEQ ID NO: 1181286
caaucucuggaaaggacaa

SEQ ID NO: 1181288 - RNA, 19 nt, Artificial Sequence
  Description of Artificial Sequence: Synthetic oligonucleotide
  Sense strand starting at position 760 of SEQ ID NO: 916753
auugacgccuucuccaaua

SEQ ID NO: 1181289 - RNA, 19 nt, Artificial Sequence
  Description of Artificial Sequence: Synthetic oligonucleotide
  Antisense strand to SEQ ID NO: 1181288
uauuggagaaggcgucaau

SEQ ID NO: 1181290 - RNA, 19 nt, Artificial Sequence
  Description of Artificial Sequence: Synthetic oligonucleotide
  Sense strand starting at position 762 of SEQ ID NO: 916753
ugacgccuucuccaauaca

SEQ ID NO: 1181291 - RNA, 19 nt, Artificial Sequence
  Description of Artificial Sequence: Synthetic oligonucleotide
  Antisense strand to SEQ ID NO: 1181290
uguauuggagaaggcguca

SEQ ID NO: 1181292 - RNA, 19 nt, Artificial Sequence
  Description of Artificial Sequence: Synthetic oligonucleotide
  Sense strand starting at position 896 of SEQ ID NO: 916753
uggaguuuggguggacaaa

SEQ ID NO: 1181293 - RNA, 19 nt, Artificial Sequence
  Description of Artificial Sequence: Synthetic oligonucleotide
  Antisense strand to SEQ ID NO: 1181292
uuuguccacccaaacucca

SEQ ID NO: 1181294 - RNA, 19 nt, Artificial Sequence
  Description of Artificial Sequence: Synthetic oligonucleotide
  Sense strand starting at position 1496 of SEQ ID NO: 916753
ugaauuugaugucauacaa

SEQ ID NO: 1181295 - RNA, 19 nt, Artificial Sequence
  Description of Artificial Sequence: Synthetic oligonucleotide
  Antisense strand to SEQ ID NO: 1181294
uuguaugacaucaaauuca

SEQ ID NO: 1181296 - RNA, 19 nt, Artificial Sequence
  Description of Artificial Sequence: Synthetic oligonucleotide
  Sense strand starting at position 1675 of SEQ ID NO: 916753
guacuauguaaacguacua

SEQ ID NO: 1181297 - RNA, 19 nt, Artificial Sequence
  Description of Artificial Sequence: Synthetic oligonucleotide
  Antisense strand to SEQ ID NO: 1181296
uaguacguuuacauaguac

SEQ ID NO: 1181298 - RNA, 19 nt, Artificial Sequence
  Description of Artificial Sequence: Synthetic oligonucleotide
  Sense strand starting at position 1796 of SEQ ID NO: 916753
cuagguacugcucacacau

SEQ ID NO: 1181299 - RNA, 19 nt, Artificial Sequence
  Description of Artificial Sequence: Synthetic oligonucleotide
  Antisense strand to SEQ ID NO: 1181298
augugugagcaguaccuag

SEQ ID NO: 1181300 - RNA, 19 nt, Artificial Sequence
  Description of Artificial Sequence: Synthetic oligonucleotide
  Sense strand starting at position 1815 of SEQ ID NO: 916753
guacuacgaugcucuacaa

SEQ ID NO: 1181301 - RNA, 19 nt, Artificial Sequence
  Description of Artificial Sequence: Synthetic oligonucleotide
  Antisense strand to SEQ ID NO: 1181300
uuguagagcaucguaguac

SEQ ID NO: 1181302 - RNA, 19 nt, Artificial Sequence
  Description of Artificial Sequence: Synthetic oligonucleotide
  Sense strand starting at position 1865 of SEQ ID NO: 916753
ucauucuuucccggcauga

SEQ ID NO: 1181303 - RNA, 19 nt, Artificial Sequence
  Description of Artificial Sequence: Synthetic oligonucleotide
  Antisense strand to SEQ ID NO: 1181302
ucaugccgggaaagaauga

SEQ ID NO: 1181304 - RNA, 19 nt, Artificial Sequence
  Description of Artificial Sequence: Synthetic oligonucleotide
  Sense strand starting at position 1867 of SEQ ID NO: 916753
auucuuucccggcaugaag

SEQ ID NO: 1181305 - RNA, 19 nt, Artificial Sequence
  Description of Artificial Sequence: Synthetic oligonucleotide
  Antisense strand to SEQ ID NO: 1181304
cuucaugccgggaaagaau

SEQ ID NO: 1181306 - RNA, 19 nt, Artificial Sequence
  Description of Artificial Sequence: Synthetic oligonucleotide
  Sense strand starting at position 1943 of SEQ ID NO: 916753
ugucacguccuccaagaau

SEQ ID NO: 1181307 - RNA, 19 nt, Artificial Sequence
  Description of Artificial Sequence: Synthetic oligonucleotide
  Antisense strand to SEQ ID NO: 1181306
auucuuggaggacgugaca

SEQ ID NO: 1181308 - RNA, 19 nt, Artificial Sequence
  Description of Artificial Sequence: Synthetic oligonucleotide
  Sense strand starting at position 1990 of SEQ ID NO: 916753
cugguugaccucuauauaa

SEQ ID NO: 1181309 - RNA, 19 nt, Artificial Sequence
  Description of Artificial Sequence: Synthetic oligonucleotide
  Antisense strand to SEQ ID NO: 1181308
uuauauagaggucaaccag

SEQ ID NO: 1181310 - RNA, 19 nt, Artificial Sequence
  Description of Artificial Sequence: Synthetic oligonucleotide
  Sense strand starting at position 2035 of SEQ ID NO: 916753
cucaaagaauguuuaaagu

SEQ ID NO: 1181311 - RNA, 19 nt, Artificial Sequence
  Description of Artificial Sequence: Synthetic oligonucleotide
  Antisense strand to SEQ ID NO: 1181310
acuuuaaacauucuuugag

SEQ ID NO: 1181312 - RNA, 19 nt, Artificial Sequence
  Description of Artificial Sequence: Synthetic oligonucleotide
  Sense strand starting at position 2459 of SEQ ID NO: 916753
aacagaguuccucaguggu

SEQ ID NO: 1181313 - RNA, 19 nt, Artificial Sequence
  Description of Artificial Sequence: Synthetic oligonucleotide
  Antisense strand to SEQ ID NO: 1181312
accacugaggaacucuguu

SEQ ID NO: 1181314 - RNA, 19 nt, Artificial Sequence
  Description of Artificial Sequence: Synthetic oligonucleotide
  Sense strand starting at position 2461 of SEQ ID NO: 916753
cagaguuccucagugguua

SEQ ID NO: 1181315 - RNA, 19 nt, Artificial Sequence
  Description of Artificial Sequence: Synthetic oligonucleotide
  Antisense strand to SEQ ID NO: 1181314
uaaccacugaggaacucug

SEQ ID NO: 1181316 - RNA, 19 nt, Artificial Sequence
  Description of Artificial Sequence: Synthetic oligonucleotide
  Sense strand starting at position 2489 of SEQ ID NO: 916753
ucucaagcugcugaagauu

SEQ ID NO: 1181317 - RNA, 19 nt, Artificial Sequence
  Description of Artificial Sequence: Synthetic oligonucleotide
  Antisense strand to SEQ ID NO: 1181316
aaucuucagcagcuugaga

SEQ ID NO: 1181318 - RNA, 19 nt, Artificial Sequence
  Description of Artificial Sequence: Synthetic oligonucleotide
  Sense strand starting at position 2498 of SEQ ID NO: 916753
gcugaagauucuuuaaggu

SEQ ID NO: 1181319 - RNA, 19 nt, Artificial Sequence
  Description of Artificial Sequence: Synthetic oligonucleotide
  Antisense strand to SEQ ID NO: 1181318
accuuaaagaaucuucagc

SEQ ID NO: 1181320 - RNA, 19 nt, Artificial Sequence
  Description of Artificial Sequence: Synthetic oligonucleotide
  Sense strand starting at position 2531 of SEQ ID NO: 916753
cuguuaacauguuugcuau

SEQ ID NO: 1181321 - RNA, 19 nt, Artificial Sequence
  Description of Artificial Sequence: Synthetic oligonucleotide
  Antisense strand to SEQ ID NO: 1181320
auagcaaacauguuaacag

SEQ ID NO: 1181322 - RNA, 19 nt, Artificial Sequence
  Description of Artificial Sequence: Synthetic oligonucleotide
  Sense strand starting at position 2545 of SEQ ID NO: 916753
gcuauucuggcggugcuau

SEQ ID NO: 1181323 - RNA, 19 nt, Artificial Sequence
  Description of Artificial Sequence: Synthetic oligonucleotide
  Antisense strand to SEQ ID NO: 1181322
auagcaccgccagaauagc

SEQ ID NO: 1181324 - RNA, 19 nt, Artificial Sequence
  Description of Artificial Sequence: Synthetic oligonucleotide
  Sense strand starting at position 2556 of SEQ ID NO: 916753
ggugcuauuaaaggugauu

SEQ ID NO: 1181325 - RNA, 19 nt, Artificial Sequence
  Description of Artificial Sequence: Synthetic oligonucleotide
  Antisense strand to SEQ ID NO: 1181324
aaucaccuuuaauagcacc

SEQ ID NO: 1181326 - RNA, 19 nt, Artificial Sequence
  Description of Artificial Sequence: Synthetic oligonucleotide
  Sense strand starting at position 2653 of SEQ ID NO: 916753
auguacuauagguggaaca

SEQ ID NO: 1181327 - RNA, 19 nt, Artificial Sequence
  Description of Artificial Sequence: Synthetic oligonucleotide
  Antisense strand to SEQ ID NO: 1181326
uguuccaccuauaguacau

SEQ ID NO: 1181328 - RNA, 19 nt, Artificial Sequence
  Description of Artificial Sequence: Synthetic oligonucleotide
  Sense strand starting at position 2654 of SEQ ID NO: 916753
uguacuauagguggaacau

SEQ ID NO: 1181329 - RNA, 19 nt, Artificial Sequence
  Description of Artificial Sequence: Synthetic oligonucleotide
  Antisense strand to SEQ ID NO: 1181328
auguuccaccuauaguaca

SEQ ID NO: 1181330 - RNA, 19 nt, Artificial Sequence
  Description of Artificial Sequence: Synthetic oligonucleotide
  Sense strand starting at position 2905 of SEQ ID NO: 916753
gugcuaugcuacuuaggag

SEQ ID NO: 1181331 - RNA, 19 nt, Artificial Sequence
  Description of Artificial Sequence: Synthetic oligonucleotide
  Antisense strand to SEQ ID NO: 1181330
cuccuaaguagcauagcac

SEQ ID NO: 1181332 - RNA, 19 nt, Artificial Sequence
  Description of Artificial Sequence: Synthetic oligonucleotide
  Sense strand starting at position 3011 of SEQ ID NO: 916753
gugucugacucugucucaa

SEQ ID NO: 1181333 - RNA, 19 nt, Artificial Sequence
  Description of Artificial Sequence: Synthetic oligonucleotide
  Antisense strand to SEQ ID NO: 1181332
uugagacagagucagacac

SEQ ID NO: 1181334 - RNA, 19 nt, Artificial Sequence
  Description of Artificial Sequence: Synthetic oligonucleotide
  Sense strand starting at position 3578 of SEQ ID NO: 916753
ggaggugguggauauguga

SEQ ID NO: 1181335 - RNA, 19 nt, Artificial Sequence
  Description of Artificial Sequence: Synthetic oligonucleotide
  Antisense strand to SEQ ID NO: 1181334
ucacauauccaccaccucc

SEQ ID NO: 1181336 - RNA, 19 nt, Artificial Sequence
  Description of Artificial Sequence: Synthetic oligonucleotide
  Sense strand starting at position 3581 of SEQ ID NO: 916753
ggugguggauaugugaauu

SEQ ID NO: 1181337 - RNA, 19 nt, Artificial Sequence
  Description of Artificial Sequence: Synthetic oligonucleotide
  Antisense strand to SEQ ID NO: 1181336
aauucacauauccaccacc

SEQ ID NO: 1181338 - RNA, 19 nt, Artificial Sequence
  Description of Artificial Sequence: Synthetic oligonucleotide
  Sense strand starting at position 3592 of SEQ ID NO: 916753
ugugaauuaccuugacugu

SEQ ID NO: 1181339 - RNA, 19 nt, Artificial Sequence
  Description of Artificial Sequence: Synthetic oligonucleotide
  Antisense strand to SEQ ID NO: 1181338
acagucaagguaauucaca

SEQ ID NO: 1181340 - RNA, 19 nt, Artificial Sequence
  Description of Artificial Sequence: Synthetic oligonucleotide
  Sense strand starting at position 3593 of SEQ ID NO: 916753
gugaauuaccuugacugug

SEQ ID NO: 1181341 - RNA, 19 nt, Artificial Sequence
  Description of Artificial Sequence: Synthetic oligonucleotide
  Antisense strand to SEQ ID NO: 1181340
cacagucaagguaauucac

SEQ ID NO: 1181342 - RNA, 19 nt, Artificial Sequence
  Description of Artificial Sequence: Synthetic oligonucleotide
  Sense strand starting at position 211 of SEQ ID NO: 916754
accugaggccacugaauua

SEQ ID NO: 1181343 - RNA, 19 nt, Artificial Sequence
  Description of Artificial Sequence: Synthetic oligonucleotide
  Antisense strand to SEQ ID NO: 1181342
uaauucaguggccucaggu

SEQ ID NO: 1181344 - RNA, 19 nt, Artificial Sequence
  Description of Artificial Sequence: Synthetic oligonucleotide
  Sense strand starting at position 247 of SEQ ID NO: 916754
guuaaaugcuaguuuccaa

SEQ ID NO: 1181345 - RNA, 19 nt, Artificial Sequence
  Description of Artificial Sequence: Synthetic oligonucleotide
  Antisense strand to SEQ ID NO: 1181344
uuggaaacuagcauuuaac

SEQ ID NO: 1181346 - RNA, 19 nt, Artificial Sequence
  Description of Artificial Sequence: Synthetic oligonucleotide
  Sense strand starting at position 276 of SEQ ID NO: 916754
uuuaaaugucugugccuca

SEQ ID NO: 1181347 - RNA, 19 nt, Artificial Sequence
  Description of Artificial Sequence: Synthetic oligonucleotide
  Antisense strand to SEQ ID NO: 1181346
ugaggcacagacauuuaaa

SEQ ID NO: 1181348 - RNA, 19 nt, Artificial Sequence
  Description of Artificial Sequence: Synthetic oligonucleotide
  Sense strand starting at position 297 of SEQ ID NO: 916754
cugcgaguucuguggagga

SEQ ID NO: 1181349 - RNA, 19 nt, Artificial Sequence
  Description of Artificial Sequence: Synthetic oligonucleotide
  Antisense strand to SEQ ID NO: 1181348
uccuccacagaacucgcag

SEQ ID NO: 1181350 - RNA, 19 nt, Artificial Sequence
  Description of Artificial Sequence: Synthetic oligonucleotide
  Sense strand starting at position 299 of SEQ ID NO: 916754
gcgaguucuguggaggacu

SEQ ID NO: 1181351 - RNA, 19 nt, Artificial Sequence
  Description of Artificial Sequence: Synthetic oligonucleotide
  Antisense strand to SEQ ID NO: 1181350
aguccuccacagaacucgc

SEQ ID NO: 1181352 - RNA, 19 nt, Artificial Sequence
  Description of Artificial Sequence: Synthetic oligonucleotide
  Sense strand starting at position 300 of SEQ ID NO: 916754
cgaguucuguggaggacua

SEQ ID NO: 1181353 - RNA, 19 nt, Artificial Sequence
  Description of Artificial Sequence: Synthetic oligonucleotide
  Antisense strand to SEQ ID NO: 1181352
uaguccuccacagaacucg

SEQ ID NO: 1181354 - RNA, 19 nt, Artificial Sequence
  Description of Artificial Sequence: Synthetic oligonucleotide
  Sense strand starting at position 447 of SEQ ID NO: 916754
gacuuugaaucaugaagug

SEQ ID NO: 1181355 - RNA, 19 nt, Artificial Sequence
  Description of Artificial Sequence: Synthetic oligonucleotide
  Antisense strand to SEQ ID NO: 1181354
cacuucaugauucaaaguc

SEQ ID NO: 1181356 - RNA, 19 nt, Artificial Sequence
  Description of Artificial Sequence: Synthetic oligonucleotide
  Sense strand starting at position 498 of SEQ ID NO: 916754
auaauacaguacugagaau

SEQ ID NO: 1181357 - RNA, 19 nt, Artificial Sequence
  Description of Artificial Sequence: Synthetic oligonucleotide
  Antisense strand to SEQ ID NO: 1181356
auucucaguacuguauuau

SEQ ID NO: 1181358 - RNA, 19 nt, Artificial Sequence
  Description of Artificial Sequence: Synthetic oligonucleotide
  Sense strand starting at position 504 of SEQ ID NO: 916754
caguacugagaauggguaa

SEQ ID NO: 1181359 - RNA, 19 nt, Artificial Sequence
  Description of Artificial Sequence: Synthetic oligonucleotide
  Antisense strand to SEQ ID NO: 1181358
uuacccauucucaguacug

SEQ ID NO: 1181360 - RNA, 19 nt, Artificial Sequence
  Description of Artificial Sequence: Synthetic oligonucleotide
  Sense strand starting at position 531 of SEQ ID NO: 916754
auuagugcugcugggagua

SEQ ID NO: 1181361 - RNA, 19 nt, Artificial Sequence
  Description of Artificial Sequence: Synthetic oligonucleotide
  Antisense strand to SEQ ID NO: 1181360
uacucccagcagcacuaau

SEQ ID NO: 1181362 - RNA, 19 nt, Artificial Sequence
  Description of Artificial Sequence: Synthetic oligonucleotide
  Sense strand starting at position 551 of SEQ ID NO: 916754
gaggaaauaaugggugucu

SEQ ID NO: 1181363 - RNA, 19 nt, Artificial Sequence
  Description of Artificial Sequence: Synthetic oligonucleotide
  Antisense strand to SEQ ID NO: 1181362
agacacccauuauuuccuc

SEQ ID NO: 1181364 - RNA, 19 nt, Artificial Sequence
  Description of Artificial Sequence: Synthetic oligonucleotide
  Sense strand starting at position 556 of SEQ ID NO: 916754
aauaaugggugucugcuaa

SEQ ID NO: 1181365 - RNA, 19 nt, Artificial Sequence
  Description of Artificial Sequence: Synthetic oligonucleotide
  Antisense strand to SEQ ID NO: 1181364
uuagcagacacccauuauu

SEQ ID NO: 1181366 - RNA, 19 nt, Artificial Sequence
  Description of Artificial Sequence: Synthetic oligonucleotide
  Sense strand starting at position 617 of SEQ ID NO: 916754
auuagauaauaguggugau

SEQ ID NO: 1181367 - RNA, 19 nt, Artificial Sequence
  Description of Artificial Sequence: Synthetic oligonucleotide
  Antisense strand to SEQ ID NO: 1181366
aucaccacuauuaucuaau

SEQ ID NO: 1181368 - RNA, 19 nt, Artificial Sequence
  Description of Artificial Sequence: Synthetic oligonucleotide
  Sense strand starting at position 618 of SEQ ID NO: 916754
uuagauaauaguggugauu

SEQ ID NO: 1181369 - RNA, 19 nt, Artificial Sequence
  Description of Artificial Sequence: Synthetic oligonucleotide
  Antisense strand to SEQ ID NO: 1181368
aaucaccacuauuaucuaa

SEQ ID NO: 1181370 - RNA, 19 nt, Artificial Sequence
  Description of Artificial Sequence: Synthetic oligonucleotide
  Sense strand starting at position 621 of SEQ ID NO: 916754
gauaauaguggugauugca

SEQ ID NO: 1181371 - RNA, 19 nt, Artificial Sequence
  Description of Artificial Sequence: Synthetic oligonucleotide
  Antisense strand to SEQ ID NO: 1181370
ugcaaucaccacuauuauc

SEQ ID NO: 1181372 - RNA, 19 nt, Artificial Sequence
  Description of Artificial Sequence: Synthetic oligonucleotide
  Sense strand starting at position 921 of SEQ ID NO: 916754
gcgagacuaugucuccacu

SEQ ID NO: 1181373 - RNA, 19 nt, Artificial Sequence
  Description of Artificial Sequence: Synthetic oligonucleotide
  Antisense strand to SEQ ID NO: 1181372
aguggagacauagucucgc

SEQ ID NO: 1181374 - RNA, 19 nt, Artificial Sequence
  Description of Artificial Sequence: Synthetic oligonucleotide
  Sense strand starting at position 956 of SEQ ID NO: 916754
agugaauuuaauuguacgu

SEQ ID NO: 1181375 - RNA, 19 nt, Artificial Sequence
  Description of Artificial Sequence: Synthetic oligonucleotide
  Antisense strand to SEQ ID NO: 1181374
acguacaauuaaauucacu

SEQ ID NO: 1181376 - RNA, 19 nt, Artificial Sequence
  Description of Artificial Sequence: Synthetic oligonucleotide
  Sense strand starting at position 958 of SEQ ID NO: 916754
ugaauuuaauuguacguga

SEQ ID NO: 1181377 - RNA, 19 nt, Artificial Sequence
  Description of Artificial Sequence: Synthetic oligonucleotide
  Antisense strand to SEQ ID NO: 1181376
ucacguacaauuaaauuca

SEQ ID NO: 1181378 - RNA, 19 nt, Artificial Sequence
  Description of Artificial Sequence: Synthetic oligonucleotide
  Sense strand starting at position 1267 of SEQ ID NO: 916754
gcgccagaccucuaucuca

SEQ ID NO: 1181379 - RNA, 19 nt, Artificial Sequence
  Description of Artificial Sequence: Synthetic oligonucleotide
  Antisense strand to SEQ ID NO: 1181378
ugagauagaggucuggcgc

SEQ ID NO: 1181380 - RNA, 19 nt, Artificial Sequence
  Description of Artificial Sequence: Synthetic oligonucleotide
  Sense strand starting at position 1286 of SEQ ID NO: 916754
auguuauaacaaggcucaa

SEQ ID NO: 1181381 - RNA, 19 nt, Artificial Sequence
  Description of Artificial Sequence: Synthetic oligonucleotide
  Antisense strand to SEQ ID NO: 1181380
uugagccuuguuauaacau

SEQ ID NO: 1181382 - RNA, 19 nt, Artificial Sequence
  Description of Artificial Sequence: Synthetic oligonucleotide
  Sense strand starting at position 1299 of SEQ ID NO: 916754
gcucaauacucagcuaaag

SEQ ID NO: 1181383 - RNA, 19 nt, Artificial Sequence
  Description of Artificial Sequence: Synthetic oligonucleotide
  Antisense strand to SEQ ID NO: 1181382
cuuuagcugaguauugagc

SEQ ID NO: 1181384 - RNA, 19 nt, Artificial Sequence
  Description of Artificial Sequence: Synthetic oligonucleotide
  Sense strand starting at position 1310 of SEQ ID NO: 916754
agcuaaagugagcgucaaa

SEQ ID NO: 1181385 - RNA, 19 nt, Artificial Sequence
  Description of Artificial Sequence: Synthetic oligonucleotide
  Antisense strand to SEQ ID NO: 1181384
uuugacgcucacuuuagcu

SEQ ID NO: 1181386 - RNA, 19 nt, Artificial Sequence
  Description of Artificial Sequence: Synthetic oligonucleotide
  Sense strand starting at position 1421 of SEQ ID NO: 916754
gcuugaccuccagggaaca

SEQ ID NO: 1181387 - RNA, 19 nt, Artificial Sequence
  Description of Artificial Sequence: Synthetic oligonucleotide
  Antisense strand to SEQ ID NO: 1181386
uguucccuggaggucaagc

SEQ ID NO: 1181388 - RNA, 19 nt, Artificial Sequence
  Description of Artificial Sequence: Synthetic oligonucleotide
  Sense strand starting at position 1521 of SEQ ID NO: 916754
cucaacuucguuuagcuau

SEQ ID NO: 1181389 - RNA, 19 nt, Artificial Sequence
  Description of Artificial Sequence: Synthetic oligonucleotide
  Antisense strand to SEQ ID NO: 1181388
auagcuaaacgaaguugag

SEQ ID NO: 1181390 - RNA, 19 nt, Artificial Sequence
  Description of Artificial Sequence: Synthetic oligonucleotide
  Sense strand starting at position 2259 of SEQ ID NO: 916754
ggcgguuucgucaggccuu

SEQ ID NO: 1181391 - RNA, 19 nt, Artificial Sequence
  Description of Artificial Sequence: Synthetic oligonucleotide
  Antisense strand to SEQ ID NO: 1181390
aaggccugacgaaaccgcc

SEQ ID NO: 1181392 - RNA, 19 nt, Artificial Sequence
  Description of Artificial Sequence: Synthetic oligonucleotide
  Sense strand starting at position 2272 of SEQ ID NO: 916754
ggccuucagcggcuaguua

SEQ ID NO: 1181393 - RNA, 19 nt, Artificial Sequence
  Description of Artificial Sequence: Synthetic oligonucleotide
  Antisense strand to SEQ ID NO: 1181392
uaacuagccgcugaaggcc

SEQ ID NO: 1181394 - RNA, 19 nt, Artificial Sequence
  Description of Artificial Sequence: Synthetic oligonucleotide
  Sense strand starting at position 2375 of SEQ ID NO: 916754
gaugaaugguugucagaga

SEQ ID NO: 1181395 - RNA, 19 nt, Artificial Sequence
  Description of Artificial Sequence: Synthetic oligonucleotide
  Antisense strand to SEQ ID NO: 1181394
ucucugacaaccauucauc

SEQ ID NO: 1181396 - RNA, 19 nt, Artificial Sequence
  Description of Artificial Sequence: Synthetic oligonucleotide
  Sense strand starting at position 2376 of SEQ ID NO: 916754
augaaugguugucagagac

SEQ ID NO: 1181397 - RNA, 19 nt, Artificial Sequence
  Description of Artificial Sequence: Synthetic oligonucleotide
  Antisense strand to SEQ ID NO: 1181396
gucucugacaaccauucau

SEQ ID NO: 1181398 - RNA, 19 nt, Artificial Sequence
  Description of Artificial Sequence: Synthetic oligonucleotide
  Sense strand starting at position 3112 of SEQ ID NO: 916754
ccuccuguuuaacuguuaa

SEQ ID NO: 1181399 - RNA, 19 nt, Artificial Sequence
  Description of Artificial Sequence: Synthetic oligonucleotide
  Antisense strand to SEQ ID NO: 1181398
uuaacaguuaaacaggagg

SEQ ID NO: 1181400 - RNA, 19 nt, Artificial Sequence
  Description of Artificial Sequence: Synthetic oligonucleotide
  Sense strand starting at position 3127 of SEQ ID NO: 916754
uuaacuuuguacccugaga

SEQ ID NO: 1181401 - RNA, 19 nt, Artificial Sequence
  Description of Artificial Sequence: Synthetic oligonucleotide
  Antisense strand to SEQ ID NO: 1181400
ucucaggguacaaaguuaa

SEQ ID NO: 1181402 - RNA, 19 nt, Artificial Sequence
  Description of Artificial Sequence: Synthetic oligonucleotide
  Sense strand starting at position 3344 of SEQ ID NO: 916754
uuaugaaccuguugaucau

SEQ ID NO: 1181403 - RNA, 19 nt, Artificial Sequence
  Description of Artificial Sequence: Synthetic oligonucleotide
  Antisense strand to SEQ ID NO: 1181402
augaucaacagguucauaa

SEQ ID NO: 1181404 - RNA, 19 nt, Artificial Sequence
  Description of Artificial Sequence: Synthetic oligonucleotide
  Sense strand starting at position 3354 of SEQ ID NO: 916754
guugaucauuuguauguca

SEQ ID NO: 1181405 - RNA, 19 nt, Artificial Sequence
  Description of Artificial Sequence: Synthetic oligonucleotide
  Antisense strand to SEQ ID NO: 1181404
ugacauacaaaugaucaac

SEQ ID NO: 1181406 - RNA, 19 nt, Artificial Sequence
  Description of Artificial Sequence: Synthetic oligonucleotide
  Sense strand starting at position 3401 of SEQ ID NO: 916754
gagucagggucucaagcua

SEQ ID NO: 1181407 - RNA, 19 nt, Artificial Sequence
  Description of Artificial Sequence: Synthetic oligonucleotide
  Antisense strand to SEQ ID NO: 1181406
uagcuugagacccugacuc

SEQ ID NO: 1181408 - RNA, 19 nt, Artificial Sequence
  Description of Artificial Sequence: Synthetic oligonucleotide
  Sense strand starting at position 3423 of SEQ ID NO: 916754
agcuguugcccagacugua

SEQ ID NO: 1181409 - RNA, 19 nt, Artificial Sequence
  Description of Artificial Sequence: Synthetic oligonucleotide
  Antisense strand to SEQ ID NO: 1181408
uacagucugggcaacagcu

SEQ ID NO: 1181410 - RNA, 19 nt, Artificial Sequence
  Description of Artificial Sequence: Synthetic oligonucleotide
  Sense strand starting at position 3441 of SEQ ID NO: 916754
acugcagugcugcaaucau

SEQ ID NO: 1181411 - RNA, 19 nt, Artificial Sequence
  Description of Artificial Sequence: Synthetic oligonucleotide
  Antisense strand to SEQ ID NO: 1181410
augauugcagcacugcagu

SEQ ID NO: 1181412 - RNA, 19 nt, Artificial Sequence
  Description of Artificial Sequence: Synthetic oligonucleotide
  Sense strand starting at position 3705 of SEQ ID NO: 916754
uuagucgugugaucugauu

SEQ ID NO: 1181413 - RNA, 19 nt, Artificial Sequence
  Description of Artificial Sequence: Synthetic oligonucleotide
  Antisense strand to SEQ ID NO: 1181412
aaucagaucacacgacuaa

SEQ ID NO: 1181414 - RNA, 19 nt, Artificial Sequence
  Description of Artificial Sequence: Synthetic oligonucleotide
  Sense strand starting at position 3725 of SEQ ID NO: 916754
ugcuaugaguuguuugcuu

SEQ ID NO: 1181415 - RNA, 19 nt, Artificial Sequence
  Description of Artificial Sequence: Synthetic oligonucleotide
  Antisense strand to SEQ ID NO: 1181414
aagcaaacaacucauagca

SEQ ID NO: 1181416 - RNA, 19 nt, Artificial Sequence
  Description of Artificial Sequence: Synthetic oligonucleotide
  Sense strand starting at position 3727 of SEQ ID NO: 916754
cuaugaguuguuugcuuuc

SEQ ID NO: 1181417 - RNA, 19 nt, Artificial Sequence
  Description of Artificial Sequence: Synthetic oligonucleotide
  Antisense strand to SEQ ID NO: 1181416
gaaagcaaacaacucauag

SEQ ID NO: 1181418 - RNA, 19 nt, Artificial Sequence
  Description of Artificial Sequence: Synthetic oligonucleotide
  Sense strand starting at position 3729 of SEQ ID NO: 916754
augaguuguuugcuuucuu

SEQ ID NO: 1181419 - RNA, 19 nt, Artificial Sequence
  Description of Artificial Sequence: Synthetic oligonucleotide
  Antisense strand to SEQ ID NO: 1181418
aagaaagcaaacaacucau

SEQ ID NO: 1181420 - RNA, 19 nt, Artificial Sequence
  Description of Artificial Sequence: Synthetic oligonucleotide
  Sense strand starting at position 3884 of SEQ ID NO: 916754
ccagcuagauguuuauuaa

SEQ ID NO: 1181421 - RNA, 19 nt, Artificial Sequence
  Description of Artificial Sequence: Synthetic oligonucleotide
  Antisense strand to SEQ ID NO: 1181420
uuaauaaacaucuagcugg

SEQ ID NO: 1181422 - RNA, 19 nt, Artificial Sequence
  Description of Artificial Sequence: Synthetic oligonucleotide
  Sense strand starting at position 292 of SEQ ID NO: 916755
cuugauacgugaucuguua

SEQ ID NO: 1181423 - RNA, 19 nt, Artificial Sequence
  Description of Artificial Sequence: Synthetic oligonucleotide
  Antisense strand to SEQ ID NO: 1181422
uaacagaucacguaucaag

SEQ ID NO: 1181424 - RNA, 19 nt, Artificial Sequence
  Description of Artificial Sequence: Synthetic oligonucleotide
  Sense strand starting at position 294 of SEQ ID NO: 916755
ugauacgugaucuguuaac

SEQ ID NO: 1181425 - RNA, 19 nt, Artificial Sequence
  Description of Artificial Sequence: Synthetic oligonucleotide
  Antisense strand to SEQ ID NO: 1181424
guuaacagaucacguauca

SEQ ID NO: 1181426 - RNA, 19 nt, Artificial Sequence
  Description of Artificial Sequence: Synthetic oligonucleotide
  Sense strand starting at position 300 of SEQ ID NO: 916755
gugaucuguuaacuuucuu

SEQ ID NO: 1181427 - RNA, 19 nt, Artificial Sequence
  Description of Artificial Sequence: Synthetic oligonucleotide
  Antisense strand to SEQ ID NO: 1181426
aagaaaguuaacagaucac

SEQ ID NO: 1181428 - RNA, 19 nt, Artificial Sequence
  Description of Artificial Sequence: Synthetic oligonucleotide
  Sense strand starting at position 410 of SEQ ID NO: 916755
aaaggugaugcuuauauuc

SEQ ID NO: 1181429 - RNA, 19 nt, Artificial Sequence
  Description of Artificial Sequence: Synthetic oligonucleotide
  Antisense strand to SEQ ID NO: 1181428
gaauauaagcaucaccuuu

SEQ ID NO: 1181430 - RNA, 19 nt, Artificial Sequence
  Description of Artificial Sequence: Synthetic oligonucleotide
  Sense strand starting at position 541 of SEQ ID NO: 916755
guauaauacccuuggcaaa

SEQ ID NO: 1181431 - RNA, 19 nt, Artificial Sequence
  Description of Artificial Sequence: Synthetic oligonucleotide
  Antisense strand to SEQ ID NO: 1181430
uuugccaaggguauuauac

SEQ ID NO: 1181432 - RNA, 19 nt, Artificial Sequence
  Description of Artificial Sequence: Synthetic oligonucleotide
  Sense strand starting at position 567 of SEQ ID NO: 916755
acacauagucagggcucaa

SEQ ID NO: 1181433 - RNA, 19 nt, Artificial Sequence
  Description of Artificial Sequence: Synthetic oligonucleotide
  Antisense strand to SEQ ID NO: 1181432
uugagcccugacuaugugu

SEQ ID NO: 1181434 - RNA, 19 nt, Artificial Sequence
  Description of Artificial Sequence: Synthetic oligonucleotide
  Sense strand starting at position 589 of SEQ ID NO: 916755
auuuguagugugugaaaug

SEQ ID NO: 1181435 - RNA, 19 nt, Artificial Sequence
  Description of Artificial Sequence: Synthetic oligonucleotide
  Antisense strand to SEQ ID NO: 1181434
cauuucacacacuacaaau

SEQ ID NO: 1181436 - RNA, 19 nt, Artificial Sequence
  Description of Artificial Sequence: Synthetic oligonucleotide
  Sense strand starting at position 627 of SEQ ID NO: 916755
guccuucuauauguuuaca

SEQ ID NO: 1181437 - RNA, 19 nt, Artificial Sequence
  Description of Artificial Sequence: Synthetic oligonucleotide
  Antisense strand to SEQ ID NO: 1181436
uguaaacauauagaaggac

SEQ ID NO: 1181438 - RNA, 19 nt, Artificial Sequence
  Description of Artificial Sequence: Synthetic oligonucleotide
  Sense strand starting at position 629 of SEQ ID NO: 916755
ccuucuauauguuuacagu

SEQ ID NO: 1181439 - RNA, 19 nt, Artificial Sequence
  Description of Artificial Sequence: Synthetic oligonucleotide
  Antisense strand to SEQ ID NO: 1181438
acuguaaacauauagaagg

SEQ ID NO: 1181440 - RNA, 19 nt, Artificial Sequence
  Description of Artificial Sequence: Synthetic oligonucleotide
  Sense strand starting at position 899 of SEQ ID NO: 916755
acacuagucugaucccgua

SEQ ID NO: 1181441 - RNA, 19 nt, Artificial Sequence
  Description of Artificial Sequence: Synthetic oligonucleotide
  Antisense strand to SEQ ID NO: 1181440
uacgggaucagacuagugu

SEQ ID NO: 1181442 - RNA, 19 nt, Artificial Sequence
  Description of Artificial Sequence: Synthetic oligonucleotide
  Sense strand starting at position 906 of SEQ ID NO: 916755
ucugaucccguacgacauu

SEQ ID NO: 1181443 - RNA, 19 nt, Artificial Sequence
  Description of Artificial Sequence: Synthetic oligonucleotide
  Antisense strand to SEQ ID NO: 1181442
aaugucguacgggaucaga

SEQ ID NO: 1181444 - RNA, 19 nt, Artificial Sequence
  Description of Artificial Sequence: Synthetic oligonucleotide
  Sense strand starting at position 1249 of SEQ ID NO: 916755
uuugaaagcgccguuuaca

SEQ ID NO: 1181445 - RNA, 19 nt, Artificial Sequence
  Description of Artificial Sequence: Synthetic oligonucleotide
  Antisense strand to SEQ ID NO: 1181444
uguaaacggcgcuuucaaa

SEQ ID NO: 1181446 - RNA, 19 nt, Artificial Sequence
  Description of Artificial Sequence: Synthetic oligonucleotide
  Sense strand starting at position 1257 of SEQ ID NO: 916755
cgccguuuacaacacuaau

SEQ ID NO: 1181447 - RNA, 19 nt, Artificial Sequence
  Description of Artificial Sequence: Synthetic oligonucleotide
  Antisense strand to SEQ ID NO: 1181446
auuaguguuguaaacggcg

SEQ ID NO: 1181448 - RNA, 19 nt, Artificial Sequence
  Description of Artificial Sequence: Synthetic oligonucleotide
  Sense strand starting at position 1260 of SEQ ID NO: 916755
cguuuacaacacuaauagu

SEQ ID NO: 1181449 - RNA, 19 nt, Artificial Sequence
  Description of Artificial Sequence: Synthetic oligonucleotide
  Antisense strand to SEQ ID NO: 1181448
acuauuaguguuguaaacg

SEQ ID NO: 1181450 - RNA, 19 nt, Artificial Sequence
  Description of Artificial Sequence: Synthetic oligonucleotide
  Sense strand starting at position 1620 of SEQ ID NO: 916755
cucuaagucacacgagaug

SEQ ID NO: 1181451 - RNA, 19 nt, Artificial Sequence
  Description of Artificial Sequence: Synthetic oligonucleotide
  Antisense strand to SEQ ID NO: 1181450
caucucgugugacuuagag

SEQ ID NO: 1181452 - RNA, 19 nt, Artificial Sequence
  Description of Artificial Sequence: Synthetic oligonucleotide
  Sense strand starting at position 2231 of SEQ ID NO: 916755
gggcgaggaauugggaaau

SEQ ID NO: 1181453 - RNA, 19 nt, Artificial Sequence
  Description of Artificial Sequence: Synthetic oligonucleotide
  Antisense strand to SEQ ID NO: 1181452
auuucccaauuccucgccc

SEQ ID NO: 1181454 - RNA, 19 nt, Artificial Sequence
  Description of Artificial Sequence: Synthetic oligonucleotide
  Sense strand starting at position 2451 of SEQ ID NO: 916755
gaaggccuuugguccuaua

SEQ ID NO: 1181455 - RNA, 19 nt, Artificial Sequence
  Description of Artificial Sequence: Synthetic oligonucleotide
  Antisense strand to SEQ ID NO: 1181454
uauaggaccaaaggccuuc

SEQ ID NO: 1181456 - RNA, 19 nt, Artificial Sequence
  Description of Artificial Sequence: Synthetic oligonucleotide
  Sense strand starting at position 2461 of SEQ ID NO: 916755
gguccuauaccucgaaugu

SEQ ID NO: 1181457 - RNA, 19 nt, Artificial Sequence
  Description of Artificial Sequence: Synthetic oligonucleotide
  Antisense strand to SEQ ID NO: 1181456
acauucgagguauaggacc

SEQ ID NO: 1181458 - RNA, 19 nt, Artificial Sequence
  Description of Artificial Sequence: Synthetic oligonucleotide
  Sense strand starting at position 2462 of SEQ ID NO: 916755
guccuauaccucgaauguu

SEQ ID NO: 1181459 - RNA, 19 nt, Artificial Sequence
  Description of Artificial Sequence: Synthetic oligonucleotide
  Antisense strand to SEQ ID NO: 1181458
aacauucgagguauaggac

SEQ ID NO: 1181460 - RNA, 19 nt, Artificial Sequence
  Description of Artificial Sequence: Synthetic oligonucleotide
  Sense strand starting at position 2575 of SEQ ID NO: 916755
uggccucucgaaugcagaa

SEQ ID NO: 1181461 - RNA, 19 nt, Artificial Sequence
  Description of Artificial Sequence: Synthetic oligonucleotide
  Antisense strand to SEQ ID NO: 1181460
uucugcauucgagaggcca

SEQ ID NO: 1181462 - RNA, 19 nt, Artificial Sequence
  Description of Artificial Sequence: Synthetic oligonucleotide
  Sense strand starting at position 2596 of SEQ ID NO: 916755
ggaaguagcgagcagaauu

SEQ ID NO: 1181463 - RNA, 19 nt, Artificial Sequence
  Description of Artificial Sequence: Synthetic oligonucleotide
  Antisense strand to SEQ ID NO: 1181462
aauucugcucgcuacuucc

SEQ ID NO: 1181464 - RNA, 19 nt, Artificial Sequence
  Description of Artificial Sequence: Synthetic oligonucleotide
  Sense strand starting at position 2609 of SEQ ID NO: 916755
agaauuucguacccguuua

SEQ ID NO: 1181465 - RNA, 19 nt, Artificial Sequence
  Description of Artificial Sequence: Synthetic oligonucleotide
  Antisense strand to SEQ ID NO: 1181464
uaaacggguacgaaauucu

SEQ ID NO: 1181466 - RNA, 19 nt, Artificial Sequence
  Description of Artificial Sequence: Synthetic oligonucleotide
  Sense strand starting at position 2661 of SEQ ID NO: 916755
cuccucgcuccugaaauaa

SEQ ID NO: 1181467 - RNA, 19 nt, Artificial Sequence
  Description of Artificial Sequence: Synthetic oligonucleotide
  Antisense strand to SEQ ID NO: 1181466
uuauuucaggagcgaggag

SEQ ID NO: 1181468 - RNA, 19 nt, Artificial Sequence
  Description of Artificial Sequence: Synthetic oligonucleotide
  Sense strand starting at position 2724 of SEQ ID NO: 916755
ggauuuggcgcuugcaauu

SEQ ID NO: 1181469 - RNA, 19 nt, Artificial Sequence
  Description of Artificial Sequence: Synthetic oligonucleotide
  Antisense strand to SEQ ID NO: 1181468
aauugcaagcgccaaaucc

SEQ ID NO: 1181470 - RNA, 19 nt, Artificial Sequence
  Description of Artificial Sequence: Synthetic oligonucleotide
  Sense strand starting at position 2774 of SEQ ID NO: 916755
gccucuuuaggguaggauu

SEQ ID NO: 1181471 - RNA, 19 nt, Artificial Sequence
  Description of Artificial Sequence: Synthetic oligonucleotide
  Antisense strand to SEQ ID NO: 1181470
aauccuacccuaaagaggc

SEQ ID NO: 1181472 - RNA, 19 nt, Artificial Sequence
  Description of Artificial Sequence: Synthetic oligonucleotide
  Sense strand starting at position 2782 of SEQ ID NO: 916755
aggguaggauuccuuaaug

SEQ ID NO: 1181473 - RNA, 19 nt, Artificial Sequence
  Description of Artificial Sequence: Synthetic oligonucleotide
  Antisense strand to SEQ ID NO: 1181472
cauuaaggaauccuacccu

SEQ ID NO: 1181474 - RNA, 19 nt, Artificial Sequence
  Description of Artificial Sequence: Synthetic oligonucleotide
  Sense strand starting at position 2793 of SEQ ID NO: 916755
ccuuaaugaugugugaacu

SEQ ID NO: 1181475 - RNA, 19 nt, Artificial Sequence
  Description of Artificial Sequence: Synthetic oligonucleotide
  Antisense strand to SEQ ID NO: 1181474
aguucacacaucauuaagg

SEQ ID NO: 1181476 - RNA, 19 nt, Artificial Sequence
  Description of Artificial Sequence: Synthetic oligonucleotide
  Sense strand starting at position 2794 of SEQ ID NO: 916755
cuuaaugaugugugaacuc

SEQ ID NO: 1181477 - RNA, 19 nt, Artificial Sequence
  Description of Artificial Sequence: Synthetic oligonucleotide
  Antisense strand to SEQ ID NO: 1181476
gaguucacacaucauuaag

SEQ ID NO: 1181478 - RNA, 19 nt, Artificial Sequence
  Description of Artificial Sequence: Synthetic oligonucleotide
  Sense strand starting at position 2803 of SEQ ID NO: 916755
gugugaacucauugaaacu

SEQ ID NO: 1181479 - RNA, 19 nt, Artificial Sequence
  Description of Artificial Sequence: Synthetic oligonucleotide
  Antisense strand to SEQ ID NO: 1181478
aguuucaaugaguucacac

SEQ ID NO: 1181480 - RNA, 19 nt, Artificial Sequence
  Description of Artificial Sequence: Synthetic oligonucleotide
  Sense strand starting at position 2984 of SEQ ID NO: 916755
aggacucagagcuguaauc

SEQ ID NO: 1181481 - RNA, 19 nt, Artificial Sequence
  Description of Artificial Sequence: Synthetic oligonucleotide
  Antisense strand to SEQ ID NO: 1181480
gauuacagcucugaguccu

SEQ ID NO: 1181482 - RNA, 19 nt, Artificial Sequence
  Description of Artificial Sequence: Synthetic oligonucleotide
  Sense strand starting at position 2986 of SEQ ID NO: 916755
gacucagagcuguaaucau

SEQ ID NO: 1181483 - RNA, 19 nt, Artificial Sequence
  Description of Artificial Sequence: Synthetic oligonucleotide
  Antisense strand to SEQ ID NO: 1181482
augauuacagcucugaguc

SEQ ID NO: 1181484 - RNA, 19 nt, Artificial Sequence
  Description of Artificial Sequence: Synthetic oligonucleotide
  Sense strand starting at position 3457 of SEQ ID NO: 916755
uugaaauggagcugugauu

SEQ ID NO: 1181485 - RNA, 19 nt, Artificial Sequence
  Description of Artificial Sequence: Synthetic oligonucleotide
  Antisense strand to SEQ ID NO: 1181484
aaucacagcuccauuucaa

SEQ ID NO: 1181486 - RNA, 19 nt, Artificial Sequence
  Description of Artificial Sequence: Synthetic oligonucleotide
  Sense strand starting at position 3493 of SEQ ID NO: 916755
gauggagguuggcuguaaa

SEQ ID NO: 1181487 - RNA, 19 nt, Artificial Sequence
  Description of Artificial Sequence: Synthetic oligonucleotide
  Antisense strand to SEQ ID NO: 1181486
uuuacagccaaccuccauc

SEQ ID NO: 1181488 - RNA, 19 nt, Artificial Sequence
  Description of Artificial Sequence: Synthetic oligonucleotide
  Sense strand starting at position 3728 of SEQ ID NO: 916755
aaguaauccguuuacagua

SEQ ID NO: 1181489 - RNA, 19 nt, Artificial Sequence
  Description of Artificial Sequence: Synthetic oligonucleotide
  Antisense strand to SEQ ID NO: 1181488
uacuguaaacggauuacuu

SEQ ID NO: 1181490 - RNA, 19 nt, Artificial Sequence
  Description of Artificial Sequence: Synthetic oligonucleotide
  Sense strand starting at position 3740 of SEQ ID NO: 916755
uacaguaauuucgagacac

SEQ ID NO: 1181491 - RNA, 19 nt, Artificial Sequence
  Description of Artificial Sequence: Synthetic oligonucleotide
  Antisense strand to SEQ ID NO: 1181490
gugucucgaaauuacugua

SEQ ID NO: 1181492 - RNA, 19 nt, Artificial Sequence
  Description of Artificial Sequence: Synthetic oligonucleotide
  Sense strand starting at position 3810 of SEQ ID NO: 916755
uuucucaaguuguuugaga

SEQ ID NO: 1181493 - RNA, 19 nt, Artificial Sequence
  Description of Artificial Sequence: Synthetic oligonucleotide
  Antisense strand to SEQ ID NO: 1181492
ucucaaacaacuugagaaa

SEQ ID NO: 1181494 - RNA, 19 nt, Artificial Sequence
  Description of Artificial Sequence: Synthetic oligonucleotide
  Sense strand starting at position 3812 of SEQ ID NO: 916755
ucucaaguuguuugagaag

SEQ ID NO: 1181495 - RNA, 19 nt, Artificial Sequence
  Description of Artificial Sequence: Synthetic oligonucleotide
  Antisense strand to SEQ ID NO: 1181494
cuucucaaacaacuugaga

SEQ ID NO: 1181496 - RNA, 19 nt, Artificial Sequence
  Description of Artificial Sequence: Synthetic oligonucleotide
  Sense strand starting at position 3829 of SEQ ID NO: 916755
agugaucccucuuauuuag

SEQ ID NO: 1181497 - RNA, 19 nt, Artificial Sequence
  Description of Artificial Sequence: Synthetic oligonucleotide
  Antisense strand to SEQ ID NO: 1181496
cuaaauaagagggaucacu

SEQ ID NO: 1181498 - RNA, 19 nt, Artificial Sequence
  Description of Artificial Sequence: Synthetic oligonucleotide
  Sense strand starting at position 3848 of SEQ ID NO: 916755
gguaguuguacuggaacau

SEQ ID NO: 1181499 - RNA, 19 nt, Artificial Sequence
  Description of Artificial Sequence: Synthetic oligonucleotide
  Antisense strand to SEQ ID NO: 1181498
auguuccaguacaacuacc

SEQ ID NO: 1181500 - RNA, 19 nt, Artificial Sequence
  Description of Artificial Sequence: Synthetic oligonucleotide
  Sense strand starting at position 3852 of SEQ ID NO: 916755
guuguacuggaacaucauu

SEQ ID NO: 1181501 - RNA, 19 nt, Artificial Sequence
  Description of Artificial Sequence: Synthetic oligonucleotide
  Antisense strand to SEQ ID NO: 1181500
aaugauguuccaguacaac

SEQ ID NO: 1181502 - RNA, 19 nt, Artificial Sequence
  Description of Artificial Sequence: Synthetic oligonucleotide
  Sense strand starting at position 435 of SEQ ID NO: 916756
cuugauacgugaucuguua

SEQ ID NO: 1181503 - RNA, 19 nt, Artificial Sequence
  Description of Artificial Sequence: Synthetic oligonucleotide
  Antisense strand to SEQ ID NO: 1181502
uaacagaucacguaucaag

SEQ ID NO: 1181504 - RNA, 19 nt, Artificial Sequence
  Description of Artificial Sequence: Synthetic oligonucleotide
  Sense strand starting at position 437 of SEQ ID NO: 916756
ugauacgugaucuguuaac

SEQ ID NO: 1181505 - RNA, 19 nt, Artificial Sequence
  Description of Artificial Sequence: Synthetic oligonucleotide
  Antisense strand to SEQ ID NO: 1181504
guuaacagaucacguauca

SEQ ID NO: 1181506 - RNA, 19 nt, Artificial Sequence
  Description of Artificial Sequence: Synthetic oligonucleotide
  Sense strand starting at position 443 of SEQ ID NO: 916756
gugaucuguuaacuuucuu

SEQ ID NO: 1181507 - RNA, 19 nt, Artificial Sequence
  Description of Artificial Sequence: Synthetic oligonucleotide
  Antisense strand to SEQ ID NO: 1181506
aagaaaguuaacagaucac

SEQ ID NO: 1181508 - RNA, 19 nt, Artificial Sequence
  Description of Artificial Sequence: Synthetic oligonucleotide
  Sense strand starting at position 531 of SEQ ID NO: 916756
cccaaauacuauggagaaa

SEQ ID NO: 1181509 - RNA, 19 nt, Artificial Sequence
  Description of Artificial Sequence: Synthetic oligonucleotide
  Antisense strand to SEQ ID NO: 1181508
uuucuccauaguauuuggg

SEQ ID NO: 1181510 - RNA, 19 nt, Artificial Sequence
  Description of Artificial Sequence: Synthetic oligonucleotide
  Sense strand starting at position 553 of SEQ ID NO: 916756
aaaggugaugcuuauauuc

SEQ ID NO: 1181511 - RNA, 19 nt, Artificial Sequence
  Description of Artificial Sequence: Synthetic oligonucleotide
  Antisense strand to SEQ ID NO: 1181510
gaauauaagcaucaccuuu

SEQ ID NO: 1181512 - RNA, 19 nt, Artificial Sequence
  Description of Artificial Sequence: Synthetic oligonucleotide
  Sense strand starting at position 684 of SEQ ID NO: 916756
guauaauacccuuggcaaa

SEQ ID NO: 1181513 - RNA, 19 nt, Artificial Sequence
  Description of Artificial Sequence: Synthetic oligonucleotide
  Antisense strand to SEQ ID NO: 1181512
uuugccaaggguauuauac

SEQ ID NO: 1181514 - RNA, 19 nt, Artificial Sequence
  Description of Artificial Sequence: Synthetic oligonucleotide
  Sense strand starting at position 710 of SEQ ID NO: 916756
acacauagucagggcucaa

SEQ ID NO: 1181515 - RNA, 19 nt, Artificial Sequence
  Description of Artificial Sequence: Synthetic oligonucleotide
  Antisense strand to SEQ ID NO: 1181514
uugagcccugacuaugugu

SEQ ID NO: 1181516 - RNA, 19 nt, Artificial Sequence
  Description of Artificial Sequence: Synthetic oligonucleotide
  Sense strand starting at position 732 of SEQ ID NO: 916756
auuuguagugugugaaaug

SEQ ID NO: 1181517 - RNA, 19 nt, Artificial Sequence
  Description of Artificial Sequence: Synthetic oligonucleotide
  Antisense strand to SEQ ID NO: 1181516
cauuucacacacuacaaau

SEQ ID NO: 1181518 - RNA, 19 nt, Artificial Sequence
  Description of Artificial Sequence: Synthetic oligonucleotide
  Sense strand starting at position 770 of SEQ ID NO: 916756
guccuucuauauguuuaca

SEQ ID NO: 1181519 - RNA, 19 nt, Artificial Sequence
  Description of Artificial Sequence: Synthetic oligonucleotide
  Antisense strand to SEQ ID NO: 1181518
uguaaacauauagaaggac

SEQ ID NO: 1181520 - RNA, 19 nt, Artificial Sequence
  Description of Artificial Sequence: Synthetic oligonucleotide
  Sense strand starting at position 772 of SEQ ID NO: 916756
ccuucuauauguuuacagu

SEQ ID NO: 1181521 - RNA, 19 nt, Artificial Sequence
  Description of Artificial Sequence: Synthetic oligonucleotide
  Antisense strand to SEQ ID NO: 1181520
acuguaaacauauagaagg

SEQ ID NO: 1181522 - RNA, 19 nt, Artificial Sequence
  Description of Artificial Sequence: Synthetic oligonucleotide
  Sense strand starting at position 1042 of SEQ ID NO: 916756
acacuagucugaucccgua

SEQ ID NO: 1181523 - RNA, 19 nt, Artificial Sequence
  Description of Artificial Sequence: Synthetic oligonucleotide
  Antisense strand to SEQ ID NO: 1181522
uacgggaucagacuagugu

SEQ ID NO: 1181524 - RNA, 19 nt, Artificial Sequence
  Description of Artificial Sequence: Synthetic oligonucleotide
  Sense strand starting at position 1049 of SEQ ID NO: 916756
ucugaucccguacgacauu

SEQ ID NO: 1181525 - RNA, 19 nt, Artificial Sequence
  Description of Artificial Sequence: Synthetic oligonucleotide
  Antisense strand to SEQ ID NO: 1181524
aaugucguacgggaucaga

SEQ ID NO: 1181526 - RNA, 19 nt, Artificial Sequence
  Description of Artificial Sequence: Synthetic oligonucleotide
  Sense strand starting at position 1392 of SEQ ID NO: 916756
uuugaaagcgccguuuaca

SEQ ID NO: 1181527 - RNA, 19 nt, Artificial Sequence
  Description of Artificial Sequence: Synthetic oligonucleotide
  Antisense strand to SEQ ID NO: 1181526
uguaaacggcgcuuucaaa

SEQ ID NO: 1181528 - RNA, 19 nt, Artificial Sequence
  Description of Artificial Sequence: Synthetic oligonucleotide
  Sense strand starting at position 1400 of SEQ ID NO: 916756
cgccguuuacaacacuaau

SEQ ID NO: 1181529 - RNA, 19 nt, Artificial Sequence
  Description of Artificial Sequence: Synthetic oligonucleotide
  Antisense strand to SEQ ID NO: 1181528
auuaguguuguaaacggcg

SEQ ID NO: 1181530 - RNA, 19 nt, Artificial Sequence
  Description of Artificial Sequence: Synthetic oligonucleotide
  Sense strand starting at position 1403 of SEQ ID NO: 916756
cguuuacaacacuaauagu

SEQ ID NO: 1181531 - RNA, 19 nt, Artificial Sequence
  Description of Artificial Sequence: Synthetic oligonucleotide
  Antisense strand to SEQ ID NO: 1181530
acuauuaguguuguaaacg

SEQ ID NO: 1181532 - RNA, 19 nt, Artificial Sequence
  Description of Artificial Sequence: Synthetic oligonucleotide
  Sense strand starting at position 1763 of SEQ ID NO: 916756
cucuaagucacacgagaug

SEQ ID NO: 1181533 - RNA, 19 nt, Artificial Sequence
  Description of Artificial Sequence: Synthetic oligonucleotide
  Antisense strand to SEQ ID NO: 1181532
caucucgugugacuuagag

SEQ ID NO: 1181534 - RNA, 19 nt, Artificial Sequence
  Description of Artificial Sequence: Synthetic oligonucleotide
  Sense strand starting at position 2374 of SEQ ID NO: 916756
gggcgaggaauugggaaau

SEQ ID NO: 1181535 - RNA, 19 nt, Artificial Sequence
  Description of Artificial Sequence: Synthetic oligonucleotide
  Antisense strand to SEQ ID NO: 1181534
auuucccaauuccucgccc

SEQ ID NO: 1181536 - RNA, 19 nt, Artificial Sequence
  Description of Artificial Sequence: Synthetic oligonucleotide
  Sense strand starting at position 2594 of SEQ ID NO: 916756
gaaggccuuugguccuaua

SEQ ID NO: 1181537 - RNA, 19 nt, Artificial Sequence
  Description of Artificial Sequence: Synthetic oligonucleotide
  Antisense strand to SEQ ID NO: 1181536
uauaggaccaaaggccuuc

SEQ ID NO: 1181538 - RNA, 19 nt, Artificial Sequence
  Description of Artificial Sequence: Synthetic oligonucleotide
  Sense strand starting at position 2604 of SEQ ID NO: 916756
gguccuauaccucgaaugu

SEQ ID NO: 1181539 - RNA, 19 nt, Artificial Sequence
  Description of Artificial Sequence: Synthetic oligonucleotide
  Antisense strand to SEQ ID NO: 1181538
acauucgagguauaggacc

SEQ ID NO: 1181540 - RNA, 19 nt, Artificial Sequence
  Description of Artificial Sequence: Synthetic oligonucleotide
  Sense strand starting at position 2605 of SEQ ID NO: 916756
guccuauaccucgaauguu

SEQ ID NO: 1181541 - RNA, 19 nt, Artificial Sequence
  Description of Artificial Sequence: Synthetic oligonucleotide
  Antisense strand to SEQ ID NO: 1181540
aacauucgagguauaggac

SEQ ID NO: 1181542 - RNA, 19 nt, Artificial Sequence
  Description of Artificial Sequence: Synthetic oligonucleotide
  Sense strand starting at position 2718 of SEQ ID NO: 916756
uggccucucgaaugcagaa

SEQ ID NO: 1181543 - RNA, 19 nt, Artificial Sequence
  Description of Artificial Sequence: Synthetic oligonucleotide
  Antisense strand to SEQ ID NO: 1181542
uucugcauucgagaggcca

SEQ ID NO: 1181544 - RNA, 19 nt, Artificial Sequence
  Description of Artificial Sequence: Synthetic oligonucleotide
  Sense strand starting at position 2739 of SEQ ID NO: 916756
ggaaguagcgagcagaauu

SEQ ID NO: 1181545 - RNA, 19 nt, Artificial Sequence
  Description of Artificial Sequence: Synthetic oligonucleotide
  Antisense strand to SEQ ID NO: 1181544
aauucugcucgcuacuucc

SEQ ID NO: 1181546 - RNA, 19 nt, Artificial Sequence
  Description of Artificial Sequence: Synthetic oligonucleotide
  Sense strand starting at position 2752 of SEQ ID NO: 916756
agaauuucguacccguuua

SEQ ID NO: 1181547 - RNA, 19 nt, Artificial Sequence
  Description of Artificial Sequence: Synthetic oligonucleotide
  Antisense strand to SEQ ID NO: 1181546
uaaacggguacgaaauucu

SEQ ID NO: 1181548 - RNA, 19 nt, Artificial Sequence
  Description of Artificial Sequence: Synthetic oligonucleotide
  Sense strand starting at position 2804 of SEQ ID NO: 916756
cuccucgcuccugaaauaa

SEQ ID NO: 1181549 - RNA, 19 nt, Artificial Sequence
  Description of Artificial Sequence: Synthetic oligonucleotide
  Antisense strand to SEQ ID NO: 1181548
uuauuucaggagcgaggag

SEQ ID NO: 1181550 - RNA, 19 nt, Artificial Sequence
  Description of Artificial Sequence: Synthetic oligonucleotide
  Sense strand starting at position 2867 of SEQ ID NO: 916756
ggauuuggcgcuugcaauu

SEQ ID NO: 1181551 - RNA, 19 nt, Artificial Sequence
  Description of Artificial Sequence: Synthetic oligonucleotide
  Antisense strand to SEQ ID NO: 1181550
aauugcaagcgccaaaucc

SEQ ID NO: 1181552 - RNA, 19 nt, Artificial Sequence
  Description of Artificial Sequence: Synthetic oligonucleotide
  Sense strand starting at position 2917 of SEQ ID NO: 916756
gccucuuuaggguaggauu

SEQ ID NO: 1181553 - RNA, 19 nt, Artificial Sequence
  Description of Artificial Sequence: Synthetic oligonucleotide
  Antisense strand to SEQ ID NO: 1181552
aauccuacccuaaagaggc

SEQ ID NO: 1181554 - RNA, 19 nt, Artificial Sequence
  Description of Artificial Sequence: Synthetic oligonucleotide
  Sense strand starting at position 2925 of SEQ ID NO: 916756
aggguaggauuccuuaaug

SEQ ID NO: 1181555 - RNA, 19 nt, Artificial Sequence
  Description of Artificial Sequence: Synthetic oligonucleotide
  Antisense strand to SEQ ID NO: 1181554
cauuaaggaauccuacccu

SEQ ID NO: 1181556 - RNA, 19 nt, Artificial Sequence
  Description of Artificial Sequence: Synthetic oligonucleotide
  Sense strand starting at position 2936 of SEQ ID NO: 916756
ccuuaaugaugugugaacu

SEQ ID NO: 1181557 - RNA, 19 nt, Artificial Sequence
  Description of Artificial Sequence: Synthetic oligonucleotide
  Antisense strand to SEQ ID NO: 1181556
aguucacacaucauuaagg

SEQ ID NO: 1181558 - RNA, 19 nt, Artificial Sequence
  Description of Artificial Sequence: Synthetic oligonucleotide
  Sense strand starting at position 2937 of SEQ ID NO: 916756
cuuaaugaugugugaacuc

SEQ ID NO: 1181559 - RNA, 19 nt, Artificial Sequence
  Description of Artificial Sequence: Synthetic oligonucleotide
  Antisense strand to SEQ ID NO: 1181558
gaguucacacaucauuaag

SEQ ID NO: 1181560 - RNA, 19 nt, Artificial Sequence
  Description of Artificial Sequence: Synthetic oligonucleotide
  Sense strand starting at position 2946 of SEQ ID NO: 916756
gugugaacucauugaaacu

SEQ ID NO: 1181561 - RNA, 19 nt, Artificial Sequence
  Description of Artificial Sequence: Synthetic oligonucleotide
  Antisense strand to SEQ ID NO: 1181560
aguuucaaugaguucacac

SEQ ID NO: 1181562 - RNA, 19 nt, Artificial Sequence
  Description of Artificial Sequence: Synthetic oligonucleotide
  Sense strand starting at position 3127 of SEQ ID NO: 916756
aggacucagagcuguaauc

SEQ ID NO: 1181563 - RNA, 19 nt, Artificial Sequence
  Description of Artificial Sequence: Synthetic oligonucleotide
  Antisense strand to SEQ ID NO: 1181562
gauuacagcucugaguccu

SEQ ID NO: 1181564 - RNA, 19 nt, Artificial Sequence
  Description of Artificial Sequence: Synthetic oligonucleotide
  Sense strand starting at position 3129 of SEQ ID NO: 916756
gacucagagcuguaaucau

SEQ ID NO: 1181565 - RNA, 19 nt, Artificial Sequence
  Description of Artificial Sequence: Synthetic oligonucleotide
  Antisense strand to SEQ ID NO: 1181564
augauuacagcucugaguc

SEQ ID NO: 1181566 - RNA, 19 nt, Artificial Sequence
  Description of Artificial Sequence: Synthetic oligonucleotide
  Sense strand starting at position 3440 of SEQ ID NO: 916756
cccggccuguaaucauauu

SEQ ID NO: 1181567 - RNA, 19 nt, Artificial Sequence
  Description of Artificial Sequence: Synthetic oligonucleotide
  Antisense strand to SEQ ID NO: 1181566
aauaugauuacaggccggg

SEQ ID NO: 1181568 - RNA, 19 nt, Artificial Sequence
  Description of Artificial Sequence: Synthetic oligonucleotide
  Sense strand starting at position 3600 of SEQ ID NO: 916756
uugaaauggagcugugauu

SEQ ID NO: 1181569 - RNA, 19 nt, Artificial Sequence
  Description of Artificial Sequence: Synthetic oligonucleotide
  Antisense strand to SEQ ID NO: 1181568
aaucacagcuccauuucaa

SEQ ID NO: 1181570 - RNA, 19 nt, Artificial Sequence
  Description of Artificial Sequence: Synthetic oligonucleotide
  Sense strand starting at position 3636 of SEQ ID NO: 916756
gauggagguuggcuguaaa

SEQ ID NO: 1181571 - RNA, 19 nt, Artificial Sequence
  Description of Artificial Sequence: Synthetic oligonucleotide
  Antisense strand to SEQ ID NO: 1181570
uuuacagccaaccuccauc

SEQ ID NO: 1181572 - RNA, 19 nt, Artificial Sequence
  Description of Artificial Sequence: Synthetic oligonucleotide
  Sense strand starting at position 3871 of SEQ ID NO: 916756
aaguaauccguuuacagua

SEQ ID NO: 1181573 - RNA, 19 nt, Artificial Sequence
  Description of Artificial Sequence: Synthetic oligonucleotide
  Antisense strand to SEQ ID NO: 1181572
uacuguaaacggauuacuu

SEQ ID NO: 1181574 - RNA, 19 nt, Artificial Sequence
  Description of Artificial Sequence: Synthetic oligonucleotide
  Sense strand starting at position 3883 of SEQ ID NO: 916756
uacaguaauuucgagacac

SEQ ID NO: 1181575 - RNA, 19 nt, Artificial Sequence
  Description of Artificial Sequence: Synthetic oligonucleotide
  Antisense strand to SEQ ID NO: 1181574
gugucucgaaauuacugua

SEQ ID NO: 1181576 - RNA, 19 nt, Artificial Sequence
  Description of Artificial Sequence: Synthetic oligonucleotide
  Sense strand starting at position 3953 of SEQ ID NO: 916756
uuucucaaguuguuugaga

SEQ ID NO: 1181577 - RNA, 19 nt, Artificial Sequence
  Description of Artificial Sequence: Synthetic oligonucleotide
  Antisense strand to SEQ ID NO: 1181576
ucucaaacaacuugagaaa

SEQ ID NO: 1181578 - RNA, 19 nt, Artificial Sequence
  Description of Artificial Sequence: Synthetic oligonucleotide
  Sense strand starting at position 3955 of SEQ ID NO: 916756
ucucaaguuguuugagaag

SEQ ID NO: 1181579 - RNA, 19 nt, Artificial Sequence
  Description of Artificial Sequence: Synthetic oligonucleotide
  Antisense strand to SEQ ID NO: 1181578
cuucucaaacaacuugaga

SEQ ID NO: 1181580 - RNA, 19 nt, Artificial Sequence
  Description of Artificial Sequence: Synthetic oligonucleotide
  Sense strand starting at position 3972 of SEQ ID NO: 916756
agugaucccucuuauuuag

SEQ ID NO: 1181581 - RNA, 19 nt, Artificial Sequence
  Description of Artificial Sequence: Synthetic oligonucleotide
  Antisense strand to SEQ ID NO: 1181580
cuaaauaagagggaucacu

SEQ ID NO: 1181582 - RNA, 19 nt, Artificial Sequence
  Description of Artificial Sequence: Synthetic oligonucleotide
  Sense strand starting at position 161 of SEQ ID NO: 916757
gaauaacuaugguacaguu

SEQ ID NO: 1181583 - RNA, 19 nt, Artificial Sequence
  Description of Artificial Sequence: Synthetic oligonucleotide
  Antisense strand to SEQ ID NO: 1181582
aacuguaccauaguuauuc

SEQ ID NO: 1181584 - RNA, 19 nt, Artificial Sequence
  Description of Artificial Sequence: Synthetic oligonucleotide
  Sense strand starting at position 173 of SEQ ID NO: 916757
uacaguuagcaaggcaaga

SEQ ID NO: 1181585 - RNA, 19 nt, Artificial Sequence
  Description of Artificial Sequence: Synthetic oligonucleotide
  Antisense strand to SEQ ID NO: 1181584
ucuugccuugcuaacugua

SEQ ID NO: 1181586 - RNA, 19 nt, Artificial Sequence
  Description of Artificial Sequence: Synthetic oligonucleotide
  Sense strand starting at position 226 of SEQ ID NO: 916757
ggaaauucuuguguuuauu

SEQ ID NO: 1181587 - RNA, 19 nt, Artificial Sequence
  Description of Artificial Sequence: Synthetic oligonucleotide
  Antisense strand to SEQ ID NO: 1181586
aauaaacacaagaauuucc

SEQ ID NO: 1181588 - RNA, 19 nt, Artificial Sequence
  Description of Artificial Sequence: Synthetic oligonucleotide
  Sense strand starting at position 232 of SEQ ID NO: 916757
ucuuguguuuauuuguaca

SEQ ID NO: 1181589 - RNA, 19 nt, Artificial Sequence
  Description of Artificial Sequence: Synthetic oligonucleotide
  Antisense strand to SEQ ID NO: 1181588
uguacaaauaaacacaaga

SEQ ID NO: 1181590 - RNA, 19 nt, Artificial Sequence
  Description of Artificial Sequence: Synthetic oligonucleotide
  Sense strand starting at position 243 of SEQ ID NO: 916757
uuuguacaugcucaaggaa

SEQ ID NO: 1181591 - RNA, 19 nt, Artificial Sequence
  Description of Artificial Sequence: Synthetic oligonucleotide
  Antisense strand to SEQ ID NO: 1181590
uuccuugagcauguacaaa

SEQ ID NO: 1181592 - RNA, 19 nt, Artificial Sequence
  Description of Artificial Sequence: Synthetic oligonucleotide
  Sense strand starting at position 272 of SEQ ID NO: 916757
auggaaugauuccagauaa

SEQ ID NO: 1181593 - RNA, 19 nt, Artificial Sequence
  Description of Artificial Sequence: Synthetic oligonucleotide
  Antisense strand to SEQ ID NO: 1181592
uuaucuggaaucauuccau

SEQ ID NO: 1181594 - RNA, 19 nt, Artificial Sequence
  Description of Artificial Sequence: Synthetic oligonucleotide
  Sense strand starting at position 286 of SEQ ID NO: 916757
gauaauguguuaucggcaa

SEQ ID NO: 1181595 - RNA, 19 nt, Artificial Sequence
  Description of Artificial Sequence: Synthetic oligonucleotide
  Antisense strand to SEQ ID NO: 1181594
uugccgauaacacauuauc

SEQ ID NO: 1181596 - RNA, 19 nt, Artificial Sequence
  Description of Artificial Sequence: Synthetic oligonucleotide
  Sense strand starting at position 290 of SEQ ID NO: 916757
auguguuaucggcaacgug

SEQ ID NO: 1181597 - RNA, 19 nt, Artificial Sequence
  Description of Artificial Sequence: Synthetic oligonucleotide
  Antisense strand to SEQ ID NO: 1181596
cacguugccgauaacacau

SEQ ID NO: 1181598 - RNA, 19 nt, Artificial Sequence
  Description of Artificial Sequence: Synthetic oligonucleotide
  Sense strand starting at position 291 of SEQ ID NO: 916757
uguguuaucggcaacguga

SEQ ID NO: 1181599 - RNA, 19 nt, Artificial Sequence
  Description of Artificial Sequence: Synthetic oligonucleotide
  Antisense strand to SEQ ID NO: 1181598
ucacguugccgauaacaca

SEQ ID NO: 1181600 - RNA, 19 nt, Artificial Sequence
  Description of Artificial Sequence: Synthetic oligonucleotide
  Sense strand starting at position 436 of SEQ ID NO: 916757
gaaaucagcuagucuugua

SEQ ID NO: 1181601 - RNA, 19 nt, Artificial Sequence
  Description of Artificial Sequence: Synthetic oligonucleotide
  Antisense strand to SEQ ID NO: 1181600
uacaagacuagcugauuuc

SEQ ID NO: 1181602 - RNA, 19 nt, Artificial Sequence
  Description of Artificial Sequence: Synthetic oligonucleotide
  Sense strand starting at position 443 of SEQ ID NO: 916757
gcuagucuuguauaacacu

SEQ ID NO: 1181603 - RNA, 19 nt, Artificial Sequence
  Description of Artificial Sequence: Synthetic oligonucleotide
  Antisense strand to SEQ ID NO: 1181602
aguguuauacaagacuagc

SEQ ID NO: 1181604 - RNA, 19 nt, Artificial Sequence
  Description of Artificial Sequence: Synthetic oligonucleotide
  Sense strand starting at position 452 of SEQ ID NO: 916757
guauaacacuuguuaagau

SEQ ID NO: 1181605 - RNA, 19 nt, Artificial Sequence
  Description of Artificial Sequence: Synthetic oligonucleotide
  Antisense strand to SEQ ID NO: 1181604
aucuuaacaaguguuauac

SEQ ID NO: 1181606 - RNA, 19 nt, Artificial Sequence
  Description of Artificial Sequence: Synthetic oligonucleotide
  Sense strand starting at position 629 of SEQ ID NO: 916757
cccaguguaagucauaguu

SEQ ID NO: 1181607 - RNA, 19 nt, Artificial Sequence
  Description of Artificial Sequence: Synthetic oligonucleotide
  Antisense strand to SEQ ID NO: 1181606
aacuaugacuuacacuggg

SEQ ID NO: 1181608 - RNA, 19 nt, Artificial Sequence
  Description of Artificial Sequence: Synthetic oligonucleotide
  Sense strand starting at position 770 of SEQ ID NO: 916757
gacacuauuuguuggaaca

SEQ ID NO: 1181609 - RNA, 19 nt, Artificial Sequence
  Description of Artificial Sequence: Synthetic oligonucleotide
  Antisense strand to SEQ ID NO: 1181608
uguuccaacaaauaguguc

SEQ ID NO: 1181610 - RNA, 19 nt, Artificial Sequence
  Description of Artificial Sequence: Synthetic oligonucleotide
  Sense strand starting at position 772 of SEQ ID NO: 916757
cacuauuuguuggaacaga

SEQ ID NO: 1181611 - RNA, 19 nt, Artificial Sequence
  Description of Artificial Sequence: Synthetic oligonucleotide
  Antisense strand to SEQ ID NO: 1181610
ucuguuccaacaaauagug

SEQ ID NO: 1181612 - RNA, 19 nt, Artificial Sequence
  Description of Artificial Sequence: Synthetic oligonucleotide
  Sense strand starting at position 861 of SEQ ID NO: 916757
gccuaccuuggauauaaua

SEQ ID NO: 1181613 - RNA, 19 nt, Artificial Sequence
  Description of Artificial Sequence: Synthetic oligonucleotide
  Antisense strand to SEQ ID NO: 1181612
uauuauauccaagguaggc

SEQ ID NO: 1181614 - RNA, 19 nt, Artificial Sequence
  Description of Artificial Sequence: Synthetic oligonucleotide
  Sense strand starting at position 1007 of SEQ ID NO: 916757
augcgauugaguggaugaa

SEQ ID NO: 1181615 - RNA, 19 nt, Artificial Sequence
  Description of Artificial Sequence: Synthetic oligonucleotide
  Antisense strand to SEQ ID NO: 1181614
uucauccacucaaucgcau

SEQ ID NO: 1181616 - RNA, 19 nt, Artificial Sequence
  Description of Artificial Sequence: Synthetic oligonucleotide
  Sense strand starting at position 1213 of SEQ ID NO: 916757
cccagagucacggaacuuu

SEQ ID NO: 1181617 - RNA, 19 nt, Artificial Sequence
  Description of Artificial Sequence: Synthetic oligonucleotide
  Antisense strand to SEQ ID NO: 1181616
aaaguuccgugacucuggg

SEQ ID NO: 1181618 - RNA, 19 nt, Artificial Sequence
  Description of Artificial Sequence: Synthetic oligonucleotide
  Sense strand starting at position 1354 of SEQ ID NO: 916757
aggguuaccuacuuugaac

SEQ ID NO: 1181619 - RNA, 19 nt, Artificial Sequence
  Description of Artificial Sequence: Synthetic oligonucleotide
  Antisense strand to SEQ ID NO: 1181618
guucaaaguagguaacccu

SEQ ID NO: 1181620 - RNA, 19 nt, Artificial Sequence
  Description of Artificial Sequence: Synthetic oligonucleotide
  Sense strand starting at position 2492 of SEQ ID NO: 916757
gcuguucugucucuccaga

SEQ ID NO: 1181621 - RNA, 19 nt, Artificial Sequence
  Description of Artificial Sequence: Synthetic oligonucleotide
  Antisense strand to SEQ ID NO: 1181620
ucuggagagacagaacagc

SEQ ID NO: 1181622 - RNA, 19 nt, Artificial Sequence
  Description of Artificial Sequence: Synthetic oligonucleotide
  Sense strand starting at position 2497 of SEQ ID NO: 916757
ucugucucuccagaucgua

SEQ ID NO: 1181623 - RNA, 19 nt, Artificial Sequence
  Description of Artificial Sequence: Synthetic oligonucleotide
  Antisense strand to SEQ ID NO: 1181622
uacgaucuggagagacaga

SEQ ID NO: 1181624 - RNA, 19 nt, Artificial Sequence
  Description of Artificial Sequence: Synthetic oligonucleotide
  Sense strand starting at position 2807 of SEQ ID NO: 916757
aagcguccggcuucucaaa

SEQ ID NO: 1181625 - RNA, 19 nt, Artificial Sequence
  Description of Artificial Sequence: Synthetic oligonucleotide
  Antisense strand to SEQ ID NO: 1181624
uuugagaagccggacgcuu

SEQ ID NO: 1181626 - RNA, 19 nt, Artificial Sequence
  Description of Artificial Sequence: Synthetic oligonucleotide
  Sense strand starting at position 2875 of SEQ ID NO: 916757
augaaauacuguuugcagu

SEQ ID NO: 1181627 - RNA, 19 nt, Artificial Sequence
  Description of Artificial Sequence: Synthetic oligonucleotide
  Antisense strand to SEQ ID NO: 1181626
acugcaaacaguauuucau

SEQ ID NO: 1181628 - RNA, 19 nt, Artificial Sequence
  Description of Artificial Sequence: Synthetic oligonucleotide
  Sense strand starting at position 2877 of SEQ ID NO: 916757
gaaauacuguuugcagucu

SEQ ID NO: 1181629 - RNA, 19 nt, Artificial Sequence
  Description of Artificial Sequence: Synthetic oligonucleotide
  Antisense strand to SEQ ID NO: 1181628
agacugcaaacaguauuuc

SEQ ID NO: 1181630 - RNA, 19 nt, Artificial Sequence
  Description of Artificial Sequence: Synthetic oligonucleotide
  Sense strand starting at position 2934 of SEQ ID NO: 916757
augaguaagugcucagcuu

SEQ ID NO: 1181631 - RNA, 19 nt, Artificial Sequence
  Description of Artificial Sequence: Synthetic oligonucleotide
  Antisense strand to SEQ ID NO: 1181630
aagcugagcacuuacucau

SEQ ID NO: 1181632 - RNA, 19 nt, Artificial Sequence
  Description of Artificial Sequence: Synthetic oligonucleotide
  Sense strand starting at position 2975 of SEQ ID NO: 916757
gcuguaagagcccaaacaa

SEQ ID NO: 1181633 - RNA, 19 nt, Artificial Sequence
  Description of Artificial Sequence: Synthetic oligonucleotide
  Antisense strand to SEQ ID NO: 1181632
uuguuugggcucuuacagc

SEQ ID NO: 1181634 - RNA, 19 nt, Artificial Sequence
  Description of Artificial Sequence: Synthetic oligonucleotide
  Sense strand starting at position 3288 of SEQ ID NO: 916757
agcagaaucuaacaguaaa

SEQ ID NO: 1181635 - RNA, 19 nt, Artificial Sequence
  Description of Artificial Sequence: Synthetic oligonucleotide
  Antisense strand to SEQ ID NO: 1181634
uuuacuguuagauucugcu

SEQ ID NO: 1181636 - RNA, 19 nt, Artificial Sequence
  Description of Artificial Sequence: Synthetic oligonucleotide
  Sense strand starting at position 3421 of SEQ ID NO: 916757
gaaugacggucaucuguuu

SEQ ID NO: 1181637 - RNA, 19 nt, Artificial Sequence
  Description of Artificial Sequence: Synthetic oligonucleotide
  Antisense strand to SEQ ID NO: 1181636
aaacagaugaccgucauuc

SEQ ID NO: 1181638 - RNA, 19 nt, Artificial Sequence
  Description of Artificial Sequence: Synthetic oligonucleotide
  Sense strand starting at position 3439 of SEQ ID NO: 916757
ucaacaggguuagauagau

SEQ ID NO: 1181639 - RNA, 19 nt, Artificial Sequence
  Description of Artificial Sequence: Synthetic oligonucleotide
  Antisense strand to SEQ ID NO: 1181638
aucuaucuaacccuguuga

SEQ ID NO: 1181640 - RNA, 19 nt, Artificial Sequence
  Description of Artificial Sequence: Synthetic oligonucleotide
  Sense strand starting at position 3445 of SEQ ID NO: 916757
ggguuagauagaugucaaa

SEQ ID NO: 1181641 - RNA, 19 nt, Artificial Sequence
  Description of Artificial Sequence: Synthetic oligonucleotide
  Antisense strand to SEQ ID NO: 1181640
uuugacaucuaucuaaccc

SEQ ID NO: 1181642 - RNA, 19 nt, Artificial Sequence
  Description of Artificial Sequence: Synthetic oligonucleotide
  Sense strand starting at position 3462 of SEQ ID NO: 916757
aaaggauaguguugagaaa

SEQ ID NO: 1181643 - RNA, 19 nt, Artificial Sequence
  Description of Artificial Sequence: Synthetic oligonucleotide
  Antisense strand to SEQ ID NO: 1181642
uuucucaacacuauccuuu

SEQ ID NO: 1181644 - RNA, 19 nt, Artificial Sequence
  Description of Artificial Sequence: Synthetic oligonucleotide
  Sense strand starting at position 3561 of SEQ ID NO: 916757
cccuuaaacccaggaguua

SEQ ID NO: 1181645 - RNA, 19 nt, Artificial Sequence
  Description of Artificial Sequence: Synthetic oligonucleotide
  Antisense strand to SEQ ID NO: 1181644
uaacuccuggguuuaaggg

SEQ ID NO: 1181646 - RNA, 19 nt, Artificial Sequence
  Description of Artificial Sequence: Synthetic oligonucleotide
  Sense strand starting at position 3683 of SEQ ID NO: 916757
cuuuaucuagagggauuau

SEQ ID NO: 1181647 - RNA, 19 nt, Artificial Sequence
  Description of Artificial Sequence: Synthetic oligonucleotide
  Antisense strand to SEQ ID NO: 1181646
auaaucccucuagauaaag

SEQ ID NO: 1181648 - RNA, 19 nt, Artificial Sequence
  Description of Artificial Sequence: Synthetic oligonucleotide
  Sense strand starting at position 3755 of SEQ ID NO: 916757
aagcauauuggcuauugga

SEQ ID NO: 1181649 - RNA, 19 nt, Artificial Sequence
  Description of Artificial Sequence: Synthetic oligonucleotide
  Antisense strand to SEQ ID NO: 1181648
uccaauagccaauaugcuu

SEQ ID NO: 1181650 - RNA, 19 nt, Artificial Sequence
  Description of Artificial Sequence: Synthetic oligonucleotide
  Sense strand starting at position 3762 of SEQ ID NO: 916757
uuggcuauuggauauaugu

SEQ ID NO: 1181651 - RNA, 19 nt, Artificial Sequence
  Description of Artificial Sequence: Synthetic oligonucleotide
  Antisense strand to SEQ ID NO: 1181650
acauauauccaauagccaa

SEQ ID NO: 1181652 - RNA, 19 nt, Artificial Sequence
  Description of Artificial Sequence: Synthetic oligonucleotide
  Sense strand starting at position 3764 of SEQ ID NO: 916757
ggcuauuggauauauguau

SEQ ID NO: 1181653 - RNA, 19 nt, Artificial Sequence
  Description of Artificial Sequence: Synthetic oligonucleotide
  Antisense strand to SEQ ID NO: 1181652
auacauauauccaauagcc

SEQ ID NO: 1181654 - RNA, 19 nt, Artificial Sequence
  Description of Artificial Sequence: Synthetic oligonucleotide
  Sense strand starting at position 3818 of SEQ ID NO: 916757
auaccauauccugaugguu

SEQ ID NO: 1181655 - RNA, 19 nt, Artificial Sequence
  Description of Artificial Sequence: Synthetic oligonucleotide
  Antisense strand to SEQ ID NO: 1181654
aaccaucaggauaugguau

SEQ ID NO: 1181656 - RNA, 19 nt, Artificial Sequence
  Description of Artificial Sequence: Synthetic oligonucleotide
  Sense strand starting at position 3821 of SEQ ID NO: 916757
ccauauccugaugguuauu

SEQ ID NO: 1181657 - RNA, 19 nt, Artificial Sequence
  Description of Artificial Sequence: Synthetic oligonucleotide
  Antisense strand to SEQ ID NO: 1181656
aauaaccaucaggauaugg

SEQ ID NO: 1181658 - RNA, 19 nt, Artificial Sequence
  Description of Artificial Sequence: Synthetic oligonucleotide
  Sense strand starting at position 3857 of SEQ ID NO: 916757
aaaggagugugauggaacu

SEQ ID NO: 1181659 - RNA, 19 nt, Artificial Sequence
  Description of Artificial Sequence: Synthetic oligonucleotide
  Antisense strand to SEQ ID NO: 1181658
aguuccaucacacuccuuu

SEQ ID NO: 1181660 - RNA, 19 nt, Artificial Sequence
  Description of Artificial Sequence: Synthetic oligonucleotide
  Sense strand starting at position 3863 of SEQ ID NO: 916757
gugugauggaacugagaag

SEQ ID NO: 1181661 - RNA, 19 nt, Artificial Sequence
  Description of Artificial Sequence: Synthetic oligonucleotide
  Antisense strand to SEQ ID NO: 1181660
cuucucaguuccaucacac

SEQ ID NO: 1181662 - RNA, 19 nt, Artificial Sequence
  Description of Artificial Sequence: Synthetic oligonucleotide
  Sense strand starting at position 109 of SEQ ID NO: 916758
guuauuuaaucugaguauc

SEQ ID NO: 1181663 - RNA, 19 nt, Artificial Sequence
  Description of Artificial Sequence: Synthetic oligonucleotide
  Antisense strand to SEQ ID NO: 1181662
gauacucagauuaaauaac

SEQ ID NO: 1181664 - RNA, 19 nt, Artificial Sequence
  Description of Artificial Sequence: Synthetic oligonucleotide
  Sense strand starting at position 217 of SEQ ID NO: 916758
ugggaagaauauucuuugu

SEQ ID NO: 1181665 - RNA, 19 nt, Artificial Sequence
  Description of Artificial Sequence: Synthetic oligonucleotide
  Antisense strand to SEQ ID NO: 1181664
acaaagaauauucuuccca

SEQ ID NO: 1181666 - RNA, 19 nt, Artificial Sequence
  Description of Artificial Sequence: Synthetic oligonucleotide
  Sense strand starting at position 219 of SEQ ID NO: 916758
ggaagaauauucuuuguaa

SEQ ID NO: 1181667 - RNA, 19 nt, Artificial Sequence
  Description of Artificial Sequence: Synthetic oligonucleotide
  Antisense strand to SEQ ID NO: 1181666
uuacaaagaauauucuucc

SEQ ID NO: 1181668 - RNA, 19 nt, Artificial Sequence
  Description of Artificial Sequence: Synthetic oligonucleotide
  Sense strand starting at position 259 of SEQ ID NO: 916758
cguuguauuucuuucucca

SEQ ID NO: 1181669 - RNA, 19 nt, Artificial Sequence
  Description of Artificial Sequence: Synthetic oligonucleotide
  Antisense strand to SEQ ID NO: 1181668
uggagaaagaaauacaacg

SEQ ID NO: 1181670 - RNA, 19 nt, Artificial Sequence
  Description of Artificial Sequence: Synthetic oligonucleotide
  Sense strand starting at position 282 of SEQ ID NO: 916758
gucucuuacggauagacua

SEQ ID NO: 1181671 - RNA, 19 nt, Artificial Sequence
  Description of Artificial Sequence: Synthetic oligonucleotide
  Antisense strand to SEQ ID NO: 1181670
uagucuauccguaagagac

SEQ ID NO: 1181672 - RNA, 19 nt, Artificial Sequence
  Description of Artificial Sequence: Synthetic oligonucleotide
  Sense strand starting at position 293 of SEQ ID NO: 916758
auagacuacuguccuaaag

SEQ ID NO: 1181673 - RNA, 19 nt, Artificial Sequence
  Description of Artificial Sequence: Synthetic oligonucleotide
  Antisense strand to SEQ ID NO: 1181672
cuuuaggacaguagucuau

SEQ ID NO: 1181674 - RNA, 19 nt, Artificial Sequence
  Description of Artificial Sequence: Synthetic oligonucleotide
  Sense strand starting at position 476 of SEQ ID NO: 916758
auaauaugggcuugaaguu

SEQ ID NO: 1181675 - RNA, 19 nt, Artificial Sequence
  Description of Artificial Sequence: Synthetic oligonucleotide
  Antisense strand to SEQ ID NO: 1181674
aacuucaagcccauauuau

SEQ ID NO: 1181676 - RNA, 19 nt, Artificial Sequence
  Description of Artificial Sequence: Synthetic oligonucleotide
  Sense strand starting at position 477 of SEQ ID NO: 916758
uaauaugggcuugaaguua

SEQ ID NO: 1181677 - RNA, 19 nt, Artificial Sequence
  Description of Artificial Sequence: Synthetic oligonucleotide
  Antisense strand to SEQ ID NO: 1181676
uaacuucaagcccauauua

SEQ ID NO: 1181678 - RNA, 19 nt, Artificial Sequence
  Description of Artificial Sequence: Synthetic oligonucleotide
  Sense strand starting at position 561 of SEQ ID NO: 916758
acaguauucuaauuacgaa

SEQ ID NO: 1181679 - RNA, 19 nt, Artificial Sequence
  Description of Artificial Sequence: Synthetic oligonucleotide
  Antisense strand to SEQ ID NO: 1181678
uucguaauuagaauacugu

SEQ ID NO: 1181680 - RNA, 19 nt, Artificial Sequence
  Description of Artificial Sequence: Synthetic oligonucleotide
  Sense strand starting at position 606 of SEQ ID NO: 916758
aagucagagcuuuaaauug

SEQ ID NO: 1181681 - RNA, 19 nt, Artificial Sequence
  Description of Artificial Sequence: Synthetic oligonucleotide
  Antisense strand to SEQ ID NO: 1181680
caauuuaaagcucugacuu

SEQ ID NO: 1181682 - RNA, 19 nt, Artificial Sequence
  Description of Artificial Sequence: Synthetic oligonucleotide
  Sense strand starting at position 621 of SEQ ID NO: 916758
auuguuaaguacucgacau

SEQ ID NO: 1181683 - RNA, 19 nt, Artificial Sequence
  Description of Artificial Sequence: Synthetic oligonucleotide
  Antisense strand to SEQ ID NO: 1181682
augucgaguacuuaacaau

SEQ ID NO: 1181684 - RNA, 19 nt, Artificial Sequence
  Description of Artificial Sequence: Synthetic oligonucleotide
  Sense strand starting at position 623 of SEQ ID NO: 916758
uguuaaguacucgacauau

SEQ ID NO: 1181685 - RNA, 19 nt, Artificial Sequence
  Description of Artificial Sequence: Synthetic oligonucleotide
  Antisense strand to SEQ ID NO: 1181684
auaugucgaguacuuaaca

SEQ ID NO: 1181686 - RNA, 19 nt, Artificial Sequence
  Description of Artificial Sequence: Synthetic oligonucleotide
  Sense strand starting at position 625 of SEQ ID NO: 916758
uuaaguacucgacauauau

SEQ ID NO: 1181687 - RNA, 19 nt, Artificial Sequence
  Description of Artificial Sequence: Synthetic oligonucleotide
  Antisense strand to SEQ ID NO: 1181686
auauaugucgaguacuuaa

SEQ ID NO: 1181688 - RNA, 19 nt, Artificial Sequence
  Description of Artificial Sequence: Synthetic oligonucleotide
  Sense strand starting at position 631 of SEQ ID NO: 916758
acucgacauauaugagaug

SEQ ID NO: 1181689 - RNA, 19 nt, Artificial Sequence
  Description of Artificial Sequence: Synthetic oligonucleotide
  Antisense strand to SEQ ID NO: 1181688
caucucauauaugucgagu

SEQ ID NO: 1181690 - RNA, 19 nt, Artificial Sequence
  Description of Artificial Sequence: Synthetic oligonucleotide
  Sense strand starting at position 642 of SEQ ID NO: 916758
augagaugcugccugcaaa

SEQ ID NO: 1181691 - RNA, 19 nt, Artificial Sequence
  Description of Artificial Sequence: Synthetic oligonucleotide
  Antisense strand to SEQ ID NO: 1181690
uuugcaggcagcaucucau

SEQ ID NO: 1181692 - RNA, 19 nt, Artificial Sequence
  Description of Artificial Sequence: Synthetic oligonucleotide
  Sense strand starting at position 863 of SEQ ID NO: 916758
aggaaaccaucugcuuuaa

SEQ ID NO: 1181693 - RNA, 19 nt, Artificial Sequence
  Description of Artificial Sequence: Synthetic oligonucleotide
  Antisense strand to SEQ ID NO: 1181692
uuaaagcagaugguuuccu

SEQ ID NO: 1181694 - RNA, 19 nt, Artificial Sequence
  Description of Artificial Sequence: Synthetic oligonucleotide
  Sense strand starting at position 2358 of SEQ ID NO: 916758
cuuugugcugggcaaagua

SEQ ID NO: 1181695 - RNA, 19 nt, Artificial Sequence
  Description of Artificial Sequence: Synthetic oligonucleotide
  Antisense strand to SEQ ID NO: 1181694
uacuuugcccagcacaaag

SEQ ID NO: 1181696 - RNA, 19 nt, Artificial Sequence
  Description of Artificial Sequence: Synthetic oligonucleotide
  Sense strand starting at position 2368 of SEQ ID NO: 916758
ggcaaaguaaccgagaagu

SEQ ID NO: 1181697 - RNA, 19 nt, Artificial Sequence
  Description of Artificial Sequence: Synthetic oligonucleotide
  Antisense strand to SEQ ID NO: 1181696
acuucucgguuacuuugcc

SEQ ID NO: 1181698 - RNA, 19 nt, Artificial Sequence
  Description of Artificial Sequence: Synthetic oligonucleotide
  Sense strand starting at position 2444 of SEQ ID NO: 916758
gucuuuccauucuugagau

SEQ ID NO: 1181699 - RNA, 19 nt, Artificial Sequence
  Description of Artificial Sequence: Synthetic oligonucleotide
  Antisense strand to SEQ ID NO: 1181698
aucucaagaauggaaagac

SEQ ID NO: 1181700 - RNA, 19 nt, Artificial Sequence
  Description of Artificial Sequence: Synthetic oligonucleotide
  Sense strand starting at position 2513 of SEQ ID NO: 916758
ggcgaacucuuuccaaauu

SEQ ID NO: 1181701 - RNA, 19 nt, Artificial Sequence
  Description of Artificial Sequence: Synthetic oligonucleotide
  Antisense strand to SEQ ID NO: 1181700
aauuuggaaagaguucgcc

SEQ ID NO: 1181702 - RNA, 19 nt, Artificial Sequence
  Description of Artificial Sequence: Synthetic oligonucleotide
  Sense strand starting at position 2623 of SEQ ID NO: 916758
ugcguauuuaaaugcaugu

SEQ ID NO: 1181703 - RNA, 19 nt, Artificial Sequence
  Description of Artificial Sequence: Synthetic oligonucleotide
  Antisense strand to SEQ ID NO: 1181702
acaugcauuuaaauacgca

SEQ ID NO: 1181704 - RNA, 19 nt, Artificial Sequence
  Description of Artificial Sequence: Synthetic oligonucleotide
  Sense strand starting at position 2666 of SEQ ID NO: 916758
ggauuacccauaggcaagu

SEQ ID NO: 1181705 - RNA, 19 nt, Artificial Sequence
  Description of Artificial Sequence: Synthetic oligonucleotide
  Antisense strand to SEQ ID NO: 1181704
acuugccuauggguaaucc

SEQ ID NO: 1181706 - RNA, 19 nt, Artificial Sequence
  Description of Artificial Sequence: Synthetic oligonucleotide
  Sense strand starting at position 2679 of SEQ ID NO: 916758
gcaaguagguuuaucgugu

SEQ ID NO: 1181707 - RNA, 19 nt, Artificial Sequence
  Description of Artificial Sequence: Synthetic oligonucleotide
  Antisense strand to SEQ ID NO: 1181706
acacgauaaaccuacuugc

SEQ ID NO: 1181708 - RNA, 19 nt, Artificial Sequence
  Description of Artificial Sequence: Synthetic oligonucleotide
  Sense strand starting at position 2766 of SEQ ID NO: 916758
acgggaauuuaccauucuu

SEQ ID NO: 1181709 - RNA, 19 nt, Artificial Sequence
  Description of Artificial Sequence: Synthetic oligonucleotide
  Antisense strand to SEQ ID NO: 1181708
aagaaugguaaauucccgu

SEQ ID NO: 1181710 - RNA, 19 nt, Artificial Sequence
  Description of Artificial Sequence: Synthetic oligonucleotide
  Sense strand starting at position 2833 of SEQ ID NO: 916758
uuugaugggcgaggagauu

SEQ ID NO: 1181711 - RNA, 19 nt, Artificial Sequence
  Description of Artificial Sequence: Synthetic oligonucleotide
  Antisense strand to SEQ ID NO: 1181710
aaucuccucgcccaucaaa

SEQ ID NO: 1181712 - RNA, 19 nt, Artificial Sequence
  Description of Artificial Sequence: Synthetic oligonucleotide
  Sense strand starting at position 2918 of SEQ ID NO: 916758
uuaauuaggcccuguacaa

SEQ ID NO: 1181713 - RNA, 19 nt, Artificial Sequence
  Description of Artificial Sequence: Synthetic oligonucleotide
  Antisense strand to SEQ ID NO: 1181712
uuguacagggccuaauuaa

SEQ ID NO: 1181714 - RNA, 19 nt, Artificial Sequence
  Description of Artificial Sequence: Synthetic oligonucleotide
  Sense strand starting at position 2965 of SEQ ID NO: 916758
guugauaaauuuggaagau

SEQ ID NO: 1181715 - RNA, 19 nt, Artificial Sequence
  Description of Artificial Sequence: Synthetic oligonucleotide
  Antisense strand to SEQ ID NO: 1181714
aucuuccaaauuuaucaac

SEQ ID NO: 1181716 - RNA, 19 nt, Artificial Sequence
  Description of Artificial Sequence: Synthetic oligonucleotide
  Sense strand starting at position 3010 of SEQ ID NO: 916758
guuuaagaauauguaguga

SEQ ID NO: 1181717 - RNA, 19 nt, Artificial Sequence
  Description of Artificial Sequence: Synthetic oligonucleotide
  Antisense strand to SEQ ID NO: 1181716
ucacuacauauucuuaaac

SEQ ID NO: 1181718 - RNA, 19 nt, Artificial Sequence
  Description of Artificial Sequence: Synthetic oligonucleotide
  Sense strand starting at position 3055 of SEQ ID NO: 916758
augaauagaugagaaugaa

SEQ ID NO: 1181719 - RNA, 19 nt, Artificial Sequence
  Description of Artificial Sequence: Synthetic oligonucleotide
  Antisense strand to SEQ ID NO: 1181718
uucauucucaucuauucau

SEQ ID NO: 1181720 - RNA, 19 nt, Artificial Sequence
  Description of Artificial Sequence: Synthetic oligonucleotide
  Sense strand starting at position 3112 of SEQ ID NO: 916758
uagguuaauugaguagauu

SEQ ID NO: 1181721 - RNA, 19 nt, Artificial Sequence
  Description of Artificial Sequence: Synthetic oligonucleotide
  Antisense strand to SEQ ID NO: 1181720
aaucuacucaauuaaccua

SEQ ID NO: 1181722 - RNA, 19 nt, Artificial Sequence
  Description of Artificial Sequence: Synthetic oligonucleotide
  Sense strand starting at position 3180 of SEQ ID NO: 916758
uguuuauugucugcauuua

SEQ ID NO: 1181723 - RNA, 19 nt, Artificial Sequence
  Description of Artificial Sequence: Synthetic oligonucleotide
  Antisense strand to SEQ ID NO: 1181722
uaaaugcagacaauaaaca

SEQ ID NO: 1181724 - RNA, 19 nt, Artificial Sequence
  Description of Artificial Sequence: Synthetic oligonucleotide
  Sense strand starting at position 3181 of SEQ ID NO: 916758
guuuauugucugcauuuau

SEQ ID NO: 1181725 - RNA, 19 nt, Artificial Sequence
  Description of Artificial Sequence: Synthetic oligonucleotide
  Antisense strand to SEQ ID NO: 1181724
auaaaugcagacaauaaac

SEQ ID NO: 1181726 - RNA, 19 nt, Artificial Sequence
  Description of Artificial Sequence: Synthetic oligonucleotide
  Sense strand starting at position 3191 of SEQ ID NO: 916758
ugcauuuauuguguauaca

SEQ ID NO: 1181727 - RNA, 19 nt, Artificial Sequence
  Description of Artificial Sequence: Synthetic oligonucleotide
  Antisense strand to SEQ ID NO: 1181726
uguauacacaauaaaugca

SEQ ID NO: 1181728 - RNA, 19 nt, Artificial Sequence
  Description of Artificial Sequence: Synthetic oligonucleotide
  Sense strand starting at position 3207 of SEQ ID NO: 916758
acaacaugaucguuugaag

SEQ ID NO: 1181729 - RNA, 19 nt, Artificial Sequence
  Description of Artificial Sequence: Synthetic oligonucleotide
  Antisense strand to SEQ ID NO: 1181728
cuucaaacgaucauguugu

SEQ ID NO: 1181730 - RNA, 19 nt, Artificial Sequence
  Description of Artificial Sequence: Synthetic oligonucleotide
  Sense strand starting at position 3214 of SEQ ID NO: 916758
gaucguuugaaguaaugua

SEQ ID NO: 1181731 - RNA, 19 nt, Artificial Sequence
  Description of Artificial Sequence: Synthetic oligonucleotide
  Antisense strand to SEQ ID NO: 1181730
uacauuacuucaaacgauc

SEQ ID NO: 1181732 - RNA, 19 nt, Artificial Sequence
  Description of Artificial Sequence: Synthetic oligonucleotide
  Sense strand starting at position 3855 of SEQ ID NO: 916758
cuggccuugaguuagcauu

SEQ ID NO: 1181733 - RNA, 19 nt, Artificial Sequence
  Description of Artificial Sequence: Synthetic oligonucleotide
  Antisense strand to SEQ ID NO: 1181732
aaugcuaacucaaggccag

SEQ ID NO: 1181734 - RNA, 19 nt, Artificial Sequence
  Description of Artificial Sequence: Synthetic oligonucleotide
  Sense strand starting at position 3950 of SEQ ID NO: 916758
guccguuggaauuacugua

SEQ ID NO: 1181735 - RNA, 19 nt, Artificial Sequence
  Description of Artificial Sequence: Synthetic oligonucleotide
  Antisense strand to SEQ ID NO: 1181734
uacaguaauuccaacggac

SEQ ID NO: 1181736 - RNA, 19 nt, Artificial Sequence
  Description of Artificial Sequence: Synthetic oligonucleotide
  Sense strand starting at position 3955 of SEQ ID NO: 916758
uuggaauuacuguaacuuc

SEQ ID NO: 1181737 - RNA, 19 nt, Artificial Sequence
  Description of Artificial Sequence: Synthetic oligonucleotide
  Antisense strand to SEQ ID NO: 1181736
gaaguuacaguaauuccaa

SEQ ID NO: 1181738 - RNA, 19 nt, Artificial Sequence
  Description of Artificial Sequence: Synthetic oligonucleotide
  Sense strand starting at position 3966 of SEQ ID NO: 916758
guaacuucucaaugaauga

SEQ ID NO: 1181739 - RNA, 19 nt, Artificial Sequence
  Description of Artificial Sequence: Synthetic oligonucleotide
  Antisense strand to SEQ ID NO: 1181738
ucauucauugagaaguuac

SEQ ID NO: 1181740 - RNA, 19 nt, Artificial Sequence
  Description of Artificial Sequence: Synthetic oligonucleotide
  Sense strand starting at position 3970 of SEQ ID NO: 916758
cuucucaaugaaugaguga

SEQ ID NO: 1181741 - RNA, 19 nt, Artificial Sequence
  Description of Artificial Sequence: Synthetic oligonucleotide
  Antisense strand to SEQ ID NO: 1181740
ucacucauucauugagaag

SEQ ID NO: 1181742 - RNA, 19 nt, Artificial Sequence
  Description of Artificial Sequence: Synthetic oligonucleotide
  Sense strand starting at position 64 of SEQ ID NO: 916759
ucuauuuagucuggauggu

SEQ ID NO: 1181743 - RNA, 19 nt, Artificial Sequence
  Description of Artificial Sequence: Synthetic oligonucleotide
  Antisense strand to SEQ ID NO: 1181742
accauccagacuaaauaga

SEQ ID NO: 1181744 - RNA, 19 nt, Artificial Sequence
  Description of Artificial Sequence: Synthetic oligonucleotide
  Sense strand starting at position 85 of SEQ ID NO: 916759
gggauagcuucucugcuga

SEQ ID NO: 1181745 - RNA, 19 nt, Artificial Sequence
  Description of Artificial Sequence: Synthetic oligonucleotide
  Antisense strand to SEQ ID NO: 1181744
ucagcagagaagcuauccc

SEQ ID NO: 1181746 - RNA, 19 nt, Artificial Sequence
  Description of Artificial Sequence: Synthetic oligonucleotide
  Sense strand starting at position 87 of SEQ ID NO: 916759
gauagcuucucugcugauu

SEQ ID NO: 1181747 - RNA, 19 nt, Artificial Sequence
  Description of Artificial Sequence: Synthetic oligonucleotide
  Antisense strand to SEQ ID NO: 1181746
aaucagcagagaagcuauc

SEQ ID NO: 1181748 - RNA, 19 nt, Artificial Sequence
  Description of Artificial Sequence: Synthetic oligonucleotide
  Sense strand starting at position 96 of SEQ ID NO: 916759
ucugcugauuuggauagua

SEQ ID NO: 1181749 - RNA, 19 nt, Artificial Sequence
  Description of Artificial Sequence: Synthetic oligonucleotide
  Antisense strand to SEQ ID NO: 1181748
uacuauccaaaucagcaga

SEQ ID NO: 1181750 - RNA, 19 nt, Artificial Sequence
  Description of Artificial Sequence: Synthetic oligonucleotide
  Sense strand starting at position 186 of SEQ ID NO: 916759
cagagauguuucucacuag

SEQ ID NO: 1181751 - RNA, 19 nt, Artificial Sequence
  Description of Artificial Sequence: Synthetic oligonucleotide
  Antisense strand to SEQ ID NO: 1181750
cuagugagaaacaucucug

SEQ ID NO: 1181752 - RNA, 19 nt, Artificial Sequence
  Description of Artificial Sequence: Synthetic oligonucleotide
  Sense strand starting at position 189 of SEQ ID NO: 916759
agauguuucucacuagcaa

SEQ ID NO: 1181753 - RNA, 19 nt, Artificial Sequence
  Description of Artificial Sequence: Synthetic oligonucleotide
  Antisense strand to SEQ ID NO: 1181752
uugcuagugagaaacaucu

SEQ ID NO: 1181754 - RNA, 19 nt, Artificial Sequence
  Description of Artificial Sequence: Synthetic oligonucleotide
  Sense strand starting at position 209 of SEQ ID NO: 916759
gggcacuuuggugaucuca

SEQ ID NO: 1181755 - RNA, 19 nt, Artificial Sequence
  Description of Artificial Sequence: Synthetic oligonucleotide
  Antisense strand to SEQ ID NO: 1181754
ugagaucaccaaagugccc

SEQ ID NO: 1181756 - RNA, 19 nt, Artificial Sequence
  Description of Artificial Sequence: Synthetic oligonucleotide
  Sense strand starting at position 211 of SEQ ID NO: 916759
gcacuuuggugaucucaga

SEQ ID NO: 1181757 - RNA, 19 nt, Artificial Sequence
  Description of Artificial Sequence: Synthetic oligonucleotide
  Antisense strand to SEQ ID NO: 1181756
ucugagaucaccaaagugc

SEQ ID NO: 1181758 - RNA, 19 nt, Artificial Sequence
  Description of Artificial Sequence: Synthetic oligonucleotide
  Sense strand starting at position 366 of SEQ ID NO: 916759
cggugaugcacccagaacu

SEQ ID NO: 1181759 - RNA, 19 nt, Artificial Sequence
  Description of Artificial Sequence: Synthetic oligonucleotide
  Antisense strand to SEQ ID NO: 1181758
aguucugggugcaucaccg

SEQ ID NO: 1181760 - RNA, 19 nt, Artificial Sequence
  Description of Artificial Sequence: Synthetic oligonucleotide
  Sense strand starting at position 536 of SEQ ID NO: 916759
cagagacauuugggcagaa

SEQ ID NO: 1181761 - RNA, 19 nt, Artificial Sequence
  Description of Artificial Sequence: Synthetic oligonucleotide
  Antisense strand to SEQ ID NO: 1181760
uucugcccaaaugucucug

SEQ ID NO: 1181762 - RNA, 19 nt, Artificial Sequence
  Description of Artificial Sequence: Synthetic oligonucleotide
  Sense strand starting at position 828 of SEQ ID NO: 916759
gccggugcauccuucucaa

SEQ ID NO: 1181763 - RNA, 19 nt, Artificial Sequence
  Description of Artificial Sequence: Synthetic oligonucleotide
  Antisense strand to SEQ ID NO: 1181762
uugagaaggaugcaccggc

SEQ ID NO: 1181764 - RNA, 19 nt, Artificial Sequence
  Description of Artificial Sequence: Synthetic oligonucleotide
  Sense strand starting at position 1049 of SEQ ID NO: 916759
agaacuacuuccuuagagu

SEQ ID NO: 1181765 - RNA, 19 nt, Artificial Sequence
  Description of Artificial Sequence: Synthetic oligonucleotide
  Antisense strand to SEQ ID NO: 1181764
acucuaaggaaguaguucu

SEQ ID NO: 1181766 - RNA, 19 nt, Artificial Sequence
  Description of Artificial Sequence: Synthetic oligonucleotide
  Sense strand starting at position 1058 of SEQ ID NO: 916759
uccuuagaguccucuggac

SEQ ID NO: 1181767 - RNA, 19 nt, Artificial Sequence
  Description of Artificial Sequence: Synthetic oligonucleotide
  Antisense strand to SEQ ID NO: 1181766
guccagaggacucuaagga

SEQ ID NO: 1181768 - RNA, 19 nt, Artificial Sequence
  Description of Artificial Sequence: Synthetic oligonucleotide
  Sense strand starting at position 1060 of SEQ ID NO: 916759
cuuagaguccucuggacug

SEQ ID NO: 1181769 - RNA, 19 nt, Artificial Sequence
  Description of Artificial Sequence: Synthetic oligonucleotide
  Antisense strand to SEQ ID NO: 1181768
caguccagaggacucuaag

SEQ ID NO: 1181770 - RNA, 19 nt, Artificial Sequence
  Description of Artificial Sequence: Synthetic oligonucleotide
  Sense strand starting at position 1203 of SEQ ID NO: 916759
cuuaguccucuuuggaauu

SEQ ID NO: 1181771 - RNA, 19 nt, Artificial Sequence
  Description of Artificial Sequence: Synthetic oligonucleotide
  Antisense strand to SEQ ID NO: 1181770
aauuccaaagaggacuaag

SEQ ID NO: 1181772 - RNA, 19 nt, Artificial Sequence
  Description of Artificial Sequence: Synthetic oligonucleotide
  Sense strand starting at position 1214 of SEQ ID NO: 916759
uuggaauucugucccaucu

SEQ ID NO: 1181773 - RNA, 19 nt, Artificial Sequence
  Description of Artificial Sequence: Synthetic oligonucleotide
  Antisense strand to SEQ ID NO: 1181772
agaugggacagaauuccaa

SEQ ID NO: 1181774 - RNA, 19 nt, Artificial Sequence
  Description of Artificial Sequence: Synthetic oligonucleotide
  Sense strand starting at position 1305 of SEQ ID NO: 916759
aaugcagcuucggcuuaaa

SEQ ID NO: 1181775 - RNA, 19 nt, Artificial Sequence
  Description of Artificial Sequence: Synthetic oligonucleotide
  Antisense strand to SEQ ID NO: 1181774
uuuaagccgaagcugcauu

SEQ ID NO: 1181776 - RNA, 19 nt, Artificial Sequence
  Description of Artificial Sequence: Synthetic oligonucleotide
  Sense strand starting at position 1551 of SEQ ID NO: 916759
guggguaaguccagguaca

SEQ ID NO: 1181777 - RNA, 19 nt, Artificial Sequence
  Description of Artificial Sequence: Synthetic oligonucleotide
  Antisense strand to SEQ ID NO: 1181776
uguaccuggacuuacccac

SEQ ID NO: 1181778 - RNA, 19 nt, Artificial Sequence
  Description of Artificial Sequence: Synthetic oligonucleotide
  Sense strand starting at position 1635 of SEQ ID NO: 916759
ggcuccucuugggugagua

SEQ ID NO: 1181779 - RNA, 19 nt, Artificial Sequence
  Description of Artificial Sequence: Synthetic oligonucleotide
  Antisense strand to SEQ ID NO: 1181778
uacucacccaagaggagcc

SEQ ID NO: 1181780 - RNA, 19 nt, Artificial Sequence
  Description of Artificial Sequence: Synthetic oligonucleotide
  Sense strand starting at position 1868 of SEQ ID NO: 916759
ugccuuacgguagaggaau

SEQ ID NO: 1181781 - RNA, 19 nt, Artificial Sequence
  Description of Artificial Sequence: Synthetic oligonucleotide
  Antisense strand to SEQ ID NO: 1181780
auuccucuaccguaaggca

SEQ ID NO: 1181782 - RNA, 19 nt, Artificial Sequence
  Description of Artificial Sequence: Synthetic oligonucleotide
  Sense strand starting at position 2428 of SEQ ID NO: 916759
agcagaagguguucgagua

SEQ ID NO: 1181783 - RNA, 19 nt, Artificial Sequence
  Description of Artificial Sequence: Synthetic oligonucleotide
  Antisense strand to SEQ ID NO: 1181782
uacucgaacaccuucugcu

SEQ ID NO: 1181784 - RNA, 19 nt, Artificial Sequence
  Description of Artificial Sequence: Synthetic oligonucleotide
  Sense strand starting at position 2429 of SEQ ID NO: 916759
gcagaagguguucgaguac

SEQ ID NO: 1181785 - RNA, 19 nt, Artificial Sequence
  Description of Artificial Sequence: Synthetic oligonucleotide
  Antisense strand to SEQ ID NO: 1181784
guacucgaacaccuucugc

SEQ ID NO: 1181786 - RNA, 19 nt, Artificial Sequence
  Description of Artificial Sequence: Synthetic oligonucleotide
  Sense strand starting at position 2637 of SEQ ID NO: 916759
gggacagcgacccguaauu

SEQ ID NO: 1181787 - RNA, 19 nt, Artificial Sequence
  Description of Artificial Sequence: Synthetic oligonucleotide
  Antisense strand to SEQ ID NO: 1181786
aauuacgggucgcuguccc

SEQ ID NO: 1181788 - RNA, 19 nt, Artificial Sequence
  Description of Artificial Sequence: Synthetic oligonucleotide
  Sense strand starting at position 2647 of SEQ ID NO: 916759
cccguaauucaggacgaua

SEQ ID NO: 1181789 - RNA, 19 nt, Artificial Sequence
  Description of Artificial Sequence: Synthetic oligonucleotide
  Antisense strand to SEQ ID NO: 1181788
uaucguccugaauuacggg

SEQ ID NO: 1181790 - RNA, 19 nt, Artificial Sequence
  Description of Artificial Sequence: Synthetic oligonucleotide
  Sense strand starting at position 2649 of SEQ ID NO: 916759
cguaauucaggacgauaau

SEQ ID NO: 1181791 - RNA, 19 nt, Artificial Sequence
  Description of Artificial Sequence: Synthetic oligonucleotide
  Antisense strand to SEQ ID NO: 1181790
auuaucguccugaauuacg

SEQ ID NO: 1181792 - RNA, 19 nt, Artificial Sequence
  Description of Artificial Sequence: Synthetic oligonucleotide
  Sense strand starting at position 2816 of SEQ ID NO: 916759
cgcauccuccaccaugauu

SEQ ID NO: 1181793 - RNA, 19 nt, Artificial Sequence
  Description of Artificial Sequence: Synthetic oligonucleotide
  Antisense strand to SEQ ID NO: 1181792
aaucaugguggaggaugcg

SEQ ID NO: 1181794 - RNA, 19 nt, Artificial Sequence
  Description of Artificial Sequence: Synthetic oligonucleotide
  Sense strand starting at position 3061 of SEQ ID NO: 916759
auccuauuggcaugaaaug

SEQ ID NO: 1181795 - RNA, 19 nt, Artificial Sequence
  Description of Artificial Sequence: Synthetic oligonucleotide
  Antisense strand to SEQ ID NO: 1181794
cauuucaugccaauaggau

SEQ ID NO: 1181796 - RNA, 19 nt, Artificial Sequence
  Description of Artificial Sequence: Synthetic oligonucleotide
  Sense strand starting at position 3226 of SEQ ID NO: 916759
ucugguaauuuggaagaag

SEQ ID NO: 1181797 - RNA, 19 nt, Artificial Sequence
  Description of Artificial Sequence: Synthetic oligonucleotide
  Antisense strand to SEQ ID NO: 1181796
cuucuuccaaauuaccaga

SEQ ID NO: 1181798 - RNA, 19 nt, Artificial Sequence
  Description of Artificial Sequence: Synthetic oligonucleotide
  Sense strand starting at position 3285 of SEQ ID NO: 916759
gggagucacagguaugcau

SEQ ID NO: 1181799 - RNA, 19 nt, Artificial Sequence
  Description of Artificial Sequence: Synthetic oligonucleotide
  Antisense strand to SEQ ID NO: 1181798
augcauaccugugacuccc

SEQ ID NO: 1181800 - RNA, 19 nt, Artificial Sequence
  Description of Artificial Sequence: Synthetic oligonucleotide
  Sense strand starting at position 3540 of SEQ ID NO: 916759
aagugcuuuccauguguuu

SEQ ID NO: 1181801 - RNA, 19 nt, Artificial Sequence
  Description of Artificial Sequence: Synthetic oligonucleotide
  Antisense strand to SEQ ID NO: 1181800
aaacacauggaaagcacuu

SEQ ID NO: 1181802 - RNA, 19 nt, Artificial Sequence
  Description of Artificial Sequence: Synthetic oligonucleotide
  Sense strand starting at position 3542 of SEQ ID NO: 916759
gugcuuuccauguguuuaa

SEQ ID NO: 1181803 - RNA, 19 nt, Artificial Sequence
  Description of Artificial Sequence: Synthetic oligonucleotide
  Antisense strand to SEQ ID NO: 1181802
uuaaacacauggaaagcac

SEQ ID NO: 1181804 - RNA, 19 nt, Artificial Sequence
  Description of Artificial Sequence: Synthetic oligonucleotide
  Sense strand starting at position 3543 of SEQ ID NO: 916759
ugcuuuccauguguuuaau

SEQ ID NO: 1181805 - RNA, 19 nt, Artificial Sequence
  Description of Artificial Sequence: Synthetic oligonucleotide
  Antisense strand to SEQ ID NO: 1181804
auuaaacacauggaaagca

SEQ ID NO: 1181806 - RNA, 19 nt, Artificial Sequence
  Description of Artificial Sequence: Synthetic oligonucleotide
  Sense strand starting at position 3571 of SEQ ID NO: 916759
gauccugugagguauguac

SEQ ID NO: 1181807 - RNA, 19 nt, Artificial Sequence
  Description of Artificial Sequence: Synthetic oligonucleotide
  Antisense strand to SEQ ID NO: 1181806
guacauaccucacaggauc

SEQ ID NO: 1181808 - RNA, 19 nt, Artificial Sequence
  Description of Artificial Sequence: Synthetic oligonucleotide
  Sense strand starting at position 3573 of SEQ ID NO: 916759
uccugugagguauguacuu

SEQ ID NO: 1181809 - RNA, 19 nt, Artificial Sequence
  Description of Artificial Sequence: Synthetic oligonucleotide
  Antisense strand to SEQ ID NO: 1181808
aaguacauaccucacagga

SEQ ID NO: 1181810 - RNA, 19 nt, Artificial Sequence
  Description of Artificial Sequence: Synthetic oligonucleotide
  Sense strand starting at position 3578 of SEQ ID NO: 916759
ugagguauguacuucuguu

SEQ ID NO: 1181811 - RNA, 19 nt, Artificial Sequence
  Description of Artificial Sequence: Synthetic oligonucleotide
  Antisense strand to SEQ ID NO: 1181810
aacagaaguacauaccuca

SEQ ID NO: 1181812 - RNA, 19 nt, Artificial Sequence
  Description of Artificial Sequence: Synthetic oligonucleotide
  Sense strand starting at position 3629 of SEQ ID NO: 916759
cagggauauuaaggaaauu

SEQ ID NO: 1181813 - RNA, 19 nt, Artificial Sequence
  Description of Artificial Sequence: Synthetic oligonucleotide
  Antisense strand to SEQ ID NO: 1181812
aauuuccuuaauaucccug

SEQ ID NO: 1181814 - RNA, 19 nt, Artificial Sequence
  Description of Artificial Sequence: Synthetic oligonucleotide
  Sense strand starting at position 3707 of SEQ ID NO: 916759
ccacguacucaccauggua

SEQ ID NO: 1181815 - RNA, 19 nt, Artificial Sequence
  Description of Artificial Sequence: Synthetic oligonucleotide
  Antisense strand to SEQ ID NO: 1181814
uaccauggugaguacgugg

SEQ ID NO: 1181816 - RNA, 19 nt, Artificial Sequence
  Description of Artificial Sequence: Synthetic oligonucleotide
  Sense strand starting at position 3709 of SEQ ID NO: 916759
acguacucaccaugguaua

SEQ ID NO: 1181817 - RNA, 19 nt, Artificial Sequence
  Description of Artificial Sequence: Synthetic oligonucleotide
  Antisense strand to SEQ ID NO: 1181816
uauaccauggugaguacgu

SEQ ID NO: 1181818 - RNA, 19 nt, Artificial Sequence
  Description of Artificial Sequence: Synthetic oligonucleotide
  Sense strand starting at position 3720 of SEQ ID NO: 916759
augguauacugcguauacu

SEQ ID NO: 1181819 - RNA, 19 nt, Artificial Sequence
  Description of Artificial Sequence: Synthetic oligonucleotide
  Antisense strand to SEQ ID NO: 1181818
aguauacgcaguauaccau

SEQ ID NO: 1181820 - RNA, 19 nt, Artificial Sequence
  Description of Artificial Sequence: Synthetic oligonucleotide
  Sense strand starting at position 3730 of SEQ ID NO: 916759
gcguauacucuguauguau

SEQ ID NO: 1181821 - RNA, 19 nt, Artificial Sequence
  Description of Artificial Sequence: Synthetic oligonucleotide
  Antisense strand to SEQ ID NO: 1181820
auacauacagaguauacgc

SEQ ID NO: 1181822 - RNA, 19 nt, Artificial Sequence
  Description of Artificial Sequence: Synthetic oligonucleotide
  Sense strand starting at position 63 of SEQ ID NO: 916760
gacccaggcucaugauaag

SEQ ID NO: 1181823 - RNA, 19 nt, Artificial Sequence
  Description of Artificial Sequence: Synthetic oligonucleotide
  Antisense strand to SEQ ID NO: 1181822
cuuaucaugagccuggguc

SEQ ID NO: 1181824 - RNA, 19 nt, Artificial Sequence
  Description of Artificial Sequence: Synthetic oligonucleotide
  Sense strand starting at position 66 of SEQ ID NO: 916760
ccaggcucaugauaaggaa

SEQ ID NO: 1181825 - RNA, 19 nt, Artificial Sequence
  Description of Artificial Sequence: Synthetic oligonucleotide
  Antisense strand to SEQ ID NO: 1181824
uuccuuaucaugagccugg

SEQ ID NO: 1181826 - RNA, 19 nt, Artificial Sequence
  Description of Artificial Sequence: Synthetic oligonucleotide
  Sense strand starting at position 81 of SEQ ID NO: 916760
ggaagacccuaguagagaa

SEQ ID NO: 1181827 - RNA, 19 nt, Artificial Sequence
  Description of Artificial Sequence: Synthetic oligonucleotide
  Antisense strand to SEQ ID NO: 1181826
uucucuacuagggucuucc

SEQ ID NO: 1181828 - RNA, 19 nt, Artificial Sequence
  Description of Artificial Sequence: Synthetic oligonucleotide
  Sense strand starting at position 120 of SEQ ID NO: 916760
uguggacucuccucucaau

SEQ ID NO: 1181829 - RNA, 19 nt, Artificial Sequence
  Description of Artificial Sequence: Synthetic oligonucleotide
  Antisense strand to SEQ ID NO: 1181828
auugagaggagaguccaca

SEQ ID NO: 1181830 - RNA, 19 nt, Artificial Sequence
  Description of Artificial Sequence: Synthetic oligonucleotide
  Sense strand starting at position 133 of SEQ ID NO: 916760
cucaauucugauugcaaag

SEQ ID NO: 1181831 - RNA, 19 nt, Artificial Sequence
  Description of Artificial Sequence: Synthetic oligonucleotide
  Antisense strand to SEQ ID NO: 1181830
cuuugcaaucagaauugag

SEQ ID NO: 1181832 - RNA, 19 nt, Artificial Sequence
  Description of Artificial Sequence: Synthetic oligonucleotide
  Sense strand starting at position 553 of SEQ ID NO: 916760
gaggaagacucugguuaaa

SEQ ID NO: 1181833 - RNA, 19 nt, Artificial Sequence
  Description of Artificial Sequence: Synthetic oligonucleotide
  Antisense strand to SEQ ID NO: 1181832
uuuaaccagagucuuccuc

SEQ ID NO: 1181834 - RNA, 19 nt, Artificial Sequence
  Description of Artificial Sequence: Synthetic oligonucleotide
  Sense strand starting at position 772 of SEQ ID NO: 916760
ucuauuuagucuggauggu

SEQ ID NO: 1181835 - RNA, 19 nt, Artificial Sequence
  Description of Artificial Sequence: Synthetic oligonucleotide
  Antisense strand to SEQ ID NO: 1181834
accauccagacuaaauaga

SEQ ID NO: 1181836 - RNA, 19 nt, Artificial Sequence
  Description of Artificial Sequence: Synthetic oligonucleotide
  Sense strand starting at position 793 of SEQ ID NO: 916760
gggauagcuucucugcuga

SEQ ID NO: 1181837 - RNA, 19 nt, Artificial Sequence
  Description of Artificial Sequence: Synthetic oligonucleotide
  Antisense strand to SEQ ID NO: 1181836
ucagcagagaagcuauccc

SEQ ID NO: 1181838 - RNA, 19 nt, Artificial Sequence
  Description of Artificial Sequence: Synthetic oligonucleotide
  Sense strand starting at position 795 of SEQ ID NO: 916760
gauagcuucucugcugauu

SEQ ID NO: 1181839 - RNA, 19 nt, Artificial Sequence
  Description of Artificial Sequence: Synthetic oligonucleotide
  Antisense strand to SEQ ID NO: 1181838
aaucagcagagaagcuauc

SEQ ID NO: 1181840 - RNA, 19 nt, Artificial Sequence
  Description of Artificial Sequence: Synthetic oligonucleotide
  Sense strand starting at position 804 of SEQ ID NO: 916760
ucugcugauuuggauagua

SEQ ID NO: 1181841 - RNA, 19 nt, Artificial Sequence
  Description of Artificial Sequence: Synthetic oligonucleotide
  Antisense strand to SEQ ID NO: 1181840
uacuauccaaaucagcaga

SEQ ID NO: 1181842 - RNA, 19 nt, Artificial Sequence
  Description of Artificial Sequence: Synthetic oligonucleotide
  Sense strand starting at position 894 of SEQ ID NO: 916760
cagagauguuucucacuag

SEQ ID NO: 1181843 - RNA, 19 nt, Artificial Sequence
  Description of Artificial Sequence: Synthetic oligonucleotide
  Antisense strand to SEQ ID NO: 1181842
cuagugagaaacaucucug

SEQ ID NO: 1181844 - RNA, 19 nt, Artificial Sequence
  Description of Artificial Sequence: Synthetic oligonucleotide
  Sense strand starting at position 897 of SEQ ID NO: 916760
agauguuucucacuagcaa

SEQ ID NO: 1181845 - RNA, 19 nt, Artificial Sequence
  Description of Artificial Sequence: Synthetic oligonucleotide
  Antisense strand to SEQ ID NO: 1181844
uugcuagugagaaacaucu

SEQ ID NO: 1181846 - RNA, 19 nt, Artificial Sequence
  Description of Artificial Sequence: Synthetic oligonucleotide
  Sense strand starting at position 917 of SEQ ID NO: 916760
gggcacuuuggugaucuca

SEQ ID NO: 1181847 - RNA, 19 nt, Artificial Sequence
  Description of Artificial Sequence: Synthetic oligonucleotide
  Antisense strand to SEQ ID NO: 1181846
ugagaucaccaaagugccc

SEQ ID NO: 1181848 - RNA, 19 nt, Artificial Sequence
  Description of Artificial Sequence: Synthetic oligonucleotide
  Sense strand starting at position 919 of SEQ ID NO: 916760
gcacuuuggugaucucaga

SEQ ID NO: 1181849 - RNA, 19 nt, Artificial Sequence
  Description of Artificial Sequence: Synthetic oligonucleotide
  Antisense strand to SEQ ID NO: 1181848
ucugagaucaccaaagugc

SEQ ID NO: 1181850 - RNA, 19 nt, Artificial Sequence
  Description of Artificial Sequence: Synthetic oligonucleotide
  Sense strand starting at position 1074 of SEQ ID NO: 916760
cggugaugcacccagaacu

SEQ ID NO: 1181851 - RNA, 19 nt, Artificial Sequence
  Description of Artificial Sequence: Synthetic oligonucleotide
  Antisense strand to SEQ ID NO: 1181850
aguucugggugcaucaccg

SEQ ID NO: 1181852 - RNA, 19 nt, Artificial Sequence
  Description of Artificial Sequence: Synthetic oligonucleotide
  Sense strand starting at position 1244 of SEQ ID NO: 916760
cagagacauuugggcagaa

SEQ ID NO: 1181853 - RNA, 19 nt, Artificial Sequence
  Description of Artificial Sequence: Synthetic oligonucleotide
  Antisense strand to SEQ ID NO: 1181852
uucugcccaaaugucucug

SEQ ID NO: 1181854 - RNA, 19 nt, Artificial Sequence
  Description of Artificial Sequence: Synthetic oligonucleotide
  Sense strand starting at position 1536 of SEQ ID NO: 916760
gccggugcauccuucucaa

SEQ ID NO: 1181855 - RNA, 19 nt, Artificial Sequence
  Description of Artificial Sequence: Synthetic oligonucleotide
  Antisense strand to SEQ ID NO: 1181854
uugagaaggaugcaccggc

SEQ ID NO: 1181856 - RNA, 19 nt, Artificial Sequence
  Description of Artificial Sequence: Synthetic oligonucleotide
  Sense strand starting at position 1757 of SEQ ID NO: 916760
agaacuacuuccuuagagu

SEQ ID NO: 1181857 - RNA, 19 nt, Artificial Sequence
  Description of Artificial Sequence: Synthetic oligonucleotide
  Antisense strand to SEQ ID NO: 1181856
acucuaaggaaguaguucu

SEQ ID NO: 1181858 - RNA, 19 nt, Artificial Sequence
  Description of Artificial Sequence: Synthetic oligonucleotide
  Sense strand starting at position 1766 of SEQ ID NO: 916760
uccuuagaguccucuggac

SEQ ID NO: 1181859 - RNA, 19 nt, Artificial Sequence
  Description of Artificial Sequence: Synthetic oligonucleotide
  Antisense strand to SEQ ID NO: 1181858
guccagaggacucuaagga

SEQ ID NO: 1181860 - RNA, 19 nt, Artificial Sequence
  Description of Artificial Sequence: Synthetic oligonucleotide
  Sense strand starting at position 1768 of SEQ ID NO: 916760
cuuagaguccucuggacug

SEQ ID NO: 1181861 - RNA, 19 nt, Artificial Sequence
  Description of Artificial Sequence: Synthetic oligonucleotide
  Antisense strand to SEQ ID NO: 1181860
caguccagaggacucuaag

SEQ ID NO: 1181862 - RNA, 19 nt, Artificial Sequence
  Description of Artificial Sequence: Synthetic oligonucleotide
  Sense strand starting at position 1911 of SEQ ID NO: 916760
cuuaguccucuuuggaauu

SEQ ID NO: 1181863 - RNA, 19 nt, Artificial Sequence
  Description of Artificial Sequence: Synthetic oligonucleotide
  Antisense strand to SEQ ID NO: 1181862
aauuccaaagaggacuaag

SEQ ID NO: 1181864 - RNA, 19 nt, Artificial Sequence
  Description of Artificial Sequence: Synthetic oligonucleotide
  Sense strand starting at position 1922 of SEQ ID NO: 916760
uuggaauucugucccaucu

SEQ ID NO: 1181865 - RNA, 19 nt, Artificial Sequence
  Description of Artificial Sequence: Synthetic oligonucleotide
  Antisense strand to SEQ ID NO: 1181864
agaugggacagaauuccaa

SEQ ID NO: 1181866 - RNA, 19 nt, Artificial Sequence
  Description of Artificial Sequence: Synthetic oligonucleotide
  Sense strand starting at position 1924 of SEQ ID NO: 916760
ggaauucugucccaucuca

SEQ ID NO: 1181867 - RNA, 19 nt, Artificial Sequence
  Description of Artificial Sequence: Synthetic oligonucleotide
  Antisense strand to SEQ ID NO: 1181866
ugagaugggacagaauucc

SEQ ID NO: 1181868 - RNA, 19 nt, Artificial Sequence
  Description of Artificial Sequence: Synthetic oligonucleotide
  Sense strand starting at position 2013 of SEQ ID NO: 916760
aaugcagcuucggcuuaaa

SEQ ID NO: 1181869 - RNA, 19 nt, Artificial Sequence
  Description of Artificial Sequence: Synthetic oligonucleotide
  Antisense strand to SEQ ID NO: 1181868
uuuaagccgaagcugcauu

SEQ ID NO: 1181870 - RNA, 19 nt, Artificial Sequence
  Description of Artificial Sequence: Synthetic oligonucleotide
  Sense strand starting at position 2259 of SEQ ID NO: 916760
guggguaaguccagguaca

SEQ ID NO: 1181871 - RNA, 19 nt, Artificial Sequence
  Description of Artificial Sequence: Synthetic oligonucleotide
  Antisense strand to SEQ ID NO: 1181870
uguaccuggacuuacccac

SEQ ID NO: 1181872 - RNA, 19 nt, Artificial Sequence
  Description of Artificial Sequence: Synthetic oligonucleotide
  Sense strand starting at position 2343 of SEQ ID NO: 916760
ggcuccucuugggugagua

SEQ ID NO: 1181873 - RNA, 19 nt, Artificial Sequence
  Description of Artificial Sequence: Synthetic oligonucleotide
  Antisense strand to SEQ ID NO: 1181872
uacucacccaagaggagcc

SEQ ID NO: 1181874 - RNA, 19 nt, Artificial Sequence
  Description of Artificial Sequence: Synthetic oligonucleotide
  Sense strand starting at position 2424 of SEQ ID NO: 916760
gcgccuucgucucagacga

SEQ ID NO: 1181875 - RNA, 19 nt, Artificial Sequence
  Description of Artificial Sequence: Synthetic oligonucleotide
  Antisense strand to SEQ ID NO: 1181874
ucgucugagacgaaggcgc

SEQ ID NO: 1181876 - RNA, 19 nt, Artificial Sequence
  Description of Artificial Sequence: Synthetic oligonucleotide
  Sense strand starting at position 2576 of SEQ ID NO: 916760
ugccuuacgguagaggaau

SEQ ID NO: 1181877 - RNA, 19 nt, Artificial Sequence
  Description of Artificial Sequence: Synthetic oligonucleotide
  Antisense strand to SEQ ID NO: 1181876
auuccucuaccguaaggca

SEQ ID NO: 1181878 - RNA, 19 nt, Artificial Sequence
  Description of Artificial Sequence: Synthetic oligonucleotide
  Sense strand starting at position 3136 of SEQ ID NO: 916760
agcagaagguguucgagua

SEQ ID NO: 1181879 - RNA, 19 nt, Artificial Sequence
  Description of Artificial Sequence: Synthetic oligonucleotide
  Antisense strand to SEQ ID NO: 1181878
uacucgaacaccuucugcu

SEQ ID NO: 1181880 - RNA, 19 nt, Artificial Sequence
  Description of Artificial Sequence: Synthetic oligonucleotide
  Sense strand starting at position 3137 of SEQ ID NO: 916760
gcagaagguguucgaguac

SEQ ID NO: 1181881 - RNA, 19 nt, Artificial Sequence
  Description of Artificial Sequence: Synthetic oligonucleotide
  Antisense strand to SEQ ID NO: 1181880
guacucgaacaccuucugc

SEQ ID NO: 1181882 - RNA, 19 nt, Artificial Sequence
  Description of Artificial Sequence: Synthetic oligonucleotide
  Sense strand starting at position 3345 of SEQ ID NO: 916760
gggacagcgacccguaauu

SEQ ID NO: 1181883 - RNA, 19 nt, Artificial Sequence
  Description of Artificial Sequence: Synthetic oligonucleotide
  Antisense strand to SEQ ID NO: 1181882
aauuacgggucgcuguccc

SEQ ID NO: 1181884 - RNA, 19 nt, Artificial Sequence
  Description of Artificial Sequence: Synthetic oligonucleotide
  Sense strand starting at position 3354 of SEQ ID NO: 916760
acccguaauucaggacgau

SEQ ID NO: 1181885 - RNA, 19 nt, Artificial Sequence
  Description of Artificial Sequence: Synthetic oligonucleotide
  Antisense strand to SEQ ID NO: 1181884
aucguccugaauuacgggu

SEQ ID NO: 1181886 - RNA, 19 nt, Artificial Sequence
  Description of Artificial Sequence: Synthetic oligonucleotide
  Sense strand starting at position 3355 of SEQ ID NO: 916760
cccguaauucaggacgaua

SEQ ID NO: 1181887 - RNA, 19 nt, Artificial Sequence
  Description of Artificial Sequence: Synthetic oligonucleotide
  Antisense strand to SEQ ID NO: 1181886
uaucguccugaauuacggg

SEQ ID NO: 1181888 - RNA, 19 nt, Artificial Sequence
  Description of Artificial Sequence: Synthetic oligonucleotide
  Sense strand starting at position 3357 of SEQ ID NO: 916760
cguaauucaggacgauaau

SEQ ID NO: 1181889 - RNA, 19 nt, Artificial Sequence
  Description of Artificial Sequence: Synthetic oligonucleotide
  Antisense strand to SEQ ID NO: 1181888
auuaucguccugaauuacg

SEQ ID NO: 1181890 - RNA, 19 nt, Artificial Sequence
  Description of Artificial Sequence: Synthetic oligonucleotide
  Sense strand starting at position 3524 of SEQ ID NO: 916760
cgcauccuccaccaugauu

SEQ ID NO: 1181891 - RNA, 19 nt, Artificial Sequence
  Description of Artificial Sequence: Synthetic oligonucleotide
  Antisense strand to SEQ ID NO: 1181890
aaucaugguggaggaugcg

SEQ ID NO: 1181892 - RNA, 19 nt, Artificial Sequence
  Description of Artificial Sequence: Synthetic oligonucleotide
  Sense strand starting at position 3769 of SEQ ID NO: 916760
auccuauuggcaugaaaug

SEQ ID NO: 1181893 - RNA, 19 nt, Artificial Sequence
  Description of Artificial Sequence: Synthetic oligonucleotide
  Antisense strand to SEQ ID NO: 1181892
cauuucaugccaauaggau

SEQ ID NO: 1181894 - RNA, 19 nt, Artificial Sequence
  Description of Artificial Sequence: Synthetic oligonucleotide
  Sense strand starting at position 3934 of SEQ ID NO: 916760
ucugguaauuuggaagaag

SEQ ID NO: 1181895 - RNA, 19 nt, Artificial Sequence
  Description of Artificial Sequence: Synthetic oligonucleotide
  Antisense strand to SEQ ID NO: 1181894
cuucuuccaaauuaccaga

SEQ ID NO: 1181896 - RNA, 19 nt, Artificial Sequence
  Description of Artificial Sequence: Synthetic oligonucleotide
  Sense strand starting at position 3 of SEQ ID NO: 916761
ccaggcucaugauaaggaa

SEQ ID NO: 1181897 - RNA, 19 nt, Artificial Sequence
  Description of Artificial Sequence: Synthetic oligonucleotide
  Antisense strand to SEQ ID NO: 1181896
uuccuuaucaugagccugg

SEQ ID NO: 1181898 - RNA, 19 nt, Artificial Sequence
  Description of Artificial Sequence: Synthetic oligonucleotide
  Sense strand starting at position 18 of SEQ ID NO: 916761
ggaagacccuaguagagaa

SEQ ID NO: 1181899 - RNA, 19 nt, Artificial Sequence
  Description of Artificial Sequence: Synthetic oligonucleotide
  Antisense strand to SEQ ID NO: 1181898
uucucuacuagggucuucc

SEQ ID NO: 1181900 - RNA, 19 nt, Artificial Sequence
  Description of Artificial Sequence: Synthetic oligonucleotide
  Sense strand starting at position 57 of SEQ ID NO: 916761
uguggacucuccucucaau

SEQ ID NO: 1181901 - RNA, 19 nt, Artificial Sequence
  Description of Artificial Sequence: Synthetic oligonucleotide
  Antisense strand to SEQ ID NO: 1181900
auugagaggagaguccaca

SEQ ID NO: 1181902 - RNA, 19 nt, Artificial Sequence
  Description of Artificial Sequence: Synthetic oligonucleotide
  Sense strand starting at position 70 of SEQ ID NO: 916761
cucaauucugauugcaaag

SEQ ID NO: 1181903 - RNA, 19 nt, Artificial Sequence
  Description of Artificial Sequence: Synthetic oligonucleotide
  Antisense strand to SEQ ID NO: 1181902
cuuugcaaucagaauugag

SEQ ID NO: 1181904 - RNA, 19 nt, Artificial Sequence
  Description of Artificial Sequence: Synthetic oligonucleotide
  Sense strand starting at position 490 of SEQ ID NO: 916761
gaggaagacucugguuaaa

SEQ ID NO: 1181905 - RNA, 19 nt, Artificial Sequence
  Description of Artificial Sequence: Synthetic oligonucleotide
  Antisense strand to SEQ ID NO: 1181904
uuuaaccagagucuuccuc

SEQ ID NO: 1181906 - RNA, 19 nt, Artificial Sequence
  Description of Artificial Sequence: Synthetic oligonucleotide
  Sense strand starting at position 709 of SEQ ID NO: 916761
ucuauuuagucuggauggu

SEQ ID NO: 1181907 - RNA, 19 nt, Artificial Sequence
  Description of Artificial Sequence: Synthetic oligonucleotide
  Antisense strand to SEQ ID NO: 1181906
accauccagacuaaauaga

SEQ ID NO: 1181908 - RNA, 19 nt, Artificial Sequence
  Description of Artificial Sequence: Synthetic oligonucleotide
  Sense strand starting at position 730 of SEQ ID NO: 916761
gggauagcuucucugcuga

SEQ ID NO: 1181909 - RNA, 19 nt, Artificial Sequence
  Description of Artificial Sequence: Synthetic oligonucleotide
  Antisense strand to SEQ ID NO: 1181908
ucagcagagaagcuauccc

SEQ ID NO: 1181910 - RNA, 19 nt, Artificial Sequence
  Description of Artificial Sequence: Synthetic oligonucleotide
  Sense strand starting at position 732 of SEQ ID NO: 916761
gauagcuucucugcugauu

SEQ ID NO: 1181911 - RNA, 19 nt, Artificial Sequence
  Description of Artificial Sequence: Synthetic oligonucleotide
  Antisense strand to SEQ ID NO: 1181910
aaucagcagagaagcuauc

SEQ ID NO: 1181912 - RNA, 19 nt, Artificial Sequence
  Description of Artificial Sequence: Synthetic oligonucleotide
  Sense strand starting at position 741 of SEQ ID NO: 916761
ucugcugauuuggauagua

SEQ ID NO: 1181913 - RNA, 19 nt, Artificial Sequence
  Description of Artificial Sequence: Synthetic oligonucleotide
  Antisense strand to SEQ ID NO: 1181912
uacuauccaaaucagcaga

SEQ ID NO: 1181914 - RNA, 19 nt, Artificial Sequence
  Description of Artificial Sequence: Synthetic oligonucleotide
  Sense strand starting at position 831 of SEQ ID NO: 916761
cagagauguuucucacuag

SEQ ID NO: 1181915 - RNA, 19 nt, Artificial Sequence
  Description of Artificial Sequence: Synthetic oligonucleotide
  Antisense strand to SEQ ID NO: 1181914
cuagugagaaacaucucug

SEQ ID NO: 1181916 - RNA, 19 nt, Artificial Sequence
  Description of Artificial Sequence: Synthetic oligonucleotide
  Sense strand starting at position 834 of SEQ ID NO: 916761
agauguuucucacuagcaa

SEQ ID NO: 1181917 - RNA, 19 nt, Artificial Sequence
  Description of Artificial Sequence: Synthetic oligonucleotide
  Antisense strand to SEQ ID NO: 1181916
uugcuagugagaaacaucu

SEQ ID NO: 1181918 - RNA, 19 nt, Artificial Sequence
  Description of Artificial Sequence: Synthetic oligonucleotide
  Sense strand starting at position 854 of SEQ ID NO: 916761
gggcacuuuggugaucuca

SEQ ID NO: 1181919 - RNA, 19 nt, Artificial Sequence
  Description of Artificial Sequence: Synthetic oligonucleotide
  Antisense strand to SEQ ID NO: 1181918
ugagaucaccaaagugccc

SEQ ID NO: 1181920 - RNA, 19 nt, Artificial Sequence
  Description of Artificial Sequence: Synthetic oligonucleotide
  Sense strand starting at position 856 of SEQ ID NO: 916761
gcacuuuggugaucucaga

SEQ ID NO: 1181921 - RNA, 19 nt, Artificial Sequence
  Description of Artificial Sequence: Synthetic oligonucleotide
  Antisense strand to SEQ ID NO: 1181920
ucugagaucaccaaagugc

SEQ ID NO: 1181922 - RNA, 19 nt, Artificial Sequence
  Description of Artificial Sequence: Synthetic oligonucleotide
  Sense strand starting at position 1011 of SEQ ID NO: 916761
cggugaugcacccagaacu

SEQ ID NO: 1181923 - RNA, 19 nt, Artificial Sequence
  Description of Artificial Sequence: Synthetic oligonucleotide
  Antisense strand to SEQ ID NO: 1181922
aguucugggugcaucaccg

SEQ ID NO: 1181924 - RNA, 19 nt, Artificial Sequence
  Description of Artificial Sequence: Synthetic oligonucleotide
  Sense strand starting at position 1181 of SEQ ID NO: 916761
cagagacauuugggcagaa

SEQ ID NO: 1181925 - RNA, 19 nt, Artificial Sequence
  Description of Artificial Sequence: Synthetic oligonucleotide
  Antisense strand to SEQ ID NO: 1181924
uucugcccaaaugucucug

SEQ ID NO: 1181926 - RNA, 19 nt, Artificial Sequence
  Description of Artificial Sequence: Synthetic oligonucleotide
  Sense strand starting at position 1473 of SEQ ID NO: 916761
gccggugcauccuucucaa

SEQ ID NO: 1181927 - RNA, 19 nt, Artificial Sequence
  Description of Artificial Sequence: Synthetic oligonucleotide
  Antisense strand to SEQ ID NO: 1181926
uugagaaggaugcaccggc

SEQ ID NO: 1181928 - RNA, 19 nt, Artificial Sequence
  Description of Artificial Sequence: Synthetic oligonucleotide
  Sense strand starting at position 1694 of SEQ ID NO: 916761
agaacuacuuccuuagagu

SEQ ID NO: 1181929 - RNA, 19 nt, Artificial Sequence
  Description of Artificial Sequence: Synthetic oligonucleotide
  Antisense strand to SEQ ID NO: 1181928
acucuaaggaaguaguucu

SEQ ID NO: 1181930 - RNA, 19 nt, Artificial Sequence
  Description of Artificial Sequence: Synthetic oligonucleotide
  Sense strand starting at position 1703 of SEQ ID NO: 916761
uccuuagaguccucuggac

SEQ ID NO: 1181931 - RNA, 19 nt, Artificial Sequence
  Description of Artificial Sequence: Synthetic oligonucleotide
  Antisense strand to SEQ ID NO: 1181930
guccagaggacucuaagga

SEQ ID NO: 1181932 - RNA, 19 nt, Artificial Sequence
  Description of Artificial Sequence: Synthetic oligonucleotide
  Sense strand starting at position 1705 of SEQ ID NO: 916761
cuuagaguccucuggacug

SEQ ID NO: 1181933 - RNA, 19 nt, Artificial Sequence
  Description of Artificial Sequence: Synthetic oligonucleotide
  Antisense strand to SEQ ID NO: 1181932
caguccagaggacucuaag

SEQ ID NO: 1181934 - RNA, 19 nt, Artificial Sequence
  Description of Artificial Sequence: Synthetic oligonucleotide
  Sense strand starting at position 1848 of SEQ ID NO: 916761
cuuaguccucuuuggaauu

SEQ ID NO: 1181935 - RNA, 19 nt, Artificial Sequence
  Description of Artificial Sequence: Synthetic oligonucleotide
  Antisense strand to SEQ ID NO: 1181934
aauuccaaagaggacuaag

SEQ ID NO: 1181936 - RNA, 19 nt, Artificial Sequence
  Description of Artificial Sequence: Synthetic oligonucleotide
  Sense strand starting at position 1859 of SEQ ID NO: 916761
uuggaauucugucccaucu

SEQ ID NO: 1181937 - RNA, 19 nt, Artificial Sequence
  Description of Artificial Sequence: Synthetic oligonucleotide
  Antisense strand to SEQ ID NO: 1181936
agaugggacagaauuccaa

SEQ ID NO: 1181938 - RNA, 19 nt, Artificial Sequence
  Description of Artificial Sequence: Synthetic oligonucleotide
  Sense strand starting at position 1861 of SEQ ID NO: 916761
ggaauucugucccaucuca

SEQ ID NO: 1181939 - RNA, 19 nt, Artificial Sequence
  Description of Artificial Sequence: Synthetic oligonucleotide
  Antisense strand to SEQ ID NO: 1181938
ugagaugggacagaauucc

SEQ ID NO: 1181940 - RNA, 19 nt, Artificial Sequence
  Description of Artificial Sequence: Synthetic oligonucleotide
  Sense strand starting at position 1950 of SEQ ID NO: 916761
aaugcagcuucggcuuaaa

SEQ ID NO: 1181941 - RNA, 19 nt, Artificial Sequence
  Description of Artificial Sequence: Synthetic oligonucleotide
  Antisense strand to SEQ ID NO: 1181940
uuuaagccgaagcugcauu

SEQ ID NO: 1181942 - RNA, 19 nt, Artificial Sequence
  Description of Artificial Sequence: Synthetic oligonucleotide
  Sense strand starting at position 2196 of SEQ ID NO: 916761
guggguaaguccagguaca

SEQ ID NO: 1181943 - RNA, 19 nt, Artificial Sequence
  Description of Artificial Sequence: Synthetic oligonucleotide
  Antisense strand to SEQ ID NO: 1181942
uguaccuggacuuacccac

SEQ ID NO: 1181944 - RNA, 19 nt, Artificial Sequence
  Description of Artificial Sequence: Synthetic oligonucleotide
  Sense strand starting at position 2280 of SEQ ID NO: 916761
ggcuccucuugggugagua

SEQ ID NO: 1181945 - RNA, 19 nt, Artificial Sequence
  Description of Artificial Sequence: Synthetic oligonucleotide
  Antisense strand to SEQ ID NO: 1181944
uacucacccaagaggagcc

SEQ ID NO: 1181946 - RNA, 19 nt, Artificial Sequence
  Description of Artificial Sequence: Synthetic oligonucleotide
  Sense strand starting at position 2361 of SEQ ID NO: 916761
gcgccuucgucucagacga

SEQ ID NO: 1181947 - RNA, 19 nt, Artificial Sequence
  Description of Artificial Sequence: Synthetic oligonucleotide
  Antisense strand to SEQ ID NO: 1181946
ucgucugagacgaaggcgc

SEQ ID NO: 1181948 - RNA, 19 nt, Artificial Sequence
  Description of Artificial Sequence: Synthetic oligonucleotide
  Sense strand starting at position 2513 of SEQ ID NO: 916761
ugccuuacgguagaggaau

SEQ ID NO: 1181949 - RNA, 19 nt, Artificial Sequence
  Description of Artificial Sequence: Synthetic oligonucleotide
  Antisense strand to SEQ ID NO: 1181948
auuccucuaccguaaggca

SEQ ID NO: 1181950 - RNA, 19 nt, Artificial Sequence
  Description of Artificial Sequence: Synthetic oligonucleotide
  Sense strand starting at position 3073 of SEQ ID NO: 916761
agcagaagguguucgagua

SEQ ID NO: 1181951 - RNA, 19 nt, Artificial Sequence
  Description of Artificial Sequence: Synthetic oligonucleotide
  Antisense strand to SEQ ID NO: 1181950
uacucgaacaccuucugcu

SEQ ID NO: 1181952 - RNA, 19 nt, Artificial Sequence
  Description of Artificial Sequence: Synthetic oligonucleotide
  Sense strand starting at position 3074 of SEQ ID NO: 916761
gcagaagguguucgaguac

SEQ ID NO: 1181953 - RNA, 19 nt, Artificial Sequence
  Description of Artificial Sequence: Synthetic oligonucleotide
  Antisense strand to SEQ ID NO: 1181952
guacucgaacaccuucugc

SEQ ID NO: 1181954 - RNA, 19 nt, Artificial Sequence
  Description of Artificial Sequence: Synthetic oligonucleotide
  Sense strand starting at position 3282 of SEQ ID NO: 916761
gggacagcgacccguaauu

SEQ ID NO: 1181955 - RNA, 19 nt, Artificial Sequence
  Description of Artificial Sequence: Synthetic oligonucleotide
  Antisense strand to SEQ ID NO: 1181954
aauuacgggucgcuguccc

SEQ ID NO: 1181956 - RNA, 19 nt, Artificial Sequence
  Description of Artificial Sequence: Synthetic oligonucleotide
  Sense strand starting at position 3291 of SEQ ID NO: 916761
acccguaauucaggacgau

SEQ ID NO: 1181957 - RNA, 19 nt, Artificial Sequence
  Description of Artificial Sequence: Synthetic oligonucleotide
  Antisense strand to SEQ ID NO: 1181956
aucguccugaauuacgggu

SEQ ID NO: 1181958 - RNA, 19 nt, Artificial Sequence
  Description of Artificial Sequence: Synthetic oligonucleotide
  Sense strand starting at position 3292 of SEQ ID NO: 916761
cccguaauucaggacgaua

SEQ ID NO: 1181959 - RNA, 19 nt, Artificial Sequence
  Description of Artificial Sequence: Synthetic oligonucleotide
  Antisense strand to SEQ ID NO: 1181958
uaucguccugaauuacggg

SEQ ID NO: 1181960 - RNA, 19 nt, Artificial Sequence
  Description of Artificial Sequence: Synthetic oligonucleotide
  Sense strand starting at position 3294 of SEQ ID NO: 916761
cguaauucaggacgauaau

SEQ ID NO: 1181961 - RNA, 19 nt, Artificial Sequence
  Description of Artificial Sequence: Synthetic oligonucleotide
  Antisense strand to SEQ ID NO: 1181960
auuaucguccugaauuacg

SEQ ID NO: 1181962 - RNA, 19 nt, Artificial Sequence
  Description of Artificial Sequence: Synthetic oligonucleotide
  Sense strand starting at position 3461 of SEQ ID NO: 916761
cgcauccuccaccaugauu

SEQ ID NO: 1181963 - RNA, 19 nt, Artificial Sequence
  Description of Artificial Sequence: Synthetic oligonucleotide
  Antisense strand to SEQ ID NO: 1181962
aaucaugguggaggaugcg

SEQ ID NO: 1181964 - RNA, 19 nt, Artificial Sequence
  Description of Artificial Sequence: Synthetic oligonucleotide
  Sense strand starting at position 3706 of SEQ ID NO: 916761
auccuauuggcaugaaaug

SEQ ID NO: 1181965 - RNA, 19 nt, Artificial Sequence
  Description of Artificial Sequence: Synthetic oligonucleotide
  Antisense strand to SEQ ID NO: 1181964
cauuucaugccaauaggau

SEQ ID NO: 1181966 - RNA, 19 nt, Artificial Sequence
  Description of Artificial Sequence: Synthetic oligonucleotide
  Sense strand starting at position 3871 of SEQ ID NO: 916761
ucugguaauuuggaagaag

SEQ ID NO: 1181967 - RNA, 19 nt, Artificial Sequence
  Description of Artificial Sequence: Synthetic oligonucleotide
  Antisense strand to SEQ ID NO: 1181966
cuucuuccaaauuaccaga

SEQ ID NO: 1181968 - RNA, 19 nt, Artificial Sequence
  Description of Artificial Sequence: Synthetic oligonucleotide
  Sense strand starting at position 3930 of SEQ ID NO: 916761
gggagucacagguaugcau

SEQ ID NO: 1181969 - RNA, 19 nt, Artificial Sequence
  Description of Artificial Sequence: Synthetic oligonucleotide
  Antisense strand to SEQ ID NO: 1181968
augcauaccugugacuccc

SEQ ID NO: 1181970 - RNA, 19 nt, Artificial Sequence
  Description of Artificial Sequence: Synthetic oligonucleotide
  Sense strand starting at position 3972 of SEQ ID NO: 916761
ucaugaguuucggguugcu

SEQ ID NO: 1181971 - RNA, 19 nt, Artificial Sequence
  Description of Artificial Sequence: Synthetic oligonucleotide
  Antisense strand to SEQ ID NO: 1181970
agcaacccgaaacucauga

SEQ ID NO: 1181972 - RNA, 19 nt, Artificial Sequence
  Description of Artificial Sequence: Synthetic oligonucleotide
  Sense strand starting at position 230 of SEQ ID NO: 916762
ccaggcauccucugcucua

SEQ ID NO: 1181973 - RNA, 19 nt, Artificial Sequence
  Description of Artificial Sequence: Synthetic oligonucleotide
  Antisense strand to SEQ ID NO: 1181972
uagagcagaggaugccugg

SEQ ID NO: 1181974 - RNA, 19 nt, Artificial Sequence
  Description of Artificial Sequence: Synthetic oligonucleotide
  Sense strand starting at position 696 of SEQ ID NO: 916762
cucuacuugccucaaggau

SEQ ID NO: 1181975 - RNA, 19 nt, Artificial Sequence
  Description of Artificial Sequence: Synthetic oligonucleotide
  Antisense strand to SEQ ID NO: 1181974
auccuugaggcaaguagag

SEQ ID NO: 1181976 - RNA, 19 nt, Artificial Sequence
  Description of Artificial Sequence: Synthetic oligonucleotide
  Sense strand starting at position 704 of SEQ ID NO: 916762
gccucaaggauaugagaug

SEQ ID NO: 1181977 - RNA, 19 nt, Artificial Sequence
  Description of Artificial Sequence: Synthetic oligonucleotide
  Antisense strand to SEQ ID NO: 1181976
caucucauauccuugaggc

SEQ ID NO: 1181978 - RNA, 19 nt, Artificial Sequence
  Description of Artificial Sequence: Synthetic oligonucleotide
  Sense strand starting at position 766 of SEQ ID NO: 916762
gcagaagccucagacuuga

SEQ ID NO: 1181979 - RNA, 19 nt, Artificial Sequence
  Description of Artificial Sequence: Synthetic oligonucleotide
  Antisense strand to SEQ ID NO: 1181978
ucaagucugaggcuucugc

SEQ ID NO: 1181980 - RNA, 19 nt, Artificial Sequence
  Description of Artificial Sequence: Synthetic oligonucleotide
  Sense strand starting at position 823 of SEQ ID NO: 916762
gcgggacagucaucucagu

SEQ ID NO: 1181981 - RNA, 19 nt, Artificial Sequence
  Description of Artificial Sequence: Synthetic oligonucleotide
  Antisense strand to SEQ ID NO: 1181980
acugagaugacugucccgc

SEQ ID NO: 1181982 - RNA, 19 nt, Artificial Sequence
  Description of Artificial Sequence: Synthetic oligonucleotide
  Sense strand starting at position 828 of SEQ ID NO: 916762
acagucaucucaguuucuu

SEQ ID NO: 1181983 - RNA, 19 nt, Artificial Sequence
  Description of Artificial Sequence: Synthetic oligonucleotide
  Antisense strand to SEQ ID NO: 1181982
aagaaacugagaugacugu

SEQ ID NO: 1181984 - RNA, 19 nt, Artificial Sequence
  Description of Artificial Sequence: Synthetic oligonucleotide
  Sense strand starting at position 836 of SEQ ID NO: 916762
cucaguuucuugcccugaa

SEQ ID NO: 1181985 - RNA, 19 nt, Artificial Sequence
  Description of Artificial Sequence: Synthetic oligonucleotide
  Antisense strand to SEQ ID NO: 1181984
uucagggcaagaaacugag

SEQ ID NO: 1181986 - RNA, 19 nt, Artificial Sequence
  Description of Artificial Sequence: Synthetic oligonucleotide
  Sense strand starting at position 1068 of SEQ ID NO: 916762
uugggcuucccucaagaau

SEQ ID NO: 1181987 - RNA, 19 nt, Artificial Sequence
  Description of Artificial Sequence: Synthetic oligonucleotide
  Antisense strand to SEQ ID NO: 1181986
auucuugagggaagcccaa

SEQ ID NO: 1181988 - RNA, 19 nt, Artificial Sequence
  Description of Artificial Sequence: Synthetic oligonucleotide
  Sense strand starting at position 1071 of SEQ ID NO: 916762
ggcuucccucaagaauacu

SEQ ID NO: 1181989 - RNA, 19 nt, Artificial Sequence
  Description of Artificial Sequence: Synthetic oligonucleotide
  Antisense strand to SEQ ID NO: 1181988
aguauucuugagggaagcc

SEQ ID NO: 1181990 - RNA, 19 nt, Artificial Sequence
  Description of Artificial Sequence: Synthetic oligonucleotide
  Sense strand starting at position 1200 of SEQ ID NO: 916762
gcaccaguccuucggaacu

SEQ ID NO: 1181991 - RNA, 19 nt, Artificial Sequence
  Description of Artificial Sequence: Synthetic oligonucleotide
  Antisense strand to SEQ ID NO: 1181990
aguuccgaaggacuggugc

SEQ ID NO: 1181992 - RNA, 19 nt, Artificial Sequence
  Description of Artificial Sequence: Synthetic oligonucleotide
  Sense strand starting at position 1262 of SEQ ID NO: 916762
cuugccuucugauguccaa

SEQ ID NO: 1181993 - RNA, 19 nt, Artificial Sequence
  Description of Artificial Sequence: Synthetic oligonucleotide
  Antisense strand to SEQ ID NO: 1181992
uuggacaucagaaggcaag

SEQ ID NO: 1181994 - RNA, 19 nt, Artificial Sequence
  Description of Artificial Sequence: Synthetic oligonucleotide
  Sense strand starting at position 2410 of SEQ ID NO: 916762
gcaggaguaugccagaucu

SEQ ID NO: 1181995 - RNA, 19 nt, Artificial Sequence
  Description of Artificial Sequence: Synthetic oligonucleotide
  Antisense strand to SEQ ID NO: 1181994
agaucuggcauacuccugc

SEQ ID NO: 1181996 - RNA, 19 nt, Artificial Sequence
  Description of Artificial Sequence: Synthetic oligonucleotide
  Sense strand starting at position 2526 of SEQ ID NO: 916762
ggagcaaacugguugacua

SEQ ID NO: 1181997 - RNA, 19 nt, Artificial Sequence
  Description of Artificial Sequence: Synthetic oligonucleotide
  Antisense strand to SEQ ID NO: 1181996
uagucaaccaguuugcucc

SEQ ID NO: 1181998 - RNA, 19 nt, Artificial Sequence
  Description of Artificial Sequence: Synthetic oligonucleotide
  Sense strand starting at position 2579 of SEQ ID NO: 916762
acagacaucuucccuguca

SEQ ID NO: 1181999 - RNA, 19 nt, Artificial Sequence
  Description of Artificial Sequence: Synthetic oligonucleotide
  Antisense strand to SEQ ID NO: 1181998
ugacagggaagaugucugu

SEQ ID NO: 1182000 - RNA, 19 nt, Artificial Sequence
  Description of Artificial Sequence: Synthetic oligonucleotide
  Sense strand starting at position 2581 of SEQ ID NO: 916762
agacaucuucccugucauc

SEQ ID NO: 1182001 - RNA, 19 nt, Artificial Sequence
  Description of Artificial Sequence: Synthetic oligonucleotide
  Antisense strand to SEQ ID NO: 1182000
gaugacagggaagaugucu

SEQ ID NO: 1182002 - RNA, 19 nt, Artificial Sequence
  Description of Artificial Sequence: Synthetic oligonucleotide
  Sense strand starting at position 2592 of SEQ ID NO: 916762
cugucaucuugccuggagu

SEQ ID NO: 1182003 - RNA, 19 nt, Artificial Sequence
  Description of Artificial Sequence: Synthetic oligonucleotide
  Antisense strand to SEQ ID NO: 1182002
acuccaggcaagaugacag

SEQ ID NO: 1182004 - RNA, 19 nt, Artificial Sequence
  Description of Artificial Sequence: Synthetic oligonucleotide
  Sense strand starting at position 2593 of SEQ ID NO: 916762
ugucaucuugccuggagua

SEQ ID NO: 1182005 - RNA, 19 nt, Artificial Sequence
  Description of Artificial Sequence: Synthetic oligonucleotide
  Antisense strand to SEQ ID NO: 1182004
uacuccaggcaagaugaca

SEQ ID NO: 1182006 - RNA, 19 nt, Artificial Sequence
  Description of Artificial Sequence: Synthetic oligonucleotide
  Sense strand starting at position 2594 of SEQ ID NO: 916762
gucaucuugccuggaguaa

SEQ ID NO: 1182007 - RNA, 19 nt, Artificial Sequence
  Description of Artificial Sequence: Synthetic oligonucleotide
  Antisense strand to SEQ ID NO: 1182006
uuacuccaggcaagaugac

SEQ ID NO: 1182008 - RNA, 19 nt, Artificial Sequence
  Description of Artificial Sequence: Synthetic oligonucleotide
  Sense strand starting at position 2595 of SEQ ID NO: 916762
ucaucuugccuggaguaag

SEQ ID NO: 1182009 - RNA, 19 nt, Artificial Sequence
  Description of Artificial Sequence: Synthetic oligonucleotide
  Antisense strand to SEQ ID NO: 1182008
cuuacuccaggcaagauga

SEQ ID NO: 1182010 - RNA, 19 nt, Artificial Sequence
  Description of Artificial Sequence: Synthetic oligonucleotide
  Sense strand starting at position 2605 of SEQ ID NO: 916762
uggaguaagcuccaggagu

SEQ ID NO: 1182011 - RNA, 19 nt, Artificial Sequence
  Description of Artificial Sequence: Synthetic oligonucleotide
  Antisense strand to SEQ ID NO: 1182010
acuccuggagcuuacucca

SEQ ID NO: 1182012 - RNA, 19 nt, Artificial Sequence
  Description of Artificial Sequence: Synthetic oligonucleotide
  Sense strand starting at position 2607 of SEQ ID NO: 916762
gaguaagcuccaggaguua

SEQ ID NO: 1182013 - RNA, 19 nt, Artificial Sequence
  Description of Artificial Sequence: Synthetic oligonucleotide
  Antisense strand to SEQ ID NO: 1182012
uaacuccuggagcuuacuc

SEQ ID NO: 1182014 - RNA, 19 nt, Artificial Sequence
  Description of Artificial Sequence: Synthetic oligonucleotide
  Sense strand starting at position 2820 of SEQ ID NO: 916762
guagaugugccaugaaugc

SEQ ID NO: 1182015 - RNA, 19 nt, Artificial Sequence
  Description of Artificial Sequence: Synthetic oligonucleotide
  Antisense strand to SEQ ID NO: 1182014
gcauucauggcacaucuac

SEQ ID NO: 1182016 - RNA, 19 nt, Artificial Sequence
  Description of Artificial Sequence: Synthetic oligonucleotide
  Sense strand starting at position 2983 of SEQ ID NO: 916762
gagagaacccagugguuuc

SEQ ID NO: 1182017 - RNA, 19 nt, Artificial Sequence
  Description of Artificial Sequence: Synthetic oligonucleotide
  Antisense strand to SEQ ID NO: 1182016
gaaaccacuggguucucuc

SEQ ID NO: 1182018 - RNA, 19 nt, Artificial Sequence
  Description of Artificial Sequence: Synthetic oligonucleotide
  Sense strand starting at position 3004 of SEQ ID NO: 916762
ucugcauucuacugaggac

SEQ ID NO: 1182019 - RNA, 19 nt, Artificial Sequence
  Description of Artificial Sequence: Synthetic oligonucleotide
  Antisense strand to SEQ ID NO: 1182018
guccucaguagaaugcaga

SEQ ID NO: 1182020 - RNA, 19 nt, Artificial Sequence
  Description of Artificial Sequence: Synthetic oligonucleotide
  Sense strand starting at position 3007 of SEQ ID NO: 916762
gcauucuacugaggacaga

SEQ ID NO: 1182021 - RNA, 19 nt, Artificial Sequence
  Description of Artificial Sequence: Synthetic oligonucleotide
  Antisense strand to SEQ ID NO: 1182020
ucuguccucaguagaaugc

SEQ ID NO: 1182022 - RNA, 19 nt, Artificial Sequence
  Description of Artificial Sequence: Synthetic oligonucleotide
  Sense strand starting at position 3136 of SEQ ID NO: 916762
ggcugauaggcuggacaga

SEQ ID NO: 1182023 - RNA, 19 nt, Artificial Sequence
  Description of Artificial Sequence: Synthetic oligonucleotide
  Antisense strand to SEQ ID NO: 1182022
ucuguccagccuaucagcc

SEQ ID NO: 1182024 - RNA, 19 nt, Artificial Sequence
  Description of Artificial Sequence: Synthetic oligonucleotide
  Sense strand starting at position 3285 of SEQ ID NO: 916762
uguccucccuccugggaaa

SEQ ID NO: 1182025 - RNA, 19 nt, Artificial Sequence
  Description of Artificial Sequence: Synthetic oligonucleotide
  Antisense strand to SEQ ID NO: 1182024
uuucccaggagggaggaca

SEQ ID NO: 1182026 - RNA, 19 nt, Artificial Sequence
  Description of Artificial Sequence: Synthetic oligonucleotide
  Sense strand starting at position 3361 of SEQ ID NO: 916762
gugguuaccucagggaaug

SEQ ID NO: 1182027 - RNA, 19 nt, Artificial Sequence
  Description of Artificial Sequence: Synthetic oligonucleotide
  Antisense strand to SEQ ID NO: 1182026
cauucccugagguaaccac

SEQ ID NO: 1182028 - RNA, 19 nt, Artificial Sequence
  Description of Artificial Sequence: Synthetic oligonucleotide
  Sense strand starting at position 3483 of SEQ ID NO: 916762
uguugacuuugcuugguua

SEQ ID NO: 1182029 - RNA, 19 nt, Artificial Sequence
  Description of Artificial Sequence: Synthetic oligonucleotide
  Antisense strand to SEQ ID NO: 1182028
uaaccaagcaaagucaaca

SEQ ID NO: 1182030 - RNA, 19 nt, Artificial Sequence
  Description of Artificial Sequence: Synthetic oligonucleotide
  Sense strand starting at position 3675 of SEQ ID NO: 916762
ccaguugugguuugggaau

SEQ ID NO: 1182031 - RNA, 19 nt, Artificial Sequence
  Description of Artificial Sequence: Synthetic oligonucleotide
  Antisense strand to SEQ ID NO: 1182030
auucccaaaccacaacugg

SEQ ID NO: 1182032 - RNA, 19 nt, Artificial Sequence
  Description of Artificial Sequence: Synthetic oligonucleotide
  Sense strand starting at position 3677 of SEQ ID NO: 916762
aguugugguuugggaaugu

SEQ ID NO: 1182033 - RNA, 19 nt, Artificial Sequence
  Description of Artificial Sequence: Synthetic oligonucleotide
  Antisense strand to SEQ ID NO: 1182032
acauucccaaaccacaacu

SEQ ID NO: 1182034 - RNA, 19 nt, Artificial Sequence
  Description of Artificial Sequence: Synthetic oligonucleotide
  Sense strand starting at position 3686 of SEQ ID NO: 916762
uugggaauguggcccuaau

SEQ ID NO: 1182035 - RNA, 19 nt, Artificial Sequence
  Description of Artificial Sequence: Synthetic oligonucleotide
  Antisense strand to SEQ ID NO: 1182034
auuagggccacauucccaa

SEQ ID NO: 1182036 - RNA, 19 nt, Artificial Sequence
  Description of Artificial Sequence: Synthetic oligonucleotide
  Sense strand starting at position 3731 of SEQ ID NO: 916762
guacuugguuuacagugaa

SEQ ID NO: 1182037 - RNA, 19 nt, Artificial Sequence
  Description of Artificial Sequence: Synthetic oligonucleotide
  Antisense strand to SEQ ID NO: 1182036
uucacuguaaaccaaguac

SEQ ID NO: 1182038 - RNA, 19 nt, Artificial Sequence
  Description of Artificial Sequence: Synthetic oligonucleotide
  Sense strand starting at position 3734 of SEQ ID NO: 916762
cuugguuuacagugaauga

SEQ ID NO: 1182039 - RNA, 19 nt, Artificial Sequence
  Description of Artificial Sequence: Synthetic oligonucleotide
  Antisense strand to SEQ ID NO: 1182038
ucauucacuguaaaccaag

SEQ ID NO: 1182040 - RNA, 19 nt, Artificial Sequence
  Description of Artificial Sequence: Synthetic oligonucleotide
  Sense strand starting at position 3901 of SEQ ID NO: 916762
uaggguuggucccaaagau

SEQ ID NO: 1182041 - RNA, 19 nt, Artificial Sequence
  Description of Artificial Sequence: Synthetic oligonucleotide
  Antisense strand to SEQ ID NO: 1182040
aucuuugggaccaacccua

SEQ ID NO: 1182042 - RNA, 19 nt, Artificial Sequence
  Description of Artificial Sequence: Synthetic oligonucleotide
  Sense strand starting at position 119 of SEQ ID NO: 916763
gcaauaguuccaugcuuuc

SEQ ID NO: 1182043 - RNA, 19 nt, Artificial Sequence
  Description of Artificial Sequence: Synthetic oligonucleotide
  Antisense strand to SEQ ID NO: 1182042
gaaagcauggaacuauugc

SEQ ID NO: 1182044 - RNA, 19 nt, Artificial Sequence
  Description of Artificial Sequence: Synthetic oligonucleotide
  Sense strand starting at position 133 of SEQ ID NO: 916763
cuuucucgguucuuuaaau

SEQ ID NO: 1182045 - RNA, 19 nt, Artificial Sequence
  Description of Artificial Sequence: Synthetic oligonucleotide
  Antisense strand to SEQ ID NO: 1182044
auuuaaagaaccgagaaag

SEQ ID NO: 1182046 - RNA, 19 nt, Artificial Sequence
  Description of Artificial Sequence: Synthetic oligonucleotide
  Sense strand starting at position 233 of SEQ ID NO: 916763
gcuucccaguuguuaaauu

SEQ ID NO: 1182047 - RNA, 19 nt, Artificial Sequence
  Description of Artificial Sequence: Synthetic oligonucleotide
  Antisense strand to SEQ ID NO: 1182046
aauuuaacaacugggaagc

SEQ ID NO: 1182048 - RNA, 19 nt, Artificial Sequence
  Description of Artificial Sequence: Synthetic oligonucleotide
  Sense strand starting at position 234 of SEQ ID NO: 916763
cuucccaguuguuaaauuu

SEQ ID NO: 1182049 - RNA, 19 nt, Artificial Sequence
  Description of Artificial Sequence: Synthetic oligonucleotide
  Antisense strand to SEQ ID NO: 1182048
aaauuuaacaacugggaag

SEQ ID NO: 1182050 - RNA, 19 nt, Artificial Sequence
  Description of Artificial Sequence: Synthetic oligonucleotide
  Sense strand starting at position 615 of SEQ ID NO: 916763
uuauuacugcucuggaaag

SEQ ID NO: 1182051 - RNA, 19 nt, Artificial Sequence
  Description of Artificial Sequence: Synthetic oligonucleotide
  Antisense strand to SEQ ID NO: 1182050
cuuuccagagcaguaauaa

SEQ ID NO: 1182052 - RNA, 19 nt, Artificial Sequence
  Description of Artificial Sequence: Synthetic oligonucleotide
  Sense strand starting at position 784 of SEQ ID NO: 916763
ugcugaaguuguugugugu

SEQ ID NO: 1182053 - RNA, 19 nt, Artificial Sequence
  Description of Artificial Sequence: Synthetic oligonucleotide
  Antisense strand to SEQ ID NO: 1182052
acacacaacaacuucagca

SEQ ID NO: 1182054 - RNA, 19 nt, Artificial Sequence
  Description of Artificial Sequence: Synthetic oligonucleotide
  Sense strand starting at position 785 of SEQ ID NO: 916763
gcugaaguuguuguguguu

SEQ ID NO: 1182055 - RNA, 19 nt, Artificial Sequence
  Description of Artificial Sequence: Synthetic oligonucleotide
  Antisense strand to SEQ ID NO: 1182054
aacacacaacaacuucagc

SEQ ID NO: 1182056 - RNA, 19 nt, Artificial Sequence
  Description of Artificial Sequence: Synthetic oligonucleotide
  Sense strand starting at position 788 of SEQ ID NO: 916763
gaaguuguuguguguugga

SEQ ID NO: 1182057 - RNA, 19 nt, Artificial Sequence
  Description of Artificial Sequence: Synthetic oligonucleotide
  Antisense strand to SEQ ID NO: 1182056
uccaacacacaacaacuuc

SEQ ID NO: 1182058 - RNA, 19 nt, Artificial Sequence
  Description of Artificial Sequence: Synthetic oligonucleotide
  Sense strand starting at position 793 of SEQ ID NO: 916763
uguuguguguuggagccau

SEQ ID NO: 1182059 - RNA, 19 nt, Artificial Sequence
  Description of Artificial Sequence: Synthetic oligonucleotide
  Antisense strand to SEQ ID NO: 1182058
auggcuccaacacacaaca

SEQ ID NO: 1182060 - RNA, 19 nt, Artificial Sequence
  Description of Artificial Sequence: Synthetic oligonucleotide
  Sense strand starting at position 797 of SEQ ID NO: 916763
guguguuggagccauagga

SEQ ID NO: 1182061 - RNA, 19 nt, Artificial Sequence
  Description of Artificial Sequence: Synthetic oligonucleotide
  Antisense strand to SEQ ID NO: 1182060
uccuauggcuccaacacac

SEQ ID NO: 1182062 - RNA, 19 nt, Artificial Sequence
  Description of Artificial Sequence: Synthetic oligonucleotide
  Sense strand starting at position 839 of SEQ ID NO: 916763
gcauacacguuuccaaaca

SEQ ID NO: 1182063 - RNA, 19 nt, Artificial Sequence
  Description of Artificial Sequence: Synthetic oligonucleotide
  Antisense strand to SEQ ID NO: 1182062
uguuuggaaacguguaugc

SEQ ID NO: 1182064 - RNA, 19 nt, Artificial Sequence
  Description of Artificial Sequence: Synthetic oligonucleotide
  Sense strand starting at position 946 of SEQ ID NO: 916763
ggaugcacucucgaacaca

SEQ ID NO: 1182065 - RNA, 19 nt, Artificial Sequence
  Description of Artificial Sequence: Synthetic oligonucleotide
  Antisense strand to SEQ ID NO: 1182064
uguguucgagagugcaucc

SEQ ID NO: 1182066 - RNA, 19 nt, Artificial Sequence
  Description of Artificial Sequence: Synthetic oligonucleotide
  Sense strand starting at position 1145 of SEQ ID NO: 916763
acgcucugcaaacgauauu

SEQ ID NO: 1182067 - RNA, 19 nt, Artificial Sequence
  Description of Artificial Sequence: Synthetic oligonucleotide
  Antisense strand to SEQ ID NO: 1182066
aauaucguuugcagagcgu

SEQ ID NO: 1182068 - RNA, 19 nt, Artificial Sequence
  Description of Artificial Sequence: Synthetic oligonucleotide
  Sense strand starting at position 1207 of SEQ ID NO: 916763
cacgguccugagugucaua

SEQ ID NO: 1182069 - RNA, 19 nt, Artificial Sequence
  Description of Artificial Sequence: Synthetic oligonucleotide
  Antisense strand to SEQ ID NO: 1182068
uaugacacucaggaccgug

SEQ ID NO: 1182070 - RNA, 19 nt, Artificial Sequence
  Description of Artificial Sequence: Synthetic oligonucleotide
  Sense strand starting at position 1212 of SEQ ID NO: 916763
uccugagugucauauccuu

SEQ ID NO: 1182071 - RNA, 19 nt, Artificial Sequence
  Description of Artificial Sequence: Synthetic oligonucleotide
  Antisense strand to SEQ ID NO: 1182070
aaggauaugacacucagga

SEQ ID NO: 1182072 - RNA, 19 nt, Artificial Sequence
  Description of Artificial Sequence: Synthetic oligonucleotide
  Sense strand starting at position 1410 of SEQ ID NO: 916763
gccaguaccuuacauagaa

SEQ ID NO: 1182073 - RNA, 19 nt, Artificial Sequence
  Description of Artificial Sequence: Synthetic oligonucleotide
  Antisense strand to SEQ ID NO: 1182072
uucuauguaagguacuggc

SEQ ID NO: 1182074 - RNA, 19 nt, Artificial Sequence
  Description of Artificial Sequence: Synthetic oligonucleotide
  Sense strand starting at position 1463 of SEQ ID NO: 916763
cucuuuacacacggaaaga

SEQ ID NO: 1182075 - RNA, 19 nt, Artificial Sequence
  Description of Artificial Sequence: Synthetic oligonucleotide
  Antisense strand to SEQ ID NO: 1182074
ucuuuccguguguaaagag

SEQ ID NO: 1182076 - RNA, 19 nt, Artificial Sequence
  Description of Artificial Sequence: Synthetic oligonucleotide
  Sense strand starting at position 1568 of SEQ ID NO: 916763
agauucaaguccggcgaaa

SEQ ID NO: 1182077 - RNA, 19 nt, Artificial Sequence
  Description of Artificial Sequence: Synthetic oligonucleotide
  Antisense strand to SEQ ID NO: 1182076
uuucgccggacuugaaucu

SEQ ID NO: 1182078 - RNA, 19 nt, Artificial Sequence
  Description of Artificial Sequence: Synthetic oligonucleotide
  Sense strand starting at position 1570 of SEQ ID NO: 916763
auucaaguccggcgaaaca

SEQ ID NO: 1182079 - RNA, 19 nt, Artificial Sequence
  Description of Artificial Sequence: Synthetic oligonucleotide
  Antisense strand to SEQ ID NO: 1182078
uguuucgccggacuugaau

SEQ ID NO: 1182080 - RNA, 19 nt, Artificial Sequence
  Description of Artificial Sequence: Synthetic oligonucleotide
  Sense strand starting at position 1660 of SEQ ID NO: 916763
gggcaaacguuuccauaca

SEQ ID NO: 1182081 - RNA, 19 nt, Artificial Sequence
  Description of Artificial Sequence: Synthetic oligonucleotide
  Antisense strand to SEQ ID NO: 1182080
uguauggaaacguuugccc

SEQ ID NO: 1182082 - RNA, 19 nt, Artificial Sequence
  Description of Artificial Sequence: Synthetic oligonucleotide
  Sense strand starting at position 2145 of SEQ ID NO: 916763
gcaaauaugcaagagugaa

SEQ ID NO: 1182083 - RNA, 19 nt, Artificial Sequence
  Description of Artificial Sequence: Synthetic oligonucleotide
  Antisense strand to SEQ ID NO: 1182082
uucacucuugcauauuugc

SEQ ID NO: 1182084 - RNA, 19 nt, Artificial Sequence
  Description of Artificial Sequence: Synthetic oligonucleotide
  Sense strand starting at position 2217 of SEQ ID NO: 916763
acaccuugcucgggagaau

SEQ ID NO: 1182085 - RNA, 19 nt, Artificial Sequence
  Description of Artificial Sequence: Synthetic oligonucleotide
  Antisense strand to SEQ ID NO: 1182084
auucucccgagcaaggugu

SEQ ID NO: 1182086 - RNA, 19 nt, Artificial Sequence
  Description of Artificial Sequence: Synthetic oligonucleotide
  Sense strand starting at position 2229 of SEQ ID NO: 916763
ggagaaugcuugcaggcau

SEQ ID NO: 1182087 - RNA, 19 nt, Artificial Sequence
  Description of Artificial Sequence: Synthetic oligonucleotide
  Antisense strand to SEQ ID NO: 1182086
augccugcaagcauucucc

SEQ ID NO: 1182088 - RNA, 19 nt, Artificial Sequence
  Description of Artificial Sequence: Synthetic oligonucleotide
  Sense strand starting at position 2636 of SEQ ID NO: 916763
ccgugaacucucugggaac

SEQ ID NO: 1182089 - RNA, 19 nt, Artificial Sequence
  Description of Artificial Sequence: Synthetic oligonucleotide
  Antisense strand to SEQ ID NO: 1182088
guucccagagaguucacgg

SEQ ID NO: 1182090 - RNA, 19 nt, Artificial Sequence
  Description of Artificial Sequence: Synthetic oligonucleotide
  Sense strand starting at position 2843 of SEQ ID NO: 916763
agccuuaucccgcaacuga

SEQ ID NO: 1182091 - RNA, 19 nt, Artificial Sequence
  Description of Artificial Sequence: Synthetic oligonucleotide
  Antisense strand to SEQ ID NO: 1182090
ucaguugcgggauaaggcu

SEQ ID NO: 1182092 - RNA, 19 nt, Artificial Sequence
  Description of Artificial Sequence: Synthetic oligonucleotide
  Sense strand starting at position 2894 of SEQ ID NO: 916763
ugcuccuucuucgaacaua

SEQ ID NO: 1182093 - RNA, 19 nt, Artificial Sequence
  Description of Artificial Sequence: Synthetic oligonucleotide
  Antisense strand to SEQ ID NO: 1182092
uauguucgaagaaggagca

SEQ ID NO: 1182094 - RNA, 19 nt, Artificial Sequence
  Description of Artificial Sequence: Synthetic oligonucleotide
  Sense strand starting at position 3024 of SEQ ID NO: 916763
aagggcucccucggcaaua

SEQ ID NO: 1182095 - RNA, 19 nt, Artificial Sequence
  Description of Artificial Sequence: Synthetic oligonucleotide
  Antisense strand to SEQ ID NO: 1182094
uauugccgagggagcccuu

SEQ ID NO: 1182096 - RNA, 19 nt, Artificial Sequence
  Description of Artificial Sequence: Synthetic oligonucleotide
  Sense strand starting at position 3044 of SEQ ID NO: 916763
gggcgcuucuggucacuga

SEQ ID NO: 1182097 - RNA, 19 nt, Artificial Sequence
  Description of Artificial Sequence: Synthetic oligonucleotide
  Antisense strand to SEQ ID NO: 1182096
ucagugaccagaagcgccc

SEQ ID NO: 1182098 - RNA, 19 nt, Artificial Sequence
  Description of Artificial Sequence: Synthetic oligonucleotide
  Sense strand starting at position 3061 of SEQ ID NO: 916763
gacuguucucagggucuuu

SEQ ID NO: 1182099 - RNA, 19 nt, Artificial Sequence
  Description of Artificial Sequence: Synthetic oligonucleotide
  Antisense strand to SEQ ID NO: 1182098
aaagacccugagaacaguc

SEQ ID NO: 1182100 - RNA, 19 nt, Artificial Sequence
  Description of Artificial Sequence: Synthetic oligonucleotide
  Sense strand starting at position 3066 of SEQ ID NO: 916763
uucucagggucuuuaaaua

SEQ ID NO: 1182101 - RNA, 19 nt, Artificial Sequence
  Description of Artificial Sequence: Synthetic oligonucleotide
  Antisense strand to SEQ ID NO: 1182100
uauuuaaagacccugagaa

SEQ ID NO: 1182102 - RNA, 19 nt, Artificial Sequence
  Description of Artificial Sequence: Synthetic oligonucleotide
  Sense strand starting at position 3482 of SEQ ID NO: 916763
uucuaagaaucuguuguac

SEQ ID NO: 1182103 - RNA, 19 nt, Artificial Sequence
  Description of Artificial Sequence: Synthetic oligonucleotide
  Antisense strand to SEQ ID NO: 1182102
guacaacagauucuuagaa

SEQ ID NO: 1182104 - RNA, 19 nt, Artificial Sequence
  Description of Artificial Sequence: Synthetic oligonucleotide
  Sense strand starting at position 3535 of SEQ ID NO: 916763
gggcgccuguuggaagaau

SEQ ID NO: 1182105 - RNA, 19 nt, Artificial Sequence
  Description of Artificial Sequence: Synthetic oligonucleotide
  Antisense strand to SEQ ID NO: 1182104
auucuuccaacaggcgccc

SEQ ID NO: 1182106 - RNA, 19 nt, Artificial Sequence
  Description of Artificial Sequence: Synthetic oligonucleotide
  Sense strand starting at position 3705 of SEQ ID NO: 916763
gagggaaugcacugcucuu

SEQ ID NO: 1182107 - RNA, 19 nt, Artificial Sequence
  Description of Artificial Sequence: Synthetic oligonucleotide
  Antisense strand to SEQ ID NO: 1182106
aagagcagugcauucccuc

SEQ ID NO: 1182108 - RNA, 19 nt, Artificial Sequence
  Description of Artificial Sequence: Synthetic oligonucleotide
  Sense strand starting at position 467 of SEQ ID NO: 916764
gaagcauagcuugggacua

SEQ ID NO: 1182109 - RNA, 19 nt, Artificial Sequence
  Description of Artificial Sequence: Synthetic oligonucleotide
  Antisense strand to SEQ ID NO: 1182108
uagucccaagcuaugcuuc

SEQ ID NO: 1182110 - RNA, 19 nt, Artificial Sequence
  Description of Artificial Sequence: Synthetic oligonucleotide
  Sense strand starting at position 792 of SEQ ID NO: 916764
ccaacaucugccuggacua

SEQ ID NO: 1182111 - RNA, 19 nt, Artificial Sequence
  Description of Artificial Sequence: Synthetic oligonucleotide
  Antisense strand to SEQ ID NO: 1182110
uaguccaggcagauguugg

SEQ ID NO: 1182112 - RNA, 19 nt, Artificial Sequence
  Description of Artificial Sequence: Synthetic oligonucleotide
  Sense strand starting at position 896 of SEQ ID NO: 916764
uaguacaucccgggaacaa

SEQ ID NO: 1182113 - RNA, 19 nt, Artificial Sequence
  Description of Artificial Sequence: Synthetic oligonucleotide
  Antisense strand to SEQ ID NO: 1182112
uuguucccgggauguacua

SEQ ID NO: 1182114 - RNA, 19 nt, Artificial Sequence
  Description of Artificial Sequence: Synthetic oligonucleotide
  Sense strand starting at position 1148 of SEQ ID NO: 916764
ggaguacucacacguccuu

SEQ ID NO: 1182115 - RNA, 19 nt, Artificial Sequence
  Description of Artificial Sequence: Synthetic oligonucleotide
  Antisense strand to SEQ ID NO: 1182114
aaggacgugugaguacucc

SEQ ID NO: 1182116 - RNA, 19 nt, Artificial Sequence
  Description of Artificial Sequence: Synthetic oligonucleotide
  Sense strand starting at position 1235 of SEQ ID NO: 916764
acaaacuuuccaggcagaa

SEQ ID NO: 1182117 - RNA, 19 nt, Artificial Sequence
  Description of Artificial Sequence: Synthetic oligonucleotide
  Antisense strand to SEQ ID NO: 1182116
uucugccuggaaaguuugu

SEQ ID NO: 1182118 - RNA, 19 nt, Artificial Sequence
  Description of Artificial Sequence: Synthetic oligonucleotide
  Sense strand starting at position 1365 of SEQ ID NO: 916764
augggagauuuccgaaaga

SEQ ID NO: 1182119 - RNA, 19 nt, Artificial Sequence
  Description of Artificial Sequence: Synthetic oligonucleotide
  Antisense strand to SEQ ID NO: 1182118
ucuuucggaaaucucccau

SEQ ID NO: 1182120 - RNA, 19 nt, Artificial Sequence
  Description of Artificial Sequence: Synthetic oligonucleotide
  Sense strand starting at position 1873 of SEQ ID NO: 916764
gcaaguauuaguggugggu

SEQ ID NO: 1182121 - RNA, 19 nt, Artificial Sequence
  Description of Artificial Sequence: Synthetic oligonucleotide
  Antisense strand to SEQ ID NO: 1182120
acccaccacuaauacuugc

SEQ ID NO: 1182122 - RNA, 19 nt, Artificial Sequence
  Description of Artificial Sequence: Synthetic oligonucleotide
  Sense strand starting at position 1893 of SEQ ID NO: 916764
ggaggcgucgccagagaga

SEQ ID NO: 1182123 - RNA, 19 nt, Artificial Sequence
  Description of Artificial Sequence: Synthetic oligonucleotide
  Antisense strand to SEQ ID NO: 1182122
ucucucuggcgacgccucc

SEQ ID NO: 1182124 - RNA, 19 nt, Artificial Sequence
  Description of Artificial Sequence: Synthetic oligonucleotide
  Sense strand starting at position 1977 of SEQ ID NO: 916764
ucguucuaguuuccaguua

SEQ ID NO: 1182125 - RNA, 19 nt, Artificial Sequence
  Description of Artificial Sequence: Synthetic oligonucleotide
  Antisense strand to SEQ ID NO: 1182124
uaacuggaaacuagaacga

SEQ ID NO: 1182126 - RNA, 19 nt, Artificial Sequence
  Description of Artificial Sequence: Synthetic oligonucleotide
  Sense strand starting at position 2089 of SEQ ID NO: 916764
ccacuacagcgaugauaaa

SEQ ID NO: 1182127 - RNA, 19 nt, Artificial Sequence
  Description of Artificial Sequence: Synthetic oligonucleotide
  Antisense strand to SEQ ID NO: 1182126
uuuaucaucgcuguagugg

SEQ ID NO: 1182128 - RNA, 19 nt, Artificial Sequence
  Description of Artificial Sequence: Synthetic oligonucleotide
  Sense strand starting at position 2110 of SEQ ID NO: 916764
gucaucuacaguuguuuga

SEQ ID NO: 1182129 - RNA, 19 nt, Artificial Sequence
  Description of Artificial Sequence: Synthetic oligonucleotide
  Antisense strand to SEQ ID NO: 1182128
ucaaacaacuguagaugac

SEQ ID NO: 1182130 - RNA, 19 nt, Artificial Sequence
  Description of Artificial Sequence: Synthetic oligonucleotide
  Sense strand starting at position 2113 of SEQ ID NO: 916764
aucuacaguuguuugaaca

SEQ ID NO: 1182131 - RNA, 19 nt, Artificial Sequence
  Description of Artificial Sequence: Synthetic oligonucleotide
  Antisense strand to SEQ ID NO: 1182130
uguucaaacaacuguagau

SEQ ID NO: 1182132 - RNA, 19 nt, Artificial Sequence
  Description of Artificial Sequence: Synthetic oligonucleotide
  Sense strand starting at position 2265 of SEQ ID NO: 916764
gggauuaaauaacuuggca

SEQ ID NO: 1182133 - RNA, 19 nt, Artificial Sequence
  Description of Artificial Sequence: Synthetic oligonucleotide
  Antisense strand to SEQ ID NO: 1182132
ugccaaguuauuuaauccc

SEQ ID NO: 1182134 - RNA, 19 nt, Artificial Sequence
  Description of Artificial Sequence: Synthetic oligonucleotide
  Sense strand starting at position 2349 of SEQ ID NO: 916764
gcugucuggacuuggguaa

SEQ ID NO: 1182135 - RNA, 19 nt, Artificial Sequence
  Description of Artificial Sequence: Synthetic oligonucleotide
  Antisense strand to SEQ ID NO: 1182134
uuacccaaguccagacagc

SEQ ID NO: 1182136 - RNA, 19 nt, Artificial Sequence
  Description of Artificial Sequence: Synthetic oligonucleotide
  Sense strand starting at position 2403 of SEQ ID NO: 916764
ucaucuguugagugaggau

SEQ ID NO: 1182137 - RNA, 19 nt, Artificial Sequence
  Description of Artificial Sequence: Synthetic oligonucleotide
  Antisense strand to SEQ ID NO: 1182136
auccucacucaacagauga

SEQ ID NO: 1182138 - RNA, 19 nt, Artificial Sequence
  Description of Artificial Sequence: Synthetic oligonucleotide
  Sense strand starting at position 2512 of SEQ ID NO: 916764
uccagaaaguguuugauau

SEQ ID NO: 1182139 - RNA, 19 nt, Artificial Sequence
  Description of Artificial Sequence: Synthetic oligonucleotide
  Antisense strand to SEQ ID NO: 1182138
auaucaaacacuuucugga

SEQ ID NO: 1182140 - RNA, 19 nt, Artificial Sequence
  Description of Artificial Sequence: Synthetic oligonucleotide
  Sense strand starting at position 2513 of SEQ ID NO: 916764
ccagaaaguguuugauauu

SEQ ID NO: 1182141 - RNA, 19 nt, Artificial Sequence
  Description of Artificial Sequence: Synthetic oligonucleotide
  Antisense strand to SEQ ID NO: 1182140
aauaucaaacacuuucugg

SEQ ID NO: 1182142 - RNA, 19 nt, Artificial Sequence
  Description of Artificial Sequence: Synthetic oligonucleotide
  Sense strand starting at position 2516 of SEQ ID NO: 916764
gaaaguguuugauauucug

SEQ ID NO: 1182143 - RNA, 19 nt, Artificial Sequence
  Description of Artificial Sequence: Synthetic oligonucleotide
  Antisense strand to SEQ ID NO: 1182142
cagaauaucaaacacuuuc

SEQ ID NO: 1182144 - RNA, 19 nt, Artificial Sequence
  Description of Artificial Sequence: Synthetic oligonucleotide
  Sense strand starting at position 2519 of SEQ ID NO: 916764
aguguuugauauucugauu

SEQ ID NO: 1182145 - RNA, 19 nt, Artificial Sequence
  Description of Artificial Sequence: Synthetic oligonucleotide
  Antisense strand to SEQ ID NO: 1182144
aaucagaauaucaaacacu

SEQ ID NO: 1182146 - RNA, 19 nt, Artificial Sequence
  Description of Artificial Sequence: Synthetic oligonucleotide
  Sense strand starting at position 2525 of SEQ ID NO: 916764
ugauauucugauuguuguc

SEQ ID NO: 1182147 - RNA, 19 nt, Artificial Sequence
  Description of Artificial Sequence: Synthetic oligonucleotide
  Antisense strand to SEQ ID NO: 1182146
gacaacaaucagaauauca

SEQ ID NO: 1182148 - RNA, 19 nt, Artificial Sequence
  Description of Artificial Sequence: Synthetic oligonucleotide
  Sense strand starting at position 2531 of SEQ ID NO: 916764
ucugauuguuguccuuuga

SEQ ID NO: 1182149 - RNA, 19 nt, Artificial Sequence
  Description of Artificial Sequence: Synthetic oligonucleotide
  Antisense strand to SEQ ID NO: 1182148
ucaaaggacaacaaucaga

SEQ ID NO: 1182150 - RNA, 19 nt, Artificial Sequence
  Description of Artificial Sequence: Synthetic oligonucleotide
  Sense strand starting at position 2596 of SEQ ID NO: 916764
cuuccacuccgguagagau

SEQ ID NO: 1182151 - RNA, 19 nt, Artificial Sequence
  Description of Artificial Sequence: Synthetic oligonucleotide
  Antisense strand to SEQ ID NO: 1182150
aucucuaccggaguggaag

SEQ ID NO: 1182152 - RNA, 19 nt, Artificial Sequence
  Description of Artificial Sequence: Synthetic oligonucleotide
  Sense strand starting at position 2642 of SEQ ID NO: 916764
gcuccagguuuguacauuu

SEQ ID NO: 1182153 - RNA, 19 nt, Artificial Sequence
  Description of Artificial Sequence: Synthetic oligonucleotide
  Antisense strand to SEQ ID NO: 1182152
aaauguacaaaccuggagc

SEQ ID NO: 1182154 - RNA, 19 nt, Artificial Sequence
  Description of Artificial Sequence: Synthetic oligonucleotide
  Sense strand starting at position 2693 of SEQ ID NO: 916764
gggccugucccagaacaga

SEQ ID NO: 1182155 - RNA, 19 nt, Artificial Sequence
  Description of Artificial Sequence: Synthetic oligonucleotide
  Antisense strand to SEQ ID NO: 1182154
ucuguucugggacaggccc

SEQ ID NO: 1182156 - RNA, 19 nt, Artificial Sequence
  Description of Artificial Sequence: Synthetic oligonucleotide
  Sense strand starting at position 3015 of SEQ ID NO: 916764
uuaaucccaucugggaaau

SEQ ID NO: 1182157 - RNA, 19 nt, Artificial Sequence
  Description of Artificial Sequence: Synthetic oligonucleotide
  Antisense strand to SEQ ID NO: 1182156
auuucccagaugggauuaa

SEQ ID NO: 1182158 - RNA, 19 nt, Artificial Sequence
  Description of Artificial Sequence: Synthetic oligonucleotide
  Sense strand starting at position 3051 of SEQ ID NO: 916764
cuccaaggcuuagaaguau

SEQ ID NO: 1182159 - RNA, 19 nt, Artificial Sequence
  Description of Artificial Sequence: Synthetic oligonucleotide
  Antisense strand to SEQ ID NO: 1182158
auacuucuaagccuuggag

SEQ ID NO: 1182160 - RNA, 19 nt, Artificial Sequence
  Description of Artificial Sequence: Synthetic oligonucleotide
  Sense strand starting at position 3060 of SEQ ID NO: 916764
uuagaaguauugcaacauc

SEQ ID NO: 1182161 - RNA, 19 nt, Artificial Sequence
  Description of Artificial Sequence: Synthetic oligonucleotide
  Antisense strand to SEQ ID NO: 1182160
gauguugcaauacuucuaa

SEQ ID NO: 1182162 - RNA, 19 nt, Artificial Sequence
  Description of Artificial Sequence: Synthetic oligonucleotide
  Sense strand starting at position 3137 of SEQ ID NO: 916764
gagucaucccacugugauu

SEQ ID NO: 1182163 - RNA, 19 nt, Artificial Sequence
  Description of Artificial Sequence: Synthetic oligonucleotide
  Antisense strand to SEQ ID NO: 1182162
aaucacagugggaugacuc

SEQ ID NO: 1182164 - RNA, 19 nt, Artificial Sequence
  Description of Artificial Sequence: Synthetic oligonucleotide
  Sense strand starting at position 3277 of SEQ ID NO: 916764
cacuacuaugcccgguuaa

SEQ ID NO: 1182165 - RNA, 19 nt, Artificial Sequence
  Description of Artificial Sequence: Synthetic oligonucleotide
  Antisense strand to SEQ ID NO: 1182164
uuaaccgggcauaguagug

SEQ ID NO: 1182166 - RNA, 19 nt, Artificial Sequence
  Description of Artificial Sequence: Synthetic oligonucleotide
  Sense strand starting at position 3278 of SEQ ID NO: 916764
acuacuaugcccgguuaau

SEQ ID NO: 1182167 - RNA, 19 nt, Artificial Sequence
  Description of Artificial Sequence: Synthetic oligonucleotide
  Antisense strand to SEQ ID NO: 1182166
auuaaccgggcauaguagu

SEQ ID NO: 1182168 - RNA, 19 nt, Artificial Sequence
  Description of Artificial Sequence: Synthetic oligonucleotide
  Sense strand starting at position 3439 of SEQ ID NO: 916764
ggcccacugugaucuuuau

SEQ ID NO: 1182169 - RNA, 19 nt, Artificial Sequence
  Description of Artificial Sequence: Synthetic oligonucleotide
  Antisense strand to SEQ ID NO: 1182168
auaaagaucacagugggcc

SEQ ID NO: 1182170 - RNA, 19 nt, Artificial Sequence
  Description of Artificial Sequence: Synthetic oligonucleotide
  Sense strand starting at position 3445 of SEQ ID NO: 916764
cugugaucuuuaucaguua

SEQ ID NO: 1182171 - RNA, 19 nt, Artificial Sequence
  Description of Artificial Sequence: Synthetic oligonucleotide
  Antisense strand to SEQ ID NO: 1182170
uaacugauaaagaucacag

SEQ ID NO: 1182172 - RNA, 19 nt, Artificial Sequence
  Description of Artificial Sequence: Synthetic oligonucleotide
  Sense strand starting at position 3520 of SEQ ID NO: 916764
uaagguauuugcuauguaa

SEQ ID NO: 1182173 - RNA, 19 nt, Artificial Sequence
  Description of Artificial Sequence: Synthetic oligonucleotide
  Antisense strand to SEQ ID NO: 1182172
uuacauagcaaauaccuua

SEQ ID NO: 1182174 - RNA, 19 nt, Artificial Sequence
  Description of Artificial Sequence: Synthetic oligonucleotide
  Sense strand starting at position 3541 of SEQ ID NO: 916764
gaagcuuuaagacgggaau

SEQ ID NO: 1182175 - RNA, 19 nt, Artificial Sequence
  Description of Artificial Sequence: Synthetic oligonucleotide
  Antisense strand to SEQ ID NO: 1182174
auucccgucuuaaagcuuc

SEQ ID NO: 1182176 - RNA, 19 nt, Artificial Sequence
  Description of Artificial Sequence: Synthetic oligonucleotide
  Sense strand starting at position 3544 of SEQ ID NO: 916764
gcuuuaagacgggaauccu

SEQ ID NO: 1182177 - RNA, 19 nt, Artificial Sequence
  Description of Artificial Sequence: Synthetic oligonucleotide
  Antisense strand to SEQ ID NO: 1182176
aggauucccgucuuaaagc

SEQ ID NO: 1182178 - RNA, 19 nt, Artificial Sequence
  Description of Artificial Sequence: Synthetic oligonucleotide
  Sense strand starting at position 3766 of SEQ ID NO: 916764
gcccaucuuccagagcuaa

SEQ ID NO: 1182179 - RNA, 19 nt, Artificial Sequence
  Description of Artificial Sequence: Synthetic oligonucleotide
  Antisense strand to SEQ ID NO: 1182178
uuagcucuggaagaugggc

SEQ ID NO: 1182180 - RNA, 19 nt, Artificial Sequence
  Description of Artificial Sequence: Synthetic oligonucleotide
  Sense strand starting at position 3876 of SEQ ID NO: 916764
agcgcuguuaccuguccaa

SEQ ID NO: 1182181 - RNA, 19 nt, Artificial Sequence
  Description of Artificial Sequence: Synthetic oligonucleotide
  Antisense strand to SEQ ID NO: 1182180
uuggacagguaacagcgcu

SEQ ID NO: 1182182 - RNA, 19 nt, Artificial Sequence
  Description of Artificial Sequence: Synthetic oligonucleotide
  Sense strand starting at position 3879 of SEQ ID NO: 916764
gcuguuaccuguccaauau

SEQ ID NO: 1182183 - RNA, 19 nt, Artificial Sequence
  Description of Artificial Sequence: Synthetic oligonucleotide
  Antisense strand to SEQ ID NO: 1182182
auauuggacagguaacagc

SEQ ID NO: 1182184 - RNA, 19 nt, Artificial Sequence
  Description of Artificial Sequence: Synthetic oligonucleotide
  Sense strand starting at position 3880 of SEQ ID NO: 916764
cuguuaccuguccaauauc

SEQ ID NO: 1182185 - RNA, 19 nt, Artificial Sequence
  Description of Artificial Sequence: Synthetic oligonucleotide
  Antisense strand to SEQ ID NO: 1182184
gauauuggacagguaacag

SEQ ID NO: 1182186 - RNA, 19 nt, Artificial Sequence
  Description of Artificial Sequence: Synthetic oligonucleotide
  Sense strand starting at position 3980 of SEQ ID NO: 916764
cugagaaucucugaccuga

SEQ ID NO: 1182187 - RNA, 19 nt, Artificial Sequence
  Description of Artificial Sequence: Synthetic oligonucleotide
  Antisense strand to SEQ ID NO: 1182186
ucaggucagagauucucag

SEQ ID NO: 1182188 - RNA, 19 nt, Artificial Sequence
  Description of Artificial Sequence: Synthetic oligonucleotide
  Sense strand starting at position 95 of SEQ ID NO: 916765
gcaggaaguuuggccaaga

SEQ ID NO: 1182189 - RNA, 19 nt, Artificial Sequence
  Description of Artificial Sequence: Synthetic oligonucleotide
  Antisense strand to SEQ ID NO: 1182188
ucuuggccaaacuuccugc

SEQ ID NO: 1182190 - RNA, 19 nt, Artificial Sequence
  Description of Artificial Sequence: Synthetic oligonucleotide
  Sense strand starting at position 240 of SEQ ID NO: 916765
gggccagagcucagugagu

SEQ ID NO: 1182191 - RNA, 19 nt, Artificial Sequence
  Description of Artificial Sequence: Synthetic oligonucleotide
  Antisense strand to SEQ ID NO: 1182190
acucacugagcucuggccc

SEQ ID NO: 1182192 - RNA, 19 nt, Artificial Sequence
  Description of Artificial Sequence: Synthetic oligonucleotide
  Sense strand starting at position 242 of SEQ ID NO: 916765
gccagagcucagugaguga

SEQ ID NO: 1182193 - RNA, 19 nt, Artificial Sequence
  Description of Artificial Sequence: Synthetic oligonucleotide
  Antisense strand to SEQ ID NO: 1182192
ucacucacugagcucuggc

SEQ ID NO: 1182194 - RNA, 19 nt, Artificial Sequence
  Description of Artificial Sequence: Synthetic oligonucleotide
  Sense strand starting at position 245 of SEQ ID NO: 916765
agagcucagugagugagaa

SEQ ID NO: 1182195 - RNA, 19 nt, Artificial Sequence
  Description of Artificial Sequence: Synthetic oligonucleotide
  Antisense strand to SEQ ID NO: 1182194
uucucacucacugagcucu

SEQ ID NO: 1182196 - RNA, 19 nt, Artificial Sequence
  Description of Artificial Sequence: Synthetic oligonucleotide
  Sense strand starting at position 321 of SEQ ID NO: 916765
gccucaaugcccuaacagu

SEQ ID NO: 1182197 - RNA, 19 nt, Artificial Sequence
  Description of Artificial Sequence: Synthetic oligonucleotide
  Antisense strand to SEQ ID NO: 1182196
acuguuagggcauugaggc

SEQ ID NO: 1182198 - RNA, 19 nt, Artificial Sequence
  Description of Artificial Sequence: Synthetic oligonucleotide
  Sense strand starting at position 336 of SEQ ID NO: 916765
caguguaggccgucucauu

SEQ ID NO: 1182199 - RNA, 19 nt, Artificial Sequence
  Description of Artificial Sequence: Synthetic oligonucleotide
  Antisense strand to SEQ ID NO: 1182198
aaugagacggccuacacug

SEQ ID NO: 1182200 - RNA, 19 nt, Artificial Sequence
  Description of Artificial Sequence: Synthetic oligonucleotide
  Sense strand starting at position 449 of SEQ ID NO: 916765
ggguguguauauuuggagu

SEQ ID NO: 1182201 - RNA, 19 nt, Artificial Sequence
  Description of Artificial Sequence: Synthetic oligonucleotide
  Antisense strand to SEQ ID NO: 1182200
acuccaaauauacacaccc

SEQ ID NO: 1182202 - RNA, 19 nt, Artificial Sequence
  Description of Artificial Sequence: Synthetic oligonucleotide
  Sense strand starting at position 451 of SEQ ID NO: 916765
guguguauauuuggaguag

SEQ ID NO: 1182203 - RNA, 19 nt, Artificial Sequence
  Description of Artificial Sequence: Synthetic oligonucleotide
  Antisense strand to SEQ ID NO: 1182202
cuacuccaaauauacacac

SEQ ID NO: 1182204 - RNA, 19 nt, Artificial Sequence
  Description of Artificial Sequence: Synthetic oligonucleotide
  Sense strand starting at position 462 of SEQ ID NO: 916765
uggaguagccaaugaggau

SEQ ID NO: 1182205 - RNA, 19 nt, Artificial Sequence
  Description of Artificial Sequence: Synthetic oligonucleotide
  Antisense strand to SEQ ID NO: 1182204
auccucauuggcuacucca

SEQ ID NO: 1182206 - RNA, 19 nt, Artificial Sequence
  Description of Artificial Sequence: Synthetic oligonucleotide
  Sense strand starting at position 952 of SEQ ID NO: 916765
gaagcauagcuugggacua

SEQ ID NO: 1182207 - RNA, 19 nt, Artificial Sequence
  Description of Artificial Sequence: Synthetic oligonucleotide
  Antisense strand to SEQ ID NO: 1182206
uagucccaagcuaugcuuc

SEQ ID NO: 1182208 - RNA, 19 nt, Artificial Sequence
  Description of Artificial Sequence: Synthetic oligonucleotide
  Sense strand starting at position 1277 of SEQ ID NO: 916765
ccaacaucugccuggacua

SEQ ID NO: 1182209 - RNA, 19 nt, Artificial Sequence
  Description of Artificial Sequence: Synthetic oligonucleotide
  Antisense strand to SEQ ID NO: 1182208
uaguccaggcagauguugg

SEQ ID NO: 1182210 - RNA, 19 nt, Artificial Sequence
  Description of Artificial Sequence: Synthetic oligonucleotide
  Sense strand starting at position 1381 of SEQ ID NO: 916765
uaguacaucccgggaacaa

SEQ ID NO: 1182211 - RNA, 19 nt, Artificial Sequence
  Description of Artificial Sequence: Synthetic oligonucleotide
  Antisense strand to SEQ ID NO: 1182210
uuguucccgggauguacua

SEQ ID NO: 1182212 - RNA, 19 nt, Artificial Sequence
  Description of Artificial Sequence: Synthetic oligonucleotide
  Sense strand starting at position 1633 of SEQ ID NO: 916765
ggaguacucacacguccuu

SEQ ID NO: 1182213 - RNA, 19 nt, Artificial Sequence
  Description of Artificial Sequence: Synthetic oligonucleotide
  Antisense strand to SEQ ID NO: 1182212
aaggacgugugaguacucc

SEQ ID NO: 1182214 - RNA, 19 nt, Artificial Sequence
  Description of Artificial Sequence: Synthetic oligonucleotide
  Sense strand starting at position 1720 of SEQ ID NO: 916765
acaaacuuuccaggcagaa

SEQ ID NO: 1182215 - RNA, 19 nt, Artificial Sequence
  Description of Artificial Sequence: Synthetic oligonucleotide
  Antisense strand to SEQ ID NO: 1182214
uucugccuggaaaguuugu

SEQ ID NO: 1182216 - RNA, 19 nt, Artificial Sequence
  Description of Artificial Sequence: Synthetic oligonucleotide
  Sense strand starting at position 1850 of SEQ ID NO: 916765
augggagauuuccgaaaga

SEQ ID NO: 1182217 - RNA, 19 nt, Artificial Sequence
  Description of Artificial Sequence: Synthetic oligonucleotide
  Antisense strand to SEQ ID NO: 1182216
ucuuucggaaaucucccau

SEQ ID NO: 1182218 - RNA, 19 nt, Artificial Sequence
  Description of Artificial Sequence: Synthetic oligonucleotide
  Sense strand starting at position 2358 of SEQ ID NO: 916765
gcaaguauuaguggugggu

SEQ ID NO: 1182219 - RNA, 19 nt, Artificial Sequence
  Description of Artificial Sequence: Synthetic oligonucleotide
  Antisense strand to SEQ ID NO: 1182218
acccaccacuaauacuugc

SEQ ID NO: 1182220 - RNA, 19 nt, Artificial Sequence
  Description of Artificial Sequence: Synthetic oligonucleotide
  Sense strand starting at position 2378 of SEQ ID NO: 916765
ggaggcgucgccagagaga

SEQ ID NO: 1182221 - RNA, 19 nt, Artificial Sequence
  Description of Artificial Sequence: Synthetic oligonucleotide
  Antisense strand to SEQ ID NO: 1182220
ucucucuggcgacgccucc

SEQ ID NO: 1182222 - RNA, 19 nt, Artificial Sequence
  Description of Artificial Sequence: Synthetic oligonucleotide
  Sense strand starting at position 2462 of SEQ ID NO: 916765
ucguucuaguuuccaguua

SEQ ID NO: 1182223 - RNA, 19 nt, Artificial Sequence
  Description of Artificial Sequence: Synthetic oligonucleotide
  Antisense strand to SEQ ID NO: 1182222
uaacuggaaacuagaacga

SEQ ID NO: 1182224 - RNA, 19 nt, Artificial Sequence
  Description of Artificial Sequence: Synthetic oligonucleotide
  Sense strand starting at position 2574 of SEQ ID NO: 916765
ccacuacagcgaugauaaa

SEQ ID NO: 1182225 - RNA, 19 nt, Artificial Sequence
  Description of Artificial Sequence: Synthetic oligonucleotide
  Antisense strand to SEQ ID NO: 1182224
uuuaucaucgcuguagugg

SEQ ID NO: 1182226 - RNA, 19 nt, Artificial Sequence
  Description of Artificial Sequence: Synthetic oligonucleotide
  Sense strand starting at position 2595 of SEQ ID NO: 916765
gucaucuacaguuguuuga

SEQ ID NO: 1182227 - RNA, 19 nt, Artificial Sequence
  Description of Artificial Sequence: Synthetic oligonucleotide
  Antisense strand to SEQ ID NO: 1182226
ucaaacaacuguagaugac

SEQ ID NO: 1182228 - RNA, 19 nt, Artificial Sequence
  Description of Artificial Sequence: Synthetic oligonucleotide
  Sense strand starting at position 2598 of SEQ ID NO: 916765
aucuacaguuguuugaaca

SEQ ID NO: 1182229 - RNA, 19 nt, Artificial Sequence
  Description of Artificial Sequence: Synthetic oligonucleotide
  Antisense strand to SEQ ID NO: 1182228
uguucaaacaacuguagau

SEQ ID NO: 1182230 - RNA, 19 nt, Artificial Sequence
  Description of Artificial Sequence: Synthetic oligonucleotide
  Sense strand starting at position 2750 of SEQ ID NO: 916765
gggauuaaauaacuuggca

SEQ ID NO: 1182231 - RNA, 19 nt, Artificial Sequence
  Description of Artificial Sequence: Synthetic oligonucleotide
  Antisense strand to SEQ ID NO: 1182230
ugccaaguuauuuaauccc

SEQ ID NO: 1182232 - RNA, 19 nt, Artificial Sequence
  Description of Artificial Sequence: Synthetic oligonucleotide
  Sense strand starting at position 2834 of SEQ ID NO: 916765
gcugucuggacuuggguaa

SEQ ID NO: 1182233 - RNA, 19 nt, Artificial Sequence
  Description of Artificial Sequence: Synthetic oligonucleotide
  Antisense strand to SEQ ID NO: 1182232
uuacccaaguccagacagc

SEQ ID NO: 1182234 - RNA, 19 nt, Artificial Sequence
  Description of Artificial Sequence: Synthetic oligonucleotide
  Sense strand starting at position 2888 of SEQ ID NO: 916765
ucaucuguugagugaggau

SEQ ID NO: 1182235 - RNA, 19 nt, Artificial Sequence
  Description of Artificial Sequence: Synthetic oligonucleotide
  Antisense strand to SEQ ID NO: 1182234
auccucacucaacagauga

SEQ ID NO: 1182236 - RNA, 19 nt, Artificial Sequence
  Description of Artificial Sequence: Synthetic oligonucleotide
  Sense strand starting at position 2997 of SEQ ID NO: 916765
uccagaaaguguuugauau

SEQ ID NO: 1182237 - RNA, 19 nt, Artificial Sequence
  Description of Artificial Sequence: Synthetic oligonucleotide
  Antisense strand to SEQ ID NO: 1182236
auaucaaacacuuucugga

SEQ ID NO: 1182238 - RNA, 19 nt, Artificial Sequence
  Description of Artificial Sequence: Synthetic oligonucleotide
  Sense strand starting at position 2998 of SEQ ID NO: 916765
ccagaaaguguuugauauu

SEQ ID NO: 1182239 - RNA, 19 nt, Artificial Sequence
  Description of Artificial Sequence: Synthetic oligonucleotide
  Antisense strand to SEQ ID NO: 1182238
aauaucaaacacuuucugg

SEQ ID NO: 1182240 - RNA, 19 nt, Artificial Sequence
  Description of Artificial Sequence: Synthetic oligonucleotide
  Sense strand starting at position 3001 of SEQ ID NO: 916765
gaaaguguuugauauucug

SEQ ID NO: 1182241 - RNA, 19 nt, Artificial Sequence
  Description of Artificial Sequence: Synthetic oligonucleotide
  Antisense strand to SEQ ID NO: 1182240
cagaauaucaaacacuuuc

SEQ ID NO: 1182242 - RNA, 19 nt, Artificial Sequence
  Description of Artificial Sequence: Synthetic oligonucleotide
  Sense strand starting at position 3004 of SEQ ID NO: 916765
aguguuugauauucugauu

SEQ ID NO: 1182243 - RNA, 19 nt, Artificial Sequence
  Description of Artificial Sequence: Synthetic oligonucleotide
  Antisense strand to SEQ ID NO: 1182242
aaucagaauaucaaacacu

SEQ ID NO: 1182244 - RNA, 19 nt, Artificial Sequence
  Description of Artificial Sequence: Synthetic oligonucleotide
  Sense strand starting at position 3010 of SEQ ID NO: 916765
ugauauucugauuguuguc

SEQ ID NO: 1182245 - RNA, 19 nt, Artificial Sequence
  Description of Artificial Sequence: Synthetic oligonucleotide
  Antisense strand to SEQ ID NO: 1182244
gacaacaaucagaauauca

SEQ ID NO: 1182246 - RNA, 19 nt, Artificial Sequence
  Description of Artificial Sequence: Synthetic oligonucleotide
  Sense strand starting at position 3016 of SEQ ID NO: 916765
ucugauuguuguccuuuga

SEQ ID NO: 1182247 - RNA, 19 nt, Artificial Sequence
  Description of Artificial Sequence: Synthetic oligonucleotide
  Antisense strand to SEQ ID NO: 1182246
ucaaaggacaacaaucaga

SEQ ID NO: 1182248 - RNA, 19 nt, Artificial Sequence
  Description of Artificial Sequence: Synthetic oligonucleotide
  Sense strand starting at position 3081 of SEQ ID NO: 916765
cuuccacuccgguagagau

SEQ ID NO: 1182249 - RNA, 19 nt, Artificial Sequence
  Description of Artificial Sequence: Synthetic oligonucleotide
  Antisense strand to SEQ ID NO: 1182248
aucucuaccggaguggaag

SEQ ID NO: 1182250 - RNA, 19 nt, Artificial Sequence
  Description of Artificial Sequence: Synthetic oligonucleotide
  Sense strand starting at position 3127 of SEQ ID NO: 916765
gcuccagguuuguacauuu

SEQ ID NO: 1182251 - RNA, 19 nt, Artificial Sequence
  Description of Artificial Sequence: Synthetic oligonucleotide
  Antisense strand to SEQ ID NO: 1182250
aaauguacaaaccuggagc

SEQ ID NO: 1182252 - RNA, 19 nt, Artificial Sequence
  Description of Artificial Sequence: Synthetic oligonucleotide
  Sense strand starting at position 3178 of SEQ ID NO: 916765
gggccugucccagaacaga

SEQ ID NO: 1182253 - RNA, 19 nt, Artificial Sequence
  Description of Artificial Sequence: Synthetic oligonucleotide
  Antisense strand to SEQ ID NO: 1182252
ucuguucugggacaggccc

SEQ ID NO: 1182254 - RNA, 19 nt, Artificial Sequence
  Description of Artificial Sequence: Synthetic oligonucleotide
  Sense strand starting at position 3500 of SEQ ID NO: 916765
uuaaucccaucugggaaau

SEQ ID NO: 1182255 - RNA, 19 nt, Artificial Sequence
  Description of Artificial Sequence: Synthetic oligonucleotide
  Antisense strand to SEQ ID NO: 1182254
auuucccagaugggauuaa

SEQ ID NO: 1182256 - RNA, 19 nt, Artificial Sequence
  Description of Artificial Sequence: Synthetic oligonucleotide
  Sense strand starting at position 3545 of SEQ ID NO: 916765
uuagaaguauugcaacauc

SEQ ID NO: 1182257 - RNA, 19 nt, Artificial Sequence
  Description of Artificial Sequence: Synthetic oligonucleotide
  Antisense strand to SEQ ID NO: 1182256
gauguugcaauacuucuaa

SEQ ID NO: 1182258 - RNA, 19 nt, Artificial Sequence
  Description of Artificial Sequence: Synthetic oligonucleotide
  Sense strand starting at position 3622 of SEQ ID NO: 916765
gagucaucccacugugauu

SEQ ID NO: 1182259 - RNA, 19 nt, Artificial Sequence
  Description of Artificial Sequence: Synthetic oligonucleotide
  Antisense strand to SEQ ID NO: 1182258
aaucacagugggaugacuc

SEQ ID NO: 1182260 - RNA, 19 nt, Artificial Sequence
  Description of Artificial Sequence: Synthetic oligonucleotide
  Sense strand starting at position 3762 of SEQ ID NO: 916765
cacuacuaugcccgguuaa

SEQ ID NO: 1182261 - RNA, 19 nt, Artificial Sequence
  Description of Artificial Sequence: Synthetic oligonucleotide
  Antisense strand to SEQ ID NO: 1182260
uuaaccgggcauaguagug

SEQ ID NO: 1182262 - RNA, 19 nt, Artificial Sequence
  Description of Artificial Sequence: Synthetic oligonucleotide
  Sense strand starting at position 3763 of SEQ ID NO: 916765
acuacuaugcccgguuaau

SEQ ID NO: 1182263 - RNA, 19 nt, Artificial Sequence
  Description of Artificial Sequence: Synthetic oligonucleotide
  Antisense strand to SEQ ID NO: 1182262
auuaaccgggcauaguagu

SEQ ID NO: 1182264 - RNA, 19 nt, Artificial Sequence
  Description of Artificial Sequence: Synthetic oligonucleotide
  Sense strand starting at position 3924 of SEQ ID NO: 916765
ggcccacugugaucuuuau

SEQ ID NO: 1182265 - RNA, 19 nt, Artificial Sequence
  Description of Artificial Sequence: Synthetic oligonucleotide
  Antisense strand to SEQ ID NO: 1182264
auaaagaucacagugggcc

SEQ ID NO: 1182266 - RNA, 19 nt, Artificial Sequence
  Description of Artificial Sequence: Synthetic oligonucleotide
  Sense strand starting at position 3930 of SEQ ID NO: 916765
cugugaucuuuaucaguua

SEQ ID NO: 1182267 - RNA, 19 nt, Artificial Sequence
  Description of Artificial Sequence: Synthetic oligonucleotide
  Antisense strand to SEQ ID NO: 1182266
uaacugauaaagaucacag

SEQ ID NO: 1182268 - RNA, 19 nt, Artificial Sequence
  Description of Artificial Sequence: Synthetic oligonucleotide
  Sense strand starting at position 19 of SEQ ID NO: 916766
ggcccuuucccuuaggaga

SEQ ID NO: 1182269 - RNA, 19 nt, Artificial Sequence
  Description of Artificial Sequence: Synthetic oligonucleotide
  Antisense strand to SEQ ID NO: 1182268
ucuccuaagggaaagggcc

SEQ ID NO: 1182270 - RNA, 19 nt, Artificial Sequence
  Description of Artificial Sequence: Synthetic oligonucleotide
  Sense strand starting at position 250 of SEQ ID NO: 916766
gcaggaaguuuggccaaga

SEQ ID NO: 1182271 - RNA, 19 nt, Artificial Sequence
  Description of Artificial Sequence: Synthetic oligonucleotide
  Antisense strand to SEQ ID NO: 1182270
ucuuggccaaacuuccugc

SEQ ID NO: 1182272 - RNA, 19 nt, Artificial Sequence
  Description of Artificial Sequence: Synthetic oligonucleotide
  Sense strand starting at position 395 of SEQ ID NO: 916766
gggccagagcucagugagu

SEQ ID NO: 1182273 - RNA, 19 nt, Artificial Sequence
  Description of Artificial Sequence: Synthetic oligonucleotide
  Antisense strand to SEQ ID NO: 1182272
acucacugagcucuggccc

SEQ ID NO: 1182274 - RNA, 19 nt, Artificial Sequence
  Description of Artificial Sequence: Synthetic oligonucleotide
  Sense strand starting at position 397 of SEQ ID NO: 916766
gccagagcucagugaguga

SEQ ID NO: 1182275 - RNA, 19 nt, Artificial Sequence
  Description of Artificial Sequence: Synthetic oligonucleotide
  Antisense strand to SEQ ID NO: 1182274
ucacucacugagcucuggc

SEQ ID NO: 1182276 - RNA, 19 nt, Artificial Sequence
  Description of Artificial Sequence: Synthetic oligonucleotide
  Sense strand starting at position 400 of SEQ ID NO: 916766
agagcucagugagugagaa

SEQ ID NO: 1182277 - RNA, 19 nt, Artificial Sequence
  Description of Artificial Sequence: Synthetic oligonucleotide
  Antisense strand to SEQ ID NO: 1182276
uucucacucacugagcucu

SEQ ID NO: 1182278 - RNA, 19 nt, Artificial Sequence
  Description of Artificial Sequence: Synthetic oligonucleotide
  Sense strand starting at position 476 of SEQ ID NO: 916766
gccucaaugcccuaacagu

SEQ ID NO: 1182279 - RNA, 19 nt, Artificial Sequence
  Description of Artificial Sequence: Synthetic oligonucleotide
  Antisense strand to SEQ ID NO: 1182278
acuguuagggcauugaggc

SEQ ID NO: 1182280 - RNA, 19 nt, Artificial Sequence
  Description of Artificial Sequence: Synthetic oligonucleotide
  Sense strand starting at position 491 of SEQ ID NO: 916766
caguguaggccgucucauu

SEQ ID NO: 1182281 - RNA, 19 nt, Artificial Sequence
  Description of Artificial Sequence: Synthetic oligonucleotide
  Antisense strand to SEQ ID NO: 1182280
aaugagacggccuacacug

SEQ ID NO: 1182282 - RNA, 19 nt, Artificial Sequence
  Description of Artificial Sequence: Synthetic oligonucleotide
  Sense strand starting at position 604 of SEQ ID NO: 916766
ggguguguauauuuggagu

SEQ ID NO: 1182283 - RNA, 19 nt, Artificial Sequence
  Description of Artificial Sequence: Synthetic oligonucleotide
  Antisense strand to SEQ ID NO: 1182282
acuccaaauauacacaccc

SEQ ID NO: 1182284 - RNA, 19 nt, Artificial Sequence
  Description of Artificial Sequence: Synthetic oligonucleotide
  Sense strand starting at position 606 of SEQ ID NO: 916766
guguguauauuuggaguag

SEQ ID NO: 1182285 - RNA, 19 nt, Artificial Sequence
  Description of Artificial Sequence: Synthetic oligonucleotide
  Antisense strand to SEQ ID NO: 1182284
cuacuccaaauauacacac

SEQ ID NO: 1182286 - RNA, 19 nt, Artificial Sequence
  Description of Artificial Sequence: Synthetic oligonucleotide
  Sense strand starting at position 617 of SEQ ID NO: 916766
uggaguagccaaugaggau

SEQ ID NO: 1182287 - RNA, 19 nt, Artificial Sequence
  Description of Artificial Sequence: Synthetic oligonucleotide
  Antisense strand to SEQ ID NO: 1182286
auccucauuggcuacucca

SEQ ID NO: 1182288 - RNA, 19 nt, Artificial Sequence
  Description of Artificial Sequence: Synthetic oligonucleotide
  Sense strand starting at position 1107 of SEQ ID NO: 916766
gaagcauagcuugggacua

SEQ ID NO: 1182289 - RNA, 19 nt, Artificial Sequence
  Description of Artificial Sequence: Synthetic oligonucleotide
  Antisense strand to SEQ ID NO: 1182288
uagucccaagcuaugcuuc

SEQ ID NO: 1182290 - RNA, 19 nt, Artificial Sequence
  Description of Artificial Sequence: Synthetic oligonucleotide
  Sense strand starting at position 1432 of SEQ ID NO: 916766
ccaacaucugccuggacua

SEQ ID NO: 1182291 - RNA, 19 nt, Artificial Sequence
  Description of Artificial Sequence: Synthetic oligonucleotide
  Antisense strand to SEQ ID NO: 1182290
uaguccaggcagauguugg

SEQ ID NO: 1182292 - RNA, 19 nt, Artificial Sequence
  Description of Artificial Sequence: Synthetic oligonucleotide
  Sense strand starting at position 1536 of SEQ ID NO: 916766
uaguacaucccgggaacaa

SEQ ID NO: 1182293 - RNA, 19 nt, Artificial Sequence
  Description of Artificial Sequence: Synthetic oligonucleotide
  Antisense strand to SEQ ID NO: 1182292
uuguucccgggauguacua

SEQ ID NO: 1182294 - RNA, 19 nt, Artificial Sequence
  Description of Artificial Sequence: Synthetic oligonucleotide
  Sense strand starting at position 1788 of SEQ ID NO: 916766
ggaguacucacacguccuu

SEQ ID NO: 1182295 - RNA, 19 nt, Artificial Sequence
  Description of Artificial Sequence: Synthetic oligonucleotide
  Antisense strand to SEQ ID NO: 1182294
aaggacgugugaguacucc

SEQ ID NO: 1182296 - RNA, 19 nt, Artificial Sequence
  Description of Artificial Sequence: Synthetic oligonucleotide
  Sense strand starting at position 1875 of SEQ ID NO: 916766
acaaacuuuccaggcagaa

SEQ ID NO: 1182297 - RNA, 19 nt, Artificial Sequence
  Description of Artificial Sequence: Synthetic oligonucleotide
  Antisense strand to SEQ ID NO: 1182296
uucugccuggaaaguuugu

SEQ ID NO: 1182298 - RNA, 19 nt, Artificial Sequence
  Description of Artificial Sequence: Synthetic oligonucleotide
  Sense strand starting at position 2005 of SEQ ID NO: 916766
augggagauuuccgaaaga

SEQ ID NO: 1182299 - RNA, 19 nt, Artificial Sequence
  Description of Artificial Sequence: Synthetic oligonucleotide
  Antisense strand to SEQ ID NO: 1182298
ucuuucggaaaucucccau

SEQ ID NO: 1182300 - RNA, 19 nt, Artificial Sequence
  Description of Artificial Sequence: Synthetic oligonucleotide
  Sense strand starting at position 2513 of SEQ ID NO: 916766
gcaaguauuaguggugggu

SEQ ID NO: 1182301 - RNA, 19 nt, Artificial Sequence
  Description of Artificial Sequence: Synthetic oligonucleotide
  Antisense strand to SEQ ID NO: 1182300
acccaccacuaauacuugc

SEQ ID NO: 1182302 - RNA, 19 nt, Artificial Sequence
  Description of Artificial Sequence: Synthetic oligonucleotide
  Sense strand starting at position 2533 of SEQ ID NO: 916766
ggaggcgucgccagagaga

SEQ ID NO: 1182303 - RNA, 19 nt, Artificial Sequence
  Description of Artificial Sequence: Synthetic oligonucleotide
  Antisense strand to SEQ ID NO: 1182302
ucucucuggcgacgccucc

SEQ ID NO: 1182304 - RNA, 19 nt, Artificial Sequence
  Description of Artificial Sequence: Synthetic oligonucleotide
  Sense strand starting at position 2617 of SEQ ID NO: 916766
ucguucuaguuuccaguua

SEQ ID NO: 1182305 - RNA, 19 nt, Artificial Sequence
  Description of Artificial Sequence: Synthetic oligonucleotide
  Antisense strand to SEQ ID NO: 1182304
uaacuggaaacuagaacga

SEQ ID NO: 1182306 - RNA, 19 nt, Artificial Sequence
  Description of Artificial Sequence: Synthetic oligonucleotide
  Sense strand starting at position 2729 of SEQ ID NO: 916766
ccacuacagcgaugauaaa

SEQ ID NO: 1182307 - RNA, 19 nt, Artificial Sequence
  Description of Artificial Sequence: Synthetic oligonucleotide
  Antisense strand to SEQ ID NO: 1182306
uuuaucaucgcuguagugg

SEQ ID NO: 1182308 - RNA, 19 nt, Artificial Sequence
  Description of Artificial Sequence: Synthetic oligonucleotide
  Sense strand starting at position 2750 of SEQ ID NO: 916766
gucaucuacaguuguuuga

SEQ ID NO: 1182309 - RNA, 19 nt, Artificial Sequence
  Description of Artificial Sequence: Synthetic oligonucleotide
  Antisense strand to SEQ ID NO: 1182308
ucaaacaacuguagaugac

SEQ ID NO: 1182310 - RNA, 19 nt, Artificial Sequence
  Description of Artificial Sequence: Synthetic oligonucleotide
  Sense strand starting at position 2753 of SEQ ID NO: 916766
aucuacaguuguuugaaca

SEQ ID NO: 1182311 - RNA, 19 nt, Artificial Sequence
  Description of Artificial Sequence: Synthetic oligonucleotide
  Antisense strand to SEQ ID NO: 1182310
uguucaaacaacuguagau

SEQ ID NO: 1182312 - RNA, 19 nt, Artificial Sequence
  Description of Artificial Sequence: Synthetic oligonucleotide
  Sense strand starting at position 2905 of SEQ ID NO: 916766
gggauuaaauaacuuggca

SEQ ID NO: 1182313 - RNA, 19 nt, Artificial Sequence
  Description of Artificial Sequence: Synthetic oligonucleotide
  Antisense strand to SEQ ID NO: 1182312
ugccaaguuauuuaauccc

SEQ ID NO: 1182314 - RNA, 19 nt, Artificial Sequence
  Description of Artificial Sequence: Synthetic oligonucleotide
  Sense strand starting at position 2989 of SEQ ID NO: 916766
gcugucuggacuuggguaa

SEQ ID NO: 1182315 - RNA, 19 nt, Artificial Sequence
  Description of Artificial Sequence: Synthetic oligonucleotide
  Antisense strand to SEQ ID NO: 1182314
uuacccaaguccagacagc

SEQ ID NO: 1182316 - RNA, 19 nt, Artificial Sequence
  Description of Artificial Sequence: Synthetic oligonucleotide
  Sense strand starting at position 3043 of SEQ ID NO: 916766
ucaucuguugagugaggau

SEQ ID NO: 1182317 - RNA, 19 nt, Artificial Sequence
  Description of Artificial Sequence: Synthetic oligonucleotide
  Antisense strand to SEQ ID NO: 1182316
auccucacucaacagauga

SEQ ID NO: 1182318 - RNA, 19 nt, Artificial Sequence
  Description of Artificial Sequence: Synthetic oligonucleotide
  Sense strand starting at position 3152 of SEQ ID NO: 916766
uccagaaaguguuugauau

SEQ ID NO: 1182319 - RNA, 19 nt, Artificial Sequence
  Description of Artificial Sequence: Synthetic oligonucleotide
  Antisense strand to SEQ ID NO: 1182318
auaucaaacacuuucugga

SEQ ID NO: 1182320 - RNA, 19 nt, Artificial Sequence
  Description of Artificial Sequence: Synthetic oligonucleotide
  Sense strand starting at position 3153 of SEQ ID NO: 916766
ccagaaaguguuugauauu

SEQ ID NO: 1182321 - RNA, 19 nt, Artificial Sequence
  Description of Artificial Sequence: Synthetic oligonucleotide
  Antisense strand to SEQ ID NO: 1182320
aauaucaaacacuuucugg

SEQ ID NO: 1182322 - RNA, 19 nt, Artificial Sequence
  Description of Artificial Sequence: Synthetic oligonucleotide
  Sense strand starting at position 3156 of SEQ ID NO: 916766
gaaaguguuugauauucug

SEQ ID NO: 1182323 - RNA, 19 nt, Artificial Sequence
  Description of Artificial Sequence: Synthetic oligonucleotide
  Antisense strand to SEQ ID NO: 1182322
cagaauaucaaacacuuuc

SEQ ID NO: 1182324 - RNA, 19 nt, Artificial Sequence
  Description of Artificial Sequence: Synthetic oligonucleotide
  Sense strand starting at position 3159 of SEQ ID NO: 916766
aguguuugauauucugauu

SEQ ID NO: 1182325 - RNA, 19 nt, Artificial Sequence
  Description of Artificial Sequence: Synthetic oligonucleotide
  Antisense strand to SEQ ID NO: 1182324
aaucagaauaucaaacacu

SEQ ID NO: 1182326 - RNA, 19 nt, Artificial Sequence
  Description of Artificial Sequence: Synthetic oligonucleotide
  Sense strand starting at position 3165 of SEQ ID NO: 916766
ugauauucugauuguuguc

SEQ ID NO: 1182327 - RNA, 19 nt, Artificial Sequence
  Description of Artificial Sequence: Synthetic oligonucleotide
  Antisense strand to SEQ ID NO: 1182326
gacaacaaucagaauauca

SEQ ID NO: 1182328 - RNA, 19 nt, Artificial Sequence
  Description of Artificial Sequence: Synthetic oligonucleotide
  Sense strand starting at position 3171 of SEQ ID NO: 916766
ucugauuguuguccuuuga

SEQ ID NO: 1182329 - RNA, 19 nt, Artificial Sequence
  Description of Artificial Sequence: Synthetic oligonucleotide
  Antisense strand to SEQ ID NO: 1182328
ucaaaggacaacaaucaga

SEQ ID NO: 1182330 - RNA, 19 nt, Artificial Sequence
  Description of Artificial Sequence: Synthetic oligonucleotide
  Sense strand starting at position 3236 of SEQ ID NO: 916766
cuuccacuccgguagagau

SEQ ID NO: 1182331 - RNA, 19 nt, Artificial Sequence
  Description of Artificial Sequence: Synthetic oligonucleotide
  Antisense strand to SEQ ID NO: 1182330
aucucuaccggaguggaag

SEQ ID NO: 1182332 - RNA, 19 nt, Artificial Sequence
  Description of Artificial Sequence: Synthetic oligonucleotide
  Sense strand starting at position 3282 of SEQ ID NO: 916766
gcuccagguuuguacauuu

SEQ ID NO: 1182333 - RNA, 19 nt, Artificial Sequence
  Description of Artificial Sequence: Synthetic oligonucleotide
  Antisense strand to SEQ ID NO: 1182332
aaauguacaaaccuggagc

SEQ ID NO: 1182334 - RNA, 19 nt, Artificial Sequence
  Description of Artificial Sequence: Synthetic oligonucleotide
  Sense strand starting at position 3333 of SEQ ID NO: 916766
gggccugucccagaacaga

SEQ ID NO: 1182335 - RNA, 19 nt, Artificial Sequence
  Description of Artificial Sequence: Synthetic oligonucleotide
  Antisense strand to SEQ ID NO: 1182334
ucuguucugggacaggccc

SEQ ID NO: 1182336 - RNA, 19 nt, Artificial Sequence
  Description of Artificial Sequence: Synthetic oligonucleotide
  Sense strand starting at position 3655 of SEQ ID NO: 916766
uuaaucccaucugggaaau

SEQ ID NO: 1182337 - RNA, 19 nt, Artificial Sequence
  Description of Artificial Sequence: Synthetic oligonucleotide
  Antisense strand to SEQ ID NO: 1182336
auuucccagaugggauuaa

SEQ ID NO: 1182338 - RNA, 19 nt, Artificial Sequence
  Description of Artificial Sequence: Synthetic oligonucleotide
  Sense strand starting at position 3691 of SEQ ID NO: 916766
cuccaaggcuuagaaguau

SEQ ID NO: 1182339 - RNA, 19 nt, Artificial Sequence
  Description of Artificial Sequence: Synthetic oligonucleotide
  Antisense strand to SEQ ID NO: 1182338
auacuucuaagccuuggag

SEQ ID NO: 1182340 - RNA, 19 nt, Artificial Sequence
  Description of Artificial Sequence: Synthetic oligonucleotide
  Sense strand starting at position 3700 of SEQ ID NO: 916766
uuagaaguauugcaacauc

SEQ ID NO: 1182341 - RNA, 19 nt, Artificial Sequence
  Description of Artificial Sequence: Synthetic oligonucleotide
  Antisense strand to SEQ ID NO: 1182340
gauguugcaauacuucuaa

SEQ ID NO: 1182342 - RNA, 19 nt, Artificial Sequence
  Description of Artificial Sequence: Synthetic oligonucleotide
  Sense strand starting at position 3777 of SEQ ID NO: 916766
gagucaucccacugugauu

SEQ ID NO: 1182343 - RNA, 19 nt, Artificial Sequence
  Description of Artificial Sequence: Synthetic oligonucleotide
  Antisense strand to SEQ ID NO: 1182342
aaucacagugggaugacuc

SEQ ID NO: 1182344 - RNA, 19 nt, Artificial Sequence
  Description of Artificial Sequence: Synthetic oligonucleotide
  Sense strand starting at position 3917 of SEQ ID NO: 916766
cacuacuaugcccgguuaa

SEQ ID NO: 1182345 - RNA, 19 nt, Artificial Sequence
  Description of Artificial Sequence: Synthetic oligonucleotide
  Antisense strand to SEQ ID NO: 1182344
uuaaccgggcauaguagug

SEQ ID NO: 1182346 - RNA, 19 nt, Artificial Sequence
  Description of Artificial Sequence: Synthetic oligonucleotide
  Sense strand starting at position 3918 of SEQ ID NO: 916766
acuacuaugcccgguuaau

SEQ ID NO: 1182347 - RNA, 19 nt, Artificial Sequence
  Description of Artificial Sequence: Synthetic oligonucleotide
  Antisense strand to SEQ ID NO: 1182346
auuaaccgggcauaguagu

SEQ ID NO: 1182348 - RNA, 19 nt, Artificial Sequence
  Description of Artificial Sequence: Synthetic oligonucleotide
  Sense strand starting at position 38 of SEQ ID NO: 916767
acgcuaaaugcauauaaac

SEQ ID NO: 1182349 - RNA, 19 nt, Artificial Sequence
  Description of Artificial Sequence: Synthetic oligonucleotide
  Antisense strand to SEQ ID NO: 1182348
guuuauaugcauuuagcgu

SEQ ID NO: 1182350 - RNA, 19 nt, Artificial Sequence
  Description of Artificial Sequence: Synthetic oligonucleotide
  Sense strand starting at position 187 of SEQ ID NO: 916767
agcagacaccucuggaaua

SEQ ID NO: 1182351 - RNA, 19 nt, Artificial Sequence
  Description of Artificial Sequence: Synthetic oligonucleotide
  Antisense strand to SEQ ID NO: 1182350
uauuccagaggugucugcu

SEQ ID NO: 1182352 - RNA, 19 nt, Artificial Sequence
  Description of Artificial Sequence: Synthetic oligonucleotide
  Sense strand starting at position 413 of SEQ ID NO: 916767
gcaaucucaugcucucaga

SEQ ID NO: 1182353 - RNA, 19 nt, Artificial Sequence
  Description of Artificial Sequence: Synthetic oligonucleotide
  Antisense strand to SEQ ID NO: 1182352
ucugagagcaugagauugc

SEQ ID NO: 1182354 - RNA, 19 nt, Artificial Sequence
  Description of Artificial Sequence: Synthetic oligonucleotide
  Sense strand starting at position 429 of SEQ ID NO: 916767
agaacacacucugcugaaa

SEQ ID NO: 1182355 - RNA, 19 nt, Artificial Sequence
  Description of Artificial Sequence: Synthetic oligonucleotide
  Antisense strand to SEQ ID NO: 1182354
uuucagcagaguguguucu

SEQ ID NO: 1182356 - RNA, 19 nt, Artificial Sequence
  Description of Artificial Sequence: Synthetic oligonucleotide
  Sense strand starting at position 432 of SEQ ID NO: 916767
acacacucugcugaaagua

SEQ ID NO: 1182357 - RNA, 19 nt, Artificial Sequence
  Description of Artificial Sequence: Synthetic oligonucleotide
  Antisense strand to SEQ ID NO: 1182356
uacuuucagcagagugugu

SEQ ID NO: 1182358 - RNA, 19 nt, Artificial Sequence
  Description of Artificial Sequence: Synthetic oligonucleotide
  Sense strand starting at position 459 of SEQ ID NO: 916767
cacucaaagugacucguaa

SEQ ID NO: 1182359 - RNA, 19 nt, Artificial Sequence
  Description of Artificial Sequence: Synthetic oligonucleotide
  Antisense strand to SEQ ID NO: 1182358
uuacgagucacuuugagug

SEQ ID NO: 1182360 - RNA, 19 nt, Artificial Sequence
  Description of Artificial Sequence: Synthetic oligonucleotide
  Sense strand starting at position 485 of SEQ ID NO: 916767
ggccuuaagccuuagaaac

SEQ ID NO: 1182361 - RNA, 19 nt, Artificial Sequence
  Description of Artificial Sequence: Synthetic oligonucleotide
  Antisense strand to SEQ ID NO: 1182360
guuucuaaggcuuaaggcc

SEQ ID NO: 1182362 - RNA, 19 nt, Artificial Sequence
  Description of Artificial Sequence: Synthetic oligonucleotide
  Sense strand starting at position 669 of SEQ ID NO: 916767
ucagaaaguggcuaaacuu

SEQ ID NO: 1182363 - RNA, 19 nt, Artificial Sequence
  Description of Artificial Sequence: Synthetic oligonucleotide
  Antisense strand to SEQ ID NO: 1182362
aaguuuagccacuuucuga

SEQ ID NO: 1182364 - RNA, 19 nt, Artificial Sequence
  Description of Artificial Sequence: Synthetic oligonucleotide
  Sense strand starting at position 684 of SEQ ID NO: 916767
acuuaagaggucuggcaag

SEQ ID NO: 1182365 - RNA, 19 nt, Artificial Sequence
  Description of Artificial Sequence: Synthetic oligonucleotide
  Antisense strand to SEQ ID NO: 1182364
cuugccagaccucuuaagu

SEQ ID NO: 1182366 - RNA, 19 nt, Artificial Sequence
  Description of Artificial Sequence: Synthetic oligonucleotide
  Sense strand starting at position 791 of SEQ ID NO: 916767
gucucaguccgguauuaau

SEQ ID NO: 1182367 - RNA, 19 nt, Artificial Sequence
  Description of Artificial Sequence: Synthetic oligonucleotide
  Antisense strand to SEQ ID NO: 1182366
auuaauaccggacugagac

SEQ ID NO: 1182368 - RNA, 19 nt, Artificial Sequence
  Description of Artificial Sequence: Synthetic oligonucleotide
  Sense strand starting at position 799 of SEQ ID NO: 916767
ccgguauuaauagaaaugu

SEQ ID NO: 1182369 - RNA, 19 nt, Artificial Sequence
  Description of Artificial Sequence: Synthetic oligonucleotide
  Antisense strand to SEQ ID NO: 1182368
acauuucuauuaauaccgg

SEQ ID NO: 1182370 - RNA, 19 nt, Artificial Sequence
  Description of Artificial Sequence: Synthetic oligonucleotide
  Sense strand starting at position 807 of SEQ ID NO: 916767
aauagaaauguuuggcgaa

SEQ ID NO: 1182371 - RNA, 19 nt, Artificial Sequence
  Description of Artificial Sequence: Synthetic oligonucleotide
  Antisense strand to SEQ ID NO: 1182370
uucgccaaacauuucuauu

SEQ ID NO: 1182372 - RNA, 19 nt, Artificial Sequence
  Description of Artificial Sequence: Synthetic oligonucleotide
  Sense strand starting at position 1124 of SEQ ID NO: 916767
gcuaguauuuagcauagga

SEQ ID NO: 1182373 - RNA, 19 nt, Artificial Sequence
  Description of Artificial Sequence: Synthetic oligonucleotide
  Antisense strand to SEQ ID NO: 1182372
uccuaugcuaaauacuagc

SEQ ID NO: 1182374 - RNA, 19 nt, Artificial Sequence
  Description of Artificial Sequence: Synthetic oligonucleotide
  Sense strand starting at position 1128 of SEQ ID NO: 916767
guauuuagcauaggagcuu

SEQ ID NO: 1182375 - RNA, 19 nt, Artificial Sequence
  Description of Artificial Sequence: Synthetic oligonucleotide
  Antisense strand to SEQ ID NO: 1182374
aagcuccuaugcuaaauac

SEQ ID NO: 1182376 - RNA, 19 nt, Artificial Sequence
  Description of Artificial Sequence: Synthetic oligonucleotide
  Sense strand starting at position 1137 of SEQ ID NO: 916767
auaggagcuuguuugcaaa

SEQ ID NO: 1182377 - RNA, 19 nt, Artificial Sequence
  Description of Artificial Sequence: Synthetic oligonucleotide
  Antisense strand to SEQ ID NO: 1182376
uuugcaaacaagcuccuau

SEQ ID NO: 1182378 - RNA, 19 nt, Artificial Sequence
  Description of Artificial Sequence: Synthetic oligonucleotide
  Sense strand starting at position 1216 of SEQ ID NO: 916767
gagauuuagugagagccua

SEQ ID NO: 1182379 - RNA, 19 nt, Artificial Sequence
  Description of Artificial Sequence: Synthetic oligonucleotide
  Antisense strand to SEQ ID NO: 1182378
uaggcucucacuaaaucuc

SEQ ID NO: 1182380 - RNA, 19 nt, Artificial Sequence
  Description of Artificial Sequence: Synthetic oligonucleotide
  Sense strand starting at position 1363 of SEQ ID NO: 916767
agaugaguaagcugacuaa

SEQ ID NO: 1182381 - RNA, 19 nt, Artificial Sequence
  Description of Artificial Sequence: Synthetic oligonucleotide
  Antisense strand to SEQ ID NO: 1182380
uuagucagcuuacucaucu

SEQ ID NO: 1182382 - RNA, 19 nt, Artificial Sequence
  Description of Artificial Sequence: Synthetic oligonucleotide
  Sense strand starting at position 2306 of SEQ ID NO: 916767
acugcaaauuccucugcga

SEQ ID NO: 1182383 - RNA, 19 nt, Artificial Sequence
  Description of Artificial Sequence: Synthetic oligonucleotide
  Antisense strand to SEQ ID NO: 1182382
ucgcagaggaauuugcagu

SEQ ID NO: 1182384 - RNA, 19 nt, Artificial Sequence
  Description of Artificial Sequence: Synthetic oligonucleotide
  Sense strand starting at position 2576 of SEQ ID NO: 916767
cuggguugaguuuauucga

SEQ ID NO: 1182385 - RNA, 19 nt, Artificial Sequence
  Description of Artificial Sequence: Synthetic oligonucleotide
  Antisense strand to SEQ ID NO: 1182384
ucgaauaaacucaacccag

SEQ ID NO: 1182386 - RNA, 19 nt, Artificial Sequence
  Description of Artificial Sequence: Synthetic oligonucleotide
  Sense strand starting at position 2579 of SEQ ID NO: 916767
gguugaguuuauucgaaug

SEQ ID NO: 1182387 - RNA, 19 nt, Artificial Sequence
  Description of Artificial Sequence: Synthetic oligonucleotide
  Antisense strand to SEQ ID NO: 1182386
cauucgaauaaacucaacc

SEQ ID NO: 1182388 - RNA, 19 nt, Artificial Sequence
  Description of Artificial Sequence: Synthetic oligonucleotide
  Sense strand starting at position 2671 of SEQ ID NO: 916767
uccaaauaagaucguuauc

SEQ ID NO: 1182389 - RNA, 19 nt, Artificial Sequence
  Description of Artificial Sequence: Synthetic oligonucleotide
  Antisense strand to SEQ ID NO: 1182388
gauaacgaucuuauuugga

SEQ ID NO: 1182390 - RNA, 19 nt, Artificial Sequence
  Description of Artificial Sequence: Synthetic oligonucleotide
  Sense strand starting at position 2676 of SEQ ID NO: 916767
auaagaucguuaucuuagg

SEQ ID NO: 1182391 - RNA, 19 nt, Artificial Sequence
  Description of Artificial Sequence: Synthetic oligonucleotide
  Antisense strand to SEQ ID NO: 1182390
ccuaagauaacgaucuuau

SEQ ID NO: 1182392 - RNA, 19 nt, Artificial Sequence
  Description of Artificial Sequence: Synthetic oligonucleotide
  Sense strand starting at position 2705 of SEQ ID NO: 916767
gcaacugaaaggugaacua

SEQ ID NO: 1182393 - RNA, 19 nt, Artificial Sequence
  Description of Artificial Sequence: Synthetic oligonucleotide
  Antisense strand to SEQ ID NO: 1182392
uaguucaccuuucaguugc

SEQ ID NO: 1182394 - RNA, 19 nt, Artificial Sequence
  Description of Artificial Sequence: Synthetic oligonucleotide
  Sense strand starting at position 2721 of SEQ ID NO: 916767
cuaguucuauaguuacaga

SEQ ID NO: 1182395 - RNA, 19 nt, Artificial Sequence
  Description of Artificial Sequence: Synthetic oligonucleotide
  Antisense strand to SEQ ID NO: 1182394
ucuguaacuauagaacuag

SEQ ID NO: 1182396 - RNA, 19 nt, Artificial Sequence
  Description of Artificial Sequence: Synthetic oligonucleotide
  Sense strand starting at position 2737 of SEQ ID NO: 916767
agaacaaucgagugcuuau

SEQ ID NO: 1182397 - RNA, 19 nt, Artificial Sequence
  Description of Artificial Sequence: Synthetic oligonucleotide
  Antisense strand to SEQ ID NO: 1182396
auaagcacucgauuguucu

SEQ ID NO: 1182398 - RNA, 19 nt, Artificial Sequence
  Description of Artificial Sequence: Synthetic oligonucleotide
  Sense strand starting at position 2740 of SEQ ID NO: 916767
acaaucgagugcuuaucaa

SEQ ID NO: 1182399 - RNA, 19 nt, Artificial Sequence
  Description of Artificial Sequence: Synthetic oligonucleotide
  Antisense strand to SEQ ID NO: 1182398
uugauaagcacucgauugu

SEQ ID NO: 1182400 - RNA, 19 nt, Artificial Sequence
  Description of Artificial Sequence: Synthetic oligonucleotide
  Sense strand starting at position 2808 of SEQ ID NO: 916767
cccacaaggcaugguuuaa

SEQ ID NO: 1182401 - RNA, 19 nt, Artificial Sequence
  Description of Artificial Sequence: Synthetic oligonucleotide
  Antisense strand to SEQ ID NO: 1182400
uuaaaccaugccuuguggg

SEQ ID NO: 1182402 - RNA, 19 nt, Artificial Sequence
  Description of Artificial Sequence: Synthetic oligonucleotide
  Sense strand starting at position 2955 of SEQ ID NO: 916767
guguuacugcacugauuua

SEQ ID NO: 1182403 - RNA, 19 nt, Artificial Sequence
  Description of Artificial Sequence: Synthetic oligonucleotide
  Antisense strand to SEQ ID NO: 1182402
uaaaucagugcaguaacac

SEQ ID NO: 1182404 - RNA, 19 nt, Artificial Sequence
  Description of Artificial Sequence: Synthetic oligonucleotide
  Sense strand starting at position 3035 of SEQ ID NO: 916767
guuagcgagcuucagaaga

SEQ ID NO: 1182405 - RNA, 19 nt, Artificial Sequence
  Description of Artificial Sequence: Synthetic oligonucleotide
  Antisense strand to SEQ ID NO: 1182404
ucuucugaagcucgcuaac

SEQ ID NO: 1182406 - RNA, 19 nt, Artificial Sequence
  Description of Artificial Sequence: Synthetic oligonucleotide
  Sense strand starting at position 3154 of SEQ ID NO: 916767
cgagcaacucugcaaggua

SEQ ID NO: 1182407 - RNA, 19 nt, Artificial Sequence
  Description of Artificial Sequence: Synthetic oligonucleotide
  Antisense strand to SEQ ID NO: 1182406
uaccuugcagaguugcucg

SEQ ID NO: 1182408 - RNA, 19 nt, Artificial Sequence
  Description of Artificial Sequence: Synthetic oligonucleotide
  Sense strand starting at position 3210 of SEQ ID NO: 916767
gcagcugaggcuuaaagaa

SEQ ID NO: 1182409 - RNA, 19 nt, Artificial Sequence
  Description of Artificial Sequence: Synthetic oligonucleotide
  Antisense strand to SEQ ID NO: 1182408
uucuuuaagccucagcugc

SEQ ID NO: 1182410 - RNA, 19 nt, Artificial Sequence
  Description of Artificial Sequence: Synthetic oligonucleotide
  Sense strand starting at position 3283 of SEQ ID NO: 916767
aucugaacguggucacaua

SEQ ID NO: 1182411 - RNA, 19 nt, Artificial Sequence
  Description of Artificial Sequence: Synthetic oligonucleotide
  Antisense strand to SEQ ID NO: 1182410
uaugugaccacguucagau

SEQ ID NO: 1182412 - RNA, 19 nt, Artificial Sequence
  Description of Artificial Sequence: Synthetic oligonucleotide
  Sense strand starting at position 3361 of SEQ ID NO: 916767
aagaguuggacccgaaaug

SEQ ID NO: 1182413 - RNA, 19 nt, Artificial Sequence
  Description of Artificial Sequence: Synthetic oligonucleotide
  Antisense strand to SEQ ID NO: 1182412
cauuucggguccaacucuu

SEQ ID NO: 1182414 - RNA, 19 nt, Artificial Sequence
  Description of Artificial Sequence: Synthetic oligonucleotide
  Sense strand starting at position 3401 of SEQ ID NO: 916767
acucaugagucauccuacu

SEQ ID NO: 1182415 - RNA, 19 nt, Artificial Sequence
  Description of Artificial Sequence: Synthetic oligonucleotide
  Antisense strand to SEQ ID NO: 1182414
aguaggaugacucaugagu

SEQ ID NO: 1182416 - RNA, 19 nt, Artificial Sequence
  Description of Artificial Sequence: Synthetic oligonucleotide
  Sense strand starting at position 3662 of SEQ ID NO: 916767
gugugugccaugcacauaa

SEQ ID NO: 1182417 - RNA, 19 nt, Artificial Sequence
  Description of Artificial Sequence: Synthetic oligonucleotide
  Antisense strand to SEQ ID NO: 1182416
uuaugugcauggcacacac

SEQ ID NO: 1182418 - RNA, 19 nt, Artificial Sequence
  Description of Artificial Sequence: Synthetic oligonucleotide
  Sense strand starting at position 3697 of SEQ ID NO: 916767
agggcuuuaugacaaauuu

SEQ ID NO: 1182419 - RNA, 19 nt, Artificial Sequence
  Description of Artificial Sequence: Synthetic oligonucleotide
  Antisense strand to SEQ ID NO: 1182418
aaauuugucauaaagcccu

SEQ ID NO: 1182420 - RNA, 19 nt, Artificial Sequence
  Description of Artificial Sequence: Synthetic oligonucleotide
  Sense strand starting at position 3778 of SEQ ID NO: 916767
auuccaagguaagaauaau

SEQ ID NO: 1182421 - RNA, 19 nt, Artificial Sequence
  Description of Artificial Sequence: Synthetic oligonucleotide
  Antisense strand to SEQ ID NO: 1182420
auuauucuuaccuuggaau

SEQ ID NO: 1182422 - RNA, 19 nt, Artificial Sequence
  Description of Artificial Sequence: Synthetic oligonucleotide
  Sense strand starting at position 3786 of SEQ ID NO: 916767
guaagaauaauguguaggu

SEQ ID NO: 1182423 - RNA, 19 nt, Artificial Sequence
  Description of Artificial Sequence: Synthetic oligonucleotide
  Antisense strand to SEQ ID NO: 1182422
accuacacauuauucuuac

SEQ ID NO: 1182424 - RNA, 19 nt, Artificial Sequence
  Description of Artificial Sequence: Synthetic oligonucleotide
  Sense strand starting at position 3787 of SEQ ID NO: 916767
uaagaauaauguguagguu

SEQ ID NO: 1182425 - RNA, 19 nt, Artificial Sequence
  Description of Artificial Sequence: Synthetic oligonucleotide
  Antisense strand to SEQ ID NO: 1182424
aaccuacacauuauucuua

SEQ ID NO: 1182426 - RNA, 19 nt, Artificial Sequence
  Description of Artificial Sequence: Synthetic oligonucleotide
  Sense strand starting at position 3790 of SEQ ID NO: 916767
gaauaauguguagguuaag

SEQ ID NO: 1182427 - RNA, 19 nt, Artificial Sequence
  Description of Artificial Sequence: Synthetic oligonucleotide
  Antisense strand to SEQ ID NO: 1182426
cuuaaccuacacauuauuc

SEQ ID NO: 1182428 - RNA, 19 nt, Artificial Sequence
  Description of Artificial Sequence: Synthetic oligonucleotide
  Sense strand starting at position 23 of SEQ ID NO: 916768
aacgaauuccuuugacgac

SEQ ID NO: 1182429 - RNA, 19 nt, Artificial Sequence
  Description of Artificial Sequence: Synthetic oligonucleotide
  Antisense strand to SEQ ID NO: 1182428
gucgucaaaggaauucguu

SEQ ID NO: 1182430 - RNA, 19 nt, Artificial Sequence
  Description of Artificial Sequence: Synthetic oligonucleotide
  Sense strand starting at position 57 of SEQ ID NO: 916768
gugugaacuguuuauccuu

SEQ ID NO: 1182431 - RNA, 19 nt, Artificial Sequence
  Description of Artificial Sequence: Synthetic oligonucleotide
  Antisense strand to SEQ ID NO: 1182430
aaggauaaacaguucacac

SEQ ID NO: 1182432 - RNA, 19 nt, Artificial Sequence
  Description of Artificial Sequence: Synthetic oligonucleotide
  Sense strand starting at position 82 of SEQ ID NO: 916768
uuuaacuggguuugauagu

SEQ ID NO: 1182433 - RNA, 19 nt, Artificial Sequence
  Description of Artificial Sequence: Synthetic oligonucleotide
  Antisense strand to SEQ ID NO: 1182432
acuaucaaacccaguuaaa

SEQ ID NO: 1182434 - RNA, 19 nt, Artificial Sequence
  Description of Artificial Sequence: Synthetic oligonucleotide
  Sense strand starting at position 149 of SEQ ID NO: 916768
guucuacuugcuguguuua

SEQ ID NO: 1182435 - RNA, 19 nt, Artificial Sequence
  Description of Artificial Sequence: Synthetic oligonucleotide
  Antisense strand to SEQ ID NO: 1182434
uaaacacagcaaguagaac

SEQ ID NO: 1182436 - RNA, 19 nt, Artificial Sequence
  Description of Artificial Sequence: Synthetic oligonucleotide
  Sense strand starting at position 181 of SEQ ID NO: 916768
uuuguauuuggcugcauua

SEQ ID NO: 1182437 - RNA, 19 nt, Artificial Sequence
  Description of Artificial Sequence: Synthetic oligonucleotide
  Antisense strand to SEQ ID NO: 1182436
uaaugcagccaaauacaaa

SEQ ID NO: 1182438 - RNA, 19 nt, Artificial Sequence
  Description of Artificial Sequence: Synthetic oligonucleotide
  Sense strand starting at position 260 of SEQ ID NO: 916768
uaucgauaagaauguuacu

SEQ ID NO: 1182439 - RNA, 19 nt, Artificial Sequence
  Description of Artificial Sequence: Synthetic oligonucleotide
  Antisense strand to SEQ ID NO: 1182438
aguaacauucuuaucgaua

SEQ ID NO: 1182440 - RNA, 19 nt, Artificial Sequence
  Description of Artificial Sequence: Synthetic oligonucleotide
  Sense strand starting at position 265 of SEQ ID NO: 916768
auaagaauguuacuagccu

SEQ ID NO: 1182441 - RNA, 19 nt, Artificial Sequence
  Description of Artificial Sequence: Synthetic oligonucleotide
  Antisense strand to SEQ ID NO: 1182440
aggcuaguaacauucuuau

SEQ ID NO: 1182442 - RNA, 19 nt, Artificial Sequence
  Description of Artificial Sequence: Synthetic oligonucleotide
  Sense strand starting at position 629 of SEQ ID NO: 916768
uggucaccuggauagguaa

SEQ ID NO: 1182443 - RNA, 19 nt, Artificial Sequence
  Description of Artificial Sequence: Synthetic oligonucleotide
  Antisense strand to SEQ ID NO: 1182442
uuaccuauccaggugacca

SEQ ID NO: 1182444 - RNA, 19 nt, Artificial Sequence
  Description of Artificial Sequence: Synthetic oligonucleotide
  Sense strand starting at position 636 of SEQ ID NO: 916768
cuggauagguaagucagaa

SEQ ID NO: 1182445 - RNA, 19 nt, Artificial Sequence
  Description of Artificial Sequence: Synthetic oligonucleotide
  Antisense strand to SEQ ID NO: 1182444
uucugacuuaccuauccag

SEQ ID NO: 1182446 - RNA, 19 nt, Artificial Sequence
  Description of Artificial Sequence: Synthetic oligonucleotide
  Sense strand starting at position 770 of SEQ ID NO: 916768
uugcuuuagcucucugcau

SEQ ID NO: 1182447 - RNA, 19 nt, Artificial Sequence
  Description of Artificial Sequence: Synthetic oligonucleotide
  Antisense strand to SEQ ID NO: 1182446
augcagagagcuaaagcaa

SEQ ID NO: 1182448 - RNA, 19 nt, Artificial Sequence
  Description of Artificial Sequence: Synthetic oligonucleotide
  Sense strand starting at position 774 of SEQ ID NO: 916768
uuuagcucucugcauauga

SEQ ID NO: 1182449 - RNA, 19 nt, Artificial Sequence
  Description of Artificial Sequence: Synthetic oligonucleotide
  Antisense strand to SEQ ID NO: 1182448
ucauaugcagagagcuaaa

SEQ ID NO: 1182450 - RNA, 19 nt, Artificial Sequence
  Description of Artificial Sequence: Synthetic oligonucleotide
  Sense strand starting at position 847 of SEQ ID NO: 916768
augacaagcugauuccaua

SEQ ID NO: 1182451 - RNA, 19 nt, Artificial Sequence
  Description of Artificial Sequence: Synthetic oligonucleotide
  Antisense strand to SEQ ID NO: 1182450
uauggaaucagcuugucau

SEQ ID NO: 1182452 - RNA, 19 nt, Artificial Sequence
  Description of Artificial Sequence: Synthetic oligonucleotide
  Sense strand starting at position 886 of SEQ ID NO: 916768
gggccugugagauguuaaa

SEQ ID NO: 1182453 - RNA, 19 nt, Artificial Sequence
  Description of Artificial Sequence: Synthetic oligonucleotide
  Antisense strand to SEQ ID NO: 1182452
uuuaacaucucacaggccc

SEQ ID NO: 1182454 - RNA, 19 nt, Artificial Sequence
  Description of Artificial Sequence: Synthetic oligonucleotide
  Sense strand starting at position 981 of SEQ ID NO: 916768
cagcuagacuucucugaga

SEQ ID NO: 1182455 - RNA, 19 nt, Artificial Sequence
  Description of Artificial Sequence: Synthetic oligonucleotide
  Antisense strand to SEQ ID NO: 1182454
ucucagagaagucuagcug

SEQ ID NO: 1182456 - RNA, 19 nt, Artificial Sequence
  Description of Artificial Sequence: Synthetic oligonucleotide
  Sense strand starting at position 983 of SEQ ID NO: 916768
gcuagacuucucugagacu

SEQ ID NO: 1182457 - RNA, 19 nt, Artificial Sequence
  Description of Artificial Sequence: Synthetic oligonucleotide
  Antisense strand to SEQ ID NO: 1182456
agucucagagaagucuagc

SEQ ID NO: 1182458 - RNA, 19 nt, Artificial Sequence
  Description of Artificial Sequence: Synthetic oligonucleotide
  Sense strand starting at position 1142 of SEQ ID NO: 916768
uuauucuuucuugggauaa

SEQ ID NO: 1182459 - RNA, 19 nt, Artificial Sequence
  Description of Artificial Sequence: Synthetic oligonucleotide
  Antisense strand to SEQ ID NO: 1182458
uuaucccaagaaagaauaa

SEQ ID NO: 1182460 - RNA, 19 nt, Artificial Sequence
  Description of Artificial Sequence: Synthetic oligonucleotide
  Sense strand starting at position 1475 of SEQ ID NO: 916768
acuuacucauaauugugua

SEQ ID NO: 1182461 - RNA, 19 nt, Artificial Sequence
  Description of Artificial Sequence: Synthetic oligonucleotide
  Antisense strand to SEQ ID NO: 1182460
uacacaauuaugaguaagu

SEQ ID NO: 1182462 - RNA, 19 nt, Artificial Sequence
  Description of Artificial Sequence: Synthetic oligonucleotide
  Sense strand starting at position 1480 of SEQ ID NO: 916768
cucauaauuguguaacuga

SEQ ID NO: 1182463 - RNA, 19 nt, Artificial Sequence
  Description of Artificial Sequence: Synthetic oligonucleotide
  Antisense strand to SEQ ID NO: 1182462
ucaguuacacaauuaugag

SEQ ID NO: 1182464 - RNA, 19 nt, Artificial Sequence
  Description of Artificial Sequence: Synthetic oligonucleotide
  Sense strand starting at position 1483 of SEQ ID NO: 916768
auaauuguguaacugaaac

SEQ ID NO: 1182465 - RNA, 19 nt, Artificial Sequence
  Description of Artificial Sequence: Synthetic oligonucleotide
  Antisense strand to SEQ ID NO: 1182464
guuucaguuacacaauuau

SEQ ID NO: 1182466 - RNA, 19 nt, Artificial Sequence
  Description of Artificial Sequence: Synthetic oligonucleotide
  Sense strand starting at position 2067 of SEQ ID NO: 916768
gauagaaggcucuacugca

SEQ ID NO: 1182467 - RNA, 19 nt, Artificial Sequence
  Description of Artificial Sequence: Synthetic oligonucleotide
  Antisense strand to SEQ ID NO: 1182466
ugcaguagagccuucuauc

SEQ ID NO: 1182468 - RNA, 19 nt, Artificial Sequence
  Description of Artificial Sequence: Synthetic oligonucleotide
  Sense strand starting at position 2208 of SEQ ID NO: 916768
aguauucuuuagcuaagaa

SEQ ID NO: 1182469 - RNA, 19 nt, Artificial Sequence
  Description of Artificial Sequence: Synthetic oligonucleotide
  Antisense strand to SEQ ID NO: 1182468
uucuuagcuaaagaauacu

SEQ ID NO: 1182470 - RNA, 19 nt, Artificial Sequence
  Description of Artificial Sequence: Synthetic oligonucleotide
  Sense strand starting at position 2236 of SEQ ID NO: 916768
gucauaauauccuccugga

SEQ ID NO: 1182471 - RNA, 19 nt, Artificial Sequence
  Description of Artificial Sequence: Synthetic oligonucleotide
  Antisense strand to SEQ ID NO: 1182470
uccaggaggauauuaugac

SEQ ID NO: 1182472 - RNA, 19 nt, Artificial Sequence
  Description of Artificial Sequence: Synthetic oligonucleotide
  Sense strand starting at position 2262 of SEQ ID NO: 916768
auuugcauuuguggaaaca

SEQ ID NO: 1182473 - RNA, 19 nt, Artificial Sequence
  Description of Artificial Sequence: Synthetic oligonucleotide
  Antisense strand to SEQ ID NO: 1182472
uguuuccacaaaugcaaau

SEQ ID NO: 1182474 - RNA, 19 nt, Artificial Sequence
  Description of Artificial Sequence: Synthetic oligonucleotide
  Sense strand starting at position 2690 of SEQ ID NO: 916768
uguaaacuuuguuuaggca

SEQ ID NO: 1182475 - RNA, 19 nt, Artificial Sequence
  Description of Artificial Sequence: Synthetic oligonucleotide
  Antisense strand to SEQ ID NO: 1182474
ugccuaaacaaaguuuaca

SEQ ID NO: 1182476 - RNA, 19 nt, Artificial Sequence
  Description of Artificial Sequence: Synthetic oligonucleotide
  Sense strand starting at position 2691 of SEQ ID NO: 916768
guaaacuuuguuuaggcau

SEQ ID NO: 1182477 - RNA, 19 nt, Artificial Sequence
  Description of Artificial Sequence: Synthetic oligonucleotide
  Antisense strand to SEQ ID NO: 1182476
augccuaaacaaaguuuac

SEQ ID NO: 1182478 - RNA, 19 nt, Artificial Sequence
  Description of Artificial Sequence: Synthetic oligonucleotide
  Sense strand starting at position 2731 of SEQ ID NO: 916768
uggguucaacguuaaugaa

SEQ ID NO: 1182479 - RNA, 19 nt, Artificial Sequence
  Description of Artificial Sequence: Synthetic oligonucleotide
  Antisense strand to SEQ ID NO: 1182478
uucauuaacguugaaccca

SEQ ID NO: 1182480 - RNA, 19 nt, Artificial Sequence
  Description of Artificial Sequence: Synthetic oligonucleotide
  Sense strand starting at position 2739 of SEQ ID NO: 916768
acguuaaugaaucaguaag

SEQ ID NO: 1182481 - RNA, 19 nt, Artificial Sequence
  Description of Artificial Sequence: Synthetic oligonucleotide
  Antisense strand to SEQ ID NO: 1182480
cuuacugauucauuaacgu

SEQ ID NO: 1182482 - RNA, 19 nt, Artificial Sequence
  Description of Artificial Sequence: Synthetic oligonucleotide
  Sense strand starting at position 2741 of SEQ ID NO: 916768
guuaaugaaucaguaagca

SEQ ID NO: 1182483 - RNA, 19 nt, Artificial Sequence
  Description of Artificial Sequence: Synthetic oligonucleotide
  Antisense strand to SEQ ID NO: 1182482
ugcuuacugauucauuaac

SEQ ID NO: 1182484 - RNA, 19 nt, Artificial Sequence
  Description of Artificial Sequence: Synthetic oligonucleotide
  Sense strand starting at position 2782 of SEQ ID NO: 916768
agcccaccuccagauaguu

SEQ ID NO: 1182485 - RNA, 19 nt, Artificial Sequence
  Description of Artificial Sequence: Synthetic oligonucleotide
  Antisense strand to SEQ ID NO: 1182484
aacuaucuggaggugggcu

SEQ ID NO: 1182486 - RNA, 19 nt, Artificial Sequence
  Description of Artificial Sequence: Synthetic oligonucleotide
  Sense strand starting at position 2791 of SEQ ID NO: 916768
ccagauaguuuauugacaa

SEQ ID NO: 1182487 - RNA, 19 nt, Artificial Sequence
  Description of Artificial Sequence: Synthetic oligonucleotide
  Antisense strand to SEQ ID NO: 1182486
uugucaauaaacuaucugg

SEQ ID NO: 1182488 - RNA, 19 nt, Artificial Sequence
  Description of Artificial Sequence: Synthetic oligonucleotide
  Sense strand starting at position 2843 of SEQ ID NO: 916768
cucugucugugacuuugaa

SEQ ID NO: 1182489 - RNA, 19 nt, Artificial Sequence
  Description of Artificial Sequence: Synthetic oligonucleotide
  Antisense strand to SEQ ID NO: 1182488
uucaaagucacagacagag

SEQ ID NO: 1182490 - RNA, 19 nt, Artificial Sequence
  Description of Artificial Sequence: Synthetic oligonucleotide
  Sense strand starting at position 2872 of SEQ ID NO: 916768
cucucauacccagagguuu

SEQ ID NO: 1182491 - RNA, 19 nt, Artificial Sequence
  Description of Artificial Sequence: Synthetic oligonucleotide
  Antisense strand to SEQ ID NO: 1182490
aaaccucuggguaugagag

SEQ ID NO: 1182492 - RNA, 19 nt, Artificial Sequence
  Description of Artificial Sequence: Synthetic oligonucleotide
  Sense strand starting at position 2889 of SEQ ID NO: 916768
uuuaaucagcagugcauaa

SEQ ID NO: 1182493 - RNA, 19 nt, Artificial Sequence
  Description of Artificial Sequence: Synthetic oligonucleotide
  Antisense strand to SEQ ID NO: 1182492
uuaugcacugcugauuaaa

SEQ ID NO: 1182494 - RNA, 19 nt, Artificial Sequence
  Description of Artificial Sequence: Synthetic oligonucleotide
  Sense strand starting at position 2976 of SEQ ID NO: 916768
aauuaacgauuuggguaaa

SEQ ID NO: 1182495 - RNA, 19 nt, Artificial Sequence
  Description of Artificial Sequence: Synthetic oligonucleotide
  Antisense strand to SEQ ID NO: 1182494
uuuacccaaaucguuaauu

SEQ ID NO: 1182496 - RNA, 19 nt, Artificial Sequence
  Description of Artificial Sequence: Synthetic oligonucleotide
  Sense strand starting at position 3104 of SEQ ID NO: 916768
auguauugauggguucuaa

SEQ ID NO: 1182497 - RNA, 19 nt, Artificial Sequence
  Description of Artificial Sequence: Synthetic oligonucleotide
  Antisense strand to SEQ ID NO: 1182496
uuagaacccaucaauacau

SEQ ID NO: 1182498 - RNA, 19 nt, Artificial Sequence
  Description of Artificial Sequence: Synthetic oligonucleotide
  Sense strand starting at position 3373 of SEQ ID NO: 916768
guuagauaugauuagucuc

SEQ ID NO: 1182499 - RNA, 19 nt, Artificial Sequence
  Description of Artificial Sequence: Synthetic oligonucleotide
  Antisense strand to SEQ ID NO: 1182498
gagacuaaucauaucuaac

SEQ ID NO: 1182500 - RNA, 19 nt, Artificial Sequence
  Description of Artificial Sequence: Synthetic oligonucleotide
  Sense strand starting at position 3376 of SEQ ID NO: 916768
agauaugauuagucucauu

SEQ ID NO: 1182501 - RNA, 19 nt, Artificial Sequence
  Description of Artificial Sequence: Synthetic oligonucleotide
  Antisense strand to SEQ ID NO: 1182500
aaugagacuaaucauaucu

SEQ ID NO: 1182502 - RNA, 19 nt, Artificial Sequence
  Description of Artificial Sequence: Synthetic oligonucleotide
  Sense strand starting at position 3409 of SEQ ID NO: 916768
gugagucucggagaguuua

SEQ ID NO: 1182503 - RNA, 19 nt, Artificial Sequence
  Description of Artificial Sequence: Synthetic oligonucleotide
  Antisense strand to SEQ ID NO: 1182502
uaaacucuccgagacucac

SEQ ID NO: 1182504 - RNA, 19 nt, Artificial Sequence
  Description of Artificial Sequence: Synthetic oligonucleotide
  Sense strand starting at position 3453 of SEQ ID NO: 916768
ucuaguaauuugggacaca

SEQ ID NO: 1182505 - RNA, 19 nt, Artificial Sequence
  Description of Artificial Sequence: Synthetic oligonucleotide
  Antisense strand to SEQ ID NO: 1182504
ugugucccaaauuacuaga

SEQ ID NO: 1182506 - RNA, 19 nt, Artificial Sequence
  Description of Artificial Sequence: Synthetic oligonucleotide
  Sense strand starting at position 3454 of SEQ ID NO: 916768
cuaguaauuugggacacau

SEQ ID NO: 1182507 - RNA, 19 nt, Artificial Sequence
  Description of Artificial Sequence: Synthetic oligonucleotide
  Antisense strand to SEQ ID NO: 1182506
augugucccaaauuacuag

SEQ ID NO: 1182508 - RNA, 19 nt, Artificial Sequence
  Description of Artificial Sequence: Synthetic oligonucleotide
  Sense strand starting at position 122 of SEQ ID NO: 916769
ggccauuucuuaucuuugu

SEQ ID NO: 1182509 - RNA, 19 nt, Artificial Sequence
  Description of Artificial Sequence: Synthetic oligonucleotide
  Antisense strand to SEQ ID NO: 1182508
acaaagauaagaaauggcc

SEQ ID NO: 1182510 - RNA, 19 nt, Artificial Sequence
  Description of Artificial Sequence: Synthetic oligonucleotide
  Sense strand starting at position 123 of SEQ ID NO: 916769
gccauuucuuaucuuugua

SEQ ID NO: 1182511 - RNA, 19 nt, Artificial Sequence
  Description of Artificial Sequence: Synthetic oligonucleotide
  Antisense strand to SEQ ID NO: 1182510
uacaaagauaagaaauggc

SEQ ID NO: 1182512 - RNA, 19 nt, Artificial Sequence
  Description of Artificial Sequence: Synthetic oligonucleotide
  Sense strand starting at position 181 of SEQ ID NO: 916769
acauaaaucuuuguagagu

SEQ ID NO: 1182513 - RNA, 19 nt, Artificial Sequence
  Description of Artificial Sequence: Synthetic oligonucleotide
  Antisense strand to SEQ ID NO: 1182512
acucuacaaagauuuaugu

SEQ ID NO: 1182514 - RNA, 19 nt, Artificial Sequence
  Description of Artificial Sequence: Synthetic oligonucleotide
  Sense strand starting at position 234 of SEQ ID NO: 916769
ggaagacacugagcaguau

SEQ ID NO: 1182515 - RNA, 19 nt, Artificial Sequence
  Description of Artificial Sequence: Synthetic oligonucleotide
  Antisense strand to SEQ ID NO: 1182514
auacugcucagugucuucc

SEQ ID NO: 1182516 - RNA, 19 nt, Artificial Sequence
  Description of Artificial Sequence: Synthetic oligonucleotide
  Sense strand starting at position 502 of SEQ ID NO: 916769
gacuauuuguucuccggca

SEQ ID NO: 1182517 - RNA, 19 nt, Artificial Sequence
  Description of Artificial Sequence: Synthetic oligonucleotide
  Antisense strand to SEQ ID NO: 1182516
ugccggagaacaaauaguc

SEQ ID NO: 1182518 - RNA, 19 nt, Artificial Sequence
  Description of Artificial Sequence: Synthetic oligonucleotide
  Sense strand starting at position 504 of SEQ ID NO: 916769
cuauuuguucuccggcaga

SEQ ID NO: 1182519 - RNA, 19 nt, Artificial Sequence
  Description of Artificial Sequence: Synthetic oligonucleotide
  Antisense strand to SEQ ID NO: 1182518
ucugccggagaacaaauag

SEQ ID NO: 1182520 - RNA, 19 nt, Artificial Sequence
  Description of Artificial Sequence: Synthetic oligonucleotide
  Sense strand starting at position 555 of SEQ ID NO: 916769
ccuguuguccuguuuguau

SEQ ID NO: 1182521 - RNA, 19 nt, Artificial Sequence
  Description of Artificial Sequence: Synthetic oligonucleotide
  Antisense strand to SEQ ID NO: 1182520
auacaaacaggacaacagg

SEQ ID NO: 1182522 - RNA, 19 nt, Artificial Sequence
  Description of Artificial Sequence: Synthetic oligonucleotide
  Sense strand starting at position 790 of SEQ ID NO: 916769
caaagauaagauugguucu

SEQ ID NO: 1182523 - RNA, 19 nt, Artificial Sequence
  Description of Artificial Sequence: Synthetic oligonucleotide
  Antisense strand to SEQ ID NO: 1182522
agaaccaaucuuaucuuug

SEQ ID NO: 1182524 - RNA, 19 nt, Artificial Sequence
  Description of Artificial Sequence: Synthetic oligonucleotide
  Sense strand starting at position 792 of SEQ ID NO: 916769
aagauaagauugguucuua

SEQ ID NO: 1182525 - RNA, 19 nt, Artificial Sequence
  Description of Artificial Sequence: Synthetic oligonucleotide
  Antisense strand to SEQ ID NO: 1182524
uaagaaccaaucuuaucuu

SEQ ID NO: 1182526 - RNA, 19 nt, Artificial Sequence
  Description of Artificial Sequence: Synthetic oligonucleotide
  Sense strand starting at position 793 of SEQ ID NO: 916769
agauaagauugguucuuau

SEQ ID NO: 1182527 - RNA, 19 nt, Artificial Sequence
  Description of Artificial Sequence: Synthetic oligonucleotide
  Antisense strand to SEQ ID NO: 1182526
auaagaaccaaucuuaucu

SEQ ID NO: 1182528 - RNA, 19 nt, Artificial Sequence
  Description of Artificial Sequence: Synthetic oligonucleotide
  Sense strand starting at position 956 of SEQ ID NO: 916769
uggucaauaugucuggaag

SEQ ID NO: 1182529 - RNA, 19 nt, Artificial Sequence
  Description of Artificial Sequence: Synthetic oligonucleotide
  Antisense strand to SEQ ID NO: 1182528
cuuccagacauauugacca

SEQ ID NO: 1182530 - RNA, 19 nt, Artificial Sequence
  Description of Artificial Sequence: Synthetic oligonucleotide
  Sense strand starting at position 957 of SEQ ID NO: 916769
ggucaauaugucuggaaga

SEQ ID NO: 1182531 - RNA, 19 nt, Artificial Sequence
  Description of Artificial Sequence: Synthetic oligonucleotide
  Antisense strand to SEQ ID NO: 1182530
ucuuccagacauauugacc

SEQ ID NO: 1182532 - RNA, 19 nt, Artificial Sequence
  Description of Artificial Sequence: Synthetic oligonucleotide
  Sense strand starting at position 1019 of SEQ ID NO: 916769
ugagcaauauucccauaga

SEQ ID NO: 1182533 - RNA, 19 nt, Artificial Sequence
  Description of Artificial Sequence: Synthetic oligonucleotide
  Antisense strand to SEQ ID NO: 1182532
ucuaugggaauauugcuca

SEQ ID NO: 1182534 - RNA, 19 nt, Artificial Sequence
  Description of Artificial Sequence: Synthetic oligonucleotide
  Sense strand starting at position 1110 of SEQ ID NO: 916769
uaguuaaagcuguauugag

SEQ ID NO: 1182535 - RNA, 19 nt, Artificial Sequence
  Description of Artificial Sequence: Synthetic oligonucleotide
  Antisense strand to SEQ ID NO: 1182534
cucaauacagcuuuaacua

SEQ ID NO: 1182536 - RNA, 19 nt, Artificial Sequence
  Description of Artificial Sequence: Synthetic oligonucleotide
  Sense strand starting at position 1173 of SEQ ID NO: 916769
cugggauugcuuuagaacu

SEQ ID NO: 1182537 - RNA, 19 nt, Artificial Sequence
  Description of Artificial Sequence: Synthetic oligonucleotide
  Antisense strand to SEQ ID NO: 1182536
aguucuaaagcaaucccag

SEQ ID NO: 1182538 - RNA, 19 nt, Artificial Sequence
  Description of Artificial Sequence: Synthetic oligonucleotide
  Sense strand starting at position 1187 of SEQ ID NO: 916769
gaacuaacuugggcuuaga

SEQ ID NO: 1182539 - RNA, 19 nt, Artificial Sequence
  Description of Artificial Sequence: Synthetic oligonucleotide
  Antisense strand to SEQ ID NO: 1182538
ucuaagcccaaguuaguuc

SEQ ID NO: 1182540 - RNA, 19 nt, Artificial Sequence
  Description of Artificial Sequence: Synthetic oligonucleotide
  Sense strand starting at position 1190 of SEQ ID NO: 916769
cuaacuugggcuuagagua

SEQ ID NO: 1182541 - RNA, 19 nt, Artificial Sequence
  Description of Artificial Sequence: Synthetic oligonucleotide
  Antisense strand to SEQ ID NO: 1182540
uacucuaagcccaaguuag

SEQ ID NO: 1182542 - RNA, 19 nt, Artificial Sequence
  Description of Artificial Sequence: Synthetic oligonucleotide
  Sense strand starting at position 1214 of SEQ ID NO: 916769
cugugucugcuaguauagu

SEQ ID NO: 1182543 - RNA, 19 nt, Artificial Sequence
  Description of Artificial Sequence: Synthetic oligonucleotide
  Antisense strand to SEQ ID NO: 1182542
acuauacuagcagacacag

SEQ ID NO: 1182544 - RNA, 19 nt, Artificial Sequence
  Description of Artificial Sequence: Synthetic oligonucleotide
  Sense strand starting at position 1289 of SEQ ID NO: 916769
guagacucucauggauuaa

SEQ ID NO: 1182545 - RNA, 19 nt, Artificial Sequence
  Description of Artificial Sequence: Synthetic oligonucleotide
  Antisense strand to SEQ ID NO: 1182544
uuaauccaugagagucuac

SEQ ID NO: 1182546 - RNA, 19 nt, Artificial Sequence
  Description of Artificial Sequence: Synthetic oligonucleotide
  Sense strand starting at position 1321 of SEQ ID NO: 916769
ccaucccuuguaggauaaa

SEQ ID NO: 1182547 - RNA, 19 nt, Artificial Sequence
  Description of Artificial Sequence: Synthetic oligonucleotide
  Antisense strand to SEQ ID NO: 1182546
uuuauccuacaagggaugg

SEQ ID NO: 1182548 - RNA, 19 nt, Artificial Sequence
  Description of Artificial Sequence: Synthetic oligonucleotide
  Sense strand starting at position 1398 of SEQ ID NO: 916769
aucagagguuuccuuuaaa

SEQ ID NO: 1182549 - RNA, 19 nt, Artificial Sequence
  Description of Artificial Sequence: Synthetic oligonucleotide
  Antisense strand to SEQ ID NO: 1182548
uuuaaaggaaaccucugau

SEQ ID NO: 1182550 - RNA, 19 nt, Artificial Sequence
  Description of Artificial Sequence: Synthetic oligonucleotide
  Sense strand starting at position 1860 of SEQ ID NO: 916769
guagcuuaccaauaacaga

SEQ ID NO: 1182551 - RNA, 19 nt, Artificial Sequence
  Description of Artificial Sequence: Synthetic oligonucleotide
  Antisense strand to SEQ ID NO: 1182550
ucuguuauugguaagcuac

SEQ ID NO: 1182552 - RNA, 19 nt, Artificial Sequence
  Description of Artificial Sequence: Synthetic oligonucleotide
  Sense strand starting at position 2332 of SEQ ID NO: 916769
aaaugauguguccaugguc

SEQ ID NO: 1182553 - RNA, 19 nt, Artificial Sequence
  Description of Artificial Sequence: Synthetic oligonucleotide
  Antisense strand to SEQ ID NO: 1182552
gaccauggacacaucauuu

SEQ ID NO: 1182554 - RNA, 19 nt, Artificial Sequence
  Description of Artificial Sequence: Synthetic oligonucleotide
  Sense strand starting at position 2459 of SEQ ID NO: 916769
ucauaugucccacagucua

SEQ ID NO: 1182555 - RNA, 19 nt, Artificial Sequence
  Description of Artificial Sequence: Synthetic oligonucleotide
  Antisense strand to SEQ ID NO: 1182554
uagacugugggacauauga

SEQ ID NO: 1182556 - RNA, 19 nt, Artificial Sequence
  Description of Artificial Sequence: Synthetic oligonucleotide
  Sense strand starting at position 2743 of SEQ ID NO: 916769
aguuauacgcaauaugaau

SEQ ID NO: 1182557 - RNA, 19 nt, Artificial Sequence
  Description of Artificial Sequence: Synthetic oligonucleotide
  Antisense strand to SEQ ID NO: 1182556
auucauauugcguauaacu

SEQ ID NO: 1182558 - RNA, 19 nt, Artificial Sequence
  Description of Artificial Sequence: Synthetic oligonucleotide
  Sense strand starting at position 2749 of SEQ ID NO: 916769
acgcaauaugaaugaauca

SEQ ID NO: 1182559 - RNA, 19 nt, Artificial Sequence
  Description of Artificial Sequence: Synthetic oligonucleotide
  Antisense strand to SEQ ID NO: 1182558
ugauucauucauauugcgu

SEQ ID NO: 1182560 - RNA, 19 nt, Artificial Sequence
  Description of Artificial Sequence: Synthetic oligonucleotide
  Sense strand starting at position 2860 of SEQ ID NO: 916769
ugccauuagaagugaggaa

SEQ ID NO: 1182561 - RNA, 19 nt, Artificial Sequence
  Description of Artificial Sequence: Synthetic oligonucleotide
  Antisense strand to SEQ ID NO: 1182560
uuccucacuucuaauggca

SEQ ID NO: 1182562 - RNA, 19 nt, Artificial Sequence
  Description of Artificial Sequence: Synthetic oligonucleotide
  Sense strand starting at position 2936 of SEQ ID NO: 916769
uggauuuguucaguguaug

SEQ ID NO: 1182563 - RNA, 19 nt, Artificial Sequence
  Description of Artificial Sequence: Synthetic oligonucleotide
  Antisense strand to SEQ ID NO: 1182562
cauacacugaacaaaucca

SEQ ID NO: 1182564 - RNA, 19 nt, Artificial Sequence
  Description of Artificial Sequence: Synthetic oligonucleotide
  Sense strand starting at position 3170 of SEQ ID NO: 916769
cccaaaguacuguaaauuc

SEQ ID NO: 1182565 - RNA, 19 nt, Artificial Sequence
  Description of Artificial Sequence: Synthetic oligonucleotide
  Antisense strand to SEQ ID NO: 1182564
gaauuuacaguacuuuggg

SEQ ID NO: 1182566 - RNA, 19 nt, Artificial Sequence
  Description of Artificial Sequence: Synthetic oligonucleotide
  Sense strand starting at position 3221 of SEQ ID NO: 916769
ucaucuggagccuauacaa

SEQ ID NO: 1182567 - RNA, 19 nt, Artificial Sequence
  Description of Artificial Sequence: Synthetic oligonucleotide
  Antisense strand to SEQ ID NO: 1182566
uuguauaggcuccagauga

SEQ ID NO: 1182568 - RNA, 19 nt, Artificial Sequence
  Description of Artificial Sequence: Synthetic oligonucleotide
  Sense strand starting at position 3298 of SEQ ID NO: 916769
auaaauacugcuggaguaa

SEQ ID NO: 1182569 - RNA, 19 nt, Artificial Sequence
  Description of Artificial Sequence: Synthetic oligonucleotide
  Antisense strand to SEQ ID NO: 1182568
uuacuccagcaguauuuau

SEQ ID NO: 1182570 - RNA, 19 nt, Artificial Sequence
  Description of Artificial Sequence: Synthetic oligonucleotide
  Sense strand starting at position 3422 of SEQ ID NO: 916769
auccucaaugguugauaau

SEQ ID NO: 1182571 - RNA, 19 nt, Artificial Sequence
  Description of Artificial Sequence: Synthetic oligonucleotide
  Antisense strand to SEQ ID NO: 1182570
auuaucaaccauugaggau

SEQ ID NO: 1182572 - RNA, 19 nt, Artificial Sequence
  Description of Artificial Sequence: Synthetic oligonucleotide
  Sense strand starting at position 3496 of SEQ ID NO: 916769
ccugaauauggucaguacu

SEQ ID NO: 1182573 - RNA, 19 nt, Artificial Sequence
  Description of Artificial Sequence: Synthetic oligonucleotide
  Antisense strand to SEQ ID NO: 1182572
aguacugaccauauucagg

SEQ ID NO: 1182574 - RNA, 19 nt, Artificial Sequence
  Description of Artificial Sequence: Synthetic oligonucleotide
  Sense strand starting at position 3498 of SEQ ID NO: 916769
ugaauauggucaguacuua

SEQ ID NO: 1182575 - RNA, 19 nt, Artificial Sequence
  Description of Artificial Sequence: Synthetic oligonucleotide
  Antisense strand to SEQ ID NO: 1182574
uaaguacugaccauauuca

SEQ ID NO: 1182576 - RNA, 19 nt, Artificial Sequence
  Description of Artificial Sequence: Synthetic oligonucleotide
  Sense strand starting at position 3499 of SEQ ID NO: 916769
gaauauggucaguacuuac

SEQ ID NO: 1182577 - RNA, 19 nt, Artificial Sequence
  Description of Artificial Sequence: Synthetic oligonucleotide
  Antisense strand to SEQ ID NO: 1182576
guaaguacugaccauauuc

SEQ ID NO: 1182578 - RNA, 19 nt, Artificial Sequence
  Description of Artificial Sequence: Synthetic oligonucleotide
  Sense strand starting at position 3604 of SEQ ID NO: 916769
augaaugauuaagucaguu

SEQ ID NO: 1182579 - RNA, 19 nt, Artificial Sequence
  Description of Artificial Sequence: Synthetic oligonucleotide
  Antisense strand to SEQ ID NO: 1182578
aacugacuuaaucauucau

SEQ ID NO: 1182580 - RNA, 19 nt, Artificial Sequence
  Description of Artificial Sequence: Synthetic oligonucleotide
  Sense strand starting at position 3772 of SEQ ID NO: 916769
auuaaagagucaguggaua

SEQ ID NO: 1182581 - RNA, 19 nt, Artificial Sequence
  Description of Artificial Sequence: Synthetic oligonucleotide
  Antisense strand to SEQ ID NO: 1182580
uauccacugacucuuuaau

SEQ ID NO: 1182582 - RNA, 19 nt, Artificial Sequence
  Description of Artificial Sequence: Synthetic oligonucleotide
  Sense strand starting at position 3780 of SEQ ID NO: 916769
gucaguggauaacuaaaua

SEQ ID NO: 1182583 - RNA, 19 nt, Artificial Sequence
  Description of Artificial Sequence: Synthetic oligonucleotide
  Antisense strand to SEQ ID NO: 1182582
uauuuaguuauccacugac

SEQ ID NO: 1182584 - RNA, 19 nt, Artificial Sequence
  Description of Artificial Sequence: Synthetic oligonucleotide
  Sense strand starting at position 3863 of SEQ ID NO: 916769
ucucacucucgugauugaa

SEQ ID NO: 1182585 - RNA, 19 nt, Artificial Sequence
  Description of Artificial Sequence: Synthetic oligonucleotide
  Antisense strand to SEQ ID NO: 1182584
uucaaucacgagagugaga

SEQ ID NO: 1182586 - RNA, 19 nt, Artificial Sequence
  Description of Artificial Sequence: Synthetic oligonucleotide
  Sense strand starting at position 3872 of SEQ ID NO: 916769
cgugauugaaaucacaagu

SEQ ID NO: 1182587 - RNA, 19 nt, Artificial Sequence
  Description of Artificial Sequence: Synthetic oligonucleotide
  Antisense strand to SEQ ID NO: 1182586
acuugugauuucaaucacg

SEQ ID NO: 1182588 - RNA, 19 nt, Artificial Sequence
  Description of Artificial Sequence: Synthetic oligonucleotide
  Sense strand starting at position 30 of SEQ ID NO: 916770
auuauacaaccaugucgaa

SEQ ID NO: 1182589 - RNA, 19 nt, Artificial Sequence
  Description of Artificial Sequence: Synthetic oligonucleotide
  Antisense strand to SEQ ID NO: 1182588
uucgacaugguuguauaau

SEQ ID NO: 1182590 - RNA, 19 nt, Artificial Sequence
  Description of Artificial Sequence: Synthetic oligonucleotide
  Sense strand starting at position 162 of SEQ ID NO: 916770
acugacacuucugcaaagu

SEQ ID NO: 1182591 - RNA, 19 nt, Artificial Sequence
  Description of Artificial Sequence: Synthetic oligonucleotide
  Antisense strand to SEQ ID NO: 1182590
acuuugcagaagugucagu

SEQ ID NO: 1182592 - RNA, 19 nt, Artificial Sequence
  Description of Artificial Sequence: Synthetic oligonucleotide
  Sense strand starting at position 289 of SEQ ID NO: 916770
gaaagaacucagugcauua

SEQ ID NO: 1182593 - RNA, 19 nt, Artificial Sequence
  Description of Artificial Sequence: Synthetic oligonucleotide
  Antisense strand to SEQ ID NO: 1182592
uaaugcacugaguucuuuc

SEQ ID NO: 1182594 - RNA, 19 nt, Artificial Sequence
  Description of Artificial Sequence: Synthetic oligonucleotide
  Sense strand starting at position 310 of SEQ ID NO: 916770
gccaauuguguccaucaca

SEQ ID NO: 1182595 - RNA, 19 nt, Artificial Sequence
  Description of Artificial Sequence: Synthetic oligonucleotide
  Antisense strand to SEQ ID NO: 1182594
ugugauggacacaauuggc

SEQ ID NO: 1182596 - RNA, 19 nt, Artificial Sequence
  Description of Artificial Sequence: Synthetic oligonucleotide
  Sense strand starting at position 317 of SEQ ID NO: 916770
guguccaucacagaaagua

SEQ ID NO: 1182597 - RNA, 19 nt, Artificial Sequence
  Description of Artificial Sequence: Synthetic oligonucleotide
  Antisense strand to SEQ ID NO: 1182596
uacuuucugugauggacac

SEQ ID NO: 1182598 - RNA, 19 nt, Artificial Sequence
  Description of Artificial Sequence: Synthetic oligonucleotide
  Sense strand starting at position 418 of SEQ ID NO: 916770
uguuguacuugauccuuga

SEQ ID NO: 1182599 - RNA, 19 nt, Artificial Sequence
  Description of Artificial Sequence: Synthetic oligonucleotide
  Antisense strand to SEQ ID NO: 1182598
ucaaggaucaaguacaaca

SEQ ID NO: 1182600 - RNA, 19 nt, Artificial Sequence
  Description of Artificial Sequence: Synthetic oligonucleotide
  Sense strand starting at position 421 of SEQ ID NO: 916770
uguacuugauccuugaaua

SEQ ID NO: 1182601 - RNA, 19 nt, Artificial Sequence
  Description of Artificial Sequence: Synthetic oligonucleotide
  Antisense strand to SEQ ID NO: 1182600
uauucaaggaucaaguaca

SEQ ID NO: 1182602 - RNA, 19 nt, Artificial Sequence
  Description of Artificial Sequence: Synthetic oligonucleotide
  Sense strand starting at position 422 of SEQ ID NO: 916770
guacuugauccuugaauag

SEQ ID NO: 1182603 - RNA, 19 nt, Artificial Sequence
  Description of Artificial Sequence: Synthetic oligonucleotide
  Antisense strand to SEQ ID NO: 1182602
cuauucaaggaucaaguac

SEQ ID NO: 1182604 - RNA, 19 nt, Artificial Sequence
  Description of Artificial Sequence: Synthetic oligonucleotide
  Sense strand starting at position 507 of SEQ ID NO: 916770
gggagugugccucauagag

SEQ ID NO: 1182605 - RNA, 19 nt, Artificial Sequence
  Description of Artificial Sequence: Synthetic oligonucleotide
  Antisense strand to SEQ ID NO: 1182604
cucuaugaggcacacuccc

SEQ ID NO: 1182606 - RNA, 19 nt, Artificial Sequence
  Description of Artificial Sequence: Synthetic oligonucleotide
  Sense strand starting at position 511 of SEQ ID NO: 916770
gugugccucauagagauaa

SEQ ID NO: 1182607 - RNA, 19 nt, Artificial Sequence
  Description of Artificial Sequence: Synthetic oligonucleotide
  Antisense strand to SEQ ID NO: 1182606
uuaucucuaugaggcacac

SEQ ID NO: 1182608 - RNA, 19 nt, Artificial Sequence
  Description of Artificial Sequence: Synthetic oligonucleotide
  Sense strand starting at position 816 of SEQ ID NO: 916770
cuaccagaaugagugguua

SEQ ID NO: 1182609 - RNA, 19 nt, Artificial Sequence
  Description of Artificial Sequence: Synthetic oligonucleotide
  Antisense strand to SEQ ID NO: 1182608
uaaccacucauucugguag

SEQ ID NO: 1182610 - RNA, 19 nt, Artificial Sequence
  Description of Artificial Sequence: Synthetic oligonucleotide
  Sense strand starting at position 818 of SEQ ID NO: 916770
accagaaugagugguuaau

SEQ ID NO: 1182611 - RNA, 19 nt, Artificial Sequence
  Description of Artificial Sequence: Synthetic oligonucleotide
  Antisense strand to SEQ ID NO: 1182610
auuaaccacucauucuggu

SEQ ID NO: 1182612 - RNA, 19 nt, Artificial Sequence
  Description of Artificial Sequence: Synthetic oligonucleotide
  Sense strand starting at position 820 of SEQ ID NO: 916770
cagaaugagugguuaaucu

SEQ ID NO: 1182613 - RNA, 19 nt, Artificial Sequence
  Description of Artificial Sequence: Synthetic oligonucleotide
  Antisense strand to SEQ ID NO: 1182612
agauuaaccacucauucug

SEQ ID NO: 1182614 - RNA, 19 nt, Artificial Sequence
  Description of Artificial Sequence: Synthetic oligonucleotide
  Sense strand starting at position 824 of SEQ ID NO: 916770
augagugguuaaucuaaug

SEQ ID NO: 1182615 - RNA, 19 nt, Artificial Sequence
  Description of Artificial Sequence: Synthetic oligonucleotide
  Antisense strand to SEQ ID NO: 1182614
cauuagauuaaccacucau

SEQ ID NO: 1182616 - RNA, 19 nt, Artificial Sequence
  Description of Artificial Sequence: Synthetic oligonucleotide
  Sense strand starting at position 851 of SEQ ID NO: 916770
agcagagauuuauacauau

SEQ ID NO: 1182617 - RNA, 19 nt, Artificial Sequence
  Description of Artificial Sequence: Synthetic oligonucleotide
  Antisense strand to SEQ ID NO: 1182616
auauguauaaaucucugcu

SEQ ID NO: 1182618 - RNA, 19 nt, Artificial Sequence
  Description of Artificial Sequence: Synthetic oligonucleotide
  Sense strand starting at position 903 of SEQ ID NO: 916770
augaauugcugagccacaa

SEQ ID NO: 1182619 - RNA, 19 nt, Artificial Sequence
  Description of Artificial Sequence: Synthetic oligonucleotide
  Antisense strand to SEQ ID NO: 1182618
uuguggcucagcaauucau

SEQ ID NO: 1182620 - RNA, 19 nt, Artificial Sequence
  Description of Artificial Sequence: Synthetic oligonucleotide
  Sense strand starting at position 1018 of SEQ ID NO: 916770
accugacagguuuaaguca

SEQ ID NO: 1182621 - RNA, 19 nt, Artificial Sequence
  Description of Artificial Sequence: Synthetic oligonucleotide
  Antisense strand to SEQ ID NO: 1182620
ugacuuaaaccugucaggu

SEQ ID NO: 1182622 - RNA, 19 nt, Artificial Sequence
  Description of Artificial Sequence: Synthetic oligonucleotide
  Sense strand starting at position 1025 of SEQ ID NO: 916770
agguuuaagucagcuauga

SEQ ID NO: 1182623 - RNA, 19 nt, Artificial Sequence
  Description of Artificial Sequence: Synthetic oligonucleotide
  Antisense strand to SEQ ID NO: 1182622
ucauagcugacuuaaaccu

SEQ ID NO: 1182624 - RNA, 19 nt, Artificial Sequence
  Description of Artificial Sequence: Synthetic oligonucleotide
  Sense strand starting at position 1027 of SEQ ID NO: 916770
guuuaagucagcuaugaga

SEQ ID NO: 1182625 - RNA, 19 nt, Artificial Sequence
  Description of Artificial Sequence: Synthetic oligonucleotide
  Antisense strand to SEQ ID NO: 1182624
ucucauagcugacuuaaac

SEQ ID NO: 1182626 - RNA, 19 nt, Artificial Sequence
  Description of Artificial Sequence: Synthetic oligonucleotide
  Sense strand starting at position 1344 of SEQ ID NO: 916770
ucagaauuacuuugaacgu

SEQ ID NO: 1182627 - RNA, 19 nt, Artificial Sequence
  Description of Artificial Sequence: Synthetic oligonucleotide
  Antisense strand to SEQ ID NO: 1182626
acguucaaaguaauucuga

SEQ ID NO: 1182628 - RNA, 19 nt, Artificial Sequence
  Description of Artificial Sequence: Synthetic oligonucleotide
  Sense strand starting at position 1410 of SEQ ID NO: 916770
auagaaugcagaugguuaa

SEQ ID NO: 1182629 - RNA, 19 nt, Artificial Sequence
  Description of Artificial Sequence: Synthetic oligonucleotide
  Antisense strand to SEQ ID NO: 1182628
uuaaccaucugcauucuau

SEQ ID NO: 1182630 - RNA, 19 nt, Artificial Sequence
  Description of Artificial Sequence: Synthetic oligonucleotide
  Sense strand starting at position 1411 of SEQ ID NO: 916770
uagaaugcagaugguuaau

SEQ ID NO: 1182631 - RNA, 19 nt, Artificial Sequence
  Description of Artificial Sequence: Synthetic oligonucleotide
  Antisense strand to SEQ ID NO: 1182630
auuaaccaucugcauucua

SEQ ID NO: 1182632 - RNA, 19 nt, Artificial Sequence
  Description of Artificial Sequence: Synthetic oligonucleotide
  Sense strand starting at position 1414 of SEQ ID NO: 916770
aaugcagaugguuaauagu

SEQ ID NO: 1182633 - RNA, 19 nt, Artificial Sequence
  Description of Artificial Sequence: Synthetic oligonucleotide
  Antisense strand to SEQ ID NO: 1182632
acuauuaaccaucugcauu

SEQ ID NO: 1182634 - RNA, 19 nt, Artificial Sequence
  Description of Artificial Sequence: Synthetic oligonucleotide
  Sense strand starting at position 1871 of SEQ ID NO: 916770
aguuaauacuuacucaguu

SEQ ID NO: 1182635 - RNA, 19 nt, Artificial Sequence
  Description of Artificial Sequence: Synthetic oligonucleotide
  Antisense strand to SEQ ID NO: 1182634
aacugaguaaguauuaacu

SEQ ID NO: 1182636 - RNA, 19 nt, Artificial Sequence
  Description of Artificial Sequence: Synthetic oligonucleotide
  Sense strand starting at position 1872 of SEQ ID NO: 916770
guuaauacuuacucaguuu

SEQ ID NO: 1182637 - RNA, 19 nt, Artificial Sequence
  Description of Artificial Sequence: Synthetic oligonucleotide
  Antisense strand to SEQ ID NO: 1182636
aaacugaguaaguauuaac

SEQ ID NO: 1182638 - RNA, 19 nt, Artificial Sequence
  Description of Artificial Sequence: Synthetic oligonucleotide
  Sense strand starting at position 2775 of SEQ ID NO: 916770
ggcugagacuugucaaacu

SEQ ID NO: 1182639 - RNA, 19 nt, Artificial Sequence
  Description of Artificial Sequence: Synthetic oligonucleotide
  Antisense strand to SEQ ID NO: 1182638
aguuugacaagucucagcc

SEQ ID NO: 1182640 - RNA, 19 nt, Artificial Sequence
  Description of Artificial Sequence: Synthetic oligonucleotide
  Sense strand starting at position 2800 of SEQ ID NO: 916770
uacggucacccggaaagua

SEQ ID NO: 1182641 - RNA, 19 nt, Artificial Sequence
  Description of Artificial Sequence: Synthetic oligonucleotide
  Antisense strand to SEQ ID NO: 1182640
uacuuuccgggugaccgua

SEQ ID NO: 1182642 - RNA, 19 nt, Artificial Sequence
  Description of Artificial Sequence: Synthetic oligonucleotide
  Sense strand starting at position 3001 of SEQ ID NO: 916770
gaaucaaacggacgugagu

SEQ ID NO: 1182643 - RNA, 19 nt, Artificial Sequence
  Description of Artificial Sequence: Synthetic oligonucleotide
  Antisense strand to SEQ ID NO: 1182642
acucacguccguuugauuc

SEQ ID NO: 1182644 - RNA, 19 nt, Artificial Sequence
  Description of Artificial Sequence: Synthetic oligonucleotide
  Sense strand starting at position 3007 of SEQ ID NO: 916770
aacggacgugaguaacaaa

SEQ ID NO: 1182645 - RNA, 19 nt, Artificial Sequence
  Description of Artificial Sequence: Synthetic oligonucleotide
  Antisense strand to SEQ ID NO: 1182644
uuuguuacucacguccguu

SEQ ID NO: 1182646 - RNA, 19 nt, Artificial Sequence
  Description of Artificial Sequence: Synthetic oligonucleotide
  Sense strand starting at position 3039 of SEQ ID NO: 916770
cugggcucguauucagaaa

SEQ ID NO: 1182647 - RNA, 19 nt, Artificial Sequence
  Description of Artificial Sequence: Synthetic oligonucleotide
  Antisense strand to SEQ ID NO: 1182646
uuucugaauacgagcccag

SEQ ID NO: 1182648 - RNA, 19 nt, Artificial Sequence
  Description of Artificial Sequence: Synthetic oligonucleotide
  Sense strand starting at position 3123 of SEQ ID NO: 916770
ggaaacgggugcuuucaua

SEQ ID NO: 1182649 - RNA, 19 nt, Artificial Sequence
  Description of Artificial Sequence: Synthetic oligonucleotide
  Antisense strand to SEQ ID NO: 1182648
uaugaaagcacccguuucc

SEQ ID NO: 1182650 - RNA, 19 nt, Artificial Sequence
  Description of Artificial Sequence: Synthetic oligonucleotide
  Sense strand starting at position 3142 of SEQ ID NO: 916770
uggaaauacagauguguau

SEQ ID NO: 1182651 - RNA, 19 nt, Artificial Sequence
  Description of Artificial Sequence: Synthetic oligonucleotide
  Antisense strand to SEQ ID NO: 1182650
auacacaucuguauuucca

SEQ ID NO: 1182652 - RNA, 19 nt, Artificial Sequence
  Description of Artificial Sequence: Synthetic oligonucleotide
  Sense strand starting at position 3273 of SEQ ID NO: 916770
uauuaauuugcagggcgau

SEQ ID NO: 1182653 - RNA, 19 nt, Artificial Sequence
  Description of Artificial Sequence: Synthetic oligonucleotide
  Antisense strand to SEQ ID NO: 1182652
aucgcccugcaaauuaaua

SEQ ID NO: 1182654 - RNA, 19 nt, Artificial Sequence
  Description of Artificial Sequence: Synthetic oligonucleotide
  Sense strand starting at position 3297 of SEQ ID NO: 916770
gcggauaguggaugagaua

SEQ ID NO: 1182655 - RNA, 19 nt, Artificial Sequence
  Description of Artificial Sequence: Synthetic oligonucleotide
  Antisense strand to SEQ ID NO: 1182654
uaucucauccacuauccgc

SEQ ID NO: 1182656 - RNA, 19 nt, Artificial Sequence
  Description of Artificial Sequence: Synthetic oligonucleotide
  Sense strand starting at position 3536 of SEQ ID NO: 916770
ucauuaguuccuugaccug

SEQ ID NO: 1182657 - RNA, 19 nt, Artificial Sequence
  Description of Artificial Sequence: Synthetic oligonucleotide
  Antisense strand to SEQ ID NO: 1182656
caggucaaggaacuaauga

SEQ ID NO: 1182658 - RNA, 19 nt, Artificial Sequence
  Description of Artificial Sequence: Synthetic oligonucleotide
  Sense strand starting at position 3679 of SEQ ID NO: 916770
gggcauggauccucccuua

SEQ ID NO: 1182659 - RNA, 19 nt, Artificial Sequence
  Description of Artificial Sequence: Synthetic oligonucleotide
  Antisense strand to SEQ ID NO: 1182658
uaagggaggauccaugccc

SEQ ID NO: 1182660 - RNA, 19 nt, Artificial Sequence
  Description of Artificial Sequence: Synthetic oligonucleotide
  Sense strand starting at position 3717 of SEQ ID NO: 916770
aaaggaguugccuagccuu

SEQ ID NO: 1182661 - RNA, 19 nt, Artificial Sequence
  Description of Artificial Sequence: Synthetic oligonucleotide
  Antisense strand to SEQ ID NO: 1182660
aaggcuaggcaacuccuuu

SEQ ID NO: 1182662 - RNA, 19 nt, Artificial Sequence
  Description of Artificial Sequence: Synthetic oligonucleotide
  Sense strand starting at position 3735 of SEQ ID NO: 916770
uaaggugaauguuuccuaa

SEQ ID NO: 1182663 - RNA, 19 nt, Artificial Sequence
  Description of Artificial Sequence: Synthetic oligonucleotide
  Antisense strand to SEQ ID NO: 1182662
uuaggaaacauucaccuua

SEQ ID NO: 1182664 - RNA, 19 nt, Artificial Sequence
  Description of Artificial Sequence: Synthetic oligonucleotide
  Sense strand starting at position 3738 of SEQ ID NO: 916770
ggugaauguuuccuaaccu

SEQ ID NO: 1182665 - RNA, 19 nt, Artificial Sequence
  Description of Artificial Sequence: Synthetic oligonucleotide
  Antisense strand to SEQ ID NO: 1182664
agguuaggaaacauucacc

SEQ ID NO: 1182666 - RNA, 19 nt, Artificial Sequence
  Description of Artificial Sequence: Synthetic oligonucleotide
  Sense strand starting at position 3857 of SEQ ID NO: 916770
ggcauuugccaauguugac

SEQ ID NO: 1182667 - RNA, 19 nt, Artificial Sequence
  Description of Artificial Sequence: Synthetic oligonucleotide
  Antisense strand to SEQ ID NO: 1182666
gucaacauuggcaaaugcc

SEQ ID NO: 1182668 - RNA, 19 nt, Artificial Sequence
  Description of Artificial Sequence: Synthetic oligonucleotide
  Sense strand starting at position 19 of SEQ ID NO: 916771
uuggcauaccaaugacaga

SEQ ID NO: 1182669 - RNA, 19 nt, Artificial Sequence
  Description of Artificial Sequence: Synthetic oligonucleotide
  Antisense strand to SEQ ID NO: 1182668
ucugucauugguaugccaa

SEQ ID NO: 1182670 - RNA, 19 nt, Artificial Sequence
  Description of Artificial Sequence: Synthetic oligonucleotide
  Sense strand starting at position 91 of SEQ ID NO: 916771
cccugacuacagggauagu

SEQ ID NO: 1182671 - RNA, 19 nt, Artificial Sequence
  Description of Artificial Sequence: Synthetic oligonucleotide
  Antisense strand to SEQ ID NO: 1182670
acuaucccuguagucaggg

SEQ ID NO: 1182672 - RNA, 19 nt, Artificial Sequence
  Description of Artificial Sequence: Synthetic oligonucleotide
  Sense strand starting at position 100 of SEQ ID NO: 916771
cagggauaguaugccagaa

SEQ ID NO: 1182673 - RNA, 19 nt, Artificial Sequence
  Description of Artificial Sequence: Synthetic oligonucleotide
  Antisense strand to SEQ ID NO: 1182672
uucuggcauacuaucccug

SEQ ID NO: 1182674 - RNA, 19 nt, Artificial Sequence
  Description of Artificial Sequence: Synthetic oligonucleotide
  Sense strand starting at position 497 of SEQ ID NO: 916771
augaauacauuuggaauga

SEQ ID NO: 1182675 - RNA, 19 nt, Artificial Sequence
  Description of Artificial Sequence: Synthetic oligonucleotide
  Antisense strand to SEQ ID NO: 1182674
ucauuccaaauguauucau

SEQ ID NO: 1182676 - RNA, 19 nt, Artificial Sequence
  Description of Artificial Sequence: Synthetic oligonucleotide
  Sense strand starting at position 581 of SEQ ID NO: 916771
guuguauuacucuauauug

SEQ ID NO: 1182677 - RNA, 19 nt, Artificial Sequence
  Description of Artificial Sequence: Synthetic oligonucleotide
  Antisense strand to SEQ ID NO: 1182676
caauauagaguaauacaac

SEQ ID NO: 1182678 - RNA, 19 nt, Artificial Sequence
  Description of Artificial Sequence: Synthetic oligonucleotide
  Sense strand starting at position 971 of SEQ ID NO: 916771
gaggauagcugcuugaauc

SEQ ID NO: 1182679 - RNA, 19 nt, Artificial Sequence
  Description of Artificial Sequence: Synthetic oligonucleotide
  Antisense strand to SEQ ID NO: 1182678
gauucaagcagcuauccuc

SEQ ID NO: 1182680 - RNA, 19 nt, Artificial Sequence
  Description of Artificial Sequence: Synthetic oligonucleotide
  Sense strand starting at position 1051 of SEQ ID NO: 916771
aaaguuucucuccagagug

SEQ ID NO: 1182681 - RNA, 19 nt, Artificial Sequence
  Description of Artificial Sequence: Synthetic oligonucleotide
  Antisense strand to SEQ ID NO: 1182680
cacucuggagagaaacuuu

SEQ ID NO: 1182682 - RNA, 19 nt, Artificial Sequence
  Description of Artificial Sequence: Synthetic oligonucleotide
  Sense strand starting at position 1167 of SEQ ID NO: 916771
cuacuuaguggcuauaaau

SEQ ID NO: 1182683 - RNA, 19 nt, Artificial Sequence
  Description of Artificial Sequence: Synthetic oligonucleotide
  Antisense strand to SEQ ID NO: 1182682
auuuauagccacuaaguag

SEQ ID NO: 1182684 - RNA, 19 nt, Artificial Sequence
  Description of Artificial Sequence: Synthetic oligonucleotide
  Sense strand starting at position 1190 of SEQ ID NO: 916771
guuacaucuuuaucaaagu

SEQ ID NO: 1182685 - RNA, 19 nt, Artificial Sequence
  Description of Artificial Sequence: Synthetic oligonucleotide
  Antisense strand to SEQ ID NO: 1182684
acuuugauaaagauguaac

SEQ ID NO: 1182686 - RNA, 19 nt, Artificial Sequence
  Description of Artificial Sequence: Synthetic oligonucleotide
  Sense strand starting at position 1228 of SEQ ID NO: 916771
uucuaaaguucuguugaaa

SEQ ID NO: 1182687 - RNA, 19 nt, Artificial Sequence
  Description of Artificial Sequence: Synthetic oligonucleotide
  Antisense strand to SEQ ID NO: 1182686
uuucaacagaacuuuagaa

SEQ ID NO: 1182688 - RNA, 19 nt, Artificial Sequence
  Description of Artificial Sequence: Synthetic oligonucleotide
  Sense strand starting at position 1417 of SEQ ID NO: 916771
cugggagaauauccuuacu

SEQ ID NO: 1182689 - RNA, 19 nt, Artificial Sequence
  Description of Artificial Sequence: Synthetic oligonucleotide
  Antisense strand to SEQ ID NO: 1182688
aguaaggauauucucccag

SEQ ID NO: 1182690 - RNA, 19 nt, Artificial Sequence
  Description of Artificial Sequence: Synthetic oligonucleotide
  Sense strand starting at position 1453 of SEQ ID NO: 916771
agccuaacuccuuaggcua

SEQ ID NO: 1182691 - RNA, 19 nt, Artificial Sequence
  Description of Artificial Sequence: Synthetic oligonucleotide
  Antisense strand to SEQ ID NO: 1182690
uagccuaaggaguuaggcu

SEQ ID NO: 1182692 - RNA, 19 nt, Artificial Sequence
  Description of Artificial Sequence: Synthetic oligonucleotide
  Sense strand starting at position 1534 of SEQ ID NO: 916771
acagguaggguccagagua

SEQ ID NO: 1182693 - RNA, 19 nt, Artificial Sequence
  Description of Artificial Sequence: Synthetic oligonucleotide
  Antisense strand to SEQ ID NO: 1182692
uacucuggacccuaccugu

SEQ ID NO: 1182694 - RNA, 19 nt, Artificial Sequence
  Description of Artificial Sequence: Synthetic oligonucleotide
  Sense strand starting at position 1693 of SEQ ID NO: 916771
cuuaaagugaucugagggu

SEQ ID NO: 1182695 - RNA, 19 nt, Artificial Sequence
  Description of Artificial Sequence: Synthetic oligonucleotide
  Antisense strand to SEQ ID NO: 1182694
acccucagaucacuuuaag

SEQ ID NO: 1182696 - RNA, 19 nt, Artificial Sequence
  Description of Artificial Sequence: Synthetic oligonucleotide
  Sense strand starting at position 1846 of SEQ ID NO: 916771
aacuuugaacugcgggauu

SEQ ID NO: 1182697 - RNA, 19 nt, Artificial Sequence
  Description of Artificial Sequence: Synthetic oligonucleotide
  Antisense strand to SEQ ID NO: 1182696
aaucccgcaguucaaaguu

SEQ ID NO: 1182698 - RNA, 19 nt, Artificial Sequence
  Description of Artificial Sequence: Synthetic oligonucleotide
  Sense strand starting at position 1982 of SEQ ID NO: 916771
uguguucuguaguuauuug

SEQ ID NO: 1182699 - RNA, 19 nt, Artificial Sequence
  Description of Artificial Sequence: Synthetic oligonucleotide
  Antisense strand to SEQ ID NO: 1182698
caaauaacuacagaacaca

SEQ ID NO: 1182700 - RNA, 19 nt, Artificial Sequence
  Description of Artificial Sequence: Synthetic oligonucleotide
  Sense strand starting at position 1986 of SEQ ID NO: 916771
uucuguaguuauuugcaga

SEQ ID NO: 1182701 - RNA, 19 nt, Artificial Sequence
  Description of Artificial Sequence: Synthetic oligonucleotide
  Antisense strand to SEQ ID NO: 1182700
ucugcaaauaacuacagaa

SEQ ID NO: 1182702 - RNA, 19 nt, Artificial Sequence
  Description of Artificial Sequence: Synthetic oligonucleotide
  Sense strand starting at position 2180 of SEQ ID NO: 916771
aagucaucugaucauggca

SEQ ID NO: 1182703 - RNA, 19 nt, Artificial Sequence
  Description of Artificial Sequence: Synthetic oligonucleotide
  Antisense strand to SEQ ID NO: 1182702
ugccaugaucagaugacuu

SEQ ID NO: 1182704 - RNA, 19 nt, Artificial Sequence
  Description of Artificial Sequence: Synthetic oligonucleotide
  Sense strand starting at position 2214 of SEQ ID NO: 916771
ugagaacucucuuugccaa

SEQ ID NO: 1182705 - RNA, 19 nt, Artificial Sequence
  Description of Artificial Sequence: Synthetic oligonucleotide
  Antisense strand to SEQ ID NO: 1182704
uuggcaaagagaguucuca

SEQ ID NO: 1182706 - RNA, 19 nt, Artificial Sequence
  Description of Artificial Sequence: Synthetic oligonucleotide
  Sense strand starting at position 2456 of SEQ ID NO: 916771
aucacaguuuggucuagga

SEQ ID NO: 1182707 - RNA, 19 nt, Artificial Sequence
  Description of Artificial Sequence: Synthetic oligonucleotide
  Antisense strand to SEQ ID NO: 1182706
uccuagaccaaacugugau

SEQ ID NO: 1182708 - RNA, 19 nt, Artificial Sequence
  Description of Artificial Sequence: Synthetic oligonucleotide
  Sense strand starting at position 2458 of SEQ ID NO: 916771
cacaguuuggucuaggaac

SEQ ID NO: 1182709 - RNA, 19 nt, Artificial Sequence
  Description of Artificial Sequence: Synthetic oligonucleotide
  Antisense strand to SEQ ID NO: 1182708
guuccuagaccaaacugug

SEQ ID NO: 1182710 - RNA, 19 nt, Artificial Sequence
  Description of Artificial Sequence: Synthetic oligonucleotide
  Sense strand starting at position 2460 of SEQ ID NO: 916771
caguuuggucuaggaacca

SEQ ID NO: 1182711 - RNA, 19 nt, Artificial Sequence
  Description of Artificial Sequence: Synthetic oligonucleotide
  Antisense strand to SEQ ID NO: 1182710
ugguuccuagaccaaacug

SEQ ID NO: 1182712 - RNA, 19 nt, Artificial Sequence
  Description of Artificial Sequence: Synthetic oligonucleotide
  Sense strand starting at position 2548 of SEQ ID NO: 916771
ccuuuagagcccugggaau

SEQ ID NO: 1182713 - RNA, 19 nt, Artificial Sequence
  Description of Artificial Sequence: Synthetic oligonucleotide
  Antisense strand to SEQ ID NO: 1182712
auucccagggcucuaaagg

SEQ ID NO: 1182714 - RNA, 19 nt, Artificial Sequence
  Description of Artificial Sequence: Synthetic oligonucleotide
  Sense strand starting at position 2639 of SEQ ID NO: 916771
cgaaaugugaaguggaagu

SEQ ID NO: 1182715 - RNA, 19 nt, Artificial Sequence
  Description of Artificial Sequence: Synthetic oligonucleotide
  Antisense strand to SEQ ID NO: 1182714
acuuccacuucacauuucg

SEQ ID NO: 1182716 - RNA, 19 nt, Artificial Sequence
  Description of Artificial Sequence: Synthetic oligonucleotide
  Sense strand starting at position 2817 of SEQ ID NO: 916771
aggagagcuuucucaugga

SEQ ID NO: 1182717 - RNA, 19 nt, Artificial Sequence
  Description of Artificial Sequence: Synthetic oligonucleotide
  Antisense strand to SEQ ID NO: 1182716
uccaugagaaagcucuccu

SEQ ID NO: 1182718 - RNA, 19 nt, Artificial Sequence
  Description of Artificial Sequence: Synthetic oligonucleotide
  Sense strand starting at position 3055 of SEQ ID NO: 916771
aucucaaggucuuccauga

SEQ ID NO: 1182719 - RNA, 19 nt, Artificial Sequence
  Description of Artificial Sequence: Synthetic oligonucleotide
  Antisense strand to SEQ ID NO: 1182718
ucauggaagaccuugagau

SEQ ID NO: 1182720 - RNA, 19 nt, Artificial Sequence
  Description of Artificial Sequence: Synthetic oligonucleotide
  Sense strand starting at position 3062 of SEQ ID NO: 916771
ggucuuccaugauucugau

SEQ ID NO: 1182721 - RNA, 19 nt, Artificial Sequence
  Description of Artificial Sequence: Synthetic oligonucleotide
  Antisense strand to SEQ ID NO: 1182720
aucagaaucauggaagacc

SEQ ID NO: 1182722 - RNA, 19 nt, Artificial Sequence
  Description of Artificial Sequence: Synthetic oligonucleotide
  Sense strand starting at position 3087 of SEQ ID NO: 916771
ugauuuaugcagugcucag

SEQ ID NO: 1182723 - RNA, 19 nt, Artificial Sequence
  Description of Artificial Sequence: Synthetic oligonucleotide
  Antisense strand to SEQ ID NO: 1182722
cugagcacugcauaaauca

SEQ ID NO: 1182724 - RNA, 19 nt, Artificial Sequence
  Description of Artificial Sequence: Synthetic oligonucleotide
  Sense strand starting at position 3091 of SEQ ID NO: 916771
uuaugcagugcucagauaa

SEQ ID NO: 1182725 - RNA, 19 nt, Artificial Sequence
  Description of Artificial Sequence: Synthetic oligonucleotide
  Antisense strand to SEQ ID NO: 1182724
uuaucugagcacugcauaa

SEQ ID NO: 1182726 - RNA, 19 nt, Artificial Sequence
  Description of Artificial Sequence: Synthetic oligonucleotide
  Sense strand starting at position 3185 of SEQ ID NO: 916771
acauguguccuauacuauu

SEQ ID NO: 1182727 - RNA, 19 nt, Artificial Sequence
  Description of Artificial Sequence: Synthetic oligonucleotide
  Antisense strand to SEQ ID NO: 1182726
aauaguauaggacacaugu

SEQ ID NO: 1182728 - RNA, 19 nt, Artificial Sequence
  Description of Artificial Sequence: Synthetic oligonucleotide
  Sense strand starting at position 3328 of SEQ ID NO: 916771
uuuauaucccugggaguua

SEQ ID NO: 1182729 - RNA, 19 nt, Artificial Sequence
  Description of Artificial Sequence: Synthetic oligonucleotide
  Antisense strand to SEQ ID NO: 1182728
uaacucccagggauauaaa

SEQ ID NO: 1182730 - RNA, 19 nt, Artificial Sequence
  Description of Artificial Sequence: Synthetic oligonucleotide
  Sense strand starting at position 3378 of SEQ ID NO: 916771
uugauauggucagugauuc

SEQ ID NO: 1182731 - RNA, 19 nt, Artificial Sequence
  Description of Artificial Sequence: Synthetic oligonucleotide
  Antisense strand to SEQ ID NO: 1182730
gaaucacugaccauaucaa

SEQ ID NO: 1182732 - RNA, 19 nt, Artificial Sequence
  Description of Artificial Sequence: Synthetic oligonucleotide
  Sense strand starting at position 3382 of SEQ ID NO: 916771
uauggucagugauuccaga

SEQ ID NO: 1182733 - RNA, 19 nt, Artificial Sequence
  Description of Artificial Sequence: Synthetic oligonucleotide
  Antisense strand to SEQ ID NO: 1182732
ucuggaaucacugaccaua

SEQ ID NO: 1182734 - RNA, 19 nt, Artificial Sequence
  Description of Artificial Sequence: Synthetic oligonucleotide
  Sense strand starting at position 3429 of SEQ ID NO: 916771
acauguucuguguauauau

SEQ ID NO: 1182735 - RNA, 19 nt, Artificial Sequence
  Description of Artificial Sequence: Synthetic oligonucleotide
  Antisense strand to SEQ ID NO: 1182734
auauauacacagaacaugu

SEQ ID NO: 1182736 - RNA, 19 nt, Artificial Sequence
  Description of Artificial Sequence: Synthetic oligonucleotide
  Sense strand starting at position 3589 of SEQ ID NO: 916771
cuacauaaucuugggugua

SEQ ID NO: 1182737 - RNA, 19 nt, Artificial Sequence
  Description of Artificial Sequence: Synthetic oligonucleotide
  Antisense strand to SEQ ID NO: 1182736
uacacccaagauuauguag

SEQ ID NO: 1182738 - RNA, 19 nt, Artificial Sequence
  Description of Artificial Sequence: Synthetic oligonucleotide
  Sense strand starting at position 3591 of SEQ ID NO: 916771
acauaaucuuggguguauu

SEQ ID NO: 1182739 - RNA, 19 nt, Artificial Sequence
  Description of Artificial Sequence: Synthetic oligonucleotide
  Antisense strand to SEQ ID NO: 1182738
aauacacccaagauuaugu

SEQ ID NO: 1182740 - RNA, 19 nt, Artificial Sequence
  Description of Artificial Sequence: Synthetic oligonucleotide
  Sense strand starting at position 3611 of SEQ ID NO: 916771
cuguuuccguucuugauuu

SEQ ID NO: 1182741 - RNA, 19 nt, Artificial Sequence
  Description of Artificial Sequence: Synthetic oligonucleotide
  Antisense strand to SEQ ID NO: 1182740
aaaucaagaacggaaacag

SEQ ID NO: 1182742 - RNA, 19 nt, Artificial Sequence
  Description of Artificial Sequence: Synthetic oligonucleotide
  Sense strand starting at position 3668 of SEQ ID NO: 916771
uauggaaguuuaccuaguu

SEQ ID NO: 1182743 - RNA, 19 nt, Artificial Sequence
  Description of Artificial Sequence: Synthetic oligonucleotide
  Antisense strand to SEQ ID NO: 1182742
aacuagguaaacuuccaua

SEQ ID NO: 1182744 - RNA, 19 nt, Artificial Sequence
  Description of Artificial Sequence: Synthetic oligonucleotide
  Sense strand starting at position 3669 of SEQ ID NO: 916771
auggaaguuuaccuaguua

SEQ ID NO: 1182745 - RNA, 19 nt, Artificial Sequence
  Description of Artificial Sequence: Synthetic oligonucleotide
  Antisense strand to SEQ ID NO: 1182744
uaacuagguaaacuuccau

SEQ ID NO: 1182746 - RNA, 19 nt, Artificial Sequence
  Description of Artificial Sequence: Synthetic oligonucleotide
  Sense strand starting at position 3718 of SEQ ID NO: 916771
agcuauacuguuuacuuau

SEQ ID NO: 1182747 - RNA, 19 nt, Artificial Sequence
  Description of Artificial Sequence: Synthetic oligonucleotide
  Antisense strand to SEQ ID NO: 1182746
auaaguaaacaguauagcu

SEQ ID NO: 1182748 - RNA, 19 nt, Artificial Sequence
  Description of Artificial Sequence: Synthetic oligonucleotide
  Sense strand starting at position 6 of SEQ ID NO: 916772
acaguaaacucuccaagug

SEQ ID NO: 1182749 - RNA, 19 nt, Artificial Sequence
  Description of Artificial Sequence: Synthetic oligonucleotide
  Antisense strand to SEQ ID NO: 1182748
cacuuggagaguuuacugu

SEQ ID NO: 1182750 - RNA, 19 nt, Artificial Sequence
  Description of Artificial Sequence: Synthetic oligonucleotide
  Sense strand starting at position 118 of SEQ ID NO: 916772
agcugaauuugggaagaaa

SEQ ID NO: 1182751 - RNA, 19 nt, Artificial Sequence
  Description of Artificial Sequence: Synthetic oligonucleotide
  Antisense strand to SEQ ID NO: 1182750
uuucuucccaaauucagcu

SEQ ID NO: 1182752 - RNA, 19 nt, Artificial Sequence
  Description of Artificial Sequence: Synthetic oligonucleotide
  Sense strand starting at position 188 of SEQ ID NO: 916772
agacaugucuaaccugaug

SEQ ID NO: 1182753 - RNA, 19 nt, Artificial Sequence
  Description of Artificial Sequence: Synthetic oligonucleotide
  Antisense strand to SEQ ID NO: 1182752
caucagguuagacaugucu

SEQ ID NO: 1182754 - RNA, 19 nt, Artificial Sequence
  Description of Artificial Sequence: Synthetic oligonucleotide
  Sense strand starting at position 327 of SEQ ID NO: 916772
acaguugaggccuagcaga

SEQ ID NO: 1182755 - RNA, 19 nt, Artificial Sequence
  Description of Artificial Sequence: Synthetic oligonucleotide
  Antisense strand to SEQ ID NO: 1182754
ucugcuaggccucaacugu

SEQ ID NO: 1182756 - RNA, 19 nt, Artificial Sequence
  Description of Artificial Sequence: Synthetic oligonucleotide
  Sense strand starting at position 435 of SEQ ID NO: 916772
gaagaugguuacuccugga

SEQ ID NO: 1182757 - RNA, 19 nt, Artificial Sequence
  Description of Artificial Sequence: Synthetic oligonucleotide
  Antisense strand to SEQ ID NO: 1182756
uccaggaguaaccaucuuc

SEQ ID NO: 1182758 - RNA, 19 nt, Artificial Sequence
  Description of Artificial Sequence: Synthetic oligonucleotide
  Sense strand starting at position 439 of SEQ ID NO: 916772
augguuacuccuggacaga

SEQ ID NO: 1182759 - RNA, 19 nt, Artificial Sequence
  Description of Artificial Sequence: Synthetic oligonucleotide
  Antisense strand to SEQ ID NO: 1182758
ucuguccaggaguaaccau

SEQ ID NO: 1182760 - RNA, 19 nt, Artificial Sequence
  Description of Artificial Sequence: Synthetic oligonucleotide
  Sense strand starting at position 480 of SEQ ID NO: 916772
agacuuugcuacucauguu

SEQ ID NO: 1182761 - RNA, 19 nt, Artificial Sequence
  Description of Artificial Sequence: Synthetic oligonucleotide
  Antisense strand to SEQ ID NO: 1182760
aacaugaguagcaaagucu

SEQ ID NO: 1182762 - RNA, 19 nt, Artificial Sequence
  Description of Artificial Sequence: Synthetic oligonucleotide
  Sense strand starting at position 1034 of SEQ ID NO: 916772
agcugaauuugggagggaa

SEQ ID NO: 1182763 - RNA, 19 nt, Artificial Sequence
  Description of Artificial Sequence: Synthetic oligonucleotide
  Antisense strand to SEQ ID NO: 1182762
uucccucccaaauucagcu

SEQ ID NO: 1182764 - RNA, 19 nt, Artificial Sequence
  Description of Artificial Sequence: Synthetic oligonucleotide
  Sense strand starting at position 1367 of SEQ ID NO: 916772
uccuacuugcccuaaggau

SEQ ID NO: 1182765 - RNA, 19 nt, Artificial Sequence
  Description of Artificial Sequence: Synthetic oligonucleotide
  Antisense strand to SEQ ID NO: 1182764
auccuuagggcaaguagga

SEQ ID NO: 1182766 - RNA, 19 nt, Artificial Sequence
  Description of Artificial Sequence: Synthetic oligonucleotide
  Sense strand starting at position 1406 of SEQ ID NO: 916772
agguccgcagauuaauauu

SEQ ID NO: 1182767 - RNA, 19 nt, Artificial Sequence
  Description of Artificial Sequence: Synthetic oligonucleotide
  Antisense strand to SEQ ID NO: 1182766
aauauuaaucugcggaccu

SEQ ID NO: 1182768 - RNA, 19 nt, Artificial Sequence
  Description of Artificial Sequence: Synthetic oligonucleotide
  Sense strand starting at position 1480 of SEQ ID NO: 916772
ggaccaugucccgggucaa

SEQ ID NO: 1182769 - RNA, 19 nt, Artificial Sequence
  Description of Artificial Sequence: Synthetic oligonucleotide
  Antisense strand to SEQ ID NO: 1182768
uugacccgggacauggucc

SEQ ID NO: 1182770 - RNA, 19 nt, Artificial Sequence
  Description of Artificial Sequence: Synthetic oligonucleotide
  Sense strand starting at position 1639 of SEQ ID NO: 916772
auuccucuuuccucgggau

SEQ ID NO: 1182771 - RNA, 19 nt, Artificial Sequence
  Description of Artificial Sequence: Synthetic oligonucleotide
  Antisense strand to SEQ ID NO: 1182770
aucccgaggaaagaggaau

SEQ ID NO: 1182772 - RNA, 19 nt, Artificial Sequence
  Description of Artificial Sequence: Synthetic oligonucleotide
  Sense strand starting at position 1641 of SEQ ID NO: 916772
uccucuuuccucgggauca

SEQ ID NO: 1182773 - RNA, 19 nt, Artificial Sequence
  Description of Artificial Sequence: Synthetic oligonucleotide
  Antisense strand to SEQ ID NO: 1182772
ugaucccgaggaaagagga

SEQ ID NO: 1182774 - RNA, 19 nt, Artificial Sequence
  Description of Artificial Sequence: Synthetic oligonucleotide
  Sense strand starting at position 1643 of SEQ ID NO: 916772
cucuuuccucgggaucaaa

SEQ ID NO: 1182775 - RNA, 19 nt, Artificial Sequence
  Description of Artificial Sequence: Synthetic oligonucleotide
  Antisense strand to SEQ ID NO: 1182774
uuugaucccgaggaaagag

SEQ ID NO: 1182776 - RNA, 19 nt, Artificial Sequence
  Description of Artificial Sequence: Synthetic oligonucleotide
  Sense strand starting at position 1826 of SEQ ID NO: 916772
ucgggagauucuucacgau

SEQ ID NO: 1182777 - RNA, 19 nt, Artificial Sequence
  Description of Artificial Sequence: Synthetic oligonucleotide
  Antisense strand to SEQ ID NO: 1182776
aucgugaagaaucucccga

SEQ ID NO: 1182778 - RNA, 19 nt, Artificial Sequence
  Description of Artificial Sequence: Synthetic oligonucleotide
  Sense strand starting at position 2229 of SEQ ID NO: 916772
auuauugagccuuaggacu

SEQ ID NO: 1182779 - RNA, 19 nt, Artificial Sequence
  Description of Artificial Sequence: Synthetic oligonucleotide
  Antisense strand to SEQ ID NO: 1182778
aguccuaaggcucaauaau

SEQ ID NO: 1182780 - RNA, 19 nt, Artificial Sequence
  Description of Artificial Sequence: Synthetic oligonucleotide
  Sense strand starting at position 2354 of SEQ ID NO: 916772
uuguguaaauacuuggaau

SEQ ID NO: 1182781 - RNA, 19 nt, Artificial Sequence
  Description of Artificial Sequence: Synthetic oligonucleotide
  Antisense strand to SEQ ID NO: 1182780
auuccaaguauuuacacaa

SEQ ID NO: 1182782 - RNA, 19 nt, Artificial Sequence
  Description of Artificial Sequence: Synthetic oligonucleotide
  Sense strand starting at position 2355 of SEQ ID NO: 916772
uguguaaauacuuggaaug

SEQ ID NO: 1182783 - RNA, 19 nt, Artificial Sequence
  Description of Artificial Sequence: Synthetic oligonucleotide
  Antisense strand to SEQ ID NO: 1182782
cauuccaaguauuuacaca

SEQ ID NO: 1182784 - RNA, 19 nt, Artificial Sequence
  Description of Artificial Sequence: Synthetic oligonucleotide
  Sense strand starting at position 2356 of SEQ ID NO: 916772
guguaaauacuuggaauga

SEQ ID NO: 1182785 - RNA, 19 nt, Artificial Sequence
  Description of Artificial Sequence: Synthetic oligonucleotide
  Antisense strand to SEQ ID NO: 1182784
ucauuccaaguauuuacac

SEQ ID NO: 1182786 - RNA, 19 nt, Artificial Sequence
  Description of Artificial Sequence: Synthetic oligonucleotide
  Sense strand starting at position 2415 of SEQ ID NO: 916772
acugggaaucgugcgugua

SEQ ID NO: 1182787 - RNA, 19 nt, Artificial Sequence
  Description of Artificial Sequence: Synthetic oligonucleotide
  Antisense strand to SEQ ID NO: 1182786
uacacgcacgauucccagu

SEQ ID NO: 1182788 - RNA, 19 nt, Artificial Sequence
  Description of Artificial Sequence: Synthetic oligonucleotide
  Sense strand starting at position 2450 of SEQ ID NO: 916772
gucuuauaacuaugaauug

SEQ ID NO: 1182789 - RNA, 19 nt, Artificial Sequence
  Description of Artificial Sequence: Synthetic oligonucleotide
  Antisense strand to SEQ ID NO: 1182788
caauucauaguuauaagac

SEQ ID NO: 1182790 - RNA, 19 nt, Artificial Sequence
  Description of Artificial Sequence: Synthetic oligonucleotide
  Sense strand starting at position 2556 of SEQ ID NO: 916772
cuuccuaauguuuggaacu

SEQ ID NO: 1182791 - RNA, 19 nt, Artificial Sequence
  Description of Artificial Sequence: Synthetic oligonucleotide
  Antisense strand to SEQ ID NO: 1182790
aguuccaaacauuaggaag

SEQ ID NO: 1182792 - RNA, 19 nt, Artificial Sequence
  Description of Artificial Sequence: Synthetic oligonucleotide
  Sense strand starting at position 2596 of SEQ ID NO: 916772
cugagagaucuuggccaaa

SEQ ID NO: 1182793 - RNA, 19 nt, Artificial Sequence
  Description of Artificial Sequence: Synthetic oligonucleotide
  Antisense strand to SEQ ID NO: 1182792
uuuggccaagaucucucag

SEQ ID NO: 1182794 - RNA, 19 nt, Artificial Sequence
  Description of Artificial Sequence: Synthetic oligonucleotide
  Sense strand starting at position 2686 of SEQ ID NO: 916772
gugagaacgugaaagggau

SEQ ID NO: 1182795 - RNA, 19 nt, Artificial Sequence
  Description of Artificial Sequence: Synthetic oligonucleotide
  Antisense strand to SEQ ID NO: 1182794
aucccuuucacguucucac

SEQ ID NO: 1182796 - RNA, 19 nt, Artificial Sequence
  Description of Artificial Sequence: Synthetic oligonucleotide
  Sense strand starting at position 2692 of SEQ ID NO: 916772
acgugaaagggauguuauu

SEQ ID NO: 1182797 - RNA, 19 nt, Artificial Sequence
  Description of Artificial Sequence: Synthetic oligonucleotide
  Antisense strand to SEQ ID NO: 1182796
aauaacaucccuuucacgu

SEQ ID NO: 1182798 - RNA, 19 nt, Artificial Sequence
  Description of Artificial Sequence: Synthetic oligonucleotide
  Sense strand starting at position 2727 of SEQ ID NO: 916772
gagcauucucgguaccuac

SEQ ID NO: 1182799 - RNA, 19 nt, Artificial Sequence
  Description of Artificial Sequence: Synthetic oligonucleotide
  Antisense strand to SEQ ID NO: 1182798
guagguaccgagaaugcuc

SEQ ID NO: 1182800 - RNA, 19 nt, Artificial Sequence
  Description of Artificial Sequence: Synthetic oligonucleotide
  Sense strand starting at position 2738 of SEQ ID NO: 916772
guaccuacucuuggaugga

SEQ ID NO: 1182801 - RNA, 19 nt, Artificial Sequence
  Description of Artificial Sequence: Synthetic oligonucleotide
  Antisense strand to SEQ ID NO: 1182800
uccauccaagaguagguac

SEQ ID NO: 1182802 - RNA, 19 nt, Artificial Sequence
  Description of Artificial Sequence: Synthetic oligonucleotide
  Sense strand starting at position 2793 of SEQ ID NO: 916772
gacgguauuuccuuucugu

SEQ ID NO: 1182803 - RNA, 19 nt, Artificial Sequence
  Description of Artificial Sequence: Synthetic oligonucleotide
  Antisense strand to SEQ ID NO: 1182802
acagaaaggaaauaccguc

SEQ ID NO: 1182804 - RNA, 19 nt, Artificial Sequence
  Description of Artificial Sequence: Synthetic oligonucleotide
  Sense strand starting at position 2846 of SEQ ID NO: 916772
ugccaagcuucugcaauuu

SEQ ID NO: 1182805 - RNA, 19 nt, Artificial Sequence
  Description of Artificial Sequence: Synthetic oligonucleotide
  Antisense strand to SEQ ID NO: 1182804
aaauugcagaagcuuggca

SEQ ID NO: 1182806 - RNA, 19 nt, Artificial Sequence
  Description of Artificial Sequence: Synthetic oligonucleotide
  Sense strand starting at position 2963 of SEQ ID NO: 916772
ugacuauauuuacagaggu

SEQ ID NO: 1182807 - RNA, 19 nt, Artificial Sequence
  Description of Artificial Sequence: Synthetic oligonucleotide
  Antisense strand to SEQ ID NO: 1182806
accucuguaaauauaguca

SEQ ID NO: 1182808 - RNA, 19 nt, Artificial Sequence
  Description of Artificial Sequence: Synthetic oligonucleotide
  Sense strand starting at position 3640 of SEQ ID NO: 916772
ggcuacugugaauaaucuu

SEQ ID NO: 1182809 - RNA, 19 nt, Artificial Sequence
  Description of Artificial Sequence: Synthetic oligonucleotide
  Antisense strand to SEQ ID NO: 1182808
aagauuauucacaguagcc

SEQ ID NO: 1182810 - RNA, 19 nt, Artificial Sequence
  Description of Artificial Sequence: Synthetic oligonucleotide
  Sense strand starting at position 3648 of SEQ ID NO: 916772
ugaauaaucuugccgugaa

SEQ ID NO: 1182811 - RNA, 19 nt, Artificial Sequence
  Description of Artificial Sequence: Synthetic oligonucleotide
  Antisense strand to SEQ ID NO: 1182810
uucacggcaagauuauuca

SEQ ID NO: 1182812 - RNA, 19 nt, Artificial Sequence
  Description of Artificial Sequence: Synthetic oligonucleotide
  Sense strand starting at position 3652 of SEQ ID NO: 916772
uaaucuugccgugaacauu

SEQ ID NO: 1182813 - RNA, 19 nt, Artificial Sequence
  Description of Artificial Sequence: Synthetic oligonucleotide
  Antisense strand to SEQ ID NO: 1182812
aauguucacggcaagauua

SEQ ID NO: 1182814 - RNA, 19 nt, Artificial Sequence
  Description of Artificial Sequence: Synthetic oligonucleotide
  Sense strand starting at position 3726 of SEQ ID NO: 916772
ggaguaggauugccugauc

SEQ ID NO: 1182815 - RNA, 19 nt, Artificial Sequence
  Description of Artificial Sequence: Synthetic oligonucleotide
  Antisense strand to SEQ ID NO: 1182814
gaucaggcaauccuacucc

SEQ ID NO: 1182816 - RNA, 19 nt, Artificial Sequence
  Description of Artificial Sequence: Synthetic oligonucleotide
  Sense strand starting at position 3729 of SEQ ID NO: 916772
guaggauugccugaucaua

SEQ ID NO: 1182817 - RNA, 19 nt, Artificial Sequence
  Description of Artificial Sequence: Synthetic oligonucleotide
  Antisense strand to SEQ ID NO: 1182816
uaugaucaggcaauccuac

SEQ ID NO: 1182818 - RNA, 19 nt, Artificial Sequence
  Description of Artificial Sequence: Synthetic oligonucleotide
  Sense strand starting at position 3731 of SEQ ID NO: 916772
aggauugccugaucauaug

SEQ ID NO: 1182819 - RNA, 19 nt, Artificial Sequence
  Description of Artificial Sequence: Synthetic oligonucleotide
  Antisense strand to SEQ ID NO: 1182818
cauaugaucaggcaauccu

SEQ ID NO: 1182820 - RNA, 19 nt, Artificial Sequence
  Description of Artificial Sequence: Synthetic oligonucleotide
  Sense strand starting at position 3781 of SEQ ID NO: 916772
cuaaccuguuauccaaagu

SEQ ID NO: 1182821 - RNA, 19 nt, Artificial Sequence
  Description of Artificial Sequence: Synthetic oligonucleotide
  Antisense strand to SEQ ID NO: 1182820
acuuuggauaacagguuag

SEQ ID NO: 1182822 - RNA, 19 nt, Artificial Sequence
  Description of Artificial Sequence: Synthetic oligonucleotide
  Sense strand starting at position 3826 of SEQ ID NO: 916772
gcgguauaugaagguucaa

SEQ ID NO: 1182823 - RNA, 19 nt, Artificial Sequence
  Description of Artificial Sequence: Synthetic oligonucleotide
  Antisense strand to SEQ ID NO: 1182822
uugaaccuucauauaccgc

SEQ ID NO: 1182824 - RNA, 19 nt, Artificial Sequence
  Description of Artificial Sequence: Synthetic oligonucleotide
  Sense strand starting at position 3851 of SEQ ID NO: 916772
ccacaucuccuccaguguu

SEQ ID NO: 1182825 - RNA, 19 nt, Artificial Sequence
  Description of Artificial Sequence: Synthetic oligonucleotide
  Antisense strand to SEQ ID NO: 1182824
aacacuggaggagaugugg

SEQ ID NO: 1182826 - RNA, 19 nt, Artificial Sequence
  Description of Artificial Sequence: Synthetic oligonucleotide
  Sense strand starting at position 3871 of SEQ ID NO: 916772
guuauugggucuuuauaau

SEQ ID NO: 1182827 - RNA, 19 nt, Artificial Sequence
  Description of Artificial Sequence: Synthetic oligonucleotide
  Antisense strand to SEQ ID NO: 1182826
auuauaaagacccaauaac

SEQ ID NO: 1182828 - RNA, 19 nt, Artificial Sequence
  Description of Artificial Sequence: Synthetic oligonucleotide
  Sense strand starting at position 378 of SEQ ID NO: 916773
cauguuacgggauacauau

SEQ ID NO: 1182829 - RNA, 19 nt, Artificial Sequence
  Description of Artificial Sequence: Synthetic oligonucleotide
  Antisense strand to SEQ ID NO: 1182828
auauguaucccguaacaug

SEQ ID NO: 1182830 - RNA, 19 nt, Artificial Sequence
  Description of Artificial Sequence: Synthetic oligonucleotide
  Sense strand starting at position 402 of SEQ ID NO: 916773
guagaaagguuacuauagu

SEQ ID NO: 1182831 - RNA, 19 nt, Artificial Sequence
  Description of Artificial Sequence: Synthetic oligonucleotide
  Antisense strand to SEQ ID NO: 1182830
acuauaguaaccuuucuac

SEQ ID NO: 1182832 - RNA, 19 nt, Artificial Sequence
  Description of Artificial Sequence: Synthetic oligonucleotide
  Sense strand starting at position 479 of SEQ ID NO: 916773
gcuaaagucugcucauuua

SEQ ID NO: 1182833 - RNA, 19 nt, Artificial Sequence
  Description of Artificial Sequence: Synthetic oligonucleotide
  Antisense strand to SEQ ID NO: 1182832
uaaaugagcagacuuuagc

SEQ ID NO: 1182834 - RNA, 19 nt, Artificial Sequence
  Description of Artificial Sequence: Synthetic oligonucleotide
  Sense strand starting at position 766 of SEQ ID NO: 916773
ggucucauuagguacauga

SEQ ID NO: 1182835 - RNA, 19 nt, Artificial Sequence
  Description of Artificial Sequence: Synthetic oligonucleotide
  Antisense strand to SEQ ID NO: 1182834
ucauguaccuaaugagacc

SEQ ID NO: 1182836 - RNA, 19 nt, Artificial Sequence
  Description of Artificial Sequence: Synthetic oligonucleotide
  Sense strand starting at position 841 of SEQ ID NO: 916773
ucccuaaaugucuauguca

SEQ ID NO: 1182837 - RNA, 19 nt, Artificial Sequence
  Description of Artificial Sequence: Synthetic oligonucleotide
  Antisense strand to SEQ ID NO: 1182836
ugacauagacauuuaggga

SEQ ID NO: 1182838 - RNA, 19 nt, Artificial Sequence
  Description of Artificial Sequence: Synthetic oligonucleotide
  Sense strand starting at position 945 of SEQ ID NO: 916773
uaugcugugcgcccugaaa

SEQ ID NO: 1182839 - RNA, 19 nt, Artificial Sequence
  Description of Artificial Sequence: Synthetic oligonucleotide
  Antisense strand to SEQ ID NO: 1182838
uuucagggcgcacagcaua

SEQ ID NO: 1182840 - RNA, 19 nt, Artificial Sequence
  Description of Artificial Sequence: Synthetic oligonucleotide
  Sense strand starting at position 1076 of SEQ ID NO: 916773
cuccuaggaucacugcaaa

SEQ ID NO: 1182841 - RNA, 19 nt, Artificial Sequence
  Description of Artificial Sequence: Synthetic oligonucleotide
  Antisense strand to SEQ ID NO: 1182840
uuugcagugauccuaggag

SEQ ID NO: 1182842 - RNA, 19 nt, Artificial Sequence
  Description of Artificial Sequence: Synthetic oligonucleotide
  Sense strand starting at position 1151 of SEQ ID NO: 916773
cagcgcucugugccuuaau

SEQ ID NO: 1182843 - RNA, 19 nt, Artificial Sequence
  Description of Artificial Sequence: Synthetic oligonucleotide
  Antisense strand to SEQ ID NO: 1182842
auuaaggcacagagcgcug

SEQ ID NO: 1182844 - RNA, 19 nt, Artificial Sequence
  Description of Artificial Sequence: Synthetic oligonucleotide
  Sense strand starting at position 1219 of SEQ ID NO: 916773
uaggaucuguagucuagaa

SEQ ID NO: 1182845 - RNA, 19 nt, Artificial Sequence
  Description of Artificial Sequence: Synthetic oligonucleotide
  Antisense strand to SEQ ID NO: 1182844
uucuagacuacagauccua

SEQ ID NO: 1182846 - RNA, 19 nt, Artificial Sequence
  Description of Artificial Sequence: Synthetic oligonucleotide
  Sense strand starting at position 1223 of SEQ ID NO: 916773
aucuguagucuagaagagu

SEQ ID NO: 1182847 - RNA, 19 nt, Artificial Sequence
  Description of Artificial Sequence: Synthetic oligonucleotide
  Antisense strand to SEQ ID NO: 1182846
acucuucuagacuacagau

SEQ ID NO: 1182848 - RNA, 19 nt, Artificial Sequence
  Description of Artificial Sequence: Synthetic oligonucleotide
  Sense strand starting at position 1226 of SEQ ID NO: 916773
uguagucuagaagaguaua

SEQ ID NO: 1182849 - RNA, 19 nt, Artificial Sequence
  Description of Artificial Sequence: Synthetic oligonucleotide
  Antisense strand to SEQ ID NO: 1182848
uauacucuucuagacuaca

SEQ ID NO: 1182850 - RNA, 19 nt, Artificial Sequence
  Description of Artificial Sequence: Synthetic oligonucleotide
  Sense strand starting at position 1268 of SEQ ID NO: 916773
gguuucucugacuaucuau

SEQ ID NO: 1182851 - RNA, 19 nt, Artificial Sequence
  Description of Artificial Sequence: Synthetic oligonucleotide
  Antisense strand to SEQ ID NO: 1182850
auagauagucagagaaacc

SEQ ID NO: 1182852 - RNA, 19 nt, Artificial Sequence
  Description of Artificial Sequence: Synthetic oligonucleotide
  Sense strand starting at position 1414 of SEQ ID NO: 916773
gacauauuauccuugugga

SEQ ID NO: 1182853 - RNA, 19 nt, Artificial Sequence
  Description of Artificial Sequence: Synthetic oligonucleotide
  Antisense strand to SEQ ID NO: 1182852
uccacaaggauaauauguc

SEQ ID NO: 1182854 - RNA, 19 nt, Artificial Sequence
  Description of Artificial Sequence: Synthetic oligonucleotide
  Sense strand starting at position 1415 of SEQ ID NO: 916773
acauauuauccuuguggag

SEQ ID NO: 1182855 - RNA, 19 nt, Artificial Sequence
  Description of Artificial Sequence: Synthetic oligonucleotide
  Antisense strand to SEQ ID NO: 1182854
cuccacaaggauaauaugu

SEQ ID NO: 1182856 - RNA, 19 nt, Artificial Sequence
  Description of Artificial Sequence: Synthetic oligonucleotide
  Sense strand starting at position 1424 of SEQ ID NO: 916773
ccuuguggagauugauaca

SEQ ID NO: 1182857 - RNA, 19 nt, Artificial Sequence
  Description of Artificial Sequence: Synthetic oligonucleotide
  Antisense strand to SEQ ID NO: 1182856
uguaucaaucuccacaagg

SEQ ID NO: 1182858 - RNA, 19 nt, Artificial Sequence
  Description of Artificial Sequence: Synthetic oligonucleotide
  Sense strand starting at position 1486 of SEQ ID NO: 916773
uugcaagcuugauuuguuu

SEQ ID NO: 1182859 - RNA, 19 nt, Artificial Sequence
  Description of Artificial Sequence: Synthetic oligonucleotide
  Antisense strand to SEQ ID NO: 1182858
aaacaaaucaagcuugcaa

SEQ ID NO: 1182860 - RNA, 19 nt, Artificial Sequence
  Description of Artificial Sequence: Synthetic oligonucleotide
  Sense strand starting at position 1536 of SEQ ID NO: 916773
gacugaaaguucccugaac

SEQ ID NO: 1182861 - RNA, 19 nt, Artificial Sequence
  Description of Artificial Sequence: Synthetic oligonucleotide
  Antisense strand to SEQ ID NO: 1182860
guucagggaacuuucaguc

SEQ ID NO: 1182862 - RNA, 19 nt, Artificial Sequence
  Description of Artificial Sequence: Synthetic oligonucleotide
  Sense strand starting at position 1537 of SEQ ID NO: 916773
acugaaaguucccugaacu

SEQ ID NO: 1182863 - RNA, 19 nt, Artificial Sequence
  Description of Artificial Sequence: Synthetic oligonucleotide
  Antisense strand to SEQ ID NO: 1182862
aguucagggaacuuucagu

SEQ ID NO: 1182864 - RNA, 19 nt, Artificial Sequence
  Description of Artificial Sequence: Synthetic oligonucleotide
  Sense strand starting at position 1538 of SEQ ID NO: 916773
cugaaaguucccugaacuc

SEQ ID NO: 1182865 - RNA, 19 nt, Artificial Sequence
  Description of Artificial Sequence: Synthetic oligonucleotide
  Antisense strand to SEQ ID NO: 1182864
gaguucagggaacuuucag

SEQ ID NO: 1182866 - RNA, 19 nt, Artificial Sequence
  Description of Artificial Sequence: Synthetic oligonucleotide
  Sense strand starting at position 2011 of SEQ ID NO: 916773
cuuuacgucacugagagaa

SEQ ID NO: 1182867 - RNA, 19 nt, Artificial Sequence
  Description of Artificial Sequence: Synthetic oligonucleotide
  Antisense strand to SEQ ID NO: 1182866
uucucucagugacguaaag

SEQ ID NO: 1182868 - RNA, 19 nt, Artificial Sequence
  Description of Artificial Sequence: Synthetic oligonucleotide
  Sense strand starting at position 2015 of SEQ ID NO: 916773
acgucacugagagaaguua

SEQ ID NO: 1182869 - RNA, 19 nt, Artificial Sequence
  Description of Artificial Sequence: Synthetic oligonucleotide
  Antisense strand to SEQ ID NO: 1182868
uaacuucucucagugacgu

SEQ ID NO: 1182870 - RNA, 19 nt, Artificial Sequence
  Description of Artificial Sequence: Synthetic oligonucleotide
  Sense strand starting at position 2030 of SEQ ID NO: 916773
guuaacagagucugaauga

SEQ ID NO: 1182871 - RNA, 19 nt, Artificial Sequence
  Description of Artificial Sequence: Synthetic oligonucleotide
  Antisense strand to SEQ ID NO: 1182870
ucauucagacucuguuaac

SEQ ID NO: 1182872 - RNA, 19 nt, Artificial Sequence
  Description of Artificial Sequence: Synthetic oligonucleotide
  Sense strand starting at position 2071 of SEQ ID NO: 916773
ccuaaugcccaagauguuu

SEQ ID NO: 1182873 - RNA, 19 nt, Artificial Sequence
  Description of Artificial Sequence: Synthetic oligonucleotide
  Antisense strand to SEQ ID NO: 1182872
aaacaucuugggcauuagg

SEQ ID NO: 1182874 - RNA, 19 nt, Artificial Sequence
  Description of Artificial Sequence: Synthetic oligonucleotide
  Sense strand starting at position 2130 of SEQ ID NO: 916773
aaagaagaguucuuagguc

SEQ ID NO: 1182875 - RNA, 19 nt, Artificial Sequence
  Description of Artificial Sequence: Synthetic oligonucleotide
  Antisense strand to SEQ ID NO: 1182874
gaccuaagaacucuucuuu

SEQ ID NO: 1182876 - RNA, 19 nt, Artificial Sequence
  Description of Artificial Sequence: Synthetic oligonucleotide
  Sense strand starting at position 2134 of SEQ ID NO: 916773
aagaguucuuaggucuaac

SEQ ID NO: 1182877 - RNA, 19 nt, Artificial Sequence
  Description of Artificial Sequence: Synthetic oligonucleotide
  Antisense strand to SEQ ID NO: 1182876
guuagaccuaagaacucuu

SEQ ID NO: 1182878 - RNA, 19 nt, Artificial Sequence
  Description of Artificial Sequence: Synthetic oligonucleotide
  Sense strand starting at position 2279 of SEQ ID NO: 916773
gagacauugccuuggagaa

SEQ ID NO: 1182879 - RNA, 19 nt, Artificial Sequence
  Description of Artificial Sequence: Synthetic oligonucleotide
  Antisense strand to SEQ ID NO: 1182878
uucuccaaggcaaugucuc

SEQ ID NO: 1182880 - RNA, 19 nt, Artificial Sequence
  Description of Artificial Sequence: Synthetic oligonucleotide
  Sense strand starting at position 2280 of SEQ ID NO: 916773
agacauugccuuggagaac

SEQ ID NO: 1182881 - RNA, 19 nt, Artificial Sequence
  Description of Artificial Sequence: Synthetic oligonucleotide
  Antisense strand to SEQ ID NO: 1182880
guucuccaaggcaaugucu

SEQ ID NO: 1182882 - RNA, 19 nt, Artificial Sequence
  Description of Artificial Sequence: Synthetic oligonucleotide
  Sense strand starting at position 2834 of SEQ ID NO: 916773
cagauucuccgaggaauga

SEQ ID NO: 1182883 - RNA, 19 nt, Artificial Sequence
  Description of Artificial Sequence: Synthetic oligonucleotide
  Antisense strand to SEQ ID NO: 1182882
ucauuccucggagaaucug

SEQ ID NO: 1182884 - RNA, 19 nt, Artificial Sequence
  Description of Artificial Sequence: Synthetic oligonucleotide
  Sense strand starting at position 2921 of SEQ ID NO: 916773
acaauugcaggcuaucuua

SEQ ID NO: 1182885 - RNA, 19 nt, Artificial Sequence
  Description of Artificial Sequence: Synthetic oligonucleotide
  Antisense strand to SEQ ID NO: 1182884
uaagauagccugcaauugu

SEQ ID NO: 1182886 - RNA, 19 nt, Artificial Sequence
  Description of Artificial Sequence: Synthetic oligonucleotide
  Sense strand starting at position 3016 of SEQ ID NO: 916773
ggaguuuaugucuaaauug

SEQ ID NO: 1182887 - RNA, 19 nt, Artificial Sequence
  Description of Artificial Sequence: Synthetic oligonucleotide
  Antisense strand to SEQ ID NO: 1182886
caauuuagacauaaacucc

SEQ ID NO: 1182888 - RNA, 19 nt, Artificial Sequence
  Description of Artificial Sequence: Synthetic oligonucleotide
  Sense strand starting at position 3052 of SEQ ID NO: 916773
gucugcuuugaguugucuu

SEQ ID NO: 1182889 - RNA, 19 nt, Artificial Sequence
  Description of Artificial Sequence: Synthetic oligonucleotide
  Antisense strand to SEQ ID NO: 1182888
aagacaacucaaagcagac

SEQ ID NO: 1182890 - RNA, 19 nt, Artificial Sequence
  Description of Artificial Sequence: Synthetic oligonucleotide
  Sense strand starting at position 3094 of SEQ ID NO: 916773
acuuaagaagcauaugcuu

SEQ ID NO: 1182891 - RNA, 19 nt, Artificial Sequence
  Description of Artificial Sequence: Synthetic oligonucleotide
  Antisense strand to SEQ ID NO: 1182890
aagcauaugcuucuuaagu

SEQ ID NO: 1182892 - RNA, 19 nt, Artificial Sequence
  Description of Artificial Sequence: Synthetic oligonucleotide
  Sense strand starting at position 3205 of SEQ ID NO: 916773
caaagaaugucuuuguagg

SEQ ID NO: 1182893 - RNA, 19 nt, Artificial Sequence
  Description of Artificial Sequence: Synthetic oligonucleotide
  Antisense strand to SEQ ID NO: 1182892
ccuacaaagacauucuuug

SEQ ID NO: 1182894 - RNA, 19 nt, Artificial Sequence
  Description of Artificial Sequence: Synthetic oligonucleotide
  Sense strand starting at position 3290 of SEQ ID NO: 916773
gugcaauagggauguuaaa

SEQ ID NO: 1182895 - RNA, 19 nt, Artificial Sequence
  Description of Artificial Sequence: Synthetic oligonucleotide
  Antisense strand to SEQ ID NO: 1182894
uuuaacaucccuauugcac

SEQ ID NO: 1182896 - RNA, 19 nt, Artificial Sequence
  Description of Artificial Sequence: Synthetic oligonucleotide
  Sense strand starting at position 3447 of SEQ ID NO: 916773
ucuaguuuccgugucacuu

SEQ ID NO: 1182897 - RNA, 19 nt, Artificial Sequence
  Description of Artificial Sequence: Synthetic oligonucleotide
  Antisense strand to SEQ ID NO: 1182896
aagugacacggaaacuaga

SEQ ID NO: 1182898 - RNA, 19 nt, Artificial Sequence
  Description of Artificial Sequence: Synthetic oligonucleotide
  Sense strand starting at position 3448 of SEQ ID NO: 916773
cuaguuuccgugucacuuu

SEQ ID NO: 1182899 - RNA, 19 nt, Artificial Sequence
  Description of Artificial Sequence: Synthetic oligonucleotide
  Antisense strand to SEQ ID NO: 1182898
aaagugacacggaaacuag

SEQ ID NO: 1182900 - RNA, 19 nt, Artificial Sequence
  Description of Artificial Sequence: Synthetic oligonucleotide
  Sense strand starting at position 3493 of SEQ ID NO: 916773
auuaguauucugcagagua

SEQ ID NO: 1182901 - RNA, 19 nt, Artificial Sequence
  Description of Artificial Sequence: Synthetic oligonucleotide
  Antisense strand to SEQ ID NO: 1182900
uacucugcagaauacuaau

SEQ ID NO: 1182902 - RNA, 19 nt, Artificial Sequence
  Description of Artificial Sequence: Synthetic oligonucleotide
  Sense strand starting at position 3495 of SEQ ID NO: 916773
uaguauucugcagaguaaa

SEQ ID NO: 1182903 - RNA, 19 nt, Artificial Sequence
  Description of Artificial Sequence: Synthetic oligonucleotide
  Antisense strand to SEQ ID NO: 1182902
uuuacucugcagaauacua

SEQ ID NO: 1182904 - RNA, 19 nt, Artificial Sequence
  Description of Artificial Sequence: Synthetic oligonucleotide
  Sense strand starting at position 3614 of SEQ ID NO: 916773
gggaauugcaacugagacu

SEQ ID NO: 1182905 - RNA, 19 nt, Artificial Sequence
  Description of Artificial Sequence: Synthetic oligonucleotide
  Antisense strand to SEQ ID NO: 1182904
agucucaguugcaauuccc

SEQ ID NO: 1182906 - RNA, 19 nt, Artificial Sequence
  Description of Artificial Sequence: Synthetic oligonucleotide
  Sense strand starting at position 3644 of SEQ ID NO: 916773
agccaaaugcaguaaauaa

SEQ ID NO: 1182907 - RNA, 19 nt, Artificial Sequence
  Description of Artificial Sequence: Synthetic oligonucleotide
  Antisense strand to SEQ ID NO: 1182906
uuauuuacugcauuuggcu

SEQ ID NO: 1182908 - RNA, 19 nt, Artificial Sequence
  Description of Artificial Sequence: Synthetic oligonucleotide
  Sense strand starting at position 807 of SEQ ID NO: 916774
gauggcucuggcuggagaa

SEQ ID NO: 1182909 - RNA, 19 nt, Artificial Sequence
  Description of Artificial Sequence: Synthetic oligonucleotide
  Antisense strand to SEQ ID NO: 1182908
uucuccagccagagccauc

SEQ ID NO: 1182910 - RNA, 19 nt, Artificial Sequence
  Description of Artificial Sequence: Synthetic oligonucleotide
  Sense strand starting at position 808 of SEQ ID NO: 916774
auggcucuggcuggagaau

SEQ ID NO: 1182911 - RNA, 19 nt, Artificial Sequence
  Description of Artificial Sequence: Synthetic oligonucleotide
  Antisense strand to SEQ ID NO: 1182910
auucuccagccagagccau

SEQ ID NO: 1182912 - RNA, 19 nt, Artificial Sequence
  Description of Artificial Sequence: Synthetic oligonucleotide
  Sense strand starting at position 809 of SEQ ID NO: 916774
uggcucuggcuggagaauu

SEQ ID NO: 1182913 - RNA, 19 nt, Artificial Sequence
  Description of Artificial Sequence: Synthetic oligonucleotide
  Antisense strand to SEQ ID NO: 1182912
aauucuccagccagagcca

SEQ ID NO: 1182914 - RNA, 19 nt, Artificial Sequence
  Description of Artificial Sequence: Synthetic oligonucleotide
  Sense strand starting at position 860 of SEQ ID NO: 916774
aggcauggguguagaugau

SEQ ID NO: 1182915 - RNA, 19 nt, Artificial Sequence
  Description of Artificial Sequence: Synthetic oligonucleotide
  Antisense strand to SEQ ID NO: 1182914
aucaucuacacccaugccu

SEQ ID NO: 1182916 - RNA, 19 nt, Artificial Sequence
  Description of Artificial Sequence: Synthetic oligonucleotide
  Sense strand starting at position 910 of SEQ ID NO: 916774
agaagacauuaagaacaaa

SEQ ID NO: 1182917 - RNA, 19 nt, Artificial Sequence
  Description of Artificial Sequence: Synthetic oligonucleotide
  Antisense strand to SEQ ID NO: 1182916
uuuguucuuaaugucuucu

SEQ ID NO: 1182918 - RNA, 19 nt, Artificial Sequence
  Description of Artificial Sequence: Synthetic oligonucleotide
  Sense strand starting at position 1030 of SEQ ID NO: 916774
agugaaguuauugaugcua

SEQ ID NO: 1182919 - RNA, 19 nt, Artificial Sequence
  Description of Artificial Sequence: Synthetic oligonucleotide
  Antisense strand to SEQ ID NO: 1182918
uagcaucaauaacuucacu

SEQ ID NO: 1182920 - RNA, 19 nt, Artificial Sequence
  Description of Artificial Sequence: Synthetic oligonucleotide
  Sense strand starting at position 1202 of SEQ ID NO: 916774
cuguuaguucuggagacug

SEQ ID NO: 1182921 - RNA, 19 nt, Artificial Sequence
  Description of Artificial Sequence: Synthetic oligonucleotide
  Antisense strand to SEQ ID NO: 1182920
cagucuccagaacuaacag

SEQ ID NO: 1182922 - RNA, 19 nt, Artificial Sequence
  Description of Artificial Sequence: Synthetic oligonucleotide
  Sense strand starting at position 1204 of SEQ ID NO: 916774
guuaguucuggagacuggu

SEQ ID NO: 1182923 - RNA, 19 nt, Artificial Sequence
  Description of Artificial Sequence: Synthetic oligonucleotide
  Antisense strand to SEQ ID NO: 1182922
accagucuccagaacuaac

SEQ ID NO: 1182924 - RNA, 19 nt, Artificial Sequence
  Description of Artificial Sequence: Synthetic oligonucleotide
  Sense strand starting at position 1359 of SEQ ID NO: 916774
gggaaauguaccuggcauu

SEQ ID NO: 1182925 - RNA, 19 nt, Artificial Sequence
  Description of Artificial Sequence: Synthetic oligonucleotide
  Antisense strand to SEQ ID NO: 1182924
aaugccagguacauuuccc

SEQ ID NO: 1182926 - RNA, 19 nt, Artificial Sequence
  Description of Artificial Sequence: Synthetic oligonucleotide
  Sense strand starting at position 1614 of SEQ ID NO: 916774
cccucagggcugugaguuu

SEQ ID NO: 1182927 - RNA, 19 nt, Artificial Sequence
  Description of Artificial Sequence: Synthetic oligonucleotide
  Antisense strand to SEQ ID NO: 1182926
aaacucacagcccugaggg

SEQ ID NO: 1182928 - RNA, 19 nt, Artificial Sequence
  Description of Artificial Sequence: Synthetic oligonucleotide
  Sense strand starting at position 1623 of SEQ ID NO: 916774
cugugaguuucccuucuuu

SEQ ID NO: 1182929 - RNA, 19 nt, Artificial Sequence
  Description of Artificial Sequence: Synthetic oligonucleotide
  Antisense strand to SEQ ID NO: 1182928
aaagaagggaaacucacag

SEQ ID NO: 1182930 - RNA, 19 nt, Artificial Sequence
  Description of Artificial Sequence: Synthetic oligonucleotide
  Sense strand starting at position 1670 of SEQ ID NO: 916774
cuaccaaugccugguuaga

SEQ ID NO: 1182931 - RNA, 19 nt, Artificial Sequence
  Description of Artificial Sequence: Synthetic oligonucleotide
  Antisense strand to SEQ ID NO: 1182930
ucuaaccaggcauugguag

SEQ ID NO: 1182932 - RNA, 19 nt, Artificial Sequence
  Description of Artificial Sequence: Synthetic oligonucleotide
  Sense strand starting at position 1672 of SEQ ID NO: 916774
accaaugccugguuagaaa

SEQ ID NO: 1182933 - RNA, 19 nt, Artificial Sequence
  Description of Artificial Sequence: Synthetic oligonucleotide
  Antisense strand to SEQ ID NO: 1182932
uuucuaaccaggcauuggu

SEQ ID NO: 1182934 - RNA, 19 nt, Artificial Sequence
  Description of Artificial Sequence: Synthetic oligonucleotide
  Sense strand starting at position 1854 of SEQ ID NO: 916774
ccauguucuucugcgagac

SEQ ID NO: 1182935 - RNA, 19 nt, Artificial Sequence
  Description of Artificial Sequence: Synthetic oligonucleotide
  Antisense strand to SEQ ID NO: 1182934
gucucgcagaagaacaugg

SEQ ID NO: 1182936 - RNA, 19 nt, Artificial Sequence
  Description of Artificial Sequence: Synthetic oligonucleotide
  Sense strand starting at position 1855 of SEQ ID NO: 916774
cauguucuucugcgagaca

SEQ ID NO: 1182937 - RNA, 19 nt, Artificial Sequence
  Description of Artificial Sequence: Synthetic oligonucleotide
  Antisense strand to SEQ ID NO: 1182936
ugucucgcagaagaacaug

SEQ ID NO: 1182938 - RNA, 19 nt, Artificial Sequence
  Description of Artificial Sequence: Synthetic oligonucleotide
  Sense strand starting at position 1858 of SEQ ID NO: 916774
guucuucugcgagacaaag

SEQ ID NO: 1182939 - RNA, 19 nt, Artificial Sequence
  Description of Artificial Sequence: Synthetic oligonucleotide
  Antisense strand to SEQ ID NO: 1182938
cuuugucucgcagaagaac

SEQ ID NO: 1182940 - RNA, 19 nt, Artificial Sequence
  Description of Artificial Sequence: Synthetic oligonucleotide
  Sense strand starting at position 1898 of SEQ ID NO: 916774
ggaggcauuguguggauga

SEQ ID NO: 1182941 - RNA, 19 nt, Artificial Sequence
  Description of Artificial Sequence: Synthetic oligonucleotide
  Antisense strand to SEQ ID NO: 1182940
ucauccacacaaugccucc

SEQ ID NO: 1182942 - RNA, 19 nt, Artificial Sequence
  Description of Artificial Sequence: Synthetic oligonucleotide
  Sense strand starting at position 1900 of SEQ ID NO: 916774
aggcauuguguggaugaag

SEQ ID NO: 1182943 - RNA, 19 nt, Artificial Sequence
  Description of Artificial Sequence: Synthetic oligonucleotide
  Antisense strand to SEQ ID NO: 1182942
cuucauccacacaaugccu

SEQ ID NO: 1182944 - RNA, 19 nt, Artificial Sequence
  Description of Artificial Sequence: Synthetic oligonucleotide
  Sense strand starting at position 1903 of SEQ ID NO: 916774
cauuguguggaugaagguu

SEQ ID NO: 1182945 - RNA, 19 nt, Artificial Sequence
  Description of Artificial Sequence: Synthetic oligonucleotide
  Antisense strand to SEQ ID NO: 1182944
aaccuucauccacacaaug

SEQ ID NO: 1182946 - RNA, 19 nt, Artificial Sequence
  Description of Artificial Sequence: Synthetic oligonucleotide
  Sense strand starting at position 1911 of SEQ ID NO: 916774
ggaugaagguuucaggaga

SEQ ID NO: 1182947 - RNA, 19 nt, Artificial Sequence
  Description of Artificial Sequence: Synthetic oligonucleotide
  Antisense strand to SEQ ID NO: 1182946
ucuccugaaaccuucaucc

SEQ ID NO: 1182948 - RNA, 19 nt, Artificial Sequence
  Description of Artificial Sequence: Synthetic oligonucleotide
  Sense strand starting at position 1969 of SEQ ID NO: 916774
gcaggugaggcugagagau

SEQ ID NO: 1182949 - RNA, 19 nt, Artificial Sequence
  Description of Artificial Sequence: Synthetic oligonucleotide
  Antisense strand to SEQ ID NO: 1182948
aucucucagccucaccugc

SEQ ID NO: 1182950 - RNA, 19 nt, Artificial Sequence
  Description of Artificial Sequence: Synthetic oligonucleotide
  Sense strand starting at position 2200 of SEQ ID NO: 916774
gcaggauccuuccugagga

SEQ ID NO: 1182951 - RNA, 19 nt, Artificial Sequence
  Description of Artificial Sequence: Synthetic oligonucleotide
  Antisense strand to SEQ ID NO: 1182950
uccucaggaaggauccugc

SEQ ID NO: 1182952 - RNA, 19 nt, Artificial Sequence
  Description of Artificial Sequence: Synthetic oligonucleotide
  Sense strand starting at position 2335 of SEQ ID NO: 916774
gcagucuuuccugggagac

SEQ ID NO: 1182953 - RNA, 19 nt, Artificial Sequence
  Description of Artificial Sequence: Synthetic oligonucleotide
  Antisense strand to SEQ ID NO: 1182952
gucucccaggaaagacugc

SEQ ID NO: 1182954 - RNA, 19 nt, Artificial Sequence
  Description of Artificial Sequence: Synthetic oligonucleotide
  Sense strand starting at position 2336 of SEQ ID NO: 916774
cagucuuuccugggagaca

SEQ ID NO: 1182955 - RNA, 19 nt, Artificial Sequence
  Description of Artificial Sequence: Synthetic oligonucleotide
  Antisense strand to SEQ ID NO: 1182954
ugucucccaggaaagacug

SEQ ID NO: 1182956 - RNA, 19 nt, Artificial Sequence
  Description of Artificial Sequence: Synthetic oligonucleotide
  Sense strand starting at position 2369 of SEQ ID NO: 916774
ggcugugugagguggagau

SEQ ID NO: 1182957 - RNA, 19 nt, Artificial Sequence
  Description of Artificial Sequence: Synthetic oligonucleotide
  Antisense strand to SEQ ID NO: 1182956
aucuccaccucacacagcc

SEQ ID NO: 1182958 - RNA, 19 nt, Artificial Sequence
  Description of Artificial Sequence: Synthetic oligonucleotide
  Sense strand starting at position 2382 of SEQ ID NO: 916774
ggagaugaguuccaacaau

SEQ ID NO: 1182959 - RNA, 19 nt, Artificial Sequence
  Description of Artificial Sequence: Synthetic oligonucleotide
  Antisense strand to SEQ ID NO: 1182958
auuguuggaacucaucucc

SEQ ID NO: 1182960 - RNA, 19 nt, Artificial Sequence
  Description of Artificial Sequence: Synthetic oligonucleotide
  Sense strand starting at position 2396 of SEQ ID NO: 916774
acaauauccugagauccug

SEQ ID NO: 1182961 - RNA, 19 nt, Artificial Sequence
  Description of Artificial Sequence: Synthetic oligonucleotide
  Antisense strand to SEQ ID NO: 1182960
caggaucucaggauauugu

SEQ ID NO: 1182962 - RNA, 19 nt, Artificial Sequence
  Description of Artificial Sequence: Synthetic oligonucleotide
  Sense strand starting at position 2418 of SEQ ID NO: 916774
cugagugauguuggaagau

SEQ ID NO: 1182963 - RNA, 19 nt, Artificial Sequence
  Description of Artificial Sequence: Synthetic oligonucleotide
  Antisense strand to SEQ ID NO: 1182962
aucuuccaacaucacucag

SEQ ID NO: 1182964 - RNA, 19 nt, Artificial Sequence
  Description of Artificial Sequence: Synthetic oligonucleotide
  Sense strand starting at position 2547 of SEQ ID NO: 916774
uccagacucuugguccuaa

SEQ ID NO: 1182965 - RNA, 19 nt, Artificial Sequence
  Description of Artificial Sequence: Synthetic oligonucleotide
  Antisense strand to SEQ ID NO: 1182964
uuaggaccaagagucugga

SEQ ID NO: 1182966 - RNA, 19 nt, Artificial Sequence
  Description of Artificial Sequence: Synthetic oligonucleotide
  Sense strand starting at position 2548 of SEQ ID NO: 916774
ccagacucuugguccuaaa

SEQ ID NO: 1182967 - RNA, 19 nt, Artificial Sequence
  Description of Artificial Sequence: Synthetic oligonucleotide
  Antisense strand to SEQ ID NO: 1182966
uuuaggaccaagagucugg

SEQ ID NO: 1182968 - RNA, 19 nt, Artificial Sequence
  Description of Artificial Sequence: Synthetic oligonucleotide
  Sense strand starting at position 2605 of SEQ ID NO: 916774
guucaaaguccggaacaga

SEQ ID NO: 1182969 - RNA, 19 nt, Artificial Sequence
  Description of Artificial Sequence: Synthetic oligonucleotide
  Antisense strand to SEQ ID NO: 1182968
ucuguuccggacuuugaac

SEQ ID NO: 1182970 - RNA, 19 nt, Artificial Sequence
  Description of Artificial Sequence: Synthetic oligonucleotide
  Sense strand starting at position 2633 of SEQ ID NO: 916774
aggaguuuguuggcuauuc

SEQ ID NO: 1182971 - RNA, 19 nt, Artificial Sequence
  Description of Artificial Sequence: Synthetic oligonucleotide
  Antisense strand to SEQ ID NO: 1182970
gaauagccaacaaacuccu

SEQ ID NO: 1182972 - RNA, 19 nt, Artificial Sequence
  Description of Artificial Sequence: Synthetic oligonucleotide
  Sense strand starting at position 2634 of SEQ ID NO: 916774
ggaguuuguuggcuauucu

SEQ ID NO: 1182973 - RNA, 19 nt, Artificial Sequence
  Description of Artificial Sequence: Synthetic oligonucleotide
  Antisense strand to SEQ ID NO: 1182972
agaauagccaacaaacucc

SEQ ID NO: 1182974 - RNA, 19 nt, Artificial Sequence
  Description of Artificial Sequence: Synthetic oligonucleotide
  Sense strand starting at position 2642 of SEQ ID NO: 916774
uuggcuauucuggagaauu

SEQ ID NO: 1182975 - RNA, 19 nt, Artificial Sequence
  Description of Artificial Sequence: Synthetic oligonucleotide
  Antisense strand to SEQ ID NO: 1182974
aauucuccagaauagccaa

SEQ ID NO: 1182976 - RNA, 19 nt, Artificial Sequence
  Description of Artificial Sequence: Synthetic oligonucleotide
  Sense strand starting at position 2698 of SEQ ID NO: 916774
cccucugagucaucgauga

SEQ ID NO: 1182977 - RNA, 19 nt, Artificial Sequence
  Description of Artificial Sequence: Synthetic oligonucleotide
  Antisense strand to SEQ ID NO: 1182976
ucaucgaugacucagaggg

SEQ ID NO: 1182978 - RNA, 19 nt, Artificial Sequence
  Description of Artificial Sequence: Synthetic oligonucleotide
  Sense strand starting at position 2700 of SEQ ID NO: 916774
cucugagucaucgaugaga

SEQ ID NO: 1182979 - RNA, 19 nt, Artificial Sequence
  Description of Artificial Sequence: Synthetic oligonucleotide
  Antisense strand to SEQ ID NO: 1182978
ucucaucgaugacucagag

SEQ ID NO: 1182980 - RNA, 19 nt, Artificial Sequence
  Description of Artificial Sequence: Synthetic oligonucleotide
  Sense strand starting at position 2702 of SEQ ID NO: 916774
cugagucaucgaugagacc

SEQ ID NO: 1182981 - RNA, 19 nt, Artificial Sequence
  Description of Artificial Sequence: Synthetic oligonucleotide
  Antisense strand to SEQ ID NO: 1182980
ggucucaucgaugacucag

SEQ ID NO: 1182982 - RNA, 19 nt, Artificial Sequence
  Description of Artificial Sequence: Synthetic oligonucleotide
  Sense strand starting at position 2751 of SEQ ID NO: 916774
ccaugcuuuccagauguau

SEQ ID NO: 1182983 - RNA, 19 nt, Artificial Sequence
  Description of Artificial Sequence: Synthetic oligonucleotide
  Antisense strand to SEQ ID NO: 1182982
auacaucuggaaagcaugg

SEQ ID NO: 1182984 - RNA, 19 nt, Artificial Sequence
  Description of Artificial Sequence: Synthetic oligonucleotide
  Sense strand starting at position 2764 of SEQ ID NO: 916774
auguauuucugugaaggug

SEQ ID NO: 1182985 - RNA, 19 nt, Artificial Sequence
  Description of Artificial Sequence: Synthetic oligonucleotide
  Antisense strand to SEQ ID NO: 1182984
caccuucacagaaauacau

SEQ ID NO: 1182986 - RNA, 19 nt, Artificial Sequence
  Description of Artificial Sequence: Synthetic oligonucleotide
  Sense strand starting at position 2784 of SEQ ID NO: 916774
gguggaggcgccuaaauaa

SEQ ID NO: 1182987 - RNA, 19 nt, Artificial Sequence
  Description of Artificial Sequence: Synthetic oligonucleotide
  Antisense strand to SEQ ID NO: 1182986
uuauuuaggcgccuccacc

SEQ ID NO: 1182988 - RNA, 19 nt, Artificial Sequence
  Description of Artificial Sequence: Synthetic oligonucleotide
  Sense strand starting at position 86 of SEQ ID NO: 916775
ggcacuggucuugaaacau

SEQ ID NO: 1182989 - RNA, 19 nt, Artificial Sequence
  Description of Artificial Sequence: Synthetic oligonucleotide
  Antisense strand to SEQ ID NO: 1182988
auguuucaagaccagugcc

SEQ ID NO: 1182990 - RNA, 19 nt, Artificial Sequence
  Description of Artificial Sequence: Synthetic oligonucleotide
  Sense strand starting at position 97 of SEQ ID NO: 916775
ugaaacauccugcaucagu

SEQ ID NO: 1182991 - RNA, 19 nt, Artificial Sequence
  Description of Artificial Sequence: Synthetic oligonucleotide
  Antisense strand to SEQ ID NO: 1182990
acugaugcaggauguuuca

SEQ ID NO: 1182992 - RNA, 19 nt, Artificial Sequence
  Description of Artificial Sequence: Synthetic oligonucleotide
  Sense strand starting at position 416 of SEQ ID NO: 916775
ggcaguuguugaucuggaa

SEQ ID NO: 1182993 - RNA, 19 nt, Artificial Sequence
  Description of Artificial Sequence: Synthetic oligonucleotide
  Antisense strand to SEQ ID NO: 1182992
uuccagaucaacaacugcc

SEQ ID NO: 1182994 - RNA, 19 nt, Artificial Sequence
  Description of Artificial Sequence: Synthetic oligonucleotide
  Sense strand starting at position 420 of SEQ ID NO: 916775
guuguugaucuggaagggu

SEQ ID NO: 1182995 - RNA, 19 nt, Artificial Sequence
  Description of Artificial Sequence: Synthetic oligonucleotide
  Antisense strand to SEQ ID NO: 1182994
acccuuccagaucaacaac

SEQ ID NO: 1182996 - RNA, 19 nt, Artificial Sequence
  Description of Artificial Sequence: Synthetic oligonucleotide
  Sense strand starting at position 552 of SEQ ID NO: 916775
uacagagacguuggcaaau

SEQ ID NO: 1182997 - RNA, 19 nt, Artificial Sequence
  Description of Artificial Sequence: Synthetic oligonucleotide
  Antisense strand to SEQ ID NO: 1182996
auuugccaacgucucugua

SEQ ID NO: 1182998 - RNA, 19 nt, Artificial Sequence
  Description of Artificial Sequence: Synthetic oligonucleotide
  Sense strand starting at position 742 of SEQ ID NO: 916775
cagagaauuuaaggugacu

SEQ ID NO: 1182999 - RNA, 19 nt, Artificial Sequence
  Description of Artificial Sequence: Synthetic oligonucleotide
  Antisense strand to SEQ ID NO: 1182998
agucaccuuaaauucucug

SEQ ID NO: 1183000 - RNA, 19 nt, Artificial Sequence
  Description of Artificial Sequence: Synthetic oligonucleotide
  Sense strand starting at position 806 of SEQ ID NO: 916775
aaaggacuuauguguggau

SEQ ID NO: 1183001 - RNA, 19 nt, Artificial Sequence
  Description of Artificial Sequence: Synthetic oligonucleotide
  Antisense strand to SEQ ID NO: 1183000
auccacacauaaguccuuu

SEQ ID NO: 1183002 - RNA, 19 nt, Artificial Sequence
  Description of Artificial Sequence: Synthetic oligonucleotide
  Sense strand starting at position 808 of SEQ ID NO: 916775
aggacuuauguguggauga

SEQ ID NO: 1183003 - RNA, 19 nt, Artificial Sequence
  Description of Artificial Sequence: Synthetic oligonucleotide
  Antisense strand to SEQ ID NO: 1183002
ucauccacacauaaguccu

SEQ ID NO: 1183004 - RNA, 19 nt, Artificial Sequence
  Description of Artificial Sequence: Synthetic oligonucleotide
  Sense strand starting at position 810 of SEQ ID NO: 916775
gacuuauguguggaugaca

SEQ ID NO: 1183005 - RNA, 19 nt, Artificial Sequence
  Description of Artificial Sequence: Synthetic oligonucleotide
  Antisense strand to SEQ ID NO: 1183004
ugucauccacacauaaguc

SEQ ID NO: 1183006 - RNA, 19 nt, Artificial Sequence
  Description of Artificial Sequence: Synthetic oligonucleotide
  Sense strand starting at position 813 of SEQ ID NO: 916775
uuauguguggaugacaauu

SEQ ID NO: 1183007 - RNA, 19 nt, Artificial Sequence
  Description of Artificial Sequence: Synthetic oligonucleotide
  Antisense strand to SEQ ID NO: 1183006
aauugucauccacacauaa

SEQ ID NO: 1183008 - RNA, 19 nt, Artificial Sequence
  Description of Artificial Sequence: Synthetic oligonucleotide
  Sense strand starting at position 946 of SEQ ID NO: 916775
gaugaauuaguguagugaa

SEQ ID NO: 1183009 - RNA, 19 nt, Artificial Sequence
  Description of Artificial Sequence: Synthetic oligonucleotide
  Antisense strand to SEQ ID NO: 1183008
uucacuacacuaauucauc

SEQ ID NO: 1183010 - RNA, 19 nt, Artificial Sequence
  Description of Artificial Sequence: Synthetic oligonucleotide
  Sense strand starting at position 1013 of SEQ ID NO: 916775
agcaguccuuaagcugaua

SEQ ID NO: 1183011 - RNA, 19 nt, Artificial Sequence
  Description of Artificial Sequence: Synthetic oligonucleotide
  Antisense strand to SEQ ID NO: 1183010
uaucagcuuaaggacugcu

SEQ ID NO: 1183012 - RNA, 19 nt, Artificial Sequence
  Description of Artificial Sequence: Synthetic oligonucleotide
  Sense strand starting at position 1024 of SEQ ID NO: 916775
agcugauacucuccucuga

SEQ ID NO: 1183013 - RNA, 19 nt, Artificial Sequence
  Description of Artificial Sequence: Synthetic oligonucleotide
  Antisense strand to SEQ ID NO: 1183012
ucagaggagaguaucagcu

SEQ ID NO: 1183014 - RNA, 19 nt, Artificial Sequence
  Description of Artificial Sequence: Synthetic oligonucleotide
  Sense strand starting at position 1026 of SEQ ID NO: 916775
cugauacucuccucugaag

SEQ ID NO: 1183015 - RNA, 19 nt, Artificial Sequence
  Description of Artificial Sequence: Synthetic oligonucleotide
  Antisense strand to SEQ ID NO: 1183014
cuucagaggagaguaucag

SEQ ID NO: 1183016 - RNA, 19 nt, Artificial Sequence
  Description of Artificial Sequence: Synthetic oligonucleotide
  Sense strand starting at position 1073 of SEQ ID NO: 916775
gcugaugggcccuagcaaa

SEQ ID NO: 1183017 - RNA, 19 nt, Artificial Sequence
  Description of Artificial Sequence: Synthetic oligonucleotide
  Antisense strand to SEQ ID NO: 1183016
uuugcuagggcccaucagc

SEQ ID NO: 1183018 - RNA, 19 nt, Artificial Sequence
  Description of Artificial Sequence: Synthetic oligonucleotide
  Sense strand starting at position 1096 of SEQ ID NO: 916775
agguaaagugcugggaaca

SEQ ID NO: 1183019 - RNA, 19 nt, Artificial Sequence
  Description of Artificial Sequence: Synthetic oligonucleotide
  Antisense strand to SEQ ID NO: 1183018
uguucccagcacuuuaccu

SEQ ID NO: 1183020 - RNA, 19 nt, Artificial Sequence
  Description of Artificial Sequence: Synthetic oligonucleotide
  Sense strand starting at position 1097 of SEQ ID NO: 916775
gguaaagugcugggaacau

SEQ ID NO: 1183021 - RNA, 19 nt, Artificial Sequence
  Description of Artificial Sequence: Synthetic oligonucleotide
  Antisense strand to SEQ ID NO: 1183020
auguucccagcacuuuacc

SEQ ID NO: 1183022 - RNA, 19 nt, Artificial Sequence
  Description of Artificial Sequence: Synthetic oligonucleotide
  Sense strand starting at position 1186 of SEQ ID NO: 916775
ccagcaagucuccagaucu

SEQ ID NO: 1183023 - RNA, 19 nt, Artificial Sequence
  Description of Artificial Sequence: Synthetic oligonucleotide
  Antisense strand to SEQ ID NO: 1183022
agaucuggagacuugcugg

SEQ ID NO: 1183024 - RNA, 19 nt, Artificial Sequence
  Description of Artificial Sequence: Synthetic oligonucleotide
  Sense strand starting at position 1213 of SEQ ID NO: 916775
ggcucuuagcaucaaacaa

SEQ ID NO: 1183025 - RNA, 19 nt, Artificial Sequence
  Description of Artificial Sequence: Synthetic oligonucleotide
  Antisense strand to SEQ ID NO: 1183024
uuguuugaugcuaagagcc

SEQ ID NO: 1183026 - RNA, 19 nt, Artificial Sequence
  Description of Artificial Sequence: Synthetic oligonucleotide
  Sense strand starting at position 1235 of SEQ ID NO: 916775
augacuucugcuuagacag

SEQ ID NO: 1183027 - RNA, 19 nt, Artificial Sequence
  Description of Artificial Sequence: Synthetic oligonucleotide
  Antisense strand to SEQ ID NO: 1183026
cugucuaagcagaagucau

SEQ ID NO: 1183028 - RNA, 19 nt, Artificial Sequence
  Description of Artificial Sequence: Synthetic oligonucleotide
  Sense strand starting at position 1334 of SEQ ID NO: 916775
gggagagguuaaggauuga

SEQ ID NO: 1183029 - RNA, 19 nt, Artificial Sequence
  Description of Artificial Sequence: Synthetic oligonucleotide
  Antisense strand to SEQ ID NO: 1183028
ucaauccuuaaccucuccc

SEQ ID NO: 1183030 - RNA, 19 nt, Artificial Sequence
  Description of Artificial Sequence: Synthetic oligonucleotide
  Sense strand starting at position 1370 of SEQ ID NO: 916775
gcagccuguuaagugagaa

SEQ ID NO: 1183031 - RNA, 19 nt, Artificial Sequence
  Description of Artificial Sequence: Synthetic oligonucleotide
  Antisense strand to SEQ ID NO: 1183030
uucucacuuaacaggcugc

SEQ ID NO: 1183032 - RNA, 19 nt, Artificial Sequence
  Description of Artificial Sequence: Synthetic oligonucleotide
  Sense strand starting at position 1374 of SEQ ID NO: 916775
ccuguuaagugagaaauau

SEQ ID NO: 1183033 - RNA, 19 nt, Artificial Sequence
  Description of Artificial Sequence: Synthetic oligonucleotide
  Antisense strand to SEQ ID NO: 1183032
auauuucucacuuaacagg

SEQ ID NO: 1183034 - RNA, 19 nt, Artificial Sequence
  Description of Artificial Sequence: Synthetic oligonucleotide
  Sense strand starting at position 1383 of SEQ ID NO: 916775
ugagaaauauuagaaagcu

SEQ ID NO: 1183035 - RNA, 19 nt, Artificial Sequence
  Description of Artificial Sequence: Synthetic oligonucleotide
  Antisense strand to SEQ ID NO: 1183034
agcuuucuaauauuucuca

SEQ ID NO: 1183036 - RNA, 19 nt, Artificial Sequence
  Description of Artificial Sequence: Synthetic oligonucleotide
  Sense strand starting at position 1429 of SEQ ID NO: 916775
guaggaaucuucccaggga

SEQ ID NO: 1183037 - RNA, 19 nt, Artificial Sequence
  Description of Artificial Sequence: Synthetic oligonucleotide
  Antisense strand to SEQ ID NO: 1183036
ucccugggaagauuccuac

SEQ ID NO: 1183038 - RNA, 19 nt, Artificial Sequence
  Description of Artificial Sequence: Synthetic oligonucleotide
  Sense strand starting at position 1432 of SEQ ID NO: 916775
ggaaucuucccagggagca

SEQ ID NO: 1183039 - RNA, 19 nt, Artificial Sequence
  Description of Artificial Sequence: Synthetic oligonucleotide
  Antisense strand to SEQ ID NO: 1183038
ugcucccugggaagauucc

SEQ ID NO: 1183040 - RNA, 19 nt, Artificial Sequence
  Description of Artificial Sequence: Synthetic oligonucleotide
  Sense strand starting at position 1496 of SEQ ID NO: 916775
ugacaaaccugggugguua

SEQ ID NO: 1183041 - RNA, 19 nt, Artificial Sequence
  Description of Artificial Sequence: Synthetic oligonucleotide
  Antisense strand to SEQ ID NO: 1183040
uaaccacccagguuuguca

SEQ ID NO: 1183042 - RNA, 19 nt, Artificial Sequence
  Description of Artificial Sequence: Synthetic oligonucleotide
  Sense strand starting at position 1562 of SEQ ID NO: 916775
gcucucugucuugguaaca

SEQ ID NO: 1183043 - RNA, 19 nt, Artificial Sequence
  Description of Artificial Sequence: Synthetic oligonucleotide
  Antisense strand to SEQ ID NO: 1183042
uguuaccaagacagagagc

SEQ ID NO: 1183044 - RNA, 19 nt, Artificial Sequence
  Description of Artificial Sequence: Synthetic oligonucleotide
  Sense strand starting at position 1563 of SEQ ID NO: 916775
cucucugucuugguaacau

SEQ ID NO: 1183045 - RNA, 19 nt, Artificial Sequence
  Description of Artificial Sequence: Synthetic oligonucleotide
  Antisense strand to SEQ ID NO: 1183044
auguuaccaagacagagag

SEQ ID NO: 1183046 - RNA, 19 nt, Artificial Sequence
  Description of Artificial Sequence: Synthetic oligonucleotide
  Sense strand starting at position 1631 of SEQ ID NO: 916775
ggcuccuuucuccgucaga

SEQ ID NO: 1183047 - RNA, 19 nt, Artificial Sequence
  Description of Artificial Sequence: Synthetic oligonucleotide
  Antisense strand to SEQ ID NO: 1183046
ucugacggagaaaggagcc

SEQ ID NO: 1183048 - RNA, 19 nt, Artificial Sequence
  Description of Artificial Sequence: Synthetic oligonucleotide
  Sense strand starting at position 1634 of SEQ ID NO: 916775
uccuuucuccgucagacau

SEQ ID NO: 1183049 - RNA, 19 nt, Artificial Sequence
  Description of Artificial Sequence: Synthetic oligonucleotide
  Antisense strand to SEQ ID NO: 1183048
augucugacggagaaagga

SEQ ID NO: 1183050 - RNA, 19 nt, Artificial Sequence
  Description of Artificial Sequence: Synthetic oligonucleotide
  Sense strand starting at position 1714 of SEQ ID NO: 916775
agucacagcccgugaugaa

SEQ ID NO: 1183051 - RNA, 19 nt, Artificial Sequence
  Description of Artificial Sequence: Synthetic oligonucleotide
  Antisense strand to SEQ ID NO: 1183050
uucaucacgggcugugacu

SEQ ID NO: 1183052 - RNA, 19 nt, Artificial Sequence
  Description of Artificial Sequence: Synthetic oligonucleotide
  Sense strand starting at position 1952 of SEQ ID NO: 916775
agggaauccucacuuuccu

SEQ ID NO: 1183053 - RNA, 19 nt, Artificial Sequence
  Description of Artificial Sequence: Synthetic oligonucleotide
  Antisense strand to SEQ ID NO: 1183052
aggaaagugaggauucccu

SEQ ID NO: 1183054 - RNA, 19 nt, Artificial Sequence
  Description of Artificial Sequence: Synthetic oligonucleotide
  Sense strand starting at position 2355 of SEQ ID NO: 916775
aggccuuauuggguagcua

SEQ ID NO: 1183055 - RNA, 19 nt, Artificial Sequence
  Description of Artificial Sequence: Synthetic oligonucleotide
  Antisense strand to SEQ ID NO: 1183054
uagcuacccaauaaggccu

SEQ ID NO: 1183056 - RNA, 19 nt, Artificial Sequence
  Description of Artificial Sequence: Synthetic oligonucleotide
  Sense strand starting at position 2386 of SEQ ID NO: 916775
aggcacauuagguggaaau

SEQ ID NO: 1183057 - RNA, 19 nt, Artificial Sequence
  Description of Artificial Sequence: Synthetic oligonucleotide
  Antisense strand to SEQ ID NO: 1183056
auuuccaccuaaugugccu

SEQ ID NO: 1183058 - RNA, 19 nt, Artificial Sequence
  Description of Artificial Sequence: Synthetic oligonucleotide
  Sense strand starting at position 2415 of SEQ ID NO: 916775
gccugaguuuccucauccu

SEQ ID NO: 1183059 - RNA, 19 nt, Artificial Sequence
  Description of Artificial Sequence: Synthetic oligonucleotide
  Antisense strand to SEQ ID NO: 1183058
aggaugaggaaacucaggc

SEQ ID NO: 1183060 - RNA, 19 nt, Artificial Sequence
  Description of Artificial Sequence: Synthetic oligonucleotide
  Sense strand starting at position 2477 of SEQ ID NO: 916775
cggucaggcugucuaggau

SEQ ID NO: 1183061 - RNA, 19 nt, Artificial Sequence
  Description of Artificial Sequence: Synthetic oligonucleotide
  Antisense strand to SEQ ID NO: 1183060
auccuagacagccugaccg

SEQ ID NO: 1183062 - RNA, 19 nt, Artificial Sequence
  Description of Artificial Sequence: Synthetic oligonucleotide
  Sense strand starting at position 3148 of SEQ ID NO: 916775
gggagcagugcauaacuga

SEQ ID NO: 1183063 - RNA, 19 nt, Artificial Sequence
  Description of Artificial Sequence: Synthetic oligonucleotide
  Antisense strand to SEQ ID NO: 1183062
ucaguuaugcacugcuccc

SEQ ID NO: 1183064 - RNA, 19 nt, Artificial Sequence
  Description of Artificial Sequence: Synthetic oligonucleotide
  Sense strand starting at position 3243 of SEQ ID NO: 916775
caugguguuugagcucuua

SEQ ID NO: 1183065 - RNA, 19 nt, Artificial Sequence
  Description of Artificial Sequence: Synthetic oligonucleotide
  Antisense strand to SEQ ID NO: 1183064
uaagagcucaaacaccaug

SEQ ID NO: 1183066 - RNA, 19 nt, Artificial Sequence
  Description of Artificial Sequence: Synthetic oligonucleotide
  Sense strand starting at position 3512 of SEQ ID NO: 916775
aggaaacuguuugaaggaa

SEQ ID NO: 1183067 - RNA, 19 nt, Artificial Sequence
  Description of Artificial Sequence: Synthetic oligonucleotide
  Antisense strand to SEQ ID NO: 1183066
uuccuucaaacaguuuccu

SEQ ID NO: 1183068 - RNA, 19 nt, Artificial Sequence
  Description of Artificial Sequence: Synthetic oligonucleotide
  Sense strand starting at position 238 of SEQ ID NO: 916776
gaaguaaucuacuuauggu

SEQ ID NO: 1183069 - RNA, 19 nt, Artificial Sequence
  Description of Artificial Sequence: Synthetic oligonucleotide
  Antisense strand to SEQ ID NO: 1183068
accauaaguagauuacuuc

SEQ ID NO: 1183070 - RNA, 19 nt, Artificial Sequence
  Description of Artificial Sequence: Synthetic oligonucleotide
  Sense strand starting at position 254 of SEQ ID NO: 916776
ggucacaaagcuuacauaa

SEQ ID NO: 1183071 - RNA, 19 nt, Artificial Sequence
  Description of Artificial Sequence: Synthetic oligonucleotide
  Antisense strand to SEQ ID NO: 1183070
uuauguaagcuuugugacc

SEQ ID NO: 1183072 - RNA, 19 nt, Artificial Sequence
  Description of Artificial Sequence: Synthetic oligonucleotide
  Sense strand starting at position 329 of SEQ ID NO: 916776
uccaaugugcuguaucuua

SEQ ID NO: 1183073 - RNA, 19 nt, Artificial Sequence
  Description of Artificial Sequence: Synthetic oligonucleotide
  Antisense strand to SEQ ID NO: 1183072
uaagauacagcacauugga

SEQ ID NO: 1183074 - RNA, 19 nt, Artificial Sequence
  Description of Artificial Sequence: Synthetic oligonucleotide
  Sense strand starting at position 733 of SEQ ID NO: 916776
cucuucuuccugggagcau

SEQ ID NO: 1183075 - RNA, 19 nt, Artificial Sequence
  Description of Artificial Sequence: Synthetic oligonucleotide
  Antisense strand to SEQ ID NO: 1183074
augcucccaggaagaagag

SEQ ID NO: 1183076 - RNA, 19 nt, Artificial Sequence
  Description of Artificial Sequence: Synthetic oligonucleotide
  Sense strand starting at position 1310 of SEQ ID NO: 916776
uugagaaauuaucugguug

SEQ ID NO: 1183077 - RNA, 19 nt, Artificial Sequence
  Description of Artificial Sequence: Synthetic oligonucleotide
  Antisense strand to SEQ ID NO: 1183076
caaccagauaauuucucaa

SEQ ID NO: 1183078 - RNA, 19 nt, Artificial Sequence
  Description of Artificial Sequence: Synthetic oligonucleotide
  Sense strand starting at position 1314 of SEQ ID NO: 916776
gaaauuaucugguuggcag

SEQ ID NO: 1183079 - RNA, 19 nt, Artificial Sequence
  Description of Artificial Sequence: Synthetic oligonucleotide
  Antisense strand to SEQ ID NO: 1183078
cugccaaccagauaauuuc

SEQ ID NO: 1183080 - RNA, 19 nt, Artificial Sequence
  Description of Artificial Sequence: Synthetic oligonucleotide
  Sense strand starting at position 1315 of SEQ ID NO: 916776
aaauuaucugguuggcaga

SEQ ID NO: 1183081 - RNA, 19 nt, Artificial Sequence
  Description of Artificial Sequence: Synthetic oligonucleotide
  Antisense strand to SEQ ID NO: 1183080
ucugccaaccagauaauuu

SEQ ID NO: 1183082 - RNA, 19 nt, Artificial Sequence
  Description of Artificial Sequence: Synthetic oligonucleotide
  Sense strand starting at position 1316 of SEQ ID NO: 916776
aauuaucugguuggcagau

SEQ ID NO: 1183083 - RNA, 19 nt, Artificial Sequence
  Description of Artificial Sequence: Synthetic oligonucleotide
  Antisense strand to SEQ ID NO: 1183082
aucugccaaccagauaauu

SEQ ID NO: 1183084 - RNA, 19 nt, Artificial Sequence
  Description of Artificial Sequence: Synthetic oligonucleotide
  Sense strand starting at position 1317 of SEQ ID NO: 916776
auuaucugguuggcagaua

SEQ ID NO: 1183085 - RNA, 19 nt, Artificial Sequence
  Description of Artificial Sequence: Synthetic oligonucleotide
  Antisense strand to SEQ ID NO: 1183084
uaucugccaaccagauaau

SEQ ID NO: 1183086 - RNA, 19 nt, Artificial Sequence
  Description of Artificial Sequence: Synthetic oligonucleotide
  Sense strand starting at position 1329 of SEQ ID NO: 916776
gcagauaauuggccaacca

SEQ ID NO: 1183087 - RNA, 19 nt, Artificial Sequence
  Description of Artificial Sequence: Synthetic oligonucleotide
  Antisense strand to SEQ ID NO: 1183086
ugguuggccaauuaucugc

SEQ ID NO: 1183088 - RNA, 19 nt, Artificial Sequence
  Description of Artificial Sequence: Synthetic oligonucleotide
  Sense strand starting at position 1373 of SEQ ID NO: 916776
gugggcagacccuguauuu

SEQ ID NO: 1183089 - RNA, 19 nt, Artificial Sequence
  Description of Artificial Sequence: Synthetic oligonucleotide
  Antisense strand to SEQ ID NO: 1183088
aaauacagggucugcccac

SEQ ID NO: 1183090 - RNA, 19 nt, Artificial Sequence
  Description of Artificial Sequence: Synthetic oligonucleotide
  Sense strand starting at position 1384 of SEQ ID NO: 916776
cuguauuuguggcuaacuu

SEQ ID NO: 1183091 - RNA, 19 nt, Artificial Sequence
  Description of Artificial Sequence: Synthetic oligonucleotide
  Antisense strand to SEQ ID NO: 1183090
aaguuagccacaaauacag

SEQ ID NO: 1183092 - RNA, 19 nt, Artificial Sequence
  Description of Artificial Sequence: Synthetic oligonucleotide
  Sense strand starting at position 1419 of SEQ ID NO: 916776
gccagauccuguguacaga

SEQ ID NO: 1183093 - RNA, 19 nt, Artificial Sequence
  Description of Artificial Sequence: Synthetic oligonucleotide
  Antisense strand to SEQ ID NO: 1183092
ucuguacacaggaucuggc

SEQ ID NO: 1183094 - RNA, 19 nt, Artificial Sequence
  Description of Artificial Sequence: Synthetic oligonucleotide
  Sense strand starting at position 1598 of SEQ ID NO: 916776
ugggucuuguguuuggaau

SEQ ID NO: 1183095 - RNA, 19 nt, Artificial Sequence
  Description of Artificial Sequence: Synthetic oligonucleotide
  Antisense strand to SEQ ID NO: 1183094
auuccaaacacaagaccca

SEQ ID NO: 1183096 - RNA, 19 nt, Artificial Sequence
  Description of Artificial Sequence: Synthetic oligonucleotide
  Sense strand starting at position 1599 of SEQ ID NO: 916776
gggucuuguguuuggaaug

SEQ ID NO: 1183097 - RNA, 19 nt, Artificial Sequence
  Description of Artificial Sequence: Synthetic oligonucleotide
  Antisense strand to SEQ ID NO: 1183096
cauuccaaacacaagaccc

SEQ ID NO: 1183098 - RNA, 19 nt, Artificial Sequence
  Description of Artificial Sequence: Synthetic oligonucleotide
  Sense strand starting at position 1605 of SEQ ID NO: 916776
uguguuuggaaugauguau

SEQ ID NO: 1183099 - RNA, 19 nt, Artificial Sequence
  Description of Artificial Sequence: Synthetic oligonucleotide
  Antisense strand to SEQ ID NO: 1183098
auacaucauuccaaacaca

SEQ ID NO: 1183100 - RNA, 19 nt, Artificial Sequence
  Description of Artificial Sequence: Synthetic oligonucleotide
  Sense strand starting at position 1631 of SEQ ID NO: 916776
agagguuugcugugugaua

SEQ ID NO: 1183101 - RNA, 19 nt, Artificial Sequence
  Description of Artificial Sequence: Synthetic oligonucleotide
  Antisense strand to SEQ ID NO: 1183100
uaucacacagcaaaccucu

SEQ ID NO: 1183102 - RNA, 19 nt, Artificial Sequence
  Description of Artificial Sequence: Synthetic oligonucleotide
  Sense strand starting at position 1642 of SEQ ID NO: 916776
gugugauacugagcaucuc

SEQ ID NO: 1183103 - RNA, 19 nt, Artificial Sequence
  Description of Artificial Sequence: Synthetic oligonucleotide
  Antisense strand to SEQ ID NO: 1183102
gagaugcucaguaucacac

SEQ ID NO: 1183104 - RNA, 19 nt, Artificial Sequence
  Description of Artificial Sequence: Synthetic oligonucleotide
  Sense strand starting at position 1723 of SEQ ID NO: 916776
cagaguuguggaggaucaa

SEQ ID NO: 1183105 - RNA, 19 nt, Artificial Sequence
  Description of Artificial Sequence: Synthetic oligonucleotide
  Antisense strand to SEQ ID NO: 1183104
uugauccuccacaacucug

SEQ ID NO: 1183106 - RNA, 19 nt, Artificial Sequence
  Description of Artificial Sequence: Synthetic oligonucleotide
  Sense strand starting at position 1783 of SEQ ID NO: 916776
uugaguuggcaauacaugu

SEQ ID NO: 1183107 - RNA, 19 nt, Artificial Sequence
  Description of Artificial Sequence: Synthetic oligonucleotide
  Antisense strand to SEQ ID NO: 1183106
acauguauugccaacucaa

SEQ ID NO: 1183108 - RNA, 19 nt, Artificial Sequence
  Description of Artificial Sequence: Synthetic oligonucleotide
  Sense strand starting at position 1799 of SEQ ID NO: 916776
uguaauaucuggcuagucu

SEQ ID NO: 1183109 - RNA, 19 nt, Artificial Sequence
  Description of Artificial Sequence: Synthetic oligonucleotide
  Antisense strand to SEQ ID NO: 1183108
agacuagccagauauuaca

SEQ ID NO: 1183110 - RNA, 19 nt, Artificial Sequence
  Description of Artificial Sequence: Synthetic oligonucleotide
  Sense strand starting at position 1800 of SEQ ID NO: 916776
guaauaucuggcuagucuu

SEQ ID NO: 1183111 - RNA, 19 nt, Artificial Sequence
  Description of Artificial Sequence: Synthetic oligonucleotide
  Antisense strand to SEQ ID NO: 1183110
aagacuagccagauauuac

SEQ ID NO: 1183112 - RNA, 19 nt, Artificial Sequence
  Description of Artificial Sequence: Synthetic oligonucleotide
  Sense strand starting at position 2095 of SEQ ID NO: 916776
gccagauuugccuaggcuc

SEQ ID NO: 1183113 - RNA, 19 nt, Artificial Sequence
  Description of Artificial Sequence: Synthetic oligonucleotide
  Antisense strand to SEQ ID NO: 1183112
gagccuaggcaaaucuggc

SEQ ID NO: 1183114 - RNA, 19 nt, Artificial Sequence
  Description of Artificial Sequence: Synthetic oligonucleotide
  Sense strand starting at position 2142 of SEQ ID NO: 916776
cuggguuccugaccaucua

SEQ ID NO: 1183115 - RNA, 19 nt, Artificial Sequence
  Description of Artificial Sequence: Synthetic oligonucleotide
  Antisense strand to SEQ ID NO: 1183114
uagauggucaggaacccag

SEQ ID NO: 1183116 - RNA, 19 nt, Artificial Sequence
  Description of Artificial Sequence: Synthetic oligonucleotide
  Sense strand starting at position 2143 of SEQ ID NO: 916776
uggguuccugaccaucuau

SEQ ID NO: 1183117 - RNA, 19 nt, Artificial Sequence
  Description of Artificial Sequence: Synthetic oligonucleotide
  Antisense strand to SEQ ID NO: 1183116
auagauggucaggaaccca

SEQ ID NO: 1183118 - RNA, 19 nt, Artificial Sequence
  Description of Artificial Sequence: Synthetic oligonucleotide
  Sense strand starting at position 2160 of SEQ ID NO: 916776
augucauggucuccaagga

SEQ ID NO: 1183119 - RNA, 19 nt, Artificial Sequence
  Description of Artificial Sequence: Synthetic oligonucleotide
  Antisense strand to SEQ ID NO: 1183118
uccuuggagaccaugacau

SEQ ID NO: 1183120 - RNA, 19 nt, Artificial Sequence
  Description of Artificial Sequence: Synthetic oligonucleotide
  Sense strand starting at position 2224 of SEQ ID NO: 916776
gguuacuggaccugucauu

SEQ ID NO: 1183121 - RNA, 19 nt, Artificial Sequence
  Description of Artificial Sequence: Synthetic oligonucleotide
  Antisense strand to SEQ ID NO: 1183120
aaugacagguccaguaacc

SEQ ID NO: 1183122 - RNA, 19 nt, Artificial Sequence
  Description of Artificial Sequence: Synthetic oligonucleotide
  Sense strand starting at position 2301 of SEQ ID NO: 916776
ucaugacacugcuuagagu

SEQ ID NO: 1183123 - RNA, 19 nt, Artificial Sequence
  Description of Artificial Sequence: Synthetic oligonucleotide
  Antisense strand to SEQ ID NO: 1183122
acucuaagcagugucauga

SEQ ID NO: 1183124 - RNA, 19 nt, Artificial Sequence
  Description of Artificial Sequence: Synthetic oligonucleotide
  Sense strand starting at position 2302 of SEQ ID NO: 916776
caugacacugcuuagaguu

SEQ ID NO: 1183125 - RNA, 19 nt, Artificial Sequence
  Description of Artificial Sequence: Synthetic oligonucleotide
  Antisense strand to SEQ ID NO: 1183124
aacucuaagcagugucaug

SEQ ID NO: 1183126 - RNA, 19 nt, Artificial Sequence
  Description of Artificial Sequence: Synthetic oligonucleotide
  Sense strand starting at position 2314 of SEQ ID NO: 916776
uagaguuagccugggagag

SEQ ID NO: 1183127 - RNA, 19 nt, Artificial Sequence
  Description of Artificial Sequence: Synthetic oligonucleotide
  Antisense strand to SEQ ID NO: 1183126
cucucccaggcuaacucua

SEQ ID NO: 1183128 - RNA, 19 nt, Artificial Sequence
  Description of Artificial Sequence: Synthetic oligonucleotide
  Sense strand starting at position 2392 of SEQ ID NO: 916776
uguuucucuucuguaggaa

SEQ ID NO: 1183129 - RNA, 19 nt, Artificial Sequence
  Description of Artificial Sequence: Synthetic oligonucleotide
  Antisense strand to SEQ ID NO: 1183128
uuccuacagaagagaaaca

SEQ ID NO: 1183130 - RNA, 19 nt, Artificial Sequence
  Description of Artificial Sequence: Synthetic oligonucleotide
  Sense strand starting at position 2395 of SEQ ID NO: 916776
uucucuucuguaggaaaca

SEQ ID NO: 1183131 - RNA, 19 nt, Artificial Sequence
  Description of Artificial Sequence: Synthetic oligonucleotide
  Antisense strand to SEQ ID NO: 1183130
uguuuccuacagaagagaa

SEQ ID NO: 1183132 - RNA, 19 nt, Artificial Sequence
  Description of Artificial Sequence: Synthetic oligonucleotide
  Sense strand starting at position 2576 of SEQ ID NO: 916776
guaccugucccucagggaa

SEQ ID NO: 1183133 - RNA, 19 nt, Artificial Sequence
  Description of Artificial Sequence: Synthetic oligonucleotide
  Antisense strand to SEQ ID NO: 1183132
uucccugagggacagguac

SEQ ID NO: 1183134 - RNA, 19 nt, Artificial Sequence
  Description of Artificial Sequence: Synthetic oligonucleotide
  Sense strand starting at position 2634 of SEQ ID NO: 916776
gcuaguagcucucugaaac

SEQ ID NO: 1183135 - RNA, 19 nt, Artificial Sequence
  Description of Artificial Sequence: Synthetic oligonucleotide
  Antisense strand to SEQ ID NO: 1183134
guuucagagagcuacuagc

SEQ ID NO: 1183136 - RNA, 19 nt, Artificial Sequence
  Description of Artificial Sequence: Synthetic oligonucleotide
  Sense strand starting at position 2635 of SEQ ID NO: 916776
cuaguagcucucugaaaca

SEQ ID NO: 1183137 - RNA, 19 nt, Artificial Sequence
  Description of Artificial Sequence: Synthetic oligonucleotide
  Antisense strand to SEQ ID NO: 1183136
uguuucagagagcuacuag

SEQ ID NO: 1183138 - RNA, 19 nt, Artificial Sequence
  Description of Artificial Sequence: Synthetic oligonucleotide
  Sense strand starting at position 3321 of SEQ ID NO: 916776
ggguggucuccgggacuaa

SEQ ID NO: 1183139 - RNA, 19 nt, Artificial Sequence
  Description of Artificial Sequence: Synthetic oligonucleotide
  Antisense strand to SEQ ID NO: 1183138
uuagucccggagaccaccc

SEQ ID NO: 1183140 - RNA, 19 nt, Artificial Sequence
  Description of Artificial Sequence: Synthetic oligonucleotide
  Sense strand starting at position 3322 of SEQ ID NO: 916776
gguggucuccgggacuaau

SEQ ID NO: 1183141 - RNA, 19 nt, Artificial Sequence
  Description of Artificial Sequence: Synthetic oligonucleotide
  Antisense strand to SEQ ID NO: 1183140
auuagucccggagaccacc

SEQ ID NO: 1183142 - RNA, 19 nt, Artificial Sequence
  Description of Artificial Sequence: Synthetic oligonucleotide
  Sense strand starting at position 3325 of SEQ ID NO: 916776
ggucuccgggacuaauauu

SEQ ID NO: 1183143 - RNA, 19 nt, Artificial Sequence
  Description of Artificial Sequence: Synthetic oligonucleotide
  Antisense strand to SEQ ID NO: 1183142
aauauuagucccggagacc

SEQ ID NO: 1183144 - RNA, 19 nt, Artificial Sequence
  Description of Artificial Sequence: Synthetic oligonucleotide
  Sense strand starting at position 3566 of SEQ ID NO: 916776
gggugauaucccugaggaa

SEQ ID NO: 1183145 - RNA, 19 nt, Artificial Sequence
  Description of Artificial Sequence: Synthetic oligonucleotide
  Antisense strand to SEQ ID NO: 1183144
uuccucagggauaucaccc

SEQ ID NO: 1183146 - RNA, 19 nt, Artificial Sequence
  Description of Artificial Sequence: Synthetic oligonucleotide
  Sense strand starting at position 3660 of SEQ ID NO: 916776
agccuagggaucuaugcaa

SEQ ID NO: 1183147 - RNA, 19 nt, Artificial Sequence
  Description of Artificial Sequence: Synthetic oligonucleotide
  Antisense strand to SEQ ID NO: 1183146
uugcauagaucccuaggcu

SEQ ID NO: 1183148 - RNA, 19 nt, Artificial Sequence
  Description of Artificial Sequence: Synthetic oligonucleotide
  Sense strand starting at position 15 of SEQ ID NO: 916777
aguaaucugucauuccuaa

SEQ ID NO: 1183149 - RNA, 19 nt, Artificial Sequence
  Description of Artificial Sequence: Synthetic oligonucleotide
  Antisense strand to SEQ ID NO: 1183148
uuaggaaugacagauuacu

SEQ ID NO: 1183150 - RNA, 19 nt, Artificial Sequence
  Description of Artificial Sequence: Synthetic oligonucleotide
  Sense strand starting at position 162 of SEQ ID NO: 916777
acgacuaacucucuagauu

SEQ ID NO: 1183151 - RNA, 19 nt, Artificial Sequence
  Description of Artificial Sequence: Synthetic oligonucleotide
  Antisense strand to SEQ ID NO: 1183150
aaucuagagaguuagucgu
